United States Patent Application Publication US 2007/0111227 A1 - sequence listing, part 4

SEQ ID NO: 118519 - DNA, 17 bp, Arabidopsis thaliana
gtaaaacgcaagatcac

SEQ ID NO: 118520 - DNA, 17 bp, Arabidopsis thaliana
gtaaaacggggggggca

SEQ ID NO: 118521 - DNA, 17 bp, Arabidopsis thaliana
gtaaaacttaagaattc

SEQ ID NO: 118522 - DNA, 17 bp, Arabidopsis thaliana
gtaaaacttccagacct

SEQ ID NO: 118523 - DNA, 17 bp, Arabidopsis thaliana
gtaaaacttgtgttctc

SEQ ID NO: 118524 - DNA, 17 bp, Arabidopsis thaliana
gtaaaagcggtatgtgg

SEQ ID NO: 118525 - DNA, 17 bp, Arabidopsis thaliana
gtaaaagcgttgaccag

SEQ ID NO: 118526 - DNA, 17 bp, Arabidopsis thaliana
gtaaaagctcgtttgat

SEQ ID NO: 118527 - DNA, 17 bp, Arabidopsis thaliana
gtaaaaggcgaagcatt

SEQ ID NO: 118528 - DNA, 17 bp, Arabidopsis thaliana
gtaaaaggtcgacgcgg

SEQ ID NO: 118529 - DNA, 17 bp, Arabidopsis thaliana
gtaaaagtggttcatgg

SEQ ID NO: 118530 - DNA, 17 bp, Arabidopsis thaliana
gtaaaagtgtttgccaa

SEQ ID NO: 118531 - DNA, 17 bp, Arabidopsis thaliana
gtaaaatccaactgccg

SEQ ID NO: 118532 - DNA, 17 bp, Arabidopsis thaliana
gtaaaatcgcacgttgc

SEQ ID NO: 118533 - DNA, 17 bp, Arabidopsis thaliana
gtaaaatcttactagca

SEQ ID NO: 118534 - DNA, 17 bp, Arabidopsis thaliana
gtaaaattcatccgctt

SEQ ID NO: 118535 - DNA, 17 bp, Arabidopsis thaliana
gtaaaatttcgcaggtg

SEQ ID NO: 118536 - DNA, 17 bp, Arabidopsis thaliana
gtaaacaacattccgca

SEQ ID NO: 118537 - DNA, 17 bp, Arabidopsis thaliana
gtaaacaacattcctca

SEQ ID NO: 118538 - DNA, 17 bp, Arabidopsis thaliana
gtaaacaacttttcatg

SEQ ID NO: 118539 - DNA, 17 bp, Arabidopsis thaliana
gtaaacagagttaacgt

SEQ ID NO: 118540 - DNA, 17 bp, Arabidopsis thaliana
gtaaacaggattccatc

SEQ ID NO: 118541 - DNA, 17 bp, Arabidopsis thaliana
gtaaacatctgatcgac

SEQ ID NO: 118542 - DNA, 17 bp, Arabidopsis thaliana
gtaaacatctgatcgtt

SEQ ID NO: 118543 - DNA, 17 bp, Arabidopsis thaliana
gtaaaccagcaggtgcg

SEQ ID NO: 118544 - DNA, 17 bp, Arabidopsis thaliana
gtaaaccagcgggtgcg

SEQ ID NO: 118545 - DNA, 17 bp, Arabidopsis thaliana
gtaaaccagcgggtgtg

SEQ ID NO: 118546 - DNA, 17 bp, Arabidopsis thaliana
gtaaaccagtgattttc

SEQ ID NO: 118547 - DNA, 17 bp, Arabidopsis thaliana
gtaaacccaagttgctc

SEQ ID NO: 118548 - DNA, 17 bp, Arabidopsis thaliana
gtaaacccgagattttc

SEQ ID NO: 118549 - DNA, 17 bp, Arabidopsis thaliana
gtaaacccgagattttt

SEQ ID NO: 118550 - DNA, 17 bp, Arabidopsis thaliana
gtaaacccgtaaggcgc

SEQ ID NO: 118551 - DNA, 17 bp, Arabidopsis thaliana
gtaaacccgtgattttc

SEQ ID NO: 118552 - DNA, 17 bp, Arabidopsis thaliana
gtaaacccgtgattttt

SEQ ID NO: 118553 - DNA, 17 bp, Arabidopsis thaliana
gtaaacccgtggatatc

SEQ ID NO: 118554 - DNA, 17 bp, Arabidopsis thaliana
gtaaaccctcggctggc

SEQ ID NO: 118555 - DNA, 17 bp, Arabidopsis thaliana
gtaaacctgtgattttc

SEQ ID NO: 118556 - DNA, 17 bp, Arabidopsis thaliana
gtaaacgacctgtgtcc

SEQ ID NO: 118557 - DNA, 17 bp, Arabidopsis thaliana
gtaaacgacttgtgtcc

SEQ ID NO: 118558 - DNA, 17 bp, Arabidopsis thaliana
gtaaacgaggactctgg

SEQ ID NO: 118559 - DNA, 17 bp, Arabidopsis thaliana
gtaaacgatctccgccg

SEQ ID NO: 118560 - DNA, 17 bp, Arabidopsis thaliana
gtaaacgccaatcaaag

SEQ ID NO: 118561 - DNA, 17 bp, Arabidopsis thaliana
gtaaacgccaatttatc

SEQ ID NO: 118562 - DNA, 17 bp, Arabidopsis thaliana
gtaaacgcgattttgag

SEQ ID NO: 118563 - DNA, 17 bp, Arabidopsis thaliana
gtaaacgcggatttgtg

SEQ ID NO: 118564 - DNA, 17 bp, Arabidopsis thaliana
gtaaacggcgggagtat

SEQ ID NO: 118565 - DNA, 17 bp, Arabidopsis thaliana
gtaaactactttgtccg

SEQ ID NO: 118566 - DNA, 17 bp, Arabidopsis thaliana
gtaaactctactgcggt

SEQ ID NO: 118567 - DNA, 17 bp, Arabidopsis thaliana
gtaaactgaggcacagg

SEQ ID NO: 118568 - DNA, 17 bp, Arabidopsis thaliana
gtaaactgcgagatgtg

SEQ ID NO: 118569 - DNA, 17 bp, Arabidopsis thaliana
gtaaactgttaaatcgc

SEQ ID NO: 118570 - DNA, 17 bp, Arabidopsis thaliana
gtaaacttttcccgaag

SEQ ID NO: 118571 - DNA, 17 bp, Arabidopsis thaliana
gtaaagaaatcacttgg

SEQ ID NO: 118572 - DNA, 17 bp, Arabidopsis thaliana
gtaaagaatctgtgcag

SEQ ID NO: 118573 - DNA, 17 bp, Arabidopsis thaliana
gtaaagaccagctgcta

SEQ ID NO: 118574 - DNA, 17 bp, Arabidopsis thaliana
gtaaagacccaagtgac

SEQ ID NO: 118575 - DNA, 17 bp, Arabidopsis thaliana
gtaaagaccctaggcga

SEQ ID NO: 118576 - DNA, 17 bp, Arabidopsis thaliana
gtaaagacctttggcga

SEQ ID NO: 118577 - DNA, 17 bp, Arabidopsis thaliana
gtaaagatctcggtcgg

SEQ ID NO: 118578 - DNA, 17 bp, Arabidopsis thaliana
gtaaagcatctgtaggt

SEQ ID NO: 118579 - DNA, 17 bp, Arabidopsis thaliana
gtaaagcccatgcgtct

SEQ ID NO: 118580 - DNA, 17 bp, Arabidopsis thaliana
gtaaagcgtctgtaggt

SEQ ID NO: 118581 - DNA, 17 bp, Arabidopsis thaliana
gtaaagcgttccaacac

SEQ ID NO: 118582 - DNA, 17 bp, Arabidopsis thaliana
gtaaagcgtttgtaggt

SEQ ID NO: 118583 - DNA, 17 bp, Arabidopsis thaliana
gtaaagctgttagaatg

SEQ ID NO: 118584 - DNA, 17 bp, Arabidopsis thaliana
gtaaaggaaggccaagc

SEQ ID NO: 118585 - DNA, 17 bp, Arabidopsis thaliana
gtaaaggacccaaactt

SEQ ID NO: 118586 - DNA, 17 bp, Arabidopsis thaliana
gtaaaggactcgactac

SEQ ID NO: 118587 - DNA, 17 bp, Arabidopsis thaliana
gtaaaggactgcttggg

SEQ ID NO: 118588 - DNA, 17 bp, Arabidopsis thaliana
gtaaaggatctccaggc

SEQ ID NO: 118589 - DNA, 17 bp, Arabidopsis thaliana
gtaaaggattatggcct

SEQ ID NO: 118590 - DNA, 17 bp, Arabidopsis thaliana
gtaaaggcatgttgctc

SEQ ID NO: 118591 - DNA, 17 bp, Arabidopsis thaliana
gtaaagggtttgacatt

SEQ ID NO: 118592 - DNA, 17 bp, Arabidopsis thaliana
gtaaaggtgtcaaacgg

SEQ ID NO: 118593 - DNA, 17 bp, Arabidopsis thaliana
gtaaagtaaaagtttga

SEQ ID NO: 118594 - DNA, 17 bp, Arabidopsis thaliana
gtaaagtaaggcgctta

SEQ ID NO: 118595 - DNA, 17 bp, Arabidopsis thaliana
gtaaagtagggcgctta

SEQ ID NO: 118596 - DNA, 17 bp, Arabidopsis thaliana
gtaaagtcagttgttat

SEQ ID NO: 118597 - DNA, 17 bp, Arabidopsis thaliana
gtaaagtcgtagagagg

SEQ ID NO: 118598 - DNA, 17 bp, Arabidopsis thaliana
gtaaagtcgtcgtgagg

SEQ ID NO: 118599 - DNA, 17 bp, Arabidopsis thaliana
gtaaagtgactacatcg

SEQ ID NO: 118600 - DNA, 17 bp, Arabidopsis thaliana
gtaaagtgatgtaactc

SEQ ID NO: 118601 - DNA, 17 bp, Arabidopsis thaliana
gtaaagtgtgtgtgtgc

SEQ ID NO: 118602 - DNA, 17 bp, Arabidopsis thaliana
gtaaagttgtaacggct

SEQ ID NO: 118603 - DNA, 17 bp, Arabidopsis thaliana
gtaaagttttgttgatc

SEQ ID NO: 118604 - DNA, 17 bp, Arabidopsis thaliana
gtaaataaattccaact

SEQ ID NO: 118605 - DNA, 17 bp, Arabidopsis thaliana
gtaaataacgtcctgcc

SEQ ID NO: 118606 - DNA, 17 bp, Arabidopsis thaliana
gtaaataagtccaagtc

SEQ ID NO: 118607 - DNA, 17 bp, Arabidopsis thaliana
gtaaataagttcaaact

SEQ ID NO: 118608 - DNA, 17 bp, Arabidopsis thaliana
gtaaataagttccaact

SEQ ID NO: 118609 - DNA, 17 bp, Arabidopsis thaliana
gtaaataccgcttttgt

SEQ ID NO: 118610 - DNA, 17 bp, Arabidopsis thaliana
gtaaatattcggcccag

SEQ ID NO: 118611 - DNA, 17 bp, Arabidopsis thaliana
gtaaatcagcgagtgcg

SEQ ID NO: 118612 - DNA, 17 bp, Arabidopsis thaliana
gtaaatcattctttgac

SEQ ID NO: 118613 - DNA, 17 bp, Arabidopsis thaliana
gtaaatccaattcccga

SEQ ID NO: 118614 - DNA, 17 bp, Arabidopsis thaliana
gtaaatcccggcgggac

SEQ ID NO: 118615 - DNA, 17 bp, Arabidopsis thaliana
gtaaatccgtaactttg

SEQ ID NO: 118616 - DNA, 17 bp, Arabidopsis thaliana
gtaaatccgtgattttc

SEQ ID NO: 118617 - DNA, 17 bp, Arabidopsis thaliana
gtaaatccgtgattttt

SEQ ID NO: 118618 - DNA, 17 bp, Arabidopsis thaliana
gtaaatcggagacacaa

SEQ ID NO: 118619 - DNA, 17 bp, Arabidopsis thaliana
gtaaatctagaaaataa

SEQ ID NO: 118620 - DNA, 17 bp, Arabidopsis thaliana
gtaaatctatacatgtc

SEQ ID NO: 118621 - DNA, 17 bp, Arabidopsis thaliana
gtaaatctcccagatgg

SEQ ID NO: 118622 - DNA, 17 bp, Arabidopsis thaliana
gtaaatggagcacagac

SEQ ID NO: 118623 - DNA, 17 bp, Arabidopsis thaliana
gtaaattcatcccactg

SEQ ID NO: 118624 - DNA, 17 bp, Arabidopsis thaliana
gtaaattccgtccaagg

SEQ ID NO: 118625 - DNA, 17 bp, Arabidopsis thaliana
gtaaattctccgtgaca

SEQ ID NO: 118626 - DNA, 17 bp, Arabidopsis thaliana
gtaaattctctgttact

SEQ ID NO: 118627 - DNA, 17 bp, Arabidopsis thaliana
gtaaattctttacttcc

SEQ ID NO: 118628 - DNA, 17 bp, Arabidopsis thaliana
gtaaatttgcaacactg

SEQ ID NO: 118629 - DNA, 17 bp, Arabidopsis thaliana
gtaacaaaaccacagtt

SEQ ID NO: 118630 - DNA, 17 bp, Arabidopsis thaliana
gtaacaaaccgacatcg

SEQ ID NO: 118631 - DNA, 17 bp, Arabidopsis thaliana
gtaacaacgggtctgtt

SEQ ID NO: 118632 - DNA, 17 bp, Arabidopsis thaliana
gtaacaactatcctctt

SEQ ID NO: 118633 - DNA, 17 bp, Arabidopsis thaliana
gtaacaaggacgtggtt

SEQ ID NO: 118634 - DNA, 17 bp, Arabidopsis thaliana
gtaacaaggtttccgta

SEQ ID NO: 118635 - DNA, 17 bp, Arabidopsis thaliana
gtaacaataacggtcct

SEQ ID NO: 118636 - DNA, 17 bp, Arabidopsis thaliana
gtaacaatcaatcttct

SEQ ID NO: 118637 - DNA, 17 bp, Arabidopsis thaliana
gtaacaatggctatgat

SEQ ID NO: 118638 - DNA, 17 bp, Arabidopsis thaliana
gtaacacagccggcgtg

SEQ ID NO: 118639 - DNA, 17 bp, Arabidopsis thaliana
gtaacaccccgatttca

SEQ ID NO: 118640 - DNA, 17 bp, Arabidopsis thaliana
gtaacacggaccaagga

SEQ ID NO: 118641 - DNA, 17 bp, Arabidopsis thaliana
gtaacactttggtgcgt

SEQ ID NO: 118642 - DNA, 17 bp, Arabidopsis thaliana
gtaacagccacgcttgg

SEQ ID NO: 118643 - DNA, 17 bp, Arabidopsis thaliana
gtaacagcgccggaggc

SEQ ID NO: 118644 - DNA, 17 bp, Arabidopsis thaliana
gtaacagctttacttct

SEQ ID NO: 118645 - DNA, 17 bp, Arabidopsis thaliana
gtaacaggacaaggcaa

SEQ ID NO: 118646 - DNA, 17 bp, Arabidopsis thaliana
gtaacaggcctcggtat

SEQ ID NO: 118647 - DNA, 17 bp, Arabidopsis thaliana
gtaacagtggactttcc

SEQ ID NO: 118648 - DNA, 17 bp, Arabidopsis thaliana
gtaacatcatttgcggg

SEQ ID NO: 118649 - DNA, 17 bp, Arabidopsis thaliana
gtaacatcctgccaaac

SEQ ID NO: 118650 - DNA, 17 bp, Arabidopsis thaliana
gtaacatgacgcagttt

SEQ ID NO: 118651 - DNA, 17 bp, Arabidopsis thaliana
gtaacatttcggtgcgt

SEQ ID NO: 118652 - DNA, 17 bp, Arabidopsis thaliana
gtaacatttggtccgtc

SEQ ID NO: 118653 - DNA, 17 bp, Arabidopsis thaliana
gtaaccagctgttccaa

SEQ ID NO: 118654 - DNA, 17 bp, Arabidopsis thaliana
gtaaccaggaatgtcac

SEQ ID NO: 118655 - DNA, 17 bp, Arabidopsis thaliana
gtaaccaggtttccgta

SEQ ID NO: 118656 - DNA, 17 bp, Arabidopsis thaliana
gtaacccgatcttgtaa

SEQ ID NO: 118657 - DNA, 17 bp, Arabidopsis thaliana
gtaacccgcttgaacca

SEQ ID NO: 118658 - DNA, 17 bp, Arabidopsis thaliana
gtaacccggactaacca

SEQ ID NO: 118659 - DNA, 17 bp, Arabidopsis thaliana
gtaacccggagtttcta

SEQ ID NO: 118660 - DNA, 17 bp, Arabidopsis thaliana
gtaacccgttcgggttc

SEQ ID NO: 118661 - DNA, 17 bp, Arabidopsis thaliana
gtaaccctcacatgctc

SEQ ID NO: 118662 - DNA, 17 bp, Arabidopsis thaliana
gtaaccgcctcgagggc

SEQ ID NO: 118663 - DNA, 17 bp, Arabidopsis thaliana
gtaaccgtattccggac

SEQ ID NO: 118664 - DNA, 17 bp, Arabidopsis thaliana
gtaaccgtatttcggac

SEQ ID NO: 118665 - DNA, 17 bp, Arabidopsis thaliana
gtaacctcgctaatatg

SEQ ID NO: 118666 - DNA, 17 bp, Arabidopsis thaliana
gtaacctctcgtggatc

SEQ ID NO: 118667 - DNA, 17 bp, Arabidopsis thaliana
gtaacctggctctgata

SEQ ID NO: 118668 - DNA, 17 bp, Arabidopsis thaliana
gtaacctgggtaaaggc

SEQ ID NO: 118669 - DNA, 17 bp, Arabidopsis thaliana
gtaaccttttcctttcg

SEQ ID NO: 118670 - DNA, 17 bp, Arabidopsis thaliana
gtaacgaccgtaagttt

SEQ ID NO: 118671 - DNA, 17 bp, Arabidopsis thaliana
gtaacgacttgggcgct

SEQ ID NO: 118672 - DNA, 17 bp, Arabidopsis thaliana
gtaacgataacggtcct

SEQ ID NO: 118673 - DNA, 17 bp, Arabidopsis thaliana
gtaacgatctaggtcct

SEQ ID NO: 118674 - DNA, 17 bp, Arabidopsis thaliana
gtaacgatctgggcact

SEQ ID NO: 118675 - DNA, 17 bp, Arabidopsis thaliana
gtaacgccccgaccgcc

SEQ ID NO: 118676 - DNA, 17 bp, Arabidopsis thaliana
gtaacgccccggccatc

SEQ ID NO: 118677 - DNA, 17 bp, Arabidopsis thaliana
gtaacgccggagttagt

SEQ ID NO: 118678 - DNA, 17 bp, Arabidopsis thaliana
gtaacgcgacctctaag

SEQ ID NO: 118679 - DNA, 17 bp, Arabidopsis thaliana
gtaacgcgacttagtgg

SEQ ID NO: 118680 - DNA, 17 bp, Arabidopsis thaliana
gtaacgcggattacggt

SEQ ID NO: 118681 - DNA, 17 bp, Arabidopsis thaliana
gtaacgcgtaagaacct

SEQ ID NO: 118682 - DNA, 17 bp, Arabidopsis thaliana
gtaacgctaggttgact

SEQ ID NO: 118683 - DNA, 17 bp, Arabidopsis thaliana
gtaacgctataccacga

SEQ ID NO: 118684 - DNA, 17 bp, Arabidopsis thaliana
gtaacgctatgccacga

SEQ ID NO: 118685 - DNA, 17 bp, Arabidopsis thaliana
gtaacgctcttaaggat

SEQ ID NO: 118686 - DNA, 17 bp, Arabidopsis thaliana
gtaacgctcttggtcca

SEQ ID NO: 118687 - DNA, 17 bp, Arabidopsis thaliana
gtaacgcttagtaccgc

SEQ ID NO: 118688 - DNA, 17 bp, Arabidopsis thaliana
gtaacggaaagtgagct

SEQ ID NO: 118689 - DNA, 17 bp, Arabidopsis thaliana
gtaacggaggcgtgcaa

SEQ ID NO: 118690 - DNA, 17 bp, Arabidopsis thaliana
gtaacggatgttctgga

SEQ ID NO: 118691 - DNA, 17 bp, Arabidopsis thaliana
gtaacggatgttctgta

SEQ ID NO: 118692 - DNA, 17 bp, Arabidopsis thaliana
gtaacggcctttggttc

SEQ ID NO: 118693 - DNA, 17 bp, Arabidopsis thaliana
gtaacggcgagcgaacc

SEQ ID NO: 118694 - DNA, 17 bp, Arabidopsis thaliana
gtaacggttgttagcga

SEQ ID NO: 118695 - DNA, 17 bp, Arabidopsis thaliana
gtaacgtcctgacaaac

SEQ ID NO: 118696 - DNA, 17 bp, Arabidopsis thaliana
gtaacgtcctgccaaac

SEQ ID NO: 118697 - DNA, 17 bp, Arabidopsis thaliana
gtaacgtcctgctaaat

SEQ ID NO: 118698 - DNA, 17 bp, Arabidopsis thaliana
gtaacgtcctgtcaaac

SEQ ID NO: 118699 - DNA, 17 bp, Arabidopsis thaliana
gtaacgttcaacaactc

SEQ ID NO: 118700 - DNA, 17 bp, Arabidopsis thaliana
gtaacgttctgtcaaac

SEQ ID NO: 118701 - DNA, 17 bp, Arabidopsis thaliana
gtaacgtttgccaaacc

SEQ ID NO: 118702 - DNA, 17 bp, Arabidopsis thaliana
gtaactaaattgcgacg

SEQ ID NO: 118703 - DNA, 17 bp, Arabidopsis thaliana
gtaactaacctcttgac

SEQ ID NO: 118704 - DNA, 17 bp, Arabidopsis thaliana
gtaactaactcaactca

SEQ ID NO: 118705 - DNA, 17 bp, Arabidopsis thaliana
gtaactacatgacgcag

SEQ ID NO: 118706 - DNA, 17 bp, Arabidopsis thaliana
gtaactagattttatcc

SEQ ID NO: 118707 - DNA, 17 bp, Arabidopsis thaliana
gtaactaggatttaacc

SEQ ID NO: 118708 - DNA, 17 bp, Arabidopsis thaliana
gtaactatgactctctt

SEQ ID NO: 118709 - DNA, 17 bp, Arabidopsis thaliana
gtaactattcatagccc

SEQ ID NO: 118710 - DNA, 17 bp, Arabidopsis thaliana
gtaactattcgaccggc

SEQ ID NO: 118711 - DNA, 17 bp, Arabidopsis thaliana
gtaactatttgaatcgt

SEQ ID NO: 118712 - DNA, 17 bp, Arabidopsis thaliana
gtaactatttgaatctt

SEQ ID NO: 118713 - DNA, 17 bp, Arabidopsis thaliana
gtaactcagtttggagg

SEQ ID NO: 118714 - DNA, 17 bp, Arabidopsis thaliana
gtaactccttcggtgtg

SEQ ID NO: 118715 - DNA, 17 bp, Arabidopsis thaliana
gtaactcgatgactttg

SEQ ID NO: 118716 - DNA, 17 bp, Arabidopsis thaliana
gtaactcggactatgca

SEQ ID NO: 118717 - DNA, 17 bp, Arabidopsis thaliana
gtaactcggtctcaggc

SEQ ID NO: 118718 - DNA, 17 bp, Arabidopsis thaliana
gtaactctctttgggtc

SEQ ID NO: 118719 - DNA, 17 bp, Arabidopsis thaliana
gtaactcttatagatcg

SEQ ID NO: 118720 - DNA, 17 bp, Arabidopsis thaliana
gtaactcttgcaaaact

SEQ ID NO: 118721 - DNA, 17 bp, Arabidopsis thaliana
gtaactgaactgccaac

SEQ ID NO: 118722 - DNA, 17 bp, Arabidopsis thaliana
gtaactgaatcatatgg

SEQ ID NO: 118723 - DNA, 17 bp, Arabidopsis thaliana
gtaactgagctttgcac

SEQ ID NO: 118724 - DNA, 17 bp, Arabidopsis thaliana
gtaactgccgctatatc

SEQ ID NO: 118725 - DNA, 17 bp, Arabidopsis thaliana
gtaactgccgctgtatc

SEQ ID NO: 118726 - DNA, 17 bp, Arabidopsis thaliana
gtaactgcctgtgacgt

SEQ ID NO: 118727 - DNA, 17 bp, Arabidopsis thaliana
gtaactgcgatttgctg

SEQ ID NO: 118728 - DNA, 17 bp, Arabidopsis thaliana
gtaactgcggcttgcta

SEQ ID NO: 118729 - DNA, 17 bp, Arabidopsis thaliana
gtaactgcgttttgcgg

SEQ ID NO: 118730 - DNA, 17 bp, Arabidopsis thaliana
gtaactgctgacttttg

SEQ ID NO: 118731 - DNA, 17 bp, Arabidopsis thaliana
gtaactgctgccaattc

SEQ ID NO: 118732 - DNA, 17 bp, Arabidopsis thaliana
gtaactggaaccaacga

SEQ ID NO: 118733 - DNA, 17 bp, Arabidopsis thaliana
gtaactgggcgggagac

SEQ ID NO: 118734 - DNA, 17 bp, Arabidopsis thaliana
gtaactggtcaagtggc

SEQ ID NO: 118735 - DNA, 17 bp, Arabidopsis thaliana
gtaactggttaaccaat

SEQ ID NO: 118736 - DNA, 17 bp, Arabidopsis thaliana
gtaactgtaacagattc

SEQ ID NO: 118737 - DNA, 17 bp, Arabidopsis thaliana
gtaactgtgggatacgg

SEQ ID NO: 118738 - DNA, 17 bp, Arabidopsis thaliana
gtaactgtgggcgaatc

SEQ ID NO: 118739 - DNA, 17 bp, Arabidopsis thaliana
gtaacttaaatacgcga

SEQ ID NO: 118740 - DNA, 17 bp, Arabidopsis thaliana
gtaacttaaattgttcg

SEQ ID NO: 118741 - DNA, 17 bp, Arabidopsis thaliana
gtaacttccagcgccac

SEQ ID NO: 118742 - DNA, 17 bp, Arabidopsis thaliana
gtaacttcgggaaaaga

SEQ ID NO: 118743 - DNA, 17 bp, Arabidopsis thaliana
gtaacttcgggaaaagg

SEQ ID NO: 118744 - DNA, 17 bp, Arabidopsis thaliana
gtaacttcgggagaagg

SEQ ID NO: 118745 - DNA, 17 bp, Arabidopsis thaliana
gtaacttgccactcgga

SEQ ID NO: 118746 - DNA, 17 bp, Arabidopsis thaliana
gtaactttccgtaaaca

SEQ ID NO: 118747 - DNA, 17 bp, Arabidopsis thaliana
gtaactttgacacatca

SEQ ID NO: 118748 - DNA, 17 bp, Arabidopsis thaliana
gtaactttggccgagtg

SEQ ID NO: 118749 - DNA, 17 bp, Arabidopsis thaliana
gtaagaacccaaccacg

SEQ ID NO: 118750 - DNA, 17 bp, Arabidopsis thaliana
gtaagaacgactttggg

SEQ ID NO: 118751 - DNA, 17 bp, Arabidopsis thaliana
gtaagaactctctagac

SEQ ID NO: 118752 - DNA, 17 bp, Arabidopsis thaliana
gtaagacagtggagcaa

SEQ ID NO: 118753 - DNA, 17 bp, Arabidopsis thaliana
gtaagaccagtggaaag

SEQ ID NO: 118754 - DNA, 17 bp, Arabidopsis thaliana
gtaagaccatctccatt

SEQ ID NO: 118755 - DNA, 17 bp, Arabidopsis thaliana
gtaagaccatgtatggg

SEQ ID NO: 118756 - DNA, 17 bp, Arabidopsis thaliana
gtaagaccgtggggtga

SEQ ID NO: 118757 - DNA, 17 bp, Arabidopsis thaliana
gtaagaccttgctctct

SEQ ID NO: 118758 - DNA, 17 bp, Arabidopsis thaliana
gtaagaccttggtccaa

SEQ ID NO: 118759 - DNA, 17 bp, Arabidopsis thaliana
gtaagagaagttgtgtc

SEQ ID NO: 118760 - DNA, 17 bp, Arabidopsis thaliana
gtaagagctgactactt

SEQ ID NO: 118761 - DNA, 17 bp, Arabidopsis thaliana
gtaagagggcgtgggtt

SEQ ID NO: 118762 - DNA, 17 bp, Arabidopsis thaliana
gtaagaggtgacgacga

SEQ ID NO: 118763 - DNA, 17 bp, Arabidopsis thaliana
gtaagagtttctggttc

SEQ ID NO: 118764 - DNA, 17 bp, Arabidopsis thaliana
gtaagatcgcagggatt

SEQ ID NO: 118765 - DNA, 17 bp, Arabidopsis thaliana
gtaagatctctttcgca

SEQ ID NO: 118766 - DNA, 17 bp, Arabidopsis thaliana
gtaagatctggttgcgg

SEQ ID NO: 118767 - DNA, 17 bp, Arabidopsis thaliana
gtaagattcgagaggcc

SEQ ID NO: 118768 - DNA, 17 bp, Arabidopsis thaliana
gtaagattcttgggttc

SEQ ID NO: 118769 - DNA, 17 bp, Arabidopsis thaliana
gtaagatttcgggtttg

SEQ ID NO: 118770 - DNA, 17 bp, Arabidopsis thaliana
gtaagcaaactatctca

SEQ ID NO: 118771 - DNA, 17 bp, Arabidopsis thaliana
gtaagcacatcagttcc

SEQ ID NO: 118772 - DNA, 17 bp, Arabidopsis thaliana
gtaagcagttgcagcgg

SEQ ID NO: 118773 - DNA, 17 bp, Arabidopsis thaliana
gtaagcccaagtgaaat

SEQ ID NO: 118774 - DNA, 17 bp, Arabidopsis thaliana
gtaagcccaccccaaga

SEQ ID NO: 118775 - DNA, 17 bp, Arabidopsis thaliana
gtaagcccgagctgcat

SEQ ID NO: 118776 - DNA, 17 bp, Arabidopsis thaliana
gtaagcccgtaattttt

SEQ ID NO: 118777 - DNA, 17 bp, Arabidopsis thaliana
gtaagccgattctacct

SEQ ID NO: 118778 - DNA, 17 bp, Arabidopsis thaliana
gtaagccgattctacga

SEQ ID NO: 118779 - DNA, 17 bp, Arabidopsis thaliana
gtaagccgcctgttgca

SEQ ID NO: 118780 - DNA, 17 bp, Arabidopsis thaliana
gtaagccggcgaaacag

SEQ ID NO: 118781 - DNA, 17 bp, Arabidopsis thaliana
gtaagcgaaaggccgcg

SEQ ID NO: 118782 - DNA, 17 bp, Arabidopsis thaliana
gtaagcgacgaaatgct

SEQ ID NO: 118783 - DNA, 17 bp, Arabidopsis thaliana
gtaagcgaggaaatgct

SEQ ID NO: 118784 - DNA, 17 bp, Arabidopsis thaliana
gtaagcgagtgacccga

SEQ ID NO: 118785 - DNA, 17 bp, Arabidopsis thaliana
gtaagcgcgagtcatca

SEQ ID NO: 118786 - DNA, 17 bp, Arabidopsis thaliana
gtaagcgcggtcgacag

SEQ ID NO: 118787 - DNA, 17 bp, Arabidopsis thaliana
gtaagcggcgttcgtag

SEQ ID NO: 118788 - DNA, 17 bp, Arabidopsis thaliana
gtaaggcaccggcttgc

SEQ ID NO: 118789 - DNA, 17 bp, Arabidopsis thaliana
gtaaggccctgttcgtt

SEQ ID NO: 118790 - DNA, 17 bp, Arabidopsis thaliana
gtaaggccgaattcgac

SEQ ID NO: 118791 - DNA, 17 bp, Arabidopsis thaliana
gtaaggcgcaaggaagc

SEQ ID NO: 118792 - DNA, 17 bp, Arabidopsis thaliana
gtaaggctaatgtggtt

SEQ ID NO: 118793 - DNA, 17 bp, Arabidopsis thaliana
gtaagggcagttccaac

SEQ ID NO: 118794 - DNA, 17 bp, Arabidopsis thaliana
gtaaggggtcttggaat

SEQ ID NO: 118795 - DNA, 17 bp, Arabidopsis thaliana
gtaaggtccacattgca

SEQ ID NO: 118796 - DNA, 17 bp, Arabidopsis thaliana
gtaaggtccctgcaatg

SEQ ID NO: 118797 - DNA, 17 bp, Arabidopsis thaliana
gtaaggtgtaggcgtgg

SEQ ID NO: 118798 - DNA, 17 bp, Arabidopsis thaliana
gtaaggtgttgggttaa

SEQ ID NO: 118799 - DNA, 17 bp, Arabidopsis thaliana
gtaaggttccatctcaa

SEQ ID NO: 118800 - DNA, 17 bp, Arabidopsis thaliana
gtaagtaactgagcctc

SEQ ID NO: 118801 - DNA, 17 bp, Arabidopsis thaliana
gtaagtacctttggcag

SEQ ID NO: 118802 - DNA, 17 bp, Arabidopsis thaliana
gtaagtagagctatgtg

SEQ ID NO: 118803 - DNA, 17 bp, Arabidopsis thaliana
gtaagtatgaacgaatt

SEQ ID NO: 118804 - DNA, 17 bp, Arabidopsis thaliana
gtaagtcatcggctggc

SEQ ID NO: 118805 - DNA, 17 bp, Arabidopsis thaliana
gtaagtcatgcggtgtt

SEQ ID NO: 118806 - DNA, 17 bp, Arabidopsis thaliana
gtaagtccataatggag

SEQ ID NO: 118807 - DNA, 17 bp, Arabidopsis thaliana
gtaagtcttcacttgga

SEQ ID NO: 118808 - DNA, 17 bp, Arabidopsis thaliana
gtaagtcttgcggtgtt

SEQ ID NO: 118809 - DNA, 17 bp, Arabidopsis thaliana
gtaagtgactgtgttgc

SEQ ID NO: 118810 - DNA, 17 bp, Arabidopsis thaliana
gtaagtggcagagtggc

SEQ ID NO: 118811 - DNA, 17 bp, Arabidopsis thaliana
gtaagttcagagtcaga

SEQ ID NO: 118812 - DNA, 17 bp, Arabidopsis thaliana
gtaagttccgacccgca

SEQ ID NO: 118813 - DNA, 17 bp, Arabidopsis thaliana
gtaagttgaccttggct

SEQ ID NO: 118814 - DNA, 17 bp, Arabidopsis thaliana
gtaagttggaccgccaa

SEQ ID NO: 118815 - DNA, 17 bp, Arabidopsis thaliana
gtaagttttgatggtac

SEQ ID NO: 118816 - DNA, 17 bp, Arabidopsis thaliana
gtaataaaagtggaata

SEQ ID NO: 118817 - DNA, 17 bp, Arabidopsis thaliana
gtaataaaagtggaatg

SEQ ID NO: 118818 - DNA, 17 bp, Arabidopsis thaliana
gtaataattcgctgagt

SEQ ID NO: 118819 - DNA, 17 bp, Arabidopsis thaliana
gtaataccgtatgtcgc

SEQ ID NO: 118820 - DNA, 17 bp, Arabidopsis thaliana
gtaatagagagacaatg

SEQ ID NO: 118821 - DNA, 17 bp, Arabidopsis thaliana
gtaatagcggttcaccc

SEQ ID NO: 118822 - DNA, 17 bp, Arabidopsis thaliana
gtaatagctcactgatc

SEQ ID NO: 118823 - DNA, 17 bp, Arabidopsis thaliana
gtaataggtgttgcgtt

SEQ ID NO: 118824 - DNA, 17 bp, Arabidopsis thaliana
gtaatatctacggtgct

SEQ ID NO: 118825 - DNA, 17 bp, Arabidopsis thaliana
gtaatatcttcgccgct

SEQ ID NO: 118826 - DNA, 17 bp, Arabidopsis thaliana
gtaatatgccgtaatat

SEQ ID NO: 118827 - DNA, 17 bp, Arabidopsis thaliana
gtaatcaaaagtatggt

SEQ ID NO: 118828 - DNA, 17 bp, Arabidopsis thaliana
gtaatccatgcgacttc

SEQ ID NO: 118829 - DNA, 17 bp, Arabidopsis thaliana
gtaatccccacaggtcc

SEQ ID NO: 118830 - DNA, 17 bp, Arabidopsis thaliana
gtaatccgaacattttt

SEQ ID NO: 118831 - DNA, 17 bp, Arabidopsis thaliana
gtaatccgattctacct

SEQ ID NO: 118832 - DNA, 17 bp, Arabidopsis thaliana
gtaatcctccaggcccg

SEQ ID NO: 118833 - DNA, 17 bp, Arabidopsis thaliana
gtaatcctcctaggccc

SEQ ID NO: 118834 - DNA, 17 bp, Arabidopsis thaliana
gtaatcctggacccggt

SEQ ID NO: 118835 - DNA, 17 bp, Arabidopsis thaliana
gtaatcgagtgcggcat

SEQ ID NO: 118836 - DNA, 17 bp, Arabidopsis thaliana
gtaatcgcacgatctcg

SEQ ID NO: 118837 - DNA, 17 bp, Arabidopsis thaliana
gtaatcgccggtcagcc

SEQ ID NO: 118838 - DNA, 17 bp, Arabidopsis thaliana
gtaatcgcctatgtgga

SEQ ID NO: 118839 - DNA, 17 bp, Arabidopsis thaliana
gtaatcggctaatgatg

SEQ ID NO: 118840 - DNA, 17 bp, Arabidopsis thaliana
gtaatcgtcatgtagtg

SEQ ID NO: 118841 - DNA, 17 bp, Arabidopsis thaliana
gtaatcgttccagaccc

SEQ ID NO: 118842 - DNA, 17 bp, Arabidopsis thaliana
gtaatctaaaatctcgg

SEQ ID NO: 118843 - DNA, 17 bp, Arabidopsis thaliana
gtaatctaaccggattt

SEQ ID NO: 118844 - DNA, 17 bp, Arabidopsis thaliana
gtaatctctcaggtccg

SEQ ID NO: 118845 - DNA, 17 bp, Arabidopsis thaliana
gtaatctctcgagagcc

SEQ ID NO: 118846 - DNA, 17 bp, Arabidopsis thaliana
gtaatctgactctgtag

SEQ ID NO: 118847 - DNA, 17 bp, Arabidopsis thaliana
gtaatctggtgctctac

SEQ ID NO: 118848 - DNA, 17 bp, Arabidopsis thaliana
gtaatctgtagaggaca

SEQ ID NO: 118849 - DNA, 17 bp, Arabidopsis thaliana
gtaatctgtgttaggcc

SEQ ID NO: 118850 - DNA, 17 bp, Arabidopsis thaliana
gtaatcttcggcaaata

SEQ ID NO: 118851 - DNA, 17 bp, Arabidopsis thaliana
gtaatcttctgtcaagc

SEQ ID NO: 118852 - DNA, 17 bp, Arabidopsis thaliana
gtaatcttctgtgaagc

SEQ ID NO: 118853 - DNA, 17 bp, Arabidopsis thaliana
gtaatcttgaggtccct

SEQ ID NO: 118854 - DNA, 17 bp, Arabidopsis thaliana
gtaatctttcaggtccg

SEQ ID NO: 118855 - DNA, 17 bp, Arabidopsis thaliana
gtaatgaacccatggca

SEQ ID NO: 118856 - DNA, 17 bp, Arabidopsis thaliana
gtaatgagtgcgtttgc

SEQ ID NO: 118857 - DNA, 17 bp, Arabidopsis thaliana
gtaatgattaacaggga

SEQ ID NO: 118858 - DNA, 17 bp, Arabidopsis thaliana
gtaatgcacctgctact

SEQ ID NO: 118859 - DNA, 17 bp, Arabidopsis thaliana
gtaatgcccgctacgcc

SEQ ID NO: 118860 - DNA, 17 bp, Arabidopsis thaliana
gtaatgcccgctgcgcc

SEQ ID NO: 118861 - DNA, 17 bp, Arabidopsis thaliana
gtaatgcctttcttgag

SEQ ID NO: 118862 - DNA, 17 bp, Arabidopsis thaliana
gtaatgcgggtactcat

SEQ ID NO: 118863 - DNA, 17 bp, Arabidopsis thaliana
gtaatggaacccatctt

SEQ ID NO: 118864 - DNA, 17 bp, Arabidopsis thaliana
gtaatggacccatagca

SEQ ID NO: 118865 - DNA, 17 bp, Arabidopsis thaliana
gtaatggacccatgaca

SEQ ID NO: 118866 - DNA, 17 bp, Arabidopsis thaliana
gtaatggcccgtatcga

SEQ ID NO: 118867 - DNA, 17 bp, Arabidopsis thaliana
gtaatgggcttgcccgc

SEQ ID NO: 118868 - DNA, 17 bp, Arabidopsis thaliana
gtaatgggtgcgtttgc

SEQ ID NO: 118869 - DNA, 17 bp, Arabidopsis thaliana
gtaatgtcagataatcc

SEQ ID NO: 118870 - DNA, 17 bp, Arabidopsis thaliana
gtaatgtgctacgtcat

SEQ ID NO: 118871 - DNA, 17 bp, Arabidopsis thaliana
gtaattacaaggaatgc

SEQ ID NO: 118872 - DNA, 17 bp, Arabidopsis thaliana
gtaattacataggtatg

SEQ ID NO: 118873 - DNA, 17 bp, Arabidopsis thaliana
gtaattccacaattttc

SEQ ID NO: 118874 - DNA, 17 bp, Arabidopsis thaliana
gtaattccacgacgcac

SEQ ID NO: 118875 - DNA, 17 bp, Arabidopsis thaliana
gtaattccagctccaat

SEQ ID NO: 118876 - DNA, 17 bp, Arabidopsis thaliana
gtaattcccccagaccc

SEQ ID NO: 118877 - DNA, 17 bp, Arabidopsis thaliana
gtaattcctctggttta

SEQ ID NO: 118878 - DNA, 17 bp, Arabidopsis thaliana
gtaattcctttaggccc

SEQ ID NO: 118879 - DNA, 17 bp, Arabidopsis thaliana
gtaattcgctgagattc

SEQ ID NO: 118880 - DNA, 17 bp, Arabidopsis thaliana
gtaattcggatgaatag

SEQ ID NO: 118881 - DNA, 17 bp, Arabidopsis thaliana
gtaattgattttaccgg

SEQ ID NO: 118882 - DNA, 17 bp, Arabidopsis thaliana
gtaattgcaggttttga

SEQ ID NO: 118883 - DNA, 17 bp, Arabidopsis thaliana
gtaattgcattaggcct

SEQ ID NO: 118884 - DNA, 17 bp, Arabidopsis thaliana
gtaattgccagacgcat

SEQ ID NO: 118885 - DNA, 17 bp, Arabidopsis thaliana
gtaattggtcgctgagt

SEQ ID NO: 118886 - DNA, 17 bp, Arabidopsis thaliana
gtaattgttttccggcg

SEQ ID NO: 118887 - DNA, 17 bp, Arabidopsis thaliana
gtaatttccaaacaggt

SEQ ID NO: 118888 - DNA, 17 bp, Arabidopsis thaliana
gtaatttccaacagctt

SEQ ID NO: 118889 - DNA, 17 bp, Arabidopsis thaliana
gtaatttctatcgatcg

SEQ ID NO: 118890 - DNA, 17 bp, Arabidopsis thaliana
gtaatttctggaccaat

SEQ ID NO: 118891 - DNA, 17 bp, Arabidopsis thaliana
gtaatttctttacccgt

SEQ ID NO: 118892 - DNA, 17 bp, Arabidopsis thaliana
gtaattttacccgtcct

SEQ ID NO: 118893 - DNA, 17 bp, Arabidopsis thaliana
gtaattttgggtccgta

SEQ ID NO: 118894 - DNA, 17 bp, Arabidopsis thaliana
gtacaaaccaaaggtcc

SEQ ID NO: 118895 - DNA, 17 bp, Arabidopsis thaliana
gtacaaaccgcacttgt

SEQ ID NO: 118896 - DNA, 17 bp, Arabidopsis thaliana
gtacaaaccgggttcag

SEQ ID NO: 118897 - DNA, 17 bp, Arabidopsis thaliana
gtacaaaccgggttccg

SEQ ID NO: 118898 - DNA, 17 bp, Arabidopsis thaliana
gtacaaacctccatcat

SEQ ID NO: 118899 - DNA, 17 bp, Arabidopsis thaliana
gtacaaactaagaagtt

SEQ ID NO: 118900 - DNA, 17 bp, Arabidopsis thaliana
gtacaaaggagcgctgt

SEQ ID NO: 118901 - DNA, 17 bp, Arabidopsis thaliana
gtacaaagggcagagac

SEQ ID NO: 118902 - DNA, 17 bp, Arabidopsis thaliana
gtacaaagggcagggaa

SEQ ID NO: 118903 - DNA, 17 bp, Arabidopsis thaliana
gtacaaagggcagggac

SEQ ID NO: 118904 - DNA, 17 bp, Arabidopsis thaliana
gtacaaatgcggttcaa

SEQ ID NO: 118905 - DNA, 17 bp, Arabidopsis thaliana
gtacaacactatctgta

SEQ ID NO: 118906 - DNA, 17 bp, Arabidopsis thaliana
gtacaacagagatcata

SEQ ID NO: 118907 - DNA, 17 bp, Arabidopsis thaliana
gtacaaccaaggttata

SEQ ID NO: 118908 - DNA, 17 bp, Arabidopsis thaliana
gtacaacccctgttttt

SEQ ID NO: 118909 - DNA, 17 bp, Arabidopsis thaliana
gtacaacctttccagac

SEQ ID NO: 118910 - DNA, 17 bp, Arabidopsis thaliana
gtacaacgtcgccggac

SEQ ID NO: 118911 - DNA, 17 bp, Arabidopsis thaliana
gtacaacgtcgccggcc

SEQ ID NO: 118912 - DNA, 17 bp, Arabidopsis thaliana
gtacaactatgtcattg

SEQ ID NO: 118913 - DNA, 17 bp, Arabidopsis thaliana
gtacaactgttgagtga

SEQ ID NO: 118914 - DNA, 17 bp, Arabidopsis thaliana
gtacaactttgacagtt

SEQ ID NO: 118915 - DNA, 17 bp, Arabidopsis thaliana
gtacaactttgcactat

SEQ ID NO: 118916 - DNA, 17 bp, Arabidopsis thaliana
gtacaactttggccagc

SEQ ID NO: 118917 - DNA, 17 bp, Arabidopsis thaliana
gtacaacttttctatac

SEQ ID NO: 118918 - DNA, 17 bp, Arabidopsis thaliana
gtacaagacgtgtctac

SEQ ID NO: 118919 - DNA, 17 bp, Arabidopsis thaliana
gtacaagacttggtgga

SEQ ID NO: 118920 - DNA, 17 bp, Arabidopsis thaliana
gtacaagatttgcggcg

SEQ ID NO: 118921 - DNA, 17 bp, Arabidopsis thaliana
gtacaagggatcccaac

SEQ ID NO: 118922 - DNA, 17 bp, Arabidopsis thaliana
gtacaagtgcagatcaa

SEQ ID NO: 118923 - DNA, 17 bp, Arabidopsis thaliana
gtacaagtgcctaaaca

SEQ ID NO: 118924 - DNA, 17 bp, Arabidopsis thaliana
gtacaatcgggaatgcg

SEQ ID NO: 118925 - DNA, 17 bp, Arabidopsis thaliana
gtacaatcgggaatgtg

SEQ ID NO: 118926 - DNA, 17 bp, Arabidopsis thaliana
gtacaatcgttggagat

SEQ ID NO: 118927 - DNA, 17 bp, Arabidopsis thaliana
gtacaatgcggtgcgtt

SEQ ID NO: 118928 - DNA, 17 bp, Arabidopsis thaliana
gtacacaccccccgtcg

SEQ ID NO: 118929 - DNA, 17 bp, Arabidopsis thaliana
gtacacaccgcccgtca

SEQ ID NO: 118930 - DNA, 17 bp, Arabidopsis thaliana
gtacacaccgcccgtcg

SEQ ID NO: 118931 - DNA, 17 bp, Arabidopsis thaliana
gtacacaccgcccgtct

SEQ ID NO: 118932 - DNA, 17 bp, Arabidopsis thaliana
gtacacaccgcccgttg

SEQ ID NO: 118933 - DNA, 17 bp, Arabidopsis thaliana
gtacacaccgcttgtcg

SEQ ID NO: 118934 - DNA, 17 bp, Arabidopsis thaliana
gtacacacgtgcgaagt

SEQ ID NO: 118935 - DNA, 17 bp, Arabidopsis thaliana
gtacacagtggcggatc

SEQ ID NO: 118936 - DNA, 17 bp, Arabidopsis thaliana
gtacacatcttgattgc

SEQ ID NO: 118937 - DNA, 17 bp, Arabidopsis thaliana
gtacacatgcgcgacaa

SEQ ID NO: 118938 - DNA, 17 bp, Arabidopsis thaliana
gtacaccgactgtggct

SEQ ID NO: 118939 - DNA, 17 bp, Arabidopsis thaliana
gtacaccgcagagacaa

SEQ ID NO: 118940 - DNA, 17 bp, Arabidopsis thaliana
gtacaccgcggagacag

SEQ ID NO: 118941 - DNA, 17 bp, Arabidopsis thaliana
gtacaccgcgggttgag

SEQ ID NO: 118942 - DNA, 17 bp, Arabidopsis thaliana
gtacaccgcggtgacaa

SEQ ID NO: 118943 - DNA, 17 bp, Arabidopsis thaliana
gtacaccgcgtgactat

SEQ ID NO: 118944 - DNA, 17 bp, Arabidopsis thaliana
gtacaccgctatatgta

SEQ ID NO: 118945 - DNA, 17 bp, Arabidopsis thaliana
gtacaccgtcggctgag

SEQ ID NO: 118946 - DNA, 17 bp, Arabidopsis thaliana
gtacacggctctgcgca

SEQ ID NO: 118947 - DNA, 17 bp, Arabidopsis thaliana
gtacacgggtattagat

SEQ ID NO: 118948 - DNA, 17 bp, Arabidopsis thaliana
gtacacgtcacgggcat

SEQ ID NO: 118949 - DNA, 17 bp, Arabidopsis thaliana
gtacacgtctgcctggg

SEQ ID NO: 118950 - DNA, 17 bp, Arabidopsis thaliana
gtacactaaaaaccgcg

SEQ ID NO: 118951 - DNA, 17 bp, Arabidopsis thaliana
gtacactacttcgtttt

SEQ ID NO: 118952 - DNA, 17 bp, Arabidopsis thaliana
gtacactcgggaagtgc

SEQ ID NO: 118953 - DNA, 17 bp, Arabidopsis thaliana
gtacactgcggattgat

SEQ ID NO: 118954 - DNA, 17 bp, Arabidopsis thaliana
gtacactgctctatctg

SEQ ID NO: 118955 - DNA, 17 bp, Arabidopsis thaliana
gtacactgtcggctggg

SEQ ID NO: 118956 - DNA, 17 bp, Arabidopsis thaliana
gtacactttcggactag

SEQ ID NO: 118957 - DNA, 17 bp, Arabidopsis thaliana
gtacactttgacacgga

SEQ ID NO: 118958 - DNA, 17 bp, Arabidopsis thaliana
gtacacttttcaataga

SEQ ID NO: 118959 - DNA, 17 bp, Arabidopsis thaliana
gtacagaacattcgcta

SEQ ID NO: 118960 - DNA, 17 bp, Arabidopsis thaliana
gtacagacaacttggtg

SEQ ID NO: 118961 - DNA, 17 bp, Arabidopsis thaliana
gtacagacccgatctgg

SEQ ID NO: 118962 - DNA, 17 bp, Arabidopsis thaliana
gtacagacccggattcg

SEQ ID NO: 118963 - DNA, 17 bp, Arabidopsis thaliana
gtacagacccggggttt

SEQ ID NO: 118964 - DNA, 17 bp, Arabidopsis thaliana
gtacagacccgggttca

SEQ ID NO: 118965 - DNA, 17 bp, Arabidopsis thaliana
gtacagacccgggttcg

SEQ ID NO: 118966 - DNA, 17 bp, Arabidopsis thaliana
gtacagacccgggtttc

SEQ ID NO: 118967 - DNA, 17 bp, Arabidopsis thaliana
gtacagacccgggtttt

SEQ ID NO: 118968 - DNA, 17 bp, Arabidopsis thaliana
gtacagacccggttcat

SEQ ID NO: 118969 - DNA, 17 bp, Arabidopsis thaliana
gtacagacccggtttcg

SEQ ID NO: 118970 - DNA, 17 bp, Arabidopsis thaliana
gtacagactgttcagac

SEQ ID NO: 118971 - DNA, 17 bp, Arabidopsis thaliana
gtacagagctgccaatg

SEQ ID NO: 118972 - DNA, 17 bp, Arabidopsis thaliana
gtacagagctgccgatg

SEQ ID NO: 118973 - DNA, 17 bp, Arabidopsis thaliana
gtacagagtggacatct

SEQ ID NO: 118974 - DNA, 17 bp, Arabidopsis thaliana
gtacagatagcggtgta

SEQ ID NO: 118975 - DNA, 17 bp, Arabidopsis thaliana
gtacagatatggaagag

SEQ ID NO: 118976 - DNA, 17 bp, Arabidopsis thaliana
gtacagatgtggtgtac

SEQ ID NO: 118977 - DNA, 17 bp, Arabidopsis thaliana
gtacagccccgggttcg

SEQ ID NO: 118978 - DNA, 17 bp, Arabidopsis thaliana
gtacagcgatgtacagg

SEQ ID NO: 118979 - DNA, 17 bp, Arabidopsis thaliana
gtacagcgctgtacagt

SEQ ID NO: 118980 - DNA, 17 bp, Arabidopsis thaliana
gtacagcggctggaaga

SEQ ID NO: 118981 - DNA, 17 bp, Arabidopsis thaliana
gtacagcgtctgtagga

SEQ ID NO: 118982 - DNA, 17 bp, Arabidopsis thaliana
gtacagcgtctgtaggt

SEQ ID NO: 118983 - DNA, 17 bp, Arabidopsis thaliana
gtacagctccgacgata

SEQ ID NO: 118984 - DNA, 17 bp, Arabidopsis thaliana
gtacagctttgacaatt

SEQ ID NO: 118985 - DNA, 17 bp, Arabidopsis thaliana
gtacagctttgcgttac

SEQ ID NO: 118986 - DNA, 17 bp, Arabidopsis thaliana
gtacaggagaagcagcg

SEQ ID NO: 118987 - DNA, 17 bp, Arabidopsis thaliana
gtacaggagtatggcaa

SEQ ID NO: 118988 - DNA, 17 bp, Arabidopsis thaliana
gtacaggagtatggcag

SEQ ID NO: 118989 - DNA, 17 bp, Arabidopsis thaliana
gtacaggccaacctaac

SEQ ID NO: 118990 - DNA, 17 bp, Arabidopsis thaliana
gtacaggcccggctctt

SEQ ID NO: 118991 - DNA, 17 bp, Arabidopsis thaliana
gtacaggcttacgctca

SEQ ID NO: 118992 - DNA, 17 bp, Arabidopsis thaliana
gtacaggtacagcggtt

SEQ ID NO: 118993 - DNA, 17 bp, Arabidopsis thaliana
gtacaggtgctgaacat

SEQ ID NO: 118994 - DNA, 17 bp, Arabidopsis thaliana
gtacaggttgtcaggga

SEQ ID NO: 118995 - DNA, 17 bp, Arabidopsis thaliana
gtacagtaaacgcggat

SEQ ID NO: 118996 - DNA, 17 bp, Arabidopsis thaliana
gtacagtaaactgcgag

SEQ ID NO: 118997 - DNA, 17 bp, Arabidopsis thaliana
gtacagtcacctgaaga

SEQ ID NO: 118998 - DNA, 17 bp, Arabidopsis thaliana
gtacagtcaggcgctgg

SEQ ID NO: 118999 - DNA, 17 bp, Arabidopsis thaliana
gtacagtgatcctacgt

SEQ ID NO: 119000 - DNA, 17 bp, Arabidopsis thaliana
gtacagtgctgtagcta

SEQ ID NO: 119001 - DNA, 17 bp, Arabidopsis thaliana
gtacagtgttgggcctg

SEQ ID NO: 119002 - DNA, 17 bp, Arabidopsis thaliana
gtacagttctgtacagt

SEQ ID NO: 119003 - DNA, 17 bp, Arabidopsis thaliana
gtacagttcttcgacgt

SEQ ID NO: 119004 - DNA, 17 bp, Arabidopsis thaliana
gtacagtttgtacagct

SEQ ID NO: 119005 - DNA, 17 bp, Arabidopsis thaliana
gtacagttttgcattat

SEQ ID NO: 119006 - DNA, 17 bp, Arabidopsis thaliana
gtacataaaacgttaat

SEQ ID NO: 119007 - DNA, 17 bp, Arabidopsis thaliana
gtacatacactgtggaa

SEQ ID NO: 119008 - DNA, 17 bp, Arabidopsis thaliana
gtacatagacgagatcg

SEQ ID NO: 119009 - DNA, 17 bp, Arabidopsis thaliana
gtacatccacaattgta

SEQ ID NO: 119010 - DNA, 17 bp, Arabidopsis thaliana
gtacatcctactttgtg

SEQ ID NO: 119011 - DNA, 17 bp, Arabidopsis thaliana
gtacatcgccgctcttt

SEQ ID NO: 119012 - DNA, 17 bp, Arabidopsis thaliana
gtacatcggccacgttg

SEQ ID NO: 119013 - DNA, 17 bp, Arabidopsis thaliana
gtacatcgtggagacaa

SEQ ID NO: 119014 - DNA, 17 bp, Arabidopsis thaliana
gtacatcgttgaagatc

SEQ ID NO: 119015 - DNA, 17 bp, Arabidopsis thaliana
gtacatcgttggagatc

SEQ ID NO: 119016 - DNA, 17 bp, Arabidopsis thaliana
gtacatcgttgtagatc

SEQ ID NO: 119017 - DNA, 17 bp, Arabidopsis thaliana
gtacatctcgactgcca

SEQ ID NO: 119018 - DNA, 17 bp, Arabidopsis thaliana
gtacatctcgctctcct

SEQ ID NO: 119019 - DNA, 17 bp, Arabidopsis thaliana
gtacatcttcgggttca

SEQ ID NO: 119020 - DNA, 17 bp, Arabidopsis thaliana
gtacatcttctgcggca

SEQ ID NO: 119021 - DNA, 17 bp, Arabidopsis thaliana
gtacatcttgactgcca

SEQ ID NO: 119022 - DNA, 17 bp, Arabidopsis thaliana
gtacatgcgggtcagga

SEQ ID NO: 119023 - DNA, 17 bp, Arabidopsis thaliana
gtacatggatactggaa

SEQ ID NO: 119024 - DNA, 17 bp, Arabidopsis thaliana
gtacatggggtttcccc

SEQ ID NO: 119025 - DNA, 17 bp, Arabidopsis thaliana
gtacatgtgcggttcaa

SEQ ID NO: 119026 - DNA, 17 bp, Arabidopsis thaliana
gtacattaaggtcaaaa

SEQ ID NO: 119027 - DNA, 17 bp, Arabidopsis thaliana
gtacattccacaagggt

SEQ ID NO: 119028 - DNA, 17 bp, Arabidopsis thaliana
gtacattgaaatctaca

SEQ ID NO: 119029 - DNA, 17 bp, Arabidopsis thaliana
gtacattgccaggtagt

SEQ ID NO: 119030 - DNA, 17 bp, Arabidopsis thaliana
gtacattgtgactacac

SEQ ID NO: 119031 - DNA, 17 bp, Arabidopsis thaliana
gtaccaaacgatcatgt

SEQ ID NO: 119032 - DNA, 17 bp, Arabidopsis thaliana
gtaccaaagattcgtag

SEQ ID NO: 119033 - DNA, 17 bp, Arabidopsis thaliana
gtaccaaggatgacttg

SEQ ID NO: 119034 - DNA, 17 bp, Arabidopsis thaliana
gtaccacagttgggtga

SEQ ID NO: 119035 - DNA, 17 bp, Arabidopsis thaliana
gtaccaccgcactatag

SEQ ID NO: 119036 - DNA, 17 bp, Arabidopsis thaliana
gtaccacgattgcgatt

SEQ ID NO: 119037 - DNA, 17 bp, Arabidopsis thaliana
gtaccactgccatccgc

SEQ ID NO: 119038 - DNA, 17 bp, Arabidopsis thaliana
gtaccacttcctgaagc

SEQ ID NO: 119039 - DNA, 17 bp, Arabidopsis thaliana
gtaccagactagtaggc

SEQ ID NO: 119040 - DNA, 17 bp, Arabidopsis thaliana
gtaccaggtggcacagg

SEQ ID NO: 119041 - DNA, 17 bp, Arabidopsis thaliana
gtaccagttctgagctg

SEQ ID NO: 119042 - DNA, 17 bp, Arabidopsis thaliana
gtaccagttgtacctaa

SEQ ID NO: 119043 - DNA, 17 bp, Arabidopsis thaliana
gtaccatatcggttggt

SEQ ID NO: 119044 - DNA, 17 bp, Arabidopsis thaliana
gtaccatattcgggatg

SEQ ID NO: 119045 - DNA, 17 bp, Arabidopsis thaliana
gtaccatcacatgtacc

SEQ ID NO: 119046 - DNA, 17 bp, Arabidopsis thaliana
gtaccatggataaagct

SEQ ID NO: 119047 - DNA, 17 bp, Arabidopsis thaliana
gtacccaaaaccgcacc

SEQ ID NO: 119048 - DNA, 17 bp, Arabidopsis thaliana
gtacccaacttggtttc

SEQ ID NO: 119049 - DNA, 17 bp, Arabidopsis thaliana
gtacccaagcagtcctt

SEQ ID NO: 119050 - DNA, 17 bp, Arabidopsis thaliana
gtacccacaggtattag

SEQ ID NO: 119051 - DNA, 17 bp, Arabidopsis thaliana
gtacccacggatagtct

SEQ ID NO: 119052 - DNA, 17 bp, Arabidopsis thaliana
gtacccacgggtagtct

SEQ ID NO: 119053 - DNA, 17 bp, Arabidopsis thaliana
gtacccacgggtattag

SEQ ID NO: 119054 - DNA, 17 bp, Arabidopsis thaliana
gtacccactcacagaaa

SEQ ID NO: 119055 - DNA, 17 bp, Arabidopsis thaliana
gtacccatcatctaagc

SEQ ID NO: 119056 - DNA, 17 bp, Arabidopsis thaliana
gtacccatctcgttcgt

SEQ ID NO: 119057 - DNA, 17 bp, Arabidopsis thaliana
gtacccattcaactctc

SEQ ID NO: 119058 - DNA, 17 bp, Arabidopsis thaliana
gtacccattctgcagca

SEQ ID NO: 119059 - DNA, 17 bp, Arabidopsis thaliana
gtaccccaccggaagct

SEQ ID NO: 119060 - DNA, 17 bp, Arabidopsis thaliana
gtacccccaggggaagt

SEQ ID NO: 119061 - DNA, 17 bp, Arabidopsis thaliana
gtacccgaaaccgacac

SEQ ID NO: 119062 - DNA, 17 bp, Arabidopsis thaliana
gtacccgagtgagacta

SEQ ID NO: 119063 - DNA, 17 bp, Arabidopsis thaliana
gtacccgggcgaagcca

SEQ ID NO: 119064 - DNA, 17 bp, Arabidopsis thaliana
gtacccgtcagttttgt

SEQ ID NO: 119065 - DNA, 17 bp, Arabidopsis thaliana
gtacccgtcggctttgt

SEQ ID NO: 119066 - DNA, 17 bp, Arabidopsis thaliana
gtacccgtcttttcctg

SEQ ID NO: 119067 - DNA, 17 bp, Arabidopsis thaliana
gtacccgttagtttcag

SEQ ID NO: 119068 - DNA, 17 bp, Arabidopsis thaliana
gtaccctgtccgacgcc

SEQ ID NO: 119069 - DNA, 17 bp, Arabidopsis thaliana
gtaccctttcgggtttg

SEQ ID NO: 119070 - DNA, 17 bp, Arabidopsis thaliana
gtaccgaaacgcttcat

SEQ ID NO: 119071 - DNA, 17 bp, Arabidopsis thaliana
gtaccgaaagttgccta

SEQ ID NO: 119072 - DNA, 17 bp, Arabidopsis thaliana
gtaccgaaccgtttcat

SEQ ID NO: 119073 - DNA, 17 bp, Arabidopsis thaliana
gtaccgaccggactagg

SEQ ID NO: 119074 - DNA, 17 bp, Arabidopsis thaliana
gtaccgaccgtcggacg

SEQ ID NO: 119075 - DNA, 17 bp, Arabidopsis thaliana
gtaccgaccgttggaca

SEQ ID NO: 119076 - DNA, 17 bp, Arabidopsis thaliana
gtaccgacgcggattac

SEQ ID NO: 119077 - DNA, 17 bp, Arabidopsis thaliana
gtaccgatcactttgca

SEQ ID NO: 119078 - DNA, 17 bp, Arabidopsis thaliana
gtaccgccaaatgtcct

SEQ ID NO: 119079 - DNA, 17 bp, Arabidopsis thaliana
gtaccgccgtacgggaa

SEQ ID NO: 119080 - DNA, 17 bp, Arabidopsis thaliana
gtaccgcctgcaggtca

SEQ ID NO: 119081 - DNA, 17 bp, Arabidopsis thaliana
gtaccgcgattgcgatt

SEQ ID NO: 119082 - DNA, 17 bp, Arabidopsis thaliana
gtaccgcgattgtgatt

SEQ ID NO: 119083 - DNA, 17 bp, Arabidopsis thaliana
gtaccgcgggccaaact

SEQ ID NO: 119084 - DNA, 17 bp, Arabidopsis thaliana
gtaccgcgggccaatct

SEQ ID NO: 119085 - DNA, 17 bp, Arabidopsis thaliana
gtaccgcgggtcaaaat

SEQ ID NO: 119086 - DNA, 17 bp, Arabidopsis thaliana
gtaccgcgggttttttt

SEQ ID NO: 119087 - DNA, 17 bp, Arabidopsis thaliana
gtaccgcggtaattcca

SEQ ID NO: 119088 - DNA, 17 bp, Arabidopsis thaliana
gtaccgcggtttttcga

SEQ ID NO: 119089 - DNA, 17 bp, Arabidopsis thaliana
gtaccgcggttttttct

SEQ ID NO: 119090 - DNA, 17 bp, Arabidopsis thaliana
gtaccgcggtttttttt

SEQ ID NO: 119091 - DNA, 17 bp, Arabidopsis thaliana
gtaccgctagatccgct

SEQ ID NO: 119092 - DNA, 17 bp, Arabidopsis thaliana
gtaccggaggcgcaact

SEQ ID NO: 119093 - DNA, 17 bp, Arabidopsis thaliana
gtaccggcagactcttc

SEQ ID NO: 119094 - DNA, 17 bp, Arabidopsis thaliana
gtaccggttgttagcga

SEQ ID NO: 119095 - DNA, 17 bp, Arabidopsis thaliana
gtaccgtaacagtgctg

SEQ ID NO: 119096 - DNA, 17 bp, Arabidopsis thaliana
gtaccgtagttgaaccg

SEQ ID NO: 119097 - DNA, 17 bp, Arabidopsis thaliana
gtaccgtgtacttgtgc

SEQ ID NO: 119098 - DNA, 17 bp, Arabidopsis thaliana
gtaccgtgtacttgtgt

SEQ ID NO: 119099 - DNA, 17 bp, Arabidopsis thaliana
gtaccgtttcgagaatg

SEQ ID NO: 119100 - DNA, 17 bp, Arabidopsis thaliana
gtacctacttgagtgat

SEQ ID NO: 119101 - DNA, 17 bp, Arabidopsis thaliana
gtacctatctgccaaat

SEQ ID NO: 119102 - DNA, 17 bp, Arabidopsis thaliana
gtacctcgaacccagca

SEQ ID NO: 119103 - DNA, 17 bp, Arabidopsis thaliana
gtacctgccggaaatct

SEQ ID NO: 119104 - DNA, 17 bp, Arabidopsis thaliana
gtacctgcgaagatctg

SEQ ID NO: 119105 - DNA, 17 bp, Arabidopsis thaliana
gtacctggattagactt

SEQ ID NO: 119106 - DNA, 17 bp, Arabidopsis thaliana
gtacctggcgctacggc

SEQ ID NO: 119107 - DNA, 17 bp, Arabidopsis thaliana
gtacctgtacccgaaac

SEQ ID NO: 119108 - DNA, 17 bp, Arabidopsis thaliana
gtacctgtcggaaacaa

SEQ ID NO: 119109 - DNA, 17 bp, Arabidopsis thaliana
gtacctgtcggaaacca

SEQ ID NO: 119110 - DNA, 17 bp, Arabidopsis thaliana
gtaccttcagcactttt

SEQ ID NO: 119111 - DNA, 17 bp, Arabidopsis thaliana
gtaccttcaggacattt

SEQ ID NO: 119112 - DNA, 17 bp, Arabidopsis thaliana
gtaccttgactgaagat

SEQ ID NO: 119113 - DNA, 17 bp, Arabidopsis thaliana
gtaccttggatccgtta

SEQ ID NO: 119114 - DNA, 17 bp, Arabidopsis thaliana
gtaccttggatccgttg

SEQ ID NO: 119115 - DNA, 17 bp, Arabidopsis thaliana
gtacgaaacacaggccc

SEQ ID NO: 119116 - DNA, 17 bp, Arabidopsis thaliana
gtacgaacacgcccaat

SEQ ID NO: 119117 - DNA, 17 bp, Arabidopsis thaliana
gtacgaacccgggctca

SEQ ID NO: 119118 - DNA, 17 bp, Arabidopsis thaliana
gtacgaacgtcgactct

SEQ ID NO: 119119 - DNA, 17 bp, Arabidopsis thaliana
gtacgaagccattcagc

SEQ ID NO: 119120 - DNA, 17 bp, Arabidopsis thaliana
gtacgaatccaacagtt

SEQ ID NO: 119121 - DNA, 17 bp, Arabidopsis thaliana
gtacgaatctggagatt

SEQ ID NO: 119122 - DNA, 17 bp, Arabidopsis thaliana
gtacgaccgctacgaac

SEQ ID NO: 119123 - DNA, 17 bp, Arabidopsis thaliana
gtacgacgattggtcga

SEQ ID NO: 119124 - DNA, 17 bp, Arabidopsis thaliana
gtacgacgcggattacg

SEQ ID NO: 119125 - DNA, 17 bp, Arabidopsis thaliana
gtacgacggatcgctcc

SEQ ID NO: 119126 - DNA, 17 bp, Arabidopsis thaliana
gtacgactaatcaggaa

SEQ ID NO: 119127 - DNA, 17 bp, Arabidopsis thaliana
gtacgacttcacgccgg

SEQ ID NO: 119128 - DNA, 17 bp, Arabidopsis thaliana
gtacgacttcccctggg

SEQ ID NO: 119129 - DNA, 17 bp, Arabidopsis thaliana
gtacgagaggaaccgtt

SEQ ID NO: 119130 - DNA, 17 bp, Arabidopsis thaliana
gtacgagggcacgtctg

SEQ ID NO: 119131 - DNA, 17 bp, Arabidopsis thaliana
gtacgagttctacagat

SEQ ID NO: 119132 - DNA, 17 bp, Arabidopsis thaliana
gtacgagttttgcaacc

SEQ ID NO: 119133 - DNA, 17 bp, Arabidopsis thaliana
gtacgatccttgcgtct

SEQ ID NO: 119134 - DNA, 17 bp, Arabidopsis thaliana
gtacgattagagtctcg

SEQ ID NO: 119135 - DNA, 17 bp, Arabidopsis thaliana
gtacgattatcctagga

SEQ ID NO: 119136 - DNA, 17 bp, Arabidopsis thaliana
gtacgattcaactgcgg

SEQ ID NO: 119137 - DNA, 17 bp, Arabidopsis thaliana
gtacgattggcggcgat

SEQ ID NO: 119138 - DNA, 17 bp, Arabidopsis thaliana
gtacgattgttgtccac

SEQ ID NO: 119139 - DNA, 17 bp, Arabidopsis thaliana
gtacgatttttcatctt

SEQ ID NO: 119140 - DNA, 17 bp, Arabidopsis thaliana
gtacgcaacggagtcta

SEQ ID NO: 119141 - DNA, 17 bp, Arabidopsis thaliana
gtacgcatgtgctatgg

SEQ ID NO: 119142 - DNA, 17 bp, Arabidopsis thaliana
gtacgccacaattttac

SEQ ID NO: 119143 - DNA, 17 bp, Arabidopsis thaliana
gtacgccgcagtttttt

SEQ ID NO: 119144 - DNA, 17 bp, Arabidopsis thaliana
gtacgcggtcgcctcac

SEQ ID NO: 119145 - DNA, 17 bp, Arabidopsis thaliana
gtacgcgtcgcattgtt

SEQ ID NO: 119146 - DNA, 17 bp, Arabidopsis thaliana
gtacgctatggaagtga

SEQ ID NO: 119147 - DNA, 17 bp, Arabidopsis thaliana
gtacgcttagccggtgt

SEQ ID NO: 119148 - DNA, 17 bp, Arabidopsis thaliana
gtacggacaaggggaat

SEQ ID NO: 119149 - DNA, 17 bp, Arabidopsis thaliana
gtacggacctaacccgg

SEQ ID NO: 119150 - DNA, 17 bp, Arabidopsis thaliana
gtacggactgagagtct

SEQ ID NO: 119151 - DNA, 17 bp, Arabidopsis thaliana
gtacggattggggttta

SEQ ID NO: 119152 - DNA, 17 bp, Arabidopsis thaliana
gtacggcgaccctggac

SEQ ID NO: 119153 - DNA, 17 bp, Arabidopsis thaliana
gtacggcgcaatctgtg

SEQ ID NO: 119154 - DNA, 17 bp, Arabidopsis thaliana
gtacggctgtggctcgg

SEQ ID NO: 119155 - DNA, 17 bp, Arabidopsis thaliana
gtacggcttggctcgga

SEQ ID NO: 119156 - DNA, 17 bp, Arabidopsis thaliana
gtacggctttggctcgg

SEQ ID NO: 119157 - DNA, 17 bp, Arabidopsis thaliana
gtacggctttggctggg

SEQ ID NO: 119158 - DNA, 17 bp, Arabidopsis thaliana
gtacgggacggattggc

SEQ ID NO: 119159 - DNA, 17 bp, Arabidopsis thaliana
gtacgggagaagtgcgg

SEQ ID NO: 119160 - DNA, 17 bp, Arabidopsis thaliana
gtacgggaggccatgta

SEQ ID NO: 119161 - DNA, 17 bp, Arabidopsis thaliana
gtacgggcggcgtatct

SEQ ID NO: 119162 - DNA, 17 bp, Arabidopsis thaliana
gtacgggttggcgggac

SEQ ID NO: 119163 - DNA, 17 bp, Arabidopsis thaliana
gtacgggtttacgtttt

SEQ ID NO: 119164 - DNA, 17 bp, Arabidopsis thaliana
gtacggtcgctggttta

SEQ ID NO: 119165 - DNA, 17 bp, Arabidopsis thaliana
gtacggttcaactacgg

SEQ ID NO: 119166 - DNA, 17 bp, Arabidopsis thaliana
gtacggttcaactgagg

SEQ ID NO: 119167 - DNA, 17 bp, Arabidopsis thaliana
gtacggttcaactgcgg

SEQ ID NO: 119168 - DNA, 17 bp, Arabidopsis thaliana
gtacggttgtgccatgc

SEQ ID NO: 119169 - DNA, 17 bp, Arabidopsis thaliana
gtacggttgtgccatgg

SEQ ID NO: 119170 - DNA, 17 bp, Arabidopsis thaliana
gtacggtttagttagtc

SEQ ID NO: 119171 - DNA, 17 bp, Arabidopsis thaliana
gtacggttttgggtgcg

SEQ ID NO: 119172 - DNA, 17 bp, Arabidopsis thaliana
gtacggtttttttgcca

SEQ ID NO: 119173 - DNA, 17 bp, Arabidopsis thaliana
gtacgtaaacgcggatt

SEQ ID NO: 119174 - DNA, 17 bp, Arabidopsis thaliana
gtacgtaaagacccaag

SEQ ID NO: 119175 - DNA, 17 bp, Arabidopsis thaliana
gtacgtaagccgattct

SEQ ID NO: 119176 - DNA, 17 bp, Arabidopsis thaliana
gtacgtaagtgactgtg

SEQ ID NO: 119177 - DNA, 17 bp, Arabidopsis thaliana
gtacgtaataaaagtgg

SEQ ID NO: 119178 - DNA, 17 bp, Arabidopsis thaliana
gtacgtaatctctcagg

SEQ ID NO: 119179 - DNA, 17 bp, Arabidopsis thaliana
gtacgtaatgcaactaa

SEQ ID NO: 119180 - DNA, 17 bp, Arabidopsis thaliana
gtacgtaattcgctgag

SEQ ID NO: 119181 - DNA, 17 bp, Arabidopsis thaliana
gtacgtacaaacccggt

SEQ ID NO: 119182 - DNA, 17 bp, Arabidopsis thaliana
gtacgtacaaatgcggt

SEQ ID NO: 119183 - DNA, 17 bp, Arabidopsis thaliana
gtacgtacagacccggg

SEQ ID NO: 119184 - DNA, 17 bp, Arabidopsis thaliana
gtacgtacccgaaaccg

SEQ ID NO: 119185 - DNA, 17 bp, Arabidopsis thaliana
gtacgtacctgtcggaa

SEQ ID NO: 119186 - DNA, 17 bp, Arabidopsis thaliana
gtacgtacgaacacgcc

SEQ ID NO: 119187 - DNA, 17 bp, Arabidopsis thaliana
gtacgtacgattcaact

SEQ ID NO: 119188 - DNA, 17 bp, Arabidopsis thaliana
gtacgtactaactgcag

SEQ ID NO: 119189 - DNA, 17 bp, Arabidopsis thaliana
gtacgtactaagggatt

SEQ ID NO: 119190 - DNA, 17 bp, Arabidopsis thaliana
gtacgtactcgactgca

SEQ ID NO: 119191 - DNA, 17 bp, Arabidopsis thaliana
gtacgtactcggttgac

SEQ ID NO: 119192 - DNA, 17 bp, Arabidopsis thaliana
gtacgtactttttcggg

SEQ ID NO: 119193 - DNA, 17 bp, Arabidopsis thaliana
gtacgtagaaacctgcg

SEQ ID NO: 119194 - DNA, 17 bp, Arabidopsis thaliana
gtacgtagacgcaatgt

SEQ ID NO: 119195 - DNA, 17 bp, Arabidopsis thaliana
gtacgtagatacctctt

SEQ ID NO: 119196 - DNA, 17 bp, Arabidopsis thaliana
gtacgtagccaaatgcc

SEQ ID NO: 119197 - DNA, 17 bp, Arabidopsis thaliana
gtacgtagcggttgtta

SEQ ID NO: 119198 - DNA, 17 bp, Arabidopsis thaliana
gtacgtaggaacctgcg

SEQ ID NO: 119199 - DNA, 17 bp, Arabidopsis thaliana
gtacgtaggaagcttgt

SEQ ID NO: 119200 - DNA, 17 bp, Arabidopsis thaliana
gtacgtaggcagccaag

SEQ ID NO: 119201 - DNA, 17 bp, Arabidopsis thaliana
gtacgtaggtgaacctg

SEQ ID NO: 119202 - DNA, 17 bp, Arabidopsis thaliana
gtacgtagttccatcct

SEQ ID NO: 119203 - DNA, 17 bp, Arabidopsis thaliana
gtacgtatctgatggcg

SEQ ID NO: 119204 - DNA, 17 bp, Arabidopsis thaliana
gtacgtatctggccaaa

SEQ ID NO: 119205 - DNA, 17 bp, Arabidopsis thaliana
gtacgtatgttccaagg

SEQ ID NO: 119206 - DNA, 17 bp, Arabidopsis thaliana
gtacgtattcagatttg

SEQ ID NO: 119207 - DNA, 17 bp, Arabidopsis thaliana
gtacgtattttgactgc

SEQ ID NO: 119208 - DNA, 17 bp, Arabidopsis thaliana
gtacgtattttgcacct

SEQ ID NO: 119209 - DNA, 17 bp, Arabidopsis thaliana
gtacgtctcatgcgtcg

SEQ ID NO: 119210 - DNA, 17 bp, Arabidopsis thaliana
gtacgtctgccggggtg

SEQ ID NO: 119211 - DNA, 17 bp, Arabidopsis thaliana
gtacgtctgcctgggtg

SEQ ID NO: 119212 - DNA, 17 bp, Arabidopsis thaliana
gtacgtctgcctgtgtg

SEQ ID NO: 119213 - DNA, 17 bp, Arabidopsis thaliana
gtacgtcttcattcgga

SEQ ID NO: 119214 - DNA, 17 bp, Arabidopsis thaliana
gtacgtgcgggtgagga

SEQ ID NO: 119215 - DNA, 17 bp, Arabidopsis thaliana
gtacgtgtacagttctc

SEQ ID NO: 119216 - DNA, 17 bp, Arabidopsis thaliana
gtacgttcggcggaagc

SEQ ID NO: 119217 - DNA, 17 bp, Arabidopsis thaliana
gtacgttctgataactt

SEQ ID NO: 119218 - DNA, 17 bp, Arabidopsis thaliana
gtacgttgttcgcgtga

SEQ ID NO: 119219 - DNA, 17 bp, Arabidopsis thaliana
gtacgtttccatatgga

SEQ ID NO: 119220 - DNA, 17 bp, Arabidopsis thaliana
gtacgtttgtgccatgg

SEQ ID NO: 119221 - DNA, 17 bp, Arabidopsis thaliana
gtactaaacctcggcgt

SEQ ID NO: 119222 - DNA, 17 bp, Arabidopsis thaliana
gtactaaccgaacttgt

SEQ ID NO: 119223 - DNA, 17 bp, Arabidopsis thaliana
gtactaaccgcacttgt

SEQ ID NO: 119224 - DNA, 17 bp, Arabidopsis thaliana
gtactaacctcagaggc

SEQ ID NO: 119225 - DNA, 17 bp, Arabidopsis thaliana
gtactaacggcagacca

SEQ ID NO: 119226 - DNA, 17 bp, Arabidopsis thaliana
gtactaactgcagacca

SEQ ID NO: 119227 - DNA, 17 bp, Arabidopsis thaliana
gtactaactgcagacct

SEQ ID NO: 119228 - DNA, 17 bp, Arabidopsis thaliana
gtactaagctgatgtgt

SEQ ID NO: 119229 - DNA, 17 bp, Arabidopsis thaliana
gtactaagctgttcatc

SEQ ID NO: 119230 - DNA, 17 bp, Arabidopsis thaliana
gtactacaagttgtggc

SEQ ID NO: 119231 - DNA, 17 bp, Arabidopsis thaliana
gtactacacactgcggt

SEQ ID NO: 119232 - DNA, 17 bp, Arabidopsis thaliana
gtactaccccttgttgg

SEQ ID NO: 119233 - DNA, 17 bp, Arabidopsis thaliana
gtactaccgttacaggc

SEQ ID NO: 119234 - DNA, 17 bp, Arabidopsis thaliana
gtactacgggtgaaatc

SEQ ID NO: 119235 - DNA, 17 bp, Arabidopsis thaliana
gtactacgtcgttgatt

SEQ ID NO: 119236 - DNA, 17 bp, Arabidopsis thaliana
gtactacgtggtggtca

SEQ ID NO: 119237 - DNA, 17 bp, Arabidopsis thaliana
gtactactgccacaacc

SEQ ID NO: 119238 - DNA, 17 bp, Arabidopsis thaliana
gtactactgctcattgg

SEQ ID NO: 119239 - DNA, 17 bp, Arabidopsis thaliana
gtactactgtcattgtc

SEQ ID NO: 119240 - DNA, 17 bp, Arabidopsis thaliana
gtactagatattgaccc

SEQ ID NO: 119241 - DNA, 17 bp, Arabidopsis thaliana
gtactagattctgaccc

SEQ ID NO: 119242 - DNA, 17 bp, Arabidopsis thaliana
gtactagattttatccc

SEQ ID NO: 119243 - DNA, 17 bp, Arabidopsis thaliana
gtactagattttgaccc

SEQ ID NO: 119244 - DNA, 17 bp, Arabidopsis thaliana
gtactagcttggggttg

SEQ ID NO: 119245 - DNA, 17 bp, Arabidopsis thaliana
gtactaggataggtgac

SEQ ID NO: 119246 - DNA, 17 bp, Arabidopsis thaliana
gtactaggatatgatcc

SEQ ID NO: 119247 - DNA, 17 bp, Arabidopsis thaliana
gtactaggatgcgtgac

SEQ ID NO: 119248 - DNA, 17 bp, Arabidopsis thaliana
gtactaggatgggtaac

SEQ ID NO: 119249 - DNA, 17 bp, Arabidopsis thaliana
gtactaggatgggtcac

SEQ ID NO: 119250 - DNA, 17 bp, Arabidopsis thaliana
gtactaggatgggtgac

SEQ ID NO: 119251 - DNA, 17 bp, Arabidopsis thaliana
gtactaggatgggtgcc

SEQ ID NO: 119252 - DNA, 17 bp, Arabidopsis thaliana
gtactaggatgggtgtc

SEQ ID NO: 119253 - DNA, 17 bp, Arabidopsis thaliana
gtactaggatgggttac

SEQ ID NO: 119254 - DNA, 17 bp, Arabidopsis thaliana
gtactagtctactagat

SEQ ID NO: 119255 - DNA, 17 bp, Arabidopsis thaliana
gtactatccgtgggtac

SEQ ID NO: 119256 - DNA, 17 bp, Arabidopsis thaliana
gtactatggacgggatg

SEQ ID NO: 119257 - DNA, 17 bp, Arabidopsis thaliana
gtactatggctttcaac

SEQ ID NO: 119258 - DNA, 17 bp, Arabidopsis thaliana
gtactatgggtacactg

SEQ ID NO: 119259 - DNA, 17 bp, Arabidopsis thaliana
gtactatggtcctgttt

SEQ ID NO: 119260 - DNA, 17 bp, Arabidopsis thaliana
gtactattagctcagtg

SEQ ID NO: 119261 - DNA, 17 bp, Arabidopsis thaliana
gtactattctcgtccga

SEQ ID NO: 119262 - DNA, 17 bp, Arabidopsis thaliana
gtactatttcggtgcgt

SEQ ID NO: 119263 - DNA, 17 bp, Arabidopsis thaliana
gtactatttgaagtgca

SEQ ID NO: 119264 - DNA, 17 bp, Arabidopsis thaliana
gtactcaagtccccccc

SEQ ID NO: 119265 - DNA, 17 bp, Arabidopsis thaliana
gtactcaagtttgcgcc

SEQ ID NO: 119266 - DNA, 17 bp, Arabidopsis thaliana
gtactcactttcataca

SEQ ID NO: 119267 - DNA, 17 bp, Arabidopsis thaliana
gtactcagcaggcatga

SEQ ID NO: 119268 - DNA, 17 bp, Arabidopsis thaliana
gtactcaggatcacgtg

SEQ ID NO: 119269 - DNA, 17 bp, Arabidopsis thaliana
gtactcaggatctcgtg

SEQ ID NO: 119270 - DNA, 17 bp, Arabidopsis thaliana
gtactcaggccgtctgt

SEQ ID NO: 119271 - DNA, 17 bp, Arabidopsis thaliana
gtactcataaccgcatc

SEQ ID NO: 119272 - DNA, 17 bp, Arabidopsis thaliana
gtactccattcttcttg

SEQ ID NO: 119273 - DNA, 17 bp, Arabidopsis thaliana
gtactccgagatgattt

SEQ ID NO: 119274 - DNA, 17 bp, Arabidopsis thaliana
gtactccttcttgtcga

SEQ ID NO: 119275 - DNA, 17 bp, Arabidopsis thaliana
gtactccttcttgtcgt

SEQ ID NO: 119276 - DNA, 17 bp, Arabidopsis thaliana
gtactccttcttgtcta

SEQ ID NO: 119277 - DNA, 17 bp, Arabidopsis thaliana
gtactcgaccaacagga

SEQ ID NO: 119278 - DNA, 17 bp, Arabidopsis thaliana
gtactcgaccacctagt

SEQ ID NO: 119279 - DNA, 17 bp, Arabidopsis thaliana
gtactcgacctattcaa

SEQ ID NO: 119280 - DNA, 17 bp, Arabidopsis thaliana
gtactcgacctgtttag

SEQ ID NO: 119281 - DNA, 17 bp, Arabidopsis thaliana
gtactcgactgcacagt

SEQ ID NO: 119282 - DNA, 17 bp, Arabidopsis thaliana
gtactcgactgcagtct

SEQ ID NO: 119283 - DNA, 17 bp, Arabidopsis thaliana
gtactcgagatcatctg

SEQ ID NO: 119284 - DNA, 17 bp, Arabidopsis thaliana
gtactcgagggagtaga

SEQ ID NO: 119285 - DNA, 17 bp, Arabidopsis thaliana
gtactcgagggagtcga

SEQ ID NO: 119286 - DNA, 17 bp, Arabidopsis thaliana
gtactcgatcacagggt

SEQ ID NO: 119287 - DNA, 17 bp, Arabidopsis thaliana
gtactcgatttcgccat

SEQ ID NO: 119288 - DNA, 17 bp, Arabidopsis thaliana
gtactcggaacaactga

SEQ ID NO: 119289 - DNA, 17 bp, Arabidopsis thaliana
gtactcggcccacacca

SEQ ID NO: 119290 - DNA, 17 bp, Arabidopsis thaliana
gtactcggcctgtcatc

SEQ ID NO: 119291 - DNA, 17 bp, Arabidopsis thaliana
gtactcggttgaccggt

SEQ ID NO: 119292 - DNA, 17 bp, Arabidopsis thaliana
gtactcggttgcacatt

SEQ ID NO: 119293 - DNA, 17 bp, Arabidopsis thaliana
gtactcgtcatcacccc

SEQ ID NO: 119294 - DNA, 17 bp, Arabidopsis thaliana
gtactcgtctgggcaat

SEQ ID NO: 119295 - DNA, 17 bp, Arabidopsis thaliana
gtactcgtggttcggcg

SEQ ID NO: 119296 - DNA, 17 bp, Arabidopsis thaliana
gtactctatactgtgcg

SEQ ID NO: 119297 - DNA, 17 bp, Arabidopsis thaliana
gtactctatggttcggt

SEQ ID NO: 119298 - DNA, 17 bp, Arabidopsis thaliana
gtactctctgcagattt

SEQ ID NO: 119299 - DNA, 17 bp, Arabidopsis thaliana
gtactctgacaccatag

SEQ ID NO: 119300 - DNA, 17 bp, Arabidopsis thaliana
gtactctgacaccatgg

SEQ ID NO: 119301 - DNA, 17 bp, Arabidopsis thaliana
gtactctgatagccgca

SEQ ID NO: 119302 - DNA, 17 bp, Arabidopsis thaliana
gtactcttaccaaacgg

SEQ ID NO: 119303 - DNA, 17 bp, Arabidopsis thaliana
gtactcttcgcgcctct

SEQ ID NO: 119304 - DNA, 17 bp, Arabidopsis thaliana
gtactgaaaggacagcc

SEQ ID NO: 119305 - DNA, 17 bp, Arabidopsis thaliana
gtactgaaaggacagtc

SEQ ID NO: 119306 - DNA, 17 bp, Arabidopsis thaliana
gtactgaaccaatggtg

SEQ ID NO: 119307 - DNA, 17 bp, Arabidopsis thaliana
gtactgaccagggttcg

SEQ ID NO: 119308 - DNA, 17 bp, Arabidopsis thaliana
gtactgacctctgttag

SEQ ID NO: 119309 - DNA, 17 bp, Arabidopsis thaliana
gtactgactcaacatga

SEQ ID NO: 119310 - DNA, 17 bp, Arabidopsis thaliana
gtactgagagctgatta

SEQ ID NO: 119311 - DNA, 17 bp, Arabidopsis thaliana
gtactgagctgttcatc

SEQ ID NO: 119312 - DNA, 17 bp, Arabidopsis thaliana
gtactgatgatgctgac

SEQ ID NO: 119313 - DNA, 17 bp, Arabidopsis thaliana
gtactgcacggtcataa

SEQ ID NO: 119314 - DNA, 17 bp, Arabidopsis thaliana
gtactgcaggaggtttg

SEQ ID NO: 119315 - DNA, 17 bp, Arabidopsis thaliana
gtactgcggcttggcca

SEQ ID NO: 119316 - DNA, 17 bp, Arabidopsis thaliana
gtactggaaggtgcggc

SEQ ID NO: 119317 - DNA, 17 bp, Arabidopsis thaliana
gtactggactgcttgga

SEQ ID NO: 119318 - DNA, 17 bp, Arabidopsis thaliana
gtactggccgttggttt

SEQ ID NO: 119319 - DNA, 17 bp, Arabidopsis thaliana
gtactgggatgggtgac

SEQ ID NO: 119320 - DNA, 17 bp, Arabidopsis thaliana
gtactggtccgaaaggg

SEQ ID NO: 119321 - DNA, 17 bp, Arabidopsis thaliana
gtactgtactgtgactc

SEQ ID NO: 119322 - DNA, 17 bp, Arabidopsis thaliana
gtactgtagacggcggg

SEQ ID NO: 119323 - DNA, 17 bp, Arabidopsis thaliana
gtactgtgactcaaggt

SEQ ID NO: 119324 - DNA, 17 bp, Arabidopsis thaliana
gtactgtgccatctatc

SEQ ID NO: 119325 - DNA, 17 bp, Arabidopsis thaliana
gtactgtgtactcgatc

SEQ ID NO: 119326 - DNA, 17 bp, Arabidopsis thaliana
gtactgttgcggtgcag

SEQ ID NO: 119327 - DNA, 17 bp, Arabidopsis thaliana
gtactgttgcggtgcgg

SEQ ID NO: 119328 - DNA, 17 bp, Arabidopsis thaliana
gtactgttggcctagtg

SEQ ID NO: 119329 - DNA, 17 bp, Arabidopsis thaliana
gtactgttggtcccaaa

SEQ ID NO: 119330 - DNA, 17 bp, Arabidopsis thaliana
gtacttaaaactgcagc

SEQ ID NO: 119331 - DNA, 17 bp, Arabidopsis thaliana
gtacttaaaccgcaatc

SEQ ID NO: 119332 - DNA, 17 bp, Arabidopsis thaliana
gtacttaaaggtcaaaa

SEQ ID NO: 119333 - DNA, 17 bp, Arabidopsis thaliana
gtacttaaatggctttg

SEQ ID NO: 119334 - DNA, 17 bp, Arabidopsis thaliana
gtacttacaccagttgg

SEQ ID NO: 119335 - DNA, 17 bp, Arabidopsis thaliana
gtacttacagtgaggat

SEQ ID NO: 119336 - DNA, 17 bp, Arabidopsis thaliana
gtacttagaccagtggg

SEQ ID NO: 119337 - DNA, 17 bp, Arabidopsis thaliana
gtacttagaggtccaaa

SEQ ID NO: 119338 - DNA, 17 bp, Arabidopsis thaliana
gtacttagcttggagct

SEQ ID NO: 119339 - DNA, 17 bp, Arabidopsis thaliana
gtacttaggggtgtcaa

SEQ ID NO: 119340 - DNA, 17 bp, Arabidopsis thaliana
gtacttcaccctgttca

SEQ ID NO: 119341 - DNA, 17 bp, Arabidopsis thaliana
gtacttcagattggact

SEQ ID NO: 119342 - DNA, 17 bp, Arabidopsis thaliana
gtacttccgaccgcatg

SEQ ID NO: 119343 - DNA, 17 bp, Arabidopsis thaliana
gtacttccttggttcca

SEQ ID NO: 119344 - DNA, 17 bp, Arabidopsis thaliana
gtacttcgcagttcgct

SEQ ID NO: 119345 - DNA, 17 bp, Arabidopsis thaliana
gtacttcggctaaacca

SEQ ID NO: 119346 - DNA, 17 bp, Arabidopsis thaliana
gtacttcggtattgtgg

SEQ ID NO: 119347 - DNA, 17 bp, Arabidopsis thaliana
gtacttcggtgcgtttt

SEQ ID NO: 119348 - DNA, 17 bp, Arabidopsis thaliana
gtacttctaagttcggt

SEQ ID NO: 119349 - DNA, 17 bp, Arabidopsis thaliana
gtacttctccccgaagg

SEQ ID NO: 119350 - DNA, 17 bp, Arabidopsis thaliana
gtacttctcgtggggaa

SEQ ID NO: 119351 - DNA, 17 bp, Arabidopsis thaliana
gtacttctctcaacggt

SEQ ID NO: 119352 - DNA, 17 bp, Arabidopsis thaliana
gtacttgaccgagatca

SEQ ID NO: 119353 - DNA, 17 bp, Arabidopsis thaliana
gtacttgaccggtttag

SEQ ID NO: 119354 - DNA, 17 bp, Arabidopsis thaliana
gtacttgagatgactga

SEQ ID NO: 119355 - DNA, 17 bp, Arabidopsis thaliana
gtacttgagcatgttta

SEQ ID NO: 119356 - DNA, 17 bp, Arabidopsis thaliana
gtacttgctcacccaga

SEQ ID NO: 119357 - DNA, 17 bp, Arabidopsis thaliana
gtacttgctctagtgtc

SEQ ID NO: 119358 - DNA, 17 bp, Arabidopsis thaliana
gtacttggaccgcaggg

SEQ ID NO: 119359 - DNA, 17 bp, Arabidopsis thaliana
gtacttggtgcaggtcg

SEQ ID NO: 119360 - DNA, 17 bp, Arabidopsis thaliana
gtacttgtcgaaaccgt

SEQ ID NO: 119361 - DNA, 17 bp, Arabidopsis thaliana
gtacttgtctgccggag

SEQ ID NO: 119362 - DNA, 17 bp, Arabidopsis thaliana
gtacttgtctgccggcg

SEQ ID NO: 119363 - DNA, 17 bp, Arabidopsis thaliana
gtacttgttcgctatcg

SEQ ID NO: 119364 - DNA, 17 bp, Arabidopsis thaliana
gtacttgttgcggttgt

SEQ ID NO: 119365 - DNA, 17 bp, Arabidopsis thaliana
gtactttatccgcagtt

SEQ ID NO: 119366 - DNA, 17 bp, Arabidopsis thaliana
gtactttcggttctccg

SEQ ID NO: 119367 - DNA, 17 bp, Arabidopsis thaliana
gtactttgaaacaagga

SEQ ID NO: 119368 - DNA, 17 bp, Arabidopsis thaliana
gtactttgggcaagctt

SEQ ID NO: 119369 - DNA, 17 bp, Arabidopsis thaliana
gtactttgtaggtgcgg

SEQ ID NO: 119370 - DNA, 17 bp, Arabidopsis thaliana
gtacttttcgagccttt

SEQ ID NO: 119371 - DNA, 17 bp, Arabidopsis thaliana
gtactttttcctgggtg

SEQ ID NO: 119372 - DNA, 17 bp, Arabidopsis thaliana
gtactttttcggacatt

SEQ ID NO: 119373 - DNA, 17 bp, Arabidopsis thaliana
gtactttttcgggcatt

SEQ ID NO: 119374 - DNA, 17 bp, Arabidopsis thaliana
gtactttttcgggcttt

SEQ ID NO: 119375 - DNA, 17 bp, Arabidopsis thaliana
gtacttttttggcattt

SEQ ID NO: 119376 - DNA, 17 bp, Arabidopsis thaliana
gtacttttttgggcatt

SEQ ID NO: 119377 - DNA, 17 bp, Arabidopsis thaliana
gtacttttttgggcctt

SEQ ID NO: 119378 - DNA, 17 bp, Arabidopsis thaliana
gtagaaaaccatagacc

SEQ ID NO: 119379 - DNA, 17 bp, Arabidopsis thaliana
gtagaaaactcaccact

SEQ ID NO: 119380 - DNA, 17 bp, Arabidopsis thaliana
gtagaaaccgacgcttc

SEQ ID NO: 119381 - DNA, 17 bp, Arabidopsis thaliana
gtagaaacctgcggaag

SEQ ID NO: 119382 - DNA, 17 bp, Arabidopsis thaliana
gtagaaacgcaccaacc

SEQ ID NO: 119383 - DNA, 17 bp, Arabidopsis thaliana
gtagaaactgaccagaa

SEQ ID NO: 119384 - DNA, 17 bp, Arabidopsis thaliana
gtagaaaggcatgtgcc

SEQ ID NO: 119385 - DNA, 17 bp, Arabidopsis thaliana
gtagaaaggtccaacgc

SEQ ID NO: 119386 - DNA, 17 bp, Arabidopsis thaliana
gtagaaaggtccaacgg

SEQ ID NO: 119387 - DNA, 17 bp, Arabidopsis thaliana
gtagaaatggaccacca

SEQ ID NO: 119388 - DNA, 17 bp, Arabidopsis thaliana
gtagaacactctcacca

SEQ ID NO: 119389 - DNA, 17 bp, Arabidopsis thaliana
gtagaaccccgctctac

SEQ ID NO: 119390 - DNA, 17 bp, Arabidopsis thaliana
gtagaaccgcttgatcc

SEQ ID NO: 119391 - DNA, 17 bp, Arabidopsis thaliana
gtagaaccttgggatgg

SEQ ID NO: 119392 - DNA, 17 bp, Arabidopsis thaliana
gtagaacgccggatctg

SEQ ID NO: 119393 - DNA, 17 bp, Arabidopsis thaliana
gtagaactcattcggat

SEQ ID NO: 119394 - DNA, 17 bp, Arabidopsis thaliana
gtagaacttttagacca

SEQ ID NO: 119395 - DNA, 17 bp, Arabidopsis thaliana
gtagaagaccatcttgc

SEQ ID NO: 119396 - DNA, 17 bp, Arabidopsis thaliana
gtagaagccgtgactgt

SEQ ID NO: 119397 - DNA, 17 bp, Arabidopsis thaliana
gtagaaggaccgccgga

SEQ ID NO: 119398 - DNA, 17 bp, Arabidopsis thaliana
gtagaaggagatcctgt

SEQ ID NO: 119399 - DNA, 17 bp, Arabidopsis thaliana
gtagaagggaatacatg

SEQ ID NO: 119400 - DNA, 17 bp, Arabidopsis thaliana
gtagaagtaggtagcgg

SEQ ID NO: 119401 - DNA, 17 bp, Arabidopsis thaliana
gtagaagttggaagcgc

SEQ ID NO: 119402 - DNA, 17 bp, Arabidopsis thaliana
gtagaatcctggcgaac

SEQ ID NO: 119403 - DNA, 17 bp, Arabidopsis thaliana
gtagaatcctttgaaga

SEQ ID NO: 119404 - DNA, 17 bp, Arabidopsis thaliana
gtagaatcctttgcaga

SEQ ID NO: 119405 - DNA, 17 bp, Arabidopsis thaliana
gtagaatcctttgcagc

SEQ ID NO: 119406 - DNA, 17 bp, Arabidopsis thaliana
gtagaatcttgacgaac

SEQ ID NO: 119407 - DNA, 17 bp, Arabidopsis thaliana
gtagaatgaccggttat

SEQ ID NO: 119408 - DNA, 17 bp, Arabidopsis thaliana
gtagaatgattaaaacc

SEQ ID NO: 119409 - DNA, 17 bp, Arabidopsis thaliana
gtagaatgtcgaacccg

SEQ ID NO: 119410 - DNA, 17 bp, Arabidopsis thaliana
gtagacaccacccatgt

SEQ ID NO: 119411 - DNA, 17 bp, Arabidopsis thaliana
gtagacactattcctcc

SEQ ID NO: 119412 - DNA, 17 bp, Arabidopsis thaliana
gtagacactttgggggt

SEQ ID NO: 119413 - DNA, 17 bp, Arabidopsis thaliana
gtagacagtttctatgg

SEQ ID NO: 119414 - DNA, 17 bp, Arabidopsis thaliana
gtagacatccttctcga

SEQ ID NO: 119415 - DNA, 17 bp, Arabidopsis thaliana
gtagacatcgtagatcg

SEQ ID NO: 119416 - DNA, 17 bp, Arabidopsis thaliana
gtagaccaactccgccc

SEQ ID NO: 119417 - DNA, 17 bp, Arabidopsis thaliana
gtagaccaaggttggag

SEQ ID NO: 119418 - DNA, 17 bp, Arabidopsis thaliana
gtagaccaggtcactgc

SEQ ID NO: 119419 - DNA, 17 bp, Arabidopsis thaliana
gtagaccattactctgc

SEQ ID NO: 119420 - DNA, 17 bp, Arabidopsis thaliana
gtagaccattttccact

SEQ ID NO: 119421 - DNA, 17 bp, Arabidopsis thaliana
gtagacccagccaaagc

SEQ ID NO: 119422 - DNA, 17 bp, Arabidopsis thaliana
gtagaccctctctatca

SEQ ID NO: 119423 - DNA, 17 bp, Arabidopsis thaliana
gtagaccctgtgcctca

SEQ ID NO: 119424 - DNA, 17 bp, Arabidopsis thaliana
gtagaccgcctctactt

SEQ ID NO: 119425 - DNA, 17 bp, Arabidopsis thaliana
gtagaccggatgtggtt

SEQ ID NO: 119426 - DNA, 17 bp, Arabidopsis thaliana
gtagaccgggattgaag

SEQ ID NO: 119427 - DNA, 17 bp, Arabidopsis thaliana
gtagaccgttcatgcca

SEQ ID NO: 119428 - DNA, 17 bp, Arabidopsis thaliana
gtagacctcacattggg

SEQ ID NO: 119429 - DNA, 17 bp, Arabidopsis thaliana
gtagaccttttctcctt

SEQ ID NO: 119430 - DNA, 17 bp, Arabidopsis thaliana
gtagacgattcaggcat

SEQ ID NO: 119431 - DNA, 17 bp, Arabidopsis thaliana
gtagacgcagatgaagc

SEQ ID NO: 119432 - DNA, 17 bp, Arabidopsis thaliana
gtagacggatcttacgc

SEQ ID NO: 119433 - DNA, 17 bp, Arabidopsis thaliana
gtagacggcgggtggtt

SEQ ID NO: 119434 - DNA, 17 bp, Arabidopsis thaliana
gtagacgtaattggctg

SEQ ID NO: 119435 - DNA, 17 bp, Arabidopsis thaliana
gtagacgtcttccgtcc

SEQ ID NO: 119436 - DNA, 17 bp, Arabidopsis thaliana
gtagacgtgccggagtg

SEQ ID NO: 119437 - DNA, 17 bp, Arabidopsis thaliana
gtagactaaactggcgc

SEQ ID NO: 119438 - DNA, 17 bp, Arabidopsis thaliana
gtagactagattaaccc

SEQ ID NO: 119439 - DNA, 17 bp, Arabidopsis thaliana
gtagactattgtccaca

SEQ ID NO: 119440 - DNA, 17 bp, Arabidopsis thaliana
gtagactctcggcaacg

SEQ ID NO: 119441 - DNA, 17 bp, Arabidopsis thaliana
gtagactgttggaaact

SEQ ID NO: 119442 - DNA, 17 bp, Arabidopsis thaliana
gtagacttaggttctgg

SEQ ID NO: 119443 - DNA, 17 bp, Arabidopsis thaliana
gtagacttcatttgcgg

SEQ ID NO: 119444 - DNA, 17 bp, Arabidopsis thaliana
gtagacttctggtttac

SEQ ID NO: 119445 - DNA, 17 bp, Arabidopsis thaliana
gtagacttggtcctgcg

SEQ ID NO: 119446 - DNA, 17 bp, Arabidopsis thaliana
gtagacttgtacatcca

SEQ ID NO: 119447 - DNA, 17 bp, Arabidopsis thaliana
gtagactttagccatgg

SEQ ID NO: 119448 - DNA, 17 bp, Arabidopsis thaliana
gtagactttcgggcttg

SEQ ID NO: 119449 - DNA, 17 bp, Arabidopsis thaliana
gtagactttctgtagtg

SEQ ID NO: 119450 - DNA, 17 bp, Arabidopsis thaliana
gtagagaatctgtgcag

SEQ ID NO: 119451 - DNA, 17 bp, Arabidopsis thaliana
gtagagaccaaaggttg

SEQ ID NO: 119452 - DNA, 17 bp, Arabidopsis thaliana
gtagagacggagtaatg

SEQ ID NO: 119453 - DNA, 17 bp, Arabidopsis thaliana
gtagagactcctctgcg

SEQ ID NO: 119454 - DNA, 17 bp, Arabidopsis thaliana
gtagagactttcgctga

SEQ ID NO: 119455 - DNA, 17 bp, Arabidopsis thaliana
gtagagagaggtggtat

SEQ ID NO: 119456 - DNA, 17 bp, Arabidopsis thaliana
gtagagatgtttccacg

SEQ ID NO: 119457 - DNA, 17 bp, Arabidopsis thaliana
gtagagcaatcgactgc

SEQ ID NO: 119458 - DNA, 17 bp, Arabidopsis thaliana
gtagagccacggagtcc

SEQ ID NO: 119459 - DNA, 17 bp, Arabidopsis thaliana
gtagagccgcccctgct

SEQ ID NO: 119460 - DNA, 17 bp, Arabidopsis thaliana
gtagagcgtatgatgtc

SEQ ID NO: 119461 - DNA, 17 bp, Arabidopsis thaliana
gtagagctatgtgtcgc

SEQ ID NO: 119462 - DNA, 17 bp, Arabidopsis thaliana
gtagagctctggtttgc

SEQ ID NO: 119463 - DNA, 17 bp, Arabidopsis thaliana
gtagagctgtgtgtcgc

SEQ ID NO: 119464 - DNA, 17 bp, Arabidopsis thaliana
gtagagcttctctggct

SEQ ID NO: 119465 - DNA, 17 bp, Arabidopsis thaliana
gtagaggaatgcgaaaa

SEQ ID NO: 119466 - DNA, 17 bp, Arabidopsis thaliana
gtagaggacatcactac

SEQ ID NO: 119467 - DNA, 17 bp, Arabidopsis thaliana
gtagaggacttactcga

SEQ ID NO: 119468 - DNA, 17 bp, Arabidopsis thaliana
gtagagggcaaaagcgc

SEQ ID NO: 119469 - DNA, 17 bp, Arabidopsis thaliana
gtagaggttctcaagtt

SEQ ID NO: 119470 - DNA, 17 bp, Arabidopsis thaliana
gtagagtagtttcgttt

SEQ ID NO: 119471 - DNA, 17 bp, Arabidopsis thaliana
gtagagtgtcgcctgat

SEQ ID NO: 119472 - DNA, 17 bp, Arabidopsis thaliana
gtagagttctctcggaa

SEQ ID NO: 119473 - DNA, 17 bp, Arabidopsis thaliana
gtagagttggtcacctt

SEQ ID NO: 119474 - DNA, 17 bp, Arabidopsis thaliana
gtagagttgtactgtcc

SEQ ID NO: 119475 - DNA, 17 bp, Arabidopsis thaliana
gtagataactccagcaa

SEQ ID NO: 119476 - DNA, 17 bp, Arabidopsis thaliana
gtagataactccatcaa

SEQ ID NO: 119477 - DNA, 17 bp, Arabidopsis thaliana
gtagataagaatgtggg

SEQ ID NO: 119478 - DNA, 17 bp, Arabidopsis thaliana
gtagataagccgcttga

SEQ ID NO: 119479 - DNA, 17 bp, Arabidopsis thaliana
gtagataccactgcttt

SEQ ID NO: 119480 - DNA, 17 bp, Arabidopsis thaliana
gtagataccctttgttg

SEQ ID NO: 119481 - DNA, 17 bp, Arabidopsis thaliana
gtagatacctcttgttg

SEQ ID NO: 119482 - DNA, 17 bp, Arabidopsis thaliana
gtagatagaccatattt

SEQ ID NO: 119483 - DNA, 17 bp, Arabidopsis thaliana
gtagatatcctgcatac

SEQ ID NO: 119484 - DNA, 17 bp, Arabidopsis thaliana
gtagatatgtggtgagc

SEQ ID NO: 119485 - DNA, 17 bp, Arabidopsis thaliana
gtagatcacaacatcag

SEQ ID NO: 119486 - DNA, 17 bp, Arabidopsis thaliana
gtagatcacaatggtgt

SEQ ID NO: 119487 - DNA, 17 bp, Arabidopsis thaliana
gtagatcgagatttaca

SEQ ID NO: 119488 - DNA, 17 bp, Arabidopsis thaliana
gtagatcgagatttacg

SEQ ID NO: 119489 - DNA, 17 bp, Arabidopsis thaliana
gtagatcgtctttttcc

SEQ ID NO: 119490 - DNA, 17 bp, Arabidopsis thaliana
gtagatctttaggtcgc

SEQ ID NO: 119491 - DNA, 17 bp, Arabidopsis thaliana
gtagatgaacctgcgga

SEQ ID NO: 119492 - DNA, 17 bp, Arabidopsis thaliana
gtagatgaataggagga

SEQ ID NO: 119493 - DNA, 17 bp, Arabidopsis thaliana
gtagatgatccgctgcg

SEQ ID NO: 119494 - DNA, 17 bp, Arabidopsis thaliana
gtagatggatcagtcgc

SEQ ID NO: 119495 - DNA, 17 bp, Arabidopsis thaliana
gtagatggatcatcgtc

SEQ ID NO: 119496 - DNA, 17 bp, Arabidopsis thaliana
gtagatggatcatctac

SEQ ID NO: 119497 - DNA, 17 bp, Arabidopsis thaliana
gtagatggatccagagg

SEQ ID NO: 119498 - DNA, 17 bp, Arabidopsis thaliana
gtagatggatccatcct

SEQ ID NO: 119499 - DNA, 17 bp, Arabidopsis thaliana
gtagatggatcccgacg

SEQ ID NO: 119500 - DNA, 17 bp, Arabidopsis thaliana
gtagatggatcctaagt

SEQ ID NO: 119501 - DNA, 17 bp, Arabidopsis thaliana
gtagatggatcctagtc

SEQ ID NO: 119502 - DNA, 17 bp, Arabidopsis thaliana
gtagatggatccttagt

SEQ ID NO: 119503 - DNA, 17 bp, Arabidopsis thaliana
gtagatggatcctttgg

SEQ ID NO: 119504 - DNA, 17 bp, Arabidopsis thaliana
gtagatggatcgatgga

SEQ ID NO: 119505 - DNA, 17 bp, Arabidopsis thaliana
gtagatggatcggatct

SEQ ID NO: 119506 - DNA, 17 bp, Arabidopsis thaliana
gtagatggatcggcgcc

SEQ ID NO: 119507 - DNA, 17 bp, Arabidopsis thaliana
gtagatggatcgggcat

SEQ ID NO: 119508 - DNA, 17 bp, Arabidopsis thaliana
gtagatggatcgtcacc

SEQ ID NO: 119509 - DNA, 17 bp, Arabidopsis thaliana
gtagatggatcgtcgat

SEQ ID NO: 119510 - DNA, 17 bp, Arabidopsis thaliana
gtagatggatcgtcgca

SEQ ID NO: 119511 - DNA, 17 bp, Arabidopsis thaliana
gtagatggatcgtttca

SEQ ID NO: 119512 - DNA, 17 bp, Arabidopsis thaliana
gtagatggatctcgcaa

SEQ ID NO: 119513 - DNA, 17 bp, Arabidopsis thaliana
gtagatggatctcgcat

SEQ ID NO: 119514 - DNA, 17 bp, Arabidopsis thaliana
gtagatggatcttaggc

SEQ ID NO: 119515 - DNA, 17 bp, Arabidopsis thaliana
gtagatggatcttagtc

SEQ ID NO: 119516 - DNA, 17 bp, Arabidopsis thaliana
gtagatggatcttcttc

SEQ ID NO: 119517 - DNA, 17 bp, Arabidopsis thaliana
gtagatggatggtctta

SEQ ID NO: 119518 - DNA, 17 bp, Arabidopsis thaliana
gtagatggatgtaacta

SEQ ID NO: 119519 - DNA, 17 bp, Arabidopsis thaliana
gtagatggtccgttgcg

SEQ ID NO: 119520 - DNA, 17 bp, Arabidopsis thaliana
gtagatggtttgtccgc

SEQ ID NO: 119521 - DNA, 17 bp, Arabidopsis thaliana
gtagatgtcaagccttc

SEQ ID NO: 119522 - DNA, 17 bp, Arabidopsis thaliana
gtagatgtcacagatac

SEQ ID NO: 119523 - DNA, 17 bp, Arabidopsis thaliana
gtagatgtcacaggttc

SEQ ID NO: 119524 - DNA, 17 bp, Arabidopsis thaliana
gtagatgtgcttgaaac

SEQ ID NO: 119525 - DNA, 17 bp, Arabidopsis thaliana
gtagatgttccagtagc

SEQ ID NO: 119526 - DNA, 17 bp, Arabidopsis thaliana
gtagattaccatcacga

SEQ ID NO: 119527 - DNA, 17 bp, Arabidopsis thaliana
gtagattacgggtttcg

SEQ ID NO: 119528 - DNA, 17 bp, Arabidopsis thaliana
gtagattatgggcttag

SEQ ID NO: 119529 - DNA, 17 bp, Arabidopsis thaliana
gtagattccctggagta

SEQ ID NO: 119530 - DNA, 17 bp, Arabidopsis thaliana
gtagattgcccctttgc

SEQ ID NO: 119531 - DNA, 17 bp, Arabidopsis thaliana
gtagatttcgtggacac

SEQ ID NO: 119532 - DNA, 17 bp, Arabidopsis thaliana
gtagatttgacagtctc

SEQ ID NO: 119533 - DNA, 17 bp, Arabidopsis thaliana
gtagattttgccatttt

SEQ ID NO: 119534 - DNA, 17 bp, Arabidopsis thaliana
gtagattttgtaagagt

SEQ ID NO: 119535 - DNA, 17 bp, Arabidopsis thaliana
gtagcaacccgccccgt

SEQ ID NO: 119536 - DNA, 17 bp, Arabidopsis thaliana
gtagcaactcaatcacc

SEQ ID NO: 119537 - DNA, 17 bp, Arabidopsis thaliana
gtagcaaggaaagccaa

SEQ ID NO: 119538 - DNA, 17 bp, Arabidopsis thaliana
gtagcaagtccatcgac

SEQ ID NO: 119539 - DNA, 17 bp, Arabidopsis thaliana
gtagcacactgccgcaa

SEQ ID NO: 119540 - DNA, 17 bp, Arabidopsis thaliana
gtagcacactgtcgcga

SEQ ID NO: 119541 - DNA, 17 bp, Arabidopsis thaliana
gtagcacactttggcac

SEQ ID NO: 119542 - DNA, 17 bp, Arabidopsis thaliana
gtagcacccctcaactg

SEQ ID NO: 119543 - DNA, 17 bp, Arabidopsis thaliana
gtagcacctgctggtta

SEQ ID NO: 119544 - DNA, 17 bp, Arabidopsis thaliana
gtagcacgtctgcctgg

SEQ ID NO: 119545 - DNA, 17 bp, Arabidopsis thaliana
gtagcacgtctgggtgt

SEQ ID NO: 119546 - DNA, 17 bp, Arabidopsis thaliana
gtagcactaggatgggt

SEQ ID NO: 119547 - DNA, 17 bp, Arabidopsis thaliana
gtagcagaaggtgttga

SEQ ID NO: 119548 - DNA, 17 bp, Arabidopsis thaliana
gtagcagccaccgcttc

SEQ ID NO: 119549 - DNA, 17 bp, Arabidopsis thaliana
gtagcaggcgacgaggc

SEQ ID NO: 119550 - DNA, 17 bp, Arabidopsis thaliana
gtagcagtaggtagcgc

SEQ ID NO: 119551 - DNA, 17 bp, Arabidopsis thaliana
gtagcagtattgacaga

SEQ ID NO: 119552 - DNA, 17 bp, Arabidopsis thaliana
gtagcagtatttacaga

SEQ ID NO: 119553 - DNA, 17 bp, Arabidopsis thaliana
gtagcagtgacctaatt

SEQ ID NO: 119554 - DNA, 17 bp, Arabidopsis thaliana
gtagcagttatctccgg

SEQ ID NO: 119555 - DNA, 17 bp, Arabidopsis thaliana
gtagcagttctacacga

SEQ ID NO: 119556 - DNA, 17 bp, Arabidopsis thaliana
gtagcagtttggacatc

SEQ ID NO: 119557 - DNA, 17 bp, Arabidopsis thaliana
gtagcattttcgtgatt

SEQ ID NO: 119558 - DNA, 17 bp, Arabidopsis thaliana
gtagccaaagctctcga

SEQ ID NO: 119559 - DNA, 17 bp, Arabidopsis thaliana
gtagccaaagtccatat

SEQ ID NO: 119560 - DNA, 17 bp, Arabidopsis thaliana
gtagccaaatgcctcgt

SEQ ID NO: 119561 - DNA, 17 bp, Arabidopsis thaliana
gtagccaaccaacttag

SEQ ID NO: 119562 - DNA, 17 bp, Arabidopsis thaliana
gtagccaaggatgactt

SEQ ID NO: 119563 - DNA, 17 bp, Arabidopsis thaliana
gtagccacctgggactg

SEQ ID NO: 119564 - DNA, 17 bp, Arabidopsis thaliana
gtagccaggagactagg

SEQ ID NO: 119565 - DNA, 17 bp, Arabidopsis thaliana
gtagccaggttcgacat

SEQ ID NO: 119566 - DNA, 17 bp, Arabidopsis thaliana
gtagccatatcaggtac

SEQ ID NO: 119567 - DNA, 17 bp, Arabidopsis thaliana
gtagccatctcgaccat

SEQ ID NO: 119568 - DNA, 17 bp, Arabidopsis thaliana
gtagcccctactgtgac

SEQ ID NO: 119569 - DNA, 17 bp, Arabidopsis thaliana
gtagcccgttgtgcggc

SEQ ID NO: 119570 - DNA, 17 bp, Arabidopsis thaliana
gtagccctttgtcgcta

SEQ ID NO: 119571 - DNA, 17 bp, Arabidopsis thaliana
gtagccgaaagcatcac

SEQ ID NO: 119572 - DNA, 17 bp, Arabidopsis thaliana
gtagccgacaagtacta

SEQ ID NO: 119573 - DNA, 17 bp, Arabidopsis thaliana
gtagccgcacttaattt

SEQ ID NO: 119574 - DNA, 17 bp, Arabidopsis thaliana
gtagccgtaactttgct

SEQ ID NO: 119575 - DNA, 17 bp, Arabidopsis thaliana
gtagccgtgacatgacg

SEQ ID NO: 119576 - DNA, 17 bp, Arabidopsis thaliana
gtagccgtttgcaaatg

SEQ ID NO: 119577 - DNA, 17 bp, Arabidopsis thaliana
gtagcctccttaggatc

SEQ ID NO: 119578 - DNA, 17 bp, Arabidopsis thaliana
gtagcctgcgcgatgac

SEQ ID NO: 119579 - DNA, 17 bp, Arabidopsis thaliana
gtagcctggtgttggtc

SEQ ID NO: 119580 - DNA, 17 bp, Arabidopsis thaliana
gtagcctttgatctacc

SEQ ID NO: 119581 - DNA, 17 bp, Arabidopsis thaliana
gtagcgaaatgcgatac

SEQ ID NO: 119582 - DNA, 17 bp, Arabidopsis thaliana
gtagcgaaccgaccgtc

SEQ ID NO: 119583 - DNA, 17 bp, Arabidopsis thaliana
gtagcgacaagcgacga

SEQ ID NO: 119584 - DNA, 17 bp, Arabidopsis thaliana
gtagcgacagtcgccaa

SEQ ID NO: 119585 - DNA, 17 bp, Arabidopsis thaliana
gtagcgacagtcgccag

SEQ ID NO: 119586 - DNA, 17 bp, Arabidopsis thaliana
gtagcgacagtcgccat

SEQ ID NO: 119587 - DNA, 17 bp, Arabidopsis thaliana
gtagcgacagttgccag

SEQ ID NO: 119588 - DNA, 17 bp, Arabidopsis thaliana
gtagcgaccttgtgctt

SEQ ID NO: 119589 - DNA, 17 bp, Arabidopsis thaliana
gtagcgagtaacaattc

SEQ ID NO: 119590 - DNA, 17 bp, Arabidopsis thaliana
gtagcgataagcgacga

SEQ ID NO: 119591 - DNA, 17 bp, Arabidopsis thaliana
gtagcgatcgagggatg

SEQ ID NO: 119592 - DNA, 17 bp, Arabidopsis thaliana
gtagcgattcggattga

SEQ ID NO: 119593 - DNA, 17 bp, Arabidopsis thaliana
gtagcgatttattgtcc

SEQ ID NO: 119594 - DNA, 17 bp, Arabidopsis thaliana
gtagcgcagttgatcac

SEQ ID NO: 119595 - DNA, 17 bp, Arabidopsis thaliana
gtagcgcggatgatcaa

SEQ ID NO: 119596 - DNA, 17 bp, Arabidopsis thaliana
gtagcgcggatgatcac

SEQ ID NO: 119597 - DNA, 17 bp, Arabidopsis thaliana
gtagcgcgggtgatcac

SEQ ID NO: 119598 - DNA, 17 bp, Arabidopsis thaliana
gtagcggatgggcacgc

SEQ ID NO: 119599 - DNA, 17 bp, Arabidopsis thaliana
gtagcggcactgggtgg

SEQ ID NO: 119600 - DNA, 17 bp, Arabidopsis thaliana
gtagcggccgtcggtgc

SEQ ID NO: 119601 - DNA, 17 bp, Arabidopsis thaliana
gtagcggcgcagttctc

SEQ ID NO: 119602 - DNA, 17 bp, Arabidopsis thaliana
gtagcggtgtacagata

SEQ ID NO: 119603 - DNA, 17 bp, Arabidopsis thaliana
gtagcggttgttagcga

SEQ ID NO: 119604 - DNA, 17 bp, Arabidopsis thaliana
gtagcggttgttagcgt

SEQ ID NO: 119605 - DNA, 17 bp, Arabidopsis thaliana
gtagcgttccacacaga

SEQ ID NO: 119606 - DNA, 17 bp, Arabidopsis thaliana
gtagcgttctcctctac

SEQ ID NO: 119607 - DNA, 17 bp, Arabidopsis thaliana
gtagcgttctttacaga

SEQ ID NO: 119608 - DNA, 17 bp, Arabidopsis thaliana
gtagctaacgcgttaag

SEQ ID NO: 119609 - DNA, 17 bp, Arabidopsis thaliana
gtagctaactaggttgc

SEQ ID NO: 119610 - DNA, 17 bp, Arabidopsis thaliana
gtagctaactttgtcaa

SEQ ID NO: 119611 - DNA, 17 bp, Arabidopsis thaliana
gtagctaactttgtgtc

SEQ ID NO: 119612 - DNA, 17 bp, Arabidopsis thaliana
gtagctaagcacagacg

SEQ ID NO: 119613 - DNA, 17 bp, Arabidopsis thaliana
gtagctaatccggatag

SEQ ID NO: 119614 - DNA, 17 bp, Arabidopsis thaliana
gtagctacatttgccat

SEQ ID NO: 119615 - DNA, 17 bp, Arabidopsis thaliana
gtagctacgaatacgac

SEQ ID NO: 119616 - DNA, 17 bp, Arabidopsis thaliana
gtagctacttccatttg

SEQ ID NO: 119617 - DNA, 17 bp, Arabidopsis thaliana
gtagctagagcctctca

SEQ ID NO: 119618 - DNA, 17 bp, Arabidopsis thaliana
gtagctagccccgtctc

SEQ ID NO: 119619 - DNA, 17 bp, Arabidopsis thaliana
gtagctagttagcaggc

SEQ ID NO: 119620 - DNA, 17 bp, Arabidopsis thaliana
gtagctatagccagatg

SEQ ID NO: 119621 - DNA, 17 bp, Arabidopsis thaliana
gtagctatttctgtggt

SEQ ID NO: 119622 - DNA, 17 bp, Arabidopsis thaliana
gtagctcaagagcagct

SEQ ID NO: 119623 - DNA, 17 bp, Arabidopsis thaliana
gtagctcattgaccttc

SEQ ID NO: 119624 - DNA, 17 bp, Arabidopsis thaliana
gtagctccaggatttat

SEQ ID NO: 119625 - DNA, 17 bp, Arabidopsis thaliana
gtagctccttcggtgtg

SEQ ID NO: 119626 - DNA, 17 bp, Arabidopsis thaliana
gtagctctgtccttctc

SEQ ID NO: 119627 - DNA, 17 bp, Arabidopsis thaliana
gtagctgaaagtttctt

SEQ ID NO: 119628 - DNA, 17 bp, Arabidopsis thaliana
gtagctgacttagcgat

SEQ ID NO: 119629 - DNA, 17 bp, Arabidopsis thaliana
gtagctgacttatcgat

SEQ ID NO: 119630 - DNA, 17 bp, Arabidopsis thaliana
gtagctgacttcttcca

SEQ ID NO: 119631 - DNA, 17 bp, Arabidopsis thaliana
gtagctgagccttgtgc

SEQ ID NO: 119632 - DNA, 17 bp, Arabidopsis thaliana
gtagctgccttggttct

SEQ ID NO: 119633 - DNA, 17 bp, Arabidopsis thaliana
gtagctggaactggaac

SEQ ID NO: 119634 - DNA, 17 bp, Arabidopsis thaliana
gtagctggctatggtga

SEQ ID NO: 119635 - DNA, 17 bp, Arabidopsis thaliana
gtagctggtccgagagg

SEQ ID NO: 119636 - DNA, 17 bp, Arabidopsis thaliana
gtagctggttccctccg

SEQ ID NO: 119637 - DNA, 17 bp, Arabidopsis thaliana
gtagctgtaaccgtatt

SEQ ID NO: 119638 - DNA, 17 bp, Arabidopsis thaliana
gtagcttaaagcccaag

SEQ ID NO: 119639 - DNA, 17 bp, Arabidopsis thaliana
gtagcttacgcgaccgt

SEQ ID NO: 119640 - DNA, 17 bp, Arabidopsis thaliana
gtagcttagagcgtctc

SEQ ID NO: 119641 - DNA, 17 bp, Arabidopsis thaliana
gtagcttatgtgaccgc

SEQ ID NO: 119642 - DNA, 17 bp, Arabidopsis thaliana
gtagcttcattgcaccg

SEQ ID NO: 119643 - DNA, 17 bp, Arabidopsis thaliana
gtagcttctgctcctat

SEQ ID NO: 119644 - DNA, 17 bp, Arabidopsis thaliana
gtagcttctgttggtcg

SEQ ID NO: 119645 - DNA, 17 bp, Arabidopsis thaliana
gtagctttcatcgctcc

SEQ ID NO: 119646 - DNA, 17 bp, Arabidopsis thaliana
gtagctttggccgagtg

SEQ ID NO: 119647 - DNA, 17 bp, Arabidopsis thaliana
gtagctttggtgtgtgc

SEQ ID NO: 119648 - DNA, 17 bp, Arabidopsis thaliana
gtaggaaaccggaggta

SEQ ID NO: 119649 - DNA, 17 bp, Arabidopsis thaliana
gtaggaacctgcggaag

SEQ ID NO: 119650 - DNA, 17 bp, Arabidopsis thaliana
gtaggaagtgattatgg

SEQ ID NO: 119651 - DNA, 17 bp, Arabidopsis thaliana
gtaggaattgtggacta

SEQ ID NO: 119652 - DNA, 17 bp, Arabidopsis thaliana
gtaggacagatttgggt

SEQ ID NO: 119653 - DNA, 17 bp, Arabidopsis thaliana
gtaggacccagatgtct

SEQ ID NO: 119654 - DNA, 17 bp, Arabidopsis thaliana
gtaggacctaacaccag

SEQ ID NO: 119655 - DNA, 17 bp, Arabidopsis thaliana
gtaggacctttggactt

SEQ ID NO: 119656 - DNA, 17 bp, Arabidopsis thaliana
gtaggacctttggatct

SEQ ID NO: 119657 - DNA, 17 bp, Arabidopsis thaliana
gtaggacggacttgtgt

SEQ ID NO: 119658 - DNA, 17 bp, Arabidopsis thaliana
gtaggacgggctttggt

SEQ ID NO: 119659 - DNA, 17 bp, Arabidopsis thaliana
gtaggacgggtttgagt

SEQ ID NO: 119660 - DNA, 17 bp, Arabidopsis thaliana
gtaggacgtgtcggcgg

SEQ ID NO: 119661 - DNA, 17 bp, Arabidopsis thaliana
gtaggacgtgtcggctg

SEQ ID NO: 119662 - DNA, 17 bp, Arabidopsis thaliana
gtaggactcgtgctgat

SEQ ID NO: 119663 - DNA, 17 bp, Arabidopsis thaliana
gtaggagccgcgatgat

SEQ ID NO: 119664 - DNA, 17 bp, Arabidopsis thaliana
gtaggagcgacgggcgg

SEQ ID NO: 119665 - DNA, 17 bp, Arabidopsis thaliana
gtaggagcttaggctcc

SEQ ID NO: 119666 - DNA, 17 bp, Arabidopsis thaliana
gtaggagggcgcggcgg

SEQ ID NO: 119667 - DNA, 17 bp, Arabidopsis thaliana
gtaggataagtgggagc

SEQ ID NO: 119668 - DNA, 17 bp, Arabidopsis thaliana
gtaggatagatcggatt

SEQ ID NO: 119669 - DNA, 17 bp, Arabidopsis thaliana
gtaggatagcaggcaca

SEQ ID NO: 119670 - DNA, 17 bp, Arabidopsis thaliana
gtaggataggcccatag

SEQ ID NO: 119671 - DNA, 17 bp, Arabidopsis thaliana
gtaggatagtggcctac

SEQ ID NO: 119672 - DNA, 17 bp, Arabidopsis thaliana
gtaggatcaacggtcta

SEQ ID NO: 119673 - DNA, 17 bp, Arabidopsis thaliana
gtaggatcagctaccga

SEQ ID NO: 119674 - DNA, 17 bp, Arabidopsis thaliana
gtaggatccggctggct

SEQ ID NO: 119675 - DNA, 17 bp, Arabidopsis thaliana
gtaggatcggatccgtt

SEQ ID NO: 119676 - DNA, 17 bp, Arabidopsis thaliana
gtaggatctctaagtct

SEQ ID NO: 119677 - DNA, 17 bp, Arabidopsis thaliana
gtaggatcttcagtctg

SEQ ID NO: 119678 - DNA, 17 bp, Arabidopsis thaliana
gtaggatgaatcgggaa

SEQ ID NO: 119679 - DNA, 17 bp, Arabidopsis thaliana
gtaggatgtgctttgtt

SEQ ID NO: 119680 - DNA, 17 bp, Arabidopsis thaliana
gtaggattacgggcttt

SEQ ID NO: 119681 - DNA, 17 bp, Arabidopsis thaliana
gtaggattactgctcat

SEQ ID NO: 119682 - DNA, 17 bp, Arabidopsis thaliana
gtaggattctcagtatg

SEQ ID NO: 119683 - DNA, 17 bp, Arabidopsis thaliana
gtaggattgtgccacgt

SEQ ID NO: 119684 - DNA, 17 bp, Arabidopsis thaliana
gtaggcaacccactggt

SEQ ID NO: 119685 - DNA, 17 bp, Arabidopsis thaliana
gtaggcaacgcagcagc

SEQ ID NO: 119686 - DNA, 17 bp, Arabidopsis thaliana
gtaggcatgaccacggt

SEQ ID NO: 119687 - DNA, 17 bp, Arabidopsis thaliana
gtaggcatgaccggttc

SEQ ID NO: 119688 - DNA, 17 bp, Arabidopsis thaliana
gtaggcatgatcacagt

SEQ ID NO: 119689 - DNA, 17 bp, Arabidopsis thaliana
gtaggccgttgtgctgc

SEQ ID NO: 119690 - DNA, 17 bp, Arabidopsis thaliana
gtaggcgctgacatcgt

SEQ ID NO: 119691 - DNA, 17 bp, Arabidopsis thaliana
gtaggcggtcgcctgac

SEQ ID NO: 119692 - DNA, 17 bp, Arabidopsis thaliana
gtaggcggtctaactat

SEQ ID NO: 119693 - DNA, 17 bp, Arabidopsis thaliana
gtaggcgtgatggctgt

SEQ ID NO: 119694 - DNA, 17 bp, Arabidopsis thaliana
gtaggcgtgccggagtg

SEQ ID NO: 119695 - DNA, 17 bp, Arabidopsis thaliana
gtaggctccttgttctt

SEQ ID NO: 119696 - DNA, 17 bp, Arabidopsis thaliana
gtaggctcggtgcaatc

SEQ ID NO: 119697 - DNA, 17 bp, Arabidopsis thaliana
gtaggctgatagggtag

SEQ ID NO: 119698 - DNA, 17 bp, Arabidopsis thaliana
gtaggctgcctggaagg

SEQ ID NO: 119699 - DNA, 17 bp, Arabidopsis thaliana
gtaggctgttaactgat

SEQ ID NO: 119700 - DNA, 17 bp, Arabidopsis thaliana
gtaggcttaccatccat

SEQ ID NO: 119701 - DNA, 17 bp, Arabidopsis thaliana
gtaggcttctacaagtt

SEQ ID NO: 119702 - DNA, 17 bp, Arabidopsis thaliana
gtagggaaagcggcaat

SEQ ID NO: 119703 - DNA, 17 bp, Arabidopsis thaliana
gtagggaacctgcggaa

SEQ ID NO: 119704 - DNA, 17 bp, Arabidopsis thaliana
gtagggacctgcggaag

SEQ ID NO: 119705 - DNA, 17 bp, Arabidopsis thaliana
gtagggatcggctgagg

SEQ ID NO: 119706 - DNA, 17 bp, Arabidopsis thaliana
gtagggcacatgcccca

SEQ ID NO: 119707 - DNA, 17 bp, Arabidopsis thaliana
gtagggcattcatcgaa

SEQ ID NO: 119708 - DNA, 17 bp, Arabidopsis thaliana
gtagggcgaaatcccga

SEQ ID NO: 119709 - DNA, 17 bp, Arabidopsis thaliana
gtagggcttacggtgca

SEQ ID NO: 119710 - DNA, 17 bp, Arabidopsis thaliana
gtaggggaacctgtggc

SEQ ID NO: 119711 - DNA, 17 bp, Arabidopsis thaliana
gtaggggacgagtttgg

SEQ ID NO: 119712 - DNA, 17 bp, Arabidopsis thaliana
gtaggggagtggaccgg

SEQ ID NO: 119713 - DNA, 17 bp, Arabidopsis thaliana
gtaggggtccgatccat

SEQ ID NO: 119714 - DNA, 17 bp, Arabidopsis thaliana
gtagggtaaagatctct

SEQ ID NO: 119715 - DNA, 17 bp, Arabidopsis thaliana
gtagggtccagcgcctg

SEQ ID NO: 119716 - DNA, 17 bp, Arabidopsis thaliana
gtagggtccagcggctg

SEQ ID NO: 119717 - DNA, 17 bp, Arabidopsis thaliana
gtagggtcggtgcgatg

SEQ ID NO: 119718 - DNA, 17 bp, Arabidopsis thaliana
gtagggtctgaaaccaa

SEQ ID NO: 119719 - DNA, 17 bp, Arabidopsis thaliana
gtagggtgccttagaca

SEQ ID NO: 119720 - DNA, 17 bp, Arabidopsis thaliana
gtagggtggcattccat

SEQ ID NO: 119721 - DNA, 17 bp, Arabidopsis thaliana
gtagggttcaagatttt

SEQ ID NO: 119722 - DNA, 17 bp, Arabidopsis thaliana
gtagggttcgcttgctt

SEQ ID NO: 119723 - DNA, 17 bp, Arabidopsis thaliana
gtagggttttggaccgg

SEQ ID NO: 119724 - DNA, 17 bp, Arabidopsis thaliana
gtaggtacagacccggg

SEQ ID NO: 119725 - DNA, 17 bp, Arabidopsis thaliana
gtaggtacctgcggaag

SEQ ID NO: 119726 - DNA, 17 bp, Arabidopsis thaliana
gtaggtagctgacttag

SEQ ID NO: 119727 - DNA, 17 bp, Arabidopsis thaliana
gtaggtcatctatcatg

SEQ ID NO: 119728 - DNA, 17 bp, Arabidopsis thaliana
gtaggtcctgcggaagg

SEQ ID NO: 119729 - DNA, 17 bp, Arabidopsis thaliana
gtaggtccttaagcggg

SEQ ID NO: 119730 - DNA, 17 bp, Arabidopsis thaliana
gtaggtcggatcgacgt

SEQ ID NO: 119731 - DNA, 17 bp, Arabidopsis thaliana
gtaggtctcacgttgtc

SEQ ID NO: 119732 - DNA, 17 bp, Arabidopsis thaliana
gtaggtctcgccaggct

SEQ ID NO: 119733 - DNA, 17 bp, Arabidopsis thaliana
gtaggtgaaagccagga

SEQ ID NO: 119734 - DNA, 17 bp, Arabidopsis thaliana
gtaggtgaacagaccca

SEQ ID NO: 119735 - DNA, 17 bp, Arabidopsis thaliana
gtaggtgaaccagcgga

SEQ ID NO: 119736 - DNA, 17 bp, Arabidopsis thaliana
gtaggtgaacctacgga

SEQ ID NO: 119737 - DNA, 17 bp, Arabidopsis thaliana
gtaggtgaacctgagga

SEQ ID NO: 119738 - DNA, 17 bp, Arabidopsis thaliana
gtaggtgaacctgcgga

SEQ ID NO: 119739 - DNA, 17 bp, Arabidopsis thaliana
gtaggtgagcctgcgga

SEQ ID NO: 119740 - DNA, 17 bp, Arabidopsis thaliana
gtaggtgagtgtgtttg

SEQ ID NO: 119741 - DNA, 17 bp, Arabidopsis thaliana
gtaggtgatcgggtgcc

SEQ ID NO: 119742 - DNA, 17 bp, Arabidopsis thaliana
gtaggtgcggttgttta

SEQ ID NO: 119743 - DNA, 17 bp, Arabidopsis thaliana
gtaggtggaacctgcgg

SEQ ID NO: 119744 - DNA, 17 bp, Arabidopsis thaliana
gtaggtggacctgcgga

SEQ ID NO: 119745 - DNA, 17 bp, Arabidopsis thaliana
gtaggtggcctaactac

SEQ ID NO: 119746 - DNA, 17 bp, Arabidopsis thaliana
gtaggtgtgccggagtg

SEQ ID NO: 119747 - DNA, 17 bp, Arabidopsis thaliana
gtaggtgtgccggagtt

SEQ ID NO: 119748 - DNA, 17 bp, Arabidopsis thaliana
gtaggtgtggttagttt

SEQ ID NO: 119749 - DNA, 17 bp, Arabidopsis thaliana
gtaggttacctgcggaa

SEQ ID NO: 119750 - DNA, 17 bp, Arabidopsis thaliana
gtaggttcaaatcctac

SEQ ID NO: 119751 - DNA, 17 bp, Arabidopsis thaliana
gtaggttccccctacct

SEQ ID NO: 119752 - DNA, 17 bp, Arabidopsis thaliana
gtaggttccccctacgt

SEQ ID NO: 119753 - DNA, 17 bp, Arabidopsis thaliana
gtaggttcctgcggaag

SEQ ID NO: 119754 - DNA, 17 bp, Arabidopsis thaliana
gtaggttcgagtcctac

SEQ ID NO: 119755 - DNA, 17 bp, Arabidopsis thaliana
gtaggttcgccccctac

SEQ ID NO: 119756 - DNA, 17 bp, Arabidopsis thaliana
gtaggttgagccctact

SEQ ID NO: 119757 - DNA, 17 bp, Arabidopsis thaliana
gtaggttgcagcggtag

SEQ ID NO: 119758 - DNA, 17 bp, Arabidopsis thaliana
gtaggttgcaggttttg

SEQ ID NO: 119759 - DNA, 17 bp, Arabidopsis thaliana
gtaggttggaagcccac

SEQ ID NO: 119760 - DNA, 17 bp, Arabidopsis thaliana
gtaggttggtctggtct

SEQ ID NO: 119761 - DNA, 17 bp, Arabidopsis thaliana
gtaggttgtggcagtga

SEQ ID NO: 119762 - DNA, 17 bp, Arabidopsis thaliana
gtaggttttcgtcttca

SEQ ID NO: 119763 - DNA, 17 bp, Arabidopsis thaliana
gtaggtttttcacagac

SEQ ID NO: 119764 - DNA, 17 bp, Arabidopsis thaliana
gtagtaaaacggtgcaa

SEQ ID NO: 119765 - DNA, 17 bp, Arabidopsis thaliana
gtagtaaaggtgtagtg

SEQ ID NO: 119766 - DNA, 17 bp, Arabidopsis thaliana
gtagtaaatctccgagt

SEQ ID NO: 119767 - DNA, 17 bp, Arabidopsis thaliana
gtagtaaccgcacttgt

SEQ ID NO: 119768 - DNA, 17 bp, Arabidopsis thaliana
gtagtaaccgccttttc

SEQ ID NO: 119769 - DNA, 17 bp, Arabidopsis thaliana
gtagtaacgaatgcgat

SEQ ID NO: 119770 - DNA, 17 bp, Arabidopsis thaliana
gtagtaagcggtgttcg

SEQ ID NO: 119771 - DNA, 17 bp, Arabidopsis thaliana
gtagtaataggatgggt

SEQ ID NO: 119772 - DNA, 17 bp, Arabidopsis thaliana
gtagtacagcagcgcgg

SEQ ID NO: 119773 - DNA, 17 bp, Arabidopsis thaliana
gtagtacgcttgtgcct

SEQ ID NO: 119774 - DNA, 17 bp, Arabidopsis thaliana
gtagtacggtcgagtgt

SEQ ID NO: 119775 - DNA, 17 bp, Arabidopsis thaliana
gtagtacgtgaagcgcc

SEQ ID NO: 119776 - DNA, 17 bp, Arabidopsis thaliana
gtagtactgatgggtga

SEQ ID NO: 119777 - DNA, 17 bp, Arabidopsis thaliana
gtagtacttcggtgcgt

SEQ ID NO: 119778 - DNA, 17 bp, Arabidopsis thaliana
gtagtagagatctcgtc

SEQ ID NO: 119779 - DNA, 17 bp, Arabidopsis thaliana
gtagtagagtaacttcg

SEQ ID NO: 119780 - DNA, 17 bp, Arabidopsis thaliana
gtagtagatattgcggc

SEQ ID NO: 119781 - DNA, 17 bp, Arabidopsis thaliana
gtagtagcggcgagcga

SEQ ID NO: 119782 - DNA, 17 bp, Arabidopsis thaliana
gtagtagctgcttcaga

SEQ ID NO: 119783 - DNA, 17 bp, Arabidopsis thaliana
gtagtagtcggattttg

SEQ ID NO: 119784 - DNA, 17 bp, Arabidopsis thaliana
gtagtagttcctgcgtg

SEQ ID NO: 119785 - DNA, 17 bp, Arabidopsis thaliana
gtagtataccgcaggta

SEQ ID NO: 119786 - DNA, 17 bp, Arabidopsis thaliana
gtagtatccacttgtgt

SEQ ID NO: 119787 - DNA, 17 bp, Arabidopsis thaliana
gtagtcaacgcgagctg

SEQ ID NO: 119788 - DNA, 17 bp, Arabidopsis thaliana
gtagtcaagccgtctgc

SEQ ID NO: 119789 - DNA, 17 bp, Arabidopsis thaliana
gtagtcagaaaggcagg

SEQ ID NO: 119790 - DNA, 17 bp, Arabidopsis thaliana
gtagtcatccaggctgt

SEQ ID NO: 119791 - DNA, 17 bp, Arabidopsis thaliana
gtagtcatcctcagcat

SEQ ID NO: 119792 - DNA, 17 bp, Arabidopsis thaliana
gtagtcattctgatgga

SEQ ID NO: 119793 - DNA, 17 bp, Arabidopsis thaliana
gtagtccacagtgtcaa

SEQ ID NO: 119794 - DNA, 17 bp, Arabidopsis thaliana
gtagtcccccagacctg

SEQ ID NO: 119795 - DNA, 17 bp, Arabidopsis thaliana
gtagtcccgttctcgtg

SEQ ID NO: 119796 - DNA, 17 bp, Arabidopsis thaliana
gtagtccctctcttttg

SEQ ID NO: 119797 - DNA, 17 bp, Arabidopsis thaliana
gtagtccggctatgagc

SEQ ID NO: 119798 - DNA, 17 bp, Arabidopsis thaliana
gtagtccggtcgccgca

SEQ ID NO: 119799 - DNA, 17 bp, Arabidopsis thaliana
gtagtccggttcattat

SEQ ID NO: 119800 - DNA, 17 bp, Arabidopsis thaliana
gtagtccgtcagaaagt

SEQ ID NO: 119801 - DNA, 17 bp, Arabidopsis thaliana
gtagtcctagccgtaaa

SEQ ID NO: 119802 - DNA, 17 bp, Arabidopsis thaliana
gtagtcgacgtcctcca

SEQ ID NO: 119803 - DNA, 17 bp, Arabidopsis thaliana
gtagtcgatggacaaca

SEQ ID NO: 119804 - DNA, 17 bp, Arabidopsis thaliana
gtagtcgattactgttc

SEQ ID NO: 119805 - DNA, 17 bp, Arabidopsis thaliana
gtagtcgcagatctaca

SEQ ID NO: 119806 - DNA, 17 bp, Arabidopsis thaliana
gtagtcgcatcccagat

SEQ ID NO: 119807 - DNA, 17 bp, Arabidopsis thaliana
gtagtcgcatcctgtag

SEQ ID NO: 119808 - DNA, 17 bp, Arabidopsis thaliana
gtagtcgctcaagtctg

SEQ ID NO: 119809 - DNA, 17 bp, Arabidopsis thaliana
gtagtcgctggttgctg

SEQ ID NO: 119810 - DNA, 17 bp, Arabidopsis thaliana
gtagtcggtgaggacca

SEQ ID NO: 119811 - DNA, 17 bp, Arabidopsis thaliana
gtagtcgtaaagcacca

SEQ ID NO: 119812 - DNA, 17 bp, Arabidopsis thaliana
gtagtcgtacggcttgg

SEQ ID NO: 119813 - DNA, 17 bp, Arabidopsis thaliana
gtagtcgtctactgatc

SEQ ID NO: 119814 - DNA, 17 bp, Arabidopsis thaliana
gtagtcgtgccggagtg

SEQ ID NO: 119815 - DNA, 17 bp, Arabidopsis thaliana
gtagtctaggaagttct

SEQ ID NO: 119816 - DNA, 17 bp, Arabidopsis thaliana
gtagtctccaccaccgg

SEQ ID NO: 119817 - DNA, 17 bp, Arabidopsis thaliana
gtagtctcctggtcagg

SEQ ID NO: 119818 - DNA, 17 bp, Arabidopsis thaliana
gtagtctcgatggtgca

SEQ ID NO: 119819 - DNA, 17 bp, Arabidopsis thaliana
gtagtctcgtgcctatt

SEQ ID NO: 119820 - DNA, 17 bp, Arabidopsis thaliana
gtagtctgcagaccggt

SEQ ID NO: 119821 - DNA, 17 bp, Arabidopsis thaliana
gtagtcttatctccatg

SEQ ID NO: 119822 - DNA, 17 bp, Arabidopsis thaliana
gtagtcttggcggtcca

SEQ ID NO: 119823 - DNA, 17 bp, Arabidopsis thaliana
gtagtgaaccgtgctat

SEQ ID NO: 119824 - DNA, 17 bp, Arabidopsis thaliana
gtagtgaccatccttct

SEQ ID NO: 119825 - DNA, 17 bp, Arabidopsis thaliana
gtagtgacggcttgtgc

SEQ ID NO: 119826 - DNA, 17 bp, Arabidopsis thaliana
gtagtgaggccgattct

SEQ ID NO: 119827 - DNA, 17 bp, Arabidopsis thaliana
gtagtgaggctttttct

SEQ ID NO: 119828 - DNA, 17 bp, Arabidopsis thaliana
gtagtgatgttcggcta

SEQ ID NO: 119829 - DNA, 17 bp, Arabidopsis thaliana
gtagtgatttgctggct

SEQ ID NO: 119830 - DNA, 17 bp, Arabidopsis thaliana
gtagtgcaaatgccatg

SEQ ID NO: 119831 - DNA, 17 bp, Arabidopsis thaliana
gtagtgcaacttgcgag

SEQ ID NO: 119832 - DNA, 17 bp, Arabidopsis thaliana
gtagtgcggtacggttc

SEQ ID NO: 119833 - DNA, 17 bp, Arabidopsis thaliana
gtagtggaagatcgcgt

SEQ ID NO: 119834 - DNA, 17 bp, Arabidopsis thaliana
gtagtgggaattttgcc

SEQ ID NO: 119835 - DNA, 17 bp, Arabidopsis thaliana
gtagtgggcccataacc

SEQ ID NO: 119836 - DNA, 17 bp, Arabidopsis thaliana
gtagtgggtgggactcg

SEQ ID NO: 119837 - DNA, 17 bp, Arabidopsis thaliana
gtagtggtccacttttc

SEQ ID NO: 119838 - DNA, 17 bp, Arabidopsis thaliana
gtagtgtgcaaagggca

SEQ ID NO: 119839 - DNA, 17 bp, Arabidopsis thaliana
gtagtgtgcccgcagtg

SEQ ID NO: 119840 - DNA, 17 bp, Arabidopsis thaliana
gtagttagaccctgttt

SEQ ID NO: 119841 - DNA, 17 bp, Arabidopsis thaliana
gtagttagaccgcctgc

SEQ ID NO: 119842 - DNA, 17 bp, Arabidopsis thaliana
gtagttaggggtgttaa

SEQ ID NO: 119843 - DNA, 17 bp, Arabidopsis thaliana
gtagttcacgaggatgg

SEQ ID NO: 119844 - DNA, 17 bp, Arabidopsis thaliana
gtagttccatagaatcg

SEQ ID NO: 119845 - DNA, 17 bp, Arabidopsis thaliana
gtagttccatcctgcgt

SEQ ID NO: 119846 - DNA, 17 bp, Arabidopsis thaliana
gtagttccggcgagggt

SEQ ID NO: 119847 - DNA, 17 bp, Arabidopsis thaliana
gtagttcgaccgcgaaa

SEQ ID NO: 119848 - DNA, 17 bp, Arabidopsis thaliana
gtagttcgatcctgcgt

SEQ ID NO: 119849 - DNA, 17 bp, Arabidopsis thaliana
gtagttcgccgacgaca

SEQ ID NO: 119850 - DNA, 17 bp, Arabidopsis thaliana
gtagttcgtcctgcgtg

SEQ ID NO: 119851 - DNA, 17 bp, Arabidopsis thaliana
gtagttcgttcctgcgt

SEQ ID NO: 119852 - DNA, 17 bp, Arabidopsis thaliana
gtagttcttttttgggt

SEQ ID NO: 119853 - DNA, 17 bp, Arabidopsis thaliana
gtagttgaaccttggga

SEQ ID NO: 119854 - DNA, 17 bp, Arabidopsis thaliana
gtagttgaagttgaagt

SEQ ID NO: 119855 - DNA, 17 bp, Arabidopsis thaliana
gtagttgattcaggcta

SEQ ID NO: 119856 - DNA, 17 bp, Arabidopsis thaliana
gtagttgattccggctt

SEQ ID NO: 119857 - DNA, 17 bp, Arabidopsis thaliana
gtagttgattcctttgc

SEQ ID NO: 119858 - DNA, 17 bp, Arabidopsis thaliana
gtagttgcagctgcggt

SEQ ID NO: 119859 - DNA, 17 bp, Arabidopsis thaliana
gtagttgcaggttggaa

SEQ ID NO: 119860 - DNA, 17 bp, Arabidopsis thaliana
gtagttgcggctgcggt

SEQ ID NO: 119861 - DNA, 17 bp, Arabidopsis thaliana
gtagttgcgggcggtag

SEQ ID NO: 119862 - DNA, 17 bp, Arabidopsis thaliana
gtagttgcttagattga

SEQ ID NO: 119863 - DNA, 17 bp, Arabidopsis thaliana
gtagttgtggaatccgt

SEQ ID NO: 119864 - DNA, 17 bp, Arabidopsis thaliana
gtagtttaactccttcg

SEQ ID NO: 119865 - DNA, 17 bp, Arabidopsis thaliana
gtagtttacctccgagg

SEQ ID NO: 119866 - DNA, 17 bp, Arabidopsis thaliana
gtagtttacgcgaccgc

SEQ ID NO: 119867 - DNA, 17 bp, Arabidopsis thaliana
gtagtttacgcgaccgt

SEQ ID NO: 119868 - DNA, 17 bp, Arabidopsis thaliana
gtagtttaggattcggt

SEQ ID NO: 119869 - DNA, 17 bp, Arabidopsis thaliana
gtagtttcagagatggt

SEQ ID NO: 119870 - DNA, 17 bp, Arabidopsis thaliana
gtagtttcaggatgtgt

SEQ ID NO: 119871 - DNA, 17 bp, Arabidopsis thaliana
gtagtttcctggatcaa

SEQ ID NO: 119872 - DNA, 17 bp, Arabidopsis thaliana
gtagtttcgcacgtgct

SEQ ID NO: 119873 - DNA, 17 bp, Arabidopsis thaliana
gtagtttcggctctcga

SEQ ID NO: 119874 - DNA, 17 bp, Arabidopsis thaliana
gtagtttcgggcctgag

SEQ ID NO: 119875 - DNA, 17 bp, Arabidopsis thaliana
gtagtttcgggcctggg

SEQ ID NO: 119876 - DNA, 17 bp, Arabidopsis thaliana
gtagtttcgggtacgga

SEQ ID NO: 119877 - DNA, 17 bp, Arabidopsis thaliana
gtagtttctctccgagg

SEQ ID NO: 119878 - DNA, 17 bp, Arabidopsis thaliana
gtagtttcttaagcgag

SEQ ID NO: 119879 - DNA, 17 bp, Arabidopsis thaliana
gtagtttcttaagcgat

SEQ ID NO: 119880 - DNA, 17 bp, Arabidopsis thaliana
gtagtttgcaggttttg

SEQ ID NO: 119881 - DNA, 17 bp, Arabidopsis thaliana
gtagttttgcaagactt

SEQ ID NO: 119882 - DNA, 17 bp, Arabidopsis thaliana
gtataaattacggcgca

SEQ ID NO: 119883 - DNA, 17 bp, Arabidopsis thaliana
gtataacgactactggc

SEQ ID NO: 119884 - DNA, 17 bp, Arabidopsis thaliana
gtataactcaggcaacg

SEQ ID NO: 119885 - DNA, 17 bp, Arabidopsis thaliana
gtataactgcacctgta

SEQ ID NO: 119886 - DNA, 17 bp, Arabidopsis thaliana
gtataagacttaaaccg

SEQ ID NO: 119887 - DNA, 17 bp, Arabidopsis thaliana
gtataagcctgcctgac

SEQ ID NO: 119888 - DNA, 17 bp, Arabidopsis thaliana
gtataagtcacgctcgt

SEQ ID NO: 119889 - DNA, 17 bp, Arabidopsis thaliana
gtataatcattaagccg

SEQ ID NO: 119890 - DNA, 17 bp, Arabidopsis thaliana
gtataatcctggcgaac

SEQ ID NO: 119891 - DNA, 17 bp, Arabidopsis thaliana
gtataatctcggaattg

SEQ ID NO: 119892 - DNA, 17 bp, Arabidopsis thaliana
gtataatgtaactgcgg

SEQ ID NO: 119893 - DNA, 17 bp, Arabidopsis thaliana
gtatacagaatgcaatt

SEQ ID NO: 119894 - DNA, 17 bp, Arabidopsis thaliana
gtatacagggccggtcc

SEQ ID NO: 119895 - DNA, 17 bp, Arabidopsis thaliana
gtatacagtgtgacgaa

SEQ ID NO: 119896 - DNA, 17 bp, Arabidopsis thaliana
gtatacagttttgacag

SEQ ID NO: 119897 - DNA, 17 bp, Arabidopsis thaliana
gtataccactaacggac

SEQ ID NO: 119898 - DNA, 17 bp, Arabidopsis thaliana
gtatacccatcgtgccc

SEQ ID NO: 119899 - DNA, 17 bp, Arabidopsis thaliana
gtatacccgaaatggat

SEQ ID NO: 119900 - DNA, 17 bp, Arabidopsis thaliana
gtataccgacgtttttc

SEQ ID NO: 119901 - DNA, 17 bp, Arabidopsis thaliana
gtataccgcagacacgc

SEQ ID NO: 119902 - DNA, 17 bp, Arabidopsis thaliana
gtataccgcaggtacgc

SEQ ID NO: 119903 - DNA, 17 bp, Arabidopsis thaliana
gtataccgcaggtaggc

SEQ ID NO: 119904 - DNA, 17 bp, Arabidopsis thaliana
gtataccgcggggctag

SEQ ID NO: 119905 - DNA, 17 bp, Arabidopsis thaliana
gtataccgcgggttaaa

SEQ ID NO: 119906 - DNA, 17 bp, Arabidopsis thaliana
gtataccggatacatac

SEQ ID NO: 119907 - DNA, 17 bp, Arabidopsis thaliana
gtatacctgctatctcc

SEQ ID NO: 119908 - DNA, 17 bp, Arabidopsis thaliana
gtatacggctgacgcct

SEQ ID NO: 119909 - DNA, 17 bp, Arabidopsis thaliana
gtatactacgggtgaaa

SEQ ID NO: 119910 - DNA, 17 bp, Arabidopsis thaliana
gtatactcaaactgtct

SEQ ID NO: 119911 - DNA, 17 bp, Arabidopsis thaliana
gtatactcagtacagca

SEQ ID NO: 119912 - DNA, 17 bp, Arabidopsis thaliana
gtatactcattcatagc

SEQ ID NO: 119913 - DNA, 17 bp, Arabidopsis thaliana
gtatactctaatggcaa

SEQ ID NO: 119914 - DNA, 17 bp, Arabidopsis thaliana
gtatactctgctatggc

SEQ ID NO: 119915 - DNA, 17 bp, Arabidopsis thaliana
gtatactcttttggaag

SEQ ID NO: 119916 - DNA, 17 bp, Arabidopsis thaliana
gtatagaacttgatcgg

SEQ ID NO: 119917 - DNA, 17 bp, Arabidopsis thaliana
gtatagacgcttttgtc

SEQ ID NO: 119918 - DNA, 17 bp, Arabidopsis thaliana
gtatagctacgagtttg

SEQ ID NO: 119919 - DNA, 17 bp, Arabidopsis thaliana
gtatagggactgcataa

SEQ ID NO: 119920 - DNA, 17 bp, Arabidopsis thaliana
gtatagtctctcttgcg

SEQ ID NO: 119921 - DNA, 17 bp, Arabidopsis thaliana
gtatagtttctggtgta

SEQ ID NO: 119922 - DNA, 17 bp, Arabidopsis thaliana
gtatatcaaggtgagaa

SEQ ID NO: 119923 - DNA, 17 bp, Arabidopsis thaliana
gtatatcgatgatgtgg

SEQ ID NO: 119924 - DNA, 17 bp, Arabidopsis thaliana
gtatatgagttctgtcc

SEQ ID NO: 119925 - DNA, 17 bp, Arabidopsis thaliana
gtatatgcaatgcaatc

SEQ ID NO: 119926 - DNA, 17 bp, Arabidopsis thaliana
gtatatgccactttgcg

SEQ ID NO: 119927 - DNA, 17 bp, Arabidopsis thaliana
gtatatgtacagttggc

SEQ ID NO: 119928 - DNA, 17 bp, Arabidopsis thaliana
gtatcaaaagcccaggc

SEQ ID NO: 119929 - DNA, 17 bp, Arabidopsis thaliana
gtatcaaaagcccgggc

SEQ ID NO: 119930 - DNA, 17 bp, Arabidopsis thaliana
gtatcaaaagccgaggc

SEQ ID NO: 119931 - DNA, 17 bp, Arabidopsis thaliana
gtatcaacccaaatgcg

SEQ ID NO: 119932 - DNA, 17 bp, Arabidopsis thaliana
gtatcaacgaactcttg

SEQ ID NO: 119933 - DNA, 17 bp, Arabidopsis thaliana
gtatcaatcaatggcct

SEQ ID NO: 119934 - DNA, 17 bp, Arabidopsis thaliana
gtatcaatcgacagcga

SEQ ID NO: 119935 - DNA, 17 bp, Arabidopsis thaliana
gtatcacacgtgtggag

SEQ ID NO: 119936 - DNA, 17 bp, Arabidopsis thaliana
gtatcacactatgcggt

SEQ ID NO: 119937 - DNA, 17 bp, Arabidopsis thaliana
gtatcacatgccaagtt

SEQ ID NO: 119938 - DNA, 17 bp, Arabidopsis thaliana
gtatcaccaacgaggat

SEQ ID NO: 119939 - DNA, 17 bp, Arabidopsis thaliana
gtatcaccagactagtc

SEQ ID NO: 119940 - DNA, 17 bp, Arabidopsis thaliana
gtatcaccagcggtggc

SEQ ID NO: 119941 - DNA, 17 bp, Arabidopsis thaliana
gtatcaccgatgtacaa

SEQ ID NO: 119942 - DNA, 17 bp, Arabidopsis thaliana
gtatcaccggtctgcca

SEQ ID NO: 119943 - DNA, 17 bp, Arabidopsis thaliana
gtatcaccttaacggat

SEQ ID NO: 119944 - DNA, 17 bp, Arabidopsis thaliana
gtatcacgctagataga

SEQ ID NO: 119945 - DNA, 17 bp, Arabidopsis thaliana
gtatcacgttacggctg

SEQ ID NO: 119946 - DNA, 17 bp, Arabidopsis thaliana
gtatcactagctgagtg

SEQ ID NO: 119947 - DNA, 17 bp, Arabidopsis thaliana
gtatcactcgaatgata

SEQ ID NO: 119948 - DNA, 17 bp, Arabidopsis thaliana
gtatcagacggtgattg

SEQ ID NO: 119949 - DNA, 17 bp, Arabidopsis thaliana
gtatcagagcccatggt

SEQ ID NO: 119950 - DNA, 17 bp, Arabidopsis thaliana
gtatcagagcgattacg

SEQ ID NO: 119951 - DNA, 17 bp, Arabidopsis thaliana
gtatcagagctcacggt

SEQ ID NO: 119952 - DNA, 17 bp, Arabidopsis thaliana
gtatcagatgacgaatg

SEQ ID NO: 119953 - DNA, 17 bp, Arabidopsis thaliana
gtatcagatggtcagtt

SEQ ID NO: 119954 - DNA, 17 bp, Arabidopsis thaliana
gtatcagccctttgtcg

SEQ ID NO: 119955 - DNA, 17 bp, Arabidopsis thaliana
gtatcagctccagcagg

SEQ ID NO: 119956 - DNA, 17 bp, Arabidopsis thaliana
gtatcaggaaagacagc

SEQ ID NO: 119957 - DNA, 17 bp, Arabidopsis thaliana
gtatcagggagggctgg

SEQ ID NO: 119958 - DNA, 17 bp, Arabidopsis thaliana
gtatcaggtagagtgga

SEQ ID NO: 119959 - DNA, 17 bp, Arabidopsis thaliana
gtatcaggtgacgtggc

SEQ ID NO: 119960 - DNA, 17 bp, Arabidopsis thaliana
gtatcagtgaatcagct

SEQ ID NO: 119961 - DNA, 17 bp, Arabidopsis thaliana
gtatcagttgatgtgta

SEQ ID NO: 119962 - DNA, 17 bp, Arabidopsis thaliana
gtatcagttggatgttg

SEQ ID NO: 119963 - DNA, 17 bp, Arabidopsis thaliana
gtatcatcagtggtttt

SEQ ID NO: 119964 - DNA, 17 bp, Arabidopsis thaliana
gtatcatcattcgcttg

SEQ ID NO: 119965 - DNA, 17 bp, Arabidopsis thaliana
gtatcatcccattcggt

SEQ ID NO: 119966 - DNA, 17 bp, Arabidopsis thaliana
gtatcatccccgatgat

SEQ ID NO: 119967 - DNA, 17 bp, Arabidopsis thaliana
gtatcatctaacgtgac

SEQ ID NO: 119968 - DNA, 17 bp, Arabidopsis thaliana
gtatcatctacggaccg

SEQ ID NO: 119969 - DNA, 17 bp, Arabidopsis thaliana
gtatcatctacgtggca

SEQ ID NO: 119970 - DNA, 17 bp, Arabidopsis thaliana
gtatcatctgacgtgac

SEQ ID NO: 119971 - DNA, 17 bp, Arabidopsis thaliana
gtatcatctgacgtggc

SEQ ID NO: 119972 - DNA, 17 bp, Arabidopsis thaliana
gtatcatctgacgtggt

SEQ ID NO: 119973 - DNA, 17 bp, Arabidopsis thaliana
gtatcatctgacgtgtc

SEQ ID NO: 119974 - DNA, 17 bp, Arabidopsis thaliana
gtatcatctgacgttgc

SEQ ID NO: 119975 - DNA, 17 bp, Arabidopsis thaliana
gtatcatctgtcgtgga

SEQ ID NO: 119976 - DNA, 17 bp, Arabidopsis thaliana
gtatcatcttgtgtgcc

SEQ ID NO: 119977 - DNA, 17 bp, Arabidopsis thaliana
gtatcattagccaatca

SEQ ID NO: 119978 - DNA, 17 bp, Arabidopsis thaliana
gtatccatccggtgata

SEQ ID NO: 119979 - DNA, 17 bp, Arabidopsis thaliana
gtatccattacagtttt

SEQ ID NO: 119980 - DNA, 17 bp, Arabidopsis thaliana
gtatcccgatttgcgag

SEQ ID NO: 119981 - DNA, 17 bp, Arabidopsis thaliana
gtatccctacatagcgg

SEQ ID NO: 119982 - DNA, 17 bp, Arabidopsis thaliana
gtatccctacatgcctg

SEQ ID NO: 119983 - DNA, 17 bp, Arabidopsis thaliana
gtatccctacatggcgc

SEQ ID NO: 119984 - DNA, 17 bp, Arabidopsis thaliana
gtatccctacatggcgg

SEQ ID NO: 119985 - DNA, 17 bp, Arabidopsis thaliana
gtatccctcgccttgct

SEQ ID NO: 119986 - DNA, 17 bp, Arabidopsis thaliana
gtatccgcgtttgcgtt

SEQ ID NO: 119987 - DNA, 17 bp, Arabidopsis thaliana
gtatccgctaggcttgg

SEQ ID NO: 119988 - DNA, 17 bp, Arabidopsis thaliana
gtatccgctattacaca

SEQ ID NO: 119989 - DNA, 17 bp, Arabidopsis thaliana
gtatccggactggttgg

SEQ ID NO: 119990 - DNA, 17 bp, Arabidopsis thaliana
gtatccggttgggctct

SEQ ID NO: 119991 - DNA, 17 bp, Arabidopsis thaliana
gtatccgtcgaacagtt

SEQ ID NO: 119992 - DNA, 17 bp, Arabidopsis thaliana
gtatccgttagatttcg

SEQ ID NO: 119993 - DNA, 17 bp, Arabidopsis thaliana
gtatcctctgcagattt

SEQ ID NO: 119994 - DNA, 17 bp, Arabidopsis thaliana
gtatcgaacacaccttc

SEQ ID NO: 119995 - DNA, 17 bp, Arabidopsis thaliana
gtatcgacaatgatcct

SEQ ID NO: 119996 - DNA, 17 bp, Arabidopsis thaliana
gtatcgacccgtgcagt

SEQ ID NO: 119997 - DNA, 17 bp, Arabidopsis thaliana
gtatcgagtgacgtgac

SEQ ID NO: 119998 - DNA, 17 bp, Arabidopsis thaliana
gtatcgatcaagccaaa

SEQ ID NO: 119999 - DNA, 17 bp, Arabidopsis thaliana
gtatcgattatcccgtg

SEQ ID NO: 120000 - DNA, 17 bp, Arabidopsis thaliana
gtatcgcaagctgttct

SEQ ID NO: 120001 - DNA, 17 bp, Arabidopsis thaliana
gtatcgcaatagttgct

SEQ ID NO: 120002 - DNA, 17 bp, Arabidopsis thaliana
gtatcgcagtgactaat

SEQ ID NO: 120003 - DNA, 17 bp, Arabidopsis thaliana
gtatcgcagttgaactg

SEQ ID NO: 120004 - DNA, 17 bp, Arabidopsis thaliana
gtatcgcgttacggatg

SEQ ID NO: 120005 - DNA, 17 bp, Arabidopsis thaliana
gtatcgcgttacggctg

SEQ ID NO: 120006 - DNA, 17 bp, Arabidopsis thaliana
gtatcgctttacagctg

SEQ ID NO: 120007 - DNA, 17 bp, Arabidopsis thaliana
gtatcggaaggtgcggc

SEQ ID NO: 120008 - DNA, 17 bp, Arabidopsis thaliana
gtatcggcatgctcggg

SEQ ID NO: 120009 - DNA, 17 bp, Arabidopsis thaliana
gtatcggctctattcag

SEQ ID NO: 120010 - DNA, 17 bp, Arabidopsis thaliana
gtatcggcttgtgattg

SEQ ID NO: 120011 - DNA, 17 bp, Arabidopsis thaliana
gtatcgggtcaaccggg

SEQ ID NO: 120012 - DNA, 17 bp, Arabidopsis thaliana
gtatcggtcctgcaatg

SEQ ID NO: 120013 - DNA, 17 bp, Arabidopsis thaliana
gtatcggtgtacaattg

SEQ ID NO: 120014 - DNA, 17 bp, Arabidopsis thaliana
gtatcggttggggatgg

SEQ ID NO: 120015 - DNA, 17 bp, Arabidopsis thaliana
gtatcgtcaaagcacca

SEQ ID NO: 120016 - DNA, 17 bp, Arabidopsis thaliana
gtatcgtcaggttgtgg

SEQ ID NO: 120017 - DNA, 17 bp, Arabidopsis thaliana
gtatcgtcctcatcgcc

SEQ ID NO: 120018 - DNA, 17 bp, Arabidopsis thaliana
gtatcgtcctcatcgct

SEQ ID NO: 120019 - DNA, 17 bp, Arabidopsis thaliana
gtatcgtctacttagtt

SEQ ID NO: 120020 - DNA, 17 bp, Arabidopsis thaliana
gtatcgtctgtcgtgat

SEQ ID NO: 120021 - DNA, 17 bp, Arabidopsis thaliana
gtatcgtctgtcgtgca

SEQ ID NO: 120022 - DNA, 17 bp, Arabidopsis thaliana
gtatcgtctgtcgtgga

SEQ ID NO: 120023 - DNA, 17 bp, Arabidopsis thaliana
gtatcgtcttcaacatc

SEQ ID NO: 120024 - DNA, 17 bp, Arabidopsis thaliana
gtatcgtgtgggccgga

SEQ ID NO: 120025 - DNA, 17 bp, Arabidopsis thaliana
gtatcgtttaataattc

SEQ ID NO: 120026 - DNA, 17 bp, Arabidopsis thaliana
gtatctacagctcaagg

SEQ ID NO: 120027 - DNA, 17 bp, Arabidopsis thaliana
gtatctactttgatggt

SEQ ID NO: 120028 - DNA, 17 bp, Arabidopsis thaliana
gtatctagaatgtgacc

SEQ ID NO: 120029 - DNA, 17 bp, Arabidopsis thaliana
gtatctagatctgccgg

SEQ ID NO: 120030 - DNA, 17 bp, Arabidopsis thaliana
gtatctagcggtttcta

SEQ ID NO: 120031 - DNA, 17 bp, Arabidopsis thaliana
gtatctagtcctgggcg

SEQ ID NO: 120032 - DNA, 17 bp, Arabidopsis thaliana
gtatctatctggagttt

SEQ ID NO: 120033 - DNA, 17 bp, Arabidopsis thaliana
gtatctcaacggtggca

SEQ ID NO: 120034 - DNA, 17 bp, Arabidopsis thaliana
gtatctcaagacttctg

SEQ ID NO: 120035 - DNA, 17 bp, Arabidopsis thaliana
gtatctcaatcagatat

SEQ ID NO: 120036 - DNA, 17 bp, Arabidopsis thaliana
gtatctcaggcaaatgg

SEQ ID NO: 120037 - DNA, 17 bp, Arabidopsis thaliana
gtatctccatttcgtat

SEQ ID NO: 120038 - DNA, 17 bp, Arabidopsis thaliana
gtatctcggtttctatg

SEQ ID NO: 120039 - DNA, 17 bp, Arabidopsis thaliana
gtatctcgtcgattgat

SEQ ID NO: 120040 - DNA, 17 bp, Arabidopsis thaliana
gtatctctcaggtgtcg

SEQ ID NO: 120041 - DNA, 17 bp, Arabidopsis thaliana
gtatctctggtgtagtt

SEQ ID NO: 120042 - DNA, 17 bp, Arabidopsis thaliana
gtatctcttcgcccata

SEQ ID NO: 120043 - DNA, 17 bp, Arabidopsis thaliana
gtatctgaatccctcta

SEQ ID NO: 120044 - DNA, 17 bp, Arabidopsis thaliana
gtatctgagagagtatc

SEQ ID NO: 120045 - DNA, 17 bp, Arabidopsis thaliana
gtatctgatggcgtgcc

SEQ ID NO: 120046 - DNA, 17 bp, Arabidopsis thaliana
gtatctgattgctcttt

SEQ ID NO: 120047 - DNA, 17 bp, Arabidopsis thaliana
gtatctgcacaacgcta

SEQ ID NO: 120048 - DNA, 17 bp, Arabidopsis thaliana
gtatctgctaacgcaaa

SEQ ID NO: 120049 - DNA, 17 bp, Arabidopsis thaliana
gtatctgctgatgtttg

SEQ ID NO: 120050 - DNA, 17 bp, Arabidopsis thaliana
gtatctgcttgggattt

SEQ ID NO: 120051 - DNA, 17 bp, Arabidopsis thaliana
gtatctggtgccattaa

SEQ ID NO: 120052 - DNA, 17 bp, Arabidopsis thaliana
gtatctgtaactacatt

SEQ ID NO: 120053 - DNA, 17 bp, Arabidopsis thaliana
gtatctgtgacatctac

SEQ ID NO: 120054 - DNA, 17 bp, Arabidopsis thaliana
gtatctgtgttggctac

SEQ ID NO: 120055 - DNA, 17 bp, Arabidopsis thaliana
gtatcttcgctgtctga

SEQ ID NO: 120056 - DNA, 17 bp, Arabidopsis thaliana
gtatcttctagggtttt

SEQ ID NO: 120057 - DNA, 17 bp, Arabidopsis thaliana
gtatcttctaggtttgc

SEQ ID NO: 120058 - DNA, 17 bp, Arabidopsis thaliana
gtatcttctcattggcc

SEQ ID NO: 120059 - DNA, 17 bp, Arabidopsis thaliana
gtatcttgccgttttcg

SEQ ID NO: 120060 - DNA, 17 bp, Arabidopsis thaliana
gtatcttgcctcgtggt

SEQ ID NO: 120061 - DNA, 17 bp, Arabidopsis thaliana
gtatcttggtgccgcta

SEQ ID NO: 120062 - DNA, 17 bp, Arabidopsis thaliana
gtatcttggttaggtgg

SEQ ID NO: 120063 - DNA, 17 bp, Arabidopsis thaliana
gtatcttgttttctggg

SEQ ID NO: 120064 - DNA, 17 bp, Arabidopsis thaliana
gtatctttgcgctgatc

SEQ ID NO: 120065 - DNA, 17 bp, Arabidopsis thaliana
gtatctttggactggcc

SEQ ID NO: 120066 - DNA, 17 bp, Arabidopsis thaliana
gtatctttgttgctcag

SEQ ID NO: 120067 - DNA, 17 bp, Arabidopsis thaliana
gtatgaacgaattcaga

SEQ ID NO: 120068 - DNA, 17 bp, Arabidopsis thaliana
gtatgaacgaattcata

SEQ ID NO: 120069 - DNA, 17 bp, Arabidopsis thaliana
gtatgaacgaattcgaa

SEQ ID NO: 120070 - DNA, 17 bp, Arabidopsis thaliana
gtatgaatcttaggaca

SEQ ID NO: 120071 - DNA, 17 bp, Arabidopsis thaliana
gtatgacacagcgttct

SEQ ID NO: 120072 - DNA, 17 bp, Arabidopsis thaliana
gtatgaccacaatccag

SEQ ID NO: 120073 - DNA, 17 bp, Arabidopsis thaliana
gtatgaccgggagttta

SEQ ID NO: 120074 - DNA, 17 bp, Arabidopsis thaliana
gtatgacgagtggtgct

SEQ ID NO: 120075 - DNA, 17 bp, Arabidopsis thaliana
gtatgacggaacaaccg

SEQ ID NO: 120076 - DNA, 17 bp, Arabidopsis thaliana
gtatgagaccatctaca

SEQ ID NO: 120077 - DNA, 17 bp, Arabidopsis thaliana
gtatgagcgtgccaaaa

SEQ ID NO: 120078 - DNA, 17 bp, Arabidopsis thaliana
gtatgaggtcctttagc

SEQ ID NO: 120079 - DNA, 17 bp, Arabidopsis thaliana
gtatgatcagtcgagct

SEQ ID NO: 120080 - DNA, 17 bp, Arabidopsis thaliana
gtatgatggcgtatggt

SEQ ID NO: 120081 - DNA, 17 bp, Arabidopsis thaliana
gtatgatgtattgcgaa

SEQ ID NO: 120082 - DNA, 17 bp, Arabidopsis thaliana
gtatgatgtccttggag

SEQ ID NO: 120083 - DNA, 17 bp, Arabidopsis thaliana
gtatgatgtcgatggcc

SEQ ID NO: 120084 - DNA, 17 bp, Arabidopsis thaliana
gtatgattggtgccgac

SEQ ID NO: 120085 - DNA, 17 bp, Arabidopsis thaliana
gtatgcaccgatttatt

SEQ ID NO: 120086 - DNA, 17 bp, Arabidopsis thaliana
gtatgcctgaccagctc

SEQ ID NO: 120087 - DNA, 17 bp, Arabidopsis thaliana
gtatgcgctcttgagca

SEQ ID NO: 120088 - DNA, 17 bp, Arabidopsis thaliana
gtatgcgggtcggggca

SEQ ID NO: 120089 - DNA, 17 bp, Arabidopsis thaliana
gtatgctaagagcgact

SEQ ID NO: 120090 - DNA, 17 bp, Arabidopsis thaliana
gtatgctgcaacgtcac

SEQ ID NO: 120091 - DNA, 17 bp, Arabidopsis thaliana
gtatgctgccacgtcac

SEQ ID NO: 120092 - DNA, 17 bp, Arabidopsis thaliana
gtatgctgtctgagcca

SEQ ID NO: 120093 - DNA, 17 bp, Arabidopsis thaliana
gtatgcttccgaggatg

SEQ ID NO: 120094 - DNA, 17 bp, Arabidopsis thaliana
gtatgcttggaatttac

SEQ ID NO: 120095 - DNA, 17 bp, Arabidopsis thaliana
gtatgctttggcattgg

SEQ ID NO: 120096 - DNA, 17 bp, Arabidopsis thaliana
gtatggaaaataactac

SEQ ID NO: 120097 - DNA, 17 bp, Arabidopsis thaliana
gtatggacaacgggctg

SEQ ID NO: 120098 - DNA, 17 bp, Arabidopsis thaliana
gtatggaccatctttgt

SEQ ID NO: 120099 - DNA, 17 bp, Arabidopsis thaliana
gtatggacgggatgttg

SEQ ID NO: 120100 - DNA, 17 bp, Arabidopsis thaliana
gtatggactggattgat

SEQ ID NO: 120101 - DNA, 17 bp, Arabidopsis thaliana
gtatggactggattgct

SEQ ID NO: 120102 - DNA, 17 bp, Arabidopsis thaliana
gtatggactgtggacag

SEQ ID NO: 120103 - DNA, 17 bp, Arabidopsis thaliana
gtatggatcgcagatta

SEQ ID NO: 120104 - DNA, 17 bp, Arabidopsis thaliana
gtatggatcgtacatgg

SEQ ID NO: 120105 - DNA, 17 bp, Arabidopsis thaliana
gtatggattttgggtct

SEQ ID NO: 120106 - DNA, 17 bp, Arabidopsis thaliana
gtatggcctccaatgtg

SEQ ID NO: 120107 - DNA, 17 bp, Arabidopsis thaliana
gtatggctaggatttat

SEQ ID NO: 120108 - DNA, 17 bp, Arabidopsis thaliana
gtatggctctgaaccat

SEQ ID NO: 120109 - DNA, 17 bp, Arabidopsis thaliana
gtatggctttggctcgg

SEQ ID NO: 120110 - DNA, 17 bp, Arabidopsis thaliana
gtatgggagcccgtgtc

SEQ ID NO: 120111 - DNA, 17 bp, Arabidopsis thaliana
gtatggggattttggcc

SEQ ID NO: 120112 - DNA, 17 bp, Arabidopsis thaliana
gtatgggggctgacgcc

SEQ ID NO: 120113 - DNA, 17 bp, Arabidopsis thaliana
gtatgggtggtgtagtc

SEQ ID NO: 120114 - DNA, 17 bp, Arabidopsis thaliana
gtatggtcgcaaggctg

SEQ ID NO: 120115 - DNA, 17 bp, Arabidopsis thaliana
gtatggttgattctagc

SEQ ID NO: 120116 - DNA, 17 bp, Arabidopsis thaliana
gtatggttttcaaagtt

SEQ ID NO: 120117 - DNA, 17 bp, Arabidopsis thaliana
gtatgtaactgcggctt

SEQ ID NO: 120118 - DNA, 17 bp, Arabidopsis thaliana
gtatgtactgtgaccgg

SEQ ID NO: 120119 - DNA, 17 bp, Arabidopsis thaliana
gtatgtagattggcgga

SEQ ID NO: 120120 - DNA, 17 bp, Arabidopsis thaliana
gtatgtagtttagtggt

SEQ ID NO: 120121 - DNA, 17 bp, Arabidopsis thaliana
gtatgtatccgatttcg

SEQ ID NO: 120122 - DNA, 17 bp, Arabidopsis thaliana
gtatgtattgcaggtga

SEQ ID NO: 120123 - DNA, 17 bp, Arabidopsis thaliana
gtatgtcatctaacagc

SEQ ID NO: 120124 - DNA, 17 bp, Arabidopsis thaliana
gtatgtccaaattgctg

SEQ ID NO: 120125 - DNA, 17 bp, Arabidopsis thaliana
gtatgtctcttggttct

SEQ ID NO: 120126 - DNA, 17 bp, Arabidopsis thaliana
gtatgtcttctggttct

SEQ ID NO: 120127 - DNA, 17 bp, Arabidopsis thaliana
gtatgttccaagggttg

SEQ ID NO: 120128 - DNA, 17 bp, Arabidopsis thaliana
gtatgttggatcaggcc

SEQ ID NO: 120129 - DNA, 17 bp, Arabidopsis thaliana
gtatgttgtcacgtcac

SEQ ID NO: 120130 - DNA, 17 bp, Arabidopsis thaliana
gtatgttgtcgatggtt

SEQ ID NO: 120131 - DNA, 17 bp, Arabidopsis thaliana
gtatgttgtggcgaaat

SEQ ID NO: 120132 - DNA, 17 bp, Arabidopsis thaliana
gtatgttttgacatcgg

SEQ ID NO: 120133 - DNA, 17 bp, Arabidopsis thaliana
gtattacaatggcttgc

SEQ ID NO: 120134 - DNA, 17 bp, Arabidopsis thaliana
gtattacatgccaagtt

SEQ ID NO: 120135 - DNA, 17 bp, Arabidopsis thaliana
gtattacggtcgctgac

SEQ ID NO: 120136 - DNA, 17 bp, Arabidopsis thaliana
gtattacggtggcggcc

SEQ ID NO: 120137 - DNA, 17 bp, Arabidopsis thaliana
gtattactatcgatcca

SEQ ID NO: 120138 - DNA, 17 bp, Arabidopsis thaliana
gtattagagtgtgggct

SEQ ID NO: 120139 - DNA, 17 bp, Arabidopsis thaliana
gtattaggaccgtctgg

SEQ ID NO: 120140 - DNA, 17 bp, Arabidopsis thaliana
gtattatctgctggaga

SEQ ID NO: 120141 - DNA, 17 bp, Arabidopsis thaliana
gtattatgcccaggcct

SEQ ID NO: 120142 - DNA, 17 bp, Arabidopsis thaliana
gtattatgcccaggctt

SEQ ID NO: 120143 - DNA, 17 bp, Arabidopsis thaliana
gtattatgttccaagac

SEQ ID NO: 120144 - DNA, 17 bp, Arabidopsis thaliana
gtattcaacgagttcac

SEQ ID NO: 120145 - DNA, 17 bp, Arabidopsis thaliana
gtattcaagagcaggga

SEQ ID NO: 120146 - DNA, 17 bp, Arabidopsis thaliana
gtattcacagtgactaa

SEQ ID NO: 120147 - DNA, 17 bp, Arabidopsis thaliana
gtattcagatttgcctc

SEQ ID NO: 120148 - DNA, 17 bp, Arabidopsis thaliana
gtattcagatttgcctg

SEQ ID NO: 120149 - DNA, 17 bp, Arabidopsis thaliana
gtattcaggtgccatgt

SEQ ID NO: 120150 - DNA, 17 bp, Arabidopsis thaliana
gtattcagttcagatgt

SEQ ID NO: 120151 - DNA, 17 bp, Arabidopsis thaliana
gtattcagttcggggcc

SEQ ID NO: 120152 - DNA, 17 bp, Arabidopsis thaliana
gtattcatcaaccgcat

SEQ ID NO: 120153 - DNA, 17 bp, Arabidopsis thaliana
gtattcatccaccgtgt

SEQ ID NO: 120154 - DNA, 17 bp, Arabidopsis thaliana
gtattcatgcctgttga

SEQ ID NO: 120155 - DNA, 17 bp, Arabidopsis thaliana
gtattccacttggacgt

SEQ ID NO: 120156 - DNA, 17 bp, Arabidopsis thaliana
gtattccaggctgagca

SEQ ID NO: 120157 - DNA, 17 bp, Arabidopsis thaliana
gtattcccgcctgtcac

SEQ ID NO: 120158 - DNA, 17 bp, Arabidopsis thaliana
gtattccctgcagcagt

SEQ ID NO: 120159 - DNA, 17 bp, Arabidopsis thaliana
gtattccgttgcaatac

SEQ ID NO: 120160 - DNA, 17 bp, Arabidopsis thaliana
gtattcctcctctgtca

SEQ ID NO: 120161 - DNA, 17 bp, Arabidopsis thaliana
gtattccttcagggatt

SEQ ID NO: 120162 - DNA, 17 bp, Arabidopsis thaliana
gtattcgagtcccaccg

SEQ ID NO: 120163 - DNA, 17 bp, Arabidopsis thaliana
gtattcgatgtgggacc

SEQ ID NO: 120164 - DNA, 17 bp, Arabidopsis thaliana
gtattcgccgctccacc

SEQ ID NO: 120165 - DNA, 17 bp, Arabidopsis thaliana
gtattcggcggctccct

SEQ ID NO: 120166 - DNA, 17 bp, Arabidopsis thaliana
gtattcgggataagttt

SEQ ID NO: 120167 - DNA, 17 bp, Arabidopsis thaliana
gtattcgggttcaggtt

SEQ ID NO: 120168 - DNA, 17 bp, Arabidopsis thaliana
gtattcgtcgtgtagtt

SEQ ID NO: 120169 - DNA, 17 bp, Arabidopsis thaliana
gtattctcccgtggcta

SEQ ID NO: 120170 - DNA, 17 bp, Arabidopsis thaliana
gtattcttaggtgtgtc

SEQ ID NO: 120171 - DNA, 17 bp, Arabidopsis thaliana
gtattcttgaggtccct

SEQ ID NO: 120172 - DNA, 17 bp, Arabidopsis thaliana
gtattgaaacggtggat

SEQ ID NO: 120173 - DNA, 17 bp, Arabidopsis thaliana
gtattgaaccgcatgtt

SEQ ID NO: 120174 - DNA, 17 bp, Arabidopsis thaliana
gtattgacctgccagag

SEQ ID NO: 120175 - DNA, 17 bp, Arabidopsis thaliana
gtattgatttgagcgtt

SEQ ID NO: 120176 - DNA, 17 bp, Arabidopsis thaliana
gtattgcagtttgttaa

SEQ ID NO: 120177 - DNA, 17 bp, Arabidopsis thaliana
gtattgccgtaatttgc

SEQ ID NO: 120178 - DNA, 17 bp, Arabidopsis thaliana
gtattgcgaggatactc

SEQ ID NO: 120179 - DNA, 17 bp, Arabidopsis thaliana
gtattgcgatggtccct

SEQ ID NO: 120180 - DNA, 17 bp, Arabidopsis thaliana
gtattgcgggtgacttt

SEQ ID NO: 120181 - DNA, 17 bp, Arabidopsis thaliana
gtattgctggtctgtac

SEQ ID NO: 120182 - DNA, 17 bp, Arabidopsis thaliana
gtattgctgttgcggcc

SEQ ID NO: 120183 - DNA, 17 bp, Arabidopsis thaliana
gtattggcactgtacct

SEQ ID NO: 120184 - DNA, 17 bp, Arabidopsis thaliana
gtattggccgtttttgg

SEQ ID NO: 120185 - DNA, 17 bp, Arabidopsis thaliana
gtattggcctaaaactg

SEQ ID NO: 120186 - DNA, 17 bp, Arabidopsis thaliana
gtattggctctaacgtc

SEQ ID NO: 120187 - DNA, 17 bp, Arabidopsis thaliana
gtattggctgagtgata

SEQ ID NO: 120188 - DNA, 17 bp, Arabidopsis thaliana
gtattgggatccaaggg

SEQ ID NO: 120189 - DNA, 17 bp, Arabidopsis thaliana
gtattgggcagggccgc

SEQ ID NO: 120190 - DNA, 17 bp, Arabidopsis thaliana
gtattgggttcgaacgt

SEQ ID NO: 120191 - DNA, 17 bp, Arabidopsis thaliana
gtattggtttgtttgat

SEQ ID NO: 120192 - DNA, 17 bp, Arabidopsis thaliana
gtattgtccgacttgat

SEQ ID NO: 120193 - DNA, 17 bp, Arabidopsis thaliana
gtattgtccttctttcg

SEQ ID NO: 120194 - DNA, 17 bp, Arabidopsis thaliana
gtattgtcgaaggtgct

SEQ ID NO: 120195 - DNA, 17 bp, Arabidopsis thaliana
gtattgtcggaggtgct

SEQ ID NO: 120196 - DNA, 17 bp, Arabidopsis thaliana
gtattgtctaaccgacc

SEQ ID NO: 120197 - DNA, 17 bp, Arabidopsis thaliana
gtattgtgcgtgtgcga

SEQ ID NO: 120198 - DNA, 17 bp, Arabidopsis thaliana
gtattgtgctttcgtcc

SEQ ID NO: 120199 - DNA, 17 bp, Arabidopsis thaliana
gtattgttcgacttttt

SEQ ID NO: 120200 - DNA, 17 bp, Arabidopsis thaliana
gtattgttcgcggcttc

SEQ ID NO: 120201 - DNA, 17 bp, Arabidopsis thaliana
gtattgtttgctcgagg

SEQ ID NO: 120202 - DNA, 17 bp, Arabidopsis thaliana
gtattgtttgctcgatg

SEQ ID NO: 120203 - DNA, 17 bp, Arabidopsis thaliana
gtatttaacggtctagg

SEQ ID NO: 120204 - DNA, 17 bp, Arabidopsis thaliana
gtatttaccatcatgcc

SEQ ID NO: 120205 - DNA, 17 bp, Arabidopsis thaliana
gtatttactatggtcgg

SEQ ID NO: 120206 - DNA, 17 bp, Arabidopsis thaliana
gtatttagagaaatctc

SEQ ID NO: 120207 - DNA, 17 bp, Arabidopsis thaliana
gtatttaggtgcgtttt

SEQ ID NO: 120208 - DNA, 17 bp, Arabidopsis thaliana
gtatttcaaaggtccgt

SEQ ID NO: 120209 - DNA, 17 bp, Arabidopsis thaliana
gtatttcattgtgcggt

SEQ ID NO: 120210 - DNA, 17 bp, Arabidopsis thaliana
gtatttccagcaggaga

SEQ ID NO: 120211 - DNA, 17 bp, Arabidopsis thaliana
gtatttccgagatgtta

SEQ ID NO: 120212 - DNA, 17 bp, Arabidopsis thaliana
gtatttccgagatgttg

SEQ ID NO: 120213 - DNA, 17 bp, Arabidopsis thaliana
gtatttccgagatgttt

SEQ ID NO: 120214 - DNA, 17 bp, Arabidopsis thaliana
gtatttcttcgggtgaa

SEQ ID NO: 120215 - DNA, 17 bp, Arabidopsis thaliana
gtatttcttgtggggaa

SEQ ID NO: 120216 - DNA, 17 bp, Arabidopsis thaliana
gtatttgaatgccactg

SEQ ID NO: 120217 - DNA, 17 bp, Arabidopsis thaliana
gtatttgatccgtcata

SEQ ID NO: 120218 - DNA, 17 bp, Arabidopsis thaliana
gtatttgattaagccca

SEQ ID NO: 120219 - DNA, 17 bp, Arabidopsis thaliana
gtatttgattggctact

SEQ ID NO: 120220 - DNA, 17 bp, Arabidopsis thaliana
gtatttgcagtgcgccg

SEQ ID NO: 120221 - DNA, 17 bp, Arabidopsis thaliana
gtatttgcagtgcgcgg

SEQ ID NO: 120222 - DNA, 17 bp, Arabidopsis thaliana
gtatttgccattagatc

SEQ ID NO: 120223 - DNA, 17 bp, Arabidopsis thaliana
gtatttgcggttgtttg

SEQ ID NO: 120224 - DNA, 17 bp, Arabidopsis thaliana
gtatttggaccacaagt

SEQ ID NO: 120225 - DNA, 17 bp, Arabidopsis thaliana
gtatttggagtgacggg

SEQ ID NO: 120226 - DNA, 17 bp, Arabidopsis thaliana
gtatttggatcggattt

SEQ ID NO: 120227 - DNA, 17 bp, Arabidopsis thaliana
gtatttggatggatcat

SEQ ID NO: 120228 - DNA, 17 bp, Arabidopsis thaliana
gtatttggctgcagcca

SEQ ID NO: 120229 - DNA, 17 bp, Arabidopsis thaliana
gtatttggtcgcaggga

SEQ ID NO: 120230 - DNA, 17 bp, Arabidopsis thaliana
gtatttggttacaaact

SEQ ID NO: 120231 - DNA, 17 bp, Arabidopsis thaliana
gtatttgtatccaggcc

SEQ ID NO: 120232 - DNA, 17 bp, Arabidopsis thaliana
gtatttgtccgctctaa

SEQ ID NO: 120233 - DNA, 17 bp, Arabidopsis thaliana
gtatttgtcggctacag

SEQ ID NO: 120234 - DNA, 17 bp, Arabidopsis thaliana
gtatttgtgcgccttga

SEQ ID NO: 120235 - DNA, 17 bp, Arabidopsis thaliana
gtatttgtgcgttgaga

SEQ ID NO: 120236 - DNA, 17 bp, Arabidopsis thaliana
gtatttgttcatgagcc

SEQ ID NO: 120237 - DNA, 17 bp, Arabidopsis thaliana
gtattttaccgttgggg

SEQ ID NO: 120238 - DNA, 17 bp, Arabidopsis thaliana
gtattttattcaggttt

SEQ ID NO: 120239 - DNA, 17 bp, Arabidopsis thaliana
gtattttcacggatgta

SEQ ID NO: 120240 - DNA, 17 bp, Arabidopsis thaliana
gtattttcattgagatc

SEQ ID NO: 120241 - DNA, 17 bp, Arabidopsis thaliana
gtattttcgcaggtgga

SEQ ID NO: 120242 - DNA, 17 bp, Arabidopsis thaliana
gtattttcgtttgcctt

SEQ ID NO: 120243 - DNA, 17 bp, Arabidopsis thaliana
gtattttgactgctaac

SEQ ID NO: 120244 - DNA, 17 bp, Arabidopsis thaliana
gtattttggaacctcgg

SEQ ID NO: 120245 - DNA, 17 bp, Arabidopsis thaliana
gtcaaaaactctcatgt

SEQ ID NO: 120246 - DNA, 17 bp, Arabidopsis thaliana
gtcaaaaatgcaggtgg

SEQ ID NO: 120247 - DNA, 17 bp, Arabidopsis thaliana
gtcaaaacccggagctc

SEQ ID NO: 120248 - DNA, 17 bp, Arabidopsis thaliana
gtcaaaaccggtaatcc

SEQ ID NO: 120249 - DNA, 17 bp, Arabidopsis thaliana
gtcaaaacgatgacttg

SEQ ID NO: 120250 - DNA, 17 bp, Arabidopsis thaliana
gtcaaaactcatgagcc

SEQ ID NO: 120251 - DNA, 17 bp, Arabidopsis thaliana
gtcaaaagagcgctcag

SEQ ID NO: 120252 - DNA, 17 bp, Arabidopsis thaliana
gtcaaaatctgcatctt

SEQ ID NO: 120253 - DNA, 17 bp, Arabidopsis thaliana
gtcaaaattcatgggcc

SEQ ID NO: 120254 - DNA, 17 bp, Arabidopsis thaliana
gtcaaaattggggtcga

SEQ ID NO: 120255 - DNA, 17 bp, Arabidopsis thaliana
gtcaaaattgtaaattc

SEQ ID NO: 120256 - DNA, 17 bp, Arabidopsis thaliana
gtcaaacaggtgttgcg

SEQ ID NO: 120257 - DNA, 17 bp, Arabidopsis thaliana
gtcaaacattattccgt

SEQ ID NO: 120258 - DNA, 17 bp, Arabidopsis thaliana
gtcaaaccacagcatgg

SEQ ID NO: 120259 - DNA, 17 bp, Arabidopsis thaliana
gtcaaaccattttctat

SEQ ID NO: 120260 - DNA, 17 bp, Arabidopsis thaliana
gtcaaacccgtcatgcc

SEQ ID NO: 120261 - DNA, 17 bp, Arabidopsis thaliana
gtcaaactcaattttga

SEQ ID NO: 120262 - DNA, 17 bp, Arabidopsis thaliana
gtcaaacttaaaggttg

SEQ ID NO: 120263 - DNA, 17 bp, Arabidopsis thaliana
gtcaaacttgtttcatc

SEQ ID NO: 120264 - DNA, 17 bp, Arabidopsis thaliana
gtcaaagagtgcttgaa

SEQ ID NO: 120265 - DNA, 17 bp, Arabidopsis thaliana
gtcaaagatcagccagc

SEQ ID NO: 120266 - DNA, 17 bp, Arabidopsis thaliana
gtcaaagcctgctacag

SEQ ID NO: 120267 - DNA, 17 bp, Arabidopsis thaliana
gtcaaagctgcgactta

SEQ ID NO: 120268 - DNA, 17 bp, Arabidopsis thaliana
gtcaaaggcctaagcag

SEQ ID NO: 120269 - DNA, 17 bp, Arabidopsis thaliana
gtcaaaggctttggatt

SEQ ID NO: 120270 - DNA, 17 bp, Arabidopsis thaliana
gtcaaagtgggctggcc

SEQ ID NO: 120271 - DNA, 17 bp, Arabidopsis thaliana
gtcaaagtgtcacaggt

SEQ ID NO: 120272 - DNA, 17 bp, Arabidopsis thaliana
gtcaaagttcgaaggtt

SEQ ID NO: 120273 - DNA, 17 bp, Arabidopsis thaliana
gtcaaataccactttac

SEQ ID NO: 120274 - DNA, 17 bp, Arabidopsis thaliana
gtcaaatattatgtgcc

SEQ ID NO: 120275 - DNA, 17 bp, Arabidopsis thaliana
gtcaaatctatcgatca

SEQ ID NO: 120276 - DNA, 17 bp, Arabidopsis thaliana
gtcaaatctggctaagt

SEQ ID NO: 120277 - DNA, 17 bp, Arabidopsis thaliana
gtcaaatctttgatggt

SEQ ID NO: 120278 - DNA, 17 bp, Arabidopsis thaliana
gtcaaatgagttgggtt

SEQ ID NO: 120279 - DNA, 17 bp, Arabidopsis thaliana
gtcaaatgatcagaccg

SEQ ID NO: 120280 - DNA, 17 bp, Arabidopsis thaliana
gtcaaatgcattggatt

SEQ ID NO: 120281 - DNA, 17 bp, Arabidopsis thaliana
gtcaaatggattttggc

SEQ ID NO: 120282 - DNA, 17 bp, Arabidopsis thaliana
gtcaaattcgccgaaac

SEQ ID NO: 120283 - DNA, 17 bp, Arabidopsis thaliana
gtcaaattctcttgggg

SEQ ID NO: 120284 - DNA, 17 bp, Arabidopsis thaliana
gtcaaattctcttgggt

SEQ ID NO: 120285 - DNA, 17 bp, Arabidopsis thaliana
gtcaaattttgttgact

SEQ ID NO: 120286 - DNA, 17 bp, Arabidopsis thaliana
gtcaaattttgttgatt

SEQ ID NO: 120287 - DNA, 17 bp, Arabidopsis thaliana
gtcaacactacgggatt

SEQ ID NO: 120288 - DNA, 17 bp, Arabidopsis thaliana
gtcaacactttagatct

SEQ ID NO: 120289 - DNA, 17 bp, Arabidopsis thaliana
gtcaacatctcaatgat

SEQ ID NO: 120290 - DNA, 17 bp, Arabidopsis thaliana
gtcaacatctccttcag

SEQ ID NO: 120291 - DNA, 17 bp, Arabidopsis thaliana
gtcaacatctgatcgat

SEQ ID NO: 120292 - DNA, 17 bp, Arabidopsis thaliana
gtcaacatctgattgat

SEQ ID NO: 120293 - DNA, 17 bp, Arabidopsis thaliana
gtcaacatgtttccgac

SEQ ID NO: 120294 - DNA, 17 bp, Arabidopsis thaliana
gtcaaccaggttggacc

SEQ ID NO: 120295 - DNA, 17 bp, Arabidopsis thaliana
gtcaaccattagaccaa

SEQ ID NO: 120296 - DNA, 17 bp, Arabidopsis thaliana
gtcaaccattgggccaa

SEQ ID NO: 120297 - DNA, 17 bp, Arabidopsis thaliana
gtcaaccgaaactttgc

SEQ ID NO: 120298 - DNA, 17 bp, Arabidopsis thaliana
gtcaaccggatcttaaa

SEQ ID NO: 120299 - DNA, 17 bp, Arabidopsis thaliana
gtcaaccgtatcagctg

SEQ ID NO: 120300 - DNA, 17 bp, Arabidopsis thaliana
gtcaaccgtggcgtgac

SEQ ID NO: 120301 - DNA, 17 bp, Arabidopsis thaliana
gtcaacgacaacgacag

SEQ ID NO: 120302 - DNA, 17 bp, Arabidopsis thaliana
gtcaacgataacgacag

SEQ ID NO: 120303 - DNA, 17 bp, Arabidopsis thaliana
gtcaacgcagagctccg

SEQ ID NO: 120304 - DNA, 17 bp, Arabidopsis thaliana
gtcaacgcgagctgatg

SEQ ID NO: 120305 - DNA, 17 bp, Arabidopsis thaliana
gtcaacggatcagacag

SEQ ID NO: 120306 - DNA, 17 bp, Arabidopsis thaliana
gtcaacggctactgtgc

SEQ ID NO: 120307 - DNA, 17 bp, Arabidopsis thaliana
gtcaacgggtgtggcct

SEQ ID NO: 120308 - DNA, 17 bp, Arabidopsis thaliana
gtcaacgtagttcaccg

SEQ ID NO: 120309 - DNA, 17 bp, Arabidopsis thaliana
gtcaactaagcttgatg

SEQ ID NO: 120310 - DNA, 17 bp, Arabidopsis thaliana
gtcaactaagtccttcc

SEQ ID NO: 120311 - DNA, 17 bp, Arabidopsis thaliana
gtcaactaatagcgggg

SEQ ID NO: 120312 - DNA, 17 bp, Arabidopsis thaliana
gtcaactaatctgtgga

SEQ ID NO: 120313 - DNA, 17 bp, Arabidopsis thaliana
gtcaactagtgactcat

SEQ ID NO: 120314 - DNA, 17 bp, Arabidopsis thaliana
gtcaactatggttggtg

SEQ ID NO: 120315 - DNA, 17 bp, Arabidopsis thaliana
gtcaactattgggccaa

SEQ ID NO: 120316 - DNA, 17 bp, Arabidopsis thaliana
gtcaactattgggccag

SEQ ID NO: 120317 - DNA, 17 bp, Arabidopsis thaliana
gtcaactcataggatcg

SEQ ID NO: 120318 - DNA, 17 bp, Arabidopsis thaliana
gtcaactcggccgagtg

SEQ ID NO: 120319 - DNA, 17 bp, Arabidopsis thaliana
gtcaactcgtgcagttt

SEQ ID NO: 120320 - DNA, 17 bp, Arabidopsis thaliana
gtcaactctctctgatt

SEQ ID NO: 120321 - DNA, 17 bp, Arabidopsis thaliana
gtcaactctgttatcgt

SEQ ID NO: 120322 - DNA, 17 bp, Arabidopsis thaliana
gtcaactgctggattgc

SEQ ID NO: 120323 - DNA, 17 bp, Arabidopsis thaliana
gtcaactggacaggcgc

SEQ ID NO: 120324 - DNA, 17 bp, Arabidopsis thaliana
gtcaactgggagatgtt

SEQ ID NO: 120325 - DNA, 17 bp, Arabidopsis thaliana
gtcaactgtggatcaag

SEQ ID NO: 120326 - DNA, 17 bp, Arabidopsis thaliana
gtcaacttcctggcttg

SEQ ID NO: 120327 - DNA, 17 bp, Arabidopsis thaliana
gtcaacttcgtatgcgg

SEQ ID NO: 120328 - DNA, 17 bp, Arabidopsis thaliana
gtcaacttcgtatgctg

SEQ ID NO: 120329 - DNA, 17 bp, Arabidopsis thaliana
gtcaagaacacagtgtc

SEQ ID NO: 120330 - DNA, 17 bp, Arabidopsis thaliana
gtcaagacccaactgac

SEQ ID NO: 120331 - DNA, 17 bp, Arabidopsis thaliana
gtcaagacccacctcac

SEQ ID NO: 120332 - DNA, 17 bp, Arabidopsis thaliana
gtcaagacctagaatga

SEQ ID NO: 120333 - DNA, 17 bp, Arabidopsis thaliana
gtcaagacctagaatgc

SEQ ID NO: 120334 - DNA, 17 bp, Arabidopsis thaliana
gtcaagactacgtgcag

SEQ ID NO: 120335 - DNA, 17 bp, Arabidopsis thaliana
gtcaagactttcttgct

SEQ ID NO: 120336 - DNA, 17 bp, Arabidopsis thaliana
gtcaagatcagccagct

SEQ ID NO: 120337 - DNA, 17 bp, Arabidopsis thaliana
gtcaagatccttcatct

SEQ ID NO: 120338 - DNA, 17 bp, Arabidopsis thaliana
gtcaagatcgcgtagct

SEQ ID NO: 120339 - DNA, 17 bp, Arabidopsis thaliana
gtcaagatcgtatagct

SEQ ID NO: 120340 - DNA, 17 bp, Arabidopsis thaliana
gtcaagatcgtgcagct

SEQ ID NO: 120341 - DNA, 17 bp, Arabidopsis thaliana
gtcaagatcgtgtagct

SEQ ID NO: 120342 - DNA, 17 bp, Arabidopsis thaliana
gtcaagatctgctgcat

SEQ ID NO: 120343 - DNA, 17 bp, Arabidopsis thaliana
gtcaagatggccgagtc

SEQ ID NO: 120344 - DNA, 17 bp, Arabidopsis thaliana
gtcaagatggccgagtt

SEQ ID NO: 120345 - DNA, 17 bp, Arabidopsis thaliana
gtcaagatggtcgagtt

SEQ ID NO: 120346 - DNA, 17 bp, Arabidopsis thaliana
gtcaagattcatgggtc

SEQ ID NO: 120347 - DNA, 17 bp, Arabidopsis thaliana
gtcaagattgatcatca

SEQ ID NO: 120348 - DNA, 17 bp, Arabidopsis thaliana
gtcaagccaagcataac

SEQ ID NO: 120349 - DNA, 17 bp, Arabidopsis thaliana
gtcaagcctgtttagca

SEQ ID NO: 120350 - DNA, 17 bp, Arabidopsis thaliana
gtcaagccttcacccag

SEQ ID NO: 120351 - DNA, 17 bp, Arabidopsis thaliana
gtcaagcggttaagtcc

SEQ ID NO: 120352 - DNA, 17 bp, Arabidopsis thaliana
gtcaagctcaacagggt

SEQ ID NO: 120353 - DNA, 17 bp, Arabidopsis thaliana
gtcaagctctgcaacta

SEQ ID NO: 120354 - DNA, 17 bp, Arabidopsis thaliana
gtcaaggaacacgactg

SEQ ID NO: 120355 - DNA, 17 bp, Arabidopsis thaliana
gtcaaggagagtctgac

SEQ ID NO: 120356 - DNA, 17 bp, Arabidopsis thaliana
gtcaaggatctggttac

SEQ ID NO: 120357 - DNA, 17 bp, Arabidopsis thaliana
gtcaaggccagccatag

SEQ ID NO: 120358 - DNA, 17 bp, Arabidopsis thaliana
gtcaaggccagggtgtt

SEQ ID NO: 120359 - DNA, 17 bp, Arabidopsis thaliana
gtcaaggcctgcctcgt

SEQ ID NO: 120360 - DNA, 17 bp, Arabidopsis thaliana
gtcaaggtcggccagtg

SEQ ID NO: 120361 - DNA, 17 bp, Arabidopsis thaliana
gtcaaggtcgtattcgt

SEQ ID NO: 120362 - DNA, 17 bp, Arabidopsis thaliana
gtcaaggttcctcaact

SEQ ID NO: 120363 - DNA, 17 bp, Arabidopsis thaliana
gtcaagtcaatatccag

SEQ ID NO: 120364 - DNA, 17 bp, Arabidopsis thaliana
gtcaagtcatcatgcac

SEQ ID NO: 120365 - DNA, 17 bp, Arabidopsis thaliana
gtcaagtcatcatgccc

SEQ ID NO: 120366 - DNA, 17 bp, Arabidopsis thaliana
gtcaagtccattcgctc

SEQ ID NO: 120367 - DNA, 17 bp, Arabidopsis thaliana
gtcaagtccgcatgccc

SEQ ID NO: 120368 - DNA, 17 bp, Arabidopsis thaliana
gtcaagtccgcatggcc

SEQ ID NO: 120369 - DNA, 17 bp, Arabidopsis thaliana
gtcaagtctatcgatca

SEQ ID NO: 120370 - DNA, 17 bp, Arabidopsis thaliana
gtcaagtctatcgatcg

SEQ ID NO: 120371 - DNA, 17 bp, Arabidopsis thaliana
gtcaagtctatcgttca

SEQ ID NO: 120372 - DNA, 17 bp, Arabidopsis thaliana
gtcaagtctgtcgatca

SEQ ID NO: 120373 - DNA, 17 bp, Arabidopsis thaliana
gtcaagtgactacatcg

SEQ ID NO: 120374 - DNA, 17 bp, Arabidopsis thaliana
gtcaagtgcggcttgtg

SEQ ID NO: 120375 - DNA, 17 bp, Arabidopsis thaliana
gtcaagtgggaatgtga

SEQ ID NO: 120376 - DNA, 17 bp, Arabidopsis thaliana
gtcaagtgggtctgtga

SEQ ID NO: 120377 - DNA, 17 bp, Arabidopsis thaliana
gtcaagtgtgacctgag

SEQ ID NO: 120378 - DNA, 17 bp, Arabidopsis thaliana
gtcaagtgttcggatcg

SEQ ID NO: 120379 - DNA, 17 bp, Arabidopsis thaliana
gtcaagtgttgttagct

SEQ ID NO: 120380 - DNA, 17 bp, Arabidopsis thaliana
gtcaagttccatacggc

SEQ ID NO: 120381 - DNA, 17 bp, Arabidopsis thaliana
gtcaagttgaggcctga

SEQ ID NO: 120382 - DNA, 17 bp, Arabidopsis thaliana
gtcaagttgtaggagag

SEQ ID NO: 120383 - DNA, 17 bp, Arabidopsis thaliana
gtcaagttgtccttggc

SEQ ID NO: 120384 - DNA, 17 bp, Arabidopsis thaliana
gtcaagttgtgggagag

SEQ ID NO: 120385 - DNA, 17 bp, Arabidopsis thaliana
gtcaagtttcaaattgt

SEQ ID NO: 120386 - DNA, 17 bp, Arabidopsis thaliana
gtcaagtttcgacgttc

SEQ ID NO: 120387 - DNA, 17 bp, Arabidopsis thaliana
gtcaagttttaaattgt

SEQ ID NO: 120388 - DNA, 17 bp, Arabidopsis thaliana
gtcaagttttattgact

SEQ ID NO: 120389 - DNA, 17 bp, Arabidopsis thaliana
gtcaagttttattgtct

SEQ ID NO: 120390 - DNA, 17 bp, Arabidopsis thaliana
gtcaagttttgtcccaa

SEQ ID NO: 120391 - DNA, 17 bp, Arabidopsis thaliana
gtcaagttttgttgact

SEQ ID NO: 120392 - DNA, 17 bp, Arabidopsis thaliana
gtcaatacaccggccaa

SEQ ID NO: 120393 - DNA, 17 bp, Arabidopsis thaliana
gtcaatatctccgagtg

SEQ ID NO: 120394 - DNA, 17 bp, Arabidopsis thaliana
gtcaatatgtccgagtg

SEQ ID NO: 120395 - DNA, 17 bp, Arabidopsis thaliana
gtcaatatgtctacgct

SEQ ID NO: 120396 - DNA, 17 bp, Arabidopsis thaliana
gtcaatattgtcggtcg

SEQ ID NO: 120397 - DNA, 17 bp, Arabidopsis thaliana
gtcaatcacctgtaaac

SEQ ID NO: 120398 - DNA, 17 bp, Arabidopsis thaliana
gtcaatccctactatgc

SEQ ID NO: 120399 - DNA, 17 bp, Arabidopsis thaliana
gtcaatcctactttcat

SEQ ID NO: 120400 - DNA, 17 bp, Arabidopsis thaliana
gtcaatcctacttttgc

SEQ ID NO: 120401 - DNA, 17 bp, Arabidopsis thaliana
gtcaatcgcgggttgct

SEQ ID NO: 120402 - DNA, 17 bp, Arabidopsis thaliana
gtcaatcggctggaaat

SEQ ID NO: 120403 - DNA, 17 bp, Arabidopsis thaliana
gtcaatcgtcggatcat

SEQ ID NO: 120404 - DNA, 17 bp, Arabidopsis thaliana
gtcaatctacgcagagt

SEQ ID NO: 120405 - DNA, 17 bp, Arabidopsis thaliana
gtcaatctatggttcgg

SEQ ID NO: 120406 - DNA, 17 bp, Arabidopsis thaliana
gtcaatcttgggctcac

SEQ ID NO: 120407 - DNA, 17 bp, Arabidopsis thaliana
gtcaatctttctcagcc

SEQ ID NO: 120408 - DNA, 17 bp, Arabidopsis thaliana
gtcaatgacgttgcggt

SEQ ID NO: 120409 - DNA, 17 bp, Arabidopsis thaliana
gtcaatgaggcgcctcg

SEQ ID NO: 120410 - DNA, 17 bp, Arabidopsis thaliana
gtcaatgatgttgcggt

SEQ ID NO: 120411 - DNA, 17 bp, Arabidopsis thaliana
gtcaatgccggagtctg

SEQ ID NO: 120412 - DNA, 17 bp, Arabidopsis thaliana
gtcaatggatcagaccg

SEQ ID NO: 120413 - DNA, 17 bp, Arabidopsis thaliana
gtcaatggcagcggcgg

SEQ ID NO: 120414 - DNA, 17 bp, Arabidopsis thaliana
gtcaatggtcttttcca

SEQ ID NO: 120415 - DNA, 17 bp, Arabidopsis thaliana
gtcaatgtccgagtggt

SEQ ID NO: 120416 - DNA, 17 bp, Arabidopsis thaliana
gtcaatgtccgccatca

SEQ ID NO: 120417 - DNA, 17 bp, Arabidopsis thaliana
gtcaatgtgtccgagtg

SEQ ID NO: 120418 - DNA, 17 bp, Arabidopsis thaliana
gtcaatgttatggccga

SEQ ID NO: 120419 - DNA, 17 bp, Arabidopsis thaliana
gtcaattaatcaagcct

SEQ ID NO: 120420 - DNA, 17 bp, Arabidopsis thaliana
gtcaattccgctacgaa

SEQ ID NO: 120421 - DNA, 17 bp, Arabidopsis thaliana
gtcaattccgctgcaag

SEQ ID NO: 120422 - DNA, 17 bp, Arabidopsis thaliana
gtcaattctctctctct

SEQ ID NO: 120423 - DNA, 17 bp, Arabidopsis thaliana
gtcaattctgtctctga

SEQ ID NO: 120424 - DNA, 17 bp, Arabidopsis thaliana
gtcaattcttgttgctg

SEQ ID NO: 120425 - DNA, 17 bp, Arabidopsis thaliana
gtcaattgggcttgacc

SEQ ID NO: 120426 - DNA, 17 bp, Arabidopsis thaliana
gtcaattgggtgggagg

SEQ ID NO: 120427 - DNA, 17 bp, Arabidopsis thaliana
gtcaatttggtgtgact

SEQ ID NO: 120428 - DNA, 17 bp, Arabidopsis thaliana
gtcaatttggtgtgttt

SEQ ID NO: 120429 - DNA, 17 bp, Arabidopsis thaliana
gtcaatttgtgccttta

SEQ ID NO: 120430 - DNA, 17 bp, Arabidopsis thaliana
gtcacaaaataattttg

SEQ ID NO: 120431 - DNA, 17 bp, Arabidopsis thaliana
gtcacaaacactgggac

SEQ ID NO: 120432 - DNA, 17 bp, Arabidopsis thaliana
gtcacaaccaacaacgc

SEQ ID NO: 120433 - DNA, 17 bp, Arabidopsis thaliana
gtcacaacgaaagtatg

SEQ ID NO: 120434 - DNA, 17 bp, Arabidopsis thaliana
gtcacaacgacccgcta

SEQ ID NO: 120435 - DNA, 17 bp, Arabidopsis thaliana
gtcacaacgctacccac

SEQ ID NO: 120436 - DNA, 17 bp, Arabidopsis thaliana
gtcacaagagtggattg

SEQ ID NO: 120437 - DNA, 17 bp, Arabidopsis thaliana
gtcacaagcacgacttg

SEQ ID NO: 120438 - DNA, 17 bp, Arabidopsis thaliana
gtcacaagcgtaacagg

SEQ ID NO: 120439 - DNA, 17 bp, Arabidopsis thaliana
gtcacaagggatctctc

SEQ ID NO: 120440 - DNA, 17 bp, Arabidopsis thaliana
gtcacaagtgtgcagga

SEQ ID NO: 120441 - DNA, 17 bp, Arabidopsis thaliana
gtcacaatccaatgcac

SEQ ID NO: 120442 - DNA, 17 bp, Arabidopsis thaliana
gtcacacatctcaatgc

SEQ ID NO: 120443 - DNA, 17 bp, Arabidopsis thaliana
gtcacacatcttcaacg

SEQ ID NO: 120444 - DNA, 17 bp, Arabidopsis thaliana
gtcacacatggatccat

SEQ ID NO: 120445 - DNA, 17 bp, Arabidopsis thaliana
gtcacaccatataaccc

SEQ ID NO: 120446 - DNA, 17 bp, Arabidopsis thaliana
gtcacactatgggagca

SEQ ID NO: 120447 - DNA, 17 bp, Arabidopsis thaliana
gtcacactatgggagct

SEQ ID NO: 120448 - DNA, 17 bp, Arabidopsis thaliana
gtcacacttgttggccg

SEQ ID NO: 120449 - DNA, 17 bp, Arabidopsis thaliana
gtcacagaaatttgctc

SEQ ID NO: 120450 - DNA, 17 bp, Arabidopsis thaliana
gtcacagactcgcaggg

SEQ ID NO: 120451 - DNA, 17 bp, Arabidopsis thaliana
gtcacagagccgtgcct

SEQ ID NO: 120452 - DNA, 17 bp, Arabidopsis thaliana
gtcacagagctgaagct

SEQ ID NO: 120453 - DNA, 17 bp, Arabidopsis thaliana
gtcacagatacgacgtc

SEQ ID NO: 120454 - DNA, 17 bp, Arabidopsis thaliana
gtcacagattgtgtctt

SEQ ID NO: 120455 - DNA, 17 bp, Arabidopsis thaliana
gtcacagccctatgctc

SEQ ID NO: 120456 - DNA, 17 bp, Arabidopsis thaliana
gtcacagctgttcgcca

SEQ ID NO: 120457 - DNA, 17 bp, Arabidopsis thaliana
gtcacagctgttcgcga

SEQ ID NO: 120458 - DNA, 17 bp, Arabidopsis thaliana
gtcacagcttctacaac

SEQ ID NO: 120459 - DNA, 17 bp, Arabidopsis thaliana
gtcacaggattcgtcga

SEQ ID NO: 120460 - DNA, 17 bp, Arabidopsis thaliana
gtcacaggctcgattcc

SEQ ID NO: 120461 - DNA, 17 bp, Arabidopsis thaliana
gtcacaggtgtggttgc

SEQ ID NO: 120462 - DNA, 17 bp, Arabidopsis thaliana
gtcacagtatgcaagac

SEQ ID NO: 120463 - DNA, 17 bp, Arabidopsis thaliana
gtcacagtgtgggctag

SEQ ID NO: 120464 - DNA, 17 bp, Arabidopsis thaliana
gtcacagttctccggga

SEQ ID NO: 120465 - DNA, 17 bp, Arabidopsis thaliana
gtcacataccggtgctc

SEQ ID NO: 120466 - DNA, 17 bp, Arabidopsis thaliana
gtcacatatgcaggtcc

SEQ ID NO: 120467 - DNA, 17 bp, Arabidopsis thaliana
gtcacatccgacatcta

SEQ ID NO: 120468 - DNA, 17 bp, Arabidopsis thaliana
gtcacatcttcatgcaa

SEQ ID NO: 120469 - DNA, 17 bp, Arabidopsis thaliana
gtcacatgaccgaataa

SEQ ID NO: 120470 - DNA, 17 bp, Arabidopsis thaliana
gtcacattatccgcttc

SEQ ID NO: 120471 - DNA, 17 bp, Arabidopsis thaliana
gtcacatttgccaagac

SEQ ID NO: 120472 - DNA, 17 bp, Arabidopsis thaliana
gtcaccaaagcctttgg

SEQ ID NO: 120473 - DNA, 17 bp, Arabidopsis thaliana
gtcaccaacctgctatt

SEQ ID NO: 120474 - DNA, 17 bp, Arabidopsis thaliana
gtcaccaccgtcgcctc

SEQ ID NO: 120475 - DNA, 17 bp, Arabidopsis thaliana
gtcaccaccttgcgacg

SEQ ID NO: 120476 - DNA, 17 bp, Arabidopsis thaliana
gtcaccagagtgcgagg

SEQ ID NO: 120477 - DNA, 17 bp, Arabidopsis thaliana
gtcaccaggtcatcggg

SEQ ID NO: 120478 - DNA, 17 bp, Arabidopsis thaliana
gtcaccataaactttga

SEQ ID NO: 120479 - DNA, 17 bp, Arabidopsis thaliana
gtcaccatcatcgttcg

SEQ ID NO: 120480 - DNA, 17 bp, Arabidopsis thaliana
gtcaccattcatgacct

SEQ ID NO: 120481 - DNA, 17 bp, Arabidopsis thaliana
gtcaccgacgcggatta

SEQ ID NO: 120482 - DNA, 17 bp, Arabidopsis thaliana
gtcaccgagtttctgaa

SEQ ID NO: 120483 - DNA, 17 bp, Arabidopsis thaliana
gtcaccgatggtggtgc

SEQ ID NO: 120484 - DNA, 17 bp, Arabidopsis thaliana
gtcaccgattttatgac

SEQ ID NO: 120485 - DNA, 17 bp, Arabidopsis thaliana
gtcaccgccagctaagc

SEQ ID NO: 120486 - DNA, 17 bp, Arabidopsis thaliana
gtcaccgccattggttt

SEQ ID NO: 120487 - DNA, 17 bp, Arabidopsis thaliana
gtcaccgctcctgcccc

SEQ ID NO: 120488 - DNA, 17 bp, Arabidopsis thaliana
gtcaccggaactctaga

SEQ ID NO: 120489 - DNA, 17 bp, Arabidopsis thaliana
gtcaccggagtgcgagg

SEQ ID NO: 120490 - DNA, 17 bp, Arabidopsis thaliana
gtcaccggattggaaac

SEQ ID NO: 120491 - DNA, 17 bp, Arabidopsis thaliana
gtcaccggggcgtctca

SEQ ID NO: 120492 - DNA, 17 bp, Arabidopsis thaliana
gtcaccggttcgaatcc

SEQ ID NO: 120493 - DNA, 17 bp, Arabidopsis thaliana
gtcaccggttcggaccc

SEQ ID NO: 120494 - DNA, 17 bp, Arabidopsis thaliana
gtcaccggttcggatcc

SEQ ID NO: 120495 - DNA, 17 bp, Arabidopsis thaliana
gtcaccggttcgtatcc

SEQ ID NO: 120496 - DNA, 17 bp, Arabidopsis thaliana
gtcaccggtttgacgtt

SEQ ID NO: 120497 - DNA, 17 bp, Arabidopsis thaliana
gtcaccgtcattaggct

SEQ ID NO: 120498 - DNA, 17 bp, Arabidopsis thaliana
gtcaccgtccgattagc

SEQ ID NO: 120499 - DNA, 17 bp, Arabidopsis thaliana
gtcacctaccatgtgcg

SEQ ID NO: 120500 - DNA, 17 bp, Arabidopsis thaliana
gtcacctacttatgctt

SEQ ID NO: 120501 - DNA, 17 bp, Arabidopsis thaliana
gtcacctcctccttagc

SEQ ID NO: 120502 - DNA, 17 bp, Arabidopsis thaliana
gtcacctgaagaatgac

SEQ ID NO: 120503 - DNA, 17 bp, Arabidopsis thaliana
gtcacctgaagaatggc

SEQ ID NO: 120504 - DNA, 17 bp, Arabidopsis thaliana
gtcacctgccatgtgcg

SEQ ID NO: 120505 - DNA, 17 bp, Arabidopsis thaliana
gtcacctgcggaaggat

SEQ ID NO: 120506 - DNA, 17 bp, Arabidopsis thaliana
gtcacctgcgtttgcgt

SEQ ID NO: 120507 - DNA, 17 bp, Arabidopsis thaliana
gtcacctggtgcgtggt

SEQ ID NO: 120508 - DNA, 17 bp, Arabidopsis thaliana
gtcacctgttgcttagt

SEQ ID NO: 120509 - DNA, 17 bp, Arabidopsis thaliana
gtcaccttagctcagtt

SEQ ID NO: 120510 - DNA, 17 bp, Arabidopsis thaliana
gtcaccttctaatctcc

SEQ ID NO: 120511 - DNA, 17 bp, Arabidopsis thaliana
gtcaccttgacccaccc

SEQ ID NO: 120512 - DNA, 17 bp, Arabidopsis thaliana
gtcaccttgacccacct

SEQ ID NO: 120513 - DNA, 17 bp, Arabidopsis thaliana
gtcaccttgctctacaa

SEQ ID NO: 120514 - DNA, 17 bp, Arabidopsis thaliana
gtcacgaccggttggtt

SEQ ID NO: 120515 - DNA, 17 bp, Arabidopsis thaliana
gtcacgaccgttggtta

SEQ ID NO: 120516 - DNA, 17 bp, Arabidopsis thaliana
gtcacgaccgtttggtt

SEQ ID NO: 120517 - DNA, 17 bp, Arabidopsis thaliana
gtcacgacgaccggtgg

SEQ ID NO: 120518 - DNA, 17 bp, Arabidopsis thaliana
gtcacgacggattcact

SEQ ID NO: 120519 - DNA, 17 bp, Arabidopsis thaliana
gtcacgactgtggattg

SEQ ID NO: 120520 - DNA, 17 bp, Arabidopsis thaliana
gtcacgagagtggattg

SEQ ID NO: 120521 - DNA, 17 bp, Arabidopsis thaliana
gtcacgatacagcctcc

SEQ ID NO: 120522 - DNA, 17 bp, Arabidopsis thaliana
gtcacgatcagtctaag

SEQ ID NO: 120523 - DNA, 17 bp, Arabidopsis thaliana
gtcacgcacacagtatt

SEQ ID NO: 120524 - DNA, 17 bp, Arabidopsis thaliana
gtcacgcgatagagaat

SEQ ID NO: 120525 - DNA, 17 bp, Arabidopsis thaliana
gtcacgcgatggagaat

SEQ ID NO: 120526 - DNA, 17 bp, Arabidopsis thaliana
gtcacgcgctccggacc

SEQ ID NO: 120527 - DNA, 17 bp, Arabidopsis thaliana
gtcacgcggattacggt

SEQ ID NO: 120528 - DNA, 17 bp, Arabidopsis thaliana
gtcacgcgggtgaccag

SEQ ID NO: 120529 - DNA, 17 bp, Arabidopsis thaliana
gtcacgcgggtgacccg

SEQ ID NO: 120530 - DNA, 17 bp, Arabidopsis thaliana
gtcacggatcaaggttg

SEQ ID NO: 120531 - DNA, 17 bp, Arabidopsis thaliana
gtcacggctctgggtca

SEQ ID NO: 120532 - DNA, 17 bp, Arabidopsis thaliana
gtcacggctctgggtga

SEQ ID NO: 120533 - DNA, 17 bp, Arabidopsis thaliana
gtcacggctgagttacg

SEQ ID NO: 120534 - DNA, 17 bp, Arabidopsis thaliana
gtcacgggcttgttcat

SEQ ID NO: 120535 - DNA, 17 bp, Arabidopsis thaliana
gtcacgggtgaaatgat

SEQ ID NO: 120536 - DNA, 17 bp, Arabidopsis thaliana
gtcacgggttaaccggt

SEQ ID NO: 120537 - DNA, 17 bp, Arabidopsis thaliana
gtcacgggttcaaatcc

SEQ ID NO: 120538 - DNA, 17 bp, Arabidopsis thaliana
gtcacgggtttggcagg

SEQ ID NO: 120539 - DNA, 17 bp, Arabidopsis thaliana
gtcacggtttgtcgaac

SEQ ID NO: 120540 - DNA, 17 bp, Arabidopsis thaliana
gtcacggttttcttctt

SEQ ID NO: 120541 - DNA, 17 bp, Arabidopsis thaliana
gtcacgtcactatcgcg

SEQ ID NO: 120542 - DNA, 17 bp, Arabidopsis thaliana
gtcacgtctgcctggct

SEQ ID NO: 120543 - DNA, 17 bp, Arabidopsis thaliana
gtcacgtctgcctgggt

SEQ ID NO: 120544 - DNA, 17 bp, Arabidopsis thaliana
gtcacgtgtgcctgggt

SEQ ID NO: 120545 - DNA, 17 bp, Arabidopsis thaliana
gtcacgttgtgaaaagg

SEQ ID NO: 120546 - DNA, 17 bp, Arabidopsis thaliana
gtcactaaccggcgacg

SEQ ID NO: 120547 - DNA, 17 bp, Arabidopsis thaliana
gtcactaactgacggca

SEQ ID NO: 120548 - DNA, 17 bp, Arabidopsis thaliana
gtcactaagagcatttc

SEQ ID NO: 120549 - DNA, 17 bp, Arabidopsis thaliana
gtcactaagtatttcag

SEQ ID NO: 120550 - DNA, 17 bp, Arabidopsis thaliana
gtcactacaatcgtatt

SEQ ID NO: 120551 - DNA, 17 bp, Arabidopsis thaliana
gtcactacctttggccc

SEQ ID NO: 120552 - DNA, 17 bp, Arabidopsis thaliana
gtcactagacggtcgtc

SEQ ID NO: 120553 - DNA, 17 bp, Arabidopsis thaliana
gtcactagggcaagatc

SEQ ID NO: 120554 - DNA, 17 bp, Arabidopsis thaliana
gtcactaggtgagtgtc

SEQ ID NO: 120555 - DNA, 17 bp, Arabidopsis thaliana
gtcactaggtggaggcg

SEQ ID NO: 120556 - DNA, 17 bp, Arabidopsis thaliana
gtcactatagcagccgt

SEQ ID NO: 120557 - DNA, 17 bp, Arabidopsis thaliana
gtcactattcacctgca

SEQ ID NO: 120558 - DNA, 17 bp, Arabidopsis thaliana
gtcactattcggagcct

SEQ ID NO: 120559 - DNA, 17 bp, Arabidopsis thaliana
gtcactatttgaggatg

SEQ ID NO: 120560 - DNA, 17 bp, Arabidopsis thaliana
gtcactattttgttccg

SEQ ID NO: 120561 - DNA, 17 bp, Arabidopsis thaliana
gtcactcaaaccgttga

SEQ ID NO: 120562 - DNA, 17 bp, Arabidopsis thaliana
gtcactcaaccggcgac

SEQ ID NO: 120563 - DNA, 17 bp, Arabidopsis thaliana
gtcactcagagagccgg

SEQ ID NO: 120564 - DNA, 17 bp, Arabidopsis thaliana
gtcactcatatggagag

SEQ ID NO: 120565 - DNA, 17 bp, Arabidopsis thaliana
gtcactcgaaacagcga

SEQ ID NO: 120566 - DNA, 17 bp, Arabidopsis thaliana
gtcactcgaacaggcga

SEQ ID NO: 120567 - DNA, 17 bp, Arabidopsis thaliana
gtcactcgaaccgacga

SEQ ID NO: 120568 - DNA, 17 bp, Arabidopsis thaliana
gtcactcgaaccgacgg

SEQ ID NO: 120569 - DNA, 17 bp, Arabidopsis thaliana
gtcactcgaaccggcaa

SEQ ID NO: 120570 - DNA, 17 bp, Arabidopsis thaliana
gtcactcgaaccggcga

SEQ ID NO: 120571 - DNA, 17 bp, Arabidopsis thaliana
gtcactcgaactggcga

SEQ ID NO: 120572 - DNA, 17 bp, Arabidopsis thaliana
gtcactcgaatcggcaa

SEQ ID NO: 120573 - DNA, 17 bp, Arabidopsis thaliana
gtcactcgaatcggcga

SEQ ID NO: 120574 - DNA, 17 bp, Arabidopsis thaliana
gtcactcgaattggcga

SEQ ID NO: 120575 - DNA, 17 bp, Arabidopsis thaliana
gtcactcgacctcaccc

SEQ ID NO: 120576 - DNA, 17 bp, Arabidopsis thaliana
gtcactcgagactgttt

SEQ ID NO: 120577 - DNA, 17 bp, Arabidopsis thaliana
gtcactcgaggctgttc

SEQ ID NO: 120578 - DNA, 17 bp, Arabidopsis thaliana
gtcactcgaggctgttt

SEQ ID NO: 120579 - DNA, 17 bp, Arabidopsis thaliana
gtcactcgatacggcga

SEQ ID NO: 120580 - DNA, 17 bp, Arabidopsis thaliana
gtcactcgatcaaacgg

SEQ ID NO: 120581 - DNA, 17 bp, Arabidopsis thaliana
gtcactcgatctcgccg

SEQ ID NO: 120582 - DNA, 17 bp, Arabidopsis thaliana
gtcactcgcttaccgga

SEQ ID NO: 120583 - DNA, 17 bp, Arabidopsis thaliana
gtcactcgggacggctt

SEQ ID NO: 120584 - DNA, 17 bp, Arabidopsis thaliana
gtcactctaaacatttc

SEQ ID NO: 120585 - DNA, 17 bp, Arabidopsis thaliana
gtcactctcctcttacc

SEQ ID NO: 120586 - DNA, 17 bp, Arabidopsis thaliana
gtcactctcggcaacgg

SEQ ID NO: 120587 - DNA, 17 bp, Arabidopsis thaliana
gtcactgagaagcattt

SEQ ID NO: 120588 - DNA, 17 bp, Arabidopsis thaliana
gtcactgagctggtcga

SEQ ID NO: 120589 - DNA, 17 bp, Arabidopsis thaliana
gtcactgatttgttttc

SEQ ID NO: 120590 - DNA, 17 bp, Arabidopsis thaliana
gtcactgctagacgagc

SEQ ID NO: 120591 - DNA, 17 bp, Arabidopsis thaliana
gtcactgcttatggacc

SEQ ID NO: 120592 - DNA, 17 bp, Arabidopsis thaliana
gtcactgcttggcatgg

SEQ ID NO: 120593 - DNA, 17 bp, Arabidopsis thaliana
gtcactggaaggtgcgg

SEQ ID NO: 120594 - DNA, 17 bp, Arabidopsis thaliana
gtcactggaatttcaaa

SEQ ID NO: 120595 - DNA, 17 bp, Arabidopsis thaliana
gtcactggaatttcaag

SEQ ID NO: 120596 - DNA, 17 bp, Arabidopsis thaliana
gtcactggctatggctt

SEQ ID NO: 120597 - DNA, 17 bp, Arabidopsis thaliana
gtcactgggtcatcggg

SEQ ID NO: 120598 - DNA, 17 bp, Arabidopsis thaliana
gtcactgtccactacga

SEQ ID NO: 120599 - DNA, 17 bp, Arabidopsis thaliana
gtcactgtgtgtaattg

SEQ ID NO: 120600 - DNA, 17 bp, Arabidopsis thaliana
gtcactgttccgacgac

SEQ ID NO: 120601 - DNA, 17 bp, Arabidopsis thaliana
gtcacttaaggggatta

SEQ ID NO: 120602 - DNA, 17 bp, Arabidopsis thaliana
gtcacttaggattgtta

SEQ ID NO: 120603 - DNA, 17 bp, Arabidopsis thaliana
gtcacttcagactggac

SEQ ID NO: 120604 - DNA, 17 bp, Arabidopsis thaliana
gtcacttcgacattggt

SEQ ID NO: 120605 - DNA, 17 bp, Arabidopsis thaliana
gtcacttctcagactgg

SEQ ID NO: 120606 - DNA, 17 bp, Arabidopsis thaliana
gtcacttctccgatgaa

SEQ ID NO: 120607 - DNA, 17 bp, Arabidopsis thaliana
gtcacttctgcaaaatc

SEQ ID NO: 120608 - DNA, 17 bp, Arabidopsis thaliana
gtcacttcttccggtta

SEQ ID NO: 120609 - DNA, 17 bp, Arabidopsis thaliana
gtcacttctttggcttc

SEQ ID NO: 120610 - DNA, 17 bp, Arabidopsis thaliana
gtcacttgaaccagcga

SEQ ID NO: 120611 - DNA, 17 bp, Arabidopsis thaliana
gtcacttgaaccgacga

SEQ ID NO: 120612 - DNA, 17 bp, Arabidopsis thaliana
gtcacttgaaccgatgc

SEQ ID NO: 120613 - DNA, 17 bp, Arabidopsis thaliana
gtcacttgaaccggcaa

SEQ ID NO: 120614 - DNA, 17 bp, Arabidopsis thaliana
gtcacttgacttagtca

SEQ ID NO: 120615 - DNA, 17 bp, Arabidopsis thaliana
gtcacttgatgatgttc

SEQ ID NO: 120616 - DNA, 17 bp, Arabidopsis thaliana
gtcactttcactgcatt

SEQ ID NO: 120617 - DNA, 17 bp, Arabidopsis thaliana
gtcactttcggcgatga

SEQ ID NO: 120618 - DNA, 17 bp, Arabidopsis thaliana
gtcactttgcgtcttct

SEQ ID NO: 120619 - DNA, 17 bp, Arabidopsis thaliana
gtcactttggccgagtg

SEQ ID NO: 120620 - DNA, 17 bp, Arabidopsis thaliana
gtcactttggtgtgagt

SEQ ID NO: 120621 - DNA, 17 bp, Arabidopsis thaliana
gtcactttgtgaaataa

SEQ ID NO: 120622 - DNA, 17 bp, Arabidopsis thaliana
gtcacttttcactgttt

SEQ ID NO: 120623 - DNA, 17 bp, Arabidopsis thaliana
gtcacttttcgattttc

SEQ ID NO: 120624 - DNA, 17 bp, Arabidopsis thaliana
gtcacttttggcaaact

SEQ ID NO: 120625 - DNA, 17 bp, Arabidopsis thaliana
gtcactttttcgcaggc

SEQ ID NO: 120626 - DNA, 17 bp, Arabidopsis thaliana
gtcagaaaagttaccac

SEQ ID NO: 120627 - DNA, 17 bp, Arabidopsis thaliana
gtcagaaaggttaccac

SEQ ID NO: 120628 - DNA, 17 bp, Arabidopsis thaliana
gtcagaaatgcaagttg

SEQ ID NO: 120629 - DNA, 17 bp, Arabidopsis thaliana
gtcagaaatgcaggcga

SEQ ID NO: 120630 - DNA, 17 bp, Arabidopsis thaliana
gtcagaaatgcaggcgg

SEQ ID NO: 120631 - DNA, 17 bp, Arabidopsis thaliana
gtcagaaatgcaggtga

SEQ ID NO: 120632 - DNA, 17 bp, Arabidopsis thaliana
gtcagaaatgtaggtgg

SEQ ID NO: 120633 - DNA, 17 bp, Arabidopsis thaliana
gtcagaacagcttgcga

SEQ ID NO: 120634 - DNA, 17 bp, Arabidopsis thaliana
gtcagaacttaaagctc

SEQ ID NO: 120635 - DNA, 17 bp, Arabidopsis thaliana
gtcagaagcgattaaaa

SEQ ID NO: 120636 - DNA, 17 bp, Arabidopsis thaliana
gtcagaaggaattgcac

SEQ ID NO: 120637 - DNA, 17 bp, Arabidopsis thaliana
gtcagaagggcaggaca

SEQ ID NO: 120638 - DNA, 17 bp, Arabidopsis thaliana
gtcagaagttgaagatt

SEQ ID NO: 120639 - DNA, 17 bp, Arabidopsis thaliana
gtcagaatccaatgcat

SEQ ID NO: 120640 - DNA, 17 bp, Arabidopsis thaliana
gtcagaatccattgcat

SEQ ID NO: 120641 - DNA, 17 bp, Arabidopsis thaliana
gtcagaatccgggctag

SEQ ID NO: 120642 - DNA, 17 bp, Arabidopsis thaliana
gtcagaatctgcatctt

SEQ ID NO: 120643 - DNA, 17 bp, Arabidopsis thaliana
gtcagaatgcccaatga

SEQ ID NO: 120644 - DNA, 17 bp, Arabidopsis thaliana
gtcagaatgtttcacaa

SEQ ID NO: 120645 - DNA, 17 bp, Arabidopsis thaliana
gtcagacaaacaccact

SEQ ID NO: 120646 - DNA, 17 bp, Arabidopsis thaliana
gtcagacaactgcattt

SEQ ID NO: 120647 - DNA, 17 bp, Arabidopsis thaliana
gtcagacccgaccattg

SEQ ID NO: 120648 - DNA, 17 bp, Arabidopsis thaliana
gtcagaccgactgtcgg

SEQ ID NO: 120649 - DNA, 17 bp, Arabidopsis thaliana
gtcagaccgagacacaa

SEQ ID NO: 120650 - DNA, 17 bp, Arabidopsis thaliana
gtcagaccgatcgtcag

SEQ ID NO: 120651 - DNA, 17 bp, Arabidopsis thaliana
gtcagacgacctaggtg

SEQ ID NO: 120652 - DNA, 17 bp, Arabidopsis thaliana
gtcagacgatcggcctg

SEQ ID NO: 120653 - DNA, 17 bp, Arabidopsis thaliana
gtcagacgctattcgga

SEQ ID NO: 120654 - DNA, 17 bp, Arabidopsis thaliana
gtcagacggatcggatc

SEQ ID NO: 120655 - DNA, 17 bp, Arabidopsis thaliana
gtcagacgtttcacaac

SEQ ID NO: 120656 - DNA, 17 bp, Arabidopsis thaliana
gtcagactcaccaacgc

SEQ ID NO: 120657 - DNA, 17 bp, Arabidopsis thaliana
gtcagacttgtggaagt

SEQ ID NO: 120658 - DNA, 17 bp, Arabidopsis thaliana
gtcagagaacttggatc

SEQ ID NO: 120659 - DNA, 17 bp, Arabidopsis thaliana
gtcagagacgggcctgg

SEQ ID NO: 120660 - DNA, 17 bp, Arabidopsis thaliana
gtcagagagtagattcg

SEQ ID NO: 120661 - DNA, 17 bp, Arabidopsis thaliana
gtcagagcattgagagg

SEQ ID NO: 120662 - DNA, 17 bp, Arabidopsis thaliana
gtcagagccccgtcgtg

SEQ ID NO: 120663 - DNA, 17 bp, Arabidopsis thaliana
gtcagagcgatgtgcca

SEQ ID NO: 120664 - DNA, 17 bp, Arabidopsis thaliana
gtcagagcgctgaccca

SEQ ID NO: 120665 - DNA, 17 bp, Arabidopsis thaliana
gtcagagctacgacgcc

SEQ ID NO: 120666 - DNA, 17 bp, Arabidopsis thaliana
gtcagaggcttggaaat

SEQ ID NO: 120667 - DNA, 17 bp, Arabidopsis thaliana
gtcagagggatatgagt

SEQ ID NO: 120668 - DNA, 17 bp, Arabidopsis thaliana
gtcagaggtgaaattct

SEQ ID NO: 120669 - DNA, 17 bp, Arabidopsis thaliana
gtcagagtcgcaggggg

SEQ ID NO: 120670 - DNA, 17 bp, Arabidopsis thaliana
gtcagatcacactctct

SEQ ID NO: 120671 - DNA, 17 bp, Arabidopsis thaliana
gtcagatcagtccctac

SEQ ID NO: 120672 - DNA, 17 bp, Arabidopsis thaliana
gtcagatcatctgactc

SEQ ID NO: 120673 - DNA, 17 bp, Arabidopsis thaliana
gtcagatccgttttcgc

SEQ ID NO: 120674 - DNA, 17 bp, Arabidopsis thaliana
gtcagatctaattcaca

SEQ ID NO: 120675 - DNA, 17 bp, Arabidopsis thaliana
gtcagatctacgcttca

SEQ ID NO: 120676 - DNA, 17 bp, Arabidopsis thaliana
gtcagatctggccgatc

SEQ ID NO: 120677 - DNA, 17 bp, Arabidopsis thaliana
gtcagatctggtgatga

SEQ ID NO: 120678 - DNA, 17 bp, Arabidopsis thaliana
gtcagatctggttaaga

SEQ ID NO: 120679 - DNA, 17 bp, Arabidopsis thaliana
gtcagatgagatgaccc

SEQ ID NO: 120680 - DNA, 17 bp, Arabidopsis thaliana
gtcagatgggccatatg

SEQ ID NO: 120681 - DNA, 17 bp, Arabidopsis thaliana
gtcagattccccagtca

SEQ ID NO: 120682 - DNA, 17 bp, Arabidopsis thaliana
gtcagattccgtcatgc

SEQ ID NO: 120683 - DNA, 17 bp, Arabidopsis thaliana
gtcagatttattcttat

SEQ ID NO: 120684 - DNA, 17 bp, Arabidopsis thaliana
gtcagatttgggcacta

SEQ ID NO: 120685 - DNA, 17 bp, Arabidopsis thaliana
gtcagcaaatgcgtctg

SEQ ID NO: 120686 - DNA, 17 bp, Arabidopsis thaliana
gtcagcaaatggtcgac

SEQ ID NO: 120687 - DNA, 17 bp, Arabidopsis thaliana
gtcagcagagacgcggc

SEQ ID NO: 120688 - DNA, 17 bp, Arabidopsis thaliana
gtcagcataggccgccg

SEQ ID NO: 120689 - DNA, 17 bp, Arabidopsis thaliana
gtcagccaaaactttac

SEQ ID NO: 120690 - DNA, 17 bp, Arabidopsis thaliana
gtcagccaaaactttgc

SEQ ID NO: 120691 - DNA, 17 bp, Arabidopsis thaliana
gtcagcccagaactgta

SEQ ID NO: 120692 - DNA, 17 bp, Arabidopsis thaliana
gtcagcccattggtgtg

SEQ ID NO: 120693 - DNA, 17 bp, Arabidopsis thaliana
gtcagccgcaacatatt

SEQ ID NO: 120694 - DNA, 17 bp, Arabidopsis thaliana
gtcagcgaaaggaaacc

SEQ ID NO: 120695 - DNA, 17 bp, Arabidopsis thaliana
gtcagcgacttggttgg

SEQ ID NO: 120696 - DNA, 17 bp, Arabidopsis thaliana
gtcagcgatgccttgtt

SEQ ID NO: 120697 - DNA, 17 bp, Arabidopsis thaliana
gtcagcgctctgacgaa

SEQ ID NO: 120698 - DNA, 17 bp, Arabidopsis thaliana
gtcagcgctgaaatatt

SEQ ID NO: 120699 - DNA, 17 bp, Arabidopsis thaliana
gtcagcggacagaagag

SEQ ID NO: 120700 - DNA, 17 bp, Arabidopsis thaliana
gtcagcggactgctcaa

SEQ ID NO: 120701 - DNA, 17 bp, Arabidopsis thaliana
gtcagcggactgctcga

SEQ ID NO: 120702 - DNA, 17 bp, Arabidopsis thaliana
gtcagcggtctagtcca

SEQ ID NO: 120703 - DNA, 17 bp, Arabidopsis thaliana
gtcagcggtttagtcca

SEQ ID NO: 120704 - DNA, 17 bp, Arabidopsis thaliana
gtcagctatgccagagt

SEQ ID NO: 120705 - DNA, 17 bp, Arabidopsis thaliana
gtcagctcagaactggt

SEQ ID NO: 120706 - DNA, 17 bp, Arabidopsis thaliana
gtcagctcagccactgt

SEQ ID NO: 120707 - DNA, 17 bp, Arabidopsis thaliana
gtcagctgagtcagcaa

SEQ ID NO: 120708 - DNA, 17 bp, Arabidopsis thaliana
gtcagctgtggatatgg

SEQ ID NO: 120709 - DNA, 17 bp, Arabidopsis thaliana
gtcagctgttcctctaa

SEQ ID NO: 120710 - DNA, 17 bp, Arabidopsis thaliana
gtcagcttgtccgtctc

SEQ ID NO: 120711 - DNA, 17 bp, Arabidopsis thaliana
gtcaggaactgagcact

SEQ ID NO: 120712 - DNA, 17 bp, Arabidopsis thaliana
gtcaggaagatagtttg

SEQ ID NO: 120713 - DNA, 17 bp, Arabidopsis thaliana
gtcaggacagcggttca

SEQ ID NO: 120714 - DNA, 17 bp, Arabidopsis thaliana
gtcaggacctacgggcc

SEQ ID NO: 120715 - DNA, 17 bp, Arabidopsis thaliana
gtcaggatactcggctc

SEQ ID NO: 120716 - DNA, 17 bp, Arabidopsis thaliana
gtcaggatgaccgagtg

SEQ ID NO: 120717 - DNA, 17 bp, Arabidopsis thaliana
gtcaggatggccgagat

SEQ ID NO: 120718 - DNA, 17 bp, Arabidopsis thaliana
gtcaggatggccgagcg

SEQ ID NO: 120719 - DNA, 17 bp, Arabidopsis thaliana
gtcaggatggccgagtg

SEQ ID NO: 120720 - DNA, 17 bp, Arabidopsis thaliana
gtcaggatggccgattg

SEQ ID NO: 120721 - DNA, 17 bp, Arabidopsis thaliana
gtcaggattgccgagtg

SEQ ID NO: 120722 - DNA, 17 bp, Arabidopsis thaliana
gtcaggattgggtaatt

SEQ ID NO: 120723 - DNA, 17 bp, Arabidopsis thaliana
gtcaggcaaagtgattg

SEQ ID NO: 120724 - DNA, 17 bp, Arabidopsis thaliana
gtcaggcccgggtgctt

SEQ ID NO: 120725 - DNA, 17 bp, Arabidopsis thaliana
gtcaggccctgagttca

SEQ ID NO: 120726 - DNA, 17 bp, Arabidopsis thaliana
gtcaggcgatgaatctg

SEQ ID NO: 120727 - DNA, 17 bp, Arabidopsis thaliana
gtcaggcggagtttggc

SEQ ID NO: 120728 - DNA, 17 bp, Arabidopsis thaliana
gtcaggcggctgcgcac

SEQ ID NO: 120729 - DNA, 17 bp, Arabidopsis thaliana
gtcaggcggtcgaaacc

SEQ ID NO: 120730 - DNA, 17 bp, Arabidopsis thaliana
gtcaggcgttcgaaacc

SEQ ID NO: 120731 - DNA, 17 bp, Arabidopsis thaliana
gtcaggctctcggtgag

SEQ ID NO: 120732 - DNA, 17 bp, Arabidopsis thaliana
gtcaggctgcctggcaa

SEQ ID NO: 120733 - DNA, 17 bp, Arabidopsis thaliana
gtcaggctttaaatggg

SEQ ID NO: 120734 - DNA, 17 bp, Arabidopsis thaliana
gtcagggaagtaggcag

SEQ ID NO: 120735 - DNA, 17 bp, Arabidopsis thaliana
gtcagggagttacgacc

SEQ ID NO: 120736 - DNA, 17 bp, Arabidopsis thaliana
gtcagggatgaggcact

SEQ ID NO: 120737 - DNA, 17 bp, Arabidopsis thaliana
gtcagggatgaggtact

SEQ ID NO: 120738 - DNA, 17 bp, Arabidopsis thaliana
gtcagggatgagtttgt

SEQ ID NO: 120739 - DNA, 17 bp, Arabidopsis thaliana
gtcagggcacgtctgcc

SEQ ID NO: 120740 - DNA, 17 bp, Arabidopsis thaliana
gtcagggtccaagtgtg

SEQ ID NO: 120741 - DNA, 17 bp, Arabidopsis thaliana
gtcagggtggccaagtg

SEQ ID NO: 120742 - DNA, 17 bp, Arabidopsis thaliana
gtcagggtggccgagtg

SEQ ID NO: 120743 - DNA, 17 bp, Arabidopsis thaliana
gtcaggtagtgcccggc

SEQ ID NO: 120744 - DNA, 17 bp, Arabidopsis thaliana
gtcaggtcctgatggtt

SEQ ID NO: 120745 - DNA, 17 bp, Arabidopsis thaliana
gtcaggtctaacttaca

SEQ ID NO: 120746 - DNA, 17 bp, Arabidopsis thaliana
gtcaggtctaaggtaca

SEQ ID NO: 120747 - DNA, 17 bp, Arabidopsis thaliana
gtcaggtctaaggtacg

SEQ ID NO: 120748 - DNA, 17 bp, Arabidopsis thaliana
gtcaggtctatcattga

SEQ ID NO: 120749 - DNA, 17 bp, Arabidopsis thaliana
gtcaggtctttcggatt

SEQ ID NO: 120750 - DNA, 17 bp, Arabidopsis thaliana
gtcaggtgagttgctaa

SEQ ID NO: 120751 - DNA, 17 bp, Arabidopsis thaliana
gtcaggtgcattggatt

SEQ ID NO: 120752 - DNA, 17 bp, Arabidopsis thaliana
gtcaggtggaataggga

SEQ ID NO: 120753 - DNA, 17 bp, Arabidopsis thaliana
gtcaggtggattctgag

SEQ ID NO: 120754 - DNA, 17 bp, Arabidopsis thaliana
gtcaggtggggagtgtg

SEQ ID NO: 120755 - DNA, 17 bp, Arabidopsis thaliana
gtcaggtggggagttag

SEQ ID NO: 120756 - DNA, 17 bp, Arabidopsis thaliana
gtcaggtggggagttgg

SEQ ID NO: 120757 - DNA, 17 bp, Arabidopsis thaliana
gtcaggtggggagtttg

SEQ ID NO: 120758 - DNA, 17 bp, Arabidopsis thaliana
gtcaggtggtgagttag

SEQ ID NO: 120759 - DNA, 17 bp, Arabidopsis thaliana
gtcaggtgtttgaaaca

SEQ ID NO: 120760 - DNA, 17 bp, Arabidopsis thaliana
gtcaggttcacgtcggt

SEQ ID NO: 120761 - DNA, 17 bp, Arabidopsis thaliana
gtcaggttcgaatcggt

SEQ ID NO: 120762 - DNA, 17 bp, Arabidopsis thaliana
gtcaggttcggttcgga

SEQ ID NO: 120763 - DNA, 17 bp, Arabidopsis thaliana
gtcaggttcgtttcgct

SEQ ID NO: 120764 - DNA, 17 bp, Arabidopsis thaliana
gtcaggttggccaagtg

SEQ ID NO: 120765 - DNA, 17 bp, Arabidopsis thaliana
gtcaggttggccgactg

SEQ ID NO: 120766 - DNA, 17 bp, Arabidopsis thaliana
gtcaggttggccgagtg

SEQ ID NO: 120767 - DNA, 17 bp, Arabidopsis thaliana
gtcaggttgtcgatcgg

SEQ ID NO: 120768 - DNA, 17 bp, Arabidopsis thaliana
gtcaggttgttcggttt

SEQ ID NO: 120769 - DNA, 17 bp, Arabidopsis thaliana
gtcaggttgtttggctt

SEQ ID NO: 120770 - DNA, 17 bp, Arabidopsis thaliana
gtcaggttttgttgggc

SEQ ID NO: 120771 - DNA, 17 bp, Arabidopsis thaliana
gtcagtaataacgtagt

SEQ ID NO: 120772 - DNA, 17 bp, Arabidopsis thaliana
gtcagtagccaacttgg

SEQ ID NO: 120773 - DNA, 17 bp, Arabidopsis thaliana
gtcagtagtttcacagc

SEQ ID NO: 120774 - DNA, 17 bp, Arabidopsis thaliana
gtcagtatcgctgcggg

SEQ ID NO: 120775 - DNA, 17 bp, Arabidopsis thaliana
gtcagtatggccgagtg

SEQ ID NO: 120776 - DNA, 17 bp, Arabidopsis thaliana
gtcagtcaaggtcgtat

SEQ ID NO: 120777 - DNA, 17 bp, Arabidopsis thaliana
gtcagtcacacttgttg

SEQ ID NO: 120778 - DNA, 17 bp, Arabidopsis thaliana
gtcagtccacttgcact

SEQ ID NO: 120779 - DNA, 17 bp, Arabidopsis thaliana
gtcagtccatcgtctgg

SEQ ID NO: 120780 - DNA, 17 bp, Arabidopsis thaliana
gtcagtcgcattcctgt

SEQ ID NO: 120781 - DNA, 17 bp, Arabidopsis thaliana
gtcagtcgcttcctgta

SEQ ID NO: 120782 - DNA, 17 bp, Arabidopsis thaliana
gtcagtgaagacggatt

SEQ ID NO: 120783 - DNA, 17 bp, Arabidopsis thaliana
gtcagtgaagagatggt

SEQ ID NO: 120784 - DNA, 17 bp, Arabidopsis thaliana
gtcagtgacagccattg

SEQ ID NO: 120785 - DNA, 17 bp, Arabidopsis thaliana
gtcagtggctcactgct

SEQ ID NO: 120786 - DNA, 17 bp, Arabidopsis thaliana
gtcagtgtcagacgcca

SEQ ID NO: 120787 - DNA, 17 bp, Arabidopsis thaliana
gtcagtgtcttcggctg

SEQ ID NO: 120788 - DNA, 17 bp, Arabidopsis thaliana
gtcagttacgggcgcgg

SEQ ID NO: 120789 - DNA, 17 bp, Arabidopsis thaliana
gtcagttagctgtacag

SEQ ID NO: 120790 - DNA, 17 bp, Arabidopsis thaliana
gtcagttatgtatttgg

SEQ ID NO: 120791 - DNA, 17 bp, Arabidopsis thaliana
gtcagttccaggagttt

SEQ ID NO: 120792 - DNA, 17 bp, Arabidopsis thaliana
gtcagttcctaggtcat

SEQ ID NO: 120793 - DNA, 17 bp, Arabidopsis thaliana
gtcagttgacttaacga

SEQ ID NO: 120794 - DNA, 17 bp, Arabidopsis thaliana
gtcagttgacttgacga

SEQ ID NO: 120795 - DNA, 17 bp, Arabidopsis thaliana
gtcagttggtggagcga

SEQ ID NO: 120796 - DNA, 17 bp, Arabidopsis thaliana
gtcagtttcgggtaccg

SEQ ID NO: 120797 - DNA, 17 bp, Arabidopsis thaliana
gtcagtttcttcacagc

SEQ ID NO: 120798 - DNA, 17 bp, Arabidopsis thaliana
gtcagtttgtagaagta

SEQ ID NO: 120799 - DNA, 17 bp, Arabidopsis thaliana
gtcagttttggtaggaa

SEQ ID NO: 120800 - DNA, 17 bp, Arabidopsis thaliana
gtcataactcccaaaac

SEQ ID NO: 120801 - DNA, 17 bp, Arabidopsis thaliana
gtcataagtacctctga

SEQ ID NO: 120802 - DNA, 17 bp, Arabidopsis thaliana
gtcataatccagtgcac

SEQ ID NO: 120803 - DNA, 17 bp, Arabidopsis thaliana
gtcataatcgcttggtg

SEQ ID NO: 120804 - DNA, 17 bp, Arabidopsis thaliana
gtcatacagaagcacca

SEQ ID NO: 120805 - DNA, 17 bp, Arabidopsis thaliana
gtcatacctccattttg

SEQ ID NO: 120806 - DNA, 17 bp, Arabidopsis thaliana
gtcatacctccattttt

SEQ ID NO: 120807 - DNA, 17 bp, Arabidopsis thaliana
gtcataccttggtagct

SEQ ID NO: 120808 - DNA, 17 bp, Arabidopsis thaliana
gtcatacgatggagcaa

SEQ ID NO: 120809 - DNA, 17 bp, Arabidopsis thaliana
gtcatacggcgtatcgc

SEQ ID NO: 120810 - DNA, 17 bp, Arabidopsis thaliana
gtcatacggtgtatcgc

SEQ ID NO: 120811 - DNA, 17 bp, Arabidopsis thaliana
gtcatacttagttacag

SEQ ID NO: 120812 - DNA, 17 bp, Arabidopsis thaliana
gtcatagacccaaccag

SEQ ID NO: 120813 - DNA, 17 bp, Arabidopsis thaliana
gtcatagacccaaccgg

SEQ ID NO: 120814 - DNA, 17 bp, Arabidopsis thaliana
gtcatagtctagtgcga

SEQ ID NO: 120815 - DNA, 17 bp, Arabidopsis thaliana
gtcatagtctttcttgg

SEQ ID NO: 120816 - DNA, 17 bp, Arabidopsis thaliana
gtcatagtctttttgga

SEQ ID NO: 120817 - DNA, 17 bp, Arabidopsis thaliana
gtcatagttcgggctct

SEQ ID NO: 120818 - DNA, 17 bp, Arabidopsis thaliana
gtcatagttgcgagtcc

SEQ ID NO: 120819 - DNA, 17 bp, Arabidopsis thaliana
gtcatatcccacgggca

SEQ ID NO: 120820 - DNA, 17 bp, Arabidopsis thaliana
gtcatatgggattgccc

SEQ ID NO: 120821 - DNA, 17 bp, Arabidopsis thaliana
gtcatatttggtccgct

SEQ ID NO: 120822 - DNA, 17 bp, Arabidopsis thaliana
gtcatcaaagtatccgt

SEQ ID NO: 120823 - DNA, 17 bp, Arabidopsis thaliana
gtcatcaactcgaagaa

SEQ ID NO: 120824 - DNA, 17 bp, Arabidopsis thaliana
gtcatcaatagccacaa

SEQ ID NO: 120825 - DNA, 17 bp, Arabidopsis thaliana
gtcatcacaactttcga

SEQ ID NO: 120826 - DNA, 17 bp, Arabidopsis thaliana
gtcatcaccgttgagag

SEQ ID NO: 120827 - DNA, 17 bp, Arabidopsis thaliana
gtcatcagctcgcgtgg

SEQ ID NO: 120828 - DNA, 17 bp, Arabidopsis thaliana
gtcatcagctcgcgttg

SEQ ID NO: 120829 - DNA, 17 bp, Arabidopsis thaliana
gtcatcaggctatcaac

SEQ ID NO: 120830 - DNA, 17 bp, Arabidopsis thaliana
gtcatcatattcgcctg

SEQ ID NO: 120831 - DNA, 17 bp, Arabidopsis thaliana
gtcatcatcatctcaaa

SEQ ID NO: 120832 - DNA, 17 bp, Arabidopsis thaliana
gtcatcatcttggtccc

SEQ ID NO: 120833 - DNA, 17 bp, Arabidopsis thaliana
gtcatcatgccccttat

SEQ ID NO: 120834 - DNA, 17 bp, Arabidopsis thaliana
gtcatccacacccatgc

SEQ ID NO: 120835 - DNA, 17 bp, Arabidopsis thaliana
gtcatcccaggtcgtga

SEQ ID NO: 120836 - DNA, 17 bp, Arabidopsis thaliana
gtcatccgaggcattag

SEQ ID NO: 120837 - DNA, 17 bp, Arabidopsis thaliana
gtcatccgagtgaccca

SEQ ID NO: 120838 - DNA, 17 bp, Arabidopsis thaliana
gtcatccgctttggctt

SEQ ID NO: 120839 - DNA, 17 bp, Arabidopsis thaliana
gtcatccggaggaccga

SEQ ID NO: 120840 - DNA, 17 bp, Arabidopsis thaliana
gtcatccttcggcttag

SEQ ID NO: 120841 - DNA, 17 bp, Arabidopsis thaliana
gtcatccttcgggttag

SEQ ID NO: 120842 - DNA, 17 bp, Arabidopsis thaliana
gtcatcgacagtccatg

SEQ ID NO: 120843 - DNA, 17 bp, Arabidopsis thaliana
gtcatcgactccttcat

SEQ ID NO: 120844 - DNA, 17 bp, Arabidopsis thaliana
gtcatcgatacacggga

SEQ ID NO: 120845 - DNA, 17 bp, Arabidopsis thaliana
gtcatcgatatacggga

SEQ ID NO: 120846 - DNA, 17 bp, Arabidopsis thaliana
gtcatcgccatcgctgg

SEQ ID NO: 120847 - DNA, 17 bp, Arabidopsis thaliana
gtcatcgcgccgtgtat

SEQ ID NO: 120848 - DNA, 17 bp, Arabidopsis thaliana
gtcatcgctacacggga

SEQ ID NO: 120849 - DNA, 17 bp, Arabidopsis thaliana
gtcatcgctatacggga

SEQ ID NO: 120850 - DNA, 17 bp, Arabidopsis thaliana
gtcatcggatctggcga

SEQ ID NO: 120851 - DNA, 17 bp, Arabidopsis thaliana
gtcatcggattaaccag

SEQ ID NO: 120852 - DNA, 17 bp, Arabidopsis thaliana
gtcatcggcggcgacga

SEQ ID NO: 120853 - DNA, 17 bp, Arabidopsis thaliana
gtcatcggctagcggac

SEQ ID NO: 120854 - DNA, 17 bp, Arabidopsis thaliana
gtcatcggctggcggac

SEQ ID NO: 120855 - DNA, 17 bp, Arabidopsis thaliana
gtcatcggctggctgac

SEQ ID NO: 120856 - DNA, 17 bp, Arabidopsis thaliana
gtcatcggctgtgccat

SEQ ID NO: 120857 - DNA, 17 bp, Arabidopsis thaliana
gtcatcggcttgcgtac

SEQ ID NO: 120858 - DNA, 17 bp, Arabidopsis thaliana
gtcatcggttaggaatc

SEQ ID NO: 120859 - DNA, 17 bp, Arabidopsis thaliana
gtcatcggttaggaccc

SEQ ID NO: 120860 - DNA, 17 bp, Arabidopsis thaliana
gtcatcgtctccatcgt

SEQ ID NO: 120861 - DNA, 17 bp, Arabidopsis thaliana
gtcatcgtttaaccctt

SEQ ID NO: 120862 - DNA, 17 bp, Arabidopsis thaliana
gtcatcgttttgcctct

SEQ ID NO: 120863 - DNA, 17 bp, Arabidopsis thaliana
gtcatctaattagtgac

SEQ ID NO: 120864 - DNA, 17 bp, Arabidopsis thaliana
gtcatctaattagttac

SEQ ID NO: 120865 - DNA, 17 bp, Arabidopsis thaliana
gtcatctatctacgatc

SEQ ID NO: 120866 - DNA, 17 bp, Arabidopsis thaliana
gtcatctatggcccatt

SEQ ID NO: 120867 - DNA, 17 bp, Arabidopsis thaliana
gtcatctcaaacgacga

SEQ ID NO: 120868 - DNA, 17 bp, Arabidopsis thaliana
gtcatctcagcagtgca

SEQ ID NO: 120869 - DNA, 17 bp, Arabidopsis thaliana
gtcatctccaaaagacg

SEQ ID NO: 120870 - DNA, 17 bp, Arabidopsis thaliana
gtcatctccatcccaca

SEQ ID NO: 120871 - DNA, 17 bp, Arabidopsis thaliana
gtcatctcggtcgatct

SEQ ID NO: 120872 - DNA, 17 bp, Arabidopsis thaliana
gtcatctcggtcgattt

SEQ ID NO: 120873 - DNA, 17 bp, Arabidopsis thaliana
gtcatctctacagaact

SEQ ID NO: 120874 - DNA, 17 bp, Arabidopsis thaliana
gtcatctctaccgatgg

SEQ ID NO: 120875 - DNA, 17 bp, Arabidopsis thaliana
gtcatctctcatcaact

SEQ ID NO: 120876 - DNA, 17 bp, Arabidopsis thaliana
gtcatctctggtgtatg

SEQ ID NO: 120877 - DNA, 17 bp, Arabidopsis thaliana
gtcatctctttactgcc

SEQ ID NO: 120878 - DNA, 17 bp, Arabidopsis thaliana
gtcatcttccccttctt

SEQ ID NO: 120879 - DNA, 17 bp, Arabidopsis thaliana
gtcatcttgcggacttg

SEQ ID NO: 120880 - DNA, 17 bp, Arabidopsis thaliana
gtcatctttgacctctg

SEQ ID NO: 120881 - DNA, 17 bp, Arabidopsis thaliana
gtcatgacctccggcgg

SEQ ID NO: 120882 - DNA, 17 bp, Arabidopsis thaliana
gtcatgatcaggtccgc

SEQ ID NO: 120883 - DNA, 17 bp, Arabidopsis thaliana
gtcatgatcaggtctgc

SEQ ID NO: 120884 - DNA, 17 bp, Arabidopsis thaliana
gtcatgatcgttgtgct

SEQ ID NO: 120885 - DNA, 17 bp, Arabidopsis thaliana
gtcatgatctcgtgagt

SEQ ID NO: 120886 - DNA, 17 bp, Arabidopsis thaliana
gtcatgatggccgagtg

SEQ ID NO: 120887 - DNA, 17 bp, Arabidopsis thaliana
gtcatgattgattcgtt

SEQ ID NO: 120888 - DNA, 17 bp, Arabidopsis thaliana
gtcatgcaatacatcgc

SEQ ID NO: 120889 - DNA, 17 bp, Arabidopsis thaliana
gtcatgcccgaaatggc

SEQ ID NO: 120890 - DNA, 17 bp, Arabidopsis thaliana
gtcatgcggtgtaccgt

SEQ ID NO: 120891 - DNA, 17 bp, Arabidopsis thaliana
gtcatggatggcttgag

SEQ ID NO: 120892 - DNA, 17 bp, Arabidopsis thaliana
gtcatgtcacggctgca

SEQ ID NO: 120893 - DNA, 17 bp, Arabidopsis thaliana
gtcatgtgaccaatcaa

SEQ ID NO: 120894 - DNA, 17 bp, Arabidopsis thaliana
gtcatgtgatttctgcc

SEQ ID NO: 120895 - DNA, 17 bp, Arabidopsis thaliana
gtcatgtggcagtccaa

SEQ ID NO: 120896 - DNA, 17 bp, Arabidopsis thaliana
gtcatgttcacgtcggt

SEQ ID NO: 120897 - DNA, 17 bp, Arabidopsis thaliana
gtcatgttcagtgtcgt

SEQ ID NO: 120898 - DNA, 17 bp, Arabidopsis thaliana
gtcatgttcgtttgctt

SEQ ID NO: 120899 - DNA, 17 bp, Arabidopsis thaliana
gtcatgtttgcacacca

SEQ ID NO: 120900 - DNA, 17 bp, Arabidopsis thaliana
gtcattaatggcccggc

SEQ ID NO: 120901 - DNA, 17 bp, Arabidopsis thaliana
gtcattacatccggcaa

SEQ ID NO: 120902 - DNA, 17 bp, Arabidopsis thaliana
gtcattatcatggccgc

SEQ ID NO: 120903 - DNA, 17 bp, Arabidopsis thaliana
gtcattatccacgtgtt

SEQ ID NO: 120904 - DNA, 17 bp, Arabidopsis thaliana
gtcattcaatggaccaa

SEQ ID NO: 120905 - DNA, 17 bp, Arabidopsis thaliana
gtcattcacttgcctgc

SEQ ID NO: 120906 - DNA, 17 bp, Arabidopsis thaliana
gtcattcagcgctttga

SEQ ID NO: 120907 - DNA, 17 bp, Arabidopsis thaliana
gtcattcaggaaccgac

SEQ ID NO: 120908 - DNA, 17 bp, Arabidopsis thaliana
gtcattcatttacctgt

SEQ ID NO: 120909 - DNA, 17 bp, Arabidopsis thaliana
gtcattcgaaccagcga

SEQ ID NO: 120910 - DNA, 17 bp, Arabidopsis thaliana
gtcattcgaaccgacga

SEQ ID NO: 120911 - DNA, 17 bp, Arabidopsis thaliana
gtcattcgaactggcga

SEQ ID NO: 120912 - DNA, 17 bp, Arabidopsis thaliana
gtcattcggattgttgc

SEQ ID NO: 120913 - DNA, 17 bp, Arabidopsis thaliana
gtcattcggttggagaa

SEQ ID NO: 120914 - DNA, 17 bp, Arabidopsis thaliana
gtcattctacagttggt

SEQ ID NO: 120915 - DNA, 17 bp, Arabidopsis thaliana
gtcattctgatgggccg

SEQ ID NO: 120916 - DNA, 17 bp, Arabidopsis thaliana
gtcattctgtcttccgg

SEQ ID NO: 120917 - DNA, 17 bp, Arabidopsis thaliana
gtcattcttcaggggac

SEQ ID NO: 120918 - DNA, 17 bp, Arabidopsis thaliana
gtcattcttcaggtgac

SEQ ID NO: 120919 - DNA, 17 bp, Arabidopsis thaliana
gtcattgagccaaaact

SEQ ID NO: 120920 - DNA, 17 bp, Arabidopsis thaliana
gtcattgataatttgca

SEQ ID NO: 120921 - DNA, 17 bp, Arabidopsis thaliana
gtcattgattactgacc

SEQ ID NO: 120922 - DNA, 17 bp, Arabidopsis thaliana
gtcattgctctgtcttc

SEQ ID NO: 120923 - DNA, 17 bp, Arabidopsis thaliana
gtcattggccagtgccc

SEQ ID NO: 120924 - DNA, 17 bp, Arabidopsis thaliana
gtcattggccgaaccga

SEQ ID NO: 120925 - DNA, 17 bp, Arabidopsis thaliana
gtcattgtgcggctgct

SEQ ID NO: 120926 - DNA, 17 bp, Arabidopsis thaliana
gtcattgttgtggttgg

SEQ ID NO: 120927 - DNA, 17 bp, Arabidopsis thaliana
gtcatttaccaaaacta

SEQ ID NO: 120928 - DNA, 17 bp, Arabidopsis thaliana
gtcatttatcggttgag

SEQ ID NO: 120929 - DNA, 17 bp, Arabidopsis thaliana
gtcatttatttggagag

SEQ ID NO: 120930 - DNA, 17 bp, Arabidopsis thaliana
gtcatttcacaaagtcg

SEQ ID NO: 120931 - DNA, 17 bp, Arabidopsis thaliana
gtcatttccaacgaaac

SEQ ID NO: 120932 - DNA, 17 bp, Arabidopsis thaliana
gtcatttccggcccatt

SEQ ID NO: 120933 - DNA, 17 bp, Arabidopsis thaliana
gtcatttcgacggttgg

SEQ ID NO: 120934 - DNA, 17 bp, Arabidopsis thaliana
gtcatttcgggtctgag

SEQ ID NO: 120935 - DNA, 17 bp, Arabidopsis thaliana
gtcatttctctgaaggc

SEQ ID NO: 120936 - DNA, 17 bp, Arabidopsis thaliana
gtcatttctggtgtgtc

SEQ ID NO: 120937 - DNA, 17 bp, Arabidopsis thaliana
gtcatttgaaccggcaa

SEQ ID NO: 120938 - DNA, 17 bp, Arabidopsis thaliana
gtcatttgaaccggcga

SEQ ID NO: 120939 - DNA, 17 bp, Arabidopsis thaliana
gtcatttgatggcaggt

SEQ ID NO: 120940 - DNA, 17 bp, Arabidopsis thaliana
gtcatttgattaggcgc

SEQ ID NO: 120941 - DNA, 17 bp, Arabidopsis thaliana
gtcatttggatcgtggc

SEQ ID NO: 120942 - DNA, 17 bp, Arabidopsis thaliana
gtcatttggctcaacag

SEQ ID NO: 120943 - DNA, 17 bp, Arabidopsis thaliana
gtcatttgtatgggcca

SEQ ID NO: 120944 - DNA, 17 bp, Arabidopsis thaliana
gtcatttgtcatctgat

SEQ ID NO: 120945 - DNA, 17 bp, Arabidopsis thaliana
gtcatttgttgggctag

SEQ ID NO: 120946 - DNA, 17 bp, Arabidopsis thaliana
gtcattttacagttttg

SEQ ID NO: 120947 - DNA, 17 bp, Arabidopsis thaliana
gtcattttctgacgaag

SEQ ID NO: 120948 - DNA, 17 bp, Arabidopsis thaliana
gtcattttcttgtatga

SEQ ID NO: 120949 - DNA, 17 bp, Arabidopsis thaliana
gtcattttgcaactttc

SEQ ID NO: 120950 - DNA, 17 bp, Arabidopsis thaliana
gtcattttgtatcgcga

SEQ ID NO: 120951 - DNA, 17 bp, Arabidopsis thaliana
gtcattttttccattag

SEQ ID NO: 120952 - DNA, 17 bp, Arabidopsis thaliana
gtcatttttttgctgtt

SEQ ID NO: 120953 - DNA, 17 bp, Arabidopsis thaliana
gtccaaaaaaaattgtt

SEQ ID NO: 120954 - DNA, 17 bp, Arabidopsis thaliana
gtccaaaacgcccaccg

SEQ ID NO: 120955 - DNA, 17 bp, Arabidopsis thaliana
gtccaaaattaatgtgg

SEQ ID NO: 120956 - DNA, 17 bp, Arabidopsis thaliana
gtccaaacaaccgacgt

SEQ ID NO: 120957 - DNA, 17 bp, Arabidopsis thaliana
gtccaaacaggttgcgg

SEQ ID NO: 120958 - DNA, 17 bp, Arabidopsis thaliana
gtccaaacccaatgtga

SEQ ID NO: 120959 - DNA, 17 bp, Arabidopsis thaliana
gtccaaacccggtcagg

SEQ ID NO: 120960 - DNA, 17 bp, Arabidopsis thaliana
gtccaaaccgattggtg

SEQ ID NO: 120961 - DNA, 17 bp, Arabidopsis thaliana
gtccaaagagtttcaat

SEQ ID NO: 120962 - DNA, 17 bp, Arabidopsis thaliana
gtccaaagcgatatcta

SEQ ID NO: 120963 - DNA, 17 bp, Arabidopsis thaliana
gtccaaattggatgaga

SEQ ID NO: 120964 - DNA, 17 bp, Arabidopsis thaliana
gtccaaattttttctgg

SEQ ID NO: 120965 - DNA, 17 bp, Arabidopsis thaliana
gtccaacagattatgcc

SEQ ID NO: 120966 - DNA, 17 bp, Arabidopsis thaliana
gtccaacagttgtaagt

SEQ ID NO: 120967 - DNA, 17 bp, Arabidopsis thaliana
gtccaacatagcgtatt

SEQ ID NO: 120968 - DNA, 17 bp, Arabidopsis thaliana
gtccaacatagcgtccc

SEQ ID NO: 120969 - DNA, 17 bp, Arabidopsis thaliana
gtccaacatagcgttcg

SEQ ID NO: 120970 - DNA, 17 bp, Arabidopsis thaliana
gtccaacccggttgacc

SEQ ID NO: 120971 - DNA, 17 bp, Arabidopsis thaliana
gtccaaccgacaaaatc

SEQ ID NO: 120972 - DNA, 17 bp, Arabidopsis thaliana
gtccaaccggttaatcc

SEQ ID NO: 120973 - DNA, 17 bp, Arabidopsis thaliana
gtccaacctggttgacc

SEQ ID NO: 120974 - DNA, 17 bp, Arabidopsis thaliana
gtccaacctggttgatc

SEQ ID NO: 120975 - DNA, 17 bp, Arabidopsis thaliana
gtccaacgaaaaacagt

SEQ ID NO: 120976 - DNA, 17 bp, Arabidopsis thaliana
gtccaacgactgactgg

SEQ ID NO: 120977 - DNA, 17 bp, Arabidopsis thaliana
gtccaacgcctaatgag

SEQ ID NO: 120978 - DNA, 17 bp, Arabidopsis thaliana
gtccaacgtatgtgaat

SEQ ID NO: 120979 - DNA, 17 bp, Arabidopsis thaliana
gtccaactaagcgctcc

SEQ ID NO: 120980 - DNA, 17 bp, Arabidopsis thaliana
gtccaactccaactagt

SEQ ID NO: 120981 - DNA, 17 bp, Arabidopsis thaliana
gtccaacttcaaagaca

SEQ ID NO: 120982 - DNA, 17 bp, Arabidopsis thaliana
gtccaagagcctcagat

SEQ ID NO: 120983 - DNA, 17 bp, Arabidopsis thaliana
gtccaagatctgaattt

SEQ ID NO: 120984 - DNA, 17 bp, Arabidopsis thaliana
gtccaagatcttaaccg

SEQ ID NO: 120985 - DNA, 17 bp, Arabidopsis thaliana
gtccaagcacttagtca

SEQ ID NO: 120986 - DNA, 17 bp, Arabidopsis thaliana
gtccaagcacttagtcc

SEQ ID NO: 120987 - DNA, 17 bp, Arabidopsis thaliana
gtccaagcggtctttgt

SEQ ID NO: 120988 - DNA, 17 bp, Arabidopsis thaliana
gtccaagcttgtctgcc

SEQ ID NO: 120989 - DNA, 17 bp, Arabidopsis thaliana
gtccaaggaccattggg

SEQ ID NO: 120990 - DNA, 17 bp, Arabidopsis thaliana
gtccaaggatgacttgc

SEQ ID NO: 120991 - DNA, 17 bp, Arabidopsis thaliana
gtccaaggcaatcgtgt

SEQ ID NO: 120992 - DNA, 17 bp, Arabidopsis thaliana
gtccaaggcaatcgttt

SEQ ID NO: 120993 - DNA, 17 bp, Arabidopsis thaliana
gtccaaggctaaatacg

SEQ ID NO: 120994 - DNA, 17 bp, Arabidopsis thaliana
gtccaaggtaaaatgct

SEQ ID NO: 120995 - DNA, 17 bp, Arabidopsis thaliana
gtccaataacaaatcct

SEQ ID NO: 120996 - DNA, 17 bp, Arabidopsis thaliana
gtccaatatcggtggat

SEQ ID NO: 120997 - DNA, 17 bp, Arabidopsis thaliana
gtccaatccagatgact

SEQ ID NO: 120998 - DNA, 17 bp, Arabidopsis thaliana
gtccaatccatactatt

SEQ ID NO: 120999 - DNA, 17 bp, Arabidopsis thaliana
gtccaatcgggtttggg

SEQ ID NO: 121000 - DNA, 17 bp, Arabidopsis thaliana
gtccaatgaccattggg

SEQ ID NO: 121001 - DNA, 17 bp, Arabidopsis thaliana
gtccaatgggcataaca

SEQ ID NO: 121002 - DNA, 17 bp, Arabidopsis thaliana
gtccaattaagcccaaa

SEQ ID NO: 121003 - DNA, 17 bp, Arabidopsis thaliana
gtccaatttttctaagc

SEQ ID NO: 121004 - DNA, 17 bp, Arabidopsis thaliana
gtccacaacagtttgtt

SEQ ID NO: 121005 - DNA, 17 bp, Arabidopsis thaliana
gtccacaacggacccgc

SEQ ID NO: 121006 - DNA, 17 bp, Arabidopsis thaliana
gtccacagattagttga

SEQ ID NO: 121007 - DNA, 17 bp, Arabidopsis thaliana
gtccacatgttataggg

SEQ ID NO: 121008 - DNA, 17 bp, Arabidopsis thaliana
gtccaccatcacttctc

SEQ ID NO: 121009 - DNA, 17 bp, Arabidopsis thaliana
gtccacctttggttttt

SEQ ID NO: 121010 - DNA, 17 bp, Arabidopsis thaliana
gtccacgaaagatatga

SEQ ID NO: 121011 - DNA, 17 bp, Arabidopsis thaliana
gtccacgaggaccgaaa

SEQ ID NO: 121012 - DNA, 17 bp, Arabidopsis thaliana
gtccacgataattgaga

SEQ ID NO: 121013 - DNA, 17 bp, Arabidopsis thaliana
gtccacgccccgaatcg

SEQ ID NO: 121014 - DNA, 17 bp, Arabidopsis thaliana
gtccacggcgatctcaa

SEQ ID NO: 121015 - DNA, 17 bp, Arabidopsis thaliana
gtccacggttggtgtct

SEQ ID NO: 121016 - DNA, 17 bp, Arabidopsis thaliana
gtccacgtcaacatcga

SEQ ID NO: 121017 - DNA, 17 bp, Arabidopsis thaliana
gtccacgtctgcctggg

SEQ ID NO: 121018 - DNA, 17 bp, Arabidopsis thaliana
gtccacgtgtacctagg

SEQ ID NO: 121019 - DNA, 17 bp, Arabidopsis thaliana
gtccactaacctggtaa

SEQ ID NO: 121020 - DNA, 17 bp, Arabidopsis thaliana
gtccactaaggcacatg

SEQ ID NO: 121021 - DNA, 17 bp, Arabidopsis thaliana
gtccactaaggtccatg

SEQ ID NO: 121022 - DNA, 17 bp, Arabidopsis thaliana
gtccactctaaaacact

SEQ ID NO: 121023 - DNA, 17 bp, Arabidopsis thaliana
gtccactctgtactatt

SEQ ID NO: 121024 - DNA, 17 bp, Arabidopsis thaliana
gtccactgaggtctgtt

SEQ ID NO: 121025 - DNA, 17 bp, Arabidopsis thaliana
gtccactgccctatctg

SEQ ID NO: 121026 - DNA, 17 bp, Arabidopsis thaliana
gtccactgctctatctg

SEQ ID NO: 121027 - DNA, 17 bp, Arabidopsis thaliana
gtccactgctctttctg

SEQ ID NO: 121028 - DNA, 17 bp, Arabidopsis thaliana
gtccactgtgtgaccaa

SEQ ID NO: 121029 - DNA, 17 bp, Arabidopsis thaliana
gtccactttcttctgct

SEQ ID NO: 121030 - DNA, 17 bp, Arabidopsis thaliana
gtccacttttcaataga

SEQ ID NO: 121031 - DNA, 17 bp, Arabidopsis thaliana
gtccagaaacgtcctac

SEQ ID NO: 121032 - DNA, 17 bp, Arabidopsis thaliana
gtccagaactcagccgg

SEQ ID NO: 121033 - DNA, 17 bp, Arabidopsis thaliana
gtccagacagcactccc

SEQ ID NO: 121034 - DNA, 17 bp, Arabidopsis thaliana
gtccagacagcacttca

SEQ ID NO: 121035 - DNA, 17 bp, Arabidopsis thaliana
gtccagacagtagcaca

SEQ ID NO: 121036 - DNA, 17 bp, Arabidopsis thaliana
gtccagacatagtaagg

SEQ ID NO: 121037 - DNA, 17 bp, Arabidopsis thaliana
gtccagaccacacagtg

SEQ ID NO: 121038 - DNA, 17 bp, Arabidopsis thaliana
gtccagaccactgggtt

SEQ ID NO: 121039 - DNA, 17 bp, Arabidopsis thaliana
gtccagaccattttgtg

SEQ ID NO: 121040 - DNA, 17 bp, Arabidopsis thaliana
gtccagaccttgttggt

SEQ ID NO: 121041 - DNA, 17 bp, Arabidopsis thaliana
gtccagacgtagcgttc

SEQ ID NO: 121042 - DNA, 17 bp, Arabidopsis thaliana
gtccagagtgactccaa

SEQ ID NO: 121043 - DNA, 17 bp, Arabidopsis thaliana
gtccagatgagtctttg

SEQ ID NO: 121044 - DNA, 17 bp, Arabidopsis thaliana
gtccagccagattttag

SEQ ID NO: 121045 - DNA, 17 bp, Arabidopsis thaliana
gtccagcggctggaaga

SEQ ID NO: 121046 - DNA, 17 bp, Arabidopsis thaliana
gtccagctggagcctgc

SEQ ID NO: 121047 - DNA, 17 bp, Arabidopsis thaliana
gtccaggattcttctta

SEQ ID NO: 121048 - DNA, 17 bp, Arabidopsis thaliana
gtccaggatttgaaggc

SEQ ID NO: 121049 - DNA, 17 bp, Arabidopsis thaliana
gtccaggccgacgaatc

SEQ ID NO: 121050 - DNA, 17 bp, Arabidopsis thaliana
gtccaggcctattacat

SEQ ID NO: 121051 - DNA, 17 bp, Arabidopsis thaliana
gtccagggaccattggg

SEQ ID NO: 121052 - DNA, 17 bp, Arabidopsis thaliana
gtccaggtctagacaca

SEQ ID NO: 121053 - DNA, 17 bp, Arabidopsis thaliana
gtccaggtggtgcatgg

SEQ ID NO: 121054 - DNA, 17 bp, Arabidopsis thaliana
gtccaggttgttagttc

SEQ ID NO: 121055 - DNA, 17 bp, Arabidopsis thaliana
gtccagtatccgtagtg

SEQ ID NO: 121056 - DNA, 17 bp, Arabidopsis thaliana
gtccagtccatacacgg

SEQ ID NO: 121057 - DNA, 17 bp, Arabidopsis thaliana
gtccagtccgctaatgt

SEQ ID NO: 121058 - DNA, 17 bp, Arabidopsis thaliana
gtccagtctgtagtatt

SEQ ID NO: 121059 - DNA, 17 bp, Arabidopsis thaliana
gtccagtggtgatttct

SEQ ID NO: 121060 - DNA, 17 bp, Arabidopsis thaliana
gtccagtggtggtttct

SEQ ID NO: 121061 - DNA, 17 bp, Arabidopsis thaliana
gtccagtgtaattgtga

SEQ ID NO: 121062 - DNA, 17 bp, Arabidopsis thaliana
gtccagtgttccgtctc

SEQ ID NO: 121063 - DNA, 17 bp, Arabidopsis thaliana
gtccagtttgcttcaag

SEQ ID NO: 121064 - DNA, 17 bp, Arabidopsis thaliana
gtccagtttgtttcaaa

SEQ ID NO: 121065 - DNA, 17 bp, Arabidopsis thaliana
gtccataccatttttgg

SEQ ID NO: 121066 - DNA, 17 bp, Arabidopsis thaliana
gtccatacgagagatca

SEQ ID NO: 121067 - DNA, 17 bp, Arabidopsis thaliana
gtccatacggcggacct

SEQ ID NO: 121068 - DNA, 17 bp, Arabidopsis thaliana
gtccatacggtcaagcc

SEQ ID NO: 121069 - DNA, 17 bp, Arabidopsis thaliana
gtccatactgggctgga

SEQ ID NO: 121070 - DNA, 17 bp, Arabidopsis thaliana
gtccatatgagtctttg

SEQ ID NO: 121071 - DNA, 17 bp, Arabidopsis thaliana
gtccatatgggtctttg

SEQ ID NO: 121072 - DNA, 17 bp, Arabidopsis thaliana
gtccatcctgtagatgg

SEQ ID NO: 121073 - DNA, 17 bp, Arabidopsis thaliana
gtccatcttgtggtgca

SEQ ID NO: 121074 - DNA, 17 bp, Arabidopsis thaliana
gtccatgacatttgact

SEQ ID NO: 121075 - DNA, 17 bp, Arabidopsis thaliana
gtccatgagtgaacgag

SEQ ID NO: 121076 - DNA, 17 bp, Arabidopsis thaliana
gtccatgccctttgtac

SEQ ID NO: 121077 - DNA, 17 bp, Arabidopsis thaliana
gtccatgcgtcgagcaa

SEQ ID NO: 121078 - DNA, 17 bp, Arabidopsis thaliana
gtccatgggtgattctg

SEQ ID NO: 121079 - DNA, 17 bp, Arabidopsis thaliana
gtccatgtccactaagg

SEQ ID NO: 121080 - DNA, 17 bp, Arabidopsis thaliana
gtccattaacgctcatg

SEQ ID NO: 121081 - DNA, 17 bp, Arabidopsis thaliana
gtccattaaggcccatg

SEQ ID NO: 121082 - DNA, 17 bp, Arabidopsis thaliana
gtccattaatgtccatg

SEQ ID NO: 121083 - DNA, 17 bp, Arabidopsis thaliana
gtccattccgtaacatt

SEQ ID NO: 121084 - DNA, 17 bp, Arabidopsis thaliana
gtccattgctccgatag

SEQ ID NO: 121085 - DNA, 17 bp, Arabidopsis thaliana
gtccattgtctaatgga

SEQ ID NO: 121086 - DNA, 17 bp, Arabidopsis thaliana
gtccatttaagctccac

SEQ ID NO: 121087 - DNA, 17 bp, Arabidopsis thaliana
gtccatttaagctccag

SEQ ID NO: 121088 - DNA, 17 bp, Arabidopsis thaliana
gtccatttcatctaccg

SEQ ID NO: 121089 - DNA, 17 bp, Arabidopsis thaliana
gtccatttctacgcgga

SEQ ID NO: 121090 - DNA, 17 bp, Arabidopsis thaliana
gtcccaaaatacaggtg

SEQ ID NO: 121091 - DNA, 17 bp, Arabidopsis thaliana
gtcccaaaatgcaggtt

SEQ ID NO: 121092 - DNA, 17 bp, Arabidopsis thaliana
gtcccaaagtggttgac

SEQ ID NO: 121093 - DNA, 17 bp, Arabidopsis thaliana
gtcccaaagtgtggttg

SEQ ID NO: 121094 - DNA, 17 bp, Arabidopsis thaliana
gtcccaaatttgaaagc

SEQ ID NO: 121095 - DNA, 17 bp, Arabidopsis thaliana
gtcccaaatttgaaagt

SEQ ID NO: 121096 - DNA, 17 bp, Arabidopsis thaliana
gtcccaaccgccgtaac

SEQ ID NO: 121097 - DNA, 17 bp, Arabidopsis thaliana
gtcccaaccgccgtacc

SEQ ID NO: 121098 - DNA, 17 bp, Arabidopsis thaliana
gtcccaactacagcgat

SEQ ID NO: 121099 - DNA, 17 bp, Arabidopsis thaliana
gtcccaactacaggatt

SEQ ID NO: 121100 - DNA, 17 bp, Arabidopsis thaliana
gtcccaactactgcgat

SEQ ID NO: 121101 - DNA, 17 bp, Arabidopsis thaliana
gtcccaactccaggatt

SEQ ID NO: 121102 - DNA, 17 bp, Arabidopsis thaliana
gtcccaacttgaggatt

SEQ ID NO: 121103 - DNA, 17 bp, Arabidopsis thaliana
gtcccaagcgtcactcg

SEQ ID NO: 121104 - DNA, 17 bp, Arabidopsis thaliana
gtcccaaggatgacttg

SEQ ID NO: 121105 - DNA, 17 bp, Arabidopsis thaliana
gtcccaaggctcgcttc

SEQ ID NO: 121106 - DNA, 17 bp, Arabidopsis thaliana
gtcccaaggtgtggttg

SEQ ID NO: 121107 - DNA, 17 bp, Arabidopsis thaliana
gtcccaagtgcgaggag

SEQ ID NO: 121108 - DNA, 17 bp, Arabidopsis thaliana
gtcccaagtgtcactcg

SEQ ID NO: 121109 - DNA, 17 bp, Arabidopsis thaliana
gtcccaataacagggtg

SEQ ID NO: 121110 - DNA, 17 bp, Arabidopsis thaliana
gtcccaatcatcactcg

SEQ ID NO: 121111 - DNA, 17 bp, Arabidopsis thaliana
gtcccaattcaactaca

SEQ ID NO: 121112 - DNA, 17 bp, Arabidopsis thaliana
gtcccacactttgtact

SEQ ID NO: 121113 - DNA, 17 bp, Arabidopsis thaliana
gtcccacatcgaaagtt

SEQ ID NO: 121114 - DNA, 17 bp, Arabidopsis thaliana
gtcccacatcggaagtt

SEQ ID NO: 121115 - DNA, 17 bp, Arabidopsis thaliana
gtcccacatcggatgtt

SEQ ID NO: 121116 - DNA, 17 bp, Arabidopsis thaliana
gtcccacattggatgtt

SEQ ID NO: 121117 - DNA, 17 bp, Arabidopsis thaliana
gtcccacccacccaccc

SEQ ID NO: 121118 - DNA, 17 bp, Arabidopsis thaliana
gtcccaccgggtgtgcc

SEQ ID NO: 121119 - DNA, 17 bp, Arabidopsis thaliana
gtcccaccttgcagttg

SEQ ID NO: 121120 - DNA, 17 bp, Arabidopsis thaliana
gtcccactgggtgtgct

SEQ ID NO: 121121 - DNA, 17 bp, Arabidopsis thaliana
gtcccagaaggtgtgtt

SEQ ID NO: 121122 - DNA, 17 bp, Arabidopsis thaliana
gtcccagatactgcgat

SEQ ID NO: 121123 - DNA, 17 bp, Arabidopsis thaliana
gtcccagccacccaccc

SEQ ID NO: 121124 - DNA, 17 bp, Arabidopsis thaliana
gtcccaggcatgagagc

SEQ ID NO: 121125 - DNA, 17 bp, Arabidopsis thaliana
gtcccagggcgaacggt

SEQ ID NO: 121126 - DNA, 17 bp, Arabidopsis thaliana
gtcccaggtgaagttat

SEQ ID NO: 121127 - DNA, 17 bp, Arabidopsis thaliana
gtcccagtcgacgaaac

SEQ ID NO: 121128 - DNA, 17 bp, Arabidopsis thaliana
gtcccagtggatagtca

SEQ ID NO: 121129 - DNA, 17 bp, Arabidopsis thaliana
gtcccagttccgaaccc

SEQ ID NO: 121130 - DNA, 17 bp, Arabidopsis thaliana
gtcccagtttgcagcca

SEQ ID NO: 121131 - DNA, 17 bp, Arabidopsis thaliana
gtcccatcagagttctt

SEQ ID NO: 121132 - DNA, 17 bp, Arabidopsis thaliana
gtcccatcctagttacc

SEQ ID NO: 121133 - DNA, 17 bp, Arabidopsis thaliana
gtcccatcctagttgcc

SEQ ID NO: 121134 - DNA, 17 bp, Arabidopsis thaliana
gtcccatcctgtagatg

SEQ ID NO: 121135 - DNA, 17 bp, Arabidopsis thaliana
gtcccatgtttgacttt

SEQ ID NO: 121136 - DNA, 17 bp, Arabidopsis thaliana
gtcccattcggccaagt

SEQ ID NO: 121137 - DNA, 17 bp, Arabidopsis thaliana
gtccccacagacggcgc

SEQ ID NO: 121138 - DNA, 17 bp, Arabidopsis thaliana
gtccccagcagagtcgc

SEQ ID NO: 121139 - DNA, 17 bp, Arabidopsis thaliana
gtccccatcgtctagtg

SEQ ID NO: 121140 - DNA, 17 bp, Arabidopsis thaliana
gtcccccacataggcag

SEQ ID NO: 121141 - DNA, 17 bp, Arabidopsis thaliana
gtccccccctcggatga

SEQ ID NO: 121142 - DNA, 17 bp, Arabidopsis thaliana
gtcccccgctatcagat

SEQ ID NO: 121143 - DNA, 17 bp, Arabidopsis thaliana
gtccccgacatggaccc

SEQ ID NO: 121144 - DNA, 17 bp, Arabidopsis thaliana
gtccccgcagtgtaccg

SEQ ID NO: 121145 - DNA, 17 bp, Arabidopsis thaliana
gtccccggttcgaaccc

SEQ ID NO: 121146 - DNA, 17 bp, Arabidopsis thaliana
gtccccgtctcctatcg

SEQ ID NO: 121147 - DNA, 17 bp, Arabidopsis thaliana
gtccccgttctgccaaa

SEQ ID NO: 121148 - DNA, 17 bp, Arabidopsis thaliana
gtcccctggtgtgagaa

SEQ ID NO: 121149 - DNA, 17 bp, Arabidopsis thaliana
gtccccttggcccaatg

SEQ ID NO: 121150 - DNA, 17 bp, Arabidopsis thaliana
gtcccctttgtcgctaa

SEQ ID NO: 121151 - DNA, 17 bp, Arabidopsis thaliana
gtcccgaatctgttctt

SEQ ID NO: 121152 - DNA, 17 bp, Arabidopsis thaliana
gtcccgacaactcgtcc

SEQ ID NO: 121153 - DNA, 17 bp, Arabidopsis thaliana
gtcccgacaggcatgct

SEQ ID NO: 121154 - DNA, 17 bp, Arabidopsis thaliana
gtcccgacgccggcgag

SEQ ID NO: 121155 - DNA, 17 bp, Arabidopsis thaliana
gtcccgacgcggattac

SEQ ID NO: 121156 - DNA, 17 bp, Arabidopsis thaliana
gtcccgactaagtgttt

SEQ ID NO: 121157 - DNA, 17 bp, Arabidopsis thaliana
gtcccgactcccgacga

SEQ ID NO: 121158 - DNA, 17 bp, Arabidopsis thaliana
gtcccgagattggaatg

SEQ ID NO: 121159 - DNA, 17 bp, Arabidopsis thaliana
gtcccgagggacggagg

SEQ ID NO: 121160 - DNA, 17 bp, Arabidopsis thaliana
gtcccgagtgtgagcga

SEQ ID NO: 121161 - DNA, 17 bp, Arabidopsis thaliana
gtcccgagttgggacca

SEQ ID NO: 121162 - DNA, 17 bp, Arabidopsis thaliana
gtcccgagtttggaatg

SEQ ID NO: 121163 - DNA, 17 bp, Arabidopsis thaliana
gtcccgatcttgatgtg

SEQ ID NO: 121164 - DNA, 17 bp, Arabidopsis thaliana
gtcccgatttgtttttg

SEQ ID NO: 121165 - DNA, 17 bp, Arabidopsis thaliana
gtcccgcaaaacccgtc

SEQ ID NO: 121166 - DNA, 17 bp, Arabidopsis thaliana
gtcccgcaacgagcgca

SEQ ID NO: 121167 - DNA, 17 bp, Arabidopsis thaliana
gtcccgcactgtctgtt

SEQ ID NO: 121168 - DNA, 17 bp, Arabidopsis thaliana
gtcccgcagtatatcgc

SEQ ID NO: 121169 - DNA, 17 bp, Arabidopsis thaliana
gtcccgccaaacccgtc

SEQ ID NO: 121170 - DNA, 17 bp, Arabidopsis thaliana
gtcccgccaacccgtcc

SEQ ID NO: 121171 - DNA, 17 bp, Arabidopsis thaliana
gtcccgctgcaatatgt

SEQ ID NO: 121172 - DNA, 17 bp, Arabidopsis thaliana
gtcccggacttgatcaa

SEQ ID NO: 121173 - DNA, 17 bp, Arabidopsis thaliana
gtcccggtctcttgtca

SEQ ID NO: 121174 - DNA, 17 bp, Arabidopsis thaliana
gtcccggtgaccgaacc

SEQ ID NO: 121175 - DNA, 17 bp, Arabidopsis thaliana
gtcccggttgctgtggt

SEQ ID NO: 121176 - DNA, 17 bp, Arabidopsis thaliana
gtcccgtaatcccccca

SEQ ID NO: 121177 - DNA, 17 bp, Arabidopsis thaliana
gtcccgtagctcagttg

SEQ ID NO: 121178 - DNA, 17 bp, Arabidopsis thaliana
gtcccgtatccagttgt

SEQ ID NO: 121179 - DNA, 17 bp, Arabidopsis thaliana
gtcccgtgtacttgagc

SEQ ID NO: 121180 - DNA, 17 bp, Arabidopsis thaliana
gtcccgttagaaaaatt

SEQ ID NO: 121181 - DNA, 17 bp, Arabidopsis thaliana
gtcccgttgattttgag

SEQ ID NO: 121182 - DNA, 17 bp, Arabidopsis thaliana
gtcccgtttacatcact

SEQ ID NO: 121183 - DNA, 17 bp, Arabidopsis thaliana
gtccctaagcaatcact

SEQ ID NO: 121184 - DNA, 17 bp, Arabidopsis thaliana
gtccctaagcatttcag

SEQ ID NO: 121185 - DNA, 17 bp, Arabidopsis thaliana
gtccctaatacaccccc

SEQ ID NO: 121186 - DNA, 17 bp, Arabidopsis thaliana
gtccctaatacgccccc

SEQ ID NO: 121187 - DNA, 17 bp, Arabidopsis thaliana
gtccctaggtggcgtga

SEQ ID NO: 121188 - DNA, 17 bp, Arabidopsis thaliana
gtccctatggggtcgct

SEQ ID NO: 121189 - DNA, 17 bp, Arabidopsis thaliana
gtccctccctccctccc

SEQ ID NO: 121190 - DNA, 17 bp, Arabidopsis thaliana
gtccctcctgaccccgg

SEQ ID NO: 121191 - DNA, 17 bp, Arabidopsis thaliana
gtccctcgcaaattgcg

SEQ ID NO: 121192 - DNA, 17 bp, Arabidopsis thaliana
gtccctgccctttgtac

SEQ ID NO: 121193 - DNA, 17 bp, Arabidopsis thaliana
gtccctgccctttgtcc

SEQ ID NO: 121194 - DNA, 17 bp, Arabidopsis thaliana
gtccctgcggatgctaa

SEQ ID NO: 121195 - DNA, 17 bp, Arabidopsis thaliana
gtccctgctgatgattt

SEQ ID NO: 121196 - DNA, 17 bp, Arabidopsis thaliana
gtccctgctttttgtac

SEQ ID NO: 121197 - DNA, 17 bp, Arabidopsis thaliana
gtccctggatctgtagt

SEQ ID NO: 121198 - DNA, 17 bp, Arabidopsis thaliana
gtccctggcgactgtcg

SEQ ID NO: 121199 - DNA, 17 bp, Arabidopsis thaliana
gtccctggtttcagcga

SEQ ID NO: 121200 - DNA, 17 bp, Arabidopsis thaliana
gtccctgtctactatcc

SEQ ID NO: 121201 - DNA, 17 bp, Arabidopsis thaliana
gtccctgttcatttgcc

SEQ ID NO: 121202 - DNA, 17 bp, Arabidopsis thaliana
gtcccttaggggattac

SEQ ID NO: 121203 - DNA, 17 bp, Arabidopsis thaliana
gtcccttcgatgtcggc

SEQ ID NO: 121204 - DNA, 17 bp, Arabidopsis thaliana
gtcccttcggcggcgct

SEQ ID NO: 121205 - DNA, 17 bp, Arabidopsis thaliana
gtcccttcggtcggcga

SEQ ID NO: 121206 - DNA, 17 bp, Arabidopsis thaliana
gtcccttctaatacagc

SEQ ID NO: 121207 - DNA, 17 bp, Arabidopsis thaliana
gtcccttctggcagtcg

SEQ ID NO: 121208 - DNA, 17 bp, Arabidopsis thaliana
gtcccttggcgatttgc

SEQ ID NO: 121209 - DNA, 17 bp, Arabidopsis thaliana
gtccctttcgtccagtc

SEQ ID NO: 121210 - DNA, 17 bp, Arabidopsis thaliana
gtccctttcgtccagtg

SEQ ID NO: 121211 - DNA, 17 bp, Arabidopsis thaliana
gtccctttgtccggcct

SEQ ID NO: 121212 - DNA, 17 bp, Arabidopsis thaliana
gtccgaaaaatgtccat

SEQ ID NO: 121213 - DNA, 17 bp, Arabidopsis thaliana
gtccgaaattgagccgt

SEQ ID NO: 121214 - DNA, 17 bp, Arabidopsis thaliana
gtccgaacccgggctca

SEQ ID NO: 121215 - DNA, 17 bp, Arabidopsis thaliana
gtccgaactagcaccgg

SEQ ID NO: 121216 - DNA, 17 bp, Arabidopsis thaliana
gtccgaacttaggcagt

SEQ ID NO: 121217 - DNA, 17 bp, Arabidopsis thaliana
gtccgaagactggagtc

SEQ ID NO: 121218 - DNA, 17 bp, Arabidopsis thaliana
gtccgaagattaaagat

SEQ ID NO: 121219 - DNA, 17 bp, Arabidopsis thaliana
gtccgaatagtgactgc

SEQ ID NO: 121220 - DNA, 17 bp, Arabidopsis thaliana
gtccgaatagtgattcg

SEQ ID NO: 121221 - DNA, 17 bp, Arabidopsis thaliana
gtccgaatagtgattgc

SEQ ID NO: 121222 - DNA, 17 bp, Arabidopsis thaliana
gtccgaatgatgactgc

SEQ ID NO: 121223 - DNA, 17 bp, Arabidopsis thaliana
gtccgaatggcgactgc

SEQ ID NO: 121224 - DNA, 17 bp, Arabidopsis thaliana
gtccgaatggtgactgc

SEQ ID NO: 121225 - DNA, 17 bp, Arabidopsis thaliana
gtccgaatggtgattgc

SEQ ID NO: 121226 - DNA, 17 bp, Arabidopsis thaliana
gtccgaattcttacatg

SEQ ID NO: 121227 - DNA, 17 bp, Arabidopsis thaliana
gtccgacagtcggtcgg

SEQ ID NO: 121228 - DNA, 17 bp, Arabidopsis thaliana
gtccgacagtcggtgcg

SEQ ID NO: 121229 - DNA, 17 bp, Arabidopsis thaliana
gtccgacccgttctgtc

SEQ ID NO: 121230 - DNA, 17 bp, Arabidopsis thaliana
gtccgaccgttggtttt

SEQ ID NO: 121231 - DNA, 17 bp, Arabidopsis thaliana
gtccgacgaaaccaaag

SEQ ID NO: 121232 - DNA, 17 bp, Arabidopsis thaliana
gtccgacgaactcgaag

SEQ ID NO: 121233 - DNA, 17 bp, Arabidopsis thaliana
gtccgacgactgtcacc

SEQ ID NO: 121234 - DNA, 17 bp, Arabidopsis thaliana
gtccgacgcggattacg

SEQ ID NO: 121235 - DNA, 17 bp, Arabidopsis thaliana
gtccgacggccggcgat

SEQ ID NO: 121236 - DNA, 17 bp, Arabidopsis thaliana
gtccgacggtcggtacg

SEQ ID NO: 121237 - DNA, 17 bp, Arabidopsis thaliana
gtccgacggtcggtggg

SEQ ID NO: 121238 - DNA, 17 bp, Arabidopsis thaliana
gtccgactcgctaggga

SEQ ID NO: 121239 - DNA, 17 bp, Arabidopsis thaliana
gtccgactgttggtctg

SEQ ID NO: 121240 - DNA, 17 bp, Arabidopsis thaliana
gtccgacttgttgacag

SEQ ID NO: 121241 - DNA, 17 bp, Arabidopsis thaliana
gtccgactttgtgaaat

SEQ ID NO: 121242 - DNA, 17 bp, Arabidopsis thaliana
gtccgactttttgagac

SEQ ID NO: 121243 - DNA, 17 bp, Arabidopsis thaliana
gtccgagaaacagggga

SEQ ID NO: 121244 - DNA, 17 bp, Arabidopsis thaliana
gtccgagaattcgtcga

SEQ ID NO: 121245 - DNA, 17 bp, Arabidopsis thaliana
gtccgagacacctgtcg

SEQ ID NO: 121246 - DNA, 17 bp, Arabidopsis thaliana
gtccgagacgctggtgc

SEQ ID NO: 121247 - DNA, 17 bp, Arabidopsis thaliana
gtccgagacttcatcga

SEQ ID NO: 121248 - DNA, 17 bp, Arabidopsis thaliana
gtccgagaggatgatca

SEQ ID NO: 121249 - DNA, 17 bp, Arabidopsis thaliana
gtccgaggaaagactca

SEQ ID NO: 121250 - DNA, 17 bp, Arabidopsis thaliana
gtccgaggaatcgtcga

SEQ ID NO: 121251 - DNA, 17 bp, Arabidopsis thaliana
gtccgaggattcgtcga

SEQ ID NO: 121252 - DNA, 17 bp, Arabidopsis thaliana
gtccgaggatttgtcga

SEQ ID NO: 121253 - DNA, 17 bp, Arabidopsis thaliana
gtccgagggcacgtctg

SEQ ID NO: 121254 - DNA, 17 bp, Arabidopsis thaliana
gtccgaggtgtttctac

SEQ ID NO: 121255 - DNA, 17 bp, Arabidopsis thaliana
gtccgaggttttctact

SEQ ID NO: 121256 - DNA, 17 bp, Arabidopsis thaliana
gtccgatccatagtcaa

SEQ ID NO: 121257 - DNA, 17 bp, Arabidopsis thaliana
gtccgatccattcgagc

SEQ ID NO: 121258 - DNA, 17 bp, Arabidopsis thaliana
gtccgatccgtacatac

SEQ ID NO: 121259 - DNA, 17 bp, Arabidopsis thaliana
gtccgatccgtctggcc

SEQ ID NO: 121260 - DNA, 17 bp, Arabidopsis thaliana
gtccgatccttaacaac

SEQ ID NO: 121261 - DNA, 17 bp, Arabidopsis thaliana
gtccgatctcatctgaa

SEQ ID NO: 121262 - DNA, 17 bp, Arabidopsis thaliana
gtccgatgaggatggtc

SEQ ID NO: 121263 - DNA, 17 bp, Arabidopsis thaliana
gtccgattattatgccc

SEQ ID NO: 121264 - DNA, 17 bp, Arabidopsis thaliana
gtccgattcatagtcaa

SEQ ID NO: 121265 - DNA, 17 bp, Arabidopsis thaliana
gtccgattggaccatca

SEQ ID NO: 121266 - DNA, 17 bp, Arabidopsis thaliana
gtccgattggtgacatg

SEQ ID NO: 121267 - DNA, 17 bp, Arabidopsis thaliana
gtccgattggtgaccat

SEQ ID NO: 121268 - DNA, 17 bp, Arabidopsis thaliana
gtccgattggtgacctg

SEQ ID NO: 121269 - DNA, 17 bp, Arabidopsis thaliana
gtccgattgtcgttact

SEQ ID NO: 121270 - DNA, 17 bp, Arabidopsis thaliana
gtccgcaaagtctattg

SEQ ID NO: 121271 - DNA, 17 bp, Arabidopsis thaliana
gtccgcaagacgattga

SEQ ID NO: 121272 - DNA, 17 bp, Arabidopsis thaliana
gtccgcaatcatcttct

SEQ ID NO: 121273 - DNA, 17 bp, Arabidopsis thaliana
gtccgcactaaccacaa

SEQ ID NO: 121274 - DNA, 17 bp, Arabidopsis thaliana
gtccgcagaaccgcacc

SEQ ID NO: 121275 - DNA, 17 bp, Arabidopsis thaliana
gtccgcagataatatgg

SEQ ID NO: 121276 - DNA, 17 bp, Arabidopsis thaliana
gtccgcagatggtccgc

SEQ ID NO: 121277 - DNA, 17 bp, Arabidopsis thaliana
gtccgcagccgtttatt

SEQ ID NO: 121278 - DNA, 17 bp, Arabidopsis thaliana
gtccgcagcgatttatt

SEQ ID NO: 121279 - DNA, 17 bp, Arabidopsis thaliana
gtccgcagcggttttct

SEQ ID NO: 121280 - DNA, 17 bp, Arabidopsis thaliana
gtccgcagttcatcttc

SEQ ID NO: 121281 - DNA, 17 bp, Arabidopsis thaliana
gtccgcagttgctagaa

SEQ ID NO: 121282 - DNA, 17 bp, Arabidopsis thaliana
gtccgccagccgatgac

SEQ ID NO: 121283 - DNA, 17 bp, Arabidopsis thaliana
gtccgccagttgactta

SEQ ID NO: 121284 - DNA, 17 bp, Arabidopsis thaliana
gtccgccatataacccc

SEQ ID NO: 121285 - DNA, 17 bp, Arabidopsis thaliana
gtccgccatcatcttct

SEQ ID NO: 121286 - DNA, 17 bp, Arabidopsis thaliana
gtccgccccaaaaacag

SEQ ID NO: 121287 - DNA, 17 bp, Arabidopsis thaliana
gtccgccccaaaaatag

SEQ ID NO: 121288 - DNA, 17 bp, Arabidopsis thaliana
gtccgccccaaccgctg

SEQ ID NO: 121289 - DNA, 17 bp, Arabidopsis thaliana
gtccgccctaacagccg

SEQ ID NO: 121290 - DNA, 17 bp, Arabidopsis thaliana
gtccgccgatcgatccg

SEQ ID NO: 121291 - DNA, 17 bp, Arabidopsis thaliana
gtccgccgcccgattgc

SEQ ID NO: 121292 - DNA, 17 bp, Arabidopsis thaliana
gtccgccggataaccag

SEQ ID NO: 121293 - DNA, 17 bp, Arabidopsis thaliana
gtccgccggtcgattcg

SEQ ID NO: 121294 - DNA, 17 bp, Arabidopsis thaliana
gtccgccgtcaaatccc

SEQ ID NO: 121295 - DNA, 17 bp, Arabidopsis thaliana
gtccgcctaagcactca

SEQ ID NO: 121296 - DNA, 17 bp, Arabidopsis thaliana
gtccgcctgcgcattgt

SEQ ID NO: 121297 - DNA, 17 bp, Arabidopsis thaliana
gtccgcctttggtgtgc

SEQ ID NO: 121298 - DNA, 17 bp, Arabidopsis thaliana
gtccgcgattatgtctc

SEQ ID NO: 121299 - DNA, 17 bp, Arabidopsis thaliana
gtccgcggataatatgg

SEQ ID NO: 121300 - DNA, 17 bp, Arabidopsis thaliana
gtccgcggtaattgaga

SEQ ID NO: 121301 - DNA, 17 bp, Arabidopsis thaliana
gtccgctactgctcgtt

SEQ ID NO: 121302 - DNA, 17 bp, Arabidopsis thaliana
gtccgctaggtacttct

SEQ ID NO: 121303 - DNA, 17 bp, Arabidopsis thaliana
gtccgctccgcgaatat

SEQ ID NO: 121304 - DNA, 17 bp, Arabidopsis thaliana
gtccgctccgctctatt

SEQ ID NO: 121305 - DNA, 17 bp, Arabidopsis thaliana
gtccgctgacagccgac

SEQ ID NO: 121306 - DNA, 17 bp, Arabidopsis thaliana
gtccgctgacttagttt

SEQ ID NO: 121307 - DNA, 17 bp, Arabidopsis thaliana
gtccgctgtccactttc

SEQ ID NO: 121308 - DNA, 17 bp, Arabidopsis thaliana
gtccgcttgatctgcat

SEQ ID NO: 121309 - DNA, 17 bp, Arabidopsis thaliana
gtccgcttgggccgctg

SEQ ID NO: 121310 - DNA, 17 bp, Arabidopsis thaliana
gtccgctttgaccactc

SEQ ID NO: 121311 - DNA, 17 bp, Arabidopsis thaliana
gtccggaccaggtgact

SEQ ID NO: 121312 - DNA, 17 bp, Arabidopsis thaliana
gtccggacccagtgtcg

SEQ ID NO: 121313 - DNA, 17 bp, Arabidopsis thaliana
gtccggacgagttctct

SEQ ID NO: 121314 - DNA, 17 bp, Arabidopsis thaliana
gtccggagacctcggcg

SEQ ID NO: 121315 - DNA, 17 bp, Arabidopsis thaliana
gtccggagacgtcggcg

SEQ ID NO: 121316 - DNA, 17 bp, Arabidopsis thaliana
gtccggagacgtcgtcg

SEQ ID NO: 121317 - DNA, 17 bp, Arabidopsis thaliana
gtccggagacgttggcg

SEQ ID NO: 121318 - DNA, 17 bp, Arabidopsis thaliana
gtccggagccggagtcg

SEQ ID NO: 121319 - DNA, 17 bp, Arabidopsis thaliana
gtccggatattcggatt

SEQ ID NO: 121320 - DNA, 17 bp, Arabidopsis thaliana
gtccggatcgcgggtta

SEQ ID NO: 121321 - DNA, 17 bp, Arabidopsis thaliana
gtccggcaacttctcag

SEQ ID NO: 121322 - DNA, 17 bp, Arabidopsis thaliana
gtccggccgccgggatt

SEQ ID NO: 121323 - DNA, 17 bp, Arabidopsis thaliana
gtccggcgagttgatga

SEQ ID NO: 121324 - DNA, 17 bp, Arabidopsis thaliana
gtccggcgtccggatct

SEQ ID NO: 121325 - DNA, 17 bp, Arabidopsis thaliana
gtccggctgagcaggag

SEQ ID NO: 121326 - DNA, 17 bp, Arabidopsis thaliana
gtccgggaggattcgtc

SEQ ID NO: 121327 - DNA, 17 bp, Arabidopsis thaliana
gtccgggcacgacgggg

SEQ ID NO: 121328 - DNA, 17 bp, Arabidopsis thaliana
gtccgggggtgaaagct

SEQ ID NO: 121329 - DNA, 17 bp, Arabidopsis thaliana
gtccgggttgggctata

SEQ ID NO: 121330 - DNA, 17 bp, Arabidopsis thaliana
gtccggtccacactggg

SEQ ID NO: 121331 - DNA, 17 bp, Arabidopsis thaliana
gtccggtccgccttcgg

SEQ ID NO: 121332 - DNA, 17 bp, Arabidopsis thaliana
gtccggtccgcctttgg

SEQ ID NO: 121333 - DNA, 17 bp, Arabidopsis thaliana
gtccggtcctgcgtgtg

SEQ ID NO: 121334 - DNA, 17 bp, Arabidopsis thaliana
gtccggtcctttgcgga

SEQ ID NO: 121335 - DNA, 17 bp, Arabidopsis thaliana
gtccggtctataaatgg

SEQ ID NO: 121336 - DNA, 17 bp, Arabidopsis thaliana
gtccggtgttccagttt

SEQ ID NO: 121337 - DNA, 17 bp, Arabidopsis thaliana
gtccggttacggtccga

SEQ ID NO: 121338 - DNA, 17 bp, Arabidopsis thaliana
gtccggttcactgtctg

SEQ ID NO: 121339 - DNA, 17 bp, Arabidopsis thaliana
gtccggttgcgctaagt

SEQ ID NO: 121340 - DNA, 17 bp, Arabidopsis thaliana
gtccggtttactctgaa

SEQ ID NO: 121341 - DNA, 17 bp, Arabidopsis thaliana
gtccggtttagacaaca

SEQ ID NO: 121342 - DNA, 17 bp, Arabidopsis thaliana
gtccgtaaaaatagcta

SEQ ID NO: 121343 - DNA, 17 bp, Arabidopsis thaliana
gtccgtaagtcttgagg

SEQ ID NO: 121344 - DNA, 17 bp, Arabidopsis thaliana
gtccgtacgagaatcca

SEQ ID NO: 121345 - DNA, 17 bp, Arabidopsis thaliana
gtccgtagattcatcca

SEQ ID NO: 121346 - DNA, 17 bp, Arabidopsis thaliana
gtccgtagttcggtcct

SEQ ID NO: 121347 - DNA, 17 bp, Arabidopsis thaliana
gtccgtatgagtctttg

SEQ ID NO: 121348 - DNA, 17 bp, Arabidopsis thaliana
gtccgtatgtgtctttg

SEQ ID NO: 121349 - DNA, 17 bp, Arabidopsis thaliana
gtccgtcaaagattctt

SEQ ID NO: 121350 - DNA, 17 bp, Arabidopsis thaliana
gtccgtcaaccgaaact

SEQ ID NO: 121351 - DNA, 17 bp, Arabidopsis thaliana
gtccgtcaagacccaac

SEQ ID NO: 121352 - DNA, 17 bp, Arabidopsis thaliana
gtccgtcaaggaacacg

SEQ ID NO: 121353 - DNA, 17 bp, Arabidopsis thaliana
gtccgtcaccggttcgt

SEQ ID NO: 121354 - DNA, 17 bp, Arabidopsis thaliana
gtccgtcactcaaccgg

SEQ ID NO: 121355 - DNA, 17 bp, Arabidopsis thaliana
gtccgtcagcggtgcag

SEQ ID NO: 121356 - DNA, 17 bp, Arabidopsis thaliana
gtccgtcaggacctacg

SEQ ID NO: 121357 - DNA, 17 bp, Arabidopsis thaliana
gtccgtcagttgactta

SEQ ID NO: 121358 - DNA, 17 bp, Arabidopsis thaliana
gtccgtcatatagcaca

SEQ ID NO: 121359 - DNA, 17 bp, Arabidopsis thaliana
gtccgtcattgtttgtg

SEQ ID NO: 121360 - DNA, 17 bp, Arabidopsis thaliana
gtccgtccaacctggtt

SEQ ID NO: 121361 - DNA, 17 bp, Arabidopsis thaliana
gtccgtccaaggctaaa

SEQ ID NO: 121362 - DNA, 17 bp, Arabidopsis thaliana
gtccgtccaatggttga

SEQ ID NO: 121363 - DNA, 17 bp, Arabidopsis thaliana
gtccgtccacatgttat

SEQ ID NO: 121364 - DNA, 17 bp, Arabidopsis thaliana
gtccgtccagtgtaatt

SEQ ID NO: 121365 - DNA, 17 bp, Arabidopsis thaliana
gtccgtccattaaggcc

SEQ ID NO: 121366 - DNA, 17 bp, Arabidopsis thaliana
gtccgtcccaactactg

SEQ ID NO: 121367 - DNA, 17 bp, Arabidopsis thaliana
gtccgtccctgcccttt

SEQ ID NO: 121368 - DNA, 17 bp, Arabidopsis thaliana
gtccgtccctttcgtcc

SEQ ID NO: 121369 - DNA, 17 bp, Arabidopsis thaliana
gtccgtccgactttgtg

SEQ ID NO: 121370 - DNA, 17 bp, Arabidopsis thaliana
gtccgtccgagacttca

SEQ ID NO: 121371 - DNA, 17 bp, Arabidopsis thaliana
gtccgtccgctactgct

SEQ ID NO: 121372 - DNA, 17 bp, Arabidopsis thaliana
gtccgtccggcaagtat

SEQ ID NO: 121373 - DNA, 17 bp, Arabidopsis thaliana
gtccgtccgtccgtccg

SEQ ID NO: 121374 - DNA, 17 bp, Arabidopsis thaliana
gtccgtccgttcggcgg

SEQ ID NO: 121375 - DNA, 17 bp, Arabidopsis thaliana
gtccgtcctacaggaca

SEQ ID NO: 121376 - DNA, 17 bp, Arabidopsis thaliana
gtccgtcctcagaaaag

SEQ ID NO: 121377 - DNA, 17 bp, Arabidopsis thaliana
gtccgtcctcagcgacg

SEQ ID NO: 121378 - DNA, 17 bp, Arabidopsis thaliana
gtccgtccttcaccacg

SEQ ID NO: 121379 - DNA, 17 bp, Arabidopsis thaliana
gtccgtccttcagacct

SEQ ID NO: 121380 - DNA, 17 bp, Arabidopsis thaliana
gtccgtcgaaatccgct

SEQ ID NO: 121381 - DNA, 17 bp, Arabidopsis thaliana
gtccgtcgaacctggct

SEQ ID NO: 121382 - DNA, 17 bp, Arabidopsis thaliana
gtccgtcgatacgggac

SEQ ID NO: 121383 - DNA, 17 bp, Arabidopsis thaliana
gtccgtcgatatgtccg

SEQ ID NO: 121384 - DNA, 17 bp, Arabidopsis thaliana
gtccgtcgattattgat

SEQ ID NO: 121385 - DNA, 17 bp, Arabidopsis thaliana
gtccgtcgctttggccg

SEQ ID NO: 121386 - DNA, 17 bp, Arabidopsis thaliana
gtccgtcgctttggctg

SEQ ID NO: 121387 - DNA, 17 bp, Arabidopsis thaliana
gtccgtcggagttggac

SEQ ID NO: 121388 - DNA, 17 bp, Arabidopsis thaliana
gtccgtcggcgatacgc

SEQ ID NO: 121389 - DNA, 17 bp, Arabidopsis thaliana
gtccgtcggctcttcgc

SEQ ID NO: 121390 - DNA, 17 bp, Arabidopsis thaliana
gtccgtcgggacccgaa

SEQ ID NO: 121391 - DNA, 17 bp, Arabidopsis thaliana
gtccgtcgtaaatctcc

SEQ ID NO: 121392 - DNA, 17 bp, Arabidopsis thaliana
gtccgtcgttggctaag

SEQ ID NO: 121393 - DNA, 17 bp, Arabidopsis thaliana
gtccgtctaatgacttg

SEQ ID NO: 121394 - DNA, 17 bp, Arabidopsis thaliana
gtccgtctacagcttct

SEQ ID NO: 121395 - DNA, 17 bp, Arabidopsis thaliana
gtccgtctagctcagtt

SEQ ID NO: 121396 - DNA, 17 bp, Arabidopsis thaliana
gtccgtctccaaggtga

SEQ ID NO: 121397 - DNA, 17 bp, Arabidopsis thaliana
gtccgtctcttagatct

SEQ ID NO: 121398 - DNA, 17 bp, Arabidopsis thaliana
gtccgtctgacgatcgc

SEQ ID NO: 121399 - DNA, 17 bp, Arabidopsis thaliana
gtccgtctgcctgggtg

SEQ ID NO: 121400 - DNA, 17 bp, Arabidopsis thaliana
gtccgtctggttcatta

SEQ ID NO: 121401 - DNA, 17 bp, Arabidopsis thaliana
gtccgtcttagcgccct

SEQ ID NO: 121402 - DNA, 17 bp, Arabidopsis thaliana
gtccgtcttaggcttcc

SEQ ID NO: 121403 - DNA, 17 bp, Arabidopsis thaliana
gtccgtcttagtccatc

SEQ ID NO: 121404 - DNA, 17 bp, Arabidopsis thaliana
gtccgtctttctaagta

SEQ ID NO: 121405 - DNA, 17 bp, Arabidopsis thaliana
gtccgtggacgtagcca

SEQ ID NO: 121406 - DNA, 17 bp, Arabidopsis thaliana
gtccgtggcgattagta

SEQ ID NO: 121407 - DNA, 17 bp, Arabidopsis thaliana
gtccgtggtagaatcgt

SEQ ID NO: 121408 - DNA, 17 bp, Arabidopsis thaliana
gtccgtgtcccggcgac

SEQ ID NO: 121409 - DNA, 17 bp, Arabidopsis thaliana
gtccgtgtgaatcgtgg

SEQ ID NO: 121410 - DNA, 17 bp, Arabidopsis thaliana
gtccgttaaccactttg

SEQ ID NO: 121411 - DNA, 17 bp, Arabidopsis thaliana
gtccgttcggcggaagc

SEQ ID NO: 121412 - DNA, 17 bp, Arabidopsis thaliana
gtccgttcgttgctcgt

SEQ ID NO: 121413 - DNA, 17 bp, Arabidopsis thaliana
gtccgttgacttaacga

SEQ ID NO: 121414 - DNA, 17 bp, Arabidopsis thaliana
gtccgttgctatggtgc

SEQ ID NO: 121415 - DNA, 17 bp, Arabidopsis thaliana
gtccgtttcatcttctc

SEQ ID NO: 121416 - DNA, 17 bp, Arabidopsis thaliana
gtccgtttctcggaatg

SEQ ID NO: 121417 - DNA, 17 bp, Arabidopsis thaliana
gtccgtttgcatttcgc

SEQ ID NO: 121418 - DNA, 17 bp, Arabidopsis thaliana
gtccgtttgtttacttg

SEQ ID NO: 121419 - DNA, 17 bp, Arabidopsis thaliana
gtccgttttcgtctcca

SEQ ID NO: 121420 - DNA, 17 bp, Arabidopsis thaliana
gtccgttttttcgtgag

SEQ ID NO: 121421 - DNA, 17 bp, Arabidopsis thaliana
gtcctaaacggaccaac

SEQ ID NO: 121422 - DNA, 17 bp, Arabidopsis thaliana
gtcctaaatggccaagt

SEQ ID NO: 121423 - DNA, 17 bp, Arabidopsis thaliana
gtcctaagatgagctca

SEQ ID NO: 121424 - DNA, 17 bp, Arabidopsis thaliana
gtcctaagcacggcact

SEQ ID NO: 121425 - DNA, 17 bp, Arabidopsis thaliana
gtcctaagccgtggctt

SEQ ID NO: 121426 - DNA, 17 bp, Arabidopsis thaliana
gtcctaagcgaacatgc

SEQ ID NO: 121427 - DNA, 17 bp, Arabidopsis thaliana
gtcctaagctgcagcgg

SEQ ID NO: 121428 - DNA, 17 bp, Arabidopsis thaliana
gtcctaaggtgcaacgg

SEQ ID NO: 121429 - DNA, 17 bp, Arabidopsis thaliana
gtcctaatgttccagtt

SEQ ID NO: 121430 - DNA, 17 bp, Arabidopsis thaliana
gtcctacagagaagctt

SEQ ID NO: 121431 - DNA, 17 bp, Arabidopsis thaliana
gtcctacaggacaagtg

SEQ ID NO: 121432 - DNA, 17 bp, Arabidopsis thaliana
gtcctacaggttgaggc

SEQ ID NO: 121433 - DNA, 17 bp, Arabidopsis thaliana
gtcctaccaaacccatc

SEQ ID NO: 121434 - DNA, 17 bp, Arabidopsis thaliana
gtcctaccgtgcgctgg

SEQ ID NO: 121435 - DNA, 17 bp, Arabidopsis thaliana
gtcctacctagctgaga

SEQ ID NO: 121436 - DNA, 17 bp, Arabidopsis thaliana
gtcctactttgtgaaat

SEQ ID NO: 121437 - DNA, 17 bp, Arabidopsis thaliana
gtcctagaattgacagg

SEQ ID NO: 121438 - DNA, 17 bp, Arabidopsis thaliana
gtcctagacgacgccta

SEQ ID NO: 121439 - DNA, 17 bp, Arabidopsis thaliana
gtcctagctaggtttgg

SEQ ID NO: 121440 - DNA, 17 bp, Arabidopsis thaliana
gtcctaggacccttgtg

SEQ ID NO: 121441 - DNA, 17 bp, Arabidopsis thaliana
gtcctaggatccttgtg

SEQ ID NO: 121442 - DNA, 17 bp, Arabidopsis thaliana
gtcctaggcgttcggtt

SEQ ID NO: 121443 - DNA, 17 bp, Arabidopsis thaliana
gtcctaggtccactttt

SEQ ID NO: 121444 - DNA, 17 bp, Arabidopsis thaliana
gtcctaggtttccttca

SEQ ID NO: 121445 - DNA, 17 bp, Arabidopsis thaliana
gtcctagtccgcatcct

SEQ ID NO: 121446 - DNA, 17 bp, Arabidopsis thaliana
gtcctagtcgcatcctg

SEQ ID NO: 121447 - DNA, 17 bp, Arabidopsis thaliana
gtcctagtctgaattct

SEQ ID NO: 121448 - DNA, 17 bp, Arabidopsis thaliana
gtcctatggaaggatcc

SEQ ID NO: 121449 - DNA, 17 bp, Arabidopsis thaliana
gtcctatgtaaatctat

SEQ ID NO: 121450 - DNA, 17 bp, Arabidopsis thaliana
gtcctattagctcagtg

SEQ ID NO: 121451 - DNA, 17 bp, Arabidopsis thaliana
gtcctattggtagttac

SEQ ID NO: 121452 - DNA, 17 bp, Arabidopsis thaliana
gtcctattggtgtttac

SEQ ID NO: 121453 - DNA, 17 bp, Arabidopsis thaliana
gtcctatttggcttgat

SEQ ID NO: 121454 - DNA, 17 bp, Arabidopsis thaliana
gtcctcaaagttccaga

SEQ ID NO: 121455 - DNA, 17 bp, Arabidopsis thaliana
gtcctcaatgattatgg

SEQ ID NO: 121456 - DNA, 17 bp, Arabidopsis thaliana
gtcctcactaaagttac

SEQ ID NO: 121457 - DNA, 17 bp, Arabidopsis thaliana
gtcctcactagttgcat

SEQ ID NO: 121458 - DNA, 17 bp, Arabidopsis thaliana
gtcctcagaaaaggcgg

SEQ ID NO: 121459 - DNA, 17 bp, Arabidopsis thaliana
gtcctcagcgacggacc

SEQ ID NO: 121460 - DNA, 17 bp, Arabidopsis thaliana
gtcctcagcgacggacg

SEQ ID NO: 121461 - DNA, 17 bp, Arabidopsis thaliana
gtcctcagcgacggact

SEQ ID NO: 121462 - DNA, 17 bp, Arabidopsis thaliana
gtcctcagcgacggatt

SEQ ID NO: 121463 - DNA, 17 bp, Arabidopsis thaliana
gtcctcagctcaggcca

SEQ ID NO: 121464 - DNA, 17 bp, Arabidopsis thaliana
gtcctcagggacggaga

SEQ ID NO: 121465 - DNA, 17 bp, Arabidopsis thaliana
gtcctcagttcggattg

SEQ ID NO: 121466 - DNA, 17 bp, Arabidopsis thaliana
gtcctcagttcggattt

SEQ ID NO: 121467 - DNA, 17 bp, Arabidopsis thaliana
gtcctcatagtcagacg

SEQ ID NO: 121468 - DNA, 17 bp, Arabidopsis thaliana
gtcctcattcgcacagt

SEQ ID NO: 121469 - DNA, 17 bp, Arabidopsis thaliana
gtcctccgcccggaccg

SEQ ID NO: 121470 - DNA, 17 bp, Arabidopsis thaliana
gtcctccggattttcaa

SEQ ID NO: 121471 - DNA, 17 bp, Arabidopsis thaliana
gtcctcctccagatatg

SEQ ID NO: 121472 - DNA, 17 bp, Arabidopsis thaliana
gtcctcctgttaccatt

SEQ ID NO: 121473 - DNA, 17 bp, Arabidopsis thaliana
gtcctcgagggtttgaa

SEQ ID NO: 121474 - DNA, 17 bp, Arabidopsis thaliana
gtcctcgtctctgaagg

SEQ ID NO: 121475 - DNA, 17 bp, Arabidopsis thaliana
gtcctcgtgggatagga

SEQ ID NO: 121476 - DNA, 17 bp, Arabidopsis thaliana
gtcctcgtggttagtgg

SEQ ID NO: 121477 - DNA, 17 bp, Arabidopsis thaliana
gtcctcgtgttgcatcc

SEQ ID NO: 121478 - DNA, 17 bp, Arabidopsis thaliana
gtcctcgtttaccctac

SEQ ID NO: 121479 - DNA, 17 bp, Arabidopsis thaliana
gtcctctaacctgtttg

SEQ ID NO: 121480 - DNA, 17 bp, Arabidopsis thaliana
gtcctctaatggctgtt

SEQ ID NO: 121481 - DNA, 17 bp, Arabidopsis thaliana
gtcctctactacttggc

SEQ ID NO: 121482 - DNA, 17 bp, Arabidopsis thaliana
gtcctctaggaaccaag

SEQ ID NO: 121483 - DNA, 17 bp, Arabidopsis thaliana
gtcctctaggtgcaatc

SEQ ID NO: 121484 - DNA, 17 bp, Arabidopsis thaliana
gtcctctatctgtctca

SEQ ID NO: 121485 - DNA, 17 bp, Arabidopsis thaliana
gtcctctccatttgggt

SEQ ID NO: 121486 - DNA, 17 bp, Arabidopsis thaliana
gtcctctccgccttgtg

SEQ ID NO: 121487 - DNA, 17 bp, Arabidopsis thaliana
gtcctctcctatctgac

SEQ ID NO: 121488 - DNA, 17 bp, Arabidopsis thaliana
gtcctctcggattgcag

SEQ ID NO: 121489 - DNA, 17 bp, Arabidopsis thaliana
gtcctctgacctgacga

SEQ ID NO: 121490 - DNA, 17 bp, Arabidopsis thaliana
gtcctcttcttttgact

SEQ ID NO: 121491 - DNA, 17 bp, Arabidopsis thaliana
gtcctgaaggtacagtg

SEQ ID NO: 121492 - DNA, 17 bp, Arabidopsis thaliana
gtcctgaccacacagtg

SEQ ID NO: 121493 - DNA, 17 bp, Arabidopsis thaliana
gtcctgaccgactattt

SEQ ID NO: 121494 - DNA, 17 bp, Arabidopsis thaliana
gtcctgactcagattat

SEQ ID NO: 121495 - DNA, 17 bp, Arabidopsis thaliana
gtcctgacttgggtata

SEQ ID NO: 121496 - DNA, 17 bp, Arabidopsis thaliana
gtcctgactttttgggc

SEQ ID NO: 121497 - DNA, 17 bp, Arabidopsis thaliana
gtcctgagacagttgtc

SEQ ID NO: 121498 - DNA, 17 bp, Arabidopsis thaliana
gtcctgagacagttgtt

SEQ ID NO: 121499 - DNA, 17 bp, Arabidopsis thaliana
gtcctgagcgacggacc

SEQ ID NO: 121500 - DNA, 17 bp, Arabidopsis thaliana
gtcctgaggaggccgac

SEQ ID NO: 121501 - DNA, 17 bp, Arabidopsis thaliana
gtcctgaggccagttca

SEQ ID NO: 121502 - DNA, 17 bp, Arabidopsis thaliana
gtcctgagttcttctcg

SEQ ID NO: 121503 - DNA, 17 bp, Arabidopsis thaliana
gtcctgagtttggaatg

SEQ ID NO: 121504 - DNA, 17 bp, Arabidopsis thaliana
gtcctgatcgattctct

SEQ ID NO: 121505 - DNA, 17 bp, Arabidopsis thaliana
gtcctgatggcttctct

SEQ ID NO: 121506 - DNA, 17 bp, Arabidopsis thaliana
gtcctgcagatatcttg

SEQ ID NO: 121507 - DNA, 17 bp, Arabidopsis thaliana
gtcctgcagcagttagt

SEQ ID NO: 121508 - DNA, 17 bp, Arabidopsis thaliana
gtcctgccaaacccatc

SEQ ID NO: 121509 - DNA, 17 bp, Arabidopsis thaliana
gtcctgccaaacccggg

SEQ ID NO: 121510 - DNA, 17 bp, Arabidopsis thaliana
gtcctgccaaacccgtc

SEQ ID NO: 121511 - DNA, 17 bp, Arabidopsis thaliana
gtcctgccaaacctgtc

SEQ ID NO: 121512 - DNA, 17 bp, Arabidopsis thaliana
gtcctgccaaactcgtc

SEQ ID NO: 121513 - DNA, 17 bp, Arabidopsis thaliana
gtcctgccaaatccgtc

SEQ ID NO: 121514 - DNA, 17 bp, Arabidopsis thaliana
gtcctgccacccagatc

SEQ ID NO: 121515 - DNA, 17 bp, Arabidopsis thaliana
gtcctgccaggccgaca

SEQ ID NO: 121516 - DNA, 17 bp, Arabidopsis thaliana
gtcctgccatataacac

SEQ ID NO: 121517 - DNA, 17 bp, Arabidopsis thaliana
gtcctgccattgactgt

SEQ ID NO: 121518 - DNA, 17 bp, Arabidopsis thaliana
gtcctgcgggtttgcaa

SEQ ID NO: 121519 - DNA, 17 bp, Arabidopsis thaliana
gtcctgctaaactcgtc

SEQ ID NO: 121520 - DNA, 17 bp, Arabidopsis thaliana
gtcctgctaactcggac

SEQ ID NO: 121521 - DNA, 17 bp, Arabidopsis thaliana
gtcctgctttgcaagaa

SEQ ID NO: 121522 - DNA, 17 bp, Arabidopsis thaliana
gtcctggaagtcatgtg

SEQ ID NO: 121523 - DNA, 17 bp, Arabidopsis thaliana
gtcctggtcgacgattc

SEQ ID NO: 121524 - DNA, 17 bp, Arabidopsis thaliana
gtcctggtcgagggttc

SEQ ID NO: 121525 - DNA, 17 bp, Arabidopsis thaliana
gtcctggtgagatatga

SEQ ID NO: 121526 - DNA, 17 bp, Arabidopsis thaliana
gtcctggtgttacgttt

SEQ ID NO: 121527 - DNA, 17 bp, Arabidopsis thaliana
gtcctggttgatcctgc

SEQ ID NO: 121528 - DNA, 17 bp, Arabidopsis thaliana
gtcctgtcaaacccgtc

SEQ ID NO: 121529 - DNA, 17 bp, Arabidopsis thaliana
gtcctgtcagttgggtt

SEQ ID NO: 121530 - DNA, 17 bp, Arabidopsis thaliana
gtcctgtctactatcca

SEQ ID NO: 121531 - DNA, 17 bp, Arabidopsis thaliana
gtcctgtgatgatgatg

SEQ ID NO: 121532 - DNA, 17 bp, Arabidopsis thaliana
gtcctgtgggctcccca

SEQ ID NO: 121533 - DNA, 17 bp, Arabidopsis thaliana
gtcctgttgcgtttcag

SEQ ID NO: 121534 - DNA, 17 bp, Arabidopsis thaliana
gtcctgtttgtttggcc

SEQ ID NO: 121535 - DNA, 17 bp, Arabidopsis thaliana
gtccttaaactgaccag

SEQ ID NO: 121536 - DNA, 17 bp, Arabidopsis thaliana
gtccttaatgactcttt

SEQ ID NO: 121537 - DNA, 17 bp, Arabidopsis thaliana
gtccttaccattttcgt

SEQ ID NO: 121538 - DNA, 17 bp, Arabidopsis thaliana
gtccttacttgcatggt

SEQ ID NO: 121539 - DNA, 17 bp, Arabidopsis thaliana
gtccttaggatccagct

SEQ ID NO: 121540 - DNA, 17 bp, Arabidopsis thaliana
gtccttaggcttccatc

SEQ ID NO: 121541 - DNA, 17 bp, Arabidopsis thaliana
gtccttatggagcagtt

SEQ ID NO: 121542 - DNA, 17 bp, Arabidopsis thaliana
gtccttatggtgcgctt

SEQ ID NO: 121543 - DNA, 17 bp, Arabidopsis thaliana
gtccttattcgcatggt

SEQ ID NO: 121544 - DNA, 17 bp, Arabidopsis thaliana
gtccttcaaacatagcc

SEQ ID NO: 121545 - DNA, 17 bp, Arabidopsis thaliana
gtccttcaaactactgt

SEQ ID NO: 121546 - DNA, 17 bp, Arabidopsis thaliana
gtccttcaccacggcaa

SEQ ID NO: 121547 - DNA, 17 bp, Arabidopsis thaliana
gtccttcagacctcttt

SEQ ID NO: 121548 - DNA, 17 bp, Arabidopsis thaliana
gtccttcagctggggct

SEQ ID NO: 121549 - DNA, 17 bp, Arabidopsis thaliana
gtccttccagactcttg

SEQ ID NO: 121550 - DNA, 17 bp, Arabidopsis thaliana
gtccttcctgaaggccc

SEQ ID NO: 121551 - DNA, 17 bp, Arabidopsis thaliana
gtccttccttacacagg

SEQ ID NO: 121552 - DNA, 17 bp, Arabidopsis thaliana
gtccttcgaggtgcttt

SEQ ID NO: 121553 - DNA, 17 bp, Arabidopsis thaliana
gtccttcggctacaggc

SEQ ID NO: 121554 - DNA, 17 bp, Arabidopsis thaliana
gtccttcggggagaagt

SEQ ID NO: 121555 - DNA, 17 bp, Arabidopsis thaliana
gtccttcgttgctttca

SEQ ID NO: 121556 - DNA, 17 bp, Arabidopsis thaliana
gtccttctaaacccgtt

SEQ ID NO: 121557 - DNA, 17 bp, Arabidopsis thaliana
gtccttctccgtgatat

SEQ ID NO: 121558 - DNA, 17 bp, Arabidopsis thaliana
gtccttctctatgtggt

SEQ ID NO: 121559 - DNA, 17 bp, Arabidopsis thaliana
gtccttctctgcctggg

SEQ ID NO: 121560 - DNA, 17 bp, Arabidopsis thaliana
gtccttctgagactagc

SEQ ID NO: 121561 - DNA, 17 bp, Arabidopsis thaliana
gtccttcttcatccatg

SEQ ID NO: 121562 - DNA, 17 bp, Arabidopsis thaliana
gtccttcttggtagtcg

SEQ ID NO: 121563 - DNA, 17 bp, Arabidopsis thaliana
gtccttgactagcagcc

SEQ ID NO: 121564 - DNA, 17 bp, Arabidopsis thaliana
gtccttgactctagtcc

SEQ ID NO: 121565 - DNA, 17 bp, Arabidopsis thaliana
gtccttgatttttctct

SEQ ID NO: 121566 - DNA, 17 bp, Arabidopsis thaliana
gtccttgcacatgggtt

SEQ ID NO: 121567 - DNA, 17 bp, Arabidopsis thaliana
gtccttgcagataaaac

SEQ ID NO: 121568 - DNA, 17 bp, Arabidopsis thaliana
gtccttgccggcctctt

SEQ ID NO: 121569 - DNA, 17 bp, Arabidopsis thaliana
gtccttggagtgaaatt

SEQ ID NO: 121570 - DNA, 17 bp, Arabidopsis thaliana
gtccttggagtgccgat

SEQ ID NO: 121571 - DNA, 17 bp, Arabidopsis thaliana
gtccttggagtgccggt

SEQ ID NO: 121572 - DNA, 17 bp, Arabidopsis thaliana
gtccttggatttgttgt

SEQ ID NO: 121573 - DNA, 17 bp, Arabidopsis thaliana
gtccttggcatgtgata

SEQ ID NO: 121574 - DNA, 17 bp, Arabidopsis thaliana
gtccttgggccgctgta

SEQ ID NO: 121575 - DNA, 17 bp, Arabidopsis thaliana
gtccttgggctcttcat

SEQ ID NO: 121576 - DNA, 17 bp, Arabidopsis thaliana
gtccttggttcattgcc

SEQ ID NO: 121577 - DNA, 17 bp, Arabidopsis thaliana
gtccttgtgcctattct

SEQ ID NO: 121578 - DNA, 17 bp, Arabidopsis thaliana
gtccttgtggtggacgc

SEQ ID NO: 121579 - DNA, 17 bp, Arabidopsis thaliana
gtcctttagaaggacca

SEQ ID NO: 121580 - DNA, 17 bp, Arabidopsis thaliana
gtcctttagaccgtgag

SEQ ID NO: 121581 - DNA, 17 bp, Arabidopsis thaliana
gtcctttagttgatttg

SEQ ID NO: 121582 - DNA, 17 bp, Arabidopsis thaliana
gtcctttcctgaaggcc

SEQ ID NO: 121583 - DNA, 17 bp, Arabidopsis thaliana
gtcctttcttgtcgcag

SEQ ID NO: 121584 - DNA, 17 bp, Arabidopsis thaliana
gtcctttgaggttccaa

SEQ ID NO: 121585 - DNA, 17 bp, Arabidopsis thaliana
gtcctttgcgtactgaa

SEQ ID NO: 121586 - DNA, 17 bp, Arabidopsis thaliana
gtcctttggccgagtgg

SEQ ID NO: 121587 - DNA, 17 bp, Arabidopsis thaliana
gtcctttgtcgctaaga

SEQ ID NO: 121588 - DNA, 17 bp, Arabidopsis thaliana
gtcctttgtgctttcca

SEQ ID NO: 121589 - DNA, 17 bp, Arabidopsis thaliana
gtcctttgtgttgacca

SEQ ID NO: 121590 - DNA, 17 bp, Arabidopsis thaliana
gtccttttgactctgtc

SEQ ID NO: 121591 - DNA, 17 bp, Arabidopsis thaliana
gtccttttgatccacgc

SEQ ID NO: 121592 - DNA, 17 bp, Arabidopsis thaliana
gtcgaaaaagtagatct

SEQ ID NO: 121593 - DNA, 17 bp, Arabidopsis thaliana
gtcgaaaactcggctca

SEQ ID NO: 121594 - DNA, 17 bp, Arabidopsis thaliana
gtcgaaacaaggtagcc

SEQ ID NO: 121595 - DNA, 17 bp, Arabidopsis thaliana
gtcgaaacaccgattcg

SEQ ID NO: 121596 - DNA, 17 bp, Arabidopsis thaliana
gtcgaaaccgtgtgagt

SEQ ID NO: 121597 - DNA, 17 bp, Arabidopsis thaliana
gtcgaaacggctgtttc

SEQ ID NO: 121598 - DNA, 17 bp, Arabidopsis thaliana
gtcgaaagaatagagcg

SEQ ID NO: 121599 - DNA, 17 bp, Arabidopsis thaliana
gtcgaaagactactgaa

SEQ ID NO: 121600 - DNA, 17 bp, Arabidopsis thaliana
gtcgaaaggttggccca

SEQ ID NO: 121601 - DNA, 17 bp, Arabidopsis thaliana
gtcgaaatccgctaagg

SEQ ID NO: 121602 - DNA, 17 bp, Arabidopsis thaliana
gtcgaaatccggtgttg

SEQ ID NO: 121603 - DNA, 17 bp, Arabidopsis thaliana
gtcgaaatttgcgtggt

SEQ ID NO: 121604 - DNA, 17 bp, Arabidopsis thaliana
gtcgaacagacaacgaa

SEQ ID NO: 121605 - DNA, 17 bp, Arabidopsis thaliana
gtcgaacagtcagctca

SEQ ID NO: 121606 - DNA, 17 bp, Arabidopsis thaliana
gtcgaacatatgacgtt

SEQ ID NO: 121607 - DNA, 17 bp, Arabidopsis thaliana
gtcgaacatatgtcgtt

SEQ ID NO: 121608 - DNA, 17 bp, Arabidopsis thaliana
gtcgaaccaaatctttc

SEQ ID NO: 121609 - DNA, 17 bp, Arabidopsis thaliana
gtcgaaccaggcttcat

SEQ ID NO: 121610 - DNA, 17 bp, Arabidopsis thaliana
gtcgaaccagtcacacg

SEQ ID NO: 121611 - DNA, 17 bp, Arabidopsis thaliana
gtcgaacccgggctcag

SEQ ID NO: 121612 - DNA, 17 bp, Arabidopsis thaliana
gtcgaaccgggcagtcc

SEQ ID NO: 121613 - DNA, 17 bp, Arabidopsis thaliana
gtcgaacctggctacga

SEQ ID NO: 121614 - DNA, 17 bp, Arabidopsis thaliana
gtcgaacgacaccaccc

SEQ ID NO: 121615 - DNA, 17 bp, Arabidopsis thaliana
gtcgaacgacaccatcc

SEQ ID NO: 121616 - DNA, 17 bp, Arabidopsis thaliana
gtcgaacgacactaccg

SEQ ID NO: 121617 - DNA, 17 bp, Arabidopsis thaliana
gtcgaacggaccggccc

SEQ ID NO: 121618 - DNA, 17 bp, Arabidopsis thaliana
gtcgaacggaggtactt

SEQ ID NO: 121619 - DNA, 17 bp, Arabidopsis thaliana
gtcgaacgtgcttttga

SEQ ID NO: 121620 - DNA, 17 bp, Arabidopsis thaliana
gtcgaacgtgcttttgg

SEQ ID NO: 121621 - DNA, 17 bp, Arabidopsis thaliana
gtcgaactgatagataa

SEQ ID NO: 121622 - DNA, 17 bp, Arabidopsis thaliana
gtcgaactgatagatca

SEQ ID NO: 121623 - DNA, 17 bp, Arabidopsis thaliana
gtcgaactgctatttgg

SEQ ID NO: 121624 - DNA, 17 bp, Arabidopsis thaliana
gtcgaacttgcaactat

SEQ ID NO: 121625 - DNA, 17 bp, Arabidopsis thaliana
gtcgaagaaagactcag

SEQ ID NO: 121626 - DNA, 17 bp, Arabidopsis thaliana
gtcgaagaatttgctga

SEQ ID NO: 121627 - DNA, 17 bp, Arabidopsis thaliana
gtcgaagacacgggttc

SEQ ID NO: 121628 - DNA, 17 bp, Arabidopsis thaliana
gtcgaagacctggagat

SEQ ID NO: 121629 - DNA, 17 bp, Arabidopsis thaliana
gtcgaagacgcagaaca

SEQ ID NO: 121630 - DNA, 17 bp, Arabidopsis thaliana
gtcgaagagattagtgc

SEQ ID NO: 121631 - DNA, 17 bp, Arabidopsis thaliana
gtcgaagagctggagat

SEQ ID NO: 121632 - DNA, 17 bp, Arabidopsis thaliana
gtcgaagataacatgcc

SEQ ID NO: 121633 - DNA, 17 bp, Arabidopsis thaliana
gtcgaagattgaggtct

SEQ ID NO: 121634 - DNA, 17 bp, Arabidopsis thaliana
gtcgaagatttcaggca

SEQ ID NO: 121635 - DNA, 17 bp, Arabidopsis thaliana
gtcgaagatttgaggca

SEQ ID NO: 121636 - DNA, 17 bp, Arabidopsis thaliana
gtcgaagcccgtaattc

SEQ ID NO: 121637 - DNA, 17 bp, Arabidopsis thaliana
gtcgaaggagctcgttg

SEQ ID NO: 121638 - DNA, 17 bp, Arabidopsis thaliana
gtcgaaggtgggcagga

SEQ ID NO: 121639 - DNA, 17 bp, Arabidopsis thaliana
gtcgaaggtgtttggta

SEQ ID NO: 121640 - DNA, 17 bp, Arabidopsis thaliana
gtcgaagtccgtatgag

SEQ ID NO: 121641 - DNA, 17 bp, Arabidopsis thaliana
gtcgaagtcctgaaaat

SEQ ID NO: 121642 - DNA, 17 bp, Arabidopsis thaliana
gtcgaagtcttagggtc

SEQ ID NO: 121643 - DNA, 17 bp, Arabidopsis thaliana
gtcgaatactttgacct

SEQ ID NO: 121644 - DNA, 17 bp, Arabidopsis thaliana
gtcgaataggctattga

SEQ ID NO: 121645 - DNA, 17 bp, Arabidopsis thaliana
gtcgaatccgccaaggc

SEQ ID NO: 121646 - DNA, 17 bp, Arabidopsis thaliana
gtcgaatcctacttggg

SEQ ID NO: 121647 - DNA, 17 bp, Arabidopsis thaliana
gtcgaatctcttgcgtt

SEQ ID NO: 121648 - DNA, 17 bp, Arabidopsis thaliana
gtcgaatctgattctgg

SEQ ID NO: 121649 - DNA, 17 bp, Arabidopsis thaliana
gtcgaatgagaatgtag

SEQ ID NO: 121650 - DNA, 17 bp, Arabidopsis thaliana
gtcgaatgtgacttcga

SEQ ID NO: 121651 - DNA, 17 bp, Arabidopsis thaliana
gtcgaattccactgagc

SEQ ID NO: 121652 - DNA, 17 bp, Arabidopsis thaliana
gtcgaattcggctgagt

SEQ ID NO: 121653 - DNA, 17 bp, Arabidopsis thaliana
gtcgacaaagtctctcg

SEQ ID NO: 121654 - DNA, 17 bp, Arabidopsis thaliana
gtcgacaaagtcttctc

SEQ ID NO: 121655 - DNA, 17 bp, Arabidopsis thaliana
gtcgacaaatcctcgga

SEQ ID NO: 121656 - DNA, 17 bp, Arabidopsis thaliana
gtcgacaacaacaactt

SEQ ID NO: 121657 - DNA, 17 bp, Arabidopsis thaliana
gtcgacaagcggcgacc

SEQ ID NO: 121658 - DNA, 17 bp, Arabidopsis thaliana
gtcgacaatcaagatgt

SEQ ID NO: 121659 - DNA, 17 bp, Arabidopsis thaliana
gtcgacaggaaaacgaa

SEQ ID NO: 121660 - DNA, 17 bp, Arabidopsis thaliana
gtcgacagttgccactg

SEQ ID NO: 121661 - DNA, 17 bp, Arabidopsis thaliana
gtcgacatcgttcgcgg

SEQ ID NO: 121662 - DNA, 17 bp, Arabidopsis thaliana
gtcgacattcacagaat

SEQ ID NO: 121663 - DNA, 17 bp, Arabidopsis thaliana
gtcgacattgagttttt

SEQ ID NO: 121664 - DNA, 17 bp, Arabidopsis thaliana
gtcgacattgcgttttt

SEQ ID NO: 121665 - DNA, 17 bp, Arabidopsis thaliana
gtcgaccaaagcgatca

SEQ ID NO: 121666 - DNA, 17 bp, Arabidopsis thaliana
gtcgaccacgatttcct

SEQ ID NO: 121667 - DNA, 17 bp, Arabidopsis thaliana
gtcgaccagagccgacg

SEQ ID NO: 121668 - DNA, 17 bp, Arabidopsis thaliana
gtcgaccaggacgagga

SEQ ID NO: 121669 - DNA, 17 bp, Arabidopsis thaliana
gtcgaccaggacggccg

SEQ ID NO: 121670 - DNA, 17 bp, Arabidopsis thaliana
gtcgaccaggccggccg

SEQ ID NO: 121671 - DNA, 17 bp, Arabidopsis thaliana
gtcgaccaggtccgaga

SEQ ID NO: 121672 - DNA, 17 bp, Arabidopsis thaliana
gtcgacccaaacccgtc

SEQ ID NO: 121673 - DNA, 17 bp, Arabidopsis thaliana
gtcgaccctcagtagga

SEQ ID NO: 121674 - DNA, 17 bp, Arabidopsis thaliana
gtcgaccgacacactct

SEQ ID NO: 121675 - DNA, 17 bp, Arabidopsis thaliana
gtcgaccgacaccaccg

SEQ ID NO: 121676 - DNA, 17 bp, Arabidopsis thaliana
gtcgaccgaccccacct

SEQ ID NO: 121677 - DNA, 17 bp, Arabidopsis thaliana
gtcgaccgaccgatcgc

SEQ ID NO: 121678 - DNA, 17 bp, Arabidopsis thaliana
gtcgaccgccgactgtc

SEQ ID NO: 121679 - DNA, 17 bp, Arabidopsis thaliana
gtcgaccgctagttcta

SEQ ID NO: 121680 - DNA, 17 bp, Arabidopsis thaliana
gtcgaccggatcttaaa

SEQ ID NO: 121681 - DNA, 17 bp, Arabidopsis thaliana
gtcgaccgggtccgagg

SEQ ID NO: 121682 - DNA, 17 bp, Arabidopsis thaliana
gtcgaccgggtttgagg

SEQ ID NO: 121683 - DNA, 17 bp, Arabidopsis thaliana
gtcgaccggtccgcctt

SEQ ID NO: 121684 - DNA, 17 bp, Arabidopsis thaliana
gtcgaccgtttgctgac

SEQ ID NO: 121685 - DNA, 17 bp, Arabidopsis thaliana
gtcgacctggtgaagat

SEQ ID NO: 121686 - DNA, 17 bp, Arabidopsis thaliana
gtcgacctttcagccgg

SEQ ID NO: 121687 - DNA, 17 bp, Arabidopsis thaliana
gtcgacgaaacaacaac

SEQ ID NO: 121688 - DNA, 17 bp, Arabidopsis thaliana
gtcgacgaatcctcgga

SEQ ID NO: 121689 - DNA, 17 bp, Arabidopsis thaliana
gtcgacgaattcttgga

SEQ ID NO: 121690 - DNA, 17 bp, Arabidopsis thaliana
gtcgacgaccatgagtt

SEQ ID NO: 121691 - DNA, 17 bp, Arabidopsis thaliana
gtcgacgagatcaccga

SEQ ID NO: 121692 - DNA, 17 bp, Arabidopsis thaliana
gtcgacgatgttgtggc

SEQ ID NO: 121693 - DNA, 17 bp, Arabidopsis thaliana
gtcgacgattcctcgga

SEQ ID NO: 121694 - DNA, 17 bp, Arabidopsis thaliana
gtcgacgccggtggacg

SEQ ID NO: 121695 - DNA, 17 bp, Arabidopsis thaliana
gtcgacgcgggctctgc

SEQ ID NO: 121696 - DNA, 17 bp, Arabidopsis thaliana
gtcgacggaggcgttga

SEQ ID NO: 121697 - DNA, 17 bp, Arabidopsis thaliana
gtcgacggatctctatg

SEQ ID NO: 121698 - DNA, 17 bp, Arabidopsis thaliana
gtcgacggatctttatg

SEQ ID NO: 121699 - DNA, 17 bp, Arabidopsis thaliana
gtcgacggcgcacggtg

SEQ ID NO: 121700 - DNA, 17 bp, Arabidopsis thaliana
gtcgacgggaagtggtg

SEQ ID NO: 121701 - DNA, 17 bp, Arabidopsis thaliana
gtcgacgggagttatgg

SEQ ID NO: 121702 - DNA, 17 bp, Arabidopsis thaliana
gtcgacgtcagatggca

SEQ ID NO: 121703 - DNA, 17 bp, Arabidopsis thaliana
gtcgacgtgccggagcg

SEQ ID NO: 121704 - DNA, 17 bp, Arabidopsis thaliana
gtcgacgtgccggagtg

SEQ ID NO: 121705 - DNA, 17 bp, Arabidopsis thaliana
gtcgacgtgtcggtcga

SEQ ID NO: 121706 - DNA, 17 bp, Arabidopsis thaliana
gtcgactaccgagtaat

SEQ ID NO: 121707 - DNA, 17 bp, Arabidopsis thaliana
gtcgactagatgtccca

SEQ ID NO: 121708 - DNA, 17 bp, Arabidopsis thaliana
gtcgactatccacctaa

SEQ ID NO: 121709 - DNA, 17 bp, Arabidopsis thaliana
gtcgactcaacaggaac

SEQ ID NO: 121710 - DNA, 17 bp, Arabidopsis thaliana
gtcgactcagtattcca

SEQ ID NO: 121711 - DNA, 17 bp, Arabidopsis thaliana
gtcgactccagctcacg

SEQ ID NO: 121712 - DNA, 17 bp, Arabidopsis thaliana
gtcgactccttactatc

SEQ ID NO: 121713 - DNA, 17 bp, Arabidopsis thaliana
gtcgactctaaagcatt

SEQ ID NO: 121714 - DNA, 17 bp, Arabidopsis thaliana
gtcgactctaaagtatt

SEQ ID NO: 121715 - DNA, 17 bp, Arabidopsis thaliana
gtcgactctcggcaacg

SEQ ID NO: 121716 - DNA, 17 bp, Arabidopsis thaliana
gtcgactgacttcggcg

SEQ ID NO: 121717 - DNA, 17 bp, Arabidopsis thaliana
gtcgactgagattatct

SEQ ID NO: 121718 - DNA, 17 bp, Arabidopsis thaliana
gtcgacttacttccggg

SEQ ID NO: 121719 - DNA, 17 bp, Arabidopsis thaliana
gtcgacttagttttctg

SEQ ID NO: 121720 - DNA, 17 bp, Arabidopsis thaliana
gtcgacttatcacatcc

SEQ ID NO: 121721 - DNA, 17 bp, Arabidopsis thaliana
gtcgacttgatggtttg

SEQ ID NO: 121722 - DNA, 17 bp, Arabidopsis thaliana
gtcgacttggttcagct

SEQ ID NO: 121723 - DNA, 17 bp, Arabidopsis thaliana
gtcgacttgtcccttcg

SEQ ID NO: 121724 - DNA, 17 bp, Arabidopsis thaliana
gtcgactttttggcaga

SEQ ID NO: 121725 - DNA, 17 bp, Arabidopsis thaliana
gtcgacttttttagcag

SEQ ID NO: 121726 - DNA, 17 bp, Arabidopsis thaliana
gtcgagaaaagtttacc

SEQ ID NO: 121727 - DNA, 17 bp, Arabidopsis thaliana
gtcgagaacgcacacat

SEQ ID NO: 121728 - DNA, 17 bp, Arabidopsis thaliana
gtcgagaacgttgactg

SEQ ID NO: 121729 - DNA, 17 bp, Arabidopsis thaliana
gtcgagacaggatacct

SEQ ID NO: 121730 - DNA, 17 bp, Arabidopsis thaliana
gtcgagaggctctgata

SEQ ID NO: 121731 - DNA, 17 bp, Arabidopsis thaliana
gtcgagagttcgggcct

SEQ ID NO: 121732 - DNA, 17 bp, Arabidopsis thaliana
gtcgagatctttgagac

SEQ ID NO: 121733 - DNA, 17 bp, Arabidopsis thaliana
gtcgagatgtccgagtg

SEQ ID NO: 121734 - DNA, 17 bp, Arabidopsis thaliana
gtcgagattgtctgatt

SEQ ID NO: 121735 - DNA, 17 bp, Arabidopsis thaliana
gtcgagcaacacgtctt

SEQ ID NO: 121736 - DNA, 17 bp, Arabidopsis thaliana
gtcgagcaacatttgca

SEQ ID NO: 121737 - DNA, 17 bp, Arabidopsis thaliana
gtcgagcaatcgagtaa

SEQ ID NO: 121738 - DNA, 17 bp, Arabidopsis thaliana
gtcgagcagggacgaaa

SEQ ID NO: 121739 - DNA, 17 bp, Arabidopsis thaliana
gtcgagccgagccgctg

SEQ ID NO: 121740 - DNA, 17 bp, Arabidopsis thaliana
gtcgagcgaccgatcgc

SEQ ID NO: 121741 - DNA, 17 bp, Arabidopsis thaliana
gtcgagcggcttgagct

SEQ ID NO: 121742 - DNA, 17 bp, Arabidopsis thaliana
gtcgagcgttatttatc

SEQ ID NO: 121743 - DNA, 17 bp, Arabidopsis thaliana
gtcgagctaagttatca

SEQ ID NO: 121744 - DNA, 17 bp, Arabidopsis thaliana
gtcgagctatcaattag

SEQ ID NO: 121745 - DNA, 17 bp, Arabidopsis thaliana
gtcgagctatcaattgg

SEQ ID NO: 121746 - DNA, 17 bp, Arabidopsis thaliana
gtcgagctccaaatgtg

SEQ ID NO: 121747 - DNA, 17 bp, Arabidopsis thaliana
gtcgagcttaccacagt

SEQ ID NO: 121748 - DNA, 17 bp, Arabidopsis thaliana
gtcgaggaagatttctg

SEQ ID NO: 121749 - DNA, 17 bp, Arabidopsis thaliana
gtcgaggcacgtctgcc

SEQ ID NO: 121750 - DNA, 17 bp, Arabidopsis thaliana
gtcgaggcttcgctagg

SEQ ID NO: 121751 - DNA, 17 bp, Arabidopsis thaliana
gtcgagggcacgtctgc

SEQ ID NO: 121752 - DNA, 17 bp, Arabidopsis thaliana
gtcgaggtttccatccc

SEQ ID NO: 121753 - DNA, 17 bp, Arabidopsis thaliana
gtcgagtaaccgcagct

SEQ ID NO: 121754 - DNA, 17 bp, Arabidopsis thaliana
gtcgagtaacctcagct

SEQ ID NO: 121755 - DNA, 17 bp, Arabidopsis thaliana
gtcgagtaaggattgaa

SEQ ID NO: 121756 - DNA, 17 bp, Arabidopsis thaliana
gtcgagtaagtcctcta

SEQ ID NO: 121757 - DNA, 17 bp, Arabidopsis thaliana
gtcgagtacagtgttag

SEQ ID NO: 121758 - DNA, 17 bp, Arabidopsis thaliana
gtcgagtacagtgttgg

SEQ ID NO: 121759 - DNA, 17 bp, Arabidopsis thaliana
gtcgagtaccaattgag

SEQ ID NO: 121760 - DNA, 17 bp, Arabidopsis thaliana
gtcgagtacccacctgc

SEQ ID NO: 121761 - DNA, 17 bp, Arabidopsis thaliana
gtcgagtacccatctgc

SEQ ID NO: 121762 - DNA, 17 bp, Arabidopsis thaliana
gtcgagtagtcgatgag

SEQ ID NO: 121763 - DNA, 17 bp, Arabidopsis thaliana
gtcgagtatcatgtgac

SEQ ID NO: 121764 - DNA, 17 bp, Arabidopsis thaliana
gtcgagtatgtcggccg

SEQ ID NO: 121765 - DNA, 17 bp, Arabidopsis thaliana
gtcgagtattgtgctgg

SEQ ID NO: 121766 - DNA, 17 bp, Arabidopsis thaliana
gtcgagtccttctgctt

SEQ ID NO: 121767 - DNA, 17 bp, Arabidopsis thaliana
gtcgagtctatcaatga

SEQ ID NO: 121768 - DNA, 17 bp, Arabidopsis thaliana
gtcgagtctcaggtcga

SEQ ID NO: 121769 - DNA, 17 bp, Arabidopsis thaliana
gtcgagtgagaaggagg

SEQ ID NO: 121770 - DNA, 17 bp, Arabidopsis thaliana
gtcgagtgatgtgattg

SEQ ID NO: 121771 - DNA, 17 bp, Arabidopsis thaliana
gtcgagtgatgttatgc

SEQ ID NO: 121772 - DNA, 17 bp, Arabidopsis thaliana
gtcgagtggtatgttga

SEQ ID NO: 121773 - DNA, 17 bp, Arabidopsis thaliana
gtcgagttcttctctct

SEQ ID NO: 121774 - DNA, 17 bp, Arabidopsis thaliana
gtcgagttgcttggata

SEQ ID NO: 121775 - DNA, 17 bp, Arabidopsis thaliana
gtcgagttgttcttagc

SEQ ID NO: 121776 - DNA, 17 bp, Arabidopsis thaliana
gtcgataacaggcgtta

SEQ ID NO: 121777 - DNA, 17 bp, Arabidopsis thaliana
gtcgataacgacaccgt

SEQ ID NO: 121778 - DNA, 17 bp, Arabidopsis thaliana
gtcgataactatcacct

SEQ ID NO: 121779 - DNA, 17 bp, Arabidopsis thaliana
gtcgataataggcgtta

SEQ ID NO: 121780 - DNA, 17 bp, Arabidopsis thaliana
gtcgataatttgtaaca

SEQ ID NO: 121781 - DNA, 17 bp, Arabidopsis thaliana
gtcgatagactgattgg

SEQ ID NO: 121782 - DNA, 17 bp, Arabidopsis thaliana
gtcgatagatttgacac

SEQ ID NO: 121783 - DNA, 17 bp, Arabidopsis thaliana
gtcgatatccaatacca

SEQ ID NO: 121784 - DNA, 17 bp, Arabidopsis thaliana
gtcgatatccgatacca

SEQ ID NO: 121785 - DNA, 17 bp, Arabidopsis thaliana
gtcgatatgtccaagtg

SEQ ID NO: 121786 - DNA, 17 bp, Arabidopsis thaliana
gtcgatatgtccgactc

SEQ ID NO: 121787 - DNA, 17 bp, Arabidopsis thaliana
gtcgatatgtccgactg

SEQ ID NO: 121788 - DNA, 17 bp, Arabidopsis thaliana
gtcgatatgtccgaggg

SEQ ID NO: 121789 - DNA, 17 bp, Arabidopsis thaliana
gtcgatatgtccgagta

SEQ ID NO: 121790 - DNA, 17 bp, Arabidopsis thaliana
gtcgatatgtccgagtg

SEQ ID NO: 121791 - DNA, 17 bp, Arabidopsis thaliana
gtcgatatgtccgagtt

SEQ ID NO: 121792 - DNA, 17 bp, Arabidopsis thaliana
gtcgatatgtccgtggt

SEQ ID NO: 121793 - DNA, 17 bp, Arabidopsis thaliana
gtcgatatgtcggagtg

SEQ ID NO: 121794 - DNA, 17 bp, Arabidopsis thaliana
gtcgatatgtctgagtg

SEQ ID NO: 121795 - DNA, 17 bp, Arabidopsis thaliana
gtcgatattcttgaccg

SEQ ID NO: 121796 - DNA, 17 bp, Arabidopsis thaliana
gtcgatcaacaacctca

SEQ ID NO: 121797 - DNA, 17 bp, Arabidopsis thaliana
gtcgatcagactcagcc

SEQ ID NO: 121798 - DNA, 17 bp, Arabidopsis thaliana
gtcgatcagatgtttac

SEQ ID NO: 121799 - DNA, 17 bp, Arabidopsis thaliana
gtcgatcagattccagg

SEQ ID NO: 121800 - DNA, 17 bp, Arabidopsis thaliana
gtcgatccacctctact

SEQ ID NO: 121801 - DNA, 17 bp, Arabidopsis thaliana
gtcgatccagtatgcga

SEQ ID NO: 121802 - DNA, 17 bp, Arabidopsis thaliana
gtcgatccgtagatgga

SEQ ID NO: 121803 - DNA, 17 bp, Arabidopsis thaliana
gtcgatcctattgtggt

SEQ ID NO: 121804 - DNA, 17 bp, Arabidopsis thaliana
gtcgatcctgtagaccc

SEQ ID NO: 121805 - DNA, 17 bp, Arabidopsis thaliana
gtcgatcctgtagacgg

SEQ ID NO: 121806 - DNA, 17 bp, Arabidopsis thaliana
gtcgatcctgtagatgg

SEQ ID NO: 121807 - DNA, 17 bp, Arabidopsis thaliana
gtcgatcgacacctgca

SEQ ID NO: 121808 - DNA, 17 bp, Arabidopsis thaliana
gtcgatcgacactagat

SEQ ID NO: 121809 - DNA, 17 bp, Arabidopsis thaliana
gtcgatcgacactgggt

SEQ ID NO: 121810 - DNA, 17 bp, Arabidopsis thaliana
gtcgatcgacagttggg

SEQ ID NO: 121811 - DNA, 17 bp, Arabidopsis thaliana
gtcgatcgatactgatg

SEQ ID NO: 121812 - DNA, 17 bp, Arabidopsis thaliana
gtcgatcggttccaact

SEQ ID NO: 121813 - DNA, 17 bp, Arabidopsis thaliana
gtcgatcgtcggctatg

SEQ ID NO: 121814 - DNA, 17 bp, Arabidopsis thaliana
gtcgatcgtgcacctgt

SEQ ID NO: 121815 - DNA, 17 bp, Arabidopsis thaliana
gtcgatctacttttgca

SEQ ID NO: 121816 - DNA, 17 bp, Arabidopsis thaliana
gtcgatctatctcgctg

SEQ ID NO: 121817 - DNA, 17 bp, Arabidopsis thaliana
gtcgatctgagtttgta

SEQ ID NO: 121818 - DNA, 17 bp, Arabidopsis thaliana
gtcgatgaagctgaatc

SEQ ID NO: 121819 - DNA, 17 bp, Arabidopsis thaliana
gtcgatgaagctgagtc

SEQ ID NO: 121820 - DNA, 17 bp, Arabidopsis thaliana
gtcgatgaaggctgcaa

SEQ ID NO: 121821 - DNA, 17 bp, Arabidopsis thaliana
gtcgatgaagtctcgga

SEQ ID NO: 121822 - DNA, 17 bp, Arabidopsis thaliana
gtcgatgaatactttcg

SEQ ID NO: 121823 - DNA, 17 bp, Arabidopsis thaliana
gtcgatgaccaagctgc

SEQ ID NO: 121824 - DNA, 17 bp, Arabidopsis thaliana
gtcgatgacttgactcc

SEQ ID NO: 121825 - DNA, 17 bp, Arabidopsis thaliana
gtcgatgagaatcaggc

SEQ ID NO: 121826 - DNA, 17 bp, Arabidopsis thaliana
gtcgatgccagcagatt

SEQ ID NO: 121827 - DNA, 17 bp, Arabidopsis thaliana
gtcgatggaacaatgta

SEQ ID NO: 121828 - DNA, 17 bp, Arabidopsis thaliana
gtcgatggacaacaggt

SEQ ID NO: 121829 - DNA, 17 bp, Arabidopsis thaliana
gtcgatgtccgagtggt

SEQ ID NO: 121830 - DNA, 17 bp, Arabidopsis thaliana
gtcgatgtctagcagtg

SEQ ID NO: 121831 - DNA, 17 bp, Arabidopsis thaliana
gtcgatgtgtccaagtg

SEQ ID NO: 121832 - DNA, 17 bp, Arabidopsis thaliana
gtcgatgtgtccgagtg

SEQ ID NO: 121833 - DNA, 17 bp, Arabidopsis thaliana
gtcgatgttgacactgt

SEQ ID NO: 121834 - DNA, 17 bp, Arabidopsis thaliana
gtcgattaagacagcag

SEQ ID NO: 121835 - DNA, 17 bp, Arabidopsis thaliana
gtcgattaatttgtgcc

SEQ ID NO: 121836 - DNA, 17 bp, Arabidopsis thaliana
gtcgattacgggtttca

SEQ ID NO: 121837 - DNA, 17 bp, Arabidopsis thaliana
gtcgattaggttcccgg

SEQ ID NO: 121838 - DNA, 17 bp, Arabidopsis thaliana
gtcgattattatgacga

SEQ ID NO: 121839 - DNA, 17 bp, Arabidopsis thaliana
gtcgattattgtaccca

SEQ ID NO: 121840 - DNA, 17 bp, Arabidopsis thaliana
gtcgattcataagtcag

SEQ ID NO: 121841 - DNA, 17 bp, Arabidopsis thaliana
gtcgattccggcgacag

SEQ ID NO: 121842 - DNA, 17 bp, Arabidopsis thaliana
gtcgattcttagcaact

SEQ ID NO: 121843 - DNA, 17 bp, Arabidopsis thaliana
gtcgattcttgcgaggt

SEQ ID NO: 121844 - DNA, 17 bp, Arabidopsis thaliana
gtcgattgaactgattc

SEQ ID NO: 121845 - DNA, 17 bp, Arabidopsis thaliana
gtcgattgagactaccc

SEQ ID NO: 121846 - DNA, 17 bp, Arabidopsis thaliana
gtcgattgatcacaaac

SEQ ID NO: 121847 - DNA, 17 bp, Arabidopsis thaliana
gtcgatttctgtaggga

SEQ ID NO: 121848 - DNA, 17 bp, Arabidopsis thaliana
gtcgatttctgtagggg

SEQ ID NO: 121849 - DNA, 17 bp, Arabidopsis thaliana
gtcgatttggccgagtc

SEQ ID NO: 121850 - DNA, 17 bp, Arabidopsis thaliana
gtcgatttggccggatc

SEQ ID NO: 121851 - DNA, 17 bp, Arabidopsis thaliana
gtcgatttggccgggtc

SEQ ID NO: 121852 - DNA, 17 bp, Arabidopsis thaliana
gtcgattttctctcttc

SEQ ID NO: 121853 - DNA, 17 bp, Arabidopsis thaliana
gtcgattttttgggcaa

SEQ ID NO: 121854 - DNA, 17 bp, Arabidopsis thaliana
gtcgcaaaaacgttgca

SEQ ID NO: 121855 - DNA, 17 bp, Arabidopsis thaliana
gtcgcaaaatacgaggc

SEQ ID NO: 121856 - DNA, 17 bp, Arabidopsis thaliana
gtcgcaaagtcaaaccg

SEQ ID NO: 121857 - DNA, 17 bp, Arabidopsis thaliana
gtcgcaaatttgcaatg

SEQ ID NO: 121858 - DNA, 17 bp, Arabidopsis thaliana
gtcgcaaatttgcgagg

SEQ ID NO: 121859 - DNA, 17 bp, Arabidopsis thaliana
gtcgcaacctgagatgg

SEQ ID NO: 121860 - DNA, 17 bp, Arabidopsis thaliana
gtcgcaacctgtagatg

SEQ ID NO: 121861 - DNA, 17 bp, Arabidopsis thaliana
gtcgcaacgactttaaa

SEQ ID NO: 121862 - DNA, 17 bp, Arabidopsis thaliana
gtcgcaacgtccctctt

SEQ ID NO: 121863 - DNA, 17 bp, Arabidopsis thaliana
gtcgcaactgtagatgg

SEQ ID NO: 121864 - DNA, 17 bp, Arabidopsis thaliana
gtcgcaagctgcggttg

SEQ ID NO: 121865 - DNA, 17 bp, Arabidopsis thaliana
gtcgcaaggctgaaact

SEQ ID NO: 121866 - DNA, 17 bp, Arabidopsis thaliana
gtcgcaagtcgcctgtt

SEQ ID NO: 121867 - DNA, 17 bp, Arabidopsis thaliana
gtcgcaatcctgtagaa

SEQ ID NO: 121868 - DNA, 17 bp, Arabidopsis thaliana
gtcgcaatcctgtagat

SEQ ID NO: 121869 - DNA, 17 bp, Arabidopsis thaliana
gtcgcacacgagcgtct

SEQ ID NO: 121870 - DNA, 17 bp, Arabidopsis thaliana
gtcgcaccacgaggcgc

SEQ ID NO: 121871 - DNA, 17 bp, Arabidopsis thaliana
gtcgcaccctgtagatg

SEQ ID NO: 121872 - DNA, 17 bp, Arabidopsis thaliana
gtcgcaccgcgcccccc

SEQ ID NO: 121873 - DNA, 17 bp, Arabidopsis thaliana
gtcgcaccgtagatgga

SEQ ID NO: 121874 - DNA, 17 bp, Arabidopsis thaliana
gtcgcacctgaggatgg

SEQ ID NO: 121875 - DNA, 17 bp, Arabidopsis thaliana
gtcgcacctgcagatgg

SEQ ID NO: 121876 - DNA, 17 bp, Arabidopsis thaliana
gtcgcacctgtagatgg

SEQ ID NO: 121877 - DNA, 17 bp, Arabidopsis thaliana
gtcgcacggcggtctga

SEQ ID NO: 121878 - DNA, 17 bp, Arabidopsis thaliana
gtcgcacgtagatgccc

SEQ ID NO: 121879 - DNA, 17 bp, Arabidopsis thaliana
gtcgcacgtagatggat

SEQ ID NO: 121880 - DNA, 17 bp, Arabidopsis thaliana
gtcgcacgtctgcctgg

SEQ ID NO: 121881 - DNA, 17 bp, Arabidopsis thaliana
gtcgcacgttgcaacgt

SEQ ID NO: 121882 - DNA, 17 bp, Arabidopsis thaliana
gtcgcactcaatgtaaa

SEQ ID NO: 121883 - DNA, 17 bp, Arabidopsis thaliana
gtcgcactcagcttttg

SEQ ID NO: 121884 - DNA, 17 bp, Arabidopsis thaliana
gtcgcactggagatgga

SEQ ID NO: 121885 - DNA, 17 bp, Arabidopsis thaliana
gtcgcactgtagatgga

SEQ ID NO: 121886 - DNA, 17 bp, Arabidopsis thaliana
gtcgcactgtagatggt

SEQ ID NO: 121887 - DNA, 17 bp, Arabidopsis thaliana
gtcgcactttagatgga

SEQ ID NO: 121888 - DNA, 17 bp, Arabidopsis thaliana
gtcgcagaagtgtagcg

SEQ ID NO: 121889 - DNA, 17 bp, Arabidopsis thaliana
gtcgcagaagtgtcgcg

SEQ ID NO: 121890 - DNA, 17 bp, Arabidopsis thaliana
gtcgcagagactgcttc

SEQ ID NO: 121891 - DNA, 17 bp, Arabidopsis thaliana
gtcgcagagatggagct

SEQ ID NO: 121892 - DNA, 17 bp, Arabidopsis thaliana
gtcgcagatgttgagca

SEQ ID NO: 121893 - DNA, 17 bp, Arabidopsis thaliana
gtcgcagattcatccac

SEQ ID NO: 121894 - DNA, 17 bp, Arabidopsis thaliana
gtcgcagattcatcctc

SEQ ID NO: 121895 - DNA, 17 bp, Arabidopsis thaliana
gtcgcagcaatacggtc

SEQ ID NO: 121896 - DNA, 17 bp, Arabidopsis thaliana
gtcgcagcgatcaacga

SEQ ID NO: 121897 - DNA, 17 bp, Arabidopsis thaliana
gtcgcaggagagatagc

SEQ ID NO: 121898 - DNA, 17 bp, Arabidopsis thaliana
gtcgcaggcatgagagc

SEQ ID NO: 121899 - DNA, 17 bp, Arabidopsis thaliana
gtcgcagggtttctggc

SEQ ID NO: 121900 - DNA, 17 bp, Arabidopsis thaliana
gtcgcagggtttttggc

SEQ ID NO: 121901 - DNA, 17 bp, Arabidopsis thaliana
gtcgcagggtttttggg

SEQ ID NO: 121902 - DNA, 17 bp, Arabidopsis thaliana
gtcgcagggtttttgtg

SEQ ID NO: 121903 - DNA, 17 bp, Arabidopsis thaliana
gtcgcaggtgtggttgc

SEQ ID NO: 121904 - DNA, 17 bp, Arabidopsis thaliana
gtcgcaggtttttggct

SEQ ID NO: 121905 - DNA, 17 bp, Arabidopsis thaliana
gtcgcagtcggttaaac

SEQ ID NO: 121906 - DNA, 17 bp, Arabidopsis thaliana
gtcgcagtgaccaggcc

SEQ ID NO: 121907 - DNA, 17 bp, Arabidopsis thaliana
gtcgcagtgagctcgag

SEQ ID NO: 121908 - DNA, 17 bp, Arabidopsis thaliana
gtcgcagtggatcatgg

SEQ ID NO: 121909 - DNA, 17 bp, Arabidopsis thaliana
gtcgcagttctattctg

SEQ ID NO: 121910 - DNA, 17 bp, Arabidopsis thaliana
gtcgcagtttcttctgg

SEQ ID NO: 121911 - DNA, 17 bp, Arabidopsis thaliana
gtcgcagtttgttctac

SEQ ID NO: 121912 - DNA, 17 bp, Arabidopsis thaliana
gtcgcatcctgtaaatg

SEQ ID NO: 121913 - DNA, 17 bp, Arabidopsis thaliana
gtcgcatcctgtagaat

SEQ ID NO: 121914 - DNA, 17 bp, Arabidopsis thaliana
gtcgcatcctgtagatg

SEQ ID NO: 121915 - DNA, 17 bp, Arabidopsis thaliana
gtcgcatcctgtagccc

SEQ ID NO: 121916 - DNA, 17 bp, Arabidopsis thaliana
gtcgcatcctgtagctc

SEQ ID NO: 121917 - DNA, 17 bp, Arabidopsis thaliana
gtcgcatcctgtagctg

SEQ ID NO: 121918 - DNA, 17 bp, Arabidopsis thaliana
gtcgcatcctgtaggat

SEQ ID NO: 121919 - DNA, 17 bp, Arabidopsis thaliana
gtcgcatctgcaacatg

SEQ ID NO: 121920 - DNA, 17 bp, Arabidopsis thaliana
gtcgcatgagagcctag

SEQ ID NO: 121921 - DNA, 17 bp, Arabidopsis thaliana
gtcgcatgctgtagatg

SEQ ID NO: 121922 - DNA, 17 bp, Arabidopsis thaliana
gtcgcatgtagatggat

SEQ ID NO: 121923 - DNA, 17 bp, Arabidopsis thaliana
gtcgcattctgtagacg

SEQ ID NO: 121924 - DNA, 17 bp, Arabidopsis thaliana
gtcgcattctgtagatg

SEQ ID NO: 121925 - DNA, 17 bp, Arabidopsis thaliana
gtcgcattggccgagtg

SEQ ID NO: 121926 - DNA, 17 bp, Arabidopsis thaliana
gtcgcattggtaggcaa

SEQ ID NO: 121927 - DNA, 17 bp, Arabidopsis thaliana
gtcgcattgtagatgga

SEQ ID NO: 121928 - DNA, 17 bp, Arabidopsis thaliana
gtcgcattgtcaccgga

SEQ ID NO: 121929 - DNA, 17 bp, Arabidopsis thaliana
gtcgcatttggcctctg

SEQ ID NO: 121930 - DNA, 17 bp, Arabidopsis thaliana
gtcgcatttgggtgttt

SEQ ID NO: 121931 - DNA, 17 bp, Arabidopsis thaliana
gtcgcatttttgatcgc

SEQ ID NO: 121932 - DNA, 17 bp, Arabidopsis thaliana
gtcgccaaaggcaaaaa

SEQ ID NO: 121933 - DNA, 17 bp, Arabidopsis thaliana
gtcgccaacgacagaca

SEQ ID NO: 121934 - DNA, 17 bp, Arabidopsis thaliana
gtcgccagccatcagtg

SEQ ID NO: 121935 - DNA, 17 bp, Arabidopsis thaliana
gtcgccagcgaccagcg

SEQ ID NO: 121936 - DNA, 17 bp, Arabidopsis thaliana
gtcgccagcgactgtcg

SEQ ID NO: 121937 - DNA, 17 bp, Arabidopsis thaliana
gtcgccagcgatcagcg

SEQ ID NO: 121938 - DNA, 17 bp, Arabidopsis thaliana
gtcgcccaatacatgtg

SEQ ID NO: 121939 - DNA, 17 bp, Arabidopsis thaliana
gtcgcccctgtagatgg

SEQ ID NO: 121940 - DNA, 17 bp, Arabidopsis thaliana
gtcgccctgtagatgga

SEQ ID NO: 121941 - DNA, 17 bp, Arabidopsis thaliana
gtcgccgacgatgatac

SEQ ID NO: 121942 - DNA, 17 bp, Arabidopsis thaliana
gtcgccgagggcacgtc

SEQ ID NO: 121943 - DNA, 17 bp, Arabidopsis thaliana
gtcgccgatcgctgacg

SEQ ID NO: 121944 - DNA, 17 bp, Arabidopsis thaliana
gtcgccgattaaccatc

SEQ ID NO: 121945 - DNA, 17 bp, Arabidopsis thaliana
gtcgccgcaggtagttg

SEQ ID NO: 121946 - DNA, 17 bp, Arabidopsis thaliana
gtcgccgcgtgccggcc

SEQ ID NO: 121947 - DNA, 17 bp, Arabidopsis thaliana
gtcgccgcgtgctggcc

SEQ ID NO: 121948 - DNA, 17 bp, Arabidopsis thaliana
gtcgccgctgccgcagc

SEQ ID NO: 121949 - DNA, 17 bp, Arabidopsis thaliana
gtcgccggagatctcgt

SEQ ID NO: 121950 - DNA, 17 bp, Arabidopsis thaliana
gtcgccggtcgctggca

SEQ ID NO: 121951 - DNA, 17 bp, Arabidopsis thaliana
gtcgccggttcaaatga

SEQ ID NO: 121952 - DNA, 17 bp, Arabidopsis thaliana
gtcgccggttcgaatga

SEQ ID NO: 121953 - DNA, 17 bp, Arabidopsis thaliana
gtcgccggtttctgtcg

SEQ ID NO: 121954 - DNA, 17 bp, Arabidopsis thaliana
gtcgccgtagttgaagt

SEQ ID NO: 121955 - DNA, 17 bp, Arabidopsis thaliana
gtcgccgtcgccggata

SEQ ID NO: 121956 - DNA, 17 bp, Arabidopsis thaliana
gtcgccgtcgccttgga

SEQ ID NO: 121957 - DNA, 17 bp, Arabidopsis thaliana
gtcgcctagcccgaaat

SEQ ID NO: 121958 - DNA, 17 bp, Arabidopsis thaliana
gtcgcctatgggcgcgg

SEQ ID NO: 121959 - DNA, 17 bp, Arabidopsis thaliana
gtcgcctatttttgcaa

SEQ ID NO: 121960 - DNA, 17 bp, Arabidopsis thaliana
gtcgcctcagctacaga

SEQ ID NO: 121961 - DNA, 17 bp, Arabidopsis thaliana
gtcgcctcaggtaacaa

SEQ ID NO: 121962 - DNA, 17 bp, Arabidopsis thaliana
gtcgcctcttagtgcag

SEQ ID NO: 121963 - DNA, 17 bp, Arabidopsis thaliana
gtcgcctgcatttctga

SEQ ID NO: 121964 - DNA, 17 bp, Arabidopsis thaliana
gtcgcctgtagatggat

SEQ ID NO: 121965 - DNA, 17 bp, Arabidopsis thaliana
gtcgcctgttttcttgt

SEQ ID NO: 121966 - DNA, 17 bp, Arabidopsis thaliana
gtcgccttattgcttga

SEQ ID NO: 121967 - DNA, 17 bp, Arabidopsis thaliana
gtcgccttctatttgat

SEQ ID NO: 121968 - DNA, 17 bp, Arabidopsis thaliana
gtcgccttcttgggatt

SEQ ID NO: 121969 - DNA, 17 bp, Arabidopsis thaliana
gtcgccttggccgagtg

SEQ ID NO: 121970 - DNA, 17 bp, Arabidopsis thaliana
gtcgcgacagcgacagc

SEQ ID NO: 121971 - DNA, 17 bp, Arabidopsis thaliana
gtcgcgacagtgtgcta

SEQ ID NO: 121972 - DNA, 17 bp, Arabidopsis thaliana
gtcgcgagaagtccact

SEQ ID NO: 121973 - DNA, 17 bp, Arabidopsis thaliana
gtcgcgagtctgtttat

SEQ ID NO: 121974 - DNA, 17 bp, Arabidopsis thaliana
gtcgcgattccccaacg

SEQ ID NO: 121975 - DNA, 17 bp, Arabidopsis thaliana
gtcgcgatttcgtggct

SEQ ID NO: 121976 - DNA, 17 bp, Arabidopsis thaliana
gtcgcgggcttaaaccc

SEQ ID NO: 121977 - DNA, 17 bp, Arabidopsis thaliana
gtcgcgggttcgagccc

SEQ ID NO: 121978 - DNA, 17 bp, Arabidopsis thaliana
gtcgcgggttcgagcct

SEQ ID NO: 121979 - DNA, 17 bp, Arabidopsis thaliana
gtcgcgggttcgggccc

SEQ ID NO: 121980 - DNA, 17 bp, Arabidopsis thaliana
gtcgcggtcgtcaacga

SEQ ID NO: 121981 - DNA, 17 bp, Arabidopsis thaliana
gtcgcgtatttaagtcg

SEQ ID NO: 121982 - DNA, 17 bp, Arabidopsis thaliana
gtcgcgtcctgtagatg

SEQ ID NO: 121983 - DNA, 17 bp, Arabidopsis thaliana
gtcgcgtcctgtgatgg

SEQ ID NO: 121984 - DNA, 17 bp, Arabidopsis thaliana
gtcgcgtctaagcaaac

SEQ ID NO: 121985 - DNA, 17 bp, Arabidopsis thaliana
gtcgcgtggctggatag

SEQ ID NO: 121986 - DNA, 17 bp, Arabidopsis thaliana
gtcgcgtggtgtccggt

SEQ ID NO: 121987 - DNA, 17 bp, Arabidopsis thaliana
gtcgctaaagaatggca

SEQ ID NO: 121988 - DNA, 17 bp, Arabidopsis thaliana
gtcgctaagattcgatc

SEQ ID NO: 121989 - DNA, 17 bp, Arabidopsis thaliana
gtcgctaattttgatcg

SEQ ID NO: 121990 - DNA, 17 bp, Arabidopsis thaliana
gtcgctacattcttgat

SEQ ID NO: 121991 - DNA, 17 bp, Arabidopsis thaliana
gtcgctaccactggcat

SEQ ID NO: 121992 - DNA, 17 bp, Arabidopsis thaliana
gtcgctacgtccagcag

SEQ ID NO: 121993 - DNA, 17 bp, Arabidopsis thaliana
gtcgctactaatcggcc

SEQ ID NO: 121994 - DNA, 17 bp, Arabidopsis thaliana
gtcgctacttttgaccc

SEQ ID NO: 121995 - DNA, 17 bp, Arabidopsis thaliana
gtcgctacttttgaccg

SEQ ID NO: 121996 - DNA, 17 bp, Arabidopsis thaliana
gtcgctacttttgatcg

SEQ ID NO: 121997 - DNA, 17 bp, Arabidopsis thaliana
gtcgctacttttgatct

SEQ ID NO: 121998 - DNA, 17 bp, Arabidopsis thaliana
gtcgctacttttggtcg

SEQ ID NO: 121999 - DNA, 17 bp, Arabidopsis thaliana
gtcgctagaatcaacca

SEQ ID NO: 122000 - DNA, 17 bp, Arabidopsis thaliana
gtcgctagatccagcaa

SEQ ID NO: 122001 - DNA, 17 bp, Arabidopsis thaliana
gtcgctaggattcgcag

SEQ ID NO: 122002 - DNA, 17 bp, Arabidopsis thaliana
gtcgctaggatttgcag

SEQ ID NO: 122003 - DNA, 17 bp, Arabidopsis thaliana
gtcgctaggtgcaacat

SEQ ID NO: 122004 - DNA, 17 bp, Arabidopsis thaliana
gtcgctaggtgcaacgt

SEQ ID NO: 122005 - DNA, 17 bp, Arabidopsis thaliana
gtcgctaggttcaacgt

SEQ ID NO: 122006 - DNA, 17 bp, Arabidopsis thaliana
gtcgctataaacagtcg

SEQ ID NO: 122007 - DNA, 17 bp, Arabidopsis thaliana
gtcgctatgaacgcttg

SEQ ID NO: 122008 - DNA, 17 bp, Arabidopsis thaliana
gtcgctatggccgagtg

SEQ ID NO: 122009 - DNA, 17 bp, Arabidopsis thaliana
gtcgctatgtatcgcgt

SEQ ID NO: 122010 - DNA, 17 bp, Arabidopsis thaliana
gtcgctatgtgaatggg

SEQ ID NO: 122011 - DNA, 17 bp, Arabidopsis thaliana
gtcgctatttgtcgcag

SEQ ID NO: 122012 - DNA, 17 bp, Arabidopsis thaliana
gtcgctcaccggatcaa

SEQ ID NO: 122013 - DNA, 17 bp, Arabidopsis thaliana
gtcgctcacgcccggtc

SEQ ID NO: 122014 - DNA, 17 bp, Arabidopsis thaliana
gtcgctcactgctacct

SEQ ID NO: 122015 - DNA, 17 bp, Arabidopsis thaliana
gtcgctcagaaccacta

SEQ ID NO: 122016 - DNA, 17 bp, Arabidopsis thaliana
gtcgctcagcctcaacg

SEQ ID NO: 122017 - DNA, 17 bp, Arabidopsis thaliana
gtcgctccaaccgggtg

SEQ ID NO: 122018 - DNA, 17 bp, Arabidopsis thaliana
gtcgctccagttggatg

SEQ ID NO: 122019 - DNA, 17 bp, Arabidopsis thaliana
gtcgctccgattggacc

SEQ ID NO: 122020 - DNA, 17 bp, Arabidopsis thaliana
gtcgctccggaggctgg

SEQ ID NO: 122021 - DNA, 17 bp, Arabidopsis thaliana
gtcgctccggcggctag

SEQ ID NO: 122022 - DNA, 17 bp, Arabidopsis thaliana
gtcgctccgttcttcac

SEQ ID NO: 122023 - DNA, 17 bp, Arabidopsis thaliana
gtcgctcctaccgattg

SEQ ID NO: 122024 - DNA, 17 bp, Arabidopsis thaliana
gtcgctcctgtagatgg

SEQ ID NO: 122025 - DNA, 17 bp, Arabidopsis thaliana
gtcgctctagttggatg

SEQ ID NO: 122026 - DNA, 17 bp, Arabidopsis thaliana
gtcgctctctcgggagc

SEQ ID NO: 122027 - DNA, 17 bp, Arabidopsis thaliana
gtcgctctgaaattcct

SEQ ID NO: 122028 - DNA, 17 bp, Arabidopsis thaliana
gtcgctctggccgagtg

SEQ ID NO: 122029 - DNA, 17 bp, Arabidopsis thaliana
gtcgctctgtagttctc

SEQ ID NO: 122030 - DNA, 17 bp, Arabidopsis thaliana
gtcgctctgtagttctt

SEQ ID NO: 122031 - DNA, 17 bp, Arabidopsis thaliana
gtcgctctttgcaacat

SEQ ID NO: 122032 - DNA, 17 bp, Arabidopsis thaliana
gtcgctctttgcaactt

SEQ ID NO: 122033 - DNA, 17 bp, Arabidopsis thaliana
gtcgctgaaccaacgac

SEQ ID NO: 122034 - DNA, 17 bp, Arabidopsis thaliana
gtcgctgaactggttgg

SEQ ID NO: 122035 - DNA, 17 bp, Arabidopsis thaliana
gtcgctgagacaatcgc

SEQ ID NO: 122036 - DNA, 17 bp, Arabidopsis thaliana
gtcgctgagtgacatgg

SEQ ID NO: 122037 - DNA, 17 bp, Arabidopsis thaliana
gtcgctgatacttctcg

SEQ ID NO: 122038 - DNA, 17 bp, Arabidopsis thaliana
gtcgctgatcgctggcg

SEQ ID NO: 122039 - DNA, 17 bp, Arabidopsis thaliana
gtcgctgcaaaacctag

SEQ ID NO: 122040 - DNA, 17 bp, Arabidopsis thaliana
gtcgctgcaagtagttg

SEQ ID NO: 122041 - DNA, 17 bp, Arabidopsis thaliana
gtcgctgcacgtctgcc

SEQ ID NO: 122042 - DNA, 17 bp, Arabidopsis thaliana
gtcgctgccgtgatcgg

SEQ ID NO: 122043 - DNA, 17 bp, Arabidopsis thaliana
gtcgctgccgtgatcgt

SEQ ID NO: 122044 - DNA, 17 bp, Arabidopsis thaliana
gtcgctgccgtgattgg

SEQ ID NO: 122045 - DNA, 17 bp, Arabidopsis thaliana
gtcgctgccttccgtgc

SEQ ID NO: 122046 - DNA, 17 bp, Arabidopsis thaliana
gtcgctgcgactctttc

SEQ ID NO: 122047 - DNA, 17 bp, Arabidopsis thaliana
gtcgctgcgattcagac

SEQ ID NO: 122048 - DNA, 17 bp, Arabidopsis thaliana
gtcgctgcggttgctga

SEQ ID NO: 122049 - DNA, 17 bp, Arabidopsis thaliana
gtcgctgctcgctgccc

SEQ ID NO: 122050 - DNA, 17 bp, Arabidopsis thaliana
gtcgctgctgatgtgca

SEQ ID NO: 122051 - DNA, 17 bp, Arabidopsis thaliana
gtcgctgctgatgtgga

SEQ ID NO: 122052 - DNA, 17 bp, Arabidopsis thaliana
gtcgctgctgcggctgc

SEQ ID NO: 122053 - DNA, 17 bp, Arabidopsis thaliana
gtcgctgctttcggccc

SEQ ID NO: 122054 - DNA, 17 bp, Arabidopsis thaliana
gtcgctggaggagtgat

SEQ ID NO: 122055 - DNA, 17 bp, Arabidopsis thaliana
gtcgctggatgataagg

SEQ ID NO: 122056 - DNA, 17 bp, Arabidopsis thaliana
gtcgctggcgactgaaa

SEQ ID NO: 122057 - DNA, 17 bp, Arabidopsis thaliana
gtcgctggcgactgtcg

SEQ ID NO: 122058 - DNA, 17 bp, Arabidopsis thaliana
gtcgctggtcgctactt

SEQ ID NO: 122059 - DNA, 17 bp, Arabidopsis thaliana
gtcgctggtcgctgtcg

SEQ ID NO: 122060 - DNA, 17 bp, Arabidopsis thaliana
gtcgctggtcgctgttg

SEQ ID NO: 122061 - DNA, 17 bp, Arabidopsis thaliana
gtcgctggtcgcttttg

SEQ ID NO: 122062 - DNA, 17 bp, Arabidopsis thaliana
gtcgctggttaatatgg

SEQ ID NO: 122063 - DNA, 17 bp, Arabidopsis thaliana
gtcgctggttcgaatga

SEQ ID NO: 122064 - DNA, 17 bp, Arabidopsis thaliana
gtcgctggttcgattcc

SEQ ID NO: 122065 - DNA, 17 bp, Arabidopsis thaliana
gtcgctggttcggttcc

SEQ ID NO: 122066 - DNA, 17 bp, Arabidopsis thaliana
gtcgctggttcgtttcc

SEQ ID NO: 122067 - DNA, 17 bp, Arabidopsis thaliana
gtcgctggttgctgtcg

SEQ ID NO: 122068 - DNA, 17 bp, Arabidopsis thaliana
gtcgctggttgtgtttt

SEQ ID NO: 122069 - DNA, 17 bp, Arabidopsis thaliana
gtcgctggttgttgtcg

SEQ ID NO: 122070 - DNA, 17 bp, Arabidopsis thaliana
gtcgctggtttacagga

SEQ ID NO: 122071 - DNA, 17 bp, Arabidopsis thaliana
gtcgctggtttctgtcg

SEQ ID NO: 122072 - DNA, 17 bp, Arabidopsis thaliana
gtcgctgtaattggtcg

SEQ ID NO: 122073 - DNA, 17 bp, Arabidopsis thaliana
gtcgctgtgacggcgga

SEQ ID NO: 122074 - DNA, 17 bp, Arabidopsis thaliana
gtcgctgtggccgagtg

SEQ ID NO: 122075 - DNA, 17 bp, Arabidopsis thaliana
gtcgctgtgttgttcgt

SEQ ID NO: 122076 - DNA, 17 bp, Arabidopsis thaliana
gtcgcttaatttctgaa

SEQ ID NO: 122077 - DNA, 17 bp, Arabidopsis thaliana
gtcgcttaatttctgca

SEQ ID NO: 122078 - DNA, 17 bp, Arabidopsis thaliana
gtcgcttagaaccagag

SEQ ID NO: 122079 - DNA, 17 bp, Arabidopsis thaliana
gtcgcttagagtctgtg

SEQ ID NO: 122080 - DNA, 17 bp, Arabidopsis thaliana
gtcgcttccagaccttc

SEQ ID NO: 122081 - DNA, 17 bp, Arabidopsis thaliana
gtcgcttccatcttcgt

SEQ ID NO: 122082 - DNA, 17 bp, Arabidopsis thaliana
gtcgcttgaaggactgt

SEQ ID NO: 122083 - DNA, 17 bp, Arabidopsis thaliana
gtcgcttgccaggattc

SEQ ID NO: 122084 - DNA, 17 bp, Arabidopsis thaliana
gtcgcttggatttgcag

SEQ ID NO: 122085 - DNA, 17 bp, Arabidopsis thaliana
gtcgcttggccgagtgg

SEQ ID NO: 122086 - DNA, 17 bp, Arabidopsis thaliana
gtcgcttgggccgagtg

SEQ ID NO: 122087 - DNA, 17 bp, Arabidopsis thaliana
gtcgcttgtgattaaat

SEQ ID NO: 122088 - DNA, 17 bp, Arabidopsis thaliana
gtcgcttgtgggaaatt

SEQ ID NO: 122089 - DNA, 17 bp, Arabidopsis thaliana
gtcgctttagccgagtg

SEQ ID NO: 122090 - DNA, 17 bp, Arabidopsis thaliana
gtcgctttcgccgagtg

SEQ ID NO: 122091 - DNA, 17 bp, Arabidopsis thaliana
gtcgctttgaccgagtg

SEQ ID NO: 122092 - DNA, 17 bp, Arabidopsis thaliana
gtcgctttgcccgagtg

SEQ ID NO: 122093 - DNA, 17 bp, Arabidopsis thaliana
gtcgctttggcagagtg

SEQ ID NO: 122094 - DNA, 17 bp, Arabidopsis thaliana
gtcgctttggccaagtg

SEQ ID NO: 122095 - DNA, 17 bp, Arabidopsis thaliana
gtcgctttggccagtgg

SEQ ID NO: 122096 - DNA, 17 bp, Arabidopsis thaliana
gtcgctttggcccaacg

SEQ ID NO: 122097 - DNA, 17 bp, Arabidopsis thaliana
gtcgctttggcccactc

SEQ ID NO: 122098 - DNA, 17 bp, Arabidopsis thaliana
gtcgctttggcccagtg

SEQ ID NO: 122099 - DNA, 17 bp, Arabidopsis thaliana
gtcgctttggccgaatg

SEQ ID NO: 122100 - DNA, 17 bp, Arabidopsis thaliana
gtcgctttggccgaccc

SEQ ID NO: 122101 - DNA, 17 bp, Arabidopsis thaliana
gtcgctttggccgactc

SEQ ID NO: 122102 - DNA, 17 bp, Arabidopsis thaliana
gtcgctttggccgactg

SEQ ID NO: 122103 - DNA, 17 bp, Arabidopsis thaliana
gtcgctttggccgagag

SEQ ID NO: 122104 - DNA, 17 bp, Arabidopsis thaliana
gtcgctttggccgagat

SEQ ID NO: 122105 - DNA, 17 bp, Arabidopsis thaliana
gtcgctttggccgagcg

SEQ ID NO: 122106 - DNA, 17 bp, Arabidopsis thaliana
gtcgctttggccgaggg

SEQ ID NO: 122107 - DNA, 17 bp, Arabidopsis thaliana
gtcgctttggccgagta

SEQ ID NO: 122108 - DNA, 17 bp, Arabidopsis thaliana
gtcgctttggccgagtc

SEQ ID NO: 122109 - DNA, 17 bp, Arabidopsis thaliana
gtcgctttggccgagtg

SEQ ID NO: 122110 - DNA, 17 bp, Arabidopsis thaliana
gtcgctttggccgagtt

SEQ ID NO: 122111 - DNA, 17 bp, Arabidopsis thaliana
gtcgctttggccgatgt

SEQ ID NO: 122112 - DNA, 17 bp, Arabidopsis thaliana
gtcgctttggccgattg

SEQ ID NO: 122113 - DNA, 17 bp, Arabidopsis thaliana
gtcgctttggcctagtg

SEQ ID NO: 122114 - DNA, 17 bp, Arabidopsis thaliana
gtcgctttggcggagtg

SEQ ID NO: 122115 - DNA, 17 bp, Arabidopsis thaliana
gtcgctttggctgagtg

SEQ ID NO: 122116 - DNA, 17 bp, Arabidopsis thaliana
gtcgctttgtcaggaac

SEQ ID NO: 122117 - DNA, 17 bp, Arabidopsis thaliana
gtcgctttgtccgagtg

SEQ ID NO: 122118 - DNA, 17 bp, Arabidopsis thaliana
gtcgctttgtttgtctg

SEQ ID NO: 122119 - DNA, 17 bp, Arabidopsis thaliana
gtcgcttttgcttctac

SEQ ID NO: 122120 - DNA, 17 bp, Arabidopsis thaliana
gtcggaaactaaccgcg

SEQ ID NO: 122121 - DNA, 17 bp, Arabidopsis thaliana
gtcggaaactaactgcg

SEQ ID NO: 122122 - DNA, 17 bp, Arabidopsis thaliana
gtcggaacactggctcg

SEQ ID NO: 122123 - DNA, 17 bp, Arabidopsis thaliana
gtcggaacagtatgtgt

SEQ ID NO: 122124 - DNA, 17 bp, Arabidopsis thaliana
gtcggaaccatgcgaat

SEQ ID NO: 122125 - DNA, 17 bp, Arabidopsis thaliana
gtcggaaccatgcgagt

SEQ ID NO: 122126 - DNA, 17 bp, Arabidopsis thaliana
gtcggaaccgtgtgagt

SEQ ID NO: 122127 - DNA, 17 bp, Arabidopsis thaliana
gtcggaactgtgcgaat

SEQ ID NO: 122128 - DNA, 17 bp, Arabidopsis thaliana
gtcggaactgttctgct

SEQ ID NO: 122129 - DNA, 17 bp, Arabidopsis thaliana
gtcggaagattcaggag

SEQ ID NO: 122130 - DNA, 17 bp, Arabidopsis thaliana
gtcggaagccgacgagc

SEQ ID NO: 122131 - DNA, 17 bp, Arabidopsis thaliana
gtcggaaggaattgtgc

SEQ ID NO: 122132 - DNA, 17 bp, Arabidopsis thaliana
gtcggaatcgcggtagt

SEQ ID NO: 122133 - DNA, 17 bp, Arabidopsis thaliana
gtcggaatgtcgagctt

SEQ ID NO: 122134 - DNA, 17 bp, Arabidopsis thaliana
gtcggaattaatagcga

SEQ ID NO: 122135 - DNA, 17 bp, Arabidopsis thaliana
gtcggaatttgtctggt

SEQ ID NO: 122136 - DNA, 17 bp, Arabidopsis thaliana
gtcggaatttgtctgtt

SEQ ID NO: 122137 - DNA, 17 bp, Arabidopsis thaliana
gtcggacaaaacttcat

SEQ ID NO: 122138 - DNA, 17 bp, Arabidopsis thaliana
gtcggaccacacatccc

SEQ ID NO: 122139 - DNA, 17 bp, Arabidopsis thaliana
gtcggaccacactggcc

SEQ ID NO: 122140 - DNA, 17 bp, Arabidopsis thaliana
gtcggaccagacttcat

SEQ ID NO: 122141 - DNA, 17 bp, Arabidopsis thaliana
gtcggaccaggcctcat

SEQ ID NO: 122142 - DNA, 17 bp, Arabidopsis thaliana
gtcggaccaggccttat

SEQ ID NO: 122143 - DNA, 17 bp, Arabidopsis thaliana
gtcggaccaggcttcat

SEQ ID NO: 122144 - DNA, 17 bp, Arabidopsis thaliana
gtcggaccatgcttcat

SEQ ID NO: 122145 - DNA, 17 bp, Arabidopsis thaliana
gtcggaccgatgtggat

SEQ ID NO: 122146 - DNA, 17 bp, Arabidopsis thaliana
gtcggacgacagattaa

SEQ ID NO: 122147 - DNA, 17 bp, Arabidopsis thaliana
gtcggactctctgtttc

SEQ ID NO: 122148 - DNA, 17 bp, Arabidopsis thaliana
gtcggagagtaggttcg

SEQ ID NO: 122149 - DNA, 17 bp, Arabidopsis thaliana
gtcggagagtaggttgg

SEQ ID NO: 122150 - DNA, 17 bp, Arabidopsis thaliana
gtcggagatggcctaag

SEQ ID NO: 122151 - DNA, 17 bp, Arabidopsis thaliana
gtcggagattgtcggat

SEQ ID NO: 122152 - DNA, 17 bp, Arabidopsis thaliana
gtcggagcgttggatct

SEQ ID NO: 122153 - DNA, 17 bp, Arabidopsis thaliana
gtcggagctgctgtcgg

SEQ ID NO: 122154 - DNA, 17 bp, Arabidopsis thaliana
gtcggagctttctcaac

SEQ ID NO: 122155 - DNA, 17 bp, Arabidopsis thaliana
gtcggagctttgcttta

SEQ ID NO: 122156 - DNA, 17 bp, Arabidopsis thaliana
gtcggaggactgtcttt

SEQ ID NO: 122157 - DNA, 17 bp, Arabidopsis thaliana
gtcggaggaggcgcagc

SEQ ID NO: 122158 - DNA, 17 bp, Arabidopsis thaliana
gtcggagggaagcggat

SEQ ID NO: 122159 - DNA, 17 bp, Arabidopsis thaliana
gtcggagggctgtcttt

SEQ ID NO: 122160 - DNA, 17 bp, Arabidopsis thaliana
gtcggagggtaatgcgt

SEQ ID NO: 122161 - DNA, 17 bp, Arabidopsis thaliana
gtcggagtcaatctatt

SEQ ID NO: 122162 - DNA, 17 bp, Arabidopsis thaliana
gtcggatatggaacacc

SEQ ID NO: 122163 - DNA, 17 bp, Arabidopsis thaliana
gtcggatattggtgtcg

SEQ ID NO: 122164 - DNA, 17 bp, Arabidopsis thaliana
gtcggatatttatgggg

SEQ ID NO: 122165 - DNA, 17 bp, Arabidopsis thaliana
gtcggatcaagcattcc

SEQ ID NO: 122166 - DNA, 17 bp, Arabidopsis thaliana
gtcggatcacctgttaa

SEQ ID NO: 122167 - DNA, 17 bp, Arabidopsis thaliana
gtcggatcaggcttcat

SEQ ID NO: 122168 - DNA, 17 bp, Arabidopsis thaliana
gtcggatccatcgctgg

SEQ ID NO: 122169 - DNA, 17 bp, Arabidopsis thaliana
gtcggatcccgcaccac

SEQ ID NO: 122170 - DNA, 17 bp, Arabidopsis thaliana
gtcggatcctatttgca

SEQ ID NO: 122171 - DNA, 17 bp, Arabidopsis thaliana
gtcggatcctgtagatg

SEQ ID NO: 122172 - DNA, 17 bp, Arabidopsis thaliana
gtcggatcgacgttgag

SEQ ID NO: 122173 - DNA, 17 bp, Arabidopsis thaliana
gtcggatcggatcagcc

SEQ ID NO: 122174 - DNA, 17 bp, Arabidopsis thaliana
gtcggatctatcgatat

SEQ ID NO: 122175 - DNA, 17 bp, Arabidopsis thaliana
gtcggatctgctggaat

SEQ ID NO: 122176 - DNA, 17 bp, Arabidopsis thaliana
gtcggatctgcttcatc

SEQ ID NO: 122177 - DNA, 17 bp, Arabidopsis thaliana
gtcggatctggcgattg

SEQ ID NO: 122178 - DNA, 17 bp, Arabidopsis thaliana
gtcggatcttcgtcgga

SEQ ID NO: 122179 - DNA, 17 bp, Arabidopsis thaliana
gtcggatgacaactttt

SEQ ID NO: 122180 - DNA, 17 bp, Arabidopsis thaliana
gtcggatgatcggtatg

SEQ ID NO: 122181 - DNA, 17 bp, Arabidopsis thaliana
gtcggatgattcatcta

SEQ ID NO: 122182 - DNA, 17 bp, Arabidopsis thaliana
gtcggatgcgaaacggt

SEQ ID NO: 122183 - DNA, 17 bp, Arabidopsis thaliana
gtcggatgtagccaagt

SEQ ID NO: 122184 - DNA, 17 bp, Arabidopsis thaliana
gtcggatgttgcttgaa

SEQ ID NO: 122185 - DNA, 17 bp, Arabidopsis thaliana
gtcggattctcttgatc

SEQ ID NO: 122186 - DNA, 17 bp, Arabidopsis thaliana
gtcggattctgaatacc

SEQ ID NO: 122187 - DNA, 17 bp, Arabidopsis thaliana
gtcggattgagcatgtg

SEQ ID NO: 122188 - DNA, 17 bp, Arabidopsis thaliana
gtcggattgagttgacc

SEQ ID NO: 122189 - DNA, 17 bp, Arabidopsis thaliana
gtcggattgctgttatt

SEQ ID NO: 122190 - DNA, 17 bp, Arabidopsis thaliana
gtcggatttctctgggg

SEQ ID NO: 122191 - DNA, 17 bp, Arabidopsis thaliana
gtcggatttggcgatct

SEQ ID NO: 122192 - DNA, 17 bp, Arabidopsis thaliana
gtcggatttgtgtgtta

SEQ ID NO: 122193 - DNA, 17 bp, Arabidopsis thaliana
gtcggattttggatact

SEQ ID NO: 122194 - DNA, 17 bp, Arabidopsis thaliana
gtcggcaaaatggatcc

SEQ ID NO: 122195 - DNA, 17 bp, Arabidopsis thaliana
gtcggcaaaccgagcgg

SEQ ID NO: 122196 - DNA, 17 bp, Arabidopsis thaliana
gtcggcaaaccgagcgt

SEQ ID NO: 122197 - DNA, 17 bp, Arabidopsis thaliana
gtcggcaaagttacgga

SEQ ID NO: 122198 - DNA, 17 bp, Arabidopsis thaliana
gtcggcaaatcctcgga

SEQ ID NO: 122199 - DNA, 17 bp, Arabidopsis thaliana
gtcggcaaccgagcggc

SEQ ID NO: 122200 - DNA, 17 bp, Arabidopsis thaliana
gtcggcaatcgggcggc

SEQ ID NO: 122201 - DNA, 17 bp, Arabidopsis thaliana
gtcggcacaggcatttt

SEQ ID NO: 122202 - DNA, 17 bp, Arabidopsis thaliana
gtcggcaccaatcatac

SEQ ID NO: 122203 - DNA, 17 bp, Arabidopsis thaliana
gtcggcaccgtccgttt

SEQ ID NO: 122204 - DNA, 17 bp, Arabidopsis thaliana
gtcggcagatgatccgc

SEQ ID NO: 122205 - DNA, 17 bp, Arabidopsis thaliana
gtcggcagatggtccgc

SEQ ID NO: 122206 - DNA, 17 bp, Arabidopsis thaliana
gtcggcaggctacgaga

SEQ ID NO: 122207 - DNA, 17 bp, Arabidopsis thaliana
gtcggcatggccgagtg

SEQ ID NO: 122208 - DNA, 17 bp, Arabidopsis thaliana
gtcggccaaagtgtgaa

SEQ ID NO: 122209 - DNA, 17 bp, Arabidopsis thaliana
gtcggccaagtattgca

SEQ ID NO: 122210 - DNA, 17 bp, Arabidopsis thaliana
gtcggccagtgagacgg

SEQ ID NO: 122211 - DNA, 17 bp, Arabidopsis thaliana
gtcggccagtgagagag

SEQ ID NO: 122212 - DNA, 17 bp, Arabidopsis thaliana
gtcggcccgcctttggt

SEQ ID NO: 122213 - DNA, 17 bp, Arabidopsis thaliana
gtcggccgatgtatttt

SEQ ID NO: 122214 - DNA, 17 bp, Arabidopsis thaliana
gtcggccgggggacgga

SEQ ID NO: 122215 - DNA, 17 bp, Arabidopsis thaliana
gtcggccgggggacggg

SEQ ID NO: 122216 - DNA, 17 bp, Arabidopsis thaliana
gtcggccggtccgcctt

SEQ ID NO: 122217 - DNA, 17 bp, Arabidopsis thaliana
gtcggccggtcctcctt

SEQ ID NO: 122218 - DNA, 17 bp, Arabidopsis thaliana
gtcggccggttcgcctt

SEQ ID NO: 122219 - DNA, 17 bp, Arabidopsis thaliana
gtcggccgtccgccttt

SEQ ID NO: 122220 - DNA, 17 bp, Arabidopsis thaliana
gtcggccgttcctcctt

SEQ ID NO: 122221 - DNA, 17 bp, Arabidopsis thaliana
gtcggcctgatcggcgg

SEQ ID NO: 122222 - DNA, 17 bp, Arabidopsis thaliana
gtcggcctgtgggctcc

SEQ ID NO: 122223 - DNA, 17 bp, Arabidopsis thaliana
gtcggcctgtgggttcc

SEQ ID NO: 122224 - DNA, 17 bp, Arabidopsis thaliana
gtcggccttgtccttga

SEQ ID NO: 122225 - DNA, 17 bp, Arabidopsis thaliana
gtcggcgacttggttgg

SEQ ID NO: 122226 - DNA, 17 bp, Arabidopsis thaliana
gtcggcgatacccctgg

SEQ ID NO: 122227 - DNA, 17 bp, Arabidopsis thaliana
gtcggcgataccctggt

SEQ ID NO: 122228 - DNA, 17 bp, Arabidopsis thaliana
gtcggcgatacgctcat

SEQ ID NO: 122229 - DNA, 17 bp, Arabidopsis thaliana
gtcggcgatacgctcct

SEQ ID NO: 122230 - DNA, 17 bp, Arabidopsis thaliana
gtcggcgatacgctctg

SEQ ID NO: 122231 - DNA, 17 bp, Arabidopsis thaliana
gtcggcgatacgcttgg

SEQ ID NO: 122232 - DNA, 17 bp, Arabidopsis thaliana
gtcggcgatacgcttgt

SEQ ID NO: 122233 - DNA, 17 bp, Arabidopsis thaliana
gtcggcgattgaacgtc

SEQ ID NO: 122234 - DNA, 17 bp, Arabidopsis thaliana
gtcggcgattttgagtg

SEQ ID NO: 122235 - DNA, 17 bp, Arabidopsis thaliana
gtcggcggaagcgtcgt

SEQ ID NO: 122236 - DNA, 17 bp, Arabidopsis thaliana
gtcggcggcgttacaat

SEQ ID NO: 122237 - DNA, 17 bp, Arabidopsis thaliana
gtcggcgggcttgctcc

SEQ ID NO: 122238 - DNA, 17 bp, Arabidopsis thaliana
gtcggcgggggcctcgg

SEQ ID NO: 122239 - DNA, 17 bp, Arabidopsis thaliana
gtcggcggttttaaatt

SEQ ID NO: 122240 - DNA, 17 bp, Arabidopsis thaliana
gtcggctaatcgtcttg

SEQ ID NO: 122241 - DNA, 17 bp, Arabidopsis thaliana
gtcggctacagaaatat

SEQ ID NO: 122242 - DNA, 17 bp, Arabidopsis thaliana
gtcggctacagaaattt

SEQ ID NO: 122243 - DNA, 17 bp, Arabidopsis thaliana
gtcggctatgagtttcg

SEQ ID NO: 122244 - DNA, 17 bp, Arabidopsis thaliana
gtcggctattcggttga

SEQ ID NO: 122245 - DNA, 17 bp, Arabidopsis thaliana
gtcggctcgtcccttcg

SEQ ID NO: 122246 - DNA, 17 bp, Arabidopsis thaliana
gtcggctcttcctatca

SEQ ID NO: 122247 - DNA, 17 bp, Arabidopsis thaliana
gtcggctcttcgccacc

SEQ ID NO: 122248 - DNA, 17 bp, Arabidopsis thaliana
gtcggctcttcgccatg

SEQ ID NO: 122249 - DNA, 17 bp, Arabidopsis thaliana
gtcggctcttcgccccc

SEQ ID NO: 122250 - DNA, 17 bp, Arabidopsis thaliana
gtcggctgctttgttga

SEQ ID NO: 122251 - DNA, 17 bp, Arabidopsis thaliana
gtcggctggaaatcacg

SEQ ID NO: 122252 - DNA, 17 bp, Arabidopsis thaliana
gtcggctgggcgatctc

SEQ ID NO: 122253 - DNA, 17 bp, Arabidopsis thaliana
gtcggctgtcagcggac

SEQ ID NO: 122254 - DNA, 17 bp, Arabidopsis thaliana
gtcggctgtgagcggac

SEQ ID NO: 122255 - DNA, 17 bp, Arabidopsis thaliana
gtcggctgtgatgatga

SEQ ID NO: 122256 - DNA, 17 bp, Arabidopsis thaliana
gtcggctgttaactgat

SEQ ID NO: 122257 - DNA, 17 bp, Arabidopsis thaliana
gtcggcttatatttcta

SEQ ID NO: 122258 - DNA, 17 bp, Arabidopsis thaliana
gtcggcttccttctttg

SEQ ID NO: 122259 - DNA, 17 bp, Arabidopsis thaliana
gtcggcttgtccctccg

SEQ ID NO: 122260 - DNA, 17 bp, Arabidopsis thaliana
gtcggcttgtcccttca

SEQ ID NO: 122261 - DNA, 17 bp, Arabidopsis thaliana
gtcggcttgtcccttcg

SEQ ID NO: 122262 - DNA, 17 bp, Arabidopsis thaliana
gtcggcttgtcccttct

SEQ ID NO: 122263 - DNA, 17 bp, Arabidopsis thaliana
gtcggcttgtccctttg

SEQ ID NO: 122264 - DNA, 17 bp, Arabidopsis thaliana
gtcggcttgtccttcgg

SEQ ID NO: 122265 - DNA, 17 bp, Arabidopsis thaliana
gtcggcttgtcctttcg

SEQ ID NO: 122266 - DNA, 17 bp, Arabidopsis thaliana
gtcggcttgtctcttcg

SEQ ID NO: 122267 - DNA, 17 bp, Arabidopsis thaliana
gtcggcttttcgccacc

SEQ ID NO: 122268 - DNA, 17 bp, Arabidopsis thaliana
gtcggctttttccttgg

SEQ ID NO: 122269 - DNA, 17 bp, Arabidopsis thaliana
gtcgggaactaaccgcg

SEQ ID NO: 122270 - DNA, 17 bp, Arabidopsis thaliana
gtcgggacccgaaagat

SEQ ID NO: 122271 - DNA, 17 bp, Arabidopsis thaliana
gtcgggacgagtttggc

SEQ ID NO: 122272 - DNA, 17 bp, Arabidopsis thaliana
gtcgggagggaagcgga

SEQ ID NO: 122273 - DNA, 17 bp, Arabidopsis thaliana
gtcgggatccctcgcgg

SEQ ID NO: 122274 - DNA, 17 bp, Arabidopsis thaliana
gtcgggatcgatttctg

SEQ ID NO: 122275 - DNA, 17 bp, Arabidopsis thaliana
gtcgggatgaaagtggg

SEQ ID NO: 122276 - DNA, 17 bp, Arabidopsis thaliana
gtcgggatgatcgccgc

SEQ ID NO: 122277 - DNA, 17 bp, Arabidopsis thaliana
gtcgggatgatcgccgg

SEQ ID NO: 122278 - DNA, 17 bp, Arabidopsis thaliana
gtcgggccccgccggga

SEQ ID NO: 122279 - DNA, 17 bp, Arabidopsis thaliana
gtcggggagtgttagga

SEQ ID NO: 122280 - DNA, 17 bp, Arabidopsis thaliana
gtcggggcaagagccag

SEQ ID NO: 122281 - DNA, 17 bp, Arabidopsis thaliana
gtcgggggcattcgtat

SEQ ID NO: 122282 - DNA, 17 bp, Arabidopsis thaliana
gtcggggttttttgcga

SEQ ID NO: 122283 - DNA, 17 bp, Arabidopsis thaliana
gtcgggtcaacgataat

SEQ ID NO: 122284 - DNA, 17 bp, Arabidopsis thaliana
gtcgggtcaggtccttt

SEQ ID NO: 122285 - DNA, 17 bp, Arabidopsis thaliana
gtcgggtccatttgggt

SEQ ID NO: 122286 - DNA, 17 bp, Arabidopsis thaliana
gtcgggtctgttggacg

SEQ ID NO: 122287 - DNA, 17 bp, Arabidopsis thaliana
gtcgggtgaaaagcgga

SEQ ID NO: 122288 - DNA, 17 bp, Arabidopsis thaliana
gtcgggtgggacccacg

SEQ ID NO: 122289 - DNA, 17 bp, Arabidopsis thaliana
gtcgggttcagtttggg

SEQ ID NO: 122290 - DNA, 17 bp, Arabidopsis thaliana
gtcgggttcttgtttgg

SEQ ID NO: 122291 - DNA, 17 bp, Arabidopsis thaliana
gtcgggttgtttgggaa

SEQ ID NO: 122292 - DNA, 17 bp, Arabidopsis thaliana
gtcggtagcggccacgc

SEQ ID NO: 122293 - DNA, 17 bp, Arabidopsis thaliana
gtcggtccagcagggag

SEQ ID NO: 122294 - DNA, 17 bp, Arabidopsis thaliana
gtcggtcccaagtcggg

SEQ ID NO: 122295 - DNA, 17 bp, Arabidopsis thaliana
gtcggtccgctacttct

SEQ ID NO: 122296 - DNA, 17 bp, Arabidopsis thaliana
gtcggtcgacatcgttc

SEQ ID NO: 122297 - DNA, 17 bp, Arabidopsis thaliana
gtcggtcgctttggccg

SEQ ID NO: 122298 - DNA, 17 bp, Arabidopsis thaliana
gtcggtcggatgtgttt

SEQ ID NO: 122299 - DNA, 17 bp, Arabidopsis thaliana
gtcggtcggcttgtccc

SEQ ID NO: 122300 - DNA, 17 bp, Arabidopsis thaliana
gtcggtctaacgtttgc

SEQ ID NO: 122301 - DNA, 17 bp, Arabidopsis thaliana
gtcggtctgaaactctt

SEQ ID NO: 122302 - DNA, 17 bp, Arabidopsis thaliana
gtcggtgaacttcttgg

SEQ ID NO: 122303 - DNA, 17 bp, Arabidopsis thaliana
gtcggtgcagatcttgg

SEQ ID NO: 122304 - DNA, 17 bp, Arabidopsis thaliana
gtcggtgtactacgggt

SEQ ID NO: 122305 - DNA, 17 bp, Arabidopsis thaliana
gtcggttatttcgggtt

SEQ ID NO: 122306 - DNA, 17 bp, Arabidopsis thaliana
gtcggttcacgggattc

SEQ ID NO: 122307 - DNA, 17 bp, Arabidopsis thaliana
gtcggttcatttgactg

SEQ ID NO: 122308 - DNA, 17 bp, Arabidopsis thaliana
gtcggttcccgaatgac

SEQ ID NO: 122309 - DNA, 17 bp, Arabidopsis thaliana
gtcggttcctgaatggc

SEQ ID NO: 122310 - DNA, 17 bp, Arabidopsis thaliana
gtcggttcgaacccggg

SEQ ID NO: 122311 - DNA, 17 bp, Arabidopsis thaliana
gtcggttcgagtgatgt

SEQ ID NO: 122312 - DNA, 17 bp, Arabidopsis thaliana
gtcggttcggacatcgg

SEQ ID NO: 122313 - DNA, 17 bp, Arabidopsis thaliana
gtcggttcggccaatga

SEQ ID NO: 122314 - DNA, 17 bp, Arabidopsis thaliana
gtcggttcggccattga

SEQ ID NO: 122315 - DNA, 17 bp, Arabidopsis thaliana
gtcggttcgtcgttggt

SEQ ID NO: 122316 - DNA, 17 bp, Arabidopsis thaliana
gtcggttctaacagggg

SEQ ID NO: 122317 - DNA, 17 bp, Arabidopsis thaliana
gtcggttctgtcggtac

SEQ ID NO: 122318 - DNA, 17 bp, Arabidopsis thaliana
gtcggttcttgggtcgg

SEQ ID NO: 122319 - DNA, 17 bp, Arabidopsis thaliana
gtcggttgcagttgttt

SEQ ID NO: 122320 - DNA, 17 bp, Arabidopsis thaliana
gtcggttgcgtttcttc

SEQ ID NO: 122321 - DNA, 17 bp, Arabidopsis thaliana
gtcggttggcatgtcct

SEQ ID NO: 122322 - DNA, 17 bp, Arabidopsis thaliana
gtcggttgggcgacctc

SEQ ID NO: 122323 - DNA, 17 bp, Arabidopsis thaliana
gtcggttgtacaacgag

SEQ ID NO: 122324 - DNA, 17 bp, Arabidopsis thaliana
gtcggttgtatcttggg

SEQ ID NO: 122325 - DNA, 17 bp, Arabidopsis thaliana
gtcggttgtggttgttc

SEQ ID NO: 122326 - DNA, 17 bp, Arabidopsis thaliana
gtcggttgttgttgttc

SEQ ID NO: 122327 - DNA, 17 bp, Arabidopsis thaliana
gtcggtttacagtttta

SEQ ID NO: 122328 - DNA, 17 bp, Arabidopsis thaliana
gtcggttttgataggta

SEQ ID NO: 122329 - DNA, 17 bp, Arabidopsis thaliana
gtcgtaaaaccgccgcg

SEQ ID NO: 122330 - DNA, 17 bp, Arabidopsis thaliana
gtcgtaaataagttcaa

SEQ ID NO: 122331 - DNA, 17 bp, Arabidopsis thaliana
gtcgtaaatctcccgca

SEQ ID NO: 122332 - DNA, 17 bp, Arabidopsis thaliana
gtcgtaacaaggtttct

SEQ ID NO: 122333 - DNA, 17 bp, Arabidopsis thaliana
gtcgtaacagcaaagcc

SEQ ID NO: 122334 - DNA, 17 bp, Arabidopsis thaliana
gtcgtaacagtgtgtat

SEQ ID NO: 122335 - DNA, 17 bp, Arabidopsis thaliana
gtcgtaactcccaaaac

SEQ ID NO: 122336 - DNA, 17 bp, Arabidopsis thaliana
gtcgtaactcccaaacc

SEQ ID NO: 122337 - DNA, 17 bp, Arabidopsis thaliana
gtcgtaactttgtcgct

SEQ ID NO: 122338 - DNA, 17 bp, Arabidopsis thaliana
gtcgtaagaccatgtat

SEQ ID NO: 122339 - DNA, 17 bp, Arabidopsis thaliana
gtcgtaagtagagctgt

SEQ ID NO: 122340 - DNA, 17 bp, Arabidopsis thaliana
gtcgtaagtgccaatct

SEQ ID NO: 122341 - DNA, 17 bp, Arabidopsis thaliana
gtcgtacaatttctcag

SEQ ID NO: 122342 - DNA, 17 bp, Arabidopsis thaliana
gtcgtacagagccagaa

SEQ ID NO: 122343 - DNA, 17 bp, Arabidopsis thaliana
gtcgtacaggttctact

SEQ ID NO: 122344 - DNA, 17 bp, Arabidopsis thaliana
gtcgtaccaggcttcat

SEQ ID NO: 122345 - DNA, 17 bp, Arabidopsis thaliana
gtcgtacgagcgctatc

SEQ ID NO: 122346 - DNA, 17 bp, Arabidopsis thaliana
gtcgtacgctgtctgag

SEQ ID NO: 122347 - DNA, 17 bp, Arabidopsis thaliana
gtcgtactcataaccgc

SEQ ID NO: 122348 - DNA, 17 bp, Arabidopsis thaliana
gtcgtactcgaaagact

SEQ ID NO: 122349 - DNA, 17 bp, Arabidopsis thaliana
gtcgtagcgaaccgacc

SEQ ID NO: 122350 - DNA, 17 bp, Arabidopsis thaliana
gtcgtaggtcccatgga

SEQ ID NO: 122351 - DNA, 17 bp, Arabidopsis thaliana
gtcgtaggttcgacccc

SEQ ID NO: 122352 - DNA, 17 bp, Arabidopsis thaliana
gtcgtaggttcgccccc

SEQ ID NO: 122353 - DNA, 17 bp, Arabidopsis thaliana
gtcgtaggtttgacccc

SEQ ID NO: 122354 - DNA, 17 bp, Arabidopsis thaliana
gtcgtagtcgcaatcct

SEQ ID NO: 122355 - DNA, 17 bp, Arabidopsis thaliana
gtcgtagtcgctcctgt

SEQ ID NO: 122356 - DNA, 17 bp, Arabidopsis thaliana
gtcgtagtctgtctttt

SEQ ID NO: 122357 - DNA, 17 bp, Arabidopsis thaliana
gtcgtagttccatagaa

SEQ ID NO: 122358 - DNA, 17 bp, Arabidopsis thaliana
gtcgtataagattgtcc

SEQ ID NO: 122359 - DNA, 17 bp, Arabidopsis thaliana
gtcgtatcagtttcacc

SEQ ID NO: 122360 - DNA, 17 bp, Arabidopsis thaliana
gtcgtatccatttcgag

SEQ ID NO: 122361 - DNA, 17 bp, Arabidopsis thaliana
gtcgtatctgtgacatc

SEQ ID NO: 122362 - DNA, 17 bp, Arabidopsis thaliana
gtcgtatgggcttccaa

SEQ ID NO: 122363 - DNA, 17 bp, Arabidopsis thaliana
gtcgtattcgtagctac

SEQ ID NO: 122364 - DNA, 17 bp, Arabidopsis thaliana
gtcgtcaatgatgttgc

SEQ ID NO: 122365 - DNA, 17 bp, Arabidopsis thaliana
gtcgtcacatccatctc

SEQ ID NO: 122366 - DNA, 17 bp, Arabidopsis thaliana
gtcgtcactacaatcgt

SEQ ID NO: 122367 - DNA, 17 bp, Arabidopsis thaliana
gtcgtcacttgccgaca

SEQ ID NO: 122368 - DNA, 17 bp, Arabidopsis thaliana
gtcgtcatcattttgcc

SEQ ID NO: 122369 - DNA, 17 bp, Arabidopsis thaliana
gtcgtcatcattttgtc

SEQ ID NO: 122370 - DNA, 17 bp, Arabidopsis thaliana
gtcgtcatcccgttgca

SEQ ID NO: 122371 - DNA, 17 bp, Arabidopsis thaliana
gtcgtcatcgttttgcc

SEQ ID NO: 122372 - DNA, 17 bp, Arabidopsis thaliana
gtcgtcattaggctcct

SEQ ID NO: 122373 - DNA, 17 bp, Arabidopsis thaliana
gtcgtccacactgtcct

SEQ ID NO: 122374 - DNA, 17 bp, Arabidopsis thaliana
gtcgtccagcggttagg

SEQ ID NO: 122375 - DNA, 17 bp, Arabidopsis thaliana
gtcgtccagtagcgaca

SEQ ID NO: 122376 - DNA, 17 bp, Arabidopsis thaliana
gtcgtccatttttgcaa

SEQ ID NO: 122377 - DNA, 17 bp, Arabidopsis thaliana
gtcgtcccaagtgggct

SEQ ID NO: 122378 - DNA, 17 bp, Arabidopsis thaliana
gtcgtccgaagaaacca

SEQ ID NO: 122379 - DNA, 17 bp, Arabidopsis thaliana
gtcgtccgatttcagcc

SEQ ID NO: 122380 - DNA, 17 bp, Arabidopsis thaliana
gtcgtccgcctgtcgac

SEQ ID NO: 122381 - DNA, 17 bp, Arabidopsis thaliana
gtcgtccgcctttggtg

SEQ ID NO: 122382 - DNA, 17 bp, Arabidopsis thaliana
gtcgtccgttcctactg

SEQ ID NO: 122383 - DNA, 17 bp, Arabidopsis thaliana
gtcgtcctctgaattgc

SEQ ID NO: 122384 - DNA, 17 bp, Arabidopsis thaliana
gtcgtccttgaacattg

SEQ ID NO: 122385 - DNA, 17 bp, Arabidopsis thaliana
gtcgtcctttgtgcttt

SEQ ID NO: 122386 - DNA, 17 bp, Arabidopsis thaliana
gtcgtcgactgagatta

SEQ ID NO: 122387 - DNA, 17 bp, Arabidopsis thaliana
gtcgtcgatttagattt

SEQ ID NO: 122388 - DNA, 17 bp, Arabidopsis thaliana
gtcgtcgatttctgtag

SEQ ID NO: 122389 - DNA, 17 bp, Arabidopsis thaliana
gtcgtcgcagagatgga

SEQ ID NO: 122390 - DNA, 17 bp, Arabidopsis thaliana
gtcgtcgcaggtgtggt

SEQ ID NO: 122391 - DNA, 17 bp, Arabidopsis thaliana
gtcgtcgcctgtagatg

SEQ ID NO: 122392 - DNA, 17 bp, Arabidopsis thaliana
gtcgtcgcttccatctt

SEQ ID NO: 122393 - DNA, 17 bp, Arabidopsis thaliana
gtcgtcggactaactgc

SEQ ID NO: 122394 - DNA, 17 bp, Arabidopsis thaliana
gtcgtcggagagaatcg

SEQ ID NO: 122395 - DNA, 17 bp, Arabidopsis thaliana
gtcgtcggcgatggaca

SEQ ID NO: 122396 - DNA, 17 bp, Arabidopsis thaliana
gtcgtcggtagcggcca

SEQ ID NO: 122397 - DNA, 17 bp, Arabidopsis thaliana
gtcgtcggtccgccttt

SEQ ID NO: 122398 - DNA, 17 bp, Arabidopsis thaliana
gtcgtcggttcgacgtt

SEQ ID NO: 122399 - DNA, 17 bp, Arabidopsis thaliana
gtcgtcggtttgggttc

SEQ ID NO: 122400 - DNA, 17 bp, Arabidopsis thaliana
gtcgtcggtttggtctc

SEQ ID NO: 122401 - DNA, 17 bp, Arabidopsis thaliana
gtcgtcgtaagattcag

SEQ ID NO: 122402 - DNA, 17 bp, Arabidopsis thaliana
gtcgtcgtcgccgatta

SEQ ID NO: 122403 - DNA, 17 bp, Arabidopsis thaliana
gtcgtcgtcgcctgcga

SEQ ID NO: 122404 - DNA, 17 bp, Arabidopsis thaliana
gtcgtcgtcgtcaacag

SEQ ID NO: 122405 - DNA, 17 bp, Arabidopsis thaliana
gtcgtcgtcgtcttcga

SEQ ID NO: 122406 - DNA, 17 bp, Arabidopsis thaliana
gtcgtcgtctactgatc

SEQ ID NO: 122407 - DNA, 17 bp, Arabidopsis thaliana
gtcgtcgttttgtcata

SEQ ID NO: 122408 - DNA, 17 bp, Arabidopsis thaliana
gtcgtctaaagaacagt

SEQ ID NO: 122409 - DNA, 17 bp, Arabidopsis thaliana
gtcgtctactcgatacc

SEQ ID NO: 122410 - DNA, 17 bp, Arabidopsis thaliana
gtcgtctatcgtggatc

SEQ ID NO: 122411 - DNA, 17 bp, Arabidopsis thaliana
gtcgtctcatcattgtt

SEQ ID NO: 122412 - DNA, 17 bp, Arabidopsis thaliana
gtcgtctccggcgtgtg

SEQ ID NO: 122413 - DNA, 17 bp, Arabidopsis thaliana
gtcgtctcgttggtcgg

SEQ ID NO: 122414 - DNA, 17 bp, Arabidopsis thaliana
gtcgtctctgtaccgca

SEQ ID NO: 122415 - DNA, 17 bp, Arabidopsis thaliana
gtcgtctcttgactctt

SEQ ID NO: 122416 - DNA, 17 bp, Arabidopsis thaliana
gtcgtctgagcgaacag

SEQ ID NO: 122417 - DNA, 17 bp, Arabidopsis thaliana
gtcgtctgcaaaggatt

SEQ ID NO: 122418 - DNA, 17 bp, Arabidopsis thaliana
gtcgtctgcatttctga

SEQ ID NO: 122419 - DNA, 17 bp, Arabidopsis thaliana
gtcgtctgcctgagtgt

SEQ ID NO: 122420 - DNA, 17 bp, Arabidopsis thaliana
gtcgtctgcctgatgga

SEQ ID NO: 122421 - DNA, 17 bp, Arabidopsis thaliana
gtcgtctgcctgggtgt

SEQ ID NO: 122422 - DNA, 17 bp, Arabidopsis thaliana
gtcgtctgtcgtggatc

SEQ ID NO: 122423 - DNA, 17 bp, Arabidopsis thaliana
gtcgtctgtctgatgga

SEQ ID NO: 122424 - DNA, 17 bp, Arabidopsis thaliana
gtcgtcttagctcagtg

SEQ ID NO: 122425 - DNA, 17 bp, Arabidopsis thaliana
gtcgtcttcactttcag

SEQ ID NO: 122426 - DNA, 17 bp, Arabidopsis thaliana
gtcgtcttcagttgtta

SEQ ID NO: 122427 - DNA, 17 bp, Arabidopsis thaliana
gtcgtcttcggtcgcct

SEQ ID NO: 122428 - DNA, 17 bp, Arabidopsis thaliana
gtcgtcttcgtactctc

SEQ ID NO: 122429 - DNA, 17 bp, Arabidopsis thaliana
gtcgtcttcgtactctg

SEQ ID NO: 122430 - DNA, 17 bp, Arabidopsis thaliana
gtcgtcttcgtggtcca

SEQ ID NO: 122431 - DNA, 17 bp, Arabidopsis thaliana
gtcgtcttctgagattc

SEQ ID NO: 122432 - DNA, 17 bp, Arabidopsis thaliana
gtcgtcttctgttgcgt

SEQ ID NO: 122433 - DNA, 17 bp, Arabidopsis thaliana
gtcgtctttccactaag

SEQ ID NO: 122434 - DNA, 17 bp, Arabidopsis thaliana
gtcgtctttcgtggatc

SEQ ID NO: 122435 - DNA, 17 bp, Arabidopsis thaliana
gtcgtgaaactttggct

SEQ ID NO: 122436 - DNA, 17 bp, Arabidopsis thaliana
gtcgtgaaattcctcta

SEQ ID NO: 122437 - DNA, 17 bp, Arabidopsis thaliana
gtcgtgaaggcgattac

SEQ ID NO: 122438 - DNA, 17 bp, Arabidopsis thaliana
gtcgtgagaaatttggg

SEQ ID NO: 122439 - DNA, 17 bp, Arabidopsis thaliana
gtcgtgagacaggttag

SEQ ID NO: 122440 - DNA, 17 bp, Arabidopsis thaliana
gtcgtgagacgggttag

SEQ ID NO: 122441 - DNA, 17 bp, Arabidopsis thaliana
gtcgtgagatgtttggt

SEQ ID NO: 122442 - DNA, 17 bp, Arabidopsis thaliana
gtcgtgagttcggtcct

SEQ ID NO: 122443 - DNA, 17 bp, Arabidopsis thaliana
gtcgtgattggttggtt

SEQ ID NO: 122444 - DNA, 17 bp, Arabidopsis thaliana
gtcgtgatttagaccag

SEQ ID NO: 122445 - DNA, 17 bp, Arabidopsis thaliana
gtcgtgatttagaccat

SEQ ID NO: 122446 - DNA, 17 bp, Arabidopsis thaliana
gtcgtgatttctggttg

SEQ ID NO: 122447 - DNA, 17 bp, Arabidopsis thaliana
gtcgtgatttgttgcga

SEQ ID NO: 122448 - DNA, 17 bp, Arabidopsis thaliana
gtcgtgcagcttctgat

SEQ ID NO: 122449 - DNA, 17 bp, Arabidopsis thaliana
gtcgtgcaggatgtttt

SEQ ID NO: 122450 - DNA, 17 bp, Arabidopsis thaliana
gtcgtgcagggacgaaa

SEQ ID NO: 122451 - DNA, 17 bp, Arabidopsis thaliana
gtcgtgcccggaccctg

SEQ ID NO: 122452 - DNA, 17 bp, Arabidopsis thaliana
gtcgtgcctaggctctt

SEQ ID NO: 122453 - DNA, 17 bp, Arabidopsis thaliana
gtcgtgcctccggcgct

SEQ ID NO: 122454 - DNA, 17 bp, Arabidopsis thaliana
gtcgtgcctccggtgct

SEQ ID NO: 122455 - DNA, 17 bp, Arabidopsis thaliana
gtcgtgcgcgttgcttc

SEQ ID NO: 122456 - DNA, 17 bp, Arabidopsis thaliana
gtcgtgcgggttcttgc

SEQ ID NO: 122457 - DNA, 17 bp, Arabidopsis thaliana
gtcgtgctgcggagcgc

SEQ ID NO: 122458 - DNA, 17 bp, Arabidopsis thaliana
gtcgtgctgctaggcga

SEQ ID NO: 122459 - DNA, 17 bp, Arabidopsis thaliana
gtcgtggcccaagagat

SEQ ID NO: 122460 - DNA, 17 bp, Arabidopsis thaliana
gtcgtgggaggggaaga

SEQ ID NO: 122461 - DNA, 17 bp, Arabidopsis thaliana
gtcgtgggttcgactcc

SEQ ID NO: 122462 - DNA, 17 bp, Arabidopsis thaliana
gtcgtgggttcgtcttc

SEQ ID NO: 122463 - DNA, 17 bp, Arabidopsis thaliana
gtcgtggtcgcggtagg

SEQ ID NO: 122464 - DNA, 17 bp, Arabidopsis thaliana
gtcgtggtcgtggtcgt

SEQ ID NO: 122465 - DNA, 17 bp, Arabidopsis thaliana
gtcgtggtttcgggcct

SEQ ID NO: 122466 - DNA, 17 bp, Arabidopsis thaliana
gtcgtgtaaattttggc

SEQ ID NO: 122467 - DNA, 17 bp, Arabidopsis thaliana
gtcgtgtaaattttggt

SEQ ID NO: 122468 - DNA, 17 bp, Arabidopsis thaliana
gtcgtgtaggattcact

SEQ ID NO: 122469 - DNA, 17 bp, Arabidopsis thaliana
gtcgtgtatagtatgcc

SEQ ID NO: 122470 - DNA, 17 bp, Arabidopsis thaliana
gtcgtgtctacatcttc

SEQ ID NO: 122471 - DNA, 17 bp, Arabidopsis thaliana
gtcgtgtctcaatggtt

SEQ ID NO: 122472 - DNA, 17 bp, Arabidopsis thaliana
gtcgtgtgaattttttg

SEQ ID NO: 122473 - DNA, 17 bp, Arabidopsis thaliana
gtcgtgtggaccacgca

SEQ ID NO: 122474 - DNA, 17 bp, Arabidopsis thaliana
gtcgtgtggattttggc

SEQ ID NO: 122475 - DNA, 17 bp, Arabidopsis thaliana
gtcgtgtggcctgtctc

SEQ ID NO: 122476 - DNA, 17 bp, Arabidopsis thaliana
gtcgtgtggcctgtctt

SEQ ID NO: 122477 - DNA, 17 bp, Arabidopsis thaliana
gtcgtgtggtccagttt

SEQ ID NO: 122478 - DNA, 17 bp, Arabidopsis thaliana
gtcgtgttcttcttctt

SEQ ID NO: 122479 - DNA, 17 bp, Arabidopsis thaliana
gtcgtgttgttttttca

SEQ ID NO: 122480 - DNA, 17 bp, Arabidopsis thaliana
gtcgttaagtcaactga

SEQ ID NO: 122481 - DNA, 17 bp, Arabidopsis thaliana
gtcgttaagtcaactgg

SEQ ID NO: 122482 - DNA, 17 bp, Arabidopsis thaliana
gtcgttaagtttccgtc

SEQ ID NO: 122483 - DNA, 17 bp, Arabidopsis thaliana
gtcgttaatatcatgca

SEQ ID NO: 122484 - DNA, 17 bp, Arabidopsis thaliana
gtcgttacaaggctctg

SEQ ID NO: 122485 - DNA, 17 bp, Arabidopsis thaliana
gtcgttagccaagcagg

SEQ ID NO: 122486 - DNA, 17 bp, Arabidopsis thaliana
gtcgttagctcttctac

SEQ ID NO: 122487 - DNA, 17 bp, Arabidopsis thaliana
gtcgttagtcgcatcct

SEQ ID NO: 122488 - DNA, 17 bp, Arabidopsis thaliana
gtcgttatcttcgatca

SEQ ID NO: 122489 - DNA, 17 bp, Arabidopsis thaliana
gtcgttcacccaagaga

SEQ ID NO: 122490 - DNA, 17 bp, Arabidopsis thaliana
gtcgttcaggccccacc

SEQ ID NO: 122491 - DNA, 17 bp, Arabidopsis thaliana
gtcgttcatcatctttg

SEQ ID NO: 122492 - DNA, 17 bp, Arabidopsis thaliana
gtcgttcattaacggct

SEQ ID NO: 122493 - DNA, 17 bp, Arabidopsis thaliana
gtcgttccaaccttttc

SEQ ID NO: 122494 - DNA, 17 bp, Arabidopsis thaliana
gtcgttccatgtagttg

SEQ ID NO: 122495 - DNA, 17 bp, Arabidopsis thaliana
gtcgttcgacaccgatt

SEQ ID NO: 122496 - DNA, 17 bp, Arabidopsis thaliana
gtcgttcgccaggatta

SEQ ID NO: 122497 - DNA, 17 bp, Arabidopsis thaliana
gtcgttcgctaagtccg

SEQ ID NO: 122498 - DNA, 17 bp, Arabidopsis thaliana
gtcgttcggaccgcctt

SEQ ID NO: 122499 - DNA, 17 bp, Arabidopsis thaliana
gtcgttcggatgtgttt

SEQ ID NO: 122500 - DNA, 17 bp, Arabidopsis thaliana
gtcgttcgtcaaggttc

SEQ ID NO: 122501 - DNA, 17 bp, Arabidopsis thaliana
gtcgttctcgatgacca

SEQ ID NO: 122502 - DNA, 17 bp, Arabidopsis thaliana
gtcgttctgcggctgct

SEQ ID NO: 122503 - DNA, 17 bp, Arabidopsis thaliana
gtcgttctgggccgcac

SEQ ID NO: 122504 - DNA, 17 bp, Arabidopsis thaliana
gtcgttctgtcgtccgc

SEQ ID NO: 122505 - DNA, 17 bp, Arabidopsis thaliana
gtcgttgaagcgaagac

SEQ ID NO: 122506 - DNA, 17 bp, Arabidopsis thaliana
gtcgttgacccggccaa

SEQ ID NO: 122507 - DNA, 17 bp, Arabidopsis thaliana
gtcgttgattctggcta

SEQ ID NO: 122508 - DNA, 17 bp, Arabidopsis thaliana
gtcgttgcagagctgag

SEQ ID NO: 122509 - DNA, 17 bp, Arabidopsis thaliana
gtcgttgccgtctggag

SEQ ID NO: 122510 - DNA, 17 bp, Arabidopsis thaliana
gtcgttgccttctacgt

SEQ ID NO: 122511 - DNA, 17 bp, Arabidopsis thaliana
gtcgttgctcccaaatc

SEQ ID NO: 122512 - DNA, 17 bp, Arabidopsis thaliana
gtcgttgcttgactcct

SEQ ID NO: 122513 - DNA, 17 bp, Arabidopsis thaliana
gtcgttggagccgtagc

SEQ ID NO: 122514 - DNA, 17 bp, Arabidopsis thaliana
gtcgttggagtgttgcg

SEQ ID NO: 122515 - DNA, 17 bp, Arabidopsis thaliana
gtcgttggctaagtccg

SEQ ID NO: 122516 - DNA, 17 bp, Arabidopsis thaliana
gtcgttggctaagtcct

SEQ ID NO: 122517 - DNA, 17 bp, Arabidopsis thaliana
gtcgttggctggctaag

SEQ ID NO: 122518 - DNA, 17 bp, Arabidopsis thaliana
gtcgttgggtccatcga

SEQ ID NO: 122519 - DNA, 17 bp, Arabidopsis thaliana
gtcgttggtcacaacga

SEQ ID NO: 122520 - DNA, 17 bp, Arabidopsis thaliana
gtcgttggtcgctgtcg

SEQ ID NO: 122521 - DNA, 17 bp, Arabidopsis thaliana
gtcgttgtaacaacttt

SEQ ID NO: 122522 - DNA, 17 bp, Arabidopsis thaliana
gtcgttgtagtatagtg

SEQ ID NO: 122523 - DNA, 17 bp, Arabidopsis thaliana
gtcgttgtagttgctgc

SEQ ID NO: 122524 - DNA, 17 bp, Arabidopsis thaliana
gtcgttgtcaaatctat

SEQ ID NO: 122525 - DNA, 17 bp, Arabidopsis thaliana
gtcgttgtccacatagg

SEQ ID NO: 122526 - DNA, 17 bp, Arabidopsis thaliana
gtcgttgtccttcagct

SEQ ID NO: 122527 - DNA, 17 bp, Arabidopsis thaliana
gtcgttgtctacgattt

SEQ ID NO: 122528 - DNA, 17 bp, Arabidopsis thaliana
gtcgttgtgttgacgaa

SEQ ID NO: 122529 - DNA, 17 bp, Arabidopsis thaliana
gtcgtttacagaaccga

SEQ ID NO: 122530 - DNA, 17 bp, Arabidopsis thaliana
gtcgtttactgcttttg

SEQ ID NO: 122531 - DNA, 17 bp, Arabidopsis thaliana
gtcgtttagatctgtcg

SEQ ID NO: 122532 - DNA, 17 bp, Arabidopsis thaliana
gtcgtttaggtgttacg

SEQ ID NO: 122533 - DNA, 17 bp, Arabidopsis thaliana
gtcgtttcccggctggt

SEQ ID NO: 122534 - DNA, 17 bp, Arabidopsis thaliana
gtcgtttcgtggcaggt

SEQ ID NO: 122535 - DNA, 17 bp, Arabidopsis thaliana
gtcgtttcttcaaggcc

SEQ ID NO: 122536 - DNA, 17 bp, Arabidopsis thaliana
gtcgtttcttgattttg

SEQ ID NO: 122537 - DNA, 17 bp, Arabidopsis thaliana
gtcgtttctttttgttt

SEQ ID NO: 122538 - DNA, 17 bp, Arabidopsis thaliana
gtcgtttgatggcaggt

SEQ ID NO: 122539 - DNA, 17 bp, Arabidopsis thaliana
gtcgtttgcgaggaaat

SEQ ID NO: 122540 - DNA, 17 bp, Arabidopsis thaliana
gtcgtttggtttatcgg

SEQ ID NO: 122541 - DNA, 17 bp, Arabidopsis thaliana
gtcgtttgttggctgcc

SEQ ID NO: 122542 - DNA, 17 bp, Arabidopsis thaliana
gtcgttttagtttccaa

SEQ ID NO: 122543 - DNA, 17 bp, Arabidopsis thaliana
gtcgttttcacagagtg

SEQ ID NO: 122544 - DNA, 17 bp, Arabidopsis thaliana
gtcgttttccgcggccg

SEQ ID NO: 122545 - DNA, 17 bp, Arabidopsis thaliana
gtcgttttcgtaacggg

SEQ ID NO: 122546 - DNA, 17 bp, Arabidopsis thaliana
gtcgttttcttaacagg

SEQ ID NO: 122547 - DNA, 17 bp, Arabidopsis thaliana
gtcgttttgcggtgcgg

SEQ ID NO: 122548 - DNA, 17 bp, Arabidopsis thaliana
gtcgttttggccgagtg

SEQ ID NO: 122549 - DNA, 17 bp, Arabidopsis thaliana
gtcgttttgtttatcgg

SEQ ID NO: 122550 - DNA, 17 bp, Arabidopsis thaliana
gtcgttttgttttcccc

SEQ ID NO: 122551 - DNA, 17 bp, Arabidopsis thaliana
gtctaaaaaggattttg

SEQ ID NO: 122552 - DNA, 17 bp, Arabidopsis thaliana
gtctaaacatcttagaa

SEQ ID NO: 122553 - DNA, 17 bp, Arabidopsis thaliana
gtctaaaccggctaatg

SEQ ID NO: 122554 - DNA, 17 bp, Arabidopsis thaliana
gtctaaacgacccttgc

SEQ ID NO: 122555 - DNA, 17 bp, Arabidopsis thaliana
gtctaaactcataatcg

SEQ ID NO: 122556 - DNA, 17 bp, Arabidopsis thaliana
gtctaaactggcttaac

SEQ ID NO: 122557 - DNA, 17 bp, Arabidopsis thaliana
gtctaaagattctggag

SEQ ID NO: 122558 - DNA, 17 bp, Arabidopsis thaliana
gtctaaagcgcatacgg

SEQ ID NO: 122559 - DNA, 17 bp, Arabidopsis thaliana
gtctaaagttaggacct

SEQ ID NO: 122560 - DNA, 17 bp, Arabidopsis thaliana
gtctaaatagtttctcc

SEQ ID NO: 122561 - DNA, 17 bp, Arabidopsis thaliana
gtctaaatcctttgctc

SEQ ID NO: 122562 - DNA, 17 bp, Arabidopsis thaliana
gtctaacacaggtgcgt

SEQ ID NO: 122563 - DNA, 17 bp, Arabidopsis thaliana
gtctaacatacagattc

SEQ ID NO: 122564 - DNA, 17 bp, Arabidopsis thaliana
gtctaaccgatgggctc

SEQ ID NO: 122565 - DNA, 17 bp, Arabidopsis thaliana
gtctaacctgtaattct

SEQ ID NO: 122566 - DNA, 17 bp, Arabidopsis thaliana
gtctaacgttcggatcg

SEQ ID NO: 122567 - DNA, 17 bp, Arabidopsis thaliana
gtctaacgtttgcgggc

SEQ ID NO: 122568 - DNA, 17 bp, Arabidopsis thaliana
gtctaactgtcttaggg

SEQ ID NO: 122569 - DNA, 17 bp, Arabidopsis thaliana
gtctaactgttgtatgc

SEQ ID NO: 122570 - DNA, 17 bp, Arabidopsis thaliana
gtctaacttgtctgcgg

SEQ ID NO: 122571 - DNA, 17 bp, Arabidopsis thaliana
gtctaagattttgtcgg

SEQ ID NO: 122572 - DNA, 17 bp, Arabidopsis thaliana
gtctaagcaagcactta

SEQ ID NO: 122573 - DNA, 17 bp, Arabidopsis thaliana
gtctaagcaagcacttc

SEQ ID NO: 122574 - DNA, 17 bp, Arabidopsis thaliana
gtctaagccaccgtcac

SEQ ID NO: 122575 - DNA, 17 bp, Arabidopsis thaliana
gtctaagccctctctca

SEQ ID NO: 122576 - DNA, 17 bp, Arabidopsis thaliana
gtctaagcgttaggcac

SEQ ID NO: 122577 - DNA, 17 bp, Arabidopsis thaliana
gtctaagctactctact

SEQ ID NO: 122578 - DNA, 17 bp, Arabidopsis thaliana
gtctaagctgcacagat

SEQ ID NO: 122579 - DNA, 17 bp, Arabidopsis thaliana
gtctaagctgcactagt

SEQ ID NO: 122580 - DNA, 17 bp, Arabidopsis thaliana
gtctaaggtttgctgct

SEQ ID NO: 122581 - DNA, 17 bp, Arabidopsis thaliana
gtctaagtccaacatag

SEQ ID NO: 122582 - DNA, 17 bp, Arabidopsis thaliana
gtctaagtcgccttgga

SEQ ID NO: 122583 - DNA, 17 bp, Arabidopsis thaliana
gtctaagttcctctttc

SEQ ID NO: 122584 - DNA, 17 bp, Arabidopsis thaliana
gtctaagtttcgttgac

SEQ ID NO: 122585 - DNA, 17 bp, Arabidopsis thaliana
gtctaagtttgatagcg

SEQ ID NO: 122586 - DNA, 17 bp, Arabidopsis thaliana
gtctaatatggtatcag

SEQ ID NO: 122587 - DNA, 17 bp, Arabidopsis thaliana
gtctaatcaggtttagg

SEQ ID NO: 122588 - DNA, 17 bp, Arabidopsis thaliana
gtctaatccggtgaatc

SEQ ID NO: 122589 - DNA, 17 bp, Arabidopsis thaliana
gtctaatctctctttac

SEQ ID NO: 122590 - DNA, 17 bp, Arabidopsis thaliana
gtctaatgattgtgaag

SEQ ID NO: 122591 - DNA, 17 bp, Arabidopsis thaliana
gtctaatgcctcggatg

SEQ ID NO: 122592 - DNA, 17 bp, Arabidopsis thaliana
gtctaattagcgacgaa

SEQ ID NO: 122593 - DNA, 17 bp, Arabidopsis thaliana
gtctaattcgtaattcc

SEQ ID NO: 122594 - DNA, 17 bp, Arabidopsis thaliana
gtctaattcgtagttcc

SEQ ID NO: 122595 - DNA, 17 bp, Arabidopsis thaliana
gtctaattctttgggca

SEQ ID NO: 122596 - DNA, 17 bp, Arabidopsis thaliana
gtctaattgatccgtct

SEQ ID NO: 122597 - DNA, 17 bp, Arabidopsis thaliana
gtctaatttatctgcgg

SEQ ID NO: 122598 - DNA, 17 bp, Arabidopsis thaliana
gtctaatttgatttctc

SEQ ID NO: 122599 - DNA, 17 bp, Arabidopsis thaliana
gtctaatttgtctacgg

SEQ ID NO: 122600 - DNA, 17 bp, Arabidopsis thaliana
gtctaatttgtctgcgg

SEQ ID NO: 122601 - DNA, 17 bp, Arabidopsis thaliana
gtctaatttgtttgcgg

SEQ ID NO: 122602 - DNA, 17 bp, Arabidopsis thaliana
gtctaatttttctaagc

SEQ ID NO: 122603 - DNA, 17 bp, Arabidopsis thaliana
gtctaatttttctgcag

SEQ ID NO: 122604 - DNA, 17 bp, Arabidopsis thaliana
gtctaatttttctgccg

SEQ ID NO: 122605 - DNA, 17 bp, Arabidopsis thaliana
gtctacaaaatcattga

SEQ ID NO: 122606 - DNA, 17 bp, Arabidopsis thaliana
gtctacaaaggattcta

SEQ ID NO: 122607 - DNA, 17 bp, Arabidopsis thaliana
gtctacaccgccggagt

SEQ ID NO: 122608 - DNA, 17 bp, Arabidopsis thaliana
gtctacagattagttga

SEQ ID NO: 122609 - DNA, 17 bp, Arabidopsis thaliana
gtctacagctagctcgc

SEQ ID NO: 122610 - DNA, 17 bp, Arabidopsis thaliana
gtctacagctgtccttt

SEQ ID NO: 122611 - DNA, 17 bp, Arabidopsis thaliana
gtctacagcttcgcaaa

SEQ ID NO: 122612 - DNA, 17 bp, Arabidopsis thaliana
gtctacagcttcttccc

SEQ ID NO: 122613 - DNA, 17 bp, Arabidopsis thaliana
gtctacagcttcttcgc

SEQ ID NO: 122614 - DNA, 17 bp, Arabidopsis thaliana
gtctacagcttggatca

SEQ ID NO: 122615 - DNA, 17 bp, Arabidopsis thaliana
gtctacagctttcgcaa

SEQ ID NO: 122616 - DNA, 17 bp, Arabidopsis thaliana
gtctacagctttttcgc

SEQ ID NO: 122617 - DNA, 17 bp, Arabidopsis thaliana
gtctacagtgtcttctt

SEQ ID NO: 122618 - DNA, 17 bp, Arabidopsis thaliana
gtctacatgtgtggcaa

SEQ ID NO: 122619 - DNA, 17 bp, Arabidopsis thaliana
gtctacattagtatcag

SEQ ID NO: 122620 - DNA, 17 bp, Arabidopsis thaliana
gtctaccactttgtcag

SEQ ID NO: 122621 - DNA, 17 bp, Arabidopsis thaliana
gtctaccagatccgatt

SEQ ID NO: 122622 - DNA, 17 bp, Arabidopsis thaliana
gtctaccctcagtggcg

SEQ ID NO: 122623 - DNA, 17 bp, Arabidopsis thaliana
gtctaccgtgcgctgga

SEQ ID NO: 122624 - DNA, 17 bp, Arabidopsis thaliana
gtctacctgggtgtcac

SEQ ID NO: 122625 - DNA, 17 bp, Arabidopsis thaliana
gtctaccttgagttgtg

SEQ ID NO: 122626 - DNA, 17 bp, Arabidopsis thaliana
gtctacgagtcgggttg

SEQ ID NO: 122627 - DNA, 17 bp, Arabidopsis thaliana
gtctacgatttcactag

SEQ ID NO: 122628 - DNA, 17 bp, Arabidopsis thaliana
gtctacgcctcaagaag

SEQ ID NO: 122629 - DNA, 17 bp, Arabidopsis thaliana
gtctacgctctttggac

SEQ ID NO: 122630 - DNA, 17 bp, Arabidopsis thaliana
gtctacgcttgactttg

SEQ ID NO: 122631 - DNA, 17 bp, Arabidopsis thaliana
gtctacggaatggccga

SEQ ID NO: 122632 - DNA, 17 bp, Arabidopsis thaliana
gtctacggaccgtgtac

SEQ ID NO: 122633 - DNA, 17 bp, Arabidopsis thaliana
gtctacggcaactgaat

SEQ ID NO: 122634 - DNA, 17 bp, Arabidopsis thaliana
gtctacggttattacgg

SEQ ID NO: 122635 - DNA, 17 bp, Arabidopsis thaliana
gtctacgtcagccacac

SEQ ID NO: 122636 - DNA, 17 bp, Arabidopsis thaliana
gtctacgtcagcgacac

SEQ ID NO: 122637 - DNA, 17 bp, Arabidopsis thaliana
gtctacgtcagcttctc

SEQ ID NO: 122638 - DNA, 17 bp, Arabidopsis thaliana
gtctacgtcttcatcct

SEQ ID NO: 122639 - DNA, 17 bp, Arabidopsis thaliana
gtctacgtgccggagtg

SEQ ID NO: 122640 - DNA, 17 bp, Arabidopsis thaliana
gtctacgtgttgtggca

SEQ ID NO: 122641 - DNA, 17 bp, Arabidopsis thaliana
gtctactaaggcccatg

SEQ ID NO: 122642 - DNA, 17 bp, Arabidopsis thaliana
gtctactaatccaggaa

SEQ ID NO: 122643 - DNA, 17 bp, Arabidopsis thaliana
gtctactacgcagacag

SEQ ID NO: 122644 - DNA, 17 bp, Arabidopsis thaliana
gtctactacggtggtgg

SEQ ID NO: 122645 - DNA, 17 bp, Arabidopsis thaliana
gtctactagggcgtaac

SEQ ID NO: 122646 - DNA, 17 bp, Arabidopsis thaliana
gtctactcatttggaag

SEQ ID NO: 122647 - DNA, 17 bp, Arabidopsis thaliana
gtctactccttaagtgc

SEQ ID NO: 122648 - DNA, 17 bp, Arabidopsis thaliana
gtctactctataacact

SEQ ID NO: 122649 - DNA, 17 bp, Arabidopsis thaliana
gtctactcttttggaag

SEQ ID NO: 122650 - DNA, 17 bp, Arabidopsis thaliana
gtctactgaacacttgc

SEQ ID NO: 122651 - DNA, 17 bp, Arabidopsis thaliana
gtctactgctggcgtca

SEQ ID NO: 122652 - DNA, 17 bp, Arabidopsis thaliana
gtctactggaagtgagt

SEQ ID NO: 122653 - DNA, 17 bp, Arabidopsis thaliana
gtctactggggctaagc

SEQ ID NO: 122654 - DNA, 17 bp, Arabidopsis thaliana
gtctactgtatgttgca

SEQ ID NO: 122655 - DNA, 17 bp, Arabidopsis thaliana
gtctacttagtcgagct

SEQ ID NO: 122656 - DNA, 17 bp, Arabidopsis thaliana
gtctactttgaatgcta

SEQ ID NO: 122657 - DNA, 17 bp, Arabidopsis thaliana
gtctagacattaaagca

SEQ ID NO: 122658 - DNA, 17 bp, Arabidopsis thaliana
gtctagatccgtcactg

SEQ ID NO: 122659 - DNA, 17 bp, Arabidopsis thaliana
gtctagatctttgggcc

SEQ ID NO: 122660 - DNA, 17 bp, Arabidopsis thaliana
gtctagattctgtgttt

SEQ ID NO: 122661 - DNA, 17 bp, Arabidopsis thaliana
gtctagattgcagccga

SEQ ID NO: 122662 - DNA, 17 bp, Arabidopsis thaliana
gtctagcatggccagac

SEQ ID NO: 122663 - DNA, 17 bp, Arabidopsis thaliana
gtctagccgccggagcg

SEQ ID NO: 122664 - DNA, 17 bp, Arabidopsis thaliana
gtctagcggatgagtta

SEQ ID NO: 122665 - DNA, 17 bp, Arabidopsis thaliana
gtctaggcctccgttat

SEQ ID NO: 122666 - DNA, 17 bp, Arabidopsis thaliana
gtctagtcgcatcctgt

SEQ ID NO: 122667 - DNA, 17 bp, Arabidopsis thaliana
gtctagtcgtcctgtag

SEQ ID NO: 122668 - DNA, 17 bp, Arabidopsis thaliana
gtctagttctgcatgaa

SEQ ID NO: 122669 - DNA, 17 bp, Arabidopsis thaliana
gtctatagagaacacta

SEQ ID NO: 122670 - DNA, 17 bp, Arabidopsis thaliana
gtctatataggagtttc

SEQ ID NO: 122671 - DNA, 17 bp, Arabidopsis thaliana
gtctatatccggctctg

SEQ ID NO: 122672 - DNA, 17 bp, Arabidopsis thaliana
gtctatatggccgagtt

SEQ ID NO: 122673 - DNA, 17 bp, Arabidopsis thaliana
gtctatcactgcgacag

SEQ ID NO: 122674 - DNA, 17 bp, Arabidopsis thaliana
gtctatcagttgtgctt

SEQ ID NO: 122675 - DNA, 17 bp, Arabidopsis thaliana
gtctatccatcctgagt

SEQ ID NO: 122676 - DNA, 17 bp, Arabidopsis thaliana
gtctatcgatcagatgt

SEQ ID NO: 122677 - DNA, 17 bp, Arabidopsis thaliana
gtctatcgcatcctgta

SEQ ID NO: 122678 - DNA, 17 bp, Arabidopsis thaliana
gtctatcggtttgccat

SEQ ID NO: 122679 - DNA, 17 bp, Arabidopsis thaliana
gtctatcgttgtgtcta

SEQ ID NO: 122680 - DNA, 17 bp, Arabidopsis thaliana
gtctatgacattggctt

SEQ ID NO: 122681 - DNA, 17 bp, Arabidopsis thaliana
gtctatggagactcttt

SEQ ID NO: 122682 - DNA, 17 bp, Arabidopsis thaliana
gtctatgggtccaaacc

SEQ ID NO: 122683 - DNA, 17 bp, Arabidopsis thaliana
gtctatggtttgtggag

SEQ ID NO: 122684 - DNA, 17 bp, Arabidopsis thaliana
gtctatgtaaaacgcgg

SEQ ID NO: 122685 - DNA, 17 bp, Arabidopsis thaliana
gtctatgtccaaggccg

SEQ ID NO: 122686 - DNA, 17 bp, Arabidopsis thaliana
gtctatgtccactaagg

SEQ ID NO: 122687 - DNA, 17 bp, Arabidopsis thaliana
gtctatgtcttgagttg

SEQ ID NO: 122688 - DNA, 17 bp, Arabidopsis thaliana
gtctatgtggactaatc

SEQ ID NO: 122689 - DNA, 17 bp, Arabidopsis thaliana
gtctattactcgacctg

SEQ ID NO: 122690 - DNA, 17 bp, Arabidopsis thaliana
gtctattagctcagtgg

SEQ ID NO: 122691 - DNA, 17 bp, Arabidopsis thaliana
gtctattcgggttcggg

SEQ ID NO: 122692 - DNA, 17 bp, Arabidopsis thaliana
gtctattctggcctggt

SEQ ID NO: 122693 - DNA, 17 bp, Arabidopsis thaliana
gtctatttaggcgggtc

SEQ ID NO: 122694 - DNA, 17 bp, Arabidopsis thaliana
gtctatttgaggtcatg

SEQ ID NO: 122695 - DNA, 17 bp, Arabidopsis thaliana
gtctatttgagtgacgc

SEQ ID NO: 122696 - DNA, 17 bp, Arabidopsis thaliana
gtctatttggccgggtc

SEQ ID NO: 122697 - DNA, 17 bp, Arabidopsis thaliana
gtctatttggtggtggt

SEQ ID NO: 122698 - DNA, 17 bp, Arabidopsis thaliana
gtctatttggttctttg

SEQ ID NO: 122699 - DNA, 17 bp, Arabidopsis thaliana
gtctattttggcctggt

SEQ ID NO: 122700 - DNA, 17 bp, Arabidopsis thaliana
gtctattttttcgtcgc

SEQ ID NO: 122701 - DNA, 17 bp, Arabidopsis thaliana
gtctcaaaaaatctatc

SEQ ID NO: 122702 - DNA, 17 bp, Arabidopsis thaliana
gtctcaaagattaagcc

SEQ ID NO: 122703 - DNA, 17 bp, Arabidopsis thaliana
gtctcaaaggtccaata

SEQ ID NO: 122704 - DNA, 17 bp, Arabidopsis thaliana
gtctcaaagtgtggttg

SEQ ID NO: 122705 - DNA, 17 bp, Arabidopsis thaliana
gtctcaacaaaagtttg

SEQ ID NO: 122706 - DNA, 17 bp, Arabidopsis thaliana
gtctcaacatagatccg

SEQ ID NO: 122707 - DNA, 17 bp, Arabidopsis thaliana
gtctcaacctgcattca

SEQ ID NO: 122708 - DNA, 17 bp, Arabidopsis thaliana
gtctcaaccttggaaag

SEQ ID NO: 122709 - DNA, 17 bp, Arabidopsis thaliana
gtctcaactgagtcgac

SEQ ID NO: 122710 - DNA, 17 bp, Arabidopsis thaliana
gtctcaagatctatcag

SEQ ID NO: 122711 - DNA, 17 bp, Arabidopsis thaliana
gtctcaaggcggtgtag

SEQ ID NO: 122712 - DNA, 17 bp, Arabidopsis thaliana
gtctcaaggctgggcac

SEQ ID NO: 122713 - DNA, 17 bp, Arabidopsis thaliana
gtctcaagttattgtgc

SEQ ID NO: 122714 - DNA, 17 bp, Arabidopsis thaliana
gtctcaagttctagcag

SEQ ID NO: 122715 - DNA, 17 bp, Arabidopsis thaliana
gtctcaagtttacaggt

SEQ ID NO: 122716 - DNA, 17 bp, Arabidopsis thaliana
gtctcaatcttctctac

SEQ ID NO: 122717 - DNA, 17 bp, Arabidopsis thaliana
gtctcaattttactgac

SEQ ID NO: 122718 - DNA, 17 bp, Arabidopsis thaliana
gtctcacaccatttgct

SEQ ID NO: 122719 - DNA, 17 bp, Arabidopsis thaliana
gtctcacagaacggtgg

SEQ ID NO: 122720 - DNA, 17 bp, Arabidopsis thaliana
gtctcacagttaagcaa

SEQ ID NO: 122721 - DNA, 17 bp, Arabidopsis thaliana
gtctcacagttaagtgt

SEQ ID NO: 122722 - DNA, 17 bp, Arabidopsis thaliana
gtctcacatggatttac

SEQ ID NO: 122723 - DNA, 17 bp, Arabidopsis thaliana
gtctcacatggctttct

SEQ ID NO: 122724 - DNA, 17 bp, Arabidopsis thaliana
gtctcaccgcttgctgt

SEQ ID NO: 122725 - DNA, 17 bp, Arabidopsis thaliana
gtctcacctcgcgacag

SEQ ID NO: 122726 - DNA, 17 bp, Arabidopsis thaliana
gtctcacctctctttct

SEQ ID NO: 122727 - DNA, 17 bp, Arabidopsis thaliana
gtctcacgagacttgtt

SEQ ID NO: 122728 - DNA, 17 bp, Arabidopsis thaliana
gtctcacgatgtaccgc

SEQ ID NO: 122729 - DNA, 17 bp, Arabidopsis thaliana
gtctcacgatgtttggg

SEQ ID NO: 122730 - DNA, 17 bp, Arabidopsis thaliana
gtctcacgcagctggtc

SEQ ID NO: 122731 - DNA, 17 bp, Arabidopsis thaliana
gtctcacgcgtgcggtg

SEQ ID NO: 122732 - DNA, 17 bp, Arabidopsis thaliana
gtctcacggggcgagtt

SEQ ID NO: 122733 - DNA, 17 bp, Arabidopsis thaliana
gtctcactgctataacc

SEQ ID NO: 122734 - DNA, 17 bp, Arabidopsis thaliana
gtctcagaaatggctgc

SEQ ID NO: 122735 - DNA, 17 bp, Arabidopsis thaliana
gtctcagaacaatagac

SEQ ID NO: 122736 - DNA, 17 bp, Arabidopsis thaliana
gtctcagaacaataggc

SEQ ID NO: 122737 - DNA, 17 bp, Arabidopsis thaliana
gtctcagaacaatcagg

SEQ ID NO: 122738 - DNA, 17 bp, Arabidopsis thaliana
gtctcagaagtctgtct

SEQ ID NO: 122739 - DNA, 17 bp, Arabidopsis thaliana
gtctcagaagtctgttt

SEQ ID NO: 122740 - DNA, 17 bp, Arabidopsis thaliana
gtctcagaccgacatgc

SEQ ID NO: 122741 - DNA, 17 bp, Arabidopsis thaliana
gtctcagactgagagtg

SEQ ID NO: 122742 - DNA, 17 bp, Arabidopsis thaliana
gtctcagactttggctt

SEQ ID NO: 122743 - DNA, 17 bp, Arabidopsis thaliana
gtctcagagatgatatt

SEQ ID NO: 122744 - DNA, 17 bp, Arabidopsis thaliana
gtctcagatggtgacag

SEQ ID NO: 122745 - DNA, 17 bp, Arabidopsis thaliana
gtctcagattgacaagt

SEQ ID NO: 122746 - DNA, 17 bp, Arabidopsis thaliana
gtctcagccctttgtcg

SEQ ID NO: 122747 - DNA, 17 bp, Arabidopsis thaliana
gtctcagcgacagatct

SEQ ID NO: 122748 - DNA, 17 bp, Arabidopsis thaliana
gtctcagctactgcgat

SEQ ID NO: 122749 - DNA, 17 bp, Arabidopsis thaliana
gtctcagctattgcgat

SEQ ID NO: 122750 - DNA, 17 bp, Arabidopsis thaliana
gtctcagctcgctacgt

SEQ ID NO: 122751 - DNA, 17 bp, Arabidopsis thaliana
gtctcagcttccccctg

SEQ ID NO: 122752 - DNA, 17 bp, Arabidopsis thaliana
gtctcagcttctatctt

SEQ ID NO: 122753 - DNA, 17 bp, Arabidopsis thaliana
gtctcaggaattcgtgg

SEQ ID NO: 122754 - DNA, 17 bp, Arabidopsis thaliana
gtctcaggatgagggca

SEQ ID NO: 122755 - DNA, 17 bp, Arabidopsis thaliana
gtctcaggattgatacg

SEQ ID NO: 122756 - DNA, 17 bp, Arabidopsis thaliana
gtctcaggcacagctgt

SEQ ID NO: 122757 - DNA, 17 bp, Arabidopsis thaliana
gtctcaggcgttgctct

SEQ ID NO: 122758 - DNA, 17 bp, Arabidopsis thaliana
gtctcaggctgatcgat

SEQ ID NO: 122759 - DNA, 17 bp, Arabidopsis thaliana
gtctcagggacttcaca

SEQ ID NO: 122760 - DNA, 17 bp, Arabidopsis thaliana
gtctcaggtagacagtt

SEQ ID NO: 122761 - DNA, 17 bp, Arabidopsis thaliana
gtctcagtctagattct

SEQ ID NO: 122762 - DNA, 17 bp, Arabidopsis thaliana
gtctcagtctcatccgg

SEQ ID NO: 122763 - DNA, 17 bp, Arabidopsis thaliana
gtctcagtcttcgtttg

SEQ ID NO: 122764 - DNA, 17 bp, Arabidopsis thaliana
gtctcagtggtggttta

SEQ ID NO: 122765 - DNA, 17 bp, Arabidopsis thaliana
gtctcagttgatgtcgg

SEQ ID NO: 122766 - DNA, 17 bp, Arabidopsis thaliana
gtctcagtttcgaacca

SEQ ID NO: 122767 - DNA, 17 bp, Arabidopsis thaliana
gtctcataactattgca

SEQ ID NO: 122768 - DNA, 17 bp, Arabidopsis thaliana
gtctcataaggatttgc

SEQ ID NO: 122769 - DNA, 17 bp, Arabidopsis thaliana
gtctcatatccttctcc

SEQ ID NO: 122770 - DNA, 17 bp, Arabidopsis thaliana
gtctcatcatcgccttg

SEQ ID NO: 122771 - DNA, 17 bp, Arabidopsis thaliana
gtctcatccctataaag

SEQ ID NO: 122772 - DNA, 17 bp, Arabidopsis thaliana
gtctcatccctgaaaag

SEQ ID NO: 122773 - DNA, 17 bp, Arabidopsis thaliana
gtctcatcctgtagatg

SEQ ID NO: 122774 - DNA, 17 bp, Arabidopsis thaliana
gtctcatctacgaattc

SEQ ID NO: 122775 - DNA, 17 bp, Arabidopsis thaliana
gtctcatctctgcaaag

SEQ ID NO: 122776 - DNA, 17 bp, Arabidopsis thaliana
gtctcatcttagttgac

SEQ ID NO: 122777 - DNA, 17 bp, Arabidopsis thaliana
gtctcatgactcatcat

SEQ ID NO: 122778 - DNA, 17 bp, Arabidopsis thaliana
gtctcatgagggtccat

SEQ ID NO: 122779 - DNA, 17 bp, Arabidopsis thaliana
gtctcatgcttctagtc

SEQ ID NO: 122780 - DNA, 17 bp, Arabidopsis thaliana
gtctcatggactcgtgg

SEQ ID NO: 122781 - DNA, 17 bp, Arabidopsis thaliana
gtctcatggattcgtcg

SEQ ID NO: 122782 - DNA, 17 bp, Arabidopsis thaliana
gtctcatggattcgtgg

SEQ ID NO: 122783 - DNA, 17 bp, Arabidopsis thaliana
gtctcatggattcgttg

SEQ ID NO: 122784 - DNA, 17 bp, Arabidopsis thaliana
gtctcatggttggcgtc

SEQ ID NO: 122785 - DNA, 17 bp, Arabidopsis thaliana
gtctcatgtgaagttga

SEQ ID NO: 122786 - DNA, 17 bp, Arabidopsis thaliana
gtctcatgtgctgatgt

SEQ ID NO: 122787 - DNA, 17 bp, Arabidopsis thaliana
gtctcatttctcatgtc

SEQ ID NO: 122788 - DNA, 17 bp, Arabidopsis thaliana
gtctccaacaaattagc

SEQ ID NO: 122789 - DNA, 17 bp, Arabidopsis thaliana
gtctccaaggtgaacag

SEQ ID NO: 122790 - DNA, 17 bp, Arabidopsis thaliana
gtctccaagttggacaa

SEQ ID NO: 122791 - DNA, 17 bp, Arabidopsis thaliana
gtctccaattcctaaga

SEQ ID NO: 122792 - DNA, 17 bp, Arabidopsis thaliana
gtctccagagatgtgtc

SEQ ID NO: 122793 - DNA, 17 bp, Arabidopsis thaliana
gtctccagatgatggga

SEQ ID NO: 122794 - DNA, 17 bp, Arabidopsis thaliana
gtctccagattattttt

SEQ ID NO: 122795 - DNA, 17 bp, Arabidopsis thaliana
gtctccagcgcatctgc

SEQ ID NO: 122796 - DNA, 17 bp, Arabidopsis thaliana
gtctccagtcctaggtc

SEQ ID NO: 122797 - DNA, 17 bp, Arabidopsis thaliana
gtctccagtcgggtgca

SEQ ID NO: 122798 - DNA, 17 bp, Arabidopsis thaliana
gtctccagtggcattca

SEQ ID NO: 122799 - DNA, 17 bp, Arabidopsis thaliana
gtctccatgataacttg

SEQ ID NO: 122800 - DNA, 17 bp, Arabidopsis thaliana
gtctccatggtcgaatc

SEQ ID NO: 122801 - DNA, 17 bp, Arabidopsis thaliana
gtctccattagcacact

SEQ ID NO: 122802 - DNA, 17 bp, Arabidopsis thaliana
gtctccattcagagcct

SEQ ID NO: 122803 - DNA, 17 bp, Arabidopsis thaliana
gtctccattttttttgc

SEQ ID NO: 122804 - DNA, 17 bp, Arabidopsis thaliana
gtctcccactgtggtcg

SEQ ID NO: 122805 - DNA, 17 bp, Arabidopsis thaliana
gtctcccagagctgcag

SEQ ID NO: 122806 - DNA, 17 bp, Arabidopsis thaliana
gtctcccgaggcgatat

SEQ ID NO: 122807 - DNA, 17 bp, Arabidopsis thaliana
gtctcccggcagacgca

SEQ ID NO: 122808 - DNA, 17 bp, Arabidopsis thaliana
gtctcccggtaggacct

SEQ ID NO: 122809 - DNA, 17 bp, Arabidopsis thaliana
gtctccctacttggggc

SEQ ID NO: 122810 - DNA, 17 bp, Arabidopsis thaliana
gtctccgaacaatcagg

SEQ ID NO: 122811 - DNA, 17 bp, Arabidopsis thaliana
gtctccgccgtataccg

SEQ ID NO: 122812 - DNA, 17 bp, Arabidopsis thaliana
gtctccgcggtataccg

SEQ ID NO: 122813 - DNA, 17 bp, Arabidopsis thaliana
gtctccggatgtgttag

SEQ ID NO: 122814 - DNA, 17 bp, Arabidopsis thaliana
gtctccggattgcttat

SEQ ID NO: 122815 - DNA, 17 bp, Arabidopsis thaliana
gtctccggcaagtcaga

SEQ ID NO: 122816 - DNA, 17 bp, Arabidopsis thaliana
gtctccggcgaagatca

SEQ ID NO: 122817 - DNA, 17 bp, Arabidopsis thaliana
gtctccggcgtgtgcta

SEQ ID NO: 122818 - DNA, 17 bp, Arabidopsis thaliana
gtctccggggaggcgaa

SEQ ID NO: 122819 - DNA, 17 bp, Arabidopsis thaliana
gtctccggggagttggc

SEQ ID NO: 122820 - DNA, 17 bp, Arabidopsis thaliana
gtctccgtcaagctttc

SEQ ID NO: 122821 - DNA, 17 bp, Arabidopsis thaliana
gtctccgtgttgcatcc

SEQ ID NO: 122822 - DNA, 17 bp, Arabidopsis thaliana
gtctcctacatgacgca

SEQ ID NO: 122823 - DNA, 17 bp, Arabidopsis thaliana
gtctcctactccacgat

SEQ ID NO: 122824 - DNA, 17 bp, Arabidopsis thaliana
gtctcctgacgtctcgg

SEQ ID NO: 122825 - DNA, 17 bp, Arabidopsis thaliana
gtctcctgagggccgaa

SEQ ID NO: 122826 - DNA, 17 bp, Arabidopsis thaliana
gtctcctgtggtccttg

SEQ ID NO: 122827 - DNA, 17 bp, Arabidopsis thaliana
gtctccttagctcagtg

SEQ ID NO: 122828 - DNA, 17 bp, Arabidopsis thaliana
gtctccttctgcagaat

SEQ ID NO: 122829 - DNA, 17 bp, Arabidopsis thaliana
gtctcctttggagaaaa

SEQ ID NO: 122830 - DNA, 17 bp, Arabidopsis thaliana
gtctcgaagcaactatc

SEQ ID NO: 122831 - DNA, 17 bp, Arabidopsis thaliana
gtctcgaagcaactatt

SEQ ID NO: 122832 - DNA, 17 bp, Arabidopsis thaliana
gtctcgaagcgtgtgat

SEQ ID NO: 122833 - DNA, 17 bp, Arabidopsis thaliana
gtctcgaccgaatagat

SEQ ID NO: 122834 - DNA, 17 bp, Arabidopsis thaliana
gtctcgactccaggatt

SEQ ID NO: 122835 - DNA, 17 bp, Arabidopsis thaliana
gtctcgagagtaggatc

SEQ ID NO: 122836 - DNA, 17 bp, Arabidopsis thaliana
gtctcgagggcttcgat

SEQ ID NO: 122837 - DNA, 17 bp, Arabidopsis thaliana
gtctcgattgtgaacca

SEQ ID NO: 122838 - DNA, 17 bp, Arabidopsis thaliana
gtctcgcaagtacgctt

SEQ ID NO: 122839 - DNA, 17 bp, Arabidopsis thaliana
gtctcgcagatgaatta

SEQ ID NO: 122840 - DNA, 17 bp, Arabidopsis thaliana
gtctcgccaaacccgtc

SEQ ID NO: 122841 - DNA, 17 bp, Arabidopsis thaliana
gtctcgcgacaagattt

SEQ ID NO: 122842 - DNA, 17 bp, Arabidopsis thaliana
gtctcgcgatataccgt

SEQ ID NO: 122843 - DNA, 17 bp, Arabidopsis thaliana
gtctcggaacaatcagg

SEQ ID NO: 122844 - DNA, 17 bp, Arabidopsis thaliana
gtctcggaatctccagg

SEQ ID NO: 122845 - DNA, 17 bp, Arabidopsis thaliana
gtctcggacctgatcta

SEQ ID NO: 122846 - DNA, 17 bp, Arabidopsis thaliana
gtctcggacctggtcga

SEQ ID NO: 122847 - DNA, 17 bp, Arabidopsis thaliana
gtctcggagattttggc

SEQ ID NO: 122848 - DNA, 17 bp, Arabidopsis thaliana
gtctcggattcaggccg

SEQ ID NO: 122849 - DNA, 17 bp, Arabidopsis thaliana
gtctcggattcatacgc

SEQ ID NO: 122850 - DNA, 17 bp, Arabidopsis thaliana
gtctcggcctcgaacct

SEQ ID NO: 122851 - DNA, 17 bp, Arabidopsis thaliana
gtctcgggattttggcc

SEQ ID NO: 122852 - DNA, 17 bp, Arabidopsis thaliana
gtctcggggattttggc

SEQ ID NO: 122853 - DNA, 17 bp, Arabidopsis thaliana
gtctcggggcgttacag

SEQ ID NO: 122854 - DNA, 17 bp, Arabidopsis thaliana
gtctcggtacatcttag

SEQ ID NO: 122855 - DNA, 17 bp, Arabidopsis thaliana
gtctcggtattgtcgaa

SEQ ID NO: 122856 - DNA, 17 bp, Arabidopsis thaliana
gtctcggtttgtaagac

SEQ ID NO: 122857 - DNA, 17 bp, Arabidopsis thaliana
gtctcgtcccgtgtact

SEQ ID NO: 122858 - DNA, 17 bp, Arabidopsis thaliana
gtctcgtcgtagtttgg

SEQ ID NO: 122859 - DNA, 17 bp, Arabidopsis thaliana
gtctcgtctcgggttcc

SEQ ID NO: 122860 - DNA, 17 bp, Arabidopsis thaliana
gtctcgtcttcattgct

SEQ ID NO: 122861 - DNA, 17 bp, Arabidopsis thaliana
gtctcgtgtaaaggatg

SEQ ID NO: 122862 - DNA, 17 bp, Arabidopsis thaliana
gtctcgttggctaagtc

SEQ ID NO: 122863 - DNA, 17 bp, Arabidopsis thaliana
gtctcgtttgcttgtcg

SEQ ID NO: 122864 - DNA, 17 bp, Arabidopsis thaliana
gtctcgttttaacattt

SEQ ID NO: 122865 - DNA, 17 bp, Arabidopsis thaliana
gtctcgttttgtctccg

SEQ ID NO: 122866 - DNA, 17 bp, Arabidopsis thaliana
gtctctaaagatccctg

SEQ ID NO: 122867 - DNA, 17 bp, Arabidopsis thaliana
gtctctaaatcgactga

SEQ ID NO: 122868 - DNA, 17 bp, Arabidopsis thaliana
gtctctaacaggttcag

SEQ ID NO: 122869 - DNA, 17 bp, Arabidopsis thaliana
gtctctaagcgcagaat

SEQ ID NO: 122870 - DNA, 17 bp, Arabidopsis thaliana
gtctctaatccactgtg

SEQ ID NO: 122871 - DNA, 17 bp, Arabidopsis thaliana
gtctctaatgacgtggc

SEQ ID NO: 122872 - DNA, 17 bp, Arabidopsis thaliana
gtctctacggtgtaccg

SEQ ID NO: 122873 - DNA, 17 bp, Arabidopsis thaliana
gtctctacttaaggctt

SEQ ID NO: 122874 - DNA, 17 bp, Arabidopsis thaliana
gtctctacttctgcttg

SEQ ID NO: 122875 - DNA, 17 bp, Arabidopsis thaliana
gtctctagagcatagtt

SEQ ID NO: 122876 - DNA, 17 bp, Arabidopsis thaliana
gtctctagatgatgtga

SEQ ID NO: 122877 - DNA, 17 bp, Arabidopsis thaliana
gtctctaggatcacagt

SEQ ID NO: 122878 - DNA, 17 bp, Arabidopsis thaliana
gtctctaggatttgcag

SEQ ID NO: 122879 - DNA, 17 bp, Arabidopsis thaliana
gtctctaggtcaactga

SEQ ID NO: 122880 - DNA, 17 bp, Arabidopsis thaliana
gtctctagttttcgact

SEQ ID NO: 122881 - DNA, 17 bp, Arabidopsis thaliana
gtctctatccaaagcca

SEQ ID NO: 122882 - DNA, 17 bp, Arabidopsis thaliana
gtctctattgggtgatt

SEQ ID NO: 122883 - DNA, 17 bp, Arabidopsis thaliana
gtctctcaatcgattcg

SEQ ID NO: 122884 - DNA, 17 bp, Arabidopsis thaliana
gtctctcacatagtttc

SEQ ID NO: 122885 - DNA, 17 bp, Arabidopsis thaliana
gtctctcacatggtttc

SEQ ID NO: 122886 - DNA, 17 bp, Arabidopsis thaliana
gtctctcacgttcaggc

SEQ ID NO: 122887 - DNA, 17 bp, Arabidopsis thaliana
gtctctcagatccacta

SEQ ID NO: 122888 - DNA, 17 bp, Arabidopsis thaliana
gtctctcagcgattcct

SEQ ID NO: 122889 - DNA, 17 bp, Arabidopsis thaliana
gtctctcagttgtgatt

SEQ ID NO: 122890 - DNA, 17 bp, Arabidopsis thaliana
gtctctccatctcttgt

SEQ ID NO: 122891 - DNA, 17 bp, Arabidopsis thaliana
gtctctcccctgcgagg

SEQ ID NO: 122892 - DNA, 17 bp, Arabidopsis thaliana
gtctctcccggatgttc

SEQ ID NO: 122893 - DNA, 17 bp, Arabidopsis thaliana
gtctctccgacctgccc

SEQ ID NO: 122894 - DNA, 17 bp, Arabidopsis thaliana
gtctctccgccggagca

SEQ ID NO: 122895 - DNA, 17 bp, Arabidopsis thaliana
gtctctcctactcttca

SEQ ID NO: 122896 - DNA, 17 bp, Arabidopsis thaliana
gtctctcctgaccgaac

SEQ ID NO: 122897 - DNA, 17 bp, Arabidopsis thaliana
gtctctcgctcaagcgc

SEQ ID NO: 122898 - DNA, 17 bp, Arabidopsis thaliana
gtctctcgtgctttcta

SEQ ID NO: 122899 - DNA, 17 bp, Arabidopsis thaliana
gtctctctacggccaca

SEQ ID NO: 122900 - DNA, 17 bp, Arabidopsis thaliana
gtctctctactaccagt

SEQ ID NO: 122901 - DNA, 17 bp, Arabidopsis thaliana
gtctctctcacgctacg

SEQ ID NO: 122902 - DNA, 17 bp, Arabidopsis thaliana
gtctctctcaggtttgc

SEQ ID NO: 122903 - DNA, 17 bp, Arabidopsis thaliana
gtctctctcgaaaggcg

SEQ ID NO: 122904 - DNA, 17 bp, Arabidopsis thaliana
gtctctctctcgctttg

SEQ ID NO: 122905 - DNA, 17 bp, Arabidopsis thaliana
gtctctcttcatggtgt

SEQ ID NO: 122906 - DNA, 17 bp, Arabidopsis thaliana
gtctctcttctgctgac

SEQ ID NO: 122907 - DNA, 17 bp, Arabidopsis thaliana
gtctctcttgccagttt

SEQ ID NO: 122908 - DNA, 17 bp, Arabidopsis thaliana
gtctctgacaatggttt

SEQ ID NO: 122909 - DNA, 17 bp, Arabidopsis thaliana
gtctctgagtgagctcc

SEQ ID NO: 122910 - DNA, 17 bp, Arabidopsis thaliana
gtctctgatcaacactg

SEQ ID NO: 122911 - DNA, 17 bp, Arabidopsis thaliana
gtctctgatgacatggc

SEQ ID NO: 122912 - DNA, 17 bp, Arabidopsis thaliana
gtctctgattcgagggg

SEQ ID NO: 122913 - DNA, 17 bp, Arabidopsis thaliana
gtctctgcaatggacat

SEQ ID NO: 122914 - DNA, 17 bp, Arabidopsis thaliana
gtctctgctcgggtatg

SEQ ID NO: 122915 - DNA, 17 bp, Arabidopsis thaliana
gtctctgctgattgtct

SEQ ID NO: 122916 - DNA, 17 bp, Arabidopsis thaliana
gtctctggatgatggtt

SEQ ID NO: 122917 - DNA, 17 bp, Arabidopsis thaliana
gtctctggcagctatac

SEQ ID NO: 122918 - DNA, 17 bp, Arabidopsis thaliana
gtctctggcagctatag

SEQ ID NO: 122919 - DNA, 17 bp, Arabidopsis thaliana
gtctctggccagacgta

SEQ ID NO: 122920 - DNA, 17 bp, Arabidopsis thaliana
gtctctggtgtacactc

SEQ ID NO: 122921 - DNA, 17 bp, Arabidopsis thaliana
gtctctggttactgtcg

SEQ ID NO: 122922 - DNA, 17 bp, Arabidopsis thaliana
gtctctggttcaaatcc

SEQ ID NO: 122923 - DNA, 17 bp, Arabidopsis thaliana
gtctctggtttcagcgg

SEQ ID NO: 122924 - DNA, 17 bp, Arabidopsis thaliana
gtctctggtttctcttc

SEQ ID NO: 122925 - DNA, 17 bp, Arabidopsis thaliana
gtctctgtgctggcgac

SEQ ID NO: 122926 - DNA, 17 bp, Arabidopsis thaliana
gtctctgtgttgttcgt

SEQ ID NO: 122927 - DNA, 17 bp, Arabidopsis thaliana
gtctcttagaccaactc

SEQ ID NO: 122928 - DNA, 17 bp, Arabidopsis thaliana
gtctcttagatctgtcg

SEQ ID NO: 122929 - DNA, 17 bp, Arabidopsis thaliana
gtctcttagatgttgac

SEQ ID NO: 122930 - DNA, 17 bp, Arabidopsis thaliana
gtctcttaggagaatgt

SEQ ID NO: 122931 - DNA, 17 bp, Arabidopsis thaliana
gtctcttagttgcagac

SEQ ID NO: 122932 - DNA, 17 bp, Arabidopsis thaliana
gtctcttcaggtgtctc

SEQ ID NO: 122933 - DNA, 17 bp, Arabidopsis thaliana
gtctcttccagaaacct

SEQ ID NO: 122934 - DNA, 17 bp, Arabidopsis thaliana
gtctcttccgacattcg

SEQ ID NO: 122935 - DNA, 17 bp, Arabidopsis thaliana
gtctcttcgttaggccc

SEQ ID NO: 122936 - DNA, 17 bp, Arabidopsis thaliana
gtctcttcgttaggtga

SEQ ID NO: 122937 - DNA, 17 bp, Arabidopsis thaliana
gtctcttctaaggtctg

SEQ ID NO: 122938 - DNA, 17 bp, Arabidopsis thaliana
gtctcttctacaaacct

SEQ ID NO: 122939 - DNA, 17 bp, Arabidopsis thaliana
gtctcttctatagttgc

SEQ ID NO: 122940 - DNA, 17 bp, Arabidopsis thaliana
gtctcttctgcgcattg

SEQ ID NO: 122941 - DNA, 17 bp, Arabidopsis thaliana
gtctcttgaagaatgac

SEQ ID NO: 122942 - DNA, 17 bp, Arabidopsis thaliana
gtctcttgaccagcttg

SEQ ID NO: 122943 - DNA, 17 bp, Arabidopsis thaliana
gtctcttgacttactct

SEQ ID NO: 122944 - DNA, 17 bp, Arabidopsis thaliana
gtctcttgattgctttt

SEQ ID NO: 122945 - DNA, 17 bp, Arabidopsis thaliana
gtctcttgttagtggcg

SEQ ID NO: 122946 - DNA, 17 bp, Arabidopsis thaliana
gtctctttactcgaccg

SEQ ID NO: 122947 - DNA, 17 bp, Arabidopsis thaliana
gtctctttactcgactg

SEQ ID NO: 122948 - DNA, 17 bp, Arabidopsis thaliana
gtctctttggatttggc

SEQ ID NO: 122949 - DNA, 17 bp, Arabidopsis thaliana
gtctctttggccgagtg

SEQ ID NO: 122950 - DNA, 17 bp, Arabidopsis thaliana
gtctcttttcagttggt

SEQ ID NO: 122951 - DNA, 17 bp, Arabidopsis thaliana
gtctcttttggaagatt

SEQ ID NO: 122952 - DNA, 17 bp, Arabidopsis thaliana
gtctcttttggtgcgca

SEQ ID NO: 122953 - DNA, 17 bp, Arabidopsis thaliana
gtctcttttgtggttcg

SEQ ID NO: 122954 - DNA, 17 bp, Arabidopsis thaliana
gtctgaaatgtctcggg

SEQ ID NO: 122955 - DNA, 17 bp, Arabidopsis thaliana
gtctgaaatgtggatct

SEQ ID NO: 122956 - DNA, 17 bp, Arabidopsis thaliana
gtctgaaattgacaagg

SEQ ID NO: 122957 - DNA, 17 bp, Arabidopsis thaliana
gtctgaaattgagagcg

SEQ ID NO: 122958 - DNA, 17 bp, Arabidopsis thaliana
gtctgaacccagcggag

SEQ ID NO: 122959 - DNA, 17 bp, Arabidopsis thaliana
gtctgaaccgcaccgca

SEQ ID NO: 122960 - DNA, 17 bp, Arabidopsis thaliana
gtctgaatacgaagccc

SEQ ID NO: 122961 - DNA, 17 bp, Arabidopsis thaliana
gtctgaatggtaaccgc

SEQ ID NO: 122962 - DNA, 17 bp, Arabidopsis thaliana
gtctgaatggtgactgc

SEQ ID NO: 122963 - DNA, 17 bp, Arabidopsis thaliana
gtctgaatgtgcagcgc

SEQ ID NO: 122964 - DNA, 17 bp, Arabidopsis thaliana
gtctgaattctactctt

SEQ ID NO: 122965 - DNA, 17 bp, Arabidopsis thaliana
gtctgacaaccgtccga

SEQ ID NO: 122966 - DNA, 17 bp, Arabidopsis thaliana
gtctgacacaggcggcc

SEQ ID NO: 122967 - DNA, 17 bp, Arabidopsis thaliana
gtctgacaccatggcta

SEQ ID NO: 122968 - DNA, 17 bp, Arabidopsis thaliana
gtctgacagaaagaaag

SEQ ID NO: 122969 - DNA, 17 bp, Arabidopsis thaliana
gtctgacagaattaacg

SEQ ID NO: 122970 - DNA, 17 bp, Arabidopsis thaliana
gtctgacatgtgtgcga

SEQ ID NO: 122971 - DNA, 17 bp, Arabidopsis thaliana
gtctgacattgccgtat

SEQ ID NO: 122972 - DNA, 17 bp, Arabidopsis thaliana
gtctgacccttattaga

SEQ ID NO: 122973 - DNA, 17 bp, Arabidopsis thaliana
gtctgaccggttagaca

SEQ ID NO: 122974 - DNA, 17 bp, Arabidopsis thaliana
gtctgacgcgtcttgtg

SEQ ID NO: 122975 - DNA, 17 bp, Arabidopsis thaliana
gtctgactgttaaactg

SEQ ID NO: 122976 - DNA, 17 bp, Arabidopsis thaliana
gtctgacttgggtatag

SEQ ID NO: 122977 - DNA, 17 bp, Arabidopsis thaliana
gtctgagaagggttcga

SEQ ID NO: 122978 - DNA, 17 bp, Arabidopsis thaliana
gtctgagagaccacccc

SEQ ID NO: 122979 - DNA, 17 bp, Arabidopsis thaliana
gtctgagagatgtgtga

SEQ ID NO: 122980 - DNA, 17 bp, Arabidopsis thaliana
gtctgagagattacggg

SEQ ID NO: 122981 - DNA, 17 bp, Arabidopsis thaliana
gtctgagattatcgcca

SEQ ID NO: 122982 - DNA, 17 bp, Arabidopsis thaliana
gtctgagctaaacctgg

SEQ ID NO: 122983 - DNA, 17 bp, Arabidopsis thaliana
gtctgagctaaatcgat

SEQ ID NO: 122984 - DNA, 17 bp, Arabidopsis thaliana
gtctgagctcacagcat

SEQ ID NO: 122985 - DNA, 17 bp, Arabidopsis thaliana
gtctgagctcgttgttg

SEQ ID NO: 122986 - DNA, 17 bp, Arabidopsis thaliana
gtctgaggggattacga

SEQ ID NO: 122987 - DNA, 17 bp, Arabidopsis thaliana
gtctgagtagtcagctt

SEQ ID NO: 122988 - DNA, 17 bp, Arabidopsis thaliana
gtctgagtagtctgctt

SEQ ID NO: 122989 - DNA, 17 bp, Arabidopsis thaliana
gtctgagtggtgtagtc

SEQ ID NO: 122990 - DNA, 17 bp, Arabidopsis thaliana
gtctgagtttgtctaag

SEQ ID NO: 122991 - DNA, 17 bp, Arabidopsis thaliana
gtctgataactcgacgg

SEQ ID NO: 122992 - DNA, 17 bp, Arabidopsis thaliana
gtctgatcacatcctga

SEQ ID NO: 122993 - DNA, 17 bp, Arabidopsis thaliana
gtctgatcagcctgtca

SEQ ID NO: 122994 - DNA, 17 bp, Arabidopsis thaliana
gtctgatcagcctgtga

SEQ ID NO: 122995 - DNA, 17 bp, Arabidopsis thaliana
gtctgatccattgacgg

SEQ ID NO: 122996 - DNA, 17 bp, Arabidopsis thaliana
gtctgatccgttgacgg

SEQ ID NO: 122997 - DNA, 17 bp, Arabidopsis thaliana
gtctgatccgtttttac

SEQ ID NO: 122998 - DNA, 17 bp, Arabidopsis thaliana
gtctgatccttgttgca

SEQ ID NO: 122999 - DNA, 17 bp, Arabidopsis thaliana
gtctgatcctttcacga

SEQ ID NO: 123000 - DNA, 17 bp, Arabidopsis thaliana
gtctgatcttagaccta

SEQ ID NO: 123001 - DNA, 17 bp, Arabidopsis thaliana
gtctgatgtggatttcg

SEQ ID NO: 123002 - DNA, 17 bp, Arabidopsis thaliana
gtctgattcaccgtccg

SEQ ID NO: 123003 - DNA, 17 bp, Arabidopsis thaliana
gtctgattcacttctaa

SEQ ID NO: 123004 - DNA, 17 bp, Arabidopsis thaliana
gtctgattcagtagtga

SEQ ID NO: 123005 - DNA, 17 bp, Arabidopsis thaliana
gtctgattcgagggggt

SEQ ID NO: 123006 - DNA, 17 bp, Arabidopsis thaliana
gtctgattcgtacactt

SEQ ID NO: 123007 - DNA, 17 bp, Arabidopsis thaliana
gtctgattggtaaccaa

SEQ ID NO: 123008 - DNA, 17 bp, Arabidopsis thaliana
gtctgatttcaggggat

SEQ ID NO: 123009 - DNA, 17 bp, Arabidopsis thaliana
gtctgcagcggttattg

SEQ ID NO: 123010 - DNA, 17 bp, Arabidopsis thaliana
gtctgccatctttgtga

SEQ ID NO: 123011 - DNA, 17 bp, Arabidopsis thaliana
gtctgcctgggtgccag

SEQ ID NO: 123012 - DNA, 17 bp, Arabidopsis thaliana
gtctgcctgggtgtcac

SEQ ID NO: 123013 - DNA, 17 bp, Arabidopsis thaliana
gtctgcctgggtgtcag

SEQ ID NO: 123014 - DNA, 17 bp, Arabidopsis thaliana
gtctgcgacgcgacagt

SEQ ID NO: 123015 - DNA, 17 bp, Arabidopsis thaliana
gtctgcgatttagtcca

SEQ ID NO: 123016 - DNA, 17 bp, Arabidopsis thaliana
gtctgcgcctttgtgtc

SEQ ID NO: 123017 - DNA, 17 bp, Arabidopsis thaliana
gtctgcgctctttggac

SEQ ID NO: 123018 - DNA, 17 bp, Arabidopsis thaliana
gtctgcggatcgatcta

SEQ ID NO: 123019 - DNA, 17 bp, Arabidopsis thaliana
gtctgcgggaagcaggc

SEQ ID NO: 123020 - DNA, 17 bp, Arabidopsis thaliana
gtctgcggtttagtcca

SEQ ID NO: 123021 - DNA, 17 bp, Arabidopsis thaliana
gtctgcggtttagtcta

SEQ ID NO: 123022 - DNA, 17 bp, Arabidopsis thaliana
gtctgcgtagatttcac

SEQ ID NO: 123023 - DNA, 17 bp, Arabidopsis thaliana
gtctgcgttaggacaat

SEQ ID NO: 123024 - DNA, 17 bp, Arabidopsis thaliana
gtctgctaacacctgtt

SEQ ID NO: 123025 - DNA, 17 bp, Arabidopsis thaliana
gtctgctaacgttgcgg

SEQ ID NO: 123026 - DNA, 17 bp, Arabidopsis thaliana
gtctgctagaggacgca

SEQ ID NO: 123027 - DNA, 17 bp, Arabidopsis thaliana
gtctgctcaaggaccta

SEQ ID NO: 123028 - DNA, 17 bp, Arabidopsis thaliana
gtctgctctctcttcaa

SEQ ID NO: 123029 - DNA, 17 bp, Arabidopsis thaliana
gtctgctgcacagtgca

SEQ ID NO: 123030 - DNA, 17 bp, Arabidopsis thaliana
gtctgcttaggtgtgtg

SEQ ID NO: 123031 - DNA, 17 bp, Arabidopsis thaliana
gtctgcttcttcagcta

SEQ ID NO: 123032 - DNA, 17 bp, Arabidopsis thaliana
gtctgcttgggtgtcac

SEQ ID NO: 123033 - DNA, 17 bp, Arabidopsis thaliana
gtctgcttgttgctcac

SEQ ID NO: 123034 - DNA, 17 bp, Arabidopsis thaliana
gtctggaaaattcggcc

SEQ ID NO: 123035 - DNA, 17 bp, Arabidopsis thaliana
gtctggaaccgcagttt

SEQ ID NO: 123036 - DNA, 17 bp, Arabidopsis thaliana
gtctggaacgattacgg

SEQ ID NO: 123037 - DNA, 17 bp, Arabidopsis thaliana
gtctggacatccattct

SEQ ID NO: 123038 - DNA, 17 bp, Arabidopsis thaliana
gtctggaccaccgcgag

SEQ ID NO: 123039 - DNA, 17 bp, Arabidopsis thaliana
gtctggaggattatggc

SEQ ID NO: 123040 - DNA, 17 bp, Arabidopsis thaliana
gtctggatgatggaaat

SEQ ID NO: 123041 - DNA, 17 bp, Arabidopsis thaliana
gtctggatggactgctg

SEQ ID NO: 123042 - DNA, 17 bp, Arabidopsis thaliana
gtctggatggtgtagtc

SEQ ID NO: 123043 - DNA, 17 bp, Arabidopsis thaliana
gtctggatggtgtagtg

SEQ ID NO: 123044 - DNA, 17 bp, Arabidopsis thaliana
gtctggccgatccgatc

SEQ ID NO: 123045 - DNA, 17 bp, Arabidopsis thaliana
gtctggccgatctgatc

SEQ ID NO: 123046 - DNA, 17 bp, Arabidopsis thaliana
gtctggcctggtgagtg

SEQ ID NO: 123047 - DNA, 17 bp, Arabidopsis thaliana
gtctggcgacagactgt

SEQ ID NO: 123048 - DNA, 17 bp, Arabidopsis thaliana
gtctggcgatttcgagc

SEQ ID NO: 123049 - DNA, 17 bp, Arabidopsis thaliana
gtctggcggtggaccga

SEQ ID NO: 123050 - DNA, 17 bp, Arabidopsis thaliana
gtctggctctgttagcg

SEQ ID NO: 123051 - DNA, 17 bp, Arabidopsis thaliana
gtctgggaactggctcg

SEQ ID NO: 123052 - DNA, 17 bp, Arabidopsis thaliana
gtctgggaactggtggc

SEQ ID NO: 123053 - DNA, 17 bp, Arabidopsis thaliana
gtctgggaagatcacgg

SEQ ID NO: 123054 - DNA, 17 bp, Arabidopsis thaliana
gtctgggacctcactca

SEQ ID NO: 123055 - DNA, 17 bp, Arabidopsis thaliana
gtctgggactaggttaa

SEQ ID NO: 123056 - DNA, 17 bp, Arabidopsis thaliana
gtctgggaggatcacgg

SEQ ID NO: 123057 - DNA, 17 bp, Arabidopsis thaliana
gtctgggagtccgagcc

SEQ ID NO: 123058 - DNA, 17 bp, Arabidopsis thaliana
gtctgggattacggact

SEQ ID NO: 123059 - DNA, 17 bp, Arabidopsis thaliana
gtctgggcaccaagcgg

SEQ ID NO: 123060 - DNA, 17 bp, Arabidopsis thaliana
gtctgggctcaaattac

SEQ ID NO: 123061 - DNA, 17 bp, Arabidopsis thaliana
gtctggggcggcacatc

SEQ ID NO: 123062 - DNA, 17 bp, Arabidopsis thaliana
gtctgggggattacggg

SEQ ID NO: 123063 - DNA, 17 bp, Arabidopsis thaliana
gtctgggtccattgggc

SEQ ID NO: 123064 - DNA, 17 bp, Arabidopsis thaliana
gtctgggtcgtgtagtc

SEQ ID NO: 123065 - DNA, 17 bp, Arabidopsis thaliana
gtctgggtggtgtagtc

SEQ ID NO: 123066 - DNA, 17 bp, Arabidopsis thaliana
gtctgggtggtgtagtg

SEQ ID NO: 123067 - DNA, 17 bp, Arabidopsis thaliana
gtctgggtgtgtagtcg

SEQ ID NO: 123068 - DNA, 17 bp, Arabidopsis thaliana
gtctgggttgtgtagtc

SEQ ID NO: 123069 - DNA, 17 bp, Arabidopsis thaliana
gtctgggttgtgtagtg

SEQ ID NO: 123070 - DNA, 17 bp, Arabidopsis thaliana
gtctggtaaaccagcgg

SEQ ID NO: 123071 - DNA, 17 bp, Arabidopsis thaliana
gtctggtaggattacgg

SEQ ID NO: 123072 - DNA, 17 bp, Arabidopsis thaliana
gtctggtcgtaatcggg

SEQ ID NO: 123073 - DNA, 17 bp, Arabidopsis thaliana
gtctggtgaaactgata

SEQ ID NO: 123074 - DNA, 17 bp, Arabidopsis thaliana
gtctggtgagcggtctt

SEQ ID NO: 123075 - DNA, 17 bp, Arabidopsis thaliana
gtctggtgagttttttg

SEQ ID NO: 123076 - DNA, 17 bp, Arabidopsis thaliana
gtctggtgccaacagcc

SEQ ID NO: 123077 - DNA, 17 bp, Arabidopsis thaliana
gtctggtgccagcagcc

SEQ ID NO: 123078 - DNA, 17 bp, Arabidopsis thaliana
gtctggtgcctgcagcc

SEQ ID NO: 123079 - DNA, 17 bp, Arabidopsis thaliana
gtctggtggaacactgg

SEQ ID NO: 123080 - DNA, 17 bp, Arabidopsis thaliana
gtctggtggcttcaccc

SEQ ID NO: 123081 - DNA, 17 bp, Arabidopsis thaliana
gtctggtggcttctgct

SEQ ID NO: 123082 - DNA, 17 bp, Arabidopsis thaliana
gtctggttcagaggcat

SEQ ID NO: 123083 - DNA, 17 bp, Arabidopsis thaliana
gtctggttgagtgcgga

SEQ ID NO: 123084 - DNA, 17 bp, Arabidopsis thaliana
gtctgtaagctttgtgg

SEQ ID NO: 123085 - DNA, 17 bp, Arabidopsis thaliana
gtctgtaatcttctgag

SEQ ID NO: 123086 - DNA, 17 bp, Arabidopsis thaliana
gtctgtaccaccgcgag

SEQ ID NO: 123087 - DNA, 17 bp, Arabidopsis thaliana
gtctgtacccgatctta

SEQ ID NO: 123088 - DNA, 17 bp, Arabidopsis thaliana
gtctgtaccttctcaca

SEQ ID NO: 123089 - DNA, 17 bp, Arabidopsis thaliana
gtctgtagaacagaggc

SEQ ID NO: 123090 - DNA, 17 bp, Arabidopsis thaliana
gtctgtagcgatttatt

SEQ ID NO: 123091 - DNA, 17 bp, Arabidopsis thaliana
gtctgtagctcaggccc

SEQ ID NO: 123092 - DNA, 17 bp, Arabidopsis thaliana
gtctgtagctgaggcga

SEQ ID NO: 123093 - DNA, 17 bp, Arabidopsis thaliana
gtctgtaggtggcttgc

SEQ ID NO: 123094 - DNA, 17 bp, Arabidopsis thaliana
gtctgtaggtggctttt

SEQ ID NO: 123095 - DNA, 17 bp, Arabidopsis thaliana
gtctgtaggttgcaggt

SEQ ID NO: 123096 - DNA, 17 bp, Arabidopsis thaliana
gtctgtagtccaacggt

SEQ ID NO: 123097 - DNA, 17 bp, Arabidopsis thaliana
gtctgtcagtggttcga

SEQ ID NO: 123098 - DNA, 17 bp, Arabidopsis thaliana
gtctgtcagttaggcct

SEQ ID NO: 123099 - DNA, 17 bp, Arabidopsis thaliana
gtctgtcagttgagcct

SEQ ID NO: 123100 - DNA, 17 bp, Arabidopsis thaliana
gtctgtcagttggactt

SEQ ID NO: 123101 - DNA, 17 bp, Arabidopsis thaliana
gtctgtcagttgggctt

SEQ ID NO: 123102 - DNA, 17 bp, Arabidopsis thaliana
gtctgtcagttgggtct

SEQ ID NO: 123103 - DNA, 17 bp, Arabidopsis thaliana
gtctgtcagttgggttt

SEQ ID NO: 123104 - DNA, 17 bp, Arabidopsis thaliana
gtctgtcatcggttcta

SEQ ID NO: 123105 - DNA, 17 bp, Arabidopsis thaliana
gtctgtccgatccgtct

SEQ ID NO: 123106 - DNA, 17 bp, Arabidopsis thaliana
gtctgtcgatcacgctc

SEQ ID NO: 123107 - DNA, 17 bp, Arabidopsis thaliana
gtctgtcgctagactca

SEQ ID NO: 123108 - DNA, 17 bp, Arabidopsis thaliana
gtctgtcgctgaaactg

SEQ ID NO: 123109 - DNA, 17 bp, Arabidopsis thaliana
gtctgtcggttcggcca

SEQ ID NO: 123110 - DNA, 17 bp, Arabidopsis thaliana
gtctgtgaaactggttt

SEQ ID NO: 123111 - DNA, 17 bp, Arabidopsis thaliana
gtctgtgcgatctcaga

SEQ ID NO: 123112 - DNA, 17 bp, Arabidopsis thaliana
gtctgtggagattacgg

SEQ ID NO: 123113 - DNA, 17 bp, Arabidopsis thaliana
gtctgtggatgtcggat

SEQ ID NO: 123114 - DNA, 17 bp, Arabidopsis thaliana
gtctgtgggtagctcat

SEQ ID NO: 123115 - DNA, 17 bp, Arabidopsis thaliana
gtctgtggtacgatcga

SEQ ID NO: 123116 - DNA, 17 bp, Arabidopsis thaliana
gtctgtggtacgctttc

SEQ ID NO: 123117 - DNA, 17 bp, Arabidopsis thaliana
gtctgtggtgcaaataa

SEQ ID NO: 123118 - DNA, 17 bp, Arabidopsis thaliana
gtctgtggtgcatggcc

SEQ ID NO: 123119 - DNA, 17 bp, Arabidopsis thaliana
gtctgtgtcatggatgt

SEQ ID NO: 123120 - DNA, 17 bp, Arabidopsis thaliana
gtctgttaacgcgcatg

SEQ ID NO: 123121 - DNA, 17 bp, Arabidopsis thaliana
gtctgttaatcgaccag

SEQ ID NO: 123122 - DNA, 17 bp, Arabidopsis thaliana
gtctgttactccacctg

SEQ ID NO: 123123 - DNA, 17 bp, Arabidopsis thaliana
gtctgttactcgacctg

SEQ ID NO: 123124 - DNA, 17 bp, Arabidopsis thaliana
gtctgttacttggatgt

SEQ ID NO: 123125 - DNA, 17 bp, Arabidopsis thaliana
gtctgttcattaacgcg

SEQ ID NO: 123126 - DNA, 17 bp, Arabidopsis thaliana
gtctgttcccatttgcg

SEQ ID NO: 123127 - DNA, 17 bp, Arabidopsis thaliana
gtctgttccgcactaac

SEQ ID NO: 123128 - DNA, 17 bp, Arabidopsis thaliana
gtctgttctgaggcgta

SEQ ID NO: 123129 - DNA, 17 bp, Arabidopsis thaliana
gtctgttgaagcacgga

SEQ ID NO: 123130 - DNA, 17 bp, Arabidopsis thaliana
gtctgttgatgaatgct

SEQ ID NO: 123131 - DNA, 17 bp, Arabidopsis thaliana
gtctgttgccagcgctt

SEQ ID NO: 123132 - DNA, 17 bp, Arabidopsis thaliana
gtctgttgctatggtgc

SEQ ID NO: 123133 - DNA, 17 bp, Arabidopsis thaliana
gtctgttggtgccaaga

SEQ ID NO: 123134 - DNA, 17 bp, Arabidopsis thaliana
gtctgtttgatcatttg

SEQ ID NO: 123135 - DNA, 17 bp, Arabidopsis thaliana
gtctgttttgctccaga

SEQ ID NO: 123136 - DNA, 17 bp, Arabidopsis thaliana
gtcttaaaacccctttt

SEQ ID NO: 123137 - DNA, 17 bp, Arabidopsis thaliana
gtcttaaaatttgtcca

SEQ ID NO: 123138 - DNA, 17 bp, Arabidopsis thaliana
gtcttaaacagcgacca

SEQ ID NO: 123139 - DNA, 17 bp, Arabidopsis thaliana
gtcttaaagcaggcgat

SEQ ID NO: 123140 - DNA, 17 bp, Arabidopsis thaliana
gtcttaaatgcgacggt

SEQ ID NO: 123141 - DNA, 17 bp, Arabidopsis thaliana
gtcttaaatgcgatggt

SEQ ID NO: 123142 - DNA, 17 bp, Arabidopsis thaliana
gtcttaagagagaacga

SEQ ID NO: 123143 - DNA, 17 bp, Arabidopsis thaliana
gtcttaagtcgcatcct

SEQ ID NO: 123144 - DNA, 17 bp, Arabidopsis thaliana
gtcttaatcgcatcctg

SEQ ID NO: 123145 - DNA, 17 bp, Arabidopsis thaliana
gtcttaatgatccgacg

SEQ ID NO: 123146 - DNA, 17 bp, Arabidopsis thaliana
gtcttaattggccgggt

SEQ ID NO: 123147 - DNA, 17 bp, Arabidopsis thaliana
gtcttacagcccaacca

SEQ ID NO: 123148 - DNA, 17 bp, Arabidopsis thaliana
gtcttacatttacactt

SEQ ID NO: 123149 - DNA, 17 bp, Arabidopsis thaliana
gtcttacccttatcctg

SEQ ID NO: 123150 - DNA, 17 bp, Arabidopsis thaliana
gtcttaccgcactcggt

SEQ ID NO: 123151 - DNA, 17 bp, Arabidopsis thaliana
gtcttacgacgagctgc

SEQ ID NO: 123152 - DNA, 17 bp, Arabidopsis thaliana
gtcttacgttcaccaaa

SEQ ID NO: 123153 - DNA, 17 bp, Arabidopsis thaliana
gtcttacttaatccaac

SEQ ID NO: 123154 - DNA, 17 bp, Arabidopsis thaliana
gtcttacttccatccat

SEQ ID NO: 123155 - DNA, 17 bp, Arabidopsis thaliana
gtcttagacttctccat

SEQ ID NO: 123156 - DNA, 17 bp, Arabidopsis thaliana
gtcttagaggattcgag

SEQ ID NO: 123157 - DNA, 17 bp, Arabidopsis thaliana
gtcttagccatacacac

SEQ ID NO: 123158 - DNA, 17 bp, Arabidopsis thaliana
gtcttagcccatcctgt

SEQ ID NO: 123159 - DNA, 17 bp, Arabidopsis thaliana
gtcttagccgcatcctt

SEQ ID NO: 123160 - DNA, 17 bp, Arabidopsis thaliana
gtcttagccgcattctt

SEQ ID NO: 123161 - DNA, 17 bp, Arabidopsis thaliana
gtcttagcgcactgtag

SEQ ID NO: 123162 - DNA, 17 bp, Arabidopsis thaliana
gtcttagcgcatcctgt

SEQ ID NO: 123163 - DNA, 17 bp, Arabidopsis thaliana
gtcttagcgccctgtag

SEQ ID NO: 123164 - DNA, 17 bp, Arabidopsis thaliana
gtcttagctcaatggta

SEQ ID NO: 123165 - DNA, 17 bp, Arabidopsis thaliana
gtcttaggagacaccgg

SEQ ID NO: 123166 - DNA, 17 bp, Arabidopsis thaliana
gtcttaggcattgtaga

SEQ ID NO: 123167 - DNA, 17 bp, Arabidopsis thaliana
gtcttaggcgcctacta

SEQ ID NO: 123168 - DNA, 17 bp, Arabidopsis thaliana
gtcttaggctatctcca

SEQ ID NO: 123169 - DNA, 17 bp, Arabidopsis thaliana
gtcttaggcttccatct

SEQ ID NO: 123170 - DNA, 17 bp, Arabidopsis thaliana
gtcttaggtcagatccc

SEQ ID NO: 123171 - DNA, 17 bp, Arabidopsis thaliana
gtcttaggtcagattcc

SEQ ID NO: 123172 - DNA, 17 bp, Arabidopsis thaliana
gtcttaggtcggattcc

SEQ ID NO: 123173 - DNA, 17 bp, Arabidopsis thaliana
gtcttaggttcttagca

SEQ ID NO: 123174 - DNA, 17 bp, Arabidopsis thaliana
gtcttaggttggtcatg

SEQ ID NO: 123175 - DNA, 17 bp, Arabidopsis thaliana
gtcttagtcacatcctg

SEQ ID NO: 123176 - DNA, 17 bp, Arabidopsis thaliana
gtcttagtcagtcattg

SEQ ID NO: 123177 - DNA, 17 bp, Arabidopsis thaliana
gtcttagtcatcctgta

SEQ ID NO: 123178 - DNA, 17 bp, Arabidopsis thaliana
gtcttagtccatcctgt

SEQ ID NO: 123179 - DNA, 17 bp, Arabidopsis thaliana
gtcttagtccatccttt

SEQ ID NO: 123180 - DNA, 17 bp, Arabidopsis thaliana
gtcttagtcccatcctg

SEQ ID NO: 123181 - DNA, 17 bp, Arabidopsis thaliana
gtcttagtccctgtaga

SEQ ID NO: 123182 - DNA, 17 bp, Arabidopsis thaliana
gtcttagtccgcatcct

SEQ ID NO: 123183 - DNA, 17 bp, Arabidopsis thaliana
gtcttagtcgaccctgt

SEQ ID NO: 123184 - DNA, 17 bp, Arabidopsis thaliana
gtcttagtcgatccgta

SEQ ID NO: 123185 - DNA, 17 bp, Arabidopsis thaliana
gtcttagtcgatcctct

SEQ ID NO: 123186 - DNA, 17 bp, Arabidopsis thaliana
gtcttagtcgatcctgt

SEQ ID NO: 123187 - DNA, 17 bp, Arabidopsis thaliana
gtcttagtcgatccttt

SEQ ID NO: 123188 - DNA, 17 bp, Arabidopsis thaliana
gtcttagtcgatctgta

SEQ ID NO: 123189 - DNA, 17 bp, Arabidopsis thaliana
gtcttagtcgcaacctg

SEQ ID NO: 123190 - DNA, 17 bp, Arabidopsis thaliana
gtcttagtcgcaatcct

SEQ ID NO: 123191 - DNA, 17 bp, Arabidopsis thaliana
gtcttagtcgcaccctc

SEQ ID NO: 123192 - DNA, 17 bp, Arabidopsis thaliana
gtcttagtcgcaccctg

SEQ ID NO: 123193 - DNA, 17 bp, Arabidopsis thaliana
gtcttagtcgcacctat

SEQ ID NO: 123194 - DNA, 17 bp, Arabidopsis thaliana
gtcttagtcgcacctct

SEQ ID NO: 123195 - DNA, 17 bp, Arabidopsis thaliana
gtcttagtcgcacctgc

SEQ ID NO: 123196 - DNA, 17 bp, Arabidopsis thaliana
gtcttagtcgcacctgt

SEQ ID NO: 123197 - DNA, 17 bp, Arabidopsis thaliana
gtcttagtcgcaccttt

SEQ ID NO: 123198 - DNA, 17 bp, Arabidopsis thaliana
gtcttagtcgcactcta

SEQ ID NO: 123199 - DNA, 17 bp, Arabidopsis thaliana
gtcttagtcgcactggt

SEQ ID NO: 123200 - DNA, 17 bp, Arabidopsis thaliana
gtcttagtcgcactgta

SEQ ID NO: 123201 - DNA, 17 bp, Arabidopsis thaliana
gtcttagtcgcagcctg

SEQ ID NO: 123202 - DNA, 17 bp, Arabidopsis thaliana
gtcttagtcgcagtaga

SEQ ID NO: 123203 - DNA, 17 bp, Arabidopsis thaliana
gtcttagtcgcataccg

SEQ ID NO: 123204 - DNA, 17 bp, Arabidopsis thaliana
gtcttagtcgcatactg

SEQ ID NO: 123205 - DNA, 17 bp, Arabidopsis thaliana
gtcttagtcgcatagat

SEQ ID NO: 123206 - DNA, 17 bp, Arabidopsis thaliana
gtcttagtcgcatccac

SEQ ID NO: 123207 - DNA, 17 bp, Arabidopsis thaliana
gtcttagtcgcatccag

SEQ ID NO: 123208 - DNA, 17 bp, Arabidopsis thaliana
gtcttagtcgcatccca

SEQ ID NO: 123209 - DNA, 17 bp, Arabidopsis thaliana
gtcttagtcgcatccgg

SEQ ID NO: 123210 - DNA, 17 bp, Arabidopsis thaliana
gtcttagtcgcatccgt

SEQ ID NO: 123211 - DNA, 17 bp, Arabidopsis thaliana
gtcttagtcgcatccta

SEQ ID NO: 123212 - DNA, 17 bp, Arabidopsis thaliana
gtcttagtcgcatcctc

SEQ ID NO: 123213 - DNA, 17 bp, Arabidopsis thaliana
gtcttagtcgcatcctg

SEQ ID NO: 123214 - DNA, 17 bp, Arabidopsis thaliana
gtcttagtcgcatcctt

SEQ ID NO: 123215 - DNA, 17 bp, Arabidopsis thaliana
gtcttagtcgcatctgt

SEQ ID NO: 123216 - DNA, 17 bp, Arabidopsis thaliana
gtcttagtcgcatcttg

SEQ ID NO: 123217 - DNA, 17 bp, Arabidopsis thaliana
gtcttagtcgcatggat

SEQ ID NO: 123218 - DNA, 17 bp, Arabidopsis thaliana
gtcttagtcgcatgtag

SEQ ID NO: 123219 - DNA, 17 bp, Arabidopsis thaliana
gtcttagtcgcattcct

SEQ ID NO: 123220 - DNA, 17 bp, Arabidopsis thaliana
gtcttagtcgcattctc

SEQ ID NO: 123221 - DNA, 17 bp, Arabidopsis thaliana
gtcttagtcgcattctg

SEQ ID NO: 123222 - DNA, 17 bp, Arabidopsis thaliana
gtcttagtcgcattctt

SEQ ID NO: 123223 - DNA, 17 bp, Arabidopsis thaliana
gtcttagtcgcattgag

SEQ ID NO: 123224 - DNA, 17 bp, Arabidopsis thaliana
gtcttagtcgcattgta

SEQ ID NO: 123225 - DNA, 17 bp, Arabidopsis thaliana
gtcttagtcgcattgtg

SEQ ID NO: 123226 - DNA, 17 bp, Arabidopsis thaliana
gtcttagtcgcatttag

SEQ ID NO: 123227 - DNA, 17 bp, Arabidopsis thaliana
gtcttagtcgcatttgt

SEQ ID NO: 123228 - DNA, 17 bp, Arabidopsis thaliana
gtcttagtcgcattttt

SEQ ID NO: 123229 - DNA, 17 bp, Arabidopsis thaliana
gtcttagtcgccctgta

SEQ ID NO: 123230 - DNA, 17 bp, Arabidopsis thaliana
gtcttagtcgcctgtag

SEQ ID NO: 123231 - DNA, 17 bp, Arabidopsis thaliana
gtcttagtcgcctgtct

SEQ ID NO: 123232 - DNA, 17 bp, Arabidopsis thaliana
gtcttagtcgcgccctg

SEQ ID NO: 123233 - DNA, 17 bp, Arabidopsis thaliana
gtcttagtcgcgcctct

SEQ ID NO: 123234 - DNA, 17 bp, Arabidopsis thaliana
gtcttagtcgcgcctgt

SEQ ID NO: 123235 - DNA, 17 bp, Arabidopsis thaliana
gtcttagtcgcgctgta

SEQ ID NO: 123236 - DNA, 17 bp, Arabidopsis thaliana
gtcttagtcgcggcctg

SEQ ID NO: 123237 - DNA, 17 bp, Arabidopsis thaliana
gtcttagtcgcgtagat

SEQ ID NO: 123238 - DNA, 17 bp, Arabidopsis thaliana
gtcttagtcgcgtcctg

SEQ ID NO: 123239 - DNA, 17 bp, Arabidopsis thaliana
gtcttagtcgcgtgtag

SEQ ID NO: 123240 - DNA, 17 bp, Arabidopsis thaliana
gtcttagtcgcgttgta

SEQ ID NO: 123241 - DNA, 17 bp, Arabidopsis thaliana
gtcttagtcgcgttgtt

SEQ ID NO: 123242 - DNA, 17 bp, Arabidopsis thaliana
gtcttagtcgctccgta

SEQ ID NO: 123243 - DNA, 17 bp, Arabidopsis thaliana
gtcttagtcgctcctgt

SEQ ID NO: 123244 - DNA, 17 bp, Arabidopsis thaliana
gtcttagtcgctccttt

SEQ ID NO: 123245 - DNA, 17 bp, Arabidopsis thaliana
gtcttagtcgctctgta

SEQ ID NO: 123246 - DNA, 17 bp, Arabidopsis thaliana
gtcttagtcgctgaatc

SEQ ID NO: 123247 - DNA, 17 bp, Arabidopsis thaliana
gtcttagtcgctgtaga

SEQ ID NO: 123248 - DNA, 17 bp, Arabidopsis thaliana
gtcttagtcgcttcctg

SEQ ID NO: 123249 - DNA, 17 bp, Arabidopsis thaliana
gtcttagtcgggtcctg

SEQ ID NO: 123250 - DNA, 17 bp, Arabidopsis thaliana
gtcttagtcgtatccta

SEQ ID NO: 123251 - DNA, 17 bp, Arabidopsis thaliana
gtcttagtcgtatcctc

SEQ ID NO: 123252 - DNA, 17 bp, Arabidopsis thaliana
gtcttagtcgtatcctg

SEQ ID NO: 123253 - DNA, 17 bp, Arabidopsis thaliana
gtcttagtcgtatcctt

SEQ ID NO: 123254 - DNA, 17 bp, Arabidopsis thaliana
gtcttagtcgtccctgt

SEQ ID NO: 123255 - DNA, 17 bp, Arabidopsis thaliana
gtcttagtcgtcctgta

SEQ ID NO: 123256 - DNA, 17 bp, Arabidopsis thaliana
gtcttagtctacggaac

SEQ ID NO: 123257 - DNA, 17 bp, Arabidopsis thaliana
gtcttagtctcatcctg

SEQ ID NO: 123258 - DNA, 17 bp, Arabidopsis thaliana
gtcttagtcttcctgta

SEQ ID NO: 123259 - DNA, 17 bp, Arabidopsis thaliana
gtcttagttcgcatcct

SEQ ID NO: 123260 - DNA, 17 bp, Arabidopsis thaliana
gtcttagttctacggtg

SEQ ID NO: 123261 - DNA, 17 bp, Arabidopsis thaliana
gtcttagttgcatcctg

SEQ ID NO: 123262 - DNA, 17 bp, Arabidopsis thaliana
gtcttagttgtatcctg

SEQ ID NO: 123263 - DNA, 17 bp, Arabidopsis thaliana
gtcttatatctggggct

SEQ ID NO: 123264 - DNA, 17 bp, Arabidopsis thaliana
gtcttatatttggctgt

SEQ ID NO: 123265 - DNA, 17 bp, Arabidopsis thaliana
gtcttatcacacaaagg

SEQ ID NO: 123266 - DNA, 17 bp, Arabidopsis thaliana
gtcttatcgtcggaggg

SEQ ID NO: 123267 - DNA, 17 bp, Arabidopsis thaliana
gtcttatctctgcaaag

SEQ ID NO: 123268 - DNA, 17 bp, Arabidopsis thaliana
gtcttatgaaactttgc

SEQ ID NO: 123269 - DNA, 17 bp, Arabidopsis thaliana
gtcttatggattcgtgg

SEQ ID NO: 123270 - DNA, 17 bp, Arabidopsis thaliana
gtcttatgtcacatgag

SEQ ID NO: 123271 - DNA, 17 bp, Arabidopsis thaliana
gtcttattcgccctgta

SEQ ID NO: 123272 - DNA, 17 bp, Arabidopsis thaliana
gtcttattcgtcctgta

SEQ ID NO: 123273 - DNA, 17 bp, Arabidopsis thaliana
gtcttattctcgtattc

SEQ ID NO: 123274 - DNA, 17 bp, Arabidopsis thaliana
gtcttattgctgcaagg

SEQ ID NO: 123275 - DNA, 17 bp, Arabidopsis thaliana
gtcttcaacgggcttga

SEQ ID NO: 123276 - DNA, 17 bp, Arabidopsis thaliana
gtcttcaactgtttgac

SEQ ID NO: 123277 - DNA, 17 bp, Arabidopsis thaliana
gtcttcaactgtttggc

SEQ ID NO: 123278 - DNA, 17 bp, Arabidopsis thaliana
gtcttcaacttcaaggt

SEQ ID NO: 123279 - DNA, 17 bp, Arabidopsis thaliana
gtcttcaagccacaagg

SEQ ID NO: 123280 - DNA, 17 bp, Arabidopsis thaliana
gtcttcaaggcgcacaa

SEQ ID NO: 123281 - DNA, 17 bp, Arabidopsis thaliana
gtcttcacaagacttac

SEQ ID NO: 123282 - DNA, 17 bp, Arabidopsis thaliana
gtcttcacaagcacaat

SEQ ID NO: 123283 - DNA, 17 bp, Arabidopsis thaliana
gtcttcacaaggatgat

SEQ ID NO: 123284 - DNA, 17 bp, Arabidopsis thaliana
gtcttcagaacagcttg

SEQ ID NO: 123285 - DNA, 17 bp, Arabidopsis thaliana
gtcttcagagcagttcg

SEQ ID NO: 123286 - DNA, 17 bp, Arabidopsis thaliana
gtcttcagcaactggac

SEQ ID NO: 123287 - DNA, 17 bp, Arabidopsis thaliana
gtcttcagcgacggacc

SEQ ID NO: 123288 - DNA, 17 bp, Arabidopsis thaliana
gtcttcagcgacggacg

SEQ ID NO: 123289 - DNA, 17 bp, Arabidopsis thaliana
gtcttcaggaaagggca

SEQ ID NO: 123290 - DNA, 17 bp, Arabidopsis thaliana
gtcttcaggggttagcg

SEQ ID NO: 123291 - DNA, 17 bp, Arabidopsis thaliana
gtcttcagtgactgact

SEQ ID NO: 123292 - DNA, 17 bp, Arabidopsis thaliana
gtcttcataaacgactc

SEQ ID NO: 123293 - DNA, 17 bp, Arabidopsis thaliana
gtcttcatcatgcttgt

SEQ ID NO: 123294 - DNA, 17 bp, Arabidopsis thaliana
gtcttcatccactaagc

SEQ ID NO: 123295 - DNA, 17 bp, Arabidopsis thaliana
gtcttcatcggtcttct

SEQ ID NO: 123296 - DNA, 17 bp, Arabidopsis thaliana
gtcttcatcgttagcgc

SEQ ID NO: 123297 - DNA, 17 bp, Arabidopsis thaliana
gtcttcattggtaagcc

SEQ ID NO: 123298 - DNA, 17 bp, Arabidopsis thaliana
gtcttccaagctaaagg

SEQ ID NO: 123299 - DNA, 17 bp, Arabidopsis thaliana
gtcttccacgctttttc

SEQ ID NO: 123300 - DNA, 17 bp, Arabidopsis thaliana
gtcttccaggcattgat

SEQ ID NO: 123301 - DNA, 17 bp, Arabidopsis thaliana
gtcttccaggcgtttct

SEQ ID NO: 123302 - DNA, 17 bp, Arabidopsis thaliana
gtcttcccaaccgaatg

SEQ ID NO: 123303 - DNA, 17 bp, Arabidopsis thaliana
gtcttcccaccttgatg

SEQ ID NO: 123304 - DNA, 17 bp, Arabidopsis thaliana
gtcttcccatatggaca

SEQ ID NO: 123305 - DNA, 17 bp, Arabidopsis thaliana
gtcttcccgttggtgtg

SEQ ID NO: 123306 - DNA, 17 bp, Arabidopsis thaliana
gtcttccgccacgaccg

SEQ ID NO: 123307 - DNA, 17 bp, Arabidopsis thaliana
gtcttccggagtgtcgt

SEQ ID NO: 123308 - DNA, 17 bp, Arabidopsis thaliana
gtcttccgggattttga

SEQ ID NO: 123309 - DNA, 17 bp, Arabidopsis thaliana
gtcttccggttcgttaa

SEQ ID NO: 123310 - DNA, 17 bp, Arabidopsis thaliana
gtcttccgttctaccaa

SEQ ID NO: 123311 - DNA, 17 bp, Arabidopsis thaliana
gtcttcctgctgcttct

SEQ ID NO: 123312 - DNA, 17 bp, Arabidopsis thaliana
gtcttcgaattgtcgtt

SEQ ID NO: 123313 - DNA, 17 bp, Arabidopsis thaliana
gtcttcgacttaaggcg

SEQ ID NO: 123314 - DNA, 17 bp, Arabidopsis thaliana
gtcttcgatggtgcagt

SEQ ID NO: 123315 - DNA, 17 bp, Arabidopsis thaliana
gtcttcgattttgcttt

SEQ ID NO: 123316 - DNA, 17 bp, Arabidopsis thaliana
gtcttcgcataagcttg

SEQ ID NO: 123317 - DNA, 17 bp, Arabidopsis thaliana
gtcttcgcgagttaggt

SEQ ID NO: 123318 - DNA, 17 bp, Arabidopsis thaliana
gtcttcgcgccctgtag

SEQ ID NO: 123319 - DNA, 17 bp, Arabidopsis thaliana
gtcttcgcggattcctt

SEQ ID NO: 123320 - DNA, 17 bp, Arabidopsis thaliana
gtcttcgcttcaacgac

SEQ ID NO: 123321 - DNA, 17 bp, Arabidopsis thaliana
gtcttcggaaattacgg

SEQ ID NO: 123322 - DNA, 17 bp, Arabidopsis thaliana
gtcttcggaccaggctt

SEQ ID NO: 123323 - DNA, 17 bp, Arabidopsis thaliana
gtcttcggagatcttga

SEQ ID NO: 123324 - DNA, 17 bp, Arabidopsis thaliana
gtcttcggcgttcgaat

SEQ ID NO: 123325 - DNA, 17 bp, Arabidopsis thaliana
gtcttcgggccaggctt

SEQ ID NO: 123326 - DNA, 17 bp, Arabidopsis thaliana
gtcttcggtcccccgca

SEQ ID NO: 123327 - DNA, 17 bp, Arabidopsis thaliana
gtcttcgtcagagtcgc

SEQ ID NO: 123328 - DNA, 17 bp, Arabidopsis thaliana
gtcttcgtctaagagcc

SEQ ID NO: 123329 - DNA, 17 bp, Arabidopsis thaliana
gtcttcgtctctgtcta

SEQ ID NO: 123330 - DNA, 17 bp, Arabidopsis thaliana
gtcttcgtgcgcgttgc

SEQ ID NO: 123331 - DNA, 17 bp, Arabidopsis thaliana
gtcttcgttgaaccaaa

SEQ ID NO: 123332 - DNA, 17 bp, Arabidopsis thaliana
gtcttctactgcaagtg

SEQ ID NO: 123333 - DNA, 17 bp, Arabidopsis thaliana
gtcttctacttgggctt

SEQ ID NO: 123334 - DNA, 17 bp, Arabidopsis thaliana
gtcttctcaagatgtgt

SEQ ID NO: 123335 - DNA, 17 bp, Arabidopsis thaliana
gtcttctcacaagatct

SEQ ID NO: 123336 - DNA, 17 bp, Arabidopsis thaliana
gtcttctcaccggcaag

SEQ ID NO: 123337 - DNA, 17 bp, Arabidopsis thaliana
gtcttctcagccactgt

SEQ ID NO: 123338 - DNA, 17 bp, Arabidopsis thaliana
gtcttctcagtttgttg

SEQ ID NO: 123339 - DNA, 17 bp, Arabidopsis thaliana
gtcttctcattccggca

SEQ ID NO: 123340 - DNA, 17 bp, Arabidopsis thaliana
gtcttctcattgcggca

SEQ ID NO: 123341 - DNA, 17 bp, Arabidopsis thaliana
gtcttctccaaatgaat

SEQ ID NO: 123342 - DNA, 17 bp, Arabidopsis thaliana
gtcttctccaaccgaat

SEQ ID NO: 123343 - DNA, 17 bp, Arabidopsis thaliana
gtcttctccaaccgcat

SEQ ID NO: 123344 - DNA, 17 bp, Arabidopsis thaliana
gtcttctcttttgtgcc

SEQ ID NO: 123345 - DNA, 17 bp, Arabidopsis thaliana
gtcttctgcccatgatg

SEQ ID NO: 123346 - DNA, 17 bp, Arabidopsis thaliana
gtcttctggtgttgctg

SEQ ID NO: 123347 - DNA, 17 bp, Arabidopsis thaliana
gtcttcttagaccaaaa

SEQ ID NO: 123348 - DNA, 17 bp, Arabidopsis thaliana
gtcttcttccttccccc

SEQ ID NO: 123349 - DNA, 17 bp, Arabidopsis thaliana
gtcttcttcgaaagcac

SEQ ID NO: 123350 - DNA, 17 bp, Arabidopsis thaliana
gtcttcttctacacgaa

SEQ ID NO: 123351 - DNA, 17 bp, Arabidopsis thaliana
gtcttcttctacacgag

SEQ ID NO: 123352 - DNA, 17 bp, Arabidopsis thaliana
gtcttcttctacatgag

SEQ ID NO: 123353 - DNA, 17 bp, Arabidopsis thaliana
gtcttcttctccggcag

SEQ ID NO: 123354 - DNA, 17 bp, Arabidopsis thaliana
gtcttcttgacactacc

SEQ ID NO: 123355 - DNA, 17 bp, Arabidopsis thaliana
gtcttcttggttgttac

SEQ ID NO: 123356 - DNA, 17 bp, Arabidopsis thaliana
gtcttcttgttatgacc

SEQ ID NO: 123357 - DNA, 17 bp, Arabidopsis thaliana
gtcttctttctcgttct

SEQ ID NO: 123358 - DNA, 17 bp, Arabidopsis thaliana
gtcttctttgactctat

SEQ ID NO: 123359 - DNA, 17 bp, Arabidopsis thaliana
gtcttgaaccaggttta

SEQ ID NO: 123360 - DNA, 17 bp, Arabidopsis thaliana
gtcttgaacccgggcgt

SEQ ID NO: 123361 - DNA, 17 bp, Arabidopsis thaliana
gtcttgaacgggcttga

SEQ ID NO: 123362 - DNA, 17 bp, Arabidopsis thaliana
gtcttgaacgttcgtgc

SEQ ID NO: 123363 - DNA, 17 bp, Arabidopsis thaliana
gtcttgacgattggacc

SEQ ID NO: 123364 - DNA, 17 bp, Arabidopsis thaliana
gtcttgactcttggctg

SEQ ID NO: 123365 - DNA, 17 bp, Arabidopsis thaliana
gtcttgagcgtctggca

SEQ ID NO: 123366 - DNA, 17 bp, Arabidopsis thaliana
gtcttgaggcacggctc

SEQ ID NO: 123367 - DNA, 17 bp, Arabidopsis thaliana
gtcttgaggcacggctg

SEQ ID NO: 123368 - DNA, 17 bp, Arabidopsis thaliana
gtcttgatgaaccgttc

SEQ ID NO: 123369 - DNA, 17 bp, Arabidopsis thaliana
gtcttgcaaagattagc

SEQ ID NO: 123370 - DNA, 17 bp, Arabidopsis thaliana
gtcttgcaaggctagag

SEQ ID NO: 123371 - DNA, 17 bp, Arabidopsis thaliana
gtcttgcatactgtgac

SEQ ID NO: 123372 - DNA, 17 bp, Arabidopsis thaliana
gtcttgccggtcataga

SEQ ID NO: 123373 - DNA, 17 bp, Arabidopsis thaliana
gtcttgccggttatgga

SEQ ID NO: 123374 - DNA, 17 bp, Arabidopsis thaliana
gtcttgccgttatctgg

SEQ ID NO: 123375 - DNA, 17 bp, Arabidopsis thaliana
gtcttgcgctgcgattt

SEQ ID NO: 123376 - DNA, 17 bp, Arabidopsis thaliana
gtcttgcggtgttcgaa

SEQ ID NO: 123377 - DNA, 17 bp, Arabidopsis thaliana
gtcttgctcatctacgg

SEQ ID NO: 123378 - DNA, 17 bp, Arabidopsis thaliana
gtcttgcttcttgcacc

SEQ ID NO: 123379 - DNA, 17 bp, Arabidopsis thaliana
gtcttggaacacggacc

SEQ ID NO: 123380 - DNA, 17 bp, Arabidopsis thaliana
gtcttggaaccttagac

SEQ ID NO: 123381 - DNA, 17 bp, Arabidopsis thaliana
gtcttggacaaattttc

SEQ ID NO: 123382 - DNA, 17 bp, Arabidopsis thaliana
gtcttggactcggcttg

SEQ ID NO: 123383 - DNA, 17 bp, Arabidopsis thaliana
gtcttggatcgtatgct

SEQ ID NO: 123384 - DNA, 17 bp, Arabidopsis thaliana
gtcttggatgggcgggg

SEQ ID NO: 123385 - DNA, 17 bp, Arabidopsis thaliana
gtcttggcaaatgtgag

SEQ ID NO: 123386 - DNA, 17 bp, Arabidopsis thaliana
gtcttggctgagcagca

SEQ ID NO: 123387 - DNA, 17 bp, Arabidopsis thaliana
gtcttggctgctgtatc

SEQ ID NO: 123388 - DNA, 17 bp, Arabidopsis thaliana
gtcttggctggataatg

SEQ ID NO: 123389 - DNA, 17 bp, Arabidopsis thaliana
gtcttgggattttggcg

SEQ ID NO: 123390 - DNA, 17 bp, Arabidopsis thaliana
gtcttggtaggatgaac

SEQ ID NO: 123391 - DNA, 17 bp, Arabidopsis thaliana
gtcttggtccaatagac

SEQ ID NO: 123392 - DNA, 17 bp, Arabidopsis thaliana
gtcttggtcgcatcctg

SEQ ID NO: 123393 - DNA, 17 bp, Arabidopsis thaliana
gtcttggtgtgcaacga

SEQ ID NO: 123394 - DNA, 17 bp, Arabidopsis thaliana
gtcttggttcagtttcg

SEQ ID NO: 123395 - DNA, 17 bp, Arabidopsis thaliana
gtcttggttggctgagt

SEQ ID NO: 123396 - DNA, 17 bp, Arabidopsis thaliana
gtcttggttgtcggcac

SEQ ID NO: 123397 - DNA, 17 bp, Arabidopsis thaliana
gtcttggttgttgactt

SEQ ID NO: 123398 - DNA, 17 bp, Arabidopsis thaliana
gtcttggtttagtatcc

SEQ ID NO: 123399 - DNA, 17 bp, Arabidopsis thaliana
gtcttggtttcagtttc

SEQ ID NO: 123400 - DNA, 17 bp, Arabidopsis thaliana
gtcttgtaacacggacc

SEQ ID NO: 123401 - DNA, 17 bp, Arabidopsis thaliana
gtcttgtatcatcttct

SEQ ID NO: 123402 - DNA, 17 bp, Arabidopsis thaliana
gtcttgtctgcctgtgt

SEQ ID NO: 123403 - DNA, 17 bp, Arabidopsis thaliana
gtcttgtgagactcagt

SEQ ID NO: 123404 - DNA, 17 bp, Arabidopsis thaliana
gtcttgtggatcgacct

SEQ ID NO: 123405 - DNA, 17 bp, Arabidopsis thaliana
gtcttgtggtggtgctt

SEQ ID NO: 123406 - DNA, 17 bp, Arabidopsis thaliana
gtcttgtgttgctcaga

SEQ ID NO: 123407 - DNA, 17 bp, Arabidopsis thaliana
gtcttgtgtttttttgg

SEQ ID NO: 123408 - DNA, 17 bp, Arabidopsis thaliana
gtcttgttagcttgtgt

SEQ ID NO: 123409 - DNA, 17 bp, Arabidopsis thaliana
gtcttgttagcttgttt

SEQ ID NO: 123410 - DNA, 17 bp, Arabidopsis thaliana
gtcttgttggcagtact

SEQ ID NO: 123411 - DNA, 17 bp, Arabidopsis thaliana
gtcttgtttcatcttgc

SEQ ID NO: 123412 - DNA, 17 bp, Arabidopsis thaliana
gtcttgtttgcattgac

SEQ ID NO: 123413 - DNA, 17 bp, Arabidopsis thaliana
gtctttaaccctgacta

SEQ ID NO: 123414 - DNA, 17 bp, Arabidopsis thaliana
gtctttaagatcatgtt

SEQ ID NO: 123415 - DNA, 17 bp, Arabidopsis thaliana
gtctttaagatccggtt

SEQ ID NO: 123416 - DNA, 17 bp, Arabidopsis thaliana
gtctttaagatcctgtt

SEQ ID NO: 123417 - DNA, 17 bp, Arabidopsis thaliana
gtctttaagatcgggtt

SEQ ID NO: 123418 - DNA, 17 bp, Arabidopsis thaliana
gtctttaagatctggtt

SEQ ID NO: 123419 - DNA, 17 bp, Arabidopsis thaliana
gtctttaagcatgttgt

SEQ ID NO: 123420 - DNA, 17 bp, Arabidopsis thaliana
gtctttacatgaccttt

SEQ ID NO: 123421 - DNA, 17 bp, Arabidopsis thaliana
gtctttaccgtctaagc

SEQ ID NO: 123422 - DNA, 17 bp, Arabidopsis thaliana
gtctttagccggttttt

SEQ ID NO: 123423 - DNA, 17 bp, Arabidopsis thaliana
gtctttcaaacttggcc

SEQ ID NO: 123424 - DNA, 17 bp, Arabidopsis thaliana
gtctttcacacgctacg

SEQ ID NO: 123425 - DNA, 17 bp, Arabidopsis thaliana
gtctttcagaggtgttc

SEQ ID NO: 123426 - DNA, 17 bp, Arabidopsis thaliana
gtctttcagtaacggct

SEQ ID NO: 123427 - DNA, 17 bp, Arabidopsis thaliana
gtctttcagttgggctt

SEQ ID NO: 123428 - DNA, 17 bp, Arabidopsis thaliana
gtctttcatctacaatc

SEQ ID NO: 123429 - DNA, 17 bp, Arabidopsis thaliana
gtctttcatctcagcag

SEQ ID NO: 123430 - DNA, 17 bp, Arabidopsis thaliana
gtctttccactaagcag

SEQ ID NO: 123431 - DNA, 17 bp, Arabidopsis thaliana
gtctttccaggttgttg

SEQ ID NO: 123432 - DNA, 17 bp, Arabidopsis thaliana
gtctttccattgacttt

SEQ ID NO: 123433 - DNA, 17 bp, Arabidopsis thaliana
gtctttccggcaagtat

SEQ ID NO: 123434 - DNA, 17 bp, Arabidopsis thaliana
gtctttcctgtgctgac

SEQ ID NO: 123435 - DNA, 17 bp, Arabidopsis thaliana
gtctttcgaatcgcttg

SEQ ID NO: 123436 - DNA, 17 bp, Arabidopsis thaliana
gtctttcgaatgcaaga

SEQ ID NO: 123437 - DNA, 17 bp, Arabidopsis thaliana
gtctttcgcgatcatgg

SEQ ID NO: 123438 - DNA, 17 bp, Arabidopsis thaliana
gtctttcgggcaggctt

SEQ ID NO: 123439 - DNA, 17 bp, Arabidopsis thaliana
gtctttcggtggtgtcg

SEQ ID NO: 123440 - DNA, 17 bp, Arabidopsis thaliana
gtctttcgtccagcgcc

SEQ ID NO: 123441 - DNA, 17 bp, Arabidopsis thaliana
gtctttcgtctagcgcc

SEQ ID NO: 123442 - DNA, 17 bp, Arabidopsis thaliana
gtctttctaagtatcag

SEQ ID NO: 123443 - DNA, 17 bp, Arabidopsis thaliana
gtctttctatcgaggtt

SEQ ID NO: 123444 - DNA, 17 bp, Arabidopsis thaliana
gtctttctatgccttct

SEQ ID NO: 123445 - DNA, 17 bp, Arabidopsis thaliana
gtctttctccgaattcg

SEQ ID NO: 123446 - DNA, 17 bp, Arabidopsis thaliana
gtctttctcgttgtcgg

SEQ ID NO: 123447 - DNA, 17 bp, Arabidopsis thaliana
gtctttctctctcaggc

SEQ ID NO: 123448 - DNA, 17 bp, Arabidopsis thaliana
gtctttctgcaccgaac

SEQ ID NO: 123449 - DNA, 17 bp, Arabidopsis thaliana
gtctttcttcagactct

SEQ ID NO: 123450 - DNA, 17 bp, Arabidopsis thaliana
gtctttcttcgacggtg

SEQ ID NO: 123451 - DNA, 17 bp, Arabidopsis thaliana
gtctttcttggaacgct

SEQ ID NO: 123452 - DNA, 17 bp, Arabidopsis thaliana
gtctttgaacgcaagtt

SEQ ID NO: 123453 - DNA, 17 bp, Arabidopsis thaliana
gtctttgaagcgcgatg

SEQ ID NO: 123454 - DNA, 17 bp, Arabidopsis thaliana
gtctttgacacacgatc

SEQ ID NO: 123455 - DNA, 17 bp, Arabidopsis thaliana
gtctttgacagactcct

SEQ ID NO: 123456 - DNA, 17 bp, Arabidopsis thaliana
gtctttgagactggttg

SEQ ID NO: 123457 - DNA, 17 bp, Arabidopsis thaliana
gtctttgagcatgttgt

SEQ ID NO: 123458 - DNA, 17 bp, Arabidopsis thaliana
gtctttgatcattgtcg

SEQ ID NO: 123459 - DNA, 17 bp, Arabidopsis thaliana
gtctttgatgacatggc

SEQ ID NO: 123460 - DNA, 17 bp, Arabidopsis thaliana
gtctttgatgattctgg

SEQ ID NO: 123461 - DNA, 17 bp, Arabidopsis thaliana
gtctttgatgggctcgg

SEQ ID NO: 123462 - DNA, 17 bp, Arabidopsis thaliana
gtctttgatttgctgcg

SEQ ID NO: 123463 - DNA, 17 bp, Arabidopsis thaliana
gtctttgcccaatggtc

SEQ ID NO: 123464 - DNA, 17 bp, Arabidopsis thaliana
gtctttgctgatcacag

SEQ ID NO: 123465 - DNA, 17 bp, Arabidopsis thaliana
gtctttgcttccgactg

SEQ ID NO: 123466 - DNA, 17 bp, Arabidopsis thaliana
gtctttgcttcgcacca

SEQ ID NO: 123467 - DNA, 17 bp, Arabidopsis thaliana
gtctttggacttgaatt

SEQ ID NO: 123468 - DNA, 17 bp, Arabidopsis thaliana
gtctttggagccacaga

SEQ ID NO: 123469 - DNA, 17 bp, Arabidopsis thaliana
gtctttggagccaccga

SEQ ID NO: 123470 - DNA, 17 bp, Arabidopsis thaliana
gtctttggatccagatt

SEQ ID NO: 123471 - DNA, 17 bp, Arabidopsis thaliana
gtctttgggccggtcca

SEQ ID NO: 123472 - DNA, 17 bp, Arabidopsis thaliana
gtctttgggctttccga

SEQ ID NO: 123473 - DNA, 17 bp, Arabidopsis thaliana
gtctttgtagatggacg

SEQ ID NO: 123474 - DNA, 17 bp, Arabidopsis thaliana
gtctttgtagcaccgtt

SEQ ID NO: 123475 - DNA, 17 bp, Arabidopsis thaliana
gtctttgtccgttgcta

SEQ ID NO: 123476 - DNA, 17 bp, Arabidopsis thaliana
gtctttgtgaattattg

SEQ ID NO: 123477 - DNA, 17 bp, Arabidopsis thaliana
gtctttgtggacatatg

SEQ ID NO: 123478 - DNA, 17 bp, Arabidopsis thaliana
gtctttgtggccaaatc

SEQ ID NO: 123479 - DNA, 17 bp, Arabidopsis thaliana
gtctttgtggctatggc

SEQ ID NO: 123480 - DNA, 17 bp, Arabidopsis thaliana
gtctttgtgttggtgca

SEQ ID NO: 123481 - DNA, 17 bp, Arabidopsis thaliana
gtctttgtgtttcaggt

SEQ ID NO: 123482 - DNA, 17 bp, Arabidopsis thaliana
gtctttgttccaggtcc

SEQ ID NO: 123483 - DNA, 17 bp, Arabidopsis thaliana
gtctttgttcgagactc

SEQ ID NO: 123484 - DNA, 17 bp, Arabidopsis thaliana
gtctttgttgaagaccg

SEQ ID NO: 123485 - DNA, 17 bp, Arabidopsis thaliana
gtctttgttgaagtccg

SEQ ID NO: 123486 - DNA, 17 bp, Arabidopsis thaliana
gtcttttaccattacag

SEQ ID NO: 123487 - DNA, 17 bp, Arabidopsis thaliana
gtcttttcacttggcta

SEQ ID NO: 123488 - DNA, 17 bp, Arabidopsis thaliana
gtcttttcagcctttgc

SEQ ID NO: 123489 - DNA, 17 bp, Arabidopsis thaliana
gtcttttcagctgaaat

SEQ ID NO: 123490 - DNA, 17 bp, Arabidopsis thaliana
gtcttttcagttgcttt

SEQ ID NO: 123491 - DNA, 17 bp, Arabidopsis thaliana
gtcttttcattcaattt

SEQ ID NO: 123492 - DNA, 17 bp, Arabidopsis thaliana
gtcttttccaacaaagt

SEQ ID NO: 123493 - DNA, 17 bp, Arabidopsis thaliana
gtcttttcggtcgtgtc

SEQ ID NO: 123494 - DNA, 17 bp, Arabidopsis thaliana
gtcttttcggttgtgtc

SEQ ID NO: 123495 - DNA, 17 bp, Arabidopsis thaliana
gtcttttcgtacggatc

SEQ ID NO: 123496 - DNA, 17 bp, Arabidopsis thaliana
gtcttttgaggcaatta

SEQ ID NO: 123497 - DNA, 17 bp, Arabidopsis thaliana
gtcttttggttggacct

SEQ ID NO: 123498 - DNA, 17 bp, Arabidopsis thaliana
gtcttttggttggactt

SEQ ID NO: 123499 - DNA, 17 bp, Arabidopsis thaliana
gtcttttggttggtcct

SEQ ID NO: 123500 - DNA, 17 bp, Arabidopsis thaliana
gtcttttgtgtctccat

SEQ ID NO: 123501 - DNA, 17 bp, Arabidopsis thaliana
gtctttttacttacgaa

SEQ ID NO: 123502 - DNA, 17 bp, Arabidopsis thaliana
gtctttttcaaaactga

SEQ ID NO: 123503 - DNA, 17 bp, Arabidopsis thaliana
gtctttttcatgcggtt

SEQ ID NO: 123504 - DNA, 17 bp, Arabidopsis thaliana
gtctttttccaaggcaa

SEQ ID NO: 123505 - DNA, 17 bp, Arabidopsis thaliana
gtctttttgataaaacg

SEQ ID NO: 123506 - DNA, 17 bp, Arabidopsis thaliana
gtcttttttggcggtaa

SEQ ID NO: 123507 - DNA, 17 bp, Arabidopsis thaliana
gtgaaaaaaactactta

SEQ ID NO: 123508 - DNA, 17 bp, Arabidopsis thaliana
gtgaaaaaacaggtacc

SEQ ID NO: 123509 - DNA, 17 bp, Arabidopsis thaliana
gtgaaaaaactatttgc

SEQ ID NO: 123510 - DNA, 17 bp, Arabidopsis thaliana
gtgaaaaacctacttct

SEQ ID NO: 123511 - DNA, 17 bp, Arabidopsis thaliana
gtgaaaaagtgcggtgc

SEQ ID NO: 123512 - DNA, 17 bp, Arabidopsis thaliana
gtgaaaaccacatctca

SEQ ID NO: 123513 - DNA, 17 bp, Arabidopsis thaliana
gtgaaaacgggccgcaa

SEQ ID NO: 123514 - DNA, 17 bp, Arabidopsis thaliana
gtgaaaactcatcttcg

SEQ ID NO: 123515 - DNA, 17 bp, Arabidopsis thaliana
gtgaaaactgtggtgat

SEQ ID NO: 123516 - DNA, 17 bp, Arabidopsis thaliana
gtgaaaagaacccccaa

SEQ ID NO: 123517 - DNA, 17 bp, Arabidopsis thaliana
gtgaaaagaacccccat

SEQ ID NO: 123518 - DNA, 17 bp, Arabidopsis thaliana
gtgaaaagacagtgttg

SEQ ID NO: 123519 - DNA, 17 bp, Arabidopsis thaliana
gtgaaaagacatcactg

SEQ ID NO: 123520 - DNA, 17 bp, Arabidopsis thaliana
gtgaaaagttgagattc

SEQ ID NO: 123521 - DNA, 17 bp, Arabidopsis thaliana
gtgaaaatcggcggaaa

SEQ ID NO: 123522 - DNA, 17 bp, Arabidopsis thaliana
gtgaaaatggttagact

SEQ ID NO: 123523 - DNA, 17 bp, Arabidopsis thaliana
gtgaaaatttacgggtt

SEQ ID NO: 123524 - DNA, 17 bp, Arabidopsis thaliana
gtgaaacaccgattcgg

SEQ ID NO: 123525 - DNA, 17 bp, Arabidopsis thaliana
gtgaaacagcgaatggc

SEQ ID NO: 123526 - DNA, 17 bp, Arabidopsis thaliana
gtgaaacatttgctgtg

SEQ ID NO: 123527 - DNA, 17 bp, Arabidopsis thaliana
gtgaaacccgagggtgt

SEQ ID NO: 123528 - DNA, 17 bp, Arabidopsis thaliana
gtgaaaccgtagctcca

SEQ ID NO: 123529 - DNA, 17 bp, Arabidopsis thaliana
gtgaaacgaccggtcaa

SEQ ID NO: 123530 - DNA, 17 bp, Arabidopsis thaliana
gtgaaacggccggtcaa

SEQ ID NO: 123531 - DNA, 17 bp, Arabidopsis thaliana
gtgaaacggcctgacca

SEQ ID NO: 123532 - DNA, 17 bp, Arabidopsis thaliana
gtgaaactcctctgctc

SEQ ID NO: 123533 - DNA, 17 bp, Arabidopsis thaliana
gtgaaactctcagactt

SEQ ID NO: 123534 - DNA, 17 bp, Arabidopsis thaliana
gtgaaactctgtgcctt

SEQ ID NO: 123535 - DNA, 17 bp, Arabidopsis thaliana
gtgaaactgatacgact

SEQ ID NO: 123536 - DNA, 17 bp, Arabidopsis thaliana
gtgaaactgcgaatgaa

SEQ ID NO: 123537 - DNA, 17 bp, Arabidopsis thaliana
gtgaaactgcgaatgac

SEQ ID NO: 123538 - DNA, 17 bp, Arabidopsis thaliana
gtgaaactgcgaatggc

SEQ ID NO: 123539 - DNA, 17 bp, Arabidopsis thaliana
gtgaaactgcgaatggg

SEQ ID NO: 123540 - DNA, 17 bp, Arabidopsis thaliana
gtgaaactgtgttttct

SEQ ID NO: 123541 - DNA, 17 bp, Arabidopsis thaliana
gtgaaacttagaggtta

SEQ ID NO: 123542 - DNA, 17 bp, Arabidopsis thaliana
gtgaaacttagaggttg

SEQ ID NO: 123543 - DNA, 17 bp, Arabidopsis thaliana
gtgaaacttccagacct

SEQ ID NO: 123544 - DNA, 17 bp, Arabidopsis thaliana
gtgaaagcgtggcctat

SEQ ID NO: 123545 - DNA, 17 bp, Arabidopsis thaliana
gtgaaaggaagagttgc

SEQ ID NO: 123546 - DNA, 17 bp, Arabidopsis thaliana
gtgaaaggccccgatcc

SEQ ID NO: 123547 - DNA, 17 bp, Arabidopsis thaliana
gtgaaagtttgcatagt

SEQ ID NO: 123548 - DNA, 17 bp, Arabidopsis thaliana
gtgaaatacaaaaccgg

SEQ ID NO: 123549 - DNA, 17 bp, Arabidopsis thaliana
gtgaaatcaattgtcac

SEQ ID NO: 123550 - DNA, 17 bp, Arabidopsis thaliana
gtgaaatcacgacagtc

SEQ ID NO: 123551 - DNA, 17 bp, Arabidopsis thaliana
gtgaaatccttccagag

SEQ ID NO: 123552 - DNA, 17 bp, Arabidopsis thaliana
gtgaaatcgtggacact

SEQ ID NO: 123553 - DNA, 17 bp, Arabidopsis thaliana
gtgaaatcgtttggtcc

SEQ ID NO: 123554 - DNA, 17 bp, Arabidopsis thaliana
gtgaaatctacagatct

SEQ ID NO: 123555 - DNA, 17 bp, Arabidopsis thaliana
gtgaaatctgtcacagt

SEQ ID NO: 123556 - DNA, 17 bp, Arabidopsis thaliana
gtgaaatgacttgagaa

SEQ ID NO: 123557 - DNA, 17 bp, Arabidopsis thaliana
gtgaaatggccagtcaa

SEQ ID NO: 123558 - DNA, 17 bp, Arabidopsis thaliana
gtgaaatggccgtttta

SEQ ID NO: 123559 - DNA, 17 bp, Arabidopsis thaliana
gtgaaatggttattctc

SEQ ID NO: 123560 - DNA, 17 bp, Arabidopsis thaliana
gtgaaatgtgtgtcgat

SEQ ID NO: 123561 - DNA, 17 bp, Arabidopsis thaliana
gtgaaatttactatgcg

SEQ ID NO: 123562 - DNA, 17 bp, Arabidopsis thaliana
gtgaacaaaggtgaact

SEQ ID NO: 123563 - DNA, 17 bp, Arabidopsis thaliana
gtgaacacatttttggc

SEQ ID NO: 123564 - DNA, 17 bp, Arabidopsis thaliana
gtgaacagccttggtcg

SEQ ID NO: 123565 - DNA, 17 bp, Arabidopsis thaliana
gtgaacaggtgcggaaa

SEQ ID NO: 123566 - DNA, 17 bp, Arabidopsis thaliana
gtgaacatccacatggt

SEQ ID NO: 123567 - DNA, 17 bp, Arabidopsis thaliana
gtgaacatccacattgt

SEQ ID NO: 123568 - DNA, 17 bp, Arabidopsis thaliana
gtgaacatccttccttg

SEQ ID NO: 123569 - DNA, 17 bp, Arabidopsis thaliana
gtgaaccaactgggaat

SEQ ID NO: 123570 - DNA, 17 bp, Arabidopsis thaliana
gtgaaccacgctacgag

SEQ ID NO: 123571 - DNA, 17 bp, Arabidopsis thaliana
gtgaaccagcggaagga

SEQ ID NO: 123572 - DNA, 17 bp, Arabidopsis thaliana
gtgaaccgattgaaccg

SEQ ID NO: 123573 - DNA, 17 bp, Arabidopsis thaliana
gtgaaccgccaaaagct

SEQ ID NO: 123574 - DNA, 17 bp, Arabidopsis thaliana
gtgaaccggtcgggtgt

SEQ ID NO: 123575 - DNA, 17 bp, Arabidopsis thaliana
gtgaacctgcgaaagga

SEQ ID NO: 123576 - DNA, 17 bp, Arabidopsis thaliana
gtgaacctgcggaagaa

SEQ ID NO: 123577 - DNA, 17 bp, Arabidopsis thaliana
gtgaacctgcggaagga

SEQ ID NO: 123578 - DNA, 17 bp, Arabidopsis thaliana
gtgaacctgcggaaggg

SEQ ID NO: 123579 - DNA, 17 bp, Arabidopsis thaliana
gtgaacgacatgtggcc

SEQ ID NO: 123580 - DNA, 17 bp, Arabidopsis thaliana
gtgaacgacatgtgtcc

SEQ ID NO: 123581 - DNA, 17 bp, Arabidopsis thaliana
gtgaacgacctgtgtcc

SEQ ID NO: 123582 - DNA, 17 bp, Arabidopsis thaliana
gtgaacgacctgtgtct

SEQ ID NO: 123583 - DNA, 17 bp, Arabidopsis thaliana
gtgaacgacctgtgtgc

SEQ ID NO: 123584 - DNA, 17 bp, Arabidopsis thaliana
gtgaacgacctgtgtgt

SEQ ID NO: 123585 - DNA, 17 bp, Arabidopsis thaliana
gtgaacgagtgtcctaa

SEQ ID NO: 123586 - DNA, 17 bp, Arabidopsis thaliana
gtgaacgatctgtgtcc

SEQ ID NO: 123587 - DNA, 17 bp, Arabidopsis thaliana
gtgaacgatgattgtgg

SEQ ID NO: 123588 - DNA, 17 bp, Arabidopsis thaliana
gtgaacgcgacttcgtg

SEQ ID NO: 123589 - DNA, 17 bp, Arabidopsis thaliana
gtgaacggcactcgcac

SEQ ID NO: 123590 - DNA, 17 bp, Arabidopsis thaliana
gtgaacggcacttgcac

SEQ ID NO: 123591 - DNA, 17 bp, Arabidopsis thaliana
gtgaacgtgccggagtg

SEQ ID NO: 123592 - DNA, 17 bp, Arabidopsis thaliana
gtgaactaaacgctaac

SEQ ID NO: 123593 - DNA, 17 bp, Arabidopsis thaliana
gtgaactaggtcagtac

SEQ ID NO: 123594 - DNA, 17 bp, Arabidopsis thaliana
gtgaactatgcctgaac

SEQ ID NO: 123595 - DNA, 17 bp, Arabidopsis thaliana
gtgaactatgcctgact

SEQ ID NO: 123596 - DNA, 17 bp, Arabidopsis thaliana
gtgaactatgcctgagc

SEQ ID NO: 123597 - DNA, 17 bp, Arabidopsis thaliana
gtgaactatgcctgagt

SEQ ID NO: 123598 - DNA, 17 bp, Arabidopsis thaliana
gtgaactatgcctgatc

SEQ ID NO: 123599 - DNA, 17 bp, Arabidopsis thaliana
gtgaactcgtgaaatgg

SEQ ID NO: 123600 - DNA, 17 bp, Arabidopsis thaliana
gtgaactcgtggaccat

SEQ ID NO: 123601 - DNA, 17 bp, Arabidopsis thaliana
gtgaactcttccttgtc

SEQ ID NO: 123602 - DNA, 17 bp, Arabidopsis thaliana
gtgaactgctacttcta

SEQ ID NO: 123603 - DNA, 17 bp, Arabidopsis thaliana
gtgaactgttaaatgac

SEQ ID NO: 123604 - DNA, 17 bp, Arabidopsis thaliana
gtgaacttcgcatgtga

SEQ ID NO: 123605 - DNA, 17 bp, Arabidopsis thaliana
gtgaacttctctcagga

SEQ ID NO: 123606 - DNA, 17 bp, Arabidopsis thaliana
gtgaactttcgttgact

SEQ ID NO: 123607 - DNA, 17 bp, Arabidopsis thaliana
gtgaactttgcacatta

SEQ ID NO: 123608 - DNA, 17 bp, Arabidopsis thaliana
gtgaacttttctgccag

SEQ ID NO: 123609 - DNA, 17 bp, Arabidopsis thaliana
gtgaactttttgctgcc

SEQ ID NO: 123610 - DNA, 17 bp, Arabidopsis thaliana
gtgaagaactttttccg

SEQ ID NO: 123611 - DNA, 17 bp, Arabidopsis thaliana
gtgaagaatgaacccaa

SEQ ID NO: 123612 - DNA, 17 bp, Arabidopsis thaliana
gtgaagaatgaacccga

SEQ ID NO: 123613 - DNA, 17 bp, Arabidopsis thaliana
gtgaagactctagatat

SEQ ID NO: 123614 - DNA, 17 bp, Arabidopsis thaliana
gtgaagcacaaggtcac

SEQ ID NO: 123615 - DNA, 17 bp, Arabidopsis thaliana
gtgaagcctgatgttat

SEQ ID NO: 123616 - DNA, 17 bp, Arabidopsis thaliana
gtgaagcgcctatcaga

SEQ ID NO: 123617 - DNA, 17 bp, Arabidopsis thaliana
gtgaagctaagagactg

SEQ ID NO: 123618 - DNA, 17 bp, Arabidopsis thaliana
gtgaaggaggtactggg

SEQ ID NO: 123619 - DNA, 17 bp, Arabidopsis thaliana
gtgaaggatcgaggtcg

SEQ ID NO: 123620 - DNA, 17 bp, Arabidopsis thaliana
gtgaaggcagccaaggc

SEQ ID NO: 123621 - DNA, 17 bp, Arabidopsis thaliana
gtgaaggcccaggaaat

SEQ ID NO: 123622 - DNA, 17 bp, Arabidopsis thaliana
gtgaaggctcgagatcg

SEQ ID NO: 123623 - DNA, 17 bp, Arabidopsis thaliana
gtgaagggcagtgttgg

SEQ ID NO: 123624 - DNA, 17 bp, Arabidopsis thaliana
gtgaagtcgaaacaagg

SEQ ID NO: 123625 - DNA, 17 bp, Arabidopsis thaliana
gtgaagtgttcggatcg

SEQ ID NO: 123626 - DNA, 17 bp, Arabidopsis thaliana
gtgaagtgttcggatgg

SEQ ID NO: 123627 - DNA, 17 bp, Arabidopsis thaliana
gtgaataaactggttct

SEQ ID NO: 123628 - DNA, 17 bp, Arabidopsis thaliana
gtgaatataagccacgg

SEQ ID NO: 123629 - DNA, 17 bp, Arabidopsis thaliana
gtgaatattgccacagc

SEQ ID NO: 123630 - DNA, 17 bp, Arabidopsis thaliana
gtgaatcccgagggtgt

SEQ ID NO: 123631 - DNA, 17 bp, Arabidopsis thaliana
gtgaatccgacatccac

SEQ ID NO: 123632 - DNA, 17 bp, Arabidopsis thaliana
gtgaatccgagtacttg

SEQ ID NO: 123633 - DNA, 17 bp, Arabidopsis thaliana
gtgaatccgattcatgt

SEQ ID NO: 123634 - DNA, 17 bp, Arabidopsis thaliana
gtgaatccgtcttccac

SEQ ID NO: 123635 - DNA, 17 bp, Arabidopsis thaliana
gtgaatcgaacgtgttg

SEQ ID NO: 123636 - DNA, 17 bp, Arabidopsis thaliana
gtgaatcgatttggccg

SEQ ID NO: 123637 - DNA, 17 bp, Arabidopsis thaliana
gtgaatcgatttggcct

SEQ ID NO: 123638 - DNA, 17 bp, Arabidopsis thaliana
gtgaatcggaggcgggg

SEQ ID NO: 123639 - DNA, 17 bp, Arabidopsis thaliana
gtgaatcggatgataat

SEQ ID NO: 123640 - DNA, 17 bp, Arabidopsis thaliana
gtgaatctccggaaact

SEQ ID NO: 123641 - DNA, 17 bp, Arabidopsis thaliana
gtgaatgccattcatgc

SEQ ID NO: 123642 - DNA, 17 bp, Arabidopsis thaliana
gtgaatgcctaatttca

SEQ ID NO: 123643 - DNA, 17 bp, Arabidopsis thaliana
gtgaatgcgttgccaga

SEQ ID NO: 123644 - DNA, 17 bp, Arabidopsis thaliana
gtgaatgcttctcttaa

SEQ ID NO: 123645 - DNA, 17 bp, Arabidopsis thaliana
gtgaatggacagagggt

SEQ ID NO: 123646 - DNA, 17 bp, Arabidopsis thaliana
gtgaatggtggccaaaa

SEQ ID NO: 123647 - DNA, 17 bp, Arabidopsis thaliana
gtgaatggttacggcgg

SEQ ID NO: 123648 - DNA, 17 bp, Arabidopsis thaliana
gtgaatggttttggaac

SEQ ID NO: 123649 - DNA, 17 bp, Arabidopsis thaliana
gtgaatgtctgcctgcg

SEQ ID NO: 123650 - DNA, 17 bp, Arabidopsis thaliana
gtgaattcaccatcgcg

SEQ ID NO: 123651 - DNA, 17 bp, Arabidopsis thaliana
gtgaattcgttcccgcg

SEQ ID NO: 123652 - DNA, 17 bp, Arabidopsis thaliana
gtgaattcgttcccggg

SEQ ID NO: 123653 - DNA, 17 bp, Arabidopsis thaliana
gtgaattcttcattgtc

SEQ ID NO: 123654 - DNA, 17 bp, Arabidopsis thaliana
gtgaattcttccctatc

SEQ ID NO: 123655 - DNA, 17 bp, Arabidopsis thaliana
gtgaattcttccctgtc

SEQ ID NO: 123656 - DNA, 17 bp, Arabidopsis thaliana
gtgaattcttccttgtc

SEQ ID NO: 123657 - DNA, 17 bp, Arabidopsis thaliana
gtgaattcttctttgtc

SEQ ID NO: 123658 - DNA, 17 bp, Arabidopsis thaliana
gtgaattgccaagagtg

SEQ ID NO: 123659 - DNA, 17 bp, Arabidopsis thaliana
gtgaattgctgagtgac

SEQ ID NO: 123660 - DNA, 17 bp, Arabidopsis thaliana
gtgaattgggtgtacgg

SEQ ID NO: 123661 - DNA, 17 bp, Arabidopsis thaliana
gtgaattggtcggcttg

SEQ ID NO: 123662 - DNA, 17 bp, Arabidopsis thaliana
gtgaattttgtgctgcc

SEQ ID NO: 123663 - DNA, 17 bp, Arabidopsis thaliana
gtgaattttgtggtgcc

SEQ ID NO: 123664 - DNA, 17 bp, Arabidopsis thaliana
gtgacaaaagcgcttcg

SEQ ID NO: 123665 - DNA, 17 bp, Arabidopsis thaliana
gtgacaaaccttgatcc

SEQ ID NO: 123666 - DNA, 17 bp, Arabidopsis thaliana
gtgacaaagtattagac

SEQ ID NO: 123667 - DNA, 17 bp, Arabidopsis thaliana
gtgacaaagtattaggg

SEQ ID NO: 123668 - DNA, 17 bp, Arabidopsis thaliana
gtgacaacaggcccatc

SEQ ID NO: 123669 - DNA, 17 bp, Arabidopsis thaliana
gtgacaaccacgcaaat

SEQ ID NO: 123670 - DNA, 17 bp, Arabidopsis thaliana
gtgacaagaaaccacag

SEQ ID NO: 123671 - DNA, 17 bp, Arabidopsis thaliana
gtgacaatacttcctcc

SEQ ID NO: 123672 - DNA, 17 bp, Arabidopsis thaliana
gtgacaatcttaaggtc

SEQ ID NO: 123673 - DNA, 17 bp, Arabidopsis thaliana
gtgacaattttaaggtc

SEQ ID NO: 123674 - DNA, 17 bp, Arabidopsis thaliana
gtgacacacagacagac

SEQ ID NO: 123675 - DNA, 17 bp, Arabidopsis thaliana
gtgacacatacagttaa

SEQ ID NO: 123676 - DNA, 17 bp, Arabidopsis thaliana
gtgacacatcatcacac

SEQ ID NO: 123677 - DNA, 17 bp, Arabidopsis thaliana
gtgacacccagacagac

SEQ ID NO: 123678 - DNA, 17 bp, Arabidopsis thaliana
gtgacacccaggcagac

SEQ ID NO: 123679 - DNA, 17 bp, Arabidopsis thaliana
gtgacacgaagcggttc

SEQ ID NO: 123680 - DNA, 17 bp, Arabidopsis thaliana
gtgacacgatcttatga

SEQ ID NO: 123681 - DNA, 17 bp, Arabidopsis thaliana
gtgacacgcttaggcac

SEQ ID NO: 123682 - DNA, 17 bp, Arabidopsis thaliana
gtgacacgtgctgattg

SEQ ID NO: 123683 - DNA, 17 bp, Arabidopsis thaliana
gtgacacgtgtaagccg

SEQ ID NO: 123684 - DNA, 17 bp, Arabidopsis thaliana
gtgacacgttaaggcat

SEQ ID NO: 123685 - DNA, 17 bp, Arabidopsis thaliana
gtgacacgtttaggcac

SEQ ID NO: 123686 - DNA, 17 bp, Arabidopsis thaliana
gtgacagaatttgcgtg

SEQ ID NO: 123687 - DNA, 17 bp, Arabidopsis thaliana
gtgacagaggcaggcag

SEQ ID NO: 123688 - DNA, 17 bp, Arabidopsis thaliana
gtgacagagttgtccga

SEQ ID NO: 123689 - DNA, 17 bp, Arabidopsis thaliana
gtgacagatcgtgggtt

SEQ ID NO: 123690 - DNA, 17 bp, Arabidopsis thaliana
gtgacagccccgtcgtg

SEQ ID NO: 123691 - DNA, 17 bp, Arabidopsis thaliana
gtgacagcggatcgagc

SEQ ID NO: 123692 - DNA, 17 bp, Arabidopsis thaliana
gtgacagctgtccaaat

SEQ ID NO: 123693 - DNA, 17 bp, Arabidopsis thaliana
gtgacaggtggcgacgg

SEQ ID NO: 123694 - DNA, 17 bp, Arabidopsis thaliana
gtgacaggttacgaatg

SEQ ID NO: 123695 - DNA, 17 bp, Arabidopsis thaliana
gtgacagtgatcacgtt

SEQ ID NO: 123696 - DNA, 17 bp, Arabidopsis thaliana
gtgacagttgagcaggt

SEQ ID NO: 123697 - DNA, 17 bp, Arabidopsis thaliana
gtgacataggtggccaa

SEQ ID NO: 123698 - DNA, 17 bp, Arabidopsis thaliana
gtgacatgaagcggttt

SEQ ID NO: 123699 - DNA, 17 bp, Arabidopsis thaliana
gtgacatgacagctttt

SEQ ID NO: 123700 - DNA, 17 bp, Arabidopsis thaliana
gtgacatgacgcagttt

SEQ ID NO: 123701 - DNA, 17 bp, Arabidopsis thaliana
gtgacatgagttgtaag

SEQ ID NO: 123702 - DNA, 17 bp, Arabidopsis thaliana
gtgacatgatccaggtg

SEQ ID NO: 123703 - DNA, 17 bp, Arabidopsis thaliana
gtgacatgatgtggttc

SEQ ID NO: 123704 - DNA, 17 bp, Arabidopsis thaliana
gtgacatggcttggtgt

SEQ ID NO: 123705 - DNA, 17 bp, Arabidopsis thaliana
gtgacatgtggcaagaa

SEQ ID NO: 123706 - DNA, 17 bp, Arabidopsis thaliana
gtgacatgtggtatctc

SEQ ID NO: 123707 - DNA, 17 bp, Arabidopsis thaliana
gtgacatgtttgacacg

SEQ ID NO: 123708 - DNA, 17 bp, Arabidopsis thaliana
gtgacattcactgatgg

SEQ ID NO: 123709 - DNA, 17 bp, Arabidopsis thaliana
gtgacattcactggtgt

SEQ ID NO: 123710 - DNA, 17 bp, Arabidopsis thaliana
gtgacattcctggttac

SEQ ID NO: 123711 - DNA, 17 bp, Arabidopsis thaliana
gtgacattgttcaagct

SEQ ID NO: 123712 - DNA, 17 bp, Arabidopsis thaliana
gtgacatttctcggttc

SEQ ID NO: 123713 - DNA, 17 bp, Arabidopsis thaliana
gtgacattttggaatag

SEQ ID NO: 123714 - DNA, 17 bp, Arabidopsis thaliana
gtgaccaaactcccccg

SEQ ID NO: 123715 - DNA, 17 bp, Arabidopsis thaliana
gtgaccaatcagaagaa

SEQ ID NO: 123716 - DNA, 17 bp, Arabidopsis thaliana
gtgaccacgttggtgct

SEQ ID NO: 123717 - DNA, 17 bp, Arabidopsis thaliana
gtgaccaggttggacta

SEQ ID NO: 123718 - DNA, 17 bp, Arabidopsis thaliana
gtgaccagttctcagga

SEQ ID NO: 123719 - DNA, 17 bp, Arabidopsis thaliana
gtgaccatcatgattgt

SEQ ID NO: 123720 - DNA, 17 bp, Arabidopsis thaliana
gtgaccatgagcttatc

SEQ ID NO: 123721 - DNA, 17 bp, Arabidopsis thaliana
gtgaccatgttgcagat

SEQ ID NO: 123722 - DNA, 17 bp, Arabidopsis thaliana
gtgaccattttatccct

SEQ ID NO: 123723 - DNA, 17 bp, Arabidopsis thaliana
gtgacccaaaaagtagt

SEQ ID NO: 123724 - DNA, 17 bp, Arabidopsis thaliana
gtgacccaacgatcgga

SEQ ID NO: 123725 - DNA, 17 bp, Arabidopsis thaliana
gtgacccaatactatcc

SEQ ID NO: 123726 - DNA, 17 bp, Arabidopsis thaliana
gtgacccagaaggtagt

SEQ ID NO: 123727 - DNA, 17 bp, Arabidopsis thaliana
gtgacccagtgacccag

SEQ ID NO: 123728 - DNA, 17 bp, Arabidopsis thaliana
gtgaccccaggtcaggc

SEQ ID NO: 123729 - DNA, 17 bp, Arabidopsis thaliana
gtgacccgcataagggc

SEQ ID NO: 123730 - DNA, 17 bp, Arabidopsis thaliana
gtgacccggtgaaccag

SEQ ID NO: 123731 - DNA, 17 bp, Arabidopsis thaliana
gtgaccctcccatgtga

SEQ ID NO: 123732 - DNA, 17 bp, Arabidopsis thaliana
gtgaccgacgccggcgc

SEQ ID NO: 123733 - DNA, 17 bp, Arabidopsis thaliana
gtgaccgacgccggcgt

SEQ ID NO: 123734 - DNA, 17 bp, Arabidopsis thaliana
gtgaccgacgcggatta

SEQ ID NO: 123735 - DNA, 17 bp, Arabidopsis thaliana
gtgaccgagagcatcga

SEQ ID NO: 123736 - DNA, 17 bp, Arabidopsis thaliana
gtgaccgatagcgaagt

SEQ ID NO: 123737 - DNA, 17 bp, Arabidopsis thaliana
gtgaccgcctagaacag

SEQ ID NO: 123738 - DNA, 17 bp, Arabidopsis thaliana
gtgaccgctgggtttgc

SEQ ID NO: 123739 - DNA, 17 bp, Arabidopsis thaliana
gtgaccggtgttggtgg

SEQ ID NO: 123740 - DNA, 17 bp, Arabidopsis thaliana
gtgaccgttgctcatct

SEQ ID NO: 123741 - DNA, 17 bp, Arabidopsis thaliana
gtgacctagaaagtagt

SEQ ID NO: 123742 - DNA, 17 bp, Arabidopsis thaliana
gtgacctattccaaaat

SEQ ID NO: 123743 - DNA, 17 bp, Arabidopsis thaliana
gtgacctccaccagctt

SEQ ID NO: 123744 - DNA, 17 bp, Arabidopsis thaliana
gtgacctcccggaaagt

SEQ ID NO: 123745 - DNA, 17 bp, Arabidopsis thaliana
gtgacctcccgggaagt

SEQ ID NO: 123746 - DNA, 17 bp, Arabidopsis thaliana
gtgacctgaatagacag

SEQ ID NO: 123747 - DNA, 17 bp, Arabidopsis thaliana
gtgacctgatgacaggg

SEQ ID NO: 123748 - DNA, 17 bp, Arabidopsis thaliana
gtgacctggtttacggc

SEQ ID NO: 123749 - DNA, 17 bp, Arabidopsis thaliana
gtgaccttagctcagtt

SEQ ID NO: 123750 - DNA, 17 bp, Arabidopsis thaliana
gtgaccttcagccgctt

SEQ ID NO: 123751 - DNA, 17 bp, Arabidopsis thaliana
gtgaccttccggaaagt

SEQ ID NO: 123752 - DNA, 17 bp, Arabidopsis thaliana
gtgacctttcatttatc

SEQ ID NO: 123753 - DNA, 17 bp, Arabidopsis thaliana
gtgacctttctggctgt

SEQ ID NO: 123754 - DNA, 17 bp, Arabidopsis thaliana
gtgacctttgtcttgtg

SEQ ID NO: 123755 - DNA, 17 bp, Arabidopsis thaliana
gtgacgaaaaatgtgct

SEQ ID NO: 123756 - DNA, 17 bp, Arabidopsis thaliana
gtgacgacaaggtcaag

SEQ ID NO: 123757 - DNA, 17 bp, Arabidopsis thaliana
gtgacgacaatggagcc

SEQ ID NO: 123758 - DNA, 17 bp, Arabidopsis thaliana
gtgacgacccgagagcg

SEQ ID NO: 123759 - DNA, 17 bp, Arabidopsis thaliana
gtgacgaccgagttatg

SEQ ID NO: 123760 - DNA, 17 bp, Arabidopsis thaliana
gtgacgacgagatcaaa

SEQ ID NO: 123761 - DNA, 17 bp, Arabidopsis thaliana
gtgacgactctcggcaa

SEQ ID NO: 123762 - DNA, 17 bp, Arabidopsis thaliana
gtgacgagaagctgaca

SEQ ID NO: 123763 - DNA, 17 bp, Arabidopsis thaliana
gtgacgagagagtttgt

SEQ ID NO: 123764 - DNA, 17 bp, Arabidopsis thaliana
gtgacgagtctagcggt

SEQ ID NO: 123765 - DNA, 17 bp, Arabidopsis thaliana
gtgacgagttggcggga

SEQ ID NO: 123766 - DNA, 17 bp, Arabidopsis thaliana
gtgacgatctcgtaatg

SEQ ID NO: 123767 - DNA, 17 bp, Arabidopsis thaliana
gtgacgatggtgagctc

SEQ ID NO: 123768 - DNA, 17 bp, Arabidopsis thaliana
gtgacgcactgtgtcgc

SEQ ID NO: 123769 - DNA, 17 bp, Arabidopsis thaliana
gtgacgcgcatgaatgg

SEQ ID NO: 123770 - DNA, 17 bp, Arabidopsis thaliana
gtgacgcggactgatgg

SEQ ID NO: 123771 - DNA, 17 bp, Arabidopsis thaliana
gtgacgcggattacggt

SEQ ID NO: 123772 - DNA, 17 bp, Arabidopsis thaliana
gtgacggacctaaatgg

SEQ ID NO: 123773 - DNA, 17 bp, Arabidopsis thaliana
gtgacggacctgaaggc

SEQ ID NO: 123774 - DNA, 17 bp, Arabidopsis thaliana
gtgacggagaattagag

SEQ ID NO: 123775 - DNA, 17 bp, Arabidopsis thaliana
gtgacggagaattaggg

SEQ ID NO: 123776 - DNA, 17 bp, Arabidopsis thaliana
gtgacggagagttaggg

SEQ ID NO: 123777 - DNA, 17 bp, Arabidopsis thaliana
gtgacggagatttagag

SEQ ID NO: 123778 - DNA, 17 bp, Arabidopsis thaliana
gtgacggaggcaggcag

SEQ ID NO: 123779 - DNA, 17 bp, Arabidopsis thaliana
gtgacggatctcgtcca

SEQ ID NO: 123780 - DNA, 17 bp, Arabidopsis thaliana
gtgacggcccatcgacc

SEQ ID NO: 123781 - DNA, 17 bp, Arabidopsis thaliana
gtgacggcgcaattctc

SEQ ID NO: 123782 - DNA, 17 bp, Arabidopsis thaliana
gtgacggcggcggtggg

SEQ ID NO: 123783 - DNA, 17 bp, Arabidopsis thaliana
gtgacggctgtggtgtg

SEQ ID NO: 123784 - DNA, 17 bp, Arabidopsis thaliana
gtgacggcttgtgcggc

SEQ ID NO: 123785 - DNA, 17 bp, Arabidopsis thaliana
gtgacgggaatcacttg

SEQ ID NO: 123786 - DNA, 17 bp, Arabidopsis thaliana
gtgacgggatccaaggt

SEQ ID NO: 123787 - DNA, 17 bp, Arabidopsis thaliana
gtgacgggtttggcagg

SEQ ID NO: 123788 - DNA, 17 bp, Arabidopsis thaliana
gtgacggtttcgaaaag

SEQ ID NO: 123789 - DNA, 17 bp, Arabidopsis thaliana
gtgacggtttgttgtcc

SEQ ID NO: 123790 - DNA, 17 bp, Arabidopsis thaliana
gtgacgtatgtgtctgg

SEQ ID NO: 123791 - DNA, 17 bp, Arabidopsis thaliana
gtgacgtgccggagtgg

SEQ ID NO: 123792 - DNA, 17 bp, Arabidopsis thaliana
gtgactaaagcctaatt

SEQ ID NO: 123793 - DNA, 17 bp, Arabidopsis thaliana
gtgactaaatccaggtc

SEQ ID NO: 123794 - DNA, 17 bp, Arabidopsis thaliana
gtgactaagtgtcgtta

SEQ ID NO: 123795 - DNA, 17 bp, Arabidopsis thaliana
gtgactaattcggcgtt

SEQ ID NO: 123796 - DNA, 17 bp, Arabidopsis thaliana
gtgactacgttttgcgg

SEQ ID NO: 123797 - DNA, 17 bp, Arabidopsis thaliana
gtgactactgcaaactt

SEQ ID NO: 123798 - DNA, 17 bp, Arabidopsis thaliana
gtgactactttgcaaaa

SEQ ID NO: 123799 - DNA, 17 bp, Arabidopsis thaliana
gtgactagacacacaat

SEQ ID NO: 123800 - DNA, 17 bp, Arabidopsis thaliana
gtgactaggattggtga

SEQ ID NO: 123801 - DNA, 17 bp, Arabidopsis thaliana
gtgactaggtgagtgcc

SEQ ID NO: 123802 - DNA, 17 bp, Arabidopsis thaliana
gtgactagttactaaag

SEQ ID NO: 123803 - DNA, 17 bp, Arabidopsis thaliana
gtgactatcatcgacct

SEQ ID NO: 123804 - DNA, 17 bp, Arabidopsis thaliana
gtgactattttcccaat

SEQ ID NO: 123805 - DNA, 17 bp, Arabidopsis thaliana
gtgactcaactagccgg

SEQ ID NO: 123806 - DNA, 17 bp, Arabidopsis thaliana
gtgactcaaggttagtt

SEQ ID NO: 123807 - DNA, 17 bp, Arabidopsis thaliana
gtgactcacagtcagca

SEQ ID NO: 123808 - DNA, 17 bp, Arabidopsis thaliana
gtgactcagaaggtagt

SEQ ID NO: 123809 - DNA, 17 bp, Arabidopsis thaliana
gtgactcagaaggtggt

SEQ ID NO: 123810 - DNA, 17 bp, Arabidopsis thaliana
gtgactcatcgttgttt

SEQ ID NO: 123811 - DNA, 17 bp, Arabidopsis thaliana
gtgactcccacgttccg

SEQ ID NO: 123812 - DNA, 17 bp, Arabidopsis thaliana
gtgactcgaacccagca

SEQ ID NO: 123813 - DNA, 17 bp, Arabidopsis thaliana
gtgactcggttaaaccg

SEQ ID NO: 123814 - DNA, 17 bp, Arabidopsis thaliana
gtgactcgtagcttatc

SEQ ID NO: 123815 - DNA, 17 bp, Arabidopsis thaliana
gtgactctcaaagtgcc

SEQ ID NO: 123816 - DNA, 17 bp, Arabidopsis thaliana
gtgactctccacaagat

SEQ ID NO: 123817 - DNA, 17 bp, Arabidopsis thaliana
gtgactctctcaggttg

SEQ ID NO: 123818 - DNA, 17 bp, Arabidopsis thaliana
gtgactctgtcaaccgg

SEQ ID NO: 123819 - DNA, 17 bp, Arabidopsis thaliana
gtgactctgttcgctca

SEQ ID NO: 123820 - DNA, 17 bp, Arabidopsis thaliana
gtgactcttggcgttcc

SEQ ID NO: 123821 - DNA, 17 bp, Arabidopsis thaliana
gtgactgagttttgcgg

SEQ ID NO: 123822 - DNA, 17 bp, Arabidopsis thaliana
gtgactgatccctgggg

SEQ ID NO: 123823 - DNA, 17 bp, Arabidopsis thaliana
gtgactgatttaggcaa

SEQ ID NO: 123824 - DNA, 17 bp, Arabidopsis thaliana
gtgactgcgttttgcgc

SEQ ID NO: 123825 - DNA, 17 bp, Arabidopsis thaliana
gtgactgcgttttgtgg

SEQ ID NO: 123826 - DNA, 17 bp, Arabidopsis thaliana
gtgactgctctggatta

SEQ ID NO: 123827 - DNA, 17 bp, Arabidopsis thaliana
gtgactggaacggtgct

SEQ ID NO: 123828 - DNA, 17 bp, Arabidopsis thaliana
gtgactggaatgccaag

SEQ ID NO: 123829 - DNA, 17 bp, Arabidopsis thaliana
gtgactggagtgaagtc

SEQ ID NO: 123830 - DNA, 17 bp, Arabidopsis thaliana
gtgactggctgcggagg

SEQ ID NO: 123831 - DNA, 17 bp, Arabidopsis thaliana
gtgactggtcgagtggc

SEQ ID NO: 123832 - DNA, 17 bp, Arabidopsis thaliana
gtgactggttgatcgtg

SEQ ID NO: 123833 - DNA, 17 bp, Arabidopsis thaliana
gtgactgtaattcggcc

SEQ ID NO: 123834 - DNA, 17 bp, Arabidopsis thaliana
gtgactgtcggaaccat

SEQ ID NO: 123835 - DNA, 17 bp, Arabidopsis thaliana
gtgactgtcggtaggaa

SEQ ID NO: 123836 - DNA, 17 bp, Arabidopsis thaliana
gtgacttaatgtatccg

SEQ ID NO: 123837 - DNA, 17 bp, Arabidopsis thaliana
gtgacttaggttctgga

SEQ ID NO: 123838 - DNA, 17 bp, Arabidopsis thaliana
gtgacttagtgacagcg

SEQ ID NO: 123839 - DNA, 17 bp, Arabidopsis thaliana
gtgacttatgttttgca

SEQ ID NO: 123840 - DNA, 17 bp, Arabidopsis thaliana
gtgacttatttacaatg

SEQ ID NO: 123841 - DNA, 17 bp, Arabidopsis thaliana
gtgacttcaaccagcgg

SEQ ID NO: 123842 - DNA, 17 bp, Arabidopsis thaliana
gtgacttcaggatctgc

SEQ ID NO: 123843 - DNA, 17 bp, Arabidopsis thaliana
gtgacttgacatcacat

SEQ ID NO: 123844 - DNA, 17 bp, Arabidopsis thaliana
gtgacttgcccaagaag

SEQ ID NO: 123845 - DNA, 17 bp, Arabidopsis thaliana
gtgacttgccgtttcgg

SEQ ID NO: 123846 - DNA, 17 bp, Arabidopsis thaliana
gtgacttggagtccaat

SEQ ID NO: 123847 - DNA, 17 bp, Arabidopsis thaliana
gtgacttgtagcgactc

SEQ ID NO: 123848 - DNA, 17 bp, Arabidopsis thaliana
gtgacttgtttaactgt

SEQ ID NO: 123849 - DNA, 17 bp, Arabidopsis thaliana
gtgactttaatgtatcc

SEQ ID NO: 123850 - DNA, 17 bp, Arabidopsis thaliana
gtgactttagttctgta

SEQ ID NO: 123851 - DNA, 17 bp, Arabidopsis thaliana
gtgactttcgccatgct

SEQ ID NO: 123852 - DNA, 17 bp, Arabidopsis thaliana
gtgactttgtctctgca

SEQ ID NO: 123853 - DNA, 17 bp, Arabidopsis thaliana
gtgactttgtgagtcgc

SEQ ID NO: 123854 - DNA, 17 bp, Arabidopsis thaliana
gtgacttttaccatcgg

SEQ ID NO: 123855 - DNA, 17 bp, Arabidopsis thaliana
gtgacttttccgttgat

SEQ ID NO: 123856 - DNA, 17 bp, Arabidopsis thaliana
gtgacttttgagattgt

SEQ ID NO: 123857 - DNA, 17 bp, Arabidopsis thaliana
gtgacttttggcctttg

SEQ ID NO: 123858 - DNA, 17 bp, Arabidopsis thaliana
gtgacttttggcttttg

SEQ ID NO: 123859 - DNA, 17 bp, Arabidopsis thaliana
gtgagaaactctcttga

SEQ ID NO: 123860 - DNA, 17 bp, Arabidopsis thaliana
gtgagaaatcctttgcc

SEQ ID NO: 123861 - DNA, 17 bp, Arabidopsis thaliana
gtgagaaatgaattcgg

SEQ ID NO: 123862 - DNA, 17 bp, Arabidopsis thaliana
gtgagaactccatgggg

SEQ ID NO: 123863 - DNA, 17 bp, Arabidopsis thaliana
gtgagaacttgaccttt

SEQ ID NO: 123864 - DNA, 17 bp, Arabidopsis thaliana
gtgagaagcggtcgtgt

SEQ ID NO: 123865 - DNA, 17 bp, Arabidopsis thaliana
gtgagaagctcggtggt

SEQ ID NO: 123866 - DNA, 17 bp, Arabidopsis thaliana
gtgagaatcgtgtgtag

SEQ ID NO: 123867 - DNA, 17 bp, Arabidopsis thaliana
gtgagaatcgtgtttag

SEQ ID NO: 123868 - DNA, 17 bp, Arabidopsis thaliana
gtgagaatggttgttca

SEQ ID NO: 123869 - DNA, 17 bp, Arabidopsis thaliana
gtgagacaggttagttc

SEQ ID NO: 123870 - DNA, 17 bp, Arabidopsis thaliana
gtgagacaggttagttt

SEQ ID NO: 123871 - DNA, 17 bp, Arabidopsis thaliana
gtgagacagttcggtcc

SEQ ID NO: 123872 - DNA, 17 bp, Arabidopsis thaliana
gtgagacagtttgccga

SEQ ID NO: 123873 - DNA, 17 bp, Arabidopsis thaliana
gtgagacctgcgggaaa

SEQ ID NO: 123874 - DNA, 17 bp, Arabidopsis thaliana
gtgagacggatatcgga

SEQ ID NO: 123875 - DNA, 17 bp, Arabidopsis thaliana
gtgagacggtgaagaag

SEQ ID NO: 123876 - DNA, 17 bp, Arabidopsis thaliana
gtgagacggtgggggat

SEQ ID NO: 123877 - DNA, 17 bp, Arabidopsis thaliana
gtgagacgtggcggatt

SEQ ID NO: 123878 - DNA, 17 bp, Arabidopsis thaliana
gtgagactatcgaatcc

SEQ ID NO: 123879 - DNA, 17 bp, Arabidopsis thaliana
gtgagactgcggatttc

SEQ ID NO: 123880 - DNA, 17 bp, Arabidopsis thaliana
gtgagactggtttcaca

SEQ ID NO: 123881 - DNA, 17 bp, Arabidopsis thaliana
gtgagactttgattctt

SEQ ID NO: 123882 - DNA, 17 bp, Arabidopsis thaliana
gtgagagacccgggttc

SEQ ID NO: 123883 - DNA, 17 bp, Arabidopsis thaliana
gtgagagagagaagtgg

SEQ ID NO: 123884 - DNA, 17 bp, Arabidopsis thaliana
gtgagagagaggtttag

SEQ ID NO: 123885 - DNA, 17 bp, Arabidopsis thaliana
gtgagagaggagctttc

SEQ ID NO: 123886 - DNA, 17 bp, Arabidopsis thaliana
gtgagagccagcgccca

SEQ ID NO: 123887 - DNA, 17 bp, Arabidopsis thaliana
gtgagagccccgtcgtg

SEQ ID NO: 123888 - DNA, 17 bp, Arabidopsis thaliana
gtgagataccactctgg

SEQ ID NO: 123889 - DNA, 17 bp, Arabidopsis thaliana
gtgagataccttcttgg

SEQ ID NO: 123890 - DNA, 17 bp, Arabidopsis thaliana
gtgagataggccctgtt

SEQ ID NO: 123891 - DNA, 17 bp, Arabidopsis thaliana
gtgagatagtaaacgcc

SEQ ID NO: 123892 - DNA, 17 bp, Arabidopsis thaliana
gtgagatcaggagcagt

SEQ ID NO: 123893 - DNA, 17 bp, Arabidopsis thaliana
gtgagatcgagtggtgg

SEQ ID NO: 123894 - DNA, 17 bp, Arabidopsis thaliana
gtgagatttgatttggg

SEQ ID NO: 123895 - DNA, 17 bp, Arabidopsis thaliana
gtgagatttgtgttggt

SEQ ID NO: 123896 - DNA, 17 bp, Arabidopsis thaliana
gtgagcactttgccatc

SEQ ID NO: 123897 - DNA, 17 bp, Arabidopsis thaliana
gtgagcagacagaacag

SEQ ID NO: 123898 - DNA, 17 bp, Arabidopsis thaliana
gtgagcagccgcttagt

SEQ ID NO: 123899 - DNA, 17 bp, Arabidopsis thaliana
gtgagcatgcctgtcgg

SEQ ID NO: 123900 - DNA, 17 bp, Arabidopsis thaliana
gtgagcccaaacttggc

SEQ ID NO: 123901 - DNA, 17 bp, Arabidopsis thaliana
gtgagccgactgtccgg

SEQ ID NO: 123902 - DNA, 17 bp, Arabidopsis thaliana
gtgagccgccgccataa

SEQ ID NO: 123903 - DNA, 17 bp, Arabidopsis thaliana
gtgagcctgggcgactg

SEQ ID NO: 123904 - DNA, 17 bp, Arabidopsis thaliana
gtgagccttggcgactg

SEQ ID NO: 123905 - DNA, 17 bp, Arabidopsis thaliana
gtgagcgacattcgggt

SEQ ID NO: 123906 - DNA, 17 bp, Arabidopsis thaliana
gtgagcgacctgcggtg

SEQ ID NO: 123907 - DNA, 17 bp, Arabidopsis thaliana
gtgagcgactgggtttc

SEQ ID NO: 123908 - DNA, 17 bp, Arabidopsis thaliana
gtgagcggcactcggtc

SEQ ID NO: 123909 - DNA, 17 bp, Arabidopsis thaliana
gtgagctggggttagac

SEQ ID NO: 123910 - DNA, 17 bp, Arabidopsis thaliana
gtgagctttgccttttg

SEQ ID NO: 123911 - DNA, 17 bp, Arabidopsis thaliana
gtgaggaatagcgggta

SEQ ID NO: 123912 - DNA, 17 bp, Arabidopsis thaliana
gtgaggacactgacgat

SEQ ID NO: 123913 - DNA, 17 bp, Arabidopsis thaliana
gtgaggatcaagcggtt

SEQ ID NO: 123914 - DNA, 17 bp, Arabidopsis thaliana
gtgaggattacaggctt

SEQ ID NO: 123915 - DNA, 17 bp, Arabidopsis thaliana
gtgaggattctgagtca

SEQ ID NO: 123916 - DNA, 17 bp, Arabidopsis thaliana
gtgaggccaaacttggc

SEQ ID NO: 123917 - DNA, 17 bp, Arabidopsis thaliana
gtgaggccaaacttggg

SEQ ID NO: 123918 - DNA, 17 bp, Arabidopsis thaliana
gtgaggccaaacttggt

SEQ ID NO: 123919 - DNA, 17 bp, Arabidopsis thaliana
gtgaggccaaactttgc

SEQ ID NO: 123920 - DNA, 17 bp, Arabidopsis thaliana
gtgagggactctgtgaa

SEQ ID NO: 123921 - DNA, 17 bp, Arabidopsis thaliana
gtgagggactctgttaa

SEQ ID NO: 123922 - DNA, 17 bp, Arabidopsis thaliana
gtgagggcacgtctgcc

SEQ ID NO: 123923 - DNA, 17 bp, Arabidopsis thaliana
gtgagggttcaagtccc

SEQ ID NO: 123924 - DNA, 17 bp, Arabidopsis thaliana
gtgaggtctgctgcttc

SEQ ID NO: 123925 - DNA, 17 bp, Arabidopsis thaliana
gtgaggtcttattccga

SEQ ID NO: 123926 - DNA, 17 bp, Arabidopsis thaliana
gtgaggtggctaaggag

SEQ ID NO: 123927 - DNA, 17 bp, Arabidopsis thaliana
gtgaggtgtccaactta

SEQ ID NO: 123928 - DNA, 17 bp, Arabidopsis thaliana
gtgaggttggccgagtg

SEQ ID NO: 123929 - DNA, 17 bp, Arabidopsis thaliana
gtgaggttgtgaattcg

SEQ ID NO: 123930 - DNA, 17 bp, Arabidopsis thaliana
gtgaggtttcaccatgt

SEQ ID NO: 123931 - DNA, 17 bp, Arabidopsis thaliana
gtgaggtttggttgatc

SEQ ID NO: 123932 - DNA, 17 bp, Arabidopsis thaliana
gtgagtaaacccgtaag

SEQ ID NO: 123933 - DNA, 17 bp, Arabidopsis thaliana
gtgagtaagacgtgtgt

SEQ ID NO: 123934 - DNA, 17 bp, Arabidopsis thaliana
gtgagtaagattcctag

SEQ ID NO: 123935 - DNA, 17 bp, Arabidopsis thaliana
gtgagtaaggttcgcag

SEQ ID NO: 123936 - DNA, 17 bp, Arabidopsis thaliana
gtgagtaaggttcgctg

SEQ ID NO: 123937 - DNA, 17 bp, Arabidopsis thaliana
gtgagtagtttcccgat

SEQ ID NO: 123938 - DNA, 17 bp, Arabidopsis thaliana
gtgagtcagggcctaag

SEQ ID NO: 123939 - DNA, 17 bp, Arabidopsis thaliana
gtgagtccaggtcttca

SEQ ID NO: 123940 - DNA, 17 bp, Arabidopsis thaliana
gtgagtccctgtcctga

SEQ ID NO: 123941 - DNA, 17 bp, Arabidopsis thaliana
gtgagtcgatttggccg

SEQ ID NO: 123942 - DNA, 17 bp, Arabidopsis thaliana
gtgagtcgatttggctg

SEQ ID NO: 123943 - DNA, 17 bp, Arabidopsis thaliana
gtgagtcgtgtgactat

SEQ ID NO: 123944 - DNA, 17 bp, Arabidopsis thaliana
gtgagtctattaggccg

SEQ ID NO: 123945 - DNA, 17 bp, Arabidopsis thaliana
gtgagtctatttggccg

SEQ ID NO: 123946 - DNA, 17 bp, Arabidopsis thaliana
gtgagtctgggtggcgc

SEQ ID NO: 123947 - DNA, 17 bp, Arabidopsis thaliana
gtgagtgccggtttgag

SEQ ID NO: 123948 - DNA, 17 bp, Arabidopsis thaliana
gtgagtgcgcagaccgt

SEQ ID NO: 123949 - DNA, 17 bp, Arabidopsis thaliana
gtgagtgcgtgaccatg

SEQ ID NO: 123950 - DNA, 17 bp, Arabidopsis thaliana
gtgagtgtttgtcggac

SEQ ID NO: 123951 - DNA, 17 bp, Arabidopsis thaliana
gtgagttatgatcttgt

SEQ ID NO: 123952 - DNA, 17 bp, Arabidopsis thaliana
gtgagttccagcgacgg

SEQ ID NO: 123953 - DNA, 17 bp, Arabidopsis thaliana
gtgagttcgagcgacgg

SEQ ID NO: 123954 - DNA, 17 bp, Arabidopsis thaliana
gtgagttcgatcctcac

SEQ ID NO: 123955 - DNA, 17 bp, Arabidopsis thaliana
gtgagttcggtcctcac

SEQ ID NO: 123956 - DNA, 17 bp, Arabidopsis thaliana
gtgagttgactaaaacc

SEQ ID NO: 123957 - DNA, 17 bp, Arabidopsis thaliana
gtgagtttcacactgac

SEQ ID NO: 123958 - DNA, 17 bp, Arabidopsis thaliana
gtgagtttccgcgctac

SEQ ID NO: 123959 - DNA, 17 bp, Arabidopsis thaliana
gtgagtttcttcgcata

SEQ ID NO: 123960 - DNA, 17 bp, Arabidopsis thaliana
gtgagtttggctggggc

SEQ ID NO: 123961 - DNA, 17 bp, Arabidopsis thaliana
gtgataattgggaaaca

SEQ ID NO: 123962 - DNA, 17 bp, Arabidopsis thaliana
gtgatacccggaattgc

SEQ ID NO: 123963 - DNA, 17 bp, Arabidopsis thaliana
gtgataccttttcggaa

SEQ ID NO: 123964 - DNA, 17 bp, Arabidopsis thaliana
gtgatacgattttgggt

SEQ ID NO: 123965 - DNA, 17 bp, Arabidopsis thaliana
gtgatacgtgggcgtgg

SEQ ID NO: 123966 - DNA, 17 bp, Arabidopsis thaliana
gtgatactcgacttcga

SEQ ID NO: 123967 - DNA, 17 bp, Arabidopsis thaliana
gtgatagaaccggacat

SEQ ID NO: 123968 - DNA, 17 bp, Arabidopsis thaliana
gtgatagagctccaatt

SEQ ID NO: 123969 - DNA, 17 bp, Arabidopsis thaliana
gtgatagagttactcga

SEQ ID NO: 123970 - DNA, 17 bp, Arabidopsis thaliana
gtgatagattcagatct

SEQ ID NO: 123971 - DNA, 17 bp, Arabidopsis thaliana
gtgatagatttgggctt

SEQ ID NO: 123972 - DNA, 17 bp, Arabidopsis thaliana
gtgatagccaccccccc

SEQ ID NO: 123973 - DNA, 17 bp, Arabidopsis thaliana
gtgatagcggttattag

SEQ ID NO: 123974 - DNA, 17 bp, Arabidopsis thaliana
gtgatagtcgacgataa

SEQ ID NO: 123975 - DNA, 17 bp, Arabidopsis thaliana
gtgatatcctgttttgg

SEQ ID NO: 123976 - DNA, 17 bp, Arabidopsis thaliana
gtgatatggaccaactt

SEQ ID NO: 123977 - DNA, 17 bp, Arabidopsis thaliana
gtgatcaaagattgtcg

SEQ ID NO: 123978 - DNA, 17 bp, Arabidopsis thaliana
gtgatcaacgctttttt

SEQ ID NO: 123979 - DNA, 17 bp, Arabidopsis thaliana
gtgatcaactaaccttc

SEQ ID NO: 123980 - DNA, 17 bp, Arabidopsis thaliana
gtgatcaactaaccttg

SEQ ID NO: 123981 - DNA, 17 bp, Arabidopsis thaliana
gtgatcaactaatttgc

SEQ ID NO: 123982 - DNA, 17 bp, Arabidopsis thaliana
gtgatcaactttgccac

SEQ ID NO: 123983 - DNA, 17 bp, Arabidopsis thaliana
gtgatcacagaatgcgg

SEQ ID NO: 123984 - DNA, 17 bp, Arabidopsis thaliana
gtgatcacccgcgctat

SEQ ID NO: 123985 - DNA, 17 bp, Arabidopsis thaliana
gtgatcacgcacgagtc

SEQ ID NO: 123986 - DNA, 17 bp, Arabidopsis thaliana
gtgatcactaatccttt

SEQ ID NO: 123987 - DNA, 17 bp, Arabidopsis thaliana
gtgatcactgatctacg

SEQ ID NO: 123988 - DNA, 17 bp, Arabidopsis thaliana
gtgatcatccactcaac

SEQ ID NO: 123989 - DNA, 17 bp, Arabidopsis thaliana
gtgatcatccgcactat

SEQ ID NO: 123990 - DNA, 17 bp, Arabidopsis thaliana
gtgatcatccgcgctac

SEQ ID NO: 123991 - DNA, 17 bp, Arabidopsis thaliana
gtgatccctgtataggc

SEQ ID NO: 123992 - DNA, 17 bp, Arabidopsis thaliana
gtgatcccttaacagag

SEQ ID NO: 123993 - DNA, 17 bp, Arabidopsis thaliana
gtgatccgacggtgccg

SEQ ID NO: 123994 - DNA, 17 bp, Arabidopsis thaliana
gtgatccggtcgacagt

SEQ ID NO: 123995 - DNA, 17 bp, Arabidopsis thaliana
gtgatcgagtagttcgg

SEQ ID NO: 123996 - DNA, 17 bp, Arabidopsis thaliana
gtgatcgagtgtccggt

SEQ ID NO: 123997 - DNA, 17 bp, Arabidopsis thaliana
gtgatcgcaggagatag

SEQ ID NO: 123998 - DNA, 17 bp, Arabidopsis thaliana
gtgatcgccgacgaatt

SEQ ID NO: 123999 - DNA, 17 bp, Arabidopsis thaliana
gtgatcggtgaagattt

SEQ ID NO: 124000 - DNA, 17 bp, Arabidopsis thaliana
gtgatcggtgtcctgtg

SEQ ID NO: 124001 - DNA, 17 bp, Arabidopsis thaliana
gtgatcgtggtctgcag

SEQ ID NO: 124002 - DNA, 17 bp, Arabidopsis thaliana
gtgatcgtggtggttgc

SEQ ID NO: 124003 - DNA, 17 bp, Arabidopsis thaliana
gtgatcgttctgcagca

SEQ ID NO: 124004 - DNA, 17 bp, Arabidopsis thaliana
gtgatctaaggttgcgg

SEQ ID NO: 124005 - DNA, 17 bp, Arabidopsis thaliana
gtgatctacttactaat

SEQ ID NO: 124006 - DNA, 17 bp, Arabidopsis thaliana
gtgatctagagactcat

SEQ ID NO: 124007 - DNA, 17 bp, Arabidopsis thaliana
gtgatctcggtcgattt

SEQ ID NO: 124008 - DNA, 17 bp, Arabidopsis thaliana
gtgatctctgaccaagg

SEQ ID NO: 124009 - DNA, 17 bp, Arabidopsis thaliana
gtgatctctgtcttcgt

SEQ ID NO: 124010 - DNA, 17 bp, Arabidopsis thaliana
gtgatctgactagtcca

SEQ ID NO: 124011 - DNA, 17 bp, Arabidopsis thaliana
gtgatctgactatccac

SEQ ID NO: 124012 - DNA, 17 bp, Arabidopsis thaliana
gtgatctgagactgtcc

SEQ ID NO: 124013 - DNA, 17 bp, Arabidopsis thaliana
gtgatctgagagctttg

SEQ ID NO: 124014 - DNA, 17 bp, Arabidopsis thaliana
gtgatctgatagttctc

SEQ ID NO: 124015 - DNA, 17 bp, Arabidopsis thaliana
gtgatctgcctagtcca

SEQ ID NO: 124016 - DNA, 17 bp, Arabidopsis thaliana
gtgatctgctcggtgtt

SEQ ID NO: 124017 - DNA, 17 bp, Arabidopsis thaliana
gtgatctgtcagttgcg

SEQ ID NO: 124018 - DNA, 17 bp, Arabidopsis thaliana
gtgatcttctctcacca

SEQ ID NO: 124019 - DNA, 17 bp, Arabidopsis thaliana
gtgatcttgtgactgtg

SEQ ID NO: 124020 - DNA, 17 bp, Arabidopsis thaliana
gtgatctttgcaggttg

SEQ ID NO: 124021 - DNA, 17 bp, Arabidopsis thaliana
gtgatgaaagtcttggt

SEQ ID NO: 124022 - DNA, 17 bp, Arabidopsis thaliana
gtgatgaacgccattgt

SEQ ID NO: 124023 - DNA, 17 bp, Arabidopsis thaliana
gtgatgaacggagtagc

SEQ ID NO: 124024 - DNA, 17 bp, Arabidopsis thaliana
gtgatgaattgagggat

SEQ ID NO: 124025 - DNA, 17 bp, Arabidopsis thaliana
gtgatgacacctcagct

SEQ ID NO: 124026 - DNA, 17 bp, Arabidopsis thaliana
gtgatgactgcagtttt

SEQ ID NO: 124027 - DNA, 17 bp, Arabidopsis thaliana
gtgatgacttggccctg

SEQ ID NO: 124028 - DNA, 17 bp, Arabidopsis thaliana
gtgatgatgatcgatct

SEQ ID NO: 124029 - DNA, 17 bp, Arabidopsis thaliana
gtgatgatggtgagact

SEQ ID NO: 124030 - DNA, 17 bp, Arabidopsis thaliana
gtgatgatgtgccagtc

SEQ ID NO: 124031 - DNA, 17 bp, Arabidopsis thaliana
gtgatgatttgtaggat

SEQ ID NO: 124032 - DNA, 17 bp, Arabidopsis thaliana
gtgatgcccttagatgt

SEQ ID NO: 124033 - DNA, 17 bp, Arabidopsis thaliana
gtgatgcgtatgactga

SEQ ID NO: 124034 - DNA, 17 bp, Arabidopsis thaliana
gtgatggagattagatg

SEQ ID NO: 124035 - DNA, 17 bp, Arabidopsis thaliana
gtgatggccttgtagga

SEQ ID NO: 124036 - DNA, 17 bp, Arabidopsis thaliana
gtgatgggacgttgggt

SEQ ID NO: 124037 - DNA, 17 bp, Arabidopsis thaliana
gtgatggggatagatca

SEQ ID NO: 124038 - DNA, 17 bp, Arabidopsis thaliana
gtgatgggtcggccggt

SEQ ID NO: 124039 - DNA, 17 bp, Arabidopsis thaliana
gtgatgggtgccgcagc

SEQ ID NO: 124040 - DNA, 17 bp, Arabidopsis thaliana
gtgatgggtgcttggtt

SEQ ID NO: 124041 - DNA, 17 bp, Arabidopsis thaliana
gtgatggtccaagacgg

SEQ ID NO: 124042 - DNA, 17 bp, Arabidopsis thaliana
gtgatggttgtgagctc

SEQ ID NO: 124043 - DNA, 17 bp, Arabidopsis thaliana
gtgatgtatgcagctgg

SEQ ID NO: 124044 - DNA, 17 bp, Arabidopsis thaliana
gtgatgtcacgtcatct

SEQ ID NO: 124045 - DNA, 17 bp, Arabidopsis thaliana
gtgatgtgaccaatcaa

SEQ ID NO: 124046 - DNA, 17 bp, Arabidopsis thaliana
gtgatgtgagtccaggt

SEQ ID NO: 124047 - DNA, 17 bp, Arabidopsis thaliana
gtgatgtgatacggttc

SEQ ID NO: 124048 - DNA, 17 bp, Arabidopsis thaliana
gtgatgtgattcggctt

SEQ ID NO: 124049 - DNA, 17 bp, Arabidopsis thaliana
gtgatgttccacatcga

SEQ ID NO: 124050 - DNA, 17 bp, Arabidopsis thaliana
gtgatgttccggttata

SEQ ID NO: 124051 - DNA, 17 bp, Arabidopsis thaliana
gtgatgttcggctacga

SEQ ID NO: 124052 - DNA, 17 bp, Arabidopsis thaliana
gtgatgttggtctagtg

SEQ ID NO: 124053 - DNA, 17 bp, Arabidopsis thaliana
gtgatgtttgttgctgc

SEQ ID NO: 124054 - DNA, 17 bp, Arabidopsis thaliana
gtgattaaagcgtcagg

SEQ ID NO: 124055 - DNA, 17 bp, Arabidopsis thaliana
gtgattaagctggcctc

SEQ ID NO: 124056 - DNA, 17 bp, Arabidopsis thaliana
gtgattaccgacacttc

SEQ ID NO: 124057 - DNA, 17 bp, Arabidopsis thaliana
gtgattaggattcggaa

SEQ ID NO: 124058 - DNA, 17 bp, Arabidopsis thaliana
gtgattatctttggcga

SEQ ID NO: 124059 - DNA, 17 bp, Arabidopsis thaliana
gtgattcaaatccggcc

SEQ ID NO: 124060 - DNA, 17 bp, Arabidopsis thaliana
gtgattcaaggatccca

SEQ ID NO: 124061 - DNA, 17 bp, Arabidopsis thaliana
gtgattcaagtatcagc

SEQ ID NO: 124062 - DNA, 17 bp, Arabidopsis thaliana
gtgattcagactttcgt

SEQ ID NO: 124063 - DNA, 17 bp, Arabidopsis thaliana
gtgattcaggatgtgtc

SEQ ID NO: 124064 - DNA, 17 bp, Arabidopsis thaliana
gtgattcagggtccgaa

SEQ ID NO: 124065 - DNA, 17 bp, Arabidopsis thaliana
gtgattcagggtgtgtc

SEQ ID NO: 124066 - DNA, 17 bp, Arabidopsis thaliana
gtgattccggccaactg

SEQ ID NO: 124067 - DNA, 17 bp, Arabidopsis thaliana
gtgattcggactctcca

SEQ ID NO: 124068 - DNA, 17 bp, Arabidopsis thaliana
gtgattcgggcagtctc

SEQ ID NO: 124069 - DNA, 17 bp, Arabidopsis thaliana
gtgattctctttgtttc

SEQ ID NO: 124070 - DNA, 17 bp, Arabidopsis thaliana
gtgattctggtccagcc

SEQ ID NO: 124071 - DNA, 17 bp, Arabidopsis thaliana
gtgattgactctgggac

SEQ ID NO: 124072 - DNA, 17 bp, Arabidopsis thaliana
gtgattgagtttggtag

SEQ ID NO: 124073 - DNA, 17 bp, Arabidopsis thaliana
gtgattgccacagaacc

SEQ ID NO: 124074 - DNA, 17 bp, Arabidopsis thaliana
gtgattgcgttttgcgg

SEQ ID NO: 124075 - DNA, 17 bp, Arabidopsis thaliana
gtgattggatcacactt

SEQ ID NO: 124076 - DNA, 17 bp, Arabidopsis thaliana
gtgattggatttgtccc

SEQ ID NO: 124077 - DNA, 17 bp, Arabidopsis thaliana
gtgattggcttcttaac

SEQ ID NO: 124078 - DNA, 17 bp, Arabidopsis thaliana
gtgattggttagactgt

SEQ ID NO: 124079 - DNA, 17 bp, Arabidopsis thaliana
gtgattggttcggctgt

SEQ ID NO: 124080 - DNA, 17 bp, Arabidopsis thaliana
gtgattggttgggctgt

SEQ ID NO: 124081 - DNA, 17 bp, Arabidopsis thaliana
gtgattgtacctccggc

SEQ ID NO: 124082 - DNA, 17 bp, Arabidopsis thaliana
gtgattgtcggtaactt

SEQ ID NO: 124083 - DNA, 17 bp, Arabidopsis thaliana
gtgattgtgacacgtgt

SEQ ID NO: 124084 - DNA, 17 bp, Arabidopsis thaliana
gtgattgtttggttgac

SEQ ID NO: 124085 - DNA, 17 bp, Arabidopsis thaliana
gtgatttaagcttggga

SEQ ID NO: 124086 - DNA, 17 bp, Arabidopsis thaliana
gtgatttactgcaggta

SEQ ID NO: 124087 - DNA, 17 bp, Arabidopsis thaliana
gtgatttagtgagagct

SEQ ID NO: 124088 - DNA, 17 bp, Arabidopsis thaliana
gtgatttcaccggcgat

SEQ ID NO: 124089 - DNA, 17 bp, Arabidopsis thaliana
gtgatttccaagtgtgc

SEQ ID NO: 124090 - DNA, 17 bp, Arabidopsis thaliana
gtgatttccacgtcggc

SEQ ID NO: 124091 - DNA, 17 bp, Arabidopsis thaliana
gtgatttccagccgatt

SEQ ID NO: 124092 - DNA, 17 bp, Arabidopsis thaliana
gtgatttccagcgacgg

SEQ ID NO: 124093 - DNA, 17 bp, Arabidopsis thaliana
gtgatttccatcatcca

SEQ ID NO: 124094 - DNA, 17 bp, Arabidopsis thaliana
gtgatttctgcccagcg

SEQ ID NO: 124095 - DNA, 17 bp, Arabidopsis thaliana
gtgatttctgcccagtg

SEQ ID NO: 124096 - DNA, 17 bp, Arabidopsis thaliana
gtgatttctgcccagtt

SEQ ID NO: 124097 - DNA, 17 bp, Arabidopsis thaliana
gtgatttctggttggtt

SEQ ID NO: 124098 - DNA, 17 bp, Arabidopsis thaliana
gtgatttcttgacttca

SEQ ID NO: 124099 - DNA, 17 bp, Arabidopsis thaliana
gtgatttcttggtcctc

SEQ ID NO: 124100 - DNA, 17 bp, Arabidopsis thaliana
gtgatttgattttgttc

SEQ ID NO: 124101 - DNA, 17 bp, Arabidopsis thaliana
gtgatttgctttgcttg

SEQ ID NO: 124102 - DNA, 17 bp, Arabidopsis thaliana
gtgatttggactatatt

SEQ ID NO: 124103 - DNA, 17 bp, Arabidopsis thaliana
gtgatttgggctatatt

SEQ ID NO: 124104 - DNA, 17 bp, Arabidopsis thaliana
gtgatttgtctgacctt

SEQ ID NO: 124105 - DNA, 17 bp, Arabidopsis thaliana
gtgatttgtgctatatg

SEQ ID NO: 124106 - DNA, 17 bp, Arabidopsis thaliana
gtgatttgtgctatatt

SEQ ID NO: 124107 - DNA, 17 bp, Arabidopsis thaliana
gtgattttacggtttgg

SEQ ID NO: 124108 - DNA, 17 bp, Arabidopsis thaliana
gtgattttacggttttg

SEQ ID NO: 124109 - DNA, 17 bp, Arabidopsis thaliana
gtgattttaggtccatt

SEQ ID NO: 124110 - DNA, 17 bp, Arabidopsis thaliana
gtgattttcccgccaaa

SEQ ID NO: 124111 - DNA, 17 bp, Arabidopsis thaliana
gtgattttgcggttttg

SEQ ID NO: 124112 - DNA, 17 bp, Arabidopsis thaliana
gtgattttggaaaatag

SEQ ID NO: 124113 - DNA, 17 bp, Arabidopsis thaliana
gtgattttgggtgttgc

SEQ ID NO: 124114 - DNA, 17 bp, Arabidopsis thaliana
gtgatttttcgaaaggt

SEQ ID NO: 124115 - DNA, 17 bp, Arabidopsis thaliana
gtgatttttgttttcag

SEQ ID NO: 124116 - DNA, 17 bp, Arabidopsis thaliana
gtgatttttttgacatt

SEQ ID NO: 124117 - DNA, 17 bp, Arabidopsis thaliana
gtgcaaaagggtagact

SEQ ID NO: 124118 - DNA, 17 bp, Arabidopsis thaliana
gtgcaaaattcactagc

SEQ ID NO: 124119 - DNA, 17 bp, Arabidopsis thaliana
gtgcaaactccattcca

SEQ ID NO: 124120 - DNA, 17 bp, Arabidopsis thaliana
gtgcaaactccattcga

SEQ ID NO: 124121 - DNA, 17 bp, Arabidopsis thaliana
gtgcaaagcattgcgat

SEQ ID NO: 124122 - DNA, 17 bp, Arabidopsis thaliana
gtgcaaaggtttcctcg

SEQ ID NO: 124123 - DNA, 17 bp, Arabidopsis thaliana
gtgcaaagttagtcgat

SEQ ID NO: 124124 - DNA, 17 bp, Arabidopsis thaliana
gtgcaaagttcactagc

SEQ ID NO: 124125 - DNA, 17 bp, Arabidopsis thaliana
gtgcaaatacggtgcgg

SEQ ID NO: 124126 - DNA, 17 bp, Arabidopsis thaliana
gtgcaaatcgttcgtct

SEQ ID NO: 124127 - DNA, 17 bp, Arabidopsis thaliana
gtgcaaatgacaactga

SEQ ID NO: 124128 - DNA, 17 bp, Arabidopsis thaliana
gtgcaaatgagcgaccg

SEQ ID NO: 124129 - DNA, 17 bp, Arabidopsis thaliana
gtgcaaatgcaaccgtt

SEQ ID NO: 124130 - DNA, 17 bp, Arabidopsis thaliana
gtgcaaatgctttctac

SEQ ID NO: 124131 - DNA, 17 bp, Arabidopsis thaliana
gtgcaacccattttgac

SEQ ID NO: 124132 - DNA, 17 bp, Arabidopsis thaliana
gtgcaaccgagtacaac

SEQ ID NO: 124133 - DNA, 17 bp, Arabidopsis thaliana
gtgcaacggttagatct

SEQ ID NO: 124134 - DNA, 17 bp, Arabidopsis thaliana
gtgcaacgtttggtggt

SEQ ID NO: 124135 - DNA, 17 bp, Arabidopsis thaliana
gtgcaacttctacgatg

SEQ ID NO: 124136 - DNA, 17 bp, Arabidopsis thaliana
gtgcaacttttttgcga

SEQ ID NO: 124137 - DNA, 17 bp, Arabidopsis thaliana
gtgcaagattctcaatt

SEQ ID NO: 124138 - DNA, 17 bp, Arabidopsis thaliana
gtgcaaggaaactgagt

SEQ ID NO: 124139 - DNA, 17 bp, Arabidopsis thaliana
gtgcaagtcaggctgtc

SEQ ID NO: 124140 - DNA, 17 bp, Arabidopsis thaliana
gtgcaagtggcacacgc

SEQ ID NO: 124141 - DNA, 17 bp, Arabidopsis thaliana
gtgcaatactaatagat

SEQ ID NO: 124142 - DNA, 17 bp, Arabidopsis thaliana
gtgcaatactaataggt

SEQ ID NO: 124143 - DNA, 17 bp, Arabidopsis thaliana
gtgcaatcatgctgcct

SEQ ID NO: 124144 - DNA, 17 bp, Arabidopsis thaliana
gtgcaatctttccacag

SEQ ID NO: 124145 - DNA, 17 bp, Arabidopsis thaliana
gtgcaatggaggtggct

SEQ ID NO: 124146 - DNA, 17 bp, Arabidopsis thaliana
gtgcaatggagttgacc

SEQ ID NO: 124147 - DNA, 17 bp, Arabidopsis thaliana
gtgcaatgtgtgactca

SEQ ID NO: 124148 - DNA, 17 bp, Arabidopsis thaliana
gtgcaattctaccgatc

SEQ ID NO: 124149 - DNA, 17 bp, Arabidopsis thaliana
gtgcaatttttttgcga

SEQ ID NO: 124150 - DNA, 17 bp, Arabidopsis thaliana
gtgcacactgatgctga

SEQ ID NO: 124151 - DNA, 17 bp, Arabidopsis thaliana
gtgcacagctttcttga

SEQ ID NO: 124152 - DNA, 17 bp, Arabidopsis thaliana
gtgcacagtaaatgtta

SEQ ID NO: 124153 - DNA, 17 bp, Arabidopsis thaliana
gtgcacagtagccgttg

SEQ ID NO: 124154 - DNA, 17 bp, Arabidopsis thaliana
gtgcacccacccaaccc

SEQ ID NO: 124155 - DNA, 17 bp, Arabidopsis thaliana
gtgcaccccagcgagcg

SEQ ID NO: 124156 - DNA, 17 bp, Arabidopsis thaliana
gtgcaccctctatcagg

SEQ ID NO: 124157 - DNA, 17 bp, Arabidopsis thaliana
gtgcaccgggtcccaat

SEQ ID NO: 124158 - DNA, 17 bp, Arabidopsis thaliana
gtgcacctactcgaccc

SEQ ID NO: 124159 - DNA, 17 bp, Arabidopsis thaliana
gtgcacgattttccata

SEQ ID NO: 124160 - DNA, 17 bp, Arabidopsis thaliana
gtgcacggctctggtta

SEQ ID NO: 124161 - DNA, 17 bp, Arabidopsis thaliana
gtgcacgtatggtaaac

SEQ ID NO: 124162 - DNA, 17 bp, Arabidopsis thaliana
gtgcacgtctgcctggg

SEQ ID NO: 124163 - DNA, 17 bp, Arabidopsis thaliana
gtgcacgtctgcctggt

SEQ ID NO: 124164 - DNA, 17 bp, Arabidopsis thaliana
gtgcactcctatgttat

SEQ ID NO: 124165 - DNA, 17 bp, Arabidopsis thaliana
gtgcactgctctatctg

SEQ ID NO: 124166 - DNA, 17 bp, Arabidopsis thaliana
gtgcacttggtggtgtt

SEQ ID NO: 124167 - DNA, 17 bp, Arabidopsis thaliana
gtgcactttgatgacat

SEQ ID NO: 124168 - DNA, 17 bp, Arabidopsis thaliana
gtgcactttgatgatat

SEQ ID NO: 124169 - DNA, 17 bp, Arabidopsis thaliana
gtgcacttttccccgat

SEQ ID NO: 124170 - DNA, 17 bp, Arabidopsis thaliana
gtgcacttttccggcat

SEQ ID NO: 124171 - DNA, 17 bp, Arabidopsis thaliana
gtgcagaacaatatttg

SEQ ID NO: 124172 - DNA, 17 bp, Arabidopsis thaliana
gtgcagaaccgctacat

SEQ ID NO: 124173 - DNA, 17 bp, Arabidopsis thaliana
gtgcagacaacccggtt

SEQ ID NO: 124174 - DNA, 17 bp, Arabidopsis thaliana
gtgcagaccatcctcct

SEQ ID NO: 124175 - DNA, 17 bp, Arabidopsis thaliana
gtgcagagacaacaagc

SEQ ID NO: 124176 - DNA, 17 bp, Arabidopsis thaliana
gtgcagagacaaccagg

SEQ ID NO: 124177 - DNA, 17 bp, Arabidopsis thaliana
gtgcagagacagccagg

SEQ ID NO: 124178 - DNA, 17 bp, Arabidopsis thaliana
gtgcagatcgggctctg

SEQ ID NO: 124179 - DNA, 17 bp, Arabidopsis thaliana
gtgcagatcttggtggt

SEQ ID NO: 124180 - DNA, 17 bp, Arabidopsis thaliana
gtgcagcaaggagcgca

SEQ ID NO: 124181 - DNA, 17 bp, Arabidopsis thaliana
gtgcagcacggagcgca

SEQ ID NO: 124182 - DNA, 17 bp, Arabidopsis thaliana
gtgcagccctttgtcgc

SEQ ID NO: 124183 - DNA, 17 bp, Arabidopsis thaliana
gtgcagcttctgataga

SEQ ID NO: 124184 - DNA, 17 bp, Arabidopsis thaliana
gtgcagcttctgatagg

SEQ ID NO: 124185 - DNA, 17 bp, Arabidopsis thaliana
gtgcaggaaaaatgcgg

SEQ ID NO: 124186 - DNA, 17 bp, Arabidopsis thaliana
gtgcaggaagcagtgat

SEQ ID NO: 124187 - DNA, 17 bp, Arabidopsis thaliana
gtgcaggagaaatgcgg

SEQ ID NO: 124188 - DNA, 17 bp, Arabidopsis thaliana
gtgcaggagatctacaa

SEQ ID NO: 124189 - DNA, 17 bp, Arabidopsis thaliana
gtgcaggagatcttcaa

SEQ ID NO: 124190 - DNA, 17 bp, Arabidopsis thaliana
gtgcaggcacgaatgga

SEQ ID NO: 124191 - DNA, 17 bp, Arabidopsis thaliana
gtgcagggaaatgcggt

SEQ ID NO: 124192 - DNA, 17 bp, Arabidopsis thaliana
gtgcaggtggtgcatgg

SEQ ID NO: 124193 - DNA, 17 bp, Arabidopsis thaliana
gtgcagtatcattcggc

SEQ ID NO: 124194 - DNA, 17 bp, Arabidopsis thaliana
gtgcagtatttctctca

SEQ ID NO: 124195 - DNA, 17 bp, Arabidopsis thaliana
gtgcagtccccgttggt

SEQ ID NO: 124196 - DNA, 17 bp, Arabidopsis thaliana
gtgcagtcgagtatccc

SEQ ID NO: 124197 - DNA, 17 bp, Arabidopsis thaliana
gtgcagtgacctggtct

SEQ ID NO: 124198 - DNA, 17 bp, Arabidopsis thaliana
gtgcagtgacctggttg

SEQ ID NO: 124199 - DNA, 17 bp, Arabidopsis thaliana
gtgcagtgatgtatgca

SEQ ID NO: 124200 - DNA, 17 bp, Arabidopsis thaliana
gtgcagtgatgtatgta

SEQ ID NO: 124201 - DNA, 17 bp, Arabidopsis thaliana
gtgcagtgctgtagcca

SEQ ID NO: 124202 - DNA, 17 bp, Arabidopsis thaliana
gtgcagtgctgtagcta

SEQ ID NO: 124203 - DNA, 17 bp, Arabidopsis thaliana
gtgcagtgtcgtagcta

SEQ ID NO: 124204 - DNA, 17 bp, Arabidopsis thaliana
gtgcagttaattcacgg

SEQ ID NO: 124205 - DNA, 17 bp, Arabidopsis thaliana
gtgcagttctgataggc

SEQ ID NO: 124206 - DNA, 17 bp, Arabidopsis thaliana
gtgcagttttgcggcca

SEQ ID NO: 124207 - DNA, 17 bp, Arabidopsis thaliana
gtgcagttttggatgtg

SEQ ID NO: 124208 - DNA, 17 bp, Arabidopsis thaliana
gtgcagttttgggtgca

SEQ ID NO: 124209 - DNA, 17 bp, Arabidopsis thaliana
gtgcagttttgggtgcg

SEQ ID NO: 124210 - DNA, 17 bp, Arabidopsis thaliana
gtgcataaagtgcagtg

SEQ ID NO: 124211 - DNA, 17 bp, Arabidopsis thaliana
gtgcataacaataagcc

SEQ ID NO: 124212 - DNA, 17 bp, Arabidopsis thaliana
gtgcatactgcttggaa

SEQ ID NO: 124213 - DNA, 17 bp, Arabidopsis thaliana
gtgcatagagaaactaa

SEQ ID NO: 124214 - DNA, 17 bp, Arabidopsis thaliana
gtgcatagtgctggtat

SEQ ID NO: 124215 - DNA, 17 bp, Arabidopsis thaliana
gtgcatgagtcaaccag

SEQ ID NO: 124216 - DNA, 17 bp, Arabidopsis thaliana
gtgcatgatgcattggt

SEQ ID NO: 124217 - DNA, 17 bp, Arabidopsis thaliana
gtgcatgcggaaaggtt

SEQ ID NO: 124218 - DNA, 17 bp, Arabidopsis thaliana
gtgcatgcttggtggct

SEQ ID NO: 124219 - DNA, 17 bp, Arabidopsis thaliana
gtgcatggaagattacg

SEQ ID NO: 124220 - DNA, 17 bp, Arabidopsis thaliana
gtgcatggcggttagat

SEQ ID NO: 124221 - DNA, 17 bp, Arabidopsis thaliana
gtgcatggctgtcgtca

SEQ ID NO: 124222 - DNA, 17 bp, Arabidopsis thaliana
gtgcatgtgcgctttgg

SEQ ID NO: 124223 - DNA, 17 bp, Arabidopsis thaliana
gtgcattagtgctgata

SEQ ID NO: 124224 - DNA, 17 bp, Arabidopsis thaliana
gtgcattagtgctggca

SEQ ID NO: 124225 - DNA, 17 bp, Arabidopsis thaliana
gtgcattagtgctggta

SEQ ID NO: 124226 - DNA, 17 bp, Arabidopsis thaliana
gtgcattcggatcatat

SEQ ID NO: 124227 - DNA, 17 bp, Arabidopsis thaliana
gtgcattcgggtcataa

SEQ ID NO: 124228 - DNA, 17 bp, Arabidopsis thaliana
gtgcattcgggtcatag

SEQ ID NO: 124229 - DNA, 17 bp, Arabidopsis thaliana
gtgcattcgggtcatat

SEQ ID NO: 124230 - DNA, 17 bp, Arabidopsis thaliana
gtgcattcgggtcatgt

SEQ ID NO: 124231 - DNA, 17 bp, Arabidopsis thaliana
gtgcattgaattgtgac

SEQ ID NO: 124232 - DNA, 17 bp, Arabidopsis thaliana
gtgcattggccggcttg

SEQ ID NO: 124233 - DNA, 17 bp, Arabidopsis thaliana
gtgcattggtcggcgtg

SEQ ID NO: 124234 - DNA, 17 bp, Arabidopsis thaliana
gtgcattggtcggcttc

SEQ ID NO: 124235 - DNA, 17 bp, Arabidopsis thaliana
gtgcattggtcggcttg

SEQ ID NO: 124236 - DNA, 17 bp, Arabidopsis thaliana
gtgcattggttggcttg

SEQ ID NO: 124237 - DNA, 17 bp, Arabidopsis thaliana
gtgcattgtcaggacgt

SEQ ID NO: 124238 - DNA, 17 bp, Arabidopsis thaliana
gtgcattgtctatttgg

SEQ ID NO: 124239 - DNA, 17 bp, Arabidopsis thaliana
gtgcattgttgagatcg

SEQ ID NO: 124240 - DNA, 17 bp, Arabidopsis thaliana
gtgcattgttggcttgt

SEQ ID NO: 124241 - DNA, 17 bp, Arabidopsis thaliana
gtgcatttatggctcaa

SEQ ID NO: 124242 - DNA, 17 bp, Arabidopsis thaliana
gtgcatttctaccggtg

SEQ ID NO: 124243 - DNA, 17 bp, Arabidopsis thaliana
gtgcatttctactgagg

SEQ ID NO: 124244 - DNA, 17 bp, Arabidopsis thaliana
gtgcattttatccgatc

SEQ ID NO: 124245 - DNA, 17 bp, Arabidopsis thaliana
gtgcattttcaaagcca

SEQ ID NO: 124246 - DNA, 17 bp, Arabidopsis thaliana
gtgcattttcgtgatta

SEQ ID NO: 124247 - DNA, 17 bp, Arabidopsis thaliana
gtgcattttcgtgattt

SEQ ID NO: 124248 - DNA, 17 bp, Arabidopsis thaliana
gtgccaaaactgcttat

SEQ ID NO: 124249 - DNA, 17 bp, Arabidopsis thaliana
gtgccaaataatctgct

SEQ ID NO: 124250 - DNA, 17 bp, Arabidopsis thaliana
gtgccaaatgtcgcatt

SEQ ID NO: 124251 - DNA, 17 bp, Arabidopsis thaliana
gtgccaaattatccgct

SEQ ID NO: 124252 - DNA, 17 bp, Arabidopsis thaliana
gtgccaaccggttattg

SEQ ID NO: 124253 - DNA, 17 bp, Arabidopsis thaliana
gtgccaaccttcttctt

SEQ ID NO: 124254 - DNA, 17 bp, Arabidopsis thaliana
gtgccaacttacagact

SEQ ID NO: 124255 - DNA, 17 bp, Arabidopsis thaliana
gtgccaacttatccgct

SEQ ID NO: 124256 - DNA, 17 bp, Arabidopsis thaliana
gtgccaagacatttgat

SEQ ID NO: 124257 - DNA, 17 bp, Arabidopsis thaliana
gtgccaagagggaaaag

SEQ ID NO: 124258 - DNA, 17 bp, Arabidopsis thaliana
gtgccaaggagtctgac

SEQ ID NO: 124259 - DNA, 17 bp, Arabidopsis thaliana
gtgccaaggatgacttg

SEQ ID NO: 124260 - DNA, 17 bp, Arabidopsis thaliana
gtgccaaggttgtagct

SEQ ID NO: 124261 - DNA, 17 bp, Arabidopsis thaliana
gtgccaagtgatccagt

SEQ ID NO: 124262 - DNA, 17 bp, Arabidopsis thaliana
gtgccaatcatacactc

SEQ ID NO: 124263 - DNA, 17 bp, Arabidopsis thaliana
gtgccaatcatacactt

SEQ ID NO: 124264 - DNA, 17 bp, Arabidopsis thaliana
gtgccaatcgctaacaa

SEQ ID NO: 124265 - DNA, 17 bp, Arabidopsis thaliana
gtgccaatttgtccgcc

SEQ ID NO: 124266 - DNA, 17 bp, Arabidopsis thaliana
gtgccaccgttgagata

SEQ ID NO: 124267 - DNA, 17 bp, Arabidopsis thaliana
gtgccacctgctgctga

SEQ ID NO: 124268 - DNA, 17 bp, Arabidopsis thaliana
gtgccacgtgtcaagtc

SEQ ID NO: 124269 - DNA, 17 bp, Arabidopsis thaliana
gtgccagaccggtgtcc

SEQ ID NO: 124270 - DNA, 17 bp, Arabidopsis thaliana
gtgccagcagccgcggt

SEQ ID NO: 124271 - DNA, 17 bp, Arabidopsis thaliana
gtgccagcggagtccta

SEQ ID NO: 124272 - DNA, 17 bp, Arabidopsis thaliana
gtgccaggagggaaaag

SEQ ID NO: 124273 - DNA, 17 bp, Arabidopsis thaliana
gtgccaggcgggctatg

SEQ ID NO: 124274 - DNA, 17 bp, Arabidopsis thaliana
gtgccaggcttgagaaa

SEQ ID NO: 124275 - DNA, 17 bp, Arabidopsis thaliana
gtgccagtggtgcgtct

SEQ ID NO: 124276 - DNA, 17 bp, Arabidopsis thaliana
gtgccagttctcttccg

SEQ ID NO: 124277 - DNA, 17 bp, Arabidopsis thaliana
gtgccataagttattca

SEQ ID NO: 124278 - DNA, 17 bp, Arabidopsis thaliana
gtgccatatgcgggcca

SEQ ID NO: 124279 - DNA, 17 bp, Arabidopsis thaliana
gtgccatatgcgggcga

SEQ ID NO: 124280 - DNA, 17 bp, Arabidopsis thaliana
gtgccatcaaccaagtt

SEQ ID NO: 124281 - DNA, 17 bp, Arabidopsis thaliana
gtgccatctgtcacagt

SEQ ID NO: 124282 - DNA, 17 bp, Arabidopsis thaliana
gtgccatgactctggct

SEQ ID NO: 124283 - DNA, 17 bp, Arabidopsis thaliana
gtgccatgactttatct

SEQ ID NO: 124284 - DNA, 17 bp, Arabidopsis thaliana
gtgccatggcttacttt

SEQ ID NO: 124285 - DNA, 17 bp, Arabidopsis thaliana
gtgccattattcctact

SEQ ID NO: 124286 - DNA, 17 bp, Arabidopsis thaliana
gtgccattcaactacag

SEQ ID NO: 124287 - DNA, 17 bp, Arabidopsis thaliana
gtgccattcggaagttt

SEQ ID NO: 124288 - DNA, 17 bp, Arabidopsis thaliana
gtgccattgccatccac

SEQ ID NO: 124289 - DNA, 17 bp, Arabidopsis thaliana
gtgcccaaaatcaaata

SEQ ID NO: 124290 - DNA, 17 bp, Arabidopsis thaliana
gtgcccaaacgagtgac

SEQ ID NO: 124291 - DNA, 17 bp, Arabidopsis thaliana
gtgcccaaacgagtgag

SEQ ID NO: 124292 - DNA, 17 bp, Arabidopsis thaliana
gtgcccaaccttcttac

SEQ ID NO: 124293 - DNA, 17 bp, Arabidopsis thaliana
gtgcccaagagacagct

SEQ ID NO: 124294 - DNA, 17 bp, Arabidopsis thaliana
gtgcccacccacccacc

SEQ ID NO: 124295 - DNA, 17 bp, Arabidopsis thaliana
gtgcccactccctcaaa

SEQ ID NO: 124296 - DNA, 17 bp, Arabidopsis thaliana
gtgcccactgtccctgt

SEQ ID NO: 124297 - DNA, 17 bp, Arabidopsis thaliana
gtgcccagacctagttg

SEQ ID NO: 124298 - DNA, 17 bp, Arabidopsis thaliana
gtgcccagcaggaacgg

SEQ ID NO: 124299 - DNA, 17 bp, Arabidopsis thaliana
gtgcccatctatcaaca

SEQ ID NO: 124300 - DNA, 17 bp, Arabidopsis thaliana
gtgccccaagccttctg

SEQ ID NO: 124301 - DNA, 17 bp, Arabidopsis thaliana
gtgccccgggttatggt

SEQ ID NO: 124302 - DNA, 17 bp, Arabidopsis thaliana
gtgcccgccaatctctc

SEQ ID NO: 124303 - DNA, 17 bp, Arabidopsis thaliana
gtgcccgcgccttcgcc

SEQ ID NO: 124304 - DNA, 17 bp, Arabidopsis thaliana
gtgcccggaccctgccg

SEQ ID NO: 124305 - DNA, 17 bp, Arabidopsis thaliana
gtgcccggaccctggcg

SEQ ID NO: 124306 - DNA, 17 bp, Arabidopsis thaliana
gtgcccggaccctgtcg

SEQ ID NO: 124307 - DNA, 17 bp, Arabidopsis thaliana
gtgccctcgtgtaggcg

SEQ ID NO: 124308 - DNA, 17 bp, Arabidopsis thaliana
gtgcccttaacagagtc

SEQ ID NO: 124309 - DNA, 17 bp, Arabidopsis thaliana
gtgcccttagctcagct

SEQ ID NO: 124310 - DNA, 17 bp, Arabidopsis thaliana
gtgccctttgtcgctaa

SEQ ID NO: 124311 - DNA, 17 bp, Arabidopsis thaliana
gtgccgaagcccgtaat

SEQ ID NO: 124312 - DNA, 17 bp, Arabidopsis thaliana
gtgccgaaggcagagct

SEQ ID NO: 124313 - DNA, 17 bp, Arabidopsis thaliana
gtgccgaaggcagggct

SEQ ID NO: 124314 - DNA, 17 bp, Arabidopsis thaliana
gtgccgaattattcgct

SEQ ID NO: 124315 - DNA, 17 bp, Arabidopsis thaliana
gtgccgagtggaagggc

SEQ ID NO: 124316 - DNA, 17 bp, Arabidopsis thaliana
gtgccgatacacggtgg

SEQ ID NO: 124317 - DNA, 17 bp, Arabidopsis thaliana
gtgccgcagtgtaccgc

SEQ ID NO: 124318 - DNA, 17 bp, Arabidopsis thaliana
gtgccgcataagctaag

SEQ ID NO: 124319 - DNA, 17 bp, Arabidopsis thaliana
gtgccgcgaagggacgc

SEQ ID NO: 124320 - DNA, 17 bp, Arabidopsis thaliana
gtgccgcgttcaatgac

SEQ ID NO: 124321 - DNA, 17 bp, Arabidopsis thaliana
gtgccgctacaatatgt

SEQ ID NO: 124322 - DNA, 17 bp, Arabidopsis thaliana
gtgccgctcacccccgg

SEQ ID NO: 124323 - DNA, 17 bp, Arabidopsis thaliana
gtgccgctcacgcccgg

SEQ ID NO: 124324 - DNA, 17 bp, Arabidopsis thaliana
gtgccgctccctgtatg

SEQ ID NO: 124325 - DNA, 17 bp, Arabidopsis thaliana
gtgccggccgggggacg

SEQ ID NO: 124326 - DNA, 17 bp, Arabidopsis thaliana
gtgccggccggggggcg

SEQ ID NO: 124327 - DNA, 17 bp, Arabidopsis thaliana
gtgccggcggtgatttt

SEQ ID NO: 124328 - DNA, 17 bp, Arabidopsis thaliana
gtgccggctgaggagca

SEQ ID NO: 124329 - DNA, 17 bp, Arabidopsis thaliana
gtgccggttcttcttgg

SEQ ID NO: 124330 - DNA, 17 bp, Arabidopsis thaliana
gtgccgtagatggatcg

SEQ ID NO: 124331 - DNA, 17 bp, Arabidopsis thaliana
gtgccgtctgagctctt

SEQ ID NO: 124332 - DNA, 17 bp, Arabidopsis thaliana
gtgccgtcttcccaccc

SEQ ID NO: 124333 - DNA, 17 bp, Arabidopsis thaliana
gtgccgtgaggccaacc

SEQ ID NO: 124334 - DNA, 17 bp, Arabidopsis thaliana
gtgccgtggatatccga

SEQ ID NO: 124335 - DNA, 17 bp, Arabidopsis thaliana
gtgccgttttgtttttt

SEQ ID NO: 124336 - DNA, 17 bp, Arabidopsis thaliana
gtgcctaaacgtgtcac

SEQ ID NO: 124337 - DNA, 17 bp, Arabidopsis thaliana
gtgcctagatctgtaca

SEQ ID NO: 124338 - DNA, 17 bp, Arabidopsis thaliana
gtgcctaggctctttgg

SEQ ID NO: 124339 - DNA, 17 bp, Arabidopsis thaliana
gtgcctatgacttcgtt

SEQ ID NO: 124340 - DNA, 17 bp, Arabidopsis thaliana
gtgcctatgctttcttt

SEQ ID NO: 124341 - DNA, 17 bp, Arabidopsis thaliana
gtgcctatttgtggcca

SEQ ID NO: 124342 - DNA, 17 bp, Arabidopsis thaliana
gtgcctatttgtgtctg

SEQ ID NO: 124343 - DNA, 17 bp, Arabidopsis thaliana
gtgcctatttgtgtctt

SEQ ID NO: 124344 - DNA, 17 bp, Arabidopsis thaliana
gtgcctccaaactgagt

SEQ ID NO: 124345 - DNA, 17 bp, Arabidopsis thaliana
gtgcctccggcgctgtt

SEQ ID NO: 124346 - DNA, 17 bp, Arabidopsis thaliana
gtgcctccggtgctgtt

SEQ ID NO: 124347 - DNA, 17 bp, Arabidopsis thaliana
gtgcctcgaagctactc

SEQ ID NO: 124348 - DNA, 17 bp, Arabidopsis thaliana
gtgcctcgaagctactg

SEQ ID NO: 124349 - DNA, 17 bp, Arabidopsis thaliana
gtgcctctaggaatctg

SEQ ID NO: 124350 - DNA, 17 bp, Arabidopsis thaliana
gtgcctctcgtgctttc

SEQ ID NO: 124351 - DNA, 17 bp, Arabidopsis thaliana
gtgcctctctcacccca

SEQ ID NO: 124352 - DNA, 17 bp, Arabidopsis thaliana
gtgcctctgacaaggct

SEQ ID NO: 124353 - DNA, 17 bp, Arabidopsis thaliana
gtgcctctgacggtcct

SEQ ID NO: 124354 - DNA, 17 bp, Arabidopsis thaliana
gtgcctctgggagatgt

SEQ ID NO: 124355 - DNA, 17 bp, Arabidopsis thaliana
gtgcctgaagaatcgtc

SEQ ID NO: 124356 - DNA, 17 bp, Arabidopsis thaliana
gtgcctgaagttcccga

SEQ ID NO: 124357 - DNA, 17 bp, Arabidopsis thaliana
gtgcctgaggatgaaca

SEQ ID NO: 124358 - DNA, 17 bp, Arabidopsis thaliana
gtgcctgcggtgctgct

SEQ ID NO: 124359 - DNA, 17 bp, Arabidopsis thaliana
gtgcctggctccctgca

SEQ ID NO: 124360 - DNA, 17 bp, Arabidopsis thaliana
gtgcctggctccctgta

SEQ ID NO: 124361 - DNA, 17 bp, Arabidopsis thaliana
gtgcctgggctgtgagg

SEQ ID NO: 124362 - DNA, 17 bp, Arabidopsis thaliana
gtgcctgtagactccct

SEQ ID NO: 124363 - DNA, 17 bp, Arabidopsis thaliana
gtgcctgtagatggatc

SEQ ID NO: 124364 - DNA, 17 bp, Arabidopsis thaliana
gtgcctgtagattccct

SEQ ID NO: 124365 - DNA, 17 bp, Arabidopsis thaliana
gtgcctgttatctccgt

SEQ ID NO: 124366 - DNA, 17 bp, Arabidopsis thaliana
gtgcctgttgaagaatg

SEQ ID NO: 124367 - DNA, 17 bp, Arabidopsis thaliana
gtgccttatcttctaca

SEQ ID NO: 124368 - DNA, 17 bp, Arabidopsis thaliana
gtgccttcatcacctgc

SEQ ID NO: 124369 - DNA, 17 bp, Arabidopsis thaliana
gtgccttcattggatca

SEQ ID NO: 124370 - DNA, 17 bp, Arabidopsis thaliana
gtgccttcgggaacgcg

SEQ ID NO: 124371 - DNA, 17 bp, Arabidopsis thaliana
gtgccttctaccattct

SEQ ID NO: 124372 - DNA, 17 bp, Arabidopsis thaliana
gtgccttctaccattgt

SEQ ID NO: 124373 - DNA, 17 bp, Arabidopsis thaliana
gtgccttctatacggcc

SEQ ID NO: 124374 - DNA, 17 bp, Arabidopsis thaliana
gtgccttctatacggtc

SEQ ID NO: 124375 - DNA, 17 bp, Arabidopsis thaliana
gtgccttctggccattt

SEQ ID NO: 124376 - DNA, 17 bp, Arabidopsis thaliana
gtgccttgagttttgac

SEQ ID NO: 124377 - DNA, 17 bp, Arabidopsis thaliana
gtgcctttgggagccta

SEQ ID NO: 124378 - DNA, 17 bp, Arabidopsis thaliana
gtgcctttgggagcctg

SEQ ID NO: 124379 - DNA, 17 bp, Arabidopsis thaliana
gtgcctttgttagaatg

SEQ ID NO: 124380 - DNA, 17 bp, Arabidopsis thaliana
gtgccttttcgtgatct

SEQ ID NO: 124381 - DNA, 17 bp, Arabidopsis thaliana
gtgcgaacccgggctca

SEQ ID NO: 124382 - DNA, 17 bp, Arabidopsis thaliana
gtgcgaactaatccgtc

SEQ ID NO: 124383 - DNA, 17 bp, Arabidopsis thaliana
gtgcgaagtaaagtgct

SEQ ID NO: 124384 - DNA, 17 bp, Arabidopsis thaliana
gtgcgaagttaatgagg

SEQ ID NO: 124385 - DNA, 17 bp, Arabidopsis thaliana
gtgcgaatttcagatct

SEQ ID NO: 124386 - DNA, 17 bp, Arabidopsis thaliana
gtgcgaatttgagtaga

SEQ ID NO: 124387 - DNA, 17 bp, Arabidopsis thaliana
gtgcgacaactgtagct

SEQ ID NO: 124388 - DNA, 17 bp, Arabidopsis thaliana
gtgcgacaagtctcact

SEQ ID NO: 124389 - DNA, 17 bp, Arabidopsis thaliana
gtgcgacaagtctcagc

SEQ ID NO: 124390 - DNA, 17 bp, Arabidopsis thaliana
gtgcgacagaatttaaa

SEQ ID NO: 124391 - DNA, 17 bp, Arabidopsis thaliana
gtgcgacagctgaacgt

SEQ ID NO: 124392 - DNA, 17 bp, Arabidopsis thaliana
gtgcgacagggtccggg

SEQ ID NO: 124393 - DNA, 17 bp, Arabidopsis thaliana
gtgcgaccgcaacagag

SEQ ID NO: 124394 - DNA, 17 bp, Arabidopsis thaliana
gtgcgacgcggattacg

SEQ ID NO: 124395 - DNA, 17 bp, Arabidopsis thaliana
gtgcgacggaagtgtgg

SEQ ID NO: 124396 - DNA, 17 bp, Arabidopsis thaliana
gtgcgacgtatagtgga

SEQ ID NO: 124397 - DNA, 17 bp, Arabidopsis thaliana
gtgcgactccgtccttg

SEQ ID NO: 124398 - DNA, 17 bp, Arabidopsis thaliana
gtgcgactcggattggg

SEQ ID NO: 124399 - DNA, 17 bp, Arabidopsis thaliana
gtgcgactgtgttccgc

SEQ ID NO: 124400 - DNA, 17 bp, Arabidopsis thaliana
gtgcgactgtgttctgc

SEQ ID NO: 124401 - DNA, 17 bp, Arabidopsis thaliana
gtgcgactgtgttctgt

SEQ ID NO: 124402 - DNA, 17 bp, Arabidopsis thaliana
gtgcgactgtgttttgc

SEQ ID NO: 124403 - DNA, 17 bp, Arabidopsis thaliana
gtgcgagagagagagag

SEQ ID NO: 124404 - DNA, 17 bp, Arabidopsis thaliana
gtgcgagaggtcccgag

SEQ ID NO: 124405 - DNA, 17 bp, Arabidopsis thaliana
gtgcgagctccagatcg

SEQ ID NO: 124406 - DNA, 17 bp, Arabidopsis thaliana
gtgcgagggcacgtctg

SEQ ID NO: 124407 - DNA, 17 bp, Arabidopsis thaliana
gtgcgaggggcggcatg

SEQ ID NO: 124408 - DNA, 17 bp, Arabidopsis thaliana
gtgcgagtcaacgggtg

SEQ ID NO: 124409 - DNA, 17 bp, Arabidopsis thaliana
gtgcgagtgggcgtttt

SEQ ID NO: 124410 - DNA, 17 bp, Arabidopsis thaliana
gtgcgatcatcgcggct

SEQ ID NO: 124411 - DNA, 17 bp, Arabidopsis thaliana
gtgcgatctcgaagcct

SEQ ID NO: 124412 - DNA, 17 bp, Arabidopsis thaliana
gtgcgatctcggagcct

SEQ ID NO: 124413 - DNA, 17 bp, Arabidopsis thaliana
gtgcgatctgacgtttt

SEQ ID NO: 124414 - DNA, 17 bp, Arabidopsis thaliana
gtgcgatctgtgctttg

SEQ ID NO: 124415 - DNA, 17 bp, Arabidopsis thaliana
gtgcgatctttattcat

SEQ ID NO: 124416 - DNA, 17 bp, Arabidopsis thaliana
gtgcgatgatgtgacac

SEQ ID NO: 124417 - DNA, 17 bp, Arabidopsis thaliana
gtgcgatggacatcgac

SEQ ID NO: 124418 - DNA, 17 bp, Arabidopsis thaliana
gtgcgatgtgtcaagtc

SEQ ID NO: 124419 - DNA, 17 bp, Arabidopsis thaliana
gtgcgattcaactgcag

SEQ ID NO: 124420 - DNA, 17 bp, Arabidopsis thaliana
gtgcgattcggtcagca

SEQ ID NO: 124421 - DNA, 17 bp, Arabidopsis thaliana
gtgcgattgccaacttc

SEQ ID NO: 124422 - DNA, 17 bp, Arabidopsis thaliana
gtgcgattgtatctgta

SEQ ID NO: 124423 - DNA, 17 bp, Arabidopsis thaliana
gtgcgattgtgagaact

SEQ ID NO: 124424 - DNA, 17 bp, Arabidopsis thaliana
gtgcgattgtttgtcgg

SEQ ID NO: 124425 - DNA, 17 bp, Arabidopsis thaliana
gtgcgattttcgctggc

SEQ ID NO: 124426 - DNA, 17 bp, Arabidopsis thaliana
gtgcgattttggtcact

SEQ ID NO: 124427 - DNA, 17 bp, Arabidopsis thaliana
gtgcgcagaccgtgaat

SEQ ID NO: 124428 - DNA, 17 bp, Arabidopsis thaliana
gtgcgcagcctttttac

SEQ ID NO: 124429 - DNA, 17 bp, Arabidopsis thaliana
gtgcgcagtggttcgat

SEQ ID NO: 124430 - DNA, 17 bp, Arabidopsis thaliana
gtgcgcatccagggaaa

SEQ ID NO: 124431 - DNA, 17 bp, Arabidopsis thaliana
gtgcgcccccggcggcc

SEQ ID NO: 124432 - DNA, 17 bp, Arabidopsis thaliana
gtgcgccgaacccagca

SEQ ID NO: 124433 - DNA, 17 bp, Arabidopsis thaliana
gtgcgccgaagcgagta

SEQ ID NO: 124434 - DNA, 17 bp, Arabidopsis thaliana
gtgcgccgcatagaaaa

SEQ ID NO: 124435 - DNA, 17 bp, Arabidopsis thaliana
gtgcgccgtcgacgcct

SEQ ID NO: 124436 - DNA, 17 bp, Arabidopsis thaliana
gtgcgcctattcgtcat

SEQ ID NO: 124437 - DNA, 17 bp, Arabidopsis thaliana
gtgcgctgaaatcagtt

SEQ ID NO: 124438 - DNA, 17 bp, Arabidopsis thaliana
gtgcgctgaagagacgc

SEQ ID NO: 124439 - DNA, 17 bp, Arabidopsis thaliana
gtgcgctggattatgac

SEQ ID NO: 124440 - DNA, 17 bp, Arabidopsis thaliana
gtgcgcttgggagtccc

SEQ ID NO: 124441 - DNA, 17 bp, Arabidopsis thaliana
gtgcgctttggtagtct

SEQ ID NO: 124442 - DNA, 17 bp, Arabidopsis thaliana
gtgcggaacagacagtg

SEQ ID NO: 124443 - DNA, 17 bp, Arabidopsis thaliana
gtgcggaagtccaaatg

SEQ ID NO: 124444 - DNA, 17 bp, Arabidopsis thaliana
gtgcggacatcatcgct

SEQ ID NO: 124445 - DNA, 17 bp, Arabidopsis thaliana
gtgcggacgggataagc

SEQ ID NO: 124446 - DNA, 17 bp, Arabidopsis thaliana
gtgcggactaattctgc

SEQ ID NO: 124447 - DNA, 17 bp, Arabidopsis thaliana
gtgcggatcccacgggg

SEQ ID NO: 124448 - DNA, 17 bp, Arabidopsis thaliana
gtgcggatcgggctctg

SEQ ID NO: 124449 - DNA, 17 bp, Arabidopsis thaliana
gtgcggatctacctgtt

SEQ ID NO: 124450 - DNA, 17 bp, Arabidopsis thaliana
gtgcggatctaggtcgc

SEQ ID NO: 124451 - DNA, 17 bp, Arabidopsis thaliana
gtgcggatgatcaccta

SEQ ID NO: 124452 - DNA, 17 bp, Arabidopsis thaliana
gtgcggcaggggtgagt

SEQ ID NO: 124453 - DNA, 17 bp, Arabidopsis thaliana
gtgcggcccgggcttac

SEQ ID NO: 124454 - DNA, 17 bp, Arabidopsis thaliana
gtgcggccggggcttac

SEQ ID NO: 124455 - DNA, 17 bp, Arabidopsis thaliana
gtgcggcgatacggccg

SEQ ID NO: 124456 - DNA, 17 bp, Arabidopsis thaliana
gtgcggctggatcaccc

SEQ ID NO: 124457 - DNA, 17 bp, Arabidopsis thaliana
gtgcggctggatcacct

SEQ ID NO: 124458 - DNA, 17 bp, Arabidopsis thaliana
gtgcgggaaaaatgcgg

SEQ ID NO: 124459 - DNA, 17 bp, Arabidopsis thaliana
gtgcgggaatgcttggg

SEQ ID NO: 124460 - DNA, 17 bp, Arabidopsis thaliana
gtgcgggacaatgtatg

SEQ ID NO: 124461 - DNA, 17 bp, Arabidopsis thaliana
gtgcgggacctttgtgt

SEQ ID NO: 124462 - DNA, 17 bp, Arabidopsis thaliana
gtgcgggagaagtaaag

SEQ ID NO: 124463 - DNA, 17 bp, Arabidopsis thaliana
gtgcggtaaaatcaatt

SEQ ID NO: 124464 - DNA, 17 bp, Arabidopsis thaliana
gtgcggtccgcctttgg

SEQ ID NO: 124465 - DNA, 17 bp, Arabidopsis thaliana
gtgcggtcctatttgta

SEQ ID NO: 124466 - DNA, 17 bp, Arabidopsis thaliana
gtgcggtcgtatttgta

SEQ ID NO: 124467 - DNA, 17 bp, Arabidopsis thaliana
gtgcggtgcggttcaaa

SEQ ID NO: 124468 - DNA, 17 bp, Arabidopsis thaliana
gtgcggtgcgtttcaaa

SEQ ID NO: 124469 - DNA, 17 bp, Arabidopsis thaliana
gtgcggtggcggcctaa

SEQ ID NO: 124470 - DNA, 17 bp, Arabidopsis thaliana
gtgcggtgtgtacaaag

SEQ ID NO: 124471 - DNA, 17 bp, Arabidopsis thaliana
gtgcggttacggttgcg

SEQ ID NO: 124472 - DNA, 17 bp, Arabidopsis thaliana
gtgcggttcaactgcgg

SEQ ID NO: 124473 - DNA, 17 bp, Arabidopsis thaliana
gtgcggttcgaacagta

SEQ ID NO: 124474 - DNA, 17 bp, Arabidopsis thaliana
gtgcggttgcggttgcg

SEQ ID NO: 124475 - DNA, 17 bp, Arabidopsis thaliana
gtgcggttgtaggtgcg

SEQ ID NO: 124476 - DNA, 17 bp, Arabidopsis thaliana
gtgcggtttgattgctt

SEQ ID NO: 124477 - DNA, 17 bp, Arabidopsis thaliana
gtgcggttttaagtgcg

SEQ ID NO: 124478 - DNA, 17 bp, Arabidopsis thaliana
gtgcggttttactgcgg

SEQ ID NO: 124479 - DNA, 17 bp, Arabidopsis thaliana
gtgcggttttaggtgcg

SEQ ID NO: 124480 - DNA, 17 bp, Arabidopsis thaliana
gtgcggttttgaatgcg

SEQ ID NO: 124481 - DNA, 17 bp, Arabidopsis thaliana
gtgcggttttgagtgcg

SEQ ID NO: 124482 - DNA, 17 bp, Arabidopsis thaliana
gtgcggttttggatgcg

SEQ ID NO: 124483 - DNA, 17 bp, Arabidopsis thaliana
gtgcggttttgggtgcg

SEQ ID NO: 124484 - DNA, 17 bp, Arabidopsis thaliana
gtgcggttttggtcacc

SEQ ID NO: 124485 - DNA, 17 bp, Arabidopsis thaliana
gtgcggttttgtgtacg

SEQ ID NO: 124486 - DNA, 17 bp, Arabidopsis thaliana
gtgcgtaacaactatcc

SEQ ID NO: 124487 - DNA, 17 bp, Arabidopsis thaliana
gtgcgtaatagctcact

SEQ ID NO: 124488 - DNA, 17 bp, Arabidopsis thaliana
gtgcgtatcgacccgtg

SEQ ID NO: 124489 - DNA, 17 bp, Arabidopsis thaliana
gtgcgtcaaacggaaaa

SEQ ID NO: 124490 - DNA, 17 bp, Arabidopsis thaliana
gtgcgtcatcacctatt

SEQ ID NO: 124491 - DNA, 17 bp, Arabidopsis thaliana
gtgcgtcccaacatgtg

SEQ ID NO: 124492 - DNA, 17 bp, Arabidopsis thaliana
gtgcgtccgcacttatg

SEQ ID NO: 124493 - DNA, 17 bp, Arabidopsis thaliana
gtgcgtccgcagttatg

SEQ ID NO: 124494 - DNA, 17 bp, Arabidopsis thaliana
gtgcgtctgcctgggtg

SEQ ID NO: 124495 - DNA, 17 bp, Arabidopsis thaliana
gtgcgtgaacctgcgga

SEQ ID NO: 124496 - DNA, 17 bp, Arabidopsis thaliana
gtgcgtgaagtgttcgg

SEQ ID NO: 124497 - DNA, 17 bp, Arabidopsis thaliana
gtgcgtgaatcgatttg

SEQ ID NO: 124498 - DNA, 17 bp, Arabidopsis thaliana
gtgcgtgaatggacaga

SEQ ID NO: 124499 - DNA, 17 bp, Arabidopsis thaliana
gtgcgtgacatatgaga

SEQ ID NO: 124500 - DNA, 17 bp, Arabidopsis thaliana
gtgcgtgacccaacgat

SEQ ID NO: 124501 - DNA, 17 bp, Arabidopsis thaliana
gtgcgtgagaatcgtgt

SEQ ID NO: 124502 - DNA, 17 bp, Arabidopsis thaliana
gtgcgtgagcatgcctg

SEQ ID NO: 124503 - DNA, 17 bp, Arabidopsis thaliana
gtgcgtgagggttcaag

SEQ ID NO: 124504 - DNA, 17 bp, Arabidopsis thaliana
gtgcgtgagtttcacgg

SEQ ID NO: 124505 - DNA, 17 bp, Arabidopsis thaliana
gtgcgtgatcacccgcg

SEQ ID NO: 124506 - DNA, 17 bp, Arabidopsis thaliana
gtgcgtgatcatccgca

SEQ ID NO: 124507 - DNA, 17 bp, Arabidopsis thaliana
gtgcgtgatcgtggtct

SEQ ID NO: 124508 - DNA, 17 bp, Arabidopsis thaliana
gtgcgtgcacgtctgcc

SEQ ID NO: 124509 - DNA, 17 bp, Arabidopsis thaliana
gtgcgtgcacttttccg

SEQ ID NO: 124510 - DNA, 17 bp, Arabidopsis thaliana
gtgcgtgcattagtgct

SEQ ID NO: 124511 - DNA, 17 bp, Arabidopsis thaliana
gtgcgtgcattcgggtc

SEQ ID NO: 124512 - DNA, 17 bp, Arabidopsis thaliana
gtgcgtgcattggtcgg

SEQ ID NO: 124513 - DNA, 17 bp, Arabidopsis thaliana
gtgcgtgccaaattatc

SEQ ID NO: 124514 - DNA, 17 bp, Arabidopsis thaliana
gtgcgtgccaaggttgt

SEQ ID NO: 124515 - DNA, 17 bp, Arabidopsis thaliana
gtgcgtgccccaagcct

SEQ ID NO: 124516 - DNA, 17 bp, Arabidopsis thaliana
gtgcgtgcctccatcac

SEQ ID NO: 124517 - DNA, 17 bp, Arabidopsis thaliana
gtgcgtgcgagaggtcc

SEQ ID NO: 124518 - DNA, 17 bp, Arabidopsis thaliana
gtgcgtgcgagtcaacg

SEQ ID NO: 124519 - DNA, 17 bp, Arabidopsis thaliana
gtgcgtgcggctggatg

SEQ ID NO: 124520 - DNA, 17 bp, Arabidopsis thaliana
gtgcgtgctaaatcggc

SEQ ID NO: 124521 - DNA, 17 bp, Arabidopsis thaliana
gtgcgtgctagcggatc

SEQ ID NO: 124522 - DNA, 17 bp, Arabidopsis thaliana
gtgcgtgctccgggcgt

SEQ ID NO: 124523 - DNA, 17 bp, Arabidopsis thaliana
gtgcgtgctcgaagtaa

SEQ ID NO: 124524 - DNA, 17 bp, Arabidopsis thaliana
gtgcgtgcttaggtatc

SEQ ID NO: 124525 - DNA, 17 bp, Arabidopsis thaliana
gtgcgtggacatgtaga

SEQ ID NO: 124526 - DNA, 17 bp, Arabidopsis thaliana
gtgcgtggaccgacgcg

SEQ ID NO: 124527 - DNA, 17 bp, Arabidopsis thaliana
gtgcgtggacgtgccgg

SEQ ID NO: 124528 - DNA, 17 bp, Arabidopsis thaliana
gtgcgtggagcgatttg

SEQ ID NO: 124529 - DNA, 17 bp, Arabidopsis thaliana
gtgcgtggcagcaaggc

SEQ ID NO: 124530 - DNA, 17 bp, Arabidopsis thaliana
gtgcgtggcctaccatg

SEQ ID NO: 124531 - DNA, 17 bp, Arabidopsis thaliana
gtgcgtggcggcctaag

SEQ ID NO: 124532 - DNA, 17 bp, Arabidopsis thaliana
gtgcgtggcggttgacg

SEQ ID NO: 124533 - DNA, 17 bp, Arabidopsis thaliana
gtgcgtggctgctcgag

SEQ ID NO: 124534 - DNA, 17 bp, Arabidopsis thaliana
gtgcgtggggccccacg

SEQ ID NO: 124535 - DNA, 17 bp, Arabidopsis thaliana
gtgcgtgggttcgagcc

SEQ ID NO: 124536 - DNA, 17 bp, Arabidopsis thaliana
gtgcgtgggttcgtgcc

SEQ ID NO: 124537 - DNA, 17 bp, Arabidopsis thaliana
gtgcgtgggtttcccag

SEQ ID NO: 124538 - DNA, 17 bp, Arabidopsis thaliana
gtgcgtggtctaaggct

SEQ ID NO: 124539 - DNA, 17 bp, Arabidopsis thaliana
gtgcgtggtggtccatt

SEQ ID NO: 124540 - DNA, 17 bp, Arabidopsis thaliana
gtgcgtggttcgccgcc

SEQ ID NO: 124541 - DNA, 17 bp, Arabidopsis thaliana
gtgcgtggttgcccaat

SEQ ID NO: 124542 - DNA, 17 bp, Arabidopsis thaliana
gtgcgtggtttcagacc

SEQ ID NO: 124543 - DNA, 17 bp, Arabidopsis thaliana
gtgcgtgtcaagtctat

SEQ ID NO: 124544 - DNA, 17 bp, Arabidopsis thaliana
gtgcgtgtcaggaccta

SEQ ID NO: 124545 - DNA, 17 bp, Arabidopsis thaliana
gtgcgtgtccagaccac

SEQ ID NO: 124546 - DNA, 17 bp, Arabidopsis thaliana
gtgcgtgtcccaccggg

SEQ ID NO: 124547 - DNA, 17 bp, Arabidopsis thaliana
gtgcgtgtcgtgtcgtg

SEQ ID NO: 124548 - DNA, 17 bp, Arabidopsis thaliana
gtgcgtgtgattccact

SEQ ID NO: 124549 - DNA, 17 bp, Arabidopsis thaliana
gtgcgtgtgcgagtgag

SEQ ID NO: 124550 - DNA, 17 bp, Arabidopsis thaliana
gtgcgtgtgcgagttat

SEQ ID NO: 124551 - DNA, 17 bp, Arabidopsis thaliana
gtgcgtgtgctagtgca

SEQ ID NO: 124552 - DNA, 17 bp, Arabidopsis thaliana
gtgcgtgttcggatgcg

SEQ ID NO: 124553 - DNA, 17 bp, Arabidopsis thaliana
gtgcgtgtttcgactgg

SEQ ID NO: 124554 - DNA, 17 bp, Arabidopsis thaliana
gtgcgttactgataacg

SEQ ID NO: 124555 - DNA, 17 bp, Arabidopsis thaliana
gtgcgttactgataact

SEQ ID NO: 124556 - DNA, 17 bp, Arabidopsis thaliana
gtgcgttagttttgcca

SEQ ID NO: 124557 - DNA, 17 bp, Arabidopsis thaliana
gtgcgttatgcctttca

SEQ ID NO: 124558 - DNA, 17 bp, Arabidopsis thaliana
gtgcgttcctaccgagg

SEQ ID NO: 124559 - DNA, 17 bp, Arabidopsis thaliana
gtgcgttctattattgc

SEQ ID NO: 124560 - DNA, 17 bp, Arabidopsis thaliana
gtgcgttctcgaagcgg

SEQ ID NO: 124561 - DNA, 17 bp, Arabidopsis thaliana
gtgcgtttacaggagtt

SEQ ID NO: 124562 - DNA, 17 bp, Arabidopsis thaliana
gtgcgtttcccggctgg

SEQ ID NO: 124563 - DNA, 17 bp, Arabidopsis thaliana
gtgcgtttctaccgaaa

SEQ ID NO: 124564 - DNA, 17 bp, Arabidopsis thaliana
gtgcgtttctaccggag

SEQ ID NO: 124565 - DNA, 17 bp, Arabidopsis thaliana
gtgcgtttctaccgggg

SEQ ID NO: 124566 - DNA, 17 bp, Arabidopsis thaliana
gtgcgtttgcgagagtt

SEQ ID NO: 124567 - DNA, 17 bp, Arabidopsis thaliana
gtgcgtttgcgggaatt

SEQ ID NO: 124568 - DNA, 17 bp, Arabidopsis thaliana
gtgcgtttgcgggaggt

SEQ ID NO: 124569 - DNA, 17 bp, Arabidopsis thaliana
gtgcgtttgcgggagtt

SEQ ID NO: 124570 - DNA, 17 bp, Arabidopsis thaliana
gtgctaaaacactctcc

SEQ ID NO: 124571 - DNA, 17 bp, Arabidopsis thaliana
gtgctaaaggctcagat

SEQ ID NO: 124572 - DNA, 17 bp, Arabidopsis thaliana
gtgctaaatacgggaga

SEQ ID NO: 124573 - DNA, 17 bp, Arabidopsis thaliana
gtgctaaatcggccggt

SEQ ID NO: 124574 - DNA, 17 bp, Arabidopsis thaliana
gtgctaaatgcctttgt

SEQ ID NO: 124575 - DNA, 17 bp, Arabidopsis thaliana
gtgctaacacgtatgtt

SEQ ID NO: 124576 - DNA, 17 bp, Arabidopsis thaliana
gtgctaacagatgatct

SEQ ID NO: 124577 - DNA, 17 bp, Arabidopsis thaliana
gtgctaaccttggtatg

SEQ ID NO: 124578 - DNA, 17 bp, Arabidopsis thaliana
gtgctaacgacacttga

SEQ ID NO: 124579 - DNA, 17 bp, Arabidopsis thaliana
gtgctaacgtcgttggt

SEQ ID NO: 124580 - DNA, 17 bp, Arabidopsis thaliana
gtgctaaggccaaggtc

SEQ ID NO: 124581 - DNA, 17 bp, Arabidopsis thaliana
gtgctacaatggccggg

SEQ ID NO: 124582 - DNA, 17 bp, Arabidopsis thaliana
gtgctacagctgtgttt

SEQ ID NO: 124583 - DNA, 17 bp, Arabidopsis thaliana
gtgctacattgctcacg

SEQ ID NO: 124584 - DNA, 17 bp, Arabidopsis thaliana
gtgctacgcggtcgtct

SEQ ID NO: 124585 - DNA, 17 bp, Arabidopsis thaliana
gtgctactggaacctcc

SEQ ID NO: 124586 - DNA, 17 bp, Arabidopsis thaliana
gtgctactgtctggacc

SEQ ID NO: 124587 - DNA, 17 bp, Arabidopsis thaliana
gtgctactgtctgtacc

SEQ ID NO: 124588 - DNA, 17 bp, Arabidopsis thaliana
gtgctacttctcaatcc

SEQ ID NO: 124589 - DNA, 17 bp, Arabidopsis thaliana
gtgctacttcttggttg

SEQ ID NO: 124590 - DNA, 17 bp, Arabidopsis thaliana
gtgctacttggatagct

SEQ ID NO: 124591 - DNA, 17 bp, Arabidopsis thaliana
gtgctacttggataggt

SEQ ID NO: 124592 - DNA, 17 bp, Arabidopsis thaliana
gtgctagaactggtcga

SEQ ID NO: 124593 - DNA, 17 bp, Arabidopsis thaliana
gtgctagctctgaattt

SEQ ID NO: 124594 - DNA, 17 bp, Arabidopsis thaliana
gtgctagtgcaccggct

SEQ ID NO: 124595 - DNA, 17 bp, Arabidopsis thaliana
gtgctagtgcaccgggt

SEQ ID NO: 124596 - DNA, 17 bp, Arabidopsis thaliana
gtgctagtgttaccgga

SEQ ID NO: 124597 - DNA, 17 bp, Arabidopsis thaliana
gtgctatactcgttcta

SEQ ID NO: 124598 - DNA, 17 bp, Arabidopsis thaliana
gtgctatagccgactta

SEQ ID NO: 124599 - DNA, 17 bp, Arabidopsis thaliana
gtgctatagccgacttg

SEQ ID NO: 124600 - DNA, 17 bp, Arabidopsis thaliana
gtgctatgactttttgt

SEQ ID NO: 124601 - DNA, 17 bp, Arabidopsis thaliana
gtgctatgcatggttcc

SEQ ID NO: 124602 - DNA, 17 bp, Arabidopsis thaliana
gtgctatgctccaaatt

SEQ ID NO: 124603 - DNA, 17 bp, Arabidopsis thaliana
gtgctattagctcagtg

SEQ ID NO: 124604 - DNA, 17 bp, Arabidopsis thaliana
gtgctattagctcattg

SEQ ID NO: 124605 - DNA, 17 bp, Arabidopsis thaliana
gtgctattgacctacgg

SEQ ID NO: 124606 - DNA, 17 bp, Arabidopsis thaliana
gtgctattgcctttttt

SEQ ID NO: 124607 - DNA, 17 bp, Arabidopsis thaliana
gtgctatttttgtcaat

SEQ ID NO: 124608 - DNA, 17 bp, Arabidopsis thaliana
gtgctcaaagcaagcct

SEQ ID NO: 124609 - DNA, 17 bp, Arabidopsis thaliana
gtgctcaaagcggctca

SEQ ID NO: 124610 - DNA, 17 bp, Arabidopsis thaliana
gtgctcaaatattatcg

SEQ ID NO: 124611 - DNA, 17 bp, Arabidopsis thaliana
gtgctcaagaggattca

SEQ ID NO: 124612 - DNA, 17 bp, Arabidopsis thaliana
gtgctcagggccagtcc

SEQ ID NO: 124613 - DNA, 17 bp, Arabidopsis thaliana
gtgctcaggtggtttgg

SEQ ID NO: 124614 - DNA, 17 bp, Arabidopsis thaliana
gtgctcagttcggattg

SEQ ID NO: 124615 - DNA, 17 bp, Arabidopsis thaliana
gtgctccatactgatta

SEQ ID NO: 124616 - DNA, 17 bp, Arabidopsis thaliana
gtgctcccacgtcagaa

SEQ ID NO: 124617 - DNA, 17 bp, Arabidopsis thaliana
gtgctcccgtttttgta

SEQ ID NO: 124618 - DNA, 17 bp, Arabidopsis thaliana
gtgctccctccgacagt

SEQ ID NO: 124619 - DNA, 17 bp, Arabidopsis thaliana
gtgctccgagtccttgg

SEQ ID NO: 124620 - DNA, 17 bp, Arabidopsis thaliana
gtgctccgggcgtcggc

SEQ ID NO: 124621 - DNA, 17 bp, Arabidopsis thaliana
gtgctcctgtggtggtc

SEQ ID NO: 124622 - DNA, 17 bp, Arabidopsis thaliana
gtgctcgaagtaagtaa

SEQ ID NO: 124623 - DNA, 17 bp, Arabidopsis thaliana
gtgctcgagtgtctggt

SEQ ID NO: 124624 - DNA, 17 bp, Arabidopsis thaliana
gtgctcgcagtggacat

SEQ ID NO: 124625 - DNA, 17 bp, Arabidopsis thaliana
gtgctcggattctctgg

SEQ ID NO: 124626 - DNA, 17 bp, Arabidopsis thaliana
gtgctctaaggctctgg

SEQ ID NO: 124627 - DNA, 17 bp, Arabidopsis thaliana
gtgctctaatggctgtt

SEQ ID NO: 124628 - DNA, 17 bp, Arabidopsis thaliana
gtgctctcatctacagt

SEQ ID NO: 124629 - DNA, 17 bp, Arabidopsis thaliana
gtgctctctagccttct

SEQ ID NO: 124630 - DNA, 17 bp, Arabidopsis thaliana
gtgctctgatggattta

SEQ ID NO: 124631 - DNA, 17 bp, Arabidopsis thaliana
gtgctctgcttcttgac

SEQ ID NO: 124632 - DNA, 17 bp, Arabidopsis thaliana
gtgctctggaaaagact

SEQ ID NO: 124633 - DNA, 17 bp, Arabidopsis thaliana
gtgctcttctatggtag

SEQ ID NO: 124634 - DNA, 17 bp, Arabidopsis thaliana
gtgctgaaccgcttcat

SEQ ID NO: 124635 - DNA, 17 bp, Arabidopsis thaliana
gtgctgacctaacctgc

SEQ ID NO: 124636 - DNA, 17 bp, Arabidopsis thaliana
gtgctgacctggactgg

SEQ ID NO: 124637 - DNA, 17 bp, Arabidopsis thaliana
gtgctgagattatcgtt

SEQ ID NO: 124638 - DNA, 17 bp, Arabidopsis thaliana
gtgctgataaccaagat

SEQ ID NO: 124639 - DNA, 17 bp, Arabidopsis thaliana
gtgctgatctcgtaatt

SEQ ID NO: 124640 - DNA, 17 bp, Arabidopsis thaliana
gtgctgatgtgtcaagt

SEQ ID NO: 124641 - DNA, 17 bp, Arabidopsis thaliana
gtgctgattgctggaac

SEQ ID NO: 124642 - DNA, 17 bp, Arabidopsis thaliana
gtgctgatttgtgctga

SEQ ID NO: 124643 - DNA, 17 bp, Arabidopsis thaliana
gtgctgattttcgttac

SEQ ID NO: 124644 - DNA, 17 bp, Arabidopsis thaliana
gtgctgcaacgtggcca

SEQ ID NO: 124645 - DNA, 17 bp, Arabidopsis thaliana
gtgctgcagaccacgat

SEQ ID NO: 124646 - DNA, 17 bp, Arabidopsis thaliana
gtgctgcctcgttacaa

SEQ ID NO: 124647 - DNA, 17 bp, Arabidopsis thaliana
gtgctgcgaactgaagt

SEQ ID NO: 124648 - DNA, 17 bp, Arabidopsis thaliana
gtgctgcgcattagcca

SEQ ID NO: 124649 - DNA, 17 bp, Arabidopsis thaliana
gtgctgctaggcgaagc

SEQ ID NO: 124650 - DNA, 17 bp, Arabidopsis thaliana
gtgctgctatttcatgg

SEQ ID NO: 124651 - DNA, 17 bp, Arabidopsis thaliana
gtgctgctctcaccttc

SEQ ID NO: 124652 - DNA, 17 bp, Arabidopsis thaliana
gtgctgcttcgatggtt

SEQ ID NO: 124653 - DNA, 17 bp, Arabidopsis thaliana
gtgctgcttgatccgta

SEQ ID NO: 124654 - DNA, 17 bp, Arabidopsis thaliana
gtgctggaatttgttga

SEQ ID NO: 124655 - DNA, 17 bp, Arabidopsis thaliana
gtgctggagaagctgag

SEQ ID NO: 124656 - DNA, 17 bp, Arabidopsis thaliana
gtgctggaggagctgag

SEQ ID NO: 124657 - DNA, 17 bp, Arabidopsis thaliana
gtgctggcgacgcatca

SEQ ID NO: 124658 - DNA, 17 bp, Arabidopsis thaliana
gtgctggcgttcttggt

SEQ ID NO: 124659 - DNA, 17 bp, Arabidopsis thaliana
gtgctggctccctgtat

SEQ ID NO: 124660 - DNA, 17 bp, Arabidopsis thaliana
gtgctggctttcgtaat

SEQ ID NO: 124661 - DNA, 17 bp, Arabidopsis thaliana
gtgctgggtgaaattct

SEQ ID NO: 124662 - DNA, 17 bp, Arabidopsis thaliana
gtgctggtatgatcgca

SEQ ID NO: 124663 - DNA, 17 bp, Arabidopsis thaliana
gtgctggtctttgatcc

SEQ ID NO: 124664 - DNA, 17 bp, Arabidopsis thaliana
gtgctggtgacctgtcg

SEQ ID NO: 124665 - DNA, 17 bp, Arabidopsis thaliana
gtgctggtttgtgcttg

SEQ ID NO: 124666 - DNA, 17 bp, Arabidopsis thaliana
gtgctgtagctaacgcg

SEQ ID NO: 124667 - DNA, 17 bp, Arabidopsis thaliana
gtgctgtatggtagccg

SEQ ID NO: 124668 - DNA, 17 bp, Arabidopsis thaliana
gtgctgttggcccaatg

SEQ ID NO: 124669 - DNA, 17 bp, Arabidopsis thaliana
gtgctgttggccgagtg

SEQ ID NO: 124670 - DNA, 17 bp, Arabidopsis thaliana
gtgctgttgtgcgaatg

SEQ ID NO: 124671 - DNA, 17 bp, Arabidopsis thaliana
gtgcttagcttagatcc

SEQ ID NO: 124672 - DNA, 17 bp, Arabidopsis thaliana
gtgcttaggattccatc

SEQ ID NO: 124673 - DNA, 17 bp, Arabidopsis thaliana
gtgcttaggcacttcca

SEQ ID NO: 124674 - DNA, 17 bp, Arabidopsis thaliana
gtgcttaggtatctcca

SEQ ID NO: 124675 - DNA, 17 bp, Arabidopsis thaliana
gtgcttatacgtctttg

SEQ ID NO: 124676 - DNA, 17 bp, Arabidopsis thaliana
gtgcttatctttagccc

SEQ ID NO: 124677 - DNA, 17 bp, Arabidopsis thaliana
gtgcttattcgctagtg

SEQ ID NO: 124678 - DNA, 17 bp, Arabidopsis thaliana
gtgcttattgacggtct

SEQ ID NO: 124679 - DNA, 17 bp, Arabidopsis thaliana
gtgcttcaaggtgtgtt

SEQ ID NO: 124680 - DNA, 17 bp, Arabidopsis thaliana
gtgcttcacggccaatt

SEQ ID NO: 124681 - DNA, 17 bp, Arabidopsis thaliana
gtgcttcagagtagact

SEQ ID NO: 124682 - DNA, 17 bp, Arabidopsis thaliana
gtgcttcagctcccctc

SEQ ID NO: 124683 - DNA, 17 bp, Arabidopsis thaliana
gtgcttcatacatctcc

SEQ ID NO: 124684 - DNA, 17 bp, Arabidopsis thaliana
gtgcttcatccgtgaca

SEQ ID NO: 124685 - DNA, 17 bp, Arabidopsis thaliana
gtgcttccaaactgagt

SEQ ID NO: 124686 - DNA, 17 bp, Arabidopsis thaliana
gtgcttcgctgctttct

SEQ ID NO: 124687 - DNA, 17 bp, Arabidopsis thaliana
gtgcttcggacaaaggt

SEQ ID NO: 124688 - DNA, 17 bp, Arabidopsis thaliana
gtgcttcggctctgtgg

SEQ ID NO: 124689 - DNA, 17 bp, Arabidopsis thaliana
gtgcttcgggaagttta

SEQ ID NO: 124690 - DNA, 17 bp, Arabidopsis thaliana
gtgcttcgtagccaggt

SEQ ID NO: 124691 - DNA, 17 bp, Arabidopsis thaliana
gtgcttcgtagccagtt

SEQ ID NO: 124692 - DNA, 17 bp, Arabidopsis thaliana
gtgcttcgtcaagccat

SEQ ID NO: 124693 - DNA, 17 bp, Arabidopsis thaliana
gtgcttgaaacgcctga

SEQ ID NO: 124694 - DNA, 17 bp, Arabidopsis thaliana
gtgcttgaaacttggat

SEQ ID NO: 124695 - DNA, 17 bp, Arabidopsis thaliana
gtgcttgaaattgtcgg

SEQ ID NO: 124696 - DNA, 17 bp, Arabidopsis thaliana
gtgcttgaatttgcctt

SEQ ID NO: 124697 - DNA, 17 bp, Arabidopsis thaliana
gtgcttgactctagtcc

SEQ ID NO: 124698 - DNA, 17 bp, Arabidopsis thaliana
gtgcttgagtcagagac

SEQ ID NO: 124699 - DNA, 17 bp, Arabidopsis thaliana
gtgcttgcaaatatgag

SEQ ID NO: 124700 - DNA, 17 bp, Arabidopsis thaliana
gtgcttgccacacttgt

SEQ ID NO: 124701 - DNA, 17 bp, Arabidopsis thaliana
gtgcttggattgcagga

SEQ ID NO: 124702 - DNA, 17 bp, Arabidopsis thaliana
gtgcttgggcgagagta

SEQ ID NO: 124703 - DNA, 17 bp, Arabidopsis thaliana
gtgcttggttccaccgg

SEQ ID NO: 124704 - DNA, 17 bp, Arabidopsis thaliana
gtgcttgtctacggaga

SEQ ID NO: 124705 - DNA, 17 bp, Arabidopsis thaliana
gtgcttgtgacttcttc

SEQ ID NO: 124706 - DNA, 17 bp, Arabidopsis thaliana
gtgcttgtggctgttaa

SEQ ID NO: 124707 - DNA, 17 bp, Arabidopsis thaliana
gtgcttgtgtccagctg

SEQ ID NO: 124708 - DNA, 17 bp, Arabidopsis thaliana
gtgctttaaacttttga

SEQ ID NO: 124709 - DNA, 17 bp, Arabidopsis thaliana
gtgctttaacagacgcg

SEQ ID NO: 124710 - DNA, 17 bp, Arabidopsis thaliana
gtgctttagacctcttt

SEQ ID NO: 124711 - DNA, 17 bp, Arabidopsis thaliana
gtgctttccttaagcca

SEQ ID NO: 124712 - DNA, 17 bp, Arabidopsis thaliana
gtgctttgaagacgcgc

SEQ ID NO: 124713 - DNA, 17 bp, Arabidopsis thaliana
gtgctttggccgagtgg

SEQ ID NO: 124714 - DNA, 17 bp, Arabidopsis thaliana
gtgctttgtcgcctatg

SEQ ID NO: 124715 - DNA, 17 bp, Arabidopsis thaliana
gtgctttgtgaaataaa

SEQ ID NO: 124716 - DNA, 17 bp, Arabidopsis thaliana
gtgctttgtgcgttcat

SEQ ID NO: 124717 - DNA, 17 bp, Arabidopsis thaliana
gtgctttgttactttcc

SEQ ID NO: 124718 - DNA, 17 bp, Arabidopsis thaliana
gtgcttttaggaggaag

SEQ ID NO: 124719 - DNA, 17 bp, Arabidopsis thaliana
gtgcttttatctgtttc

SEQ ID NO: 124720 - DNA, 17 bp, Arabidopsis thaliana
gtgcttttccattacgc

SEQ ID NO: 124721 - DNA, 17 bp, Arabidopsis thaliana
gtgctttttaccgggac

SEQ ID NO: 124722 - DNA, 17 bp, Arabidopsis thaliana
gtgctttttcgggcatt

SEQ ID NO: 124723 - DNA, 17 bp, Arabidopsis thaliana
gtgctttttgtacctcg

SEQ ID NO: 124724 - DNA, 17 bp, Arabidopsis thaliana
gtggaaaaatctcggat

SEQ ID NO: 124725 - DNA, 17 bp, Arabidopsis thaliana
gtggaaaaggttcttgg

SEQ ID NO: 124726 - DNA, 17 bp, Arabidopsis thaliana
gtggaaaagttacattg

SEQ ID NO: 124727 - DNA, 17 bp, Arabidopsis thaliana
gtggaaaagttccattg

SEQ ID NO: 124728 - DNA, 17 bp, Arabidopsis thaliana
gtggaaaatcaggttta

SEQ ID NO: 124729 - DNA, 17 bp, Arabidopsis thaliana
gtggaaactcttctttg

SEQ ID NO: 124730 - DNA, 17 bp, Arabidopsis thaliana
gtggaaacttcagatcc

SEQ ID NO: 124731 - DNA, 17 bp, Arabidopsis thaliana
gtggaaagattgcactg

SEQ ID NO: 124732 - DNA, 17 bp, Arabidopsis thaliana
gtggaaaggcctacttc

SEQ ID NO: 124733 - DNA, 17 bp, Arabidopsis thaliana
gtggaaatccttctttc

SEQ ID NO: 124734 - DNA, 17 bp, Arabidopsis thaliana
gtggaaattgcgcatgt

SEQ ID NO: 124735 - DNA, 17 bp, Arabidopsis thaliana
gtggaaattggtacttt

SEQ ID NO: 124736 - DNA, 17 bp, Arabidopsis thaliana
gtggaaatttaaaggcc

SEQ ID NO: 124737 - DNA, 17 bp, Arabidopsis thaliana
gtggaaattttcttgtt

SEQ ID NO: 124738 - DNA, 17 bp, Arabidopsis thaliana
gtggaacaagcggatta

SEQ ID NO: 124739 - DNA, 17 bp, Arabidopsis thaliana
gtggaacactggctcgg

SEQ ID NO: 124740 - DNA, 17 bp, Arabidopsis thaliana
gtggaacaggtgtagga

SEQ ID NO: 124741 - DNA, 17 bp, Arabidopsis thaliana
gtggaaccagggaatta

SEQ ID NO: 124742 - DNA, 17 bp, Arabidopsis thaliana
gtggaacctctttgctt

SEQ ID NO: 124743 - DNA, 17 bp, Arabidopsis thaliana
gtggaaccttgggatgg

SEQ ID NO: 124744 - DNA, 17 bp, Arabidopsis thaliana
gtggaactcgacttggt

SEQ ID NO: 124745 - DNA, 17 bp, Arabidopsis thaliana
gtggaacttgtggatct

SEQ ID NO: 124746 - DNA, 17 bp, Arabidopsis thaliana
gtggaagaatctggttt

SEQ ID NO: 124747 - DNA, 17 bp, Arabidopsis thaliana
gtggaagacatgtggtg

SEQ ID NO: 124748 - DNA, 17 bp, Arabidopsis thaliana
gtggaagactatattcg

SEQ ID NO: 124749 - DNA, 17 bp, Arabidopsis thaliana
gtggaagagacattgtc

SEQ ID NO: 124750 - DNA, 17 bp, Arabidopsis thaliana
gtggaagatcgcgtgat

SEQ ID NO: 124751 - DNA, 17 bp, Arabidopsis thaliana
gtggaagcacttggccc

SEQ ID NO: 124752 - DNA, 17 bp, Arabidopsis thaliana
gtggaagcccgcagcga

SEQ ID NO: 124753 - DNA, 17 bp, Arabidopsis thaliana
gtggaagcctgatcatt

SEQ ID NO: 124754 - DNA, 17 bp, Arabidopsis thaliana
gtggaaggagttgtaac

SEQ ID NO: 124755 - DNA, 17 bp, Arabidopsis thaliana
gtggaaggttaagtcgt

SEQ ID NO: 124756 - DNA, 17 bp, Arabidopsis thaliana
gtggaagtccccttggc

SEQ ID NO: 124757 - DNA, 17 bp, Arabidopsis thaliana
gtggaagtctgtcagtt

SEQ ID NO: 124758 - DNA, 17 bp, Arabidopsis thaliana
gtggaagtcttggctta

SEQ ID NO: 124759 - DNA, 17 bp, Arabidopsis thaliana
gtggaagtgcagtgatg

SEQ ID NO: 124760 - DNA, 17 bp, Arabidopsis thaliana
gtggaagtgctgggttc

SEQ ID NO: 124761 - DNA, 17 bp, Arabidopsis thaliana
gtggaagtgcttgcgac

SEQ ID NO: 124762 - DNA, 17 bp, Arabidopsis thaliana
gtggaagtgtatgattg

SEQ ID NO: 124763 - DNA, 17 bp, Arabidopsis thaliana
gtggaagttgcgttgga

SEQ ID NO: 124764 - DNA, 17 bp, Arabidopsis thaliana
gtggaatccttaagtgg

SEQ ID NO: 124765 - DNA, 17 bp, Arabidopsis thaliana
gtggaatcgctaatgac

SEQ ID NO: 124766 - DNA, 17 bp, Arabidopsis thaliana
gtggaatcgggagagca

SEQ ID NO: 124767 - DNA, 17 bp, Arabidopsis thaliana
gtggaatctcttacgca

SEQ ID NO: 124768 - DNA, 17 bp, Arabidopsis thaliana
gtggaatcttcctttca

SEQ ID NO: 124769 - DNA, 17 bp, Arabidopsis thaliana
gtggaatggccagtcaa

SEQ ID NO: 124770 - DNA, 17 bp, Arabidopsis thaliana
gtggaattgtcttcgac

SEQ ID NO: 124771 - DNA, 17 bp, Arabidopsis thaliana
gtggacaaaaaccaagt

SEQ ID NO: 124772 - DNA, 17 bp, Arabidopsis thaliana
gtggacaaaactggtca

SEQ ID NO: 124773 - DNA, 17 bp, Arabidopsis thaliana
gtggacaagtactattt

SEQ ID NO: 124774 - DNA, 17 bp, Arabidopsis thaliana
gtggacaagttttggat

SEQ ID NO: 124775 - DNA, 17 bp, Arabidopsis thaliana
gtggacagccaggaggt

SEQ ID NO: 124776 - DNA, 17 bp, Arabidopsis thaliana
gtggacagcggacaaaa

SEQ ID NO: 124777 - DNA, 17 bp, Arabidopsis thaliana
gtggacagcggtactcg

SEQ ID NO: 124778 - DNA, 17 bp, Arabidopsis thaliana
gtggacaggtttggcag

SEQ ID NO: 124779 - DNA, 17 bp, Arabidopsis thaliana
gtggacagtgtgcttct

SEQ ID NO: 124780 - DNA, 17 bp, Arabidopsis thaliana
gtggacatgccggagtg

SEQ ID NO: 124781 - DNA, 17 bp, Arabidopsis thaliana
gtggacatgtagaccaa

SEQ ID NO: 124782 - DNA, 17 bp, Arabidopsis thaliana
gtggacattccggtcaa

SEQ ID NO: 124783 - DNA, 17 bp, Arabidopsis thaliana
gtggacatttcatctca

SEQ ID NO: 124784 - DNA, 17 bp, Arabidopsis thaliana
gtggaccaactattgga

SEQ ID NO: 124785 - DNA, 17 bp, Arabidopsis thaliana
gtggaccacccgcggat

SEQ ID NO: 124786 - DNA, 17 bp, Arabidopsis thaliana
gtggaccacgcgctgag

SEQ ID NO: 124787 - DNA, 17 bp, Arabidopsis thaliana
gtggaccacgcgttttg

SEQ ID NO: 124788 - DNA, 17 bp, Arabidopsis thaliana
gtggaccatttggaggt

SEQ ID NO: 124789 - DNA, 17 bp, Arabidopsis thaliana
gtggaccatttggcagt

SEQ ID NO: 124790 - DNA, 17 bp, Arabidopsis thaliana
gtggacccactttcggg

SEQ ID NO: 124791 - DNA, 17 bp, Arabidopsis thaliana
gtggaccctatacctca

SEQ ID NO: 124792 - DNA, 17 bp, Arabidopsis thaliana
gtggaccctgtgcctca

SEQ ID NO: 124793 - DNA, 17 bp, Arabidopsis thaliana
gtggaccgacgcgatta

SEQ ID NO: 124794 - DNA, 17 bp, Arabidopsis thaliana
gtggaccgacgcggaca

SEQ ID NO: 124795 - DNA, 17 bp, Arabidopsis thaliana
gtggaccgacgcggacg

SEQ ID NO: 124796 - DNA, 17 bp, Arabidopsis thaliana
gtggaccgacgcggaga

SEQ ID NO: 124797 - DNA, 17 bp, Arabidopsis thaliana
gtggaccgacgcggagc

SEQ ID NO: 124798 - DNA, 17 bp, Arabidopsis thaliana
gtggaccgacgcggagt

SEQ ID NO: 124799 - DNA, 17 bp, Arabidopsis thaliana
gtggaccgacgcggatt

SEQ ID NO: 124800 - DNA, 17 bp, Arabidopsis thaliana
gtggaccgactggtgga

SEQ ID NO: 124801 - DNA, 17 bp, Arabidopsis thaliana
gtggaccgccaatccga

SEQ ID NO: 124802 - DNA, 17 bp, Arabidopsis thaliana
gtggaccggcgattgtc

SEQ ID NO: 124803 - DNA, 17 bp, Arabidopsis thaliana
gtggaccggttgcttga

SEQ ID NO: 124804 - DNA, 17 bp, Arabidopsis thaliana
gtggaccgtctgactaa

SEQ ID NO: 124805 - DNA, 17 bp, Arabidopsis thaliana
gtggaccgtgccatggc

SEQ ID NO: 124806 - DNA, 17 bp, Arabidopsis thaliana
gtggacctaggacttgg

SEQ ID NO: 124807 - DNA, 17 bp, Arabidopsis thaliana
gtggacctgcggaagga

SEQ ID NO: 124808 - DNA, 17 bp, Arabidopsis thaliana
gtggaccttgggcttgg

SEQ ID NO: 124809 - DNA, 17 bp, Arabidopsis thaliana
gtggaccttgggctttc

SEQ ID NO: 124810 - DNA, 17 bp, Arabidopsis thaliana
gtggacgagccaccatc

SEQ ID NO: 124811 - DNA, 17 bp, Arabidopsis thaliana
gtggacgattagcgact

SEQ ID NO: 124812 - DNA, 17 bp, Arabidopsis thaliana
gtggacgattagtgact

SEQ ID NO: 124813 - DNA, 17 bp, Arabidopsis thaliana
gtggacgattgagcgtt

SEQ ID NO: 124814 - DNA, 17 bp, Arabidopsis thaliana
gtggacgattgtaattc

SEQ ID NO: 124815 - DNA, 17 bp, Arabidopsis thaliana
gtggacggactgggaac

SEQ ID NO: 124816 - DNA, 17 bp, Arabidopsis thaliana
gtggacggagaattagg

SEQ ID NO: 124817 - DNA, 17 bp, Arabidopsis thaliana
gtggacggatcacggtt

SEQ ID NO: 124818 - DNA, 17 bp, Arabidopsis thaliana
gtggacggatttagcgg

SEQ ID NO: 124819 - DNA, 17 bp, Arabidopsis thaliana
gtggacggatttggcag

SEQ ID NO: 124820 - DNA, 17 bp, Arabidopsis thaliana
gtggacgggccggagtg

SEQ ID NO: 124821 - DNA, 17 bp, Arabidopsis thaliana
gtggacgggtttatttt

SEQ ID NO: 124822 - DNA, 17 bp, Arabidopsis thaliana
gtggacgggtttggcag

SEQ ID NO: 124823 - DNA, 17 bp, Arabidopsis thaliana
gtggacgggtttggcgg

SEQ ID NO: 124824 - DNA, 17 bp, Arabidopsis thaliana
gtggacgtaccggagtg

SEQ ID NO: 124825 - DNA, 17 bp, Arabidopsis thaliana
gtggacgtcccggagtg

SEQ ID NO: 124826 - DNA, 17 bp, Arabidopsis thaliana
gtggacgtctcggagtg

SEQ ID NO: 124827 - DNA, 17 bp, Arabidopsis thaliana
gtggacgtctgcctggg

SEQ ID NO: 124828 - DNA, 17 bp, Arabidopsis thaliana
gtggacgtgcaggagtg

SEQ ID NO: 124829 - DNA, 17 bp, Arabidopsis thaliana
gtggacgtgcagtagtg

SEQ ID NO: 124830 - DNA, 17 bp, Arabidopsis thaliana
gtggacgtgccaacgtg

SEQ ID NO: 124831 - DNA, 17 bp, Arabidopsis thaliana
gtggacgtgccagagtg

SEQ ID NO: 124832 - DNA, 17 bp, Arabidopsis thaliana
gtggacgtgccagcgtg

SEQ ID NO: 124833 - DNA, 17 bp, Arabidopsis thaliana
gtggacgtgcccgagtg

SEQ ID NO: 124834 - DNA, 17 bp, Arabidopsis thaliana
gtggacgtgccgaaggg

SEQ ID NO: 124835 - DNA, 17 bp, Arabidopsis thaliana
gtggacgtgccgaagta

SEQ ID NO: 124836 - DNA, 17 bp, Arabidopsis thaliana
gtggacgtgccgaagtg

SEQ ID NO: 124837 - DNA, 17 bp, Arabidopsis thaliana
gtggacgtgccgagtga

SEQ ID NO: 124838 - DNA, 17 bp, Arabidopsis thaliana
gtggacgtgccgagtgg

SEQ ID NO: 124839 - DNA, 17 bp, Arabidopsis thaliana
gtggacgtgccgcagtg

SEQ ID NO: 124840 - DNA, 17 bp, Arabidopsis thaliana
gtggacgtgccggaatg

SEQ ID NO: 124841 - DNA, 17 bp, Arabidopsis thaliana
gtggacgtgccggactc

SEQ ID NO: 124842 - DNA, 17 bp, Arabidopsis thaliana
gtggacgtgccggactg

SEQ ID NO: 124843 - DNA, 17 bp, Arabidopsis thaliana
gtggacgtgccggagag

SEQ ID NO: 124844 - DNA, 17 bp, Arabidopsis thaliana
gtggacgtgccggagcg

SEQ ID NO: 124845 - DNA, 17 bp, Arabidopsis thaliana
gtggacgtgccggaggg

SEQ ID NO: 124846 - DNA, 17 bp, Arabidopsis thaliana
gtggacgtgccggaggt

SEQ ID NO: 124847 - DNA, 17 bp, Arabidopsis thaliana
gtggacgtgccggagta

SEQ ID NO: 124848 - DNA, 17 bp, Arabidopsis thaliana
gtggacgtgccggagtc

SEQ ID NO: 124849 - DNA, 17 bp, Arabidopsis thaliana
gtggacgtgccggagtg

SEQ ID NO: 124850 - DNA, 17 bp, Arabidopsis thaliana
gtggacgtgccggagtt

SEQ ID NO: 124851 - DNA, 17 bp, Arabidopsis thaliana
gtggacgtgccggattg

SEQ ID NO: 124852 - DNA, 17 bp, Arabidopsis thaliana
gtggacgtgccggcgtg

SEQ ID NO: 124853 - DNA, 17 bp, Arabidopsis thaliana
gtggacgtgccggggtg

SEQ ID NO: 124854 - DNA, 17 bp, Arabidopsis thaliana
gtggacgtgccggtggt

SEQ ID NO: 124855 - DNA, 17 bp, Arabidopsis thaliana
gtggacgtgccggtgtg

SEQ ID NO: 124856 - DNA, 17 bp, Arabidopsis thaliana
gtggacgtgccggttat

SEQ ID NO: 124857 - DNA, 17 bp, Arabidopsis thaliana
gtggacgtgccgtagtg

SEQ ID NO: 124858 - DNA, 17 bp, Arabidopsis thaliana
gtggacgtgcctgagtg

SEQ ID NO: 124859 - DNA, 17 bp, Arabidopsis thaliana
gtggacgtgcgggaggg

SEQ ID NO: 124860 - DNA, 17 bp, Arabidopsis thaliana
gtggacgtgcgggagtg

SEQ ID NO: 124861 - DNA, 17 bp, Arabidopsis thaliana
gtggacgtgtcggagtg

SEQ ID NO: 124862 - DNA, 17 bp, Arabidopsis thaliana
gtggacgttcccttatg

SEQ ID NO: 124863 - DNA, 17 bp, Arabidopsis thaliana
gtggactaaagcgttgg

SEQ ID NO: 124864 - DNA, 17 bp, Arabidopsis thaliana
gtggactacaacttggt

SEQ ID NO: 124865 - DNA, 17 bp, Arabidopsis thaliana
gtggactagtcagatca

SEQ ID NO: 124866 - DNA, 17 bp, Arabidopsis thaliana
gtggactcagaatcggt

SEQ ID NO: 124867 - DNA, 17 bp, Arabidopsis thaliana
gtggactccgtttgcga

SEQ ID NO: 124868 - DNA, 17 bp, Arabidopsis thaliana
gtggactctcggcaacg

SEQ ID NO: 124869 - DNA, 17 bp, Arabidopsis thaliana
gtggactctgaagatgg

SEQ ID NO: 124870 - DNA, 17 bp, Arabidopsis thaliana
gtggactgagttgtttt

SEQ ID NO: 124871 - DNA, 17 bp, Arabidopsis thaliana
gtggactgattgggttt

SEQ ID NO: 124872 - DNA, 17 bp, Arabidopsis thaliana
gtggactgccggagtgg

SEQ ID NO: 124873 - DNA, 17 bp, Arabidopsis thaliana
gtggactgcggattcaa

SEQ ID NO: 124874 - DNA, 17 bp, Arabidopsis thaliana
gtggactggagataccc

SEQ ID NO: 124875 - DNA, 17 bp, Arabidopsis thaliana
gtggactggtccgtttg

SEQ ID NO: 124876 - DNA, 17 bp, Arabidopsis thaliana
gtggactgtatcagatc

SEQ ID NO: 124877 - DNA, 17 bp, Arabidopsis thaliana
gtggacttaatgtaaca

SEQ ID NO: 124878 - DNA, 17 bp, Arabidopsis thaliana
gtggacttacgaaaact

SEQ ID NO: 124879 - DNA, 17 bp, Arabidopsis thaliana
gtggacttctccccgaa

SEQ ID NO: 124880 - DNA, 17 bp, Arabidopsis thaliana
gtggacttctcccgatt

SEQ ID NO: 124881 - DNA, 17 bp, Arabidopsis thaliana
gtggacttgaactcggg

SEQ ID NO: 124882 - DNA, 17 bp, Arabidopsis thaliana
gtggacttgccggagtg

SEQ ID NO: 124883 - DNA, 17 bp, Arabidopsis thaliana
gtggacttgctggagtt

SEQ ID NO: 124884 - DNA, 17 bp, Arabidopsis thaliana
gtggacttgttgtagga

SEQ ID NO: 124885 - DNA, 17 bp, Arabidopsis thaliana
gtggagaaatagaccgt

SEQ ID NO: 124886 - DNA, 17 bp, Arabidopsis thaliana
gtggagaagcagtcagg

SEQ ID NO: 124887 - DNA, 17 bp, Arabidopsis thaliana
gtggagaatcgccacaa

SEQ ID NO: 124888 - DNA, 17 bp, Arabidopsis thaliana
gtggagacctgggctcg

SEQ ID NO: 124889 - DNA, 17 bp, Arabidopsis thaliana
gtggagacgcggattac

SEQ ID NO: 124890 - DNA, 17 bp, Arabidopsis thaliana
gtggagacggctgctga

SEQ ID NO: 124891 - DNA, 17 bp, Arabidopsis thaliana
gtggagacgtcgccgtg

SEQ ID NO: 124892 - DNA, 17 bp, Arabidopsis thaliana
gtggagacgtcgctgcc

SEQ ID NO: 124893 - DNA, 17 bp, Arabidopsis thaliana
gtggagacgtcgctgct

SEQ ID NO: 124894 - DNA, 17 bp, Arabidopsis thaliana
gtggagactgagataga

SEQ ID NO: 124895 - DNA, 17 bp, Arabidopsis thaliana
gtggagagacaccctct

SEQ ID NO: 124896 - DNA, 17 bp, Arabidopsis thaliana
gtggagaggtttggcag

SEQ ID NO: 124897 - DNA, 17 bp, Arabidopsis thaliana
gtggagatcatattcac

SEQ ID NO: 124898 - DNA, 17 bp, Arabidopsis thaliana
gtggagattatcagaac

SEQ ID NO: 124899 - DNA, 17 bp, Arabidopsis thaliana
gtggagcagatcaagcg

SEQ ID NO: 124900 - DNA, 17 bp, Arabidopsis thaliana
gtggagcagttgatgat

SEQ ID NO: 124901 - DNA, 17 bp, Arabidopsis thaliana
gtggagccggttcagtt

SEQ ID NO: 124902 - DNA, 17 bp, Arabidopsis thaliana
gtggagcctgcggctta

SEQ ID NO: 124903 - DNA, 17 bp, Arabidopsis thaliana
gtggagcgaaagatcaa

SEQ ID NO: 124904 - DNA, 17 bp, Arabidopsis thaliana
gtggagcgatttgtcgg

SEQ ID NO: 124905 - DNA, 17 bp, Arabidopsis thaliana
gtggagcgatttgtcta

SEQ ID NO: 124906 - DNA, 17 bp, Arabidopsis thaliana
gtggagcgatttgtctg

SEQ ID NO: 124907 - DNA, 17 bp, Arabidopsis thaliana
gtggagcgatttgtctt

SEQ ID NO: 124908 - DNA, 17 bp, Arabidopsis thaliana
gtggagctatttgtctg

SEQ ID NO: 124909 - DNA, 17 bp, Arabidopsis thaliana
gtggagctgagccgcat

SEQ ID NO: 124910 - DNA, 17 bp, Arabidopsis thaliana
gtggagcttagcttccc

SEQ ID NO: 124911 - DNA, 17 bp, Arabidopsis thaliana
gtggaggatgaacgaga

SEQ ID NO: 124912 - DNA, 17 bp, Arabidopsis thaliana
gtggaggcccgcttcac

SEQ ID NO: 124913 - DNA, 17 bp, Arabidopsis thaliana
gtggaggcctacaccat

SEQ ID NO: 124914 - DNA, 17 bp, Arabidopsis thaliana
gtggaggcgaaggcgcg

SEQ ID NO: 124915 - DNA, 17 bp, Arabidopsis thaliana
gtggaggctgaccctcg

SEQ ID NO: 124916 - DNA, 17 bp, Arabidopsis thaliana
gtggagggcaatgcgtg

SEQ ID NO: 124917 - DNA, 17 bp, Arabidopsis thaliana
gtggagggcacgtctgc

SEQ ID NO: 124918 - DNA, 17 bp, Arabidopsis thaliana
gtggaggtctgatagtt

SEQ ID NO: 124919 - DNA, 17 bp, Arabidopsis thaliana
gtggaggttcgagtcct

SEQ ID NO: 124920 - DNA, 17 bp, Arabidopsis thaliana
gtggagtccgagtagcg

SEQ ID NO: 124921 - DNA, 17 bp, Arabidopsis thaliana
gtggagtgccacttcag

SEQ ID NO: 124922 - DNA, 17 bp, Arabidopsis thaliana
gtggagtgccgcaccct

SEQ ID NO: 124923 - DNA, 17 bp, Arabidopsis thaliana
gtggagtgttctgacac

SEQ ID NO: 124924 - DNA, 17 bp, Arabidopsis thaliana
gtggagttctctcagga

SEQ ID NO: 124925 - DNA, 17 bp, Arabidopsis thaliana
gtggagttggtgtctga

SEQ ID NO: 124926 - DNA, 17 bp, Arabidopsis thaliana
gtggataaaatgcaatg

SEQ ID NO: 124927 - DNA, 17 bp, Arabidopsis thaliana
gtggataacggtagccg

SEQ ID NO: 124928 - DNA, 17 bp, Arabidopsis thaliana
gtggataagttacacga

SEQ ID NO: 124929 - DNA, 17 bp, Arabidopsis thaliana
gtggataatctatctcc

SEQ ID NO: 124930 - DNA, 17 bp, Arabidopsis thaliana
gtggataattccctgaa

SEQ ID NO: 124931 - DNA, 17 bp, Arabidopsis thaliana
gtggatacctaggcacc

SEQ ID NO: 124932 - DNA, 17 bp, Arabidopsis thaliana
gtggatactcgacctca

SEQ ID NO: 124933 - DNA, 17 bp, Arabidopsis thaliana
gtggatagcgatggttt

SEQ ID NO: 124934 - DNA, 17 bp, Arabidopsis thaliana
gtggatagtattaggag

SEQ ID NO: 124935 - DNA, 17 bp, Arabidopsis thaliana
gtggatatccgattggt

SEQ ID NO: 124936 - DNA, 17 bp, Arabidopsis thaliana
gtggatatgaccaacag

SEQ ID NO: 124937 - DNA, 17 bp, Arabidopsis thaliana
gtggatatgggccgctg

SEQ ID NO: 124938 - DNA, 17 bp, Arabidopsis thaliana
gtggatatgggccgggg

SEQ ID NO: 124939 - DNA, 17 bp, Arabidopsis thaliana
gtggatcaagcaatgca

SEQ ID NO: 124940 - DNA, 17 bp, Arabidopsis thaliana
gtggatccagatcttga

SEQ ID NO: 124941 - DNA, 17 bp, Arabidopsis thaliana
gtggatcccacactatt

SEQ ID NO: 124942 - DNA, 17 bp, Arabidopsis thaliana
gtggatcctacatttta

SEQ ID NO: 124943 - DNA, 17 bp, Arabidopsis thaliana
gtggatcctgtctcccc

SEQ ID NO: 124944 - DNA, 17 bp, Arabidopsis thaliana
gtggatcctgtctctca

SEQ ID NO: 124945 - DNA, 17 bp, Arabidopsis thaliana
gtggatcctgtctctcg

SEQ ID NO: 124946 - DNA, 17 bp, Arabidopsis thaliana
gtggatcgacctttggc

SEQ ID NO: 124947 - DNA, 17 bp, Arabidopsis thaliana
gtggatcgtggcagcaa

SEQ ID NO: 124948 - DNA, 17 bp, Arabidopsis thaliana
gtggatctgattgagta

SEQ ID NO: 124949 - DNA, 17 bp, Arabidopsis thaliana
gtggatcttggagcaac

SEQ ID NO: 124950 - DNA, 17 bp, Arabidopsis thaliana
gtggatgaagaccttgg

SEQ ID NO: 124951 - DNA, 17 bp, Arabidopsis thaliana
gtggatgaagcccggta

SEQ ID NO: 124952 - DNA, 17 bp, Arabidopsis thaliana
gtggatgaagctgagtc

SEQ ID NO: 124953 - DNA, 17 bp, Arabidopsis thaliana
gtggatgaagctgagtt

SEQ ID NO: 124954 - DNA, 17 bp, Arabidopsis thaliana
gtggatgaatgcagact

SEQ ID NO: 124955 - DNA, 17 bp, Arabidopsis thaliana
gtggatgactatggtgt

SEQ ID NO: 124956 - DNA, 17 bp, Arabidopsis thaliana
gtggatgactgcgtcgc

SEQ ID NO: 124957 - DNA, 17 bp, Arabidopsis thaliana
gtggatgacttgagacg

SEQ ID NO: 124958 - DNA, 17 bp, Arabidopsis thaliana
gtggatgaggctcaacc

SEQ ID NO: 124959 - DNA, 17 bp, Arabidopsis thaliana
gtggatgatcgcttatg

SEQ ID NO: 124960 - DNA, 17 bp, Arabidopsis thaliana
gtggatgcttacggttc

SEQ ID NO: 124961 - DNA, 17 bp, Arabidopsis thaliana
gtggatggaaatcgccg

SEQ ID NO: 124962 - DNA, 17 bp, Arabidopsis thaliana
gtggatggcgatggttt

SEQ ID NO: 124963 - DNA, 17 bp, Arabidopsis thaliana
gtggatgggaaggttca

SEQ ID NO: 124964 - DNA, 17 bp, Arabidopsis thaliana
gtggatgggtttggcgg

SEQ ID NO: 124965 - DNA, 17 bp, Arabidopsis thaliana
gtggatgtcactgacaa

SEQ ID NO: 124966 - DNA, 17 bp, Arabidopsis thaliana
gtggatgtcagattcgc

SEQ ID NO: 124967 - DNA, 17 bp, Arabidopsis thaliana
gtggatgtcagattcgg

SEQ ID NO: 124968 - DNA, 17 bp, Arabidopsis thaliana
gtggatgtcggatctca

SEQ ID NO: 124969 - DNA, 17 bp, Arabidopsis thaliana
gtggatgtgccggagtg

SEQ ID NO: 124970 - DNA, 17 bp, Arabidopsis thaliana
gtggattaaatgaactc

SEQ ID NO: 124971 - DNA, 17 bp, Arabidopsis thaliana
gtggattaactttggtg

SEQ ID NO: 124972 - DNA, 17 bp, Arabidopsis thaliana
gtggattacccatcgga

SEQ ID NO: 124973 - DNA, 17 bp, Arabidopsis thaliana
gtggattacctctgtct

SEQ ID NO: 124974 - DNA, 17 bp, Arabidopsis thaliana
gtggattcagctgtaca

SEQ ID NO: 124975 - DNA, 17 bp, Arabidopsis thaliana
gtggattcgtgccccac

SEQ ID NO: 124976 - DNA, 17 bp, Arabidopsis thaliana
gtggattctctggtcga

SEQ ID NO: 124977 - DNA, 17 bp, Arabidopsis thaliana
gtggattcttgtggtcg

SEQ ID NO: 124978 - DNA, 17 bp, Arabidopsis thaliana
gtggattgacagagtga

SEQ ID NO: 124979 - DNA, 17 bp, Arabidopsis thaliana
gtggattgacccggttt

SEQ ID NO: 124980 - DNA, 17 bp, Arabidopsis thaliana
gtggattgacttattgc

SEQ ID NO: 124981 - DNA, 17 bp, Arabidopsis thaliana
gtggattgcattttttg

SEQ ID NO: 124982 - DNA, 17 bp, Arabidopsis thaliana
gtggattgctgagtgga

SEQ ID NO: 124983 - DNA, 17 bp, Arabidopsis thaliana
gtggattggtctttcta

SEQ ID NO: 124984 - DNA, 17 bp, Arabidopsis thaliana
gtggattgtcaagaccc

SEQ ID NO: 124985 - DNA, 17 bp, Arabidopsis thaliana
gtggattgttgatcgag

SEQ ID NO: 124986 - DNA, 17 bp, Arabidopsis thaliana
gtggatttagccaagga

SEQ ID NO: 124987 - DNA, 17 bp, Arabidopsis thaliana
gtggatttatggctcaa

SEQ ID NO: 124988 - DNA, 17 bp, Arabidopsis thaliana
gtggatttcaacgatgg

SEQ ID NO: 124989 - DNA, 17 bp, Arabidopsis thaliana
gtggatttctgtagggg

SEQ ID NO: 124990 - DNA, 17 bp, Arabidopsis thaliana
gtggattttgcctcaga

SEQ ID NO: 124991 - DNA, 17 bp, Arabidopsis thaliana
gtggcaaacattgtcag

SEQ ID NO: 124992 - DNA, 17 bp, Arabidopsis thaliana
gtggcaaaccctgaaca

SEQ ID NO: 124993 - DNA, 17 bp, Arabidopsis thaliana
gtggcaaagagaaacaa

SEQ ID NO: 124994 - DNA, 17 bp, Arabidopsis thaliana
gtggcaaagtgggctgg

SEQ ID NO: 124995 - DNA, 17 bp, Arabidopsis thaliana
gtggcaaatttcttacc

SEQ ID NO: 124996 - DNA, 17 bp, Arabidopsis thaliana
gtggcaaattttagcgg

SEQ ID NO: 124997 - DNA, 17 bp, Arabidopsis thaliana
gtggcaaccattgtaaa

SEQ ID NO: 124998 - DNA, 17 bp, Arabidopsis thaliana
gtggcaacctaagactg

SEQ ID NO: 124999 - DNA, 17 bp, Arabidopsis thaliana
gtggcaacgtactggtc

SEQ ID NO: 125000 - DNA, 17 bp, Arabidopsis thaliana
gtggcaactaggatgag

SEQ ID NO: 125001 - DNA, 17 bp, Arabidopsis thaliana
gtggcaagaagagtatc

SEQ ID NO: 125002 - DNA, 17 bp, Arabidopsis thaliana
gtggcaagatgcctggc

SEQ ID NO: 125003 - DNA, 17 bp, Arabidopsis thaliana
gtggcaagcacggcatg

SEQ ID NO: 125004 - DNA, 17 bp, Arabidopsis thaliana
gtggcaagcggctgagg

SEQ ID NO: 125005 - DNA, 17 bp, Arabidopsis thaliana
gtggcaagctctcatgt

SEQ ID NO: 125006 - DNA, 17 bp, Arabidopsis thaliana
gtggcaagtaacggctg

SEQ ID NO: 125007 - DNA, 17 bp, Arabidopsis thaliana
gtggcaagtctaatgat

SEQ ID NO: 125008 - DNA, 17 bp, Arabidopsis thaliana
gtggcacaaacatgttc

SEQ ID NO: 125009 - DNA, 17 bp, Arabidopsis thaliana
gtggcacaaattgcgac

SEQ ID NO: 125010 - DNA, 17 bp, Arabidopsis thaliana
gtggcaccaccgcaccg

SEQ ID NO: 125011 - DNA, 17 bp, Arabidopsis thaliana
gtggcacgatcctatga

SEQ ID NO: 125012 - DNA, 17 bp, Arabidopsis thaliana
gtggcacggtcctatga

SEQ ID NO: 125013 - DNA, 17 bp, Arabidopsis thaliana
gtggcacgtctgcctgg

SEQ ID NO: 125014 - DNA, 17 bp, Arabidopsis thaliana
gtggcactcattggtgt

SEQ ID NO: 125015 - DNA, 17 bp, Arabidopsis thaliana
gtggcacttagatttgg

SEQ ID NO: 125016 - DNA, 17 bp, Arabidopsis thaliana
gtggcagacaagcttgg

SEQ ID NO: 125017 - DNA, 17 bp, Arabidopsis thaliana
gtggcagactcttccag

SEQ ID NO: 125018 - DNA, 17 bp, Arabidopsis thaliana
gtggcagagtggccttg

SEQ ID NO: 125019 - DNA, 17 bp, Arabidopsis thaliana
gtggcagatcatttttt

SEQ ID NO: 125020 - DNA, 17 bp, Arabidopsis thaliana
gtggcagcaaggccact

SEQ ID NO: 125021 - DNA, 17 bp, Arabidopsis thaliana
gtggcagcacacgattg

SEQ ID NO: 125022 - DNA, 17 bp, Arabidopsis thaliana
gtggcagcagacagacc

SEQ ID NO: 125023 - DNA, 17 bp, Arabidopsis thaliana
gtggcagccaagcgtcc

SEQ ID NO: 125024 - DNA, 17 bp, Arabidopsis thaliana
gtggcagccaagcgttc

SEQ ID NO: 125025 - DNA, 17 bp, Arabidopsis thaliana
gtggcagccactgtaaa

SEQ ID NO: 125026 - DNA, 17 bp, Arabidopsis thaliana
gtggcagccattgtaaa

SEQ ID NO: 125027 - DNA, 17 bp, Arabidopsis thaliana
gtggcagccattgtaag

SEQ ID NO: 125028 - DNA, 17 bp, Arabidopsis thaliana
gtggcagccattgtgaa

SEQ ID NO: 125029 - DNA, 17 bp, Arabidopsis thaliana
gtggcagccgctgtaaa

SEQ ID NO: 125030 - DNA, 17 bp, Arabidopsis thaliana
gtggcagctattgtaaa

SEQ ID NO: 125031 - DNA, 17 bp, Arabidopsis thaliana
gtggcaggccgtgtaaa

SEQ ID NO: 125032 - DNA, 17 bp, Arabidopsis thaliana
gtggcaggctacaatac

SEQ ID NO: 125033 - DNA, 17 bp, Arabidopsis thaliana
gtggcagtcgataactc

SEQ ID NO: 125034 - DNA, 17 bp, Arabidopsis thaliana
gtggcataaaccaacaa

SEQ ID NO: 125035 - DNA, 17 bp, Arabidopsis thaliana
gtggcataaaccaacag

SEQ ID NO: 125036 - DNA, 17 bp, Arabidopsis thaliana
gtggcataagtcgtgtt

SEQ ID NO: 125037 - DNA, 17 bp, Arabidopsis thaliana
gtggcataccgaccgtc

SEQ ID NO: 125038 - DNA, 17 bp, Arabidopsis thaliana
gtggcatatgcgagaaa

SEQ ID NO: 125039 - DNA, 17 bp, Arabidopsis thaliana
gtggcatgagttgtaag

SEQ ID NO: 125040 - DNA, 17 bp, Arabidopsis thaliana
gtggcatgccattgtaa

SEQ ID NO: 125041 - DNA, 17 bp, Arabidopsis thaliana
gtggcatgctccccagg

SEQ ID NO: 125042 - DNA, 17 bp, Arabidopsis thaliana
gtggcatgtccaaggtt

SEQ ID NO: 125043 - DNA, 17 bp, Arabidopsis thaliana
gtggcatgtcccccagg

SEQ ID NO: 125044 - DNA, 17 bp, Arabidopsis thaliana
gtggcatgtctgtgaat

SEQ ID NO: 125045 - DNA, 17 bp, Arabidopsis thaliana
gtggcatgtcttgttgt

SEQ ID NO: 125046 - DNA, 17 bp, Arabidopsis thaliana
gtggcattaggctgacc

SEQ ID NO: 125047 - DNA, 17 bp, Arabidopsis thaliana
gtggcattagggtgacc

SEQ ID NO: 125048 - DNA, 17 bp, Arabidopsis thaliana
gtggcattcagattaac

SEQ ID NO: 125049 - DNA, 17 bp, Arabidopsis thaliana
gtggcattccggaaagt

SEQ ID NO: 125050 - DNA, 17 bp, Arabidopsis thaliana
gtggcattcttcagtgt

SEQ ID NO: 125051 - DNA, 17 bp, Arabidopsis thaliana
gtggcatttaccgtttt

SEQ ID NO: 125052 - DNA, 17 bp, Arabidopsis thaliana
gtggcattttatcacga

SEQ ID NO: 125053 - DNA, 17 bp, Arabidopsis thaliana
gtggcattttatcacgc

SEQ ID NO: 125054 - DNA, 17 bp, Arabidopsis thaliana
gtggccaaagtttcgaa

SEQ ID NO: 125055 - DNA, 17 bp, Arabidopsis thaliana
gtggccaaggacgcgtg

SEQ ID NO: 125056 - DNA, 17 bp, Arabidopsis thaliana
gtggccaatgcatgcat

SEQ ID NO: 125057 - DNA, 17 bp, Arabidopsis thaliana
gtggccagaaacgtctc

SEQ ID NO: 125058 - DNA, 17 bp, Arabidopsis thaliana
gtggccagaacatctta

SEQ ID NO: 125059 - DNA, 17 bp, Arabidopsis thaliana
gtggccagcttcaaggg

SEQ ID NO: 125060 - DNA, 17 bp, Arabidopsis thaliana
gtggccagggaaggtgg

SEQ ID NO: 125061 - DNA, 17 bp, Arabidopsis thaliana
gtggccatagttgtgtt

SEQ ID NO: 125062 - DNA, 17 bp, Arabidopsis thaliana
gtggccatgtaatctgt

SEQ ID NO: 125063 - DNA, 17 bp, Arabidopsis thaliana
gtggcccacttgtctcc

SEQ ID NO: 125064 - DNA, 17 bp, Arabidopsis thaliana
gtggcccatgagcttgc

SEQ ID NO: 125065 - DNA, 17 bp, Arabidopsis thaliana
gtggcccgctttttctt

SEQ ID NO: 125066 - DNA, 17 bp, Arabidopsis thaliana
gtggccctattgtgagt

SEQ ID NO: 125067 - DNA, 17 bp, Arabidopsis thaliana
gtggccgatgtctctac

SEQ ID NO: 125068 - DNA, 17 bp, Arabidopsis thaliana
gtggccgcaaaactgca

SEQ ID NO: 125069 - DNA, 17 bp, Arabidopsis thaliana
gtggccgctaccgacga

SEQ ID NO: 125070 - DNA, 17 bp, Arabidopsis thaliana
gtggccgctcgagtgac

SEQ ID NO: 125071 - DNA, 17 bp, Arabidopsis thaliana
gtggccggcggtggtgg

SEQ ID NO: 125072 - DNA, 17 bp, Arabidopsis thaliana
gtggccgggggacggac

SEQ ID NO: 125073 - DNA, 17 bp, Arabidopsis thaliana
gtggccgtctttattag

SEQ ID NO: 125074 - DNA, 17 bp, Arabidopsis thaliana
gtggccgtgagggaggt

SEQ ID NO: 125075 - DNA, 17 bp, Arabidopsis thaliana
gtggccgtggggacccg

SEQ ID NO: 125076 - DNA, 17 bp, Arabidopsis thaliana
gtggccgtgggttcgtt

SEQ ID NO: 125077 - DNA, 17 bp, Arabidopsis thaliana
gtggcctaccatggagg

SEQ ID NO: 125078 - DNA, 17 bp, Arabidopsis thaliana
gtggcctaccatggggt

SEQ ID NO: 125079 - DNA, 17 bp, Arabidopsis thaliana
gtggcctaccatggtag

SEQ ID NO: 125080 - DNA, 17 bp, Arabidopsis thaliana
gtggcctaccatggtgc

SEQ ID NO: 125081 - DNA, 17 bp, Arabidopsis thaliana
gtggcctaccatggtgg

SEQ ID NO: 125082 - DNA, 17 bp, Arabidopsis thaliana
gtggcctatcagaagct

SEQ ID NO: 125083 - DNA, 17 bp, Arabidopsis thaliana
gtggcctatcgatcccc

SEQ ID NO: 125084 - DNA, 17 bp, Arabidopsis thaliana
gtggcctcatttgataa

SEQ ID NO: 125085 - DNA, 17 bp, Arabidopsis thaliana
gtggcctgatggtattg

SEQ ID NO: 125086 - DNA, 17 bp, Arabidopsis thaliana
gtggcctgcaaattacc

SEQ ID NO: 125087 - DNA, 17 bp, Arabidopsis thaliana
gtggcctgcaatttacc

SEQ ID NO: 125088 - DNA, 17 bp, Arabidopsis thaliana
gtggcctgggccgagta

SEQ ID NO: 125089 - DNA, 17 bp, Arabidopsis thaliana
gtggcctgtagttgttg

SEQ ID NO: 125090 - DNA, 17 bp, Arabidopsis thaliana
gtggcctttgttgattt

SEQ ID NO: 125091 - DNA, 17 bp, Arabidopsis thaliana
gtggcctttgtttccga

SEQ ID NO: 125092 - DNA, 17 bp, Arabidopsis thaliana
gtggcctttttcagacg

SEQ ID NO: 125093 - DNA, 17 bp, Arabidopsis thaliana
gtggcgaagatcccgta

SEQ ID NO: 125094 - DNA, 17 bp, Arabidopsis thaliana
gtggcgaaggcgacttt

SEQ ID NO: 125095 - DNA, 17 bp, Arabidopsis thaliana
gtggcgaatcatacact

SEQ ID NO: 125096 - DNA, 17 bp, Arabidopsis thaliana
gtggcgacaggtgtcta

SEQ ID NO: 125097 - DNA, 17 bp, Arabidopsis thaliana
gtggcgacctatacccg

SEQ ID NO: 125098 - DNA, 17 bp, Arabidopsis thaliana
gtggcgactggtggcga

SEQ ID NO: 125099 - DNA, 17 bp, Arabidopsis thaliana
gtggcgagaccggtaaa

SEQ ID NO: 125100 - DNA, 17 bp, Arabidopsis thaliana
gtggcgagattcccgtt

SEQ ID NO: 125101 - DNA, 17 bp, Arabidopsis thaliana
gtggcgatgtgttggct

SEQ ID NO: 125102 - DNA, 17 bp, Arabidopsis thaliana
gtggcgatttgtctggt

SEQ ID NO: 125103 - DNA, 17 bp, Arabidopsis thaliana
gtggcgcgaagctaccg

SEQ ID NO: 125104 - DNA, 17 bp, Arabidopsis thaliana
gtggcggaagacgctgt

SEQ ID NO: 125105 - DNA, 17 bp, Arabidopsis thaliana
gtggcggaggcagtggc

SEQ ID NO: 125106 - DNA, 17 bp, Arabidopsis thaliana
gtggcggatcgactggt

SEQ ID NO: 125107 - DNA, 17 bp, Arabidopsis thaliana
gtggcggatgtcagcgg

SEQ ID NO: 125108 - DNA, 17 bp, Arabidopsis thaliana
gtggcggatgtcagggg

SEQ ID NO: 125109 - DNA, 17 bp, Arabidopsis thaliana
gtggcggcctaagcccg

SEQ ID NO: 125110 - DNA, 17 bp, Arabidopsis thaliana
gtggcggcctgagcggc

SEQ ID NO: 125111 - DNA, 17 bp, Arabidopsis thaliana
gtggcggcgctggtggt

SEQ ID NO: 125112 - DNA, 17 bp, Arabidopsis thaliana
gtggcggttgacggcaa

SEQ ID NO: 125113 - DNA, 17 bp, Arabidopsis thaliana
gtggcggttgacgggaa

SEQ ID NO: 125114 - DNA, 17 bp, Arabidopsis thaliana
gtggcgtagcgcggatg

SEQ ID NO: 125115 - DNA, 17 bp, Arabidopsis thaliana
gtggcgtggactactgt

SEQ ID NO: 125116 - DNA, 17 bp, Arabidopsis thaliana
gtggctaaaagactctg

SEQ ID NO: 125117 - DNA, 17 bp, Arabidopsis thaliana
gtggctaaagtccaaaa

SEQ ID NO: 125118 - DNA, 17 bp, Arabidopsis thaliana
gtggctaaagtttcaaa

SEQ ID NO: 125119 - DNA, 17 bp, Arabidopsis thaliana
gtggctaaattaatcgt

SEQ ID NO: 125120 - DNA, 17 bp, Arabidopsis thaliana
gtggctaacaggcgaaa

SEQ ID NO: 125121 - DNA, 17 bp, Arabidopsis thaliana
gtggctaactttctcca

SEQ ID NO: 125122 - DNA, 17 bp, Arabidopsis thaliana
gtggctaattcagtggt

SEQ ID NO: 125123 - DNA, 17 bp, Arabidopsis thaliana
gtggctacttcttgatc

SEQ ID NO: 125124 - DNA, 17 bp, Arabidopsis thaliana
gtggctaggaattggca

SEQ ID NO: 125125 - DNA, 17 bp, Arabidopsis thaliana
gtggctagttcaggact

SEQ ID NO: 125126 - DNA, 17 bp, Arabidopsis thaliana
gtggctagttgcgccat

SEQ ID NO: 125127 - DNA, 17 bp, Arabidopsis thaliana
gtggctatccaccgtgt

SEQ ID NO: 125128 - DNA, 17 bp, Arabidopsis thaliana
gtggctattgggtgtac

SEQ ID NO: 125129 - DNA, 17 bp, Arabidopsis thaliana
gtggctcaacgtattca

SEQ ID NO: 125130 - DNA, 17 bp, Arabidopsis thaliana
gtggctcactgctataa

SEQ ID NO: 125131 - DNA, 17 bp, Arabidopsis thaliana
gtggctcagttaacagc

SEQ ID NO: 125132 - DNA, 17 bp, Arabidopsis thaliana
gtggctccattaccgcc

SEQ ID NO: 125133 - DNA, 17 bp, Arabidopsis thaliana
gtggctccattaccgct

SEQ ID NO: 125134 - DNA, 17 bp, Arabidopsis thaliana
gtggctctcccatcgat

SEQ ID NO: 125135 - DNA, 17 bp, Arabidopsis thaliana
gtggctctcctagcacc

SEQ ID NO: 125136 - DNA, 17 bp, Arabidopsis thaliana
gtggctctctttgtaac

SEQ ID NO: 125137 - DNA, 17 bp, Arabidopsis thaliana
gtggctctgtctctgtg

SEQ ID NO: 125138 - DNA, 17 bp, Arabidopsis thaliana
gtggctctgtggtggga

SEQ ID NO: 125139 - DNA, 17 bp, Arabidopsis thaliana
gtggctcttgttgcgac

SEQ ID NO: 125140 - DNA, 17 bp, Arabidopsis thaliana
gtggctcttttgcgacg

SEQ ID NO: 125141 - DNA, 17 bp, Arabidopsis thaliana
gtggctgagataagaca

SEQ ID NO: 125142 - DNA, 17 bp, Arabidopsis thaliana
gtggctgagcaagaaac

SEQ ID NO: 125143 - DNA, 17 bp, Arabidopsis thaliana
gtggctgagtaaaacct

SEQ ID NO: 125144 - DNA, 17 bp, Arabidopsis thaliana
gtggctgatatgatccg

SEQ ID NO: 125145 - DNA, 17 bp, Arabidopsis thaliana
gtggctgcatttgttgt

SEQ ID NO: 125146 - DNA, 17 bp, Arabidopsis thaliana
gtggctgcctaagcccg

SEQ ID NO: 125147 - DNA, 17 bp, Arabidopsis thaliana
gtggctgcctcttctgg

SEQ ID NO: 125148 - DNA, 17 bp, Arabidopsis thaliana
gtggctgctactgacat

SEQ ID NO: 125149 - DNA, 17 bp, Arabidopsis thaliana
gtggctgctcgagtgac

SEQ ID NO: 125150 - DNA, 17 bp, Arabidopsis thaliana
gtggctgctgttgttga

SEQ ID NO: 125151 - DNA, 17 bp, Arabidopsis thaliana
gtggctggatagtccgc

SEQ ID NO: 125152 - DNA, 17 bp, Arabidopsis thaliana
gtggctggtaatctggt

SEQ ID NO: 125153 - DNA, 17 bp, Arabidopsis thaliana
gtggctgtagtttagtg

SEQ ID NO: 125154 - DNA, 17 bp, Arabidopsis thaliana
gtggctgtcactggcat

SEQ ID NO: 125155 - DNA, 17 bp, Arabidopsis thaliana
gtggcttatgttatgga

SEQ ID NO: 125156 - DNA, 17 bp, Arabidopsis thaliana
gtggcttctcgggttgt

SEQ ID NO: 125157 - DNA, 17 bp, Arabidopsis thaliana
gtggcttgaagacattc

SEQ ID NO: 125158 - DNA, 17 bp, Arabidopsis thaliana
gtggcttgacctactga

SEQ ID NO: 125159 - DNA, 17 bp, Arabidopsis thaliana
gtggcttgagacgttag

SEQ ID NO: 125160 - DNA, 17 bp, Arabidopsis thaliana
gtggcttgcagagagaa

SEQ ID NO: 125161 - DNA, 17 bp, Arabidopsis thaliana
gtggcttggatcgggtc

SEQ ID NO: 125162 - DNA, 17 bp, Arabidopsis thaliana
gtggcttgggttgtggt

SEQ ID NO: 125163 - DNA, 17 bp, Arabidopsis thaliana
gtggcttggtctgttgt

SEQ ID NO: 125164 - DNA, 17 bp, Arabidopsis thaliana
gtggcttggttccaccg

SEQ ID NO: 125165 - DNA, 17 bp, Arabidopsis thaliana
gtggcttgttaattgct

SEQ ID NO: 125166 - DNA, 17 bp, Arabidopsis thaliana
gtggctttatctcaaga

SEQ ID NO: 125167 - DNA, 17 bp, Arabidopsis thaliana
gtggctttgagctccga

SEQ ID NO: 125168 - DNA, 17 bp, Arabidopsis thaliana
gtggctttgattgttgt

SEQ ID NO: 125169 - DNA, 17 bp, Arabidopsis thaliana
gtggctttggcagatcg

SEQ ID NO: 125170 - DNA, 17 bp, Arabidopsis thaliana
gtggctttggccgagtg

SEQ ID NO: 125171 - DNA, 17 bp, Arabidopsis thaliana
gtggctttggcttgctc

SEQ ID NO: 125172 - DNA, 17 bp, Arabidopsis thaliana
gtggctttgtaccaacg

SEQ ID NO: 125173 - DNA, 17 bp, Arabidopsis thaliana
gtggctttgtataggat

SEQ ID NO: 125174 - DNA, 17 bp, Arabidopsis thaliana
gtggctttgtatgtttt

SEQ ID NO: 125175 - DNA, 17 bp, Arabidopsis thaliana
gtggctttgtcataggt

SEQ ID NO: 125176 - DNA, 17 bp, Arabidopsis thaliana
gtggctttttaagtccg

SEQ ID NO: 125177 - DNA, 17 bp, Arabidopsis thaliana
gtgggaaactaactgcg

SEQ ID NO: 125178 - DNA, 17 bp, Arabidopsis thaliana
gtgggaaatctgtgcag

SEQ ID NO: 125179 - DNA, 17 bp, Arabidopsis thaliana
gtgggaaccttcaactg

SEQ ID NO: 125180 - DNA, 17 bp, Arabidopsis thaliana
gtgggaacgcctgagtc

SEQ ID NO: 125181 - DNA, 17 bp, Arabidopsis thaliana
gtgggaaggacttggcc

SEQ ID NO: 125182 - DNA, 17 bp, Arabidopsis thaliana
gtgggaaggacttggct

SEQ ID NO: 125183 - DNA, 17 bp, Arabidopsis thaliana
gtgggaagtcctcgtgt

SEQ ID NO: 125184 - DNA, 17 bp, Arabidopsis thaliana
gtgggaatgtgacactg

SEQ ID NO: 125185 - DNA, 17 bp, Arabidopsis thaliana
gtgggaattggtttcgc

SEQ ID NO: 125186 - DNA, 17 bp, Arabidopsis thaliana
gtgggaatttatctatt

SEQ ID NO: 125187 - DNA, 17 bp, Arabidopsis thaliana
gtgggaatttgcttgtt

SEQ ID NO: 125188 - DNA, 17 bp, Arabidopsis thaliana
gtgggaatttgtctgtt

SEQ ID NO: 125189 - DNA, 17 bp, Arabidopsis thaliana
gtgggacaatcacgggt

SEQ ID NO: 125190 - DNA, 17 bp, Arabidopsis thaliana
gtgggacaggtcgcgaa

SEQ ID NO: 125191 - DNA, 17 bp, Arabidopsis thaliana
gtgggaccagtggcata

SEQ ID NO: 125192 - DNA, 17 bp, Arabidopsis thaliana
gtgggacccacggcaaa

SEQ ID NO: 125193 - DNA, 17 bp, Arabidopsis thaliana
gtgggacccacggcgaa

SEQ ID NO: 125194 - DNA, 17 bp, Arabidopsis thaliana
gtgggacccacggcgat

SEQ ID NO: 125195 - DNA, 17 bp, Arabidopsis thaliana
gtgggacccacggtgaa

SEQ ID NO: 125196 - DNA, 17 bp, Arabidopsis thaliana
gtgggacccagggcgaa

SEQ ID NO: 125197 - DNA, 17 bp, Arabidopsis thaliana
gtgggacccagggggaa

SEQ ID NO: 125198 - DNA, 17 bp, Arabidopsis thaliana
gtgggacccggtgcact

SEQ ID NO: 125199 - DNA, 17 bp, Arabidopsis thaliana
gtgggacccggtgcccg

SEQ ID NO: 125200 - DNA, 17 bp, Arabidopsis thaliana
gtgggacctctctgttg

SEQ ID NO: 125201 - DNA, 17 bp, Arabidopsis thaliana
gtgggacctttggtttg

SEQ ID NO: 125202 - DNA, 17 bp, Arabidopsis thaliana
gtgggacgcatatctag

SEQ ID NO: 125203 - DNA, 17 bp, Arabidopsis thaliana
gtgggacgggttggcgg

SEQ ID NO: 125204 - DNA, 17 bp, Arabidopsis thaliana
gtgggactccgtcacag

SEQ ID NO: 125205 - DNA, 17 bp, Arabidopsis thaliana
gtgggactcgtccacgt

SEQ ID NO: 125206 - DNA, 17 bp, Arabidopsis thaliana
gtgggactgcgatggtg

SEQ ID NO: 125207 - DNA, 17 bp, Arabidopsis thaliana
gtgggactggacatcca

SEQ ID NO: 125208 - DNA, 17 bp, Arabidopsis thaliana
gtgggacttgatggccg

SEQ ID NO: 125209 - DNA, 17 bp, Arabidopsis thaliana
gtgggagaaaccaaact

SEQ ID NO: 125210 - DNA, 17 bp, Arabidopsis thaliana
gtgggagactttctgct

SEQ ID NO: 125211 - DNA, 17 bp, Arabidopsis thaliana
gtgggagagagttggcc

SEQ ID NO: 125212 - DNA, 17 bp, Arabidopsis thaliana
gtgggagcactctgttt

SEQ ID NO: 125213 - DNA, 17 bp, Arabidopsis thaliana
gtgggagcagcaggacc

SEQ ID NO: 125214 - DNA, 17 bp, Arabidopsis thaliana
gtgggagctacgaacac

SEQ ID NO: 125215 - DNA, 17 bp, Arabidopsis thaliana
gtgggagcttccagcgc

SEQ ID NO: 125216 - DNA, 17 bp, Arabidopsis thaliana
gtgggagcttcggcgca

SEQ ID NO: 125217 - DNA, 17 bp, Arabidopsis thaliana
gtgggaggactccaagt

SEQ ID NO: 125218 - DNA, 17 bp, Arabidopsis thaliana
gtgggaggaggcgcagc

SEQ ID NO: 125219 - DNA, 17 bp, Arabidopsis thaliana
gtgggagtcccaccgtg

SEQ ID NO: 125220 - DNA, 17 bp, Arabidopsis thaliana
gtgggagtgttttgact

SEQ ID NO: 125221 - DNA, 17 bp, Arabidopsis thaliana
gtgggatacgggcttag

SEQ ID NO: 125222 - DNA, 17 bp, Arabidopsis thaliana
gtgggatacgggctttg

SEQ ID NO: 125223 - DNA, 17 bp, Arabidopsis thaliana
gtgggatccgccgctga

SEQ ID NO: 125224 - DNA, 17 bp, Arabidopsis thaliana
gtgggatcgtggtgaaa

SEQ ID NO: 125225 - DNA, 17 bp, Arabidopsis thaliana
gtgggatgaccggccgc

SEQ ID NO: 125226 - DNA, 17 bp, Arabidopsis thaliana
gtgggatgtcaaaatgc

SEQ ID NO: 125227 - DNA, 17 bp, Arabidopsis thaliana
gtgggattttggtttgt

SEQ ID NO: 125228 - DNA, 17 bp, Arabidopsis thaliana
gtgggcaatcccatatg

SEQ ID NO: 125229 - DNA, 17 bp, Arabidopsis thaliana
gtgggccacgctgtcta

SEQ ID NO: 125230 - DNA, 17 bp, Arabidopsis thaliana
gtgggccatttttggta

SEQ ID NO: 125231 - DNA, 17 bp, Arabidopsis thaliana
gtgggccggtccgcctt

SEQ ID NO: 125232 - DNA, 17 bp, Arabidopsis thaliana
gtgggcgcctaactttc

SEQ ID NO: 125233 - DNA, 17 bp, Arabidopsis thaliana
gtgggcgtgccggagtg

SEQ ID NO: 125234 - DNA, 17 bp, Arabidopsis thaliana
gtgggctaatattggac

SEQ ID NO: 125235 - DNA, 17 bp, Arabidopsis thaliana
gtgggctataccctttg

SEQ ID NO: 125236 - DNA, 17 bp, Arabidopsis thaliana
gtgggctcaaccctgga

SEQ ID NO: 125237 - DNA, 17 bp, Arabidopsis thaliana
gtgggctccccattcga

SEQ ID NO: 125238 - DNA, 17 bp, Arabidopsis thaliana
gtgggctcttaagagag

SEQ ID NO: 125239 - DNA, 17 bp, Arabidopsis thaliana
gtgggctctttcttctt

SEQ ID NO: 125240 - DNA, 17 bp, Arabidopsis thaliana
gtgggctgatactgatc

SEQ ID NO: 125241 - DNA, 17 bp, Arabidopsis thaliana
gtgggctgttgttctga

SEQ ID NO: 125242 - DNA, 17 bp, Arabidopsis thaliana
gtgggctgttgttctta

SEQ ID NO: 125243 - DNA, 17 bp, Arabidopsis thaliana
gtgggcttacgaaaact

SEQ ID NO: 125244 - DNA, 17 bp, Arabidopsis thaliana
gtgggcttccaacctac

SEQ ID NO: 125245 - DNA, 17 bp, Arabidopsis thaliana
gtgggcttccaacttaa

SEQ ID NO: 125246 - DNA, 17 bp, Arabidopsis thaliana
gtgggcttccaatctaa

SEQ ID NO: 125247 - DNA, 17 bp, Arabidopsis thaliana
gtgggcttgtgttttgg

SEQ ID NO: 125248 - DNA, 17 bp, Arabidopsis thaliana
gtgggctttaccctgtc

SEQ ID NO: 125249 - DNA, 17 bp, Arabidopsis thaliana
gtgggctttcaaatgat

SEQ ID NO: 125250 - DNA, 17 bp, Arabidopsis thaliana
gtgggctttgcccgcgc

SEQ ID NO: 125251 - DNA, 17 bp, Arabidopsis thaliana
gtggggaaaaggattgg

SEQ ID NO: 125252 - DNA, 17 bp, Arabidopsis thaliana
gtggggaaggtcctggt

SEQ ID NO: 125253 - DNA, 17 bp, Arabidopsis thaliana
gtggggacacaggtcgt

SEQ ID NO: 125254 - DNA, 17 bp, Arabidopsis thaliana
gtggggacgtggcgatt

SEQ ID NO: 125255 - DNA, 17 bp, Arabidopsis thaliana
gtggggagtcccaccat

SEQ ID NO: 125256 - DNA, 17 bp, Arabidopsis thaliana
gtggggagtcccaccgt

SEQ ID NO: 125257 - DNA, 17 bp, Arabidopsis thaliana
gtggggagtttggctgg

SEQ ID NO: 125258 - DNA, 17 bp, Arabidopsis thaliana
gtggggatcggtaggtg

SEQ ID NO: 125259 - DNA, 17 bp, Arabidopsis thaliana
gtggggccaaacctgtt

SEQ ID NO: 125260 - DNA, 17 bp, Arabidopsis thaliana
gtggggcccagcaactt

SEQ ID NO: 125261 - DNA, 17 bp, Arabidopsis thaliana
gtggggccccacggtgg

SEQ ID NO: 125262 - DNA, 17 bp, Arabidopsis thaliana
gtggggctgggctcggg

SEQ ID NO: 125263 - DNA, 17 bp, Arabidopsis thaliana
gtgggggaatctgacgg

SEQ ID NO: 125264 - DNA, 17 bp, Arabidopsis thaliana
gtggggggccccacggt

SEQ ID NO: 125265 - DNA, 17 bp, Arabidopsis thaliana
gtggggggctgggaccg

SEQ ID NO: 125266 - DNA, 17 bp, Arabidopsis thaliana
gtggggggtgccccacg

SEQ ID NO: 125267 - DNA, 17 bp, Arabidopsis thaliana
gtggggtcccaccgtgg

SEQ ID NO: 125268 - DNA, 17 bp, Arabidopsis thaliana
gtggggtgccccacggt

SEQ ID NO: 125269 - DNA, 17 bp, Arabidopsis thaliana
gtggggtggcaacagct

SEQ ID NO: 125270 - DNA, 17 bp, Arabidopsis thaliana
gtggggtggtggtgcat

SEQ ID NO: 125271 - DNA, 17 bp, Arabidopsis thaliana
gtggggtgtcccaccgg

SEQ ID NO: 125272 - DNA, 17 bp, Arabidopsis thaliana
gtggggttcgtgccccg

SEQ ID NO: 125273 - DNA, 17 bp, Arabidopsis thaliana
gtgggtacccaacttgg

SEQ ID NO: 125274 - DNA, 17 bp, Arabidopsis thaliana
gtgggtacccaactttg

SEQ ID NO: 125275 - DNA, 17 bp, Arabidopsis thaliana
gtgggtacgggagaagt

SEQ ID NO: 125276 - DNA, 17 bp, Arabidopsis thaliana
gtgggtattcgggtcgg

SEQ ID NO: 125277 - DNA, 17 bp, Arabidopsis thaliana
gtgggtcaaagtccgta

SEQ ID NO: 125278 - DNA, 17 bp, Arabidopsis thaliana
gtgggtcaacggctact

SEQ ID NO: 125279 - DNA, 17 bp, Arabidopsis thaliana
gtgggtcacgcctctcg

SEQ ID NO: 125280 - DNA, 17 bp, Arabidopsis thaliana
gtgggtcagaaactatc

SEQ ID NO: 125281 - DNA, 17 bp, Arabidopsis thaliana
gtgggtcagcgctctga

SEQ ID NO: 125282 - DNA, 17 bp, Arabidopsis thaliana
gtgggtcattgtgcggc

SEQ ID NO: 125283 - DNA, 17 bp, Arabidopsis thaliana
gtgggtcccaccatcta

SEQ ID NO: 125284 - DNA, 17 bp, Arabidopsis thaliana
gtgggtcccgcctctgg

SEQ ID NO: 125285 - DNA, 17 bp, Arabidopsis thaliana
gtgggtccgctcctgat

SEQ ID NO: 125286 - DNA, 17 bp, Arabidopsis thaliana
gtgggtcgcagtgacca

SEQ ID NO: 125287 - DNA, 17 bp, Arabidopsis thaliana
gtgggtcgttctgccgc

SEQ ID NO: 125288 - DNA, 17 bp, Arabidopsis thaliana
gtgggtcgttggatgga

SEQ ID NO: 125289 - DNA, 17 bp, Arabidopsis thaliana
gtgggtctctcttgatt

SEQ ID NO: 125290 - DNA, 17 bp, Arabidopsis thaliana
gtgggtcttccatcgga

SEQ ID NO: 125291 - DNA, 17 bp, Arabidopsis thaliana
gtgggtgacccgggttc

SEQ ID NO: 125292 - DNA, 17 bp, Arabidopsis thaliana
gtgggtgagccccacgg

SEQ ID NO: 125293 - DNA, 17 bp, Arabidopsis thaliana
gtgggtgatcacagaat

SEQ ID NO: 125294 - DNA, 17 bp, Arabidopsis thaliana
gtgggtgattggttgga

SEQ ID NO: 125295 - DNA, 17 bp, Arabidopsis thaliana
gtgggtgattggttggg

SEQ ID NO: 125296 - DNA, 17 bp, Arabidopsis thaliana
gtgggtgccccacggtg

SEQ ID NO: 125297 - DNA, 17 bp, Arabidopsis thaliana
gtgggtgcggctccagg

SEQ ID NO: 125298 - DNA, 17 bp, Arabidopsis thaliana
gtgggtgcggttgcggt

SEQ ID NO: 125299 - DNA, 17 bp, Arabidopsis thaliana
gtgggtgctccaaaaac

SEQ ID NO: 125300 - DNA, 17 bp, Arabidopsis thaliana
gtgggtgctcttatgtt

SEQ ID NO: 125301 - DNA, 17 bp, Arabidopsis thaliana
gtgggtggacgtgccgg

SEQ ID NO: 125302 - DNA, 17 bp, Arabidopsis thaliana
gtgggtggttcgccgcc

SEQ ID NO: 125303 - DNA, 17 bp, Arabidopsis thaliana
gtgggtgtcaaaatggg

SEQ ID NO: 125304 - DNA, 17 bp, Arabidopsis thaliana
gtgggtgtcccaccgtg

SEQ ID NO: 125305 - DNA, 17 bp, Arabidopsis thaliana
gtgggtgtgtgtgtgat

SEQ ID NO: 125306 - DNA, 17 bp, Arabidopsis thaliana
gtgggtgttgtaaatta

SEQ ID NO: 125307 - DNA, 17 bp, Arabidopsis thaliana
gtgggttatgtggatct

SEQ ID NO: 125308 - DNA, 17 bp, Arabidopsis thaliana
gtgggttcaaaccccac

SEQ ID NO: 125309 - DNA, 17 bp, Arabidopsis thaliana
gtgggttcaaatcccac

SEQ ID NO: 125310 - DNA, 17 bp, Arabidopsis thaliana
gtgggttcaagccccac

SEQ ID NO: 125311 - DNA, 17 bp, Arabidopsis thaliana
gtgggttcagatcccac

SEQ ID NO: 125312 - DNA, 17 bp, Arabidopsis thaliana
gtgggttcatcccactt

SEQ ID NO: 125313 - DNA, 17 bp, Arabidopsis thaliana
gtgggttccgcctctga

SEQ ID NO: 125314 - DNA, 17 bp, Arabidopsis thaliana
gtgggttcgaaccccac

SEQ ID NO: 125315 - DNA, 17 bp, Arabidopsis thaliana
gtgggttcgactcccac

SEQ ID NO: 125316 - DNA, 17 bp, Arabidopsis thaliana
gtgggttcgactcctat

SEQ ID NO: 125317 - DNA, 17 bp, Arabidopsis thaliana
gtgggttcgagccccaa

SEQ ID NO: 125318 - DNA, 17 bp, Arabidopsis thaliana
gtgggttcgagccccac

SEQ ID NO: 125319 - DNA, 17 bp, Arabidopsis thaliana
gtgggttcgagtcccac

SEQ ID NO: 125320 - DNA, 17 bp, Arabidopsis thaliana
gtgggttcgatccccac

SEQ ID NO: 125321 - DNA, 17 bp, Arabidopsis thaliana
gtgggttcgccccacgg

SEQ ID NO: 125322 - DNA, 17 bp, Arabidopsis thaliana
gtgggttcgcctcacgg

SEQ ID NO: 125323 - DNA, 17 bp, Arabidopsis thaliana
gtgggttcgggccccac

SEQ ID NO: 125324 - DNA, 17 bp, Arabidopsis thaliana
gtgggttcgggcccccg

SEQ ID NO: 125325 - DNA, 17 bp, Arabidopsis thaliana
gtgggttcgggtcccac

SEQ ID NO: 125326 - DNA, 17 bp, Arabidopsis thaliana
gtgggttcggtccccac

SEQ ID NO: 125327 - DNA, 17 bp, Arabidopsis thaliana
gtgggttcgtcccaccg

SEQ ID NO: 125328 - DNA, 17 bp, Arabidopsis thaliana
gtgggttcgtccccaca

SEQ ID NO: 125329 - DNA, 17 bp, Arabidopsis thaliana
gtgggttcgtctcccgg

SEQ ID NO: 125330 - DNA, 17 bp, Arabidopsis thaliana
gtgggttcgtgccccac

SEQ ID NO: 125331 - DNA, 17 bp, Arabidopsis thaliana
gtgggttcgtgccccgc

SEQ ID NO: 125332 - DNA, 17 bp, Arabidopsis thaliana
gtgggttcgtgtcccac

SEQ ID NO: 125333 - DNA, 17 bp, Arabidopsis thaliana
gtgggttcgttccccac

SEQ ID NO: 125334 - DNA, 17 bp, Arabidopsis thaliana
gtgggttcgtttcccac

SEQ ID NO: 125335 - DNA, 17 bp, Arabidopsis thaliana
gtgggttcgtttccggc

SEQ ID NO: 125336 - DNA, 17 bp, Arabidopsis thaliana
gtgggtttacccctaca

SEQ ID NO: 125337 - DNA, 17 bp, Arabidopsis thaliana
gtgggtttcccagcacc

SEQ ID NO: 125338 - DNA, 17 bp, Arabidopsis thaliana
gtgggtttctatctctt

SEQ ID NO: 125339 - DNA, 17 bp, Arabidopsis thaliana
gtgggtttctcccactg

SEQ ID NO: 125340 - DNA, 17 bp, Arabidopsis thaliana
gtgggttttccagaatg

SEQ ID NO: 125341 - DNA, 17 bp, Arabidopsis thaliana
gtggtaaaccgacagct

SEQ ID NO: 125342 - DNA, 17 bp, Arabidopsis thaliana
gtggtaaactagccatt

SEQ ID NO: 125343 - DNA, 17 bp, Arabidopsis thaliana
gtggtaaactgttgctg

SEQ ID NO: 125344 - DNA, 17 bp, Arabidopsis thaliana
gtggtaaagcggataat

SEQ ID NO: 125345 - DNA, 17 bp, Arabidopsis thaliana
gtggtaaatctcccagg

SEQ ID NO: 125346 - DNA, 17 bp, Arabidopsis thaliana
gtggtaacccaattcta

SEQ ID NO: 125347 - DNA, 17 bp, Arabidopsis thaliana
gtggtaacgacttataa

SEQ ID NO: 125348 - DNA, 17 bp, Arabidopsis thaliana
gtggtaacgggtgacgg

SEQ ID NO: 125349 - DNA, 17 bp, Arabidopsis thaliana
gtggtaagataggttgt

SEQ ID NO: 125350 - DNA, 17 bp, Arabidopsis thaliana
gtggtaagctcgacgca

SEQ ID NO: 125351 - DNA, 17 bp, Arabidopsis thaliana
gtggtaagtattcccgc

SEQ ID NO: 125352 - DNA, 17 bp, Arabidopsis thaliana
gtggtaagtggcgtttt

SEQ ID NO: 125353 - DNA, 17 bp, Arabidopsis thaliana
gtggtaagtttcttccc

SEQ ID NO: 125354 - DNA, 17 bp, Arabidopsis thaliana
gtggtaatccatcgctc

SEQ ID NO: 125355 - DNA, 17 bp, Arabidopsis thaliana
gtggtacaaagctgatg

SEQ ID NO: 125356 - DNA, 17 bp, Arabidopsis thaliana
gtggtacaccactaacg

SEQ ID NO: 125357 - DNA, 17 bp, Arabidopsis thaliana
gtggtacagacagtagc

SEQ ID NO: 125358 - DNA, 17 bp, Arabidopsis thaliana
gtggtacagcggacctt

SEQ ID NO: 125359 - DNA, 17 bp, Arabidopsis thaliana
gtggtaccccaattcta

SEQ ID NO: 125360 - DNA, 17 bp, Arabidopsis thaliana
gtggtagacaagcttgg

SEQ ID NO: 125361 - DNA, 17 bp, Arabidopsis thaliana
gtggtagaccgattgac

SEQ ID NO: 125362 - DNA, 17 bp, Arabidopsis thaliana
gtggtagagcgcgtggc

SEQ ID NO: 125363 - DNA, 17 bp, Arabidopsis thaliana
gtggtagattctgtaag

SEQ ID NO: 125364 - DNA, 17 bp, Arabidopsis thaliana
gtggtaggtgcggctgg

SEQ ID NO: 125365 - DNA, 17 bp, Arabidopsis thaliana
gtggtagtggtggcaat

SEQ ID NO: 125366 - DNA, 17 bp, Arabidopsis thaliana
gtggtataccgcgggac

SEQ ID NO: 125367 - DNA, 17 bp, Arabidopsis thaliana
gtggtataccgcggggc

SEQ ID NO: 125368 - DNA, 17 bp, Arabidopsis thaliana
gtggtatccgaccgtaa

SEQ ID NO: 125369 - DNA, 17 bp, Arabidopsis thaliana
gtggtatcgccggatcg

SEQ ID NO: 125370 - DNA, 17 bp, Arabidopsis thaliana
gtggtatctgtaactac

SEQ ID NO: 125371 - DNA, 17 bp, Arabidopsis thaliana
gtggtatgacctgattg

SEQ ID NO: 125372 - DNA, 17 bp, Arabidopsis thaliana
gtggtatgattctcgct

SEQ ID NO: 125373 - DNA, 17 bp, Arabidopsis thaliana
gtggtatgggctcctgt

SEQ ID NO: 125374 - DNA, 17 bp, Arabidopsis thaliana
gtggtattatcaacgga

SEQ ID NO: 125375 - DNA, 17 bp, Arabidopsis thaliana
gtggtattatcaacggc

SEQ ID NO: 125376 - DNA, 17 bp, Arabidopsis thaliana
gtggtattgggtgacgg

SEQ ID NO: 125377 - DNA, 17 bp, Arabidopsis thaliana
gtggtcaattagtgtct

SEQ ID NO: 125378 - DNA, 17 bp, Arabidopsis thaliana
gtggtcatttccggcag

SEQ ID NO: 125379 - DNA, 17 bp, Arabidopsis thaliana
gtggtcattttatacat

SEQ ID NO: 125380 - DNA, 17 bp, Arabidopsis thaliana
gtggtccaacccggttg

SEQ ID NO: 125381 - DNA, 17 bp, Arabidopsis thaliana
gtggtccaaggcccagt

SEQ ID NO: 125382 - DNA, 17 bp, Arabidopsis thaliana
gtggtccaagttaacaa

SEQ ID NO: 125383 - DNA, 17 bp, Arabidopsis thaliana
gtggtccacactttgtt

SEQ ID NO: 125384 - DNA, 17 bp, Arabidopsis thaliana
gtggtccacgctatgtt

SEQ ID NO: 125385 - DNA, 17 bp, Arabidopsis thaliana
gtggtccatttctacgc

SEQ ID NO: 125386 - DNA, 17 bp, Arabidopsis thaliana
gtggtcccagttccgaa

SEQ ID NO: 125387 - DNA, 17 bp, Arabidopsis thaliana
gtggtcctacggggata

SEQ ID NO: 125388 - DNA, 17 bp, Arabidopsis thaliana
gtggtcctcatctgcta

SEQ ID NO: 125389 - DNA, 17 bp, Arabidopsis thaliana
gtggtccttcagggaga

SEQ ID NO: 125390 - DNA, 17 bp, Arabidopsis thaliana
gtggtccttcggagaga

SEQ ID NO: 125391 - DNA, 17 bp, Arabidopsis thaliana
gtggtccttcggggaga

SEQ ID NO: 125392 - DNA, 17 bp, Arabidopsis thaliana
gtggtcgaagattgctc

SEQ ID NO: 125393 - DNA, 17 bp, Arabidopsis thaliana
gtggtcgatcacctcgc

SEQ ID NO: 125394 - DNA, 17 bp, Arabidopsis thaliana
gtggtcgcacggcggtc

SEQ ID NO: 125395 - DNA, 17 bp, Arabidopsis thaliana
gtggtcggctagcgtct

SEQ ID NO: 125396 - DNA, 17 bp, Arabidopsis thaliana
gtggtcgtcgtcttact

SEQ ID NO: 125397 - DNA, 17 bp, Arabidopsis thaliana
gtggtcgtggacgtcgt

SEQ ID NO: 125398 - DNA, 17 bp, Arabidopsis thaliana
gtggtctaaggcgccag

SEQ ID NO: 125399 - DNA, 17 bp, Arabidopsis thaliana
gtggtctaatggtcacc

SEQ ID NO: 125400 - DNA, 17 bp, Arabidopsis thaliana
gtggtctccctctgaca

SEQ ID NO: 125401 - DNA, 17 bp, Arabidopsis thaliana
gtggtctcctgaacata

SEQ ID NO: 125402 - DNA, 17 bp, Arabidopsis thaliana
gtggtctcgtcccggag

SEQ ID NO: 125403 - DNA, 17 bp, Arabidopsis thaliana
gtggtctgacaccatgg

SEQ ID NO: 125404 - DNA, 17 bp, Arabidopsis thaliana
gtggtctgcagcacgcg

SEQ ID NO: 125405 - DNA, 17 bp, Arabidopsis thaliana
gtggtcttcagcacgcg

SEQ ID NO: 125406 - DNA, 17 bp, Arabidopsis thaliana
gtggtcttggagcttct

SEQ ID NO: 125407 - DNA, 17 bp, Arabidopsis thaliana
gtggtgacccgccgtcg

SEQ ID NO: 125408 - DNA, 17 bp, Arabidopsis thaliana
gtggtgacgttggtggt

SEQ ID NO: 125409 - DNA, 17 bp, Arabidopsis thaliana
gtggtgactacctgcag

SEQ ID NO: 125410 - DNA, 17 bp, Arabidopsis thaliana
gtggtgactatctgcag

SEQ ID NO: 125411 - DNA, 17 bp, Arabidopsis thaliana
gtggtgactatgacgct

SEQ ID NO: 125412 - DNA, 17 bp, Arabidopsis thaliana
gtggtgactgctgctaa

SEQ ID NO: 125413 - DNA, 17 bp, Arabidopsis thaliana
gtggtgacttagattct

SEQ ID NO: 125414 - DNA, 17 bp, Arabidopsis thaliana
gtggtgacttaggttct

SEQ ID NO: 125415 - DNA, 17 bp, Arabidopsis thaliana
gtggtgaggttgtgaat

SEQ ID NO: 125416 - DNA, 17 bp, Arabidopsis thaliana
gtggtgatctgctgtcc

SEQ ID NO: 125417 - DNA, 17 bp, Arabidopsis thaliana
gtggtgatggtgatact

SEQ ID NO: 125418 - DNA, 17 bp, Arabidopsis thaliana
gtggtgatggttgtggc

SEQ ID NO: 125419 - DNA, 17 bp, Arabidopsis thaliana
gtggtgcatgcgaagag

SEQ ID NO: 125420 - DNA, 17 bp, Arabidopsis thaliana
gtggtgcatggccgttc

SEQ ID NO: 125421 - DNA, 17 bp, Arabidopsis thaliana
gtggtgcatggcctttc

SEQ ID NO: 125422 - DNA, 17 bp, Arabidopsis thaliana
gtggtgcatggctgtcg

SEQ ID NO: 125423 - DNA, 17 bp, Arabidopsis thaliana
gtggtgcattggtcggc

SEQ ID NO: 125424 - DNA, 17 bp, Arabidopsis thaliana
gtggtgccggtgaggcg

SEQ ID NO: 125425 - DNA, 17 bp, Arabidopsis thaliana
gtggtgcgctgatcggc

SEQ ID NO: 125426 - DNA, 17 bp, Arabidopsis thaliana
gtggtgcgctggattat

SEQ ID NO: 125427 - DNA, 17 bp, Arabidopsis thaliana
gtggtgctgatttcaac

SEQ ID NO: 125428 - DNA, 17 bp, Arabidopsis thaliana
gtggtgctgggccgtta

SEQ ID NO: 125429 - DNA, 17 bp, Arabidopsis thaliana
gtggtgcttggttggct

SEQ ID NO: 125430 - DNA, 17 bp, Arabidopsis thaliana
gtggtggactgacatcg

SEQ ID NO: 125431 - DNA, 17 bp, Arabidopsis thaliana
gtggtggagcgatttgt

SEQ ID NO: 125432 - DNA, 17 bp, Arabidopsis thaliana
gtggtggagcggatttg

SEQ ID NO: 125433 - DNA, 17 bp, Arabidopsis thaliana
gtggtggaggaggcggc

SEQ ID NO: 125434 - DNA, 17 bp, Arabidopsis thaliana
gtggtggagtctgtcag

SEQ ID NO: 125435 - DNA, 17 bp, Arabidopsis thaliana
gtggtggatggagttga

SEQ ID NO: 125436 - DNA, 17 bp, Arabidopsis thaliana
gtggtggcaacggatct

SEQ ID NO: 125437 - DNA, 17 bp, Arabidopsis thaliana
gtggtggcccaattcta

SEQ ID NO: 125438 - DNA, 17 bp, Arabidopsis thaliana
gtggtggcccaatttta

SEQ ID NO: 125439 - DNA, 17 bp, Arabidopsis thaliana
gtggtggcgatggcgga

SEQ ID NO: 125440 - DNA, 17 bp, Arabidopsis thaliana
gtggtggcggctggtag

SEQ ID NO: 125441 - DNA, 17 bp, Arabidopsis thaliana
gtggtggcggctgtcgt

SEQ ID NO: 125442 - DNA, 17 bp, Arabidopsis thaliana
gtggtggctaggaattg

SEQ ID NO: 125443 - DNA, 17 bp, Arabidopsis thaliana
gtggtggtccatttcta

SEQ ID NO: 125444 - DNA, 17 bp, Arabidopsis thaliana
gtggtggtccttcggag

SEQ ID NO: 125445 - DNA, 17 bp, Arabidopsis thaliana
gtggtggtcgcgacagt

SEQ ID NO: 125446 - DNA, 17 bp, Arabidopsis thaliana
gtggtggtgcatggccg

SEQ ID NO: 125447 - DNA, 17 bp, Arabidopsis thaliana
gtggtggtgcatggctg

SEQ ID NO: 125448 - DNA, 17 bp, Arabidopsis thaliana
gtggtggtgcatgggcg

SEQ ID NO: 125449 - DNA, 17 bp, Arabidopsis thaliana
gtggtggtgcatgggtt

SEQ ID NO: 125450 - DNA, 17 bp, Arabidopsis thaliana
gtggtggtggtgacgtt

SEQ ID NO: 125451 - DNA, 17 bp, Arabidopsis thaliana
gtggtggtggtggagga

SEQ ID NO: 125452 - DNA, 17 bp, Arabidopsis thaliana
gtggtggttgcggcagt

SEQ ID NO: 125453 - DNA, 17 bp, Arabidopsis thaliana
gtggtgtccctacatgg

SEQ ID NO: 125454 - DNA, 17 bp, Arabidopsis thaliana
gtggtgtccggtgcgcc

SEQ ID NO: 125455 - DNA, 17 bp, Arabidopsis thaliana
gtggtgtccggtgcggc

SEQ ID NO: 125456 - DNA, 17 bp, Arabidopsis thaliana
gtggtgtcggctgcttt

SEQ ID NO: 125457 - DNA, 17 bp, Arabidopsis thaliana
gtggtgtctcttctatc

SEQ ID NO: 125458 - DNA, 17 bp, Arabidopsis thaliana
gtggtgtgataggaatt

SEQ ID NO: 125459 - DNA, 17 bp, Arabidopsis thaliana
gtggtgttcctcagtgc

SEQ ID NO: 125460 - DNA, 17 bp, Arabidopsis thaliana
gtggtgtttccagtggc

SEQ ID NO: 125461 - DNA, 17 bp, Arabidopsis thaliana
gtggttaaactctactg

SEQ ID NO: 125462 - DNA, 17 bp, Arabidopsis thaliana
gtggttaaagcgcacag

SEQ ID NO: 125463 - DNA, 17 bp, Arabidopsis thaliana
gtggttaaagcgcacga

SEQ ID NO: 125464 - DNA, 17 bp, Arabidopsis thaliana
gtggttaagatgtggga

SEQ ID NO: 125465 - DNA, 17 bp, Arabidopsis thaliana
gtggttacgggcctggt

SEQ ID NO: 125466 - DNA, 17 bp, Arabidopsis thaliana
gtggttacgggtctgga

SEQ ID NO: 125467 - DNA, 17 bp, Arabidopsis thaliana
gtggttagatggtagga

SEQ ID NO: 125468 - DNA, 17 bp, Arabidopsis thaliana
gtggttagcttggtacc

SEQ ID NO: 125469 - DNA, 17 bp, Arabidopsis thaliana
gtggttaggggtgttaa

SEQ ID NO: 125470 - DNA, 17 bp, Arabidopsis thaliana
gtggttagtgcggacta

SEQ ID NO: 125471 - DNA, 17 bp, Arabidopsis thaliana
gtggttagtgctgactg

SEQ ID NO: 125472 - DNA, 17 bp, Arabidopsis thaliana
gtggttatctcaacggt

SEQ ID NO: 125473 - DNA, 17 bp, Arabidopsis thaliana
gtggttcagcaaggcaa

SEQ ID NO: 125474 - DNA, 17 bp, Arabidopsis thaliana
gtggttcagcaaggcga

SEQ ID NO: 125475 - DNA, 17 bp, Arabidopsis thaliana
gtggttcaggacatctc

SEQ ID NO: 125476 - DNA, 17 bp, Arabidopsis thaliana
gtggttcagtaggatga

SEQ ID NO: 125477 - DNA, 17 bp, Arabidopsis thaliana
gtggttccttaacaggg

SEQ ID NO: 125478 - DNA, 17 bp, Arabidopsis thaliana
gtggttccttaacaggt

SEQ ID NO: 125479 - DNA, 17 bp, Arabidopsis thaliana
gtggttccttgacaggg

SEQ ID NO: 125480 - DNA, 17 bp, Arabidopsis thaliana
gtggttcgacccttgcc

SEQ ID NO: 125481 - DNA, 17 bp, Arabidopsis thaliana
gtggttcgccgcccgcg

SEQ ID NO: 125482 - DNA, 17 bp, Arabidopsis thaliana
gtggttcggcgccatat

SEQ ID NO: 125483 - DNA, 17 bp, Arabidopsis thaliana
gtggttcgttgcggttt

SEQ ID NO: 125484 - DNA, 17 bp, Arabidopsis thaliana
gtggttctcttcggtgt

SEQ ID NO: 125485 - DNA, 17 bp, Arabidopsis thaliana
gtggttctgccgatact

SEQ ID NO: 125486 - DNA, 17 bp, Arabidopsis thaliana
gtggttgaccaacaaat

SEQ ID NO: 125487 - DNA, 17 bp, Arabidopsis thaliana
gtggttgacccagccca

SEQ ID NO: 125488 - DNA, 17 bp, Arabidopsis thaliana
gtggttgcagctactag

SEQ ID NO: 125489 - DNA, 17 bp, Arabidopsis thaliana
gtggttgccacaatacc

SEQ ID NO: 125490 - DNA, 17 bp, Arabidopsis thaliana
gtggttgccacaatacg

SEQ ID NO: 125491 - DNA, 17 bp, Arabidopsis thaliana
gtggttgccacagagcc

SEQ ID NO: 125492 - DNA, 17 bp, Arabidopsis thaliana
gtggttgcccaattcta

SEQ ID NO: 125493 - DNA, 17 bp, Arabidopsis thaliana
gtggttgcggcagtgtg

SEQ ID NO: 125494 - DNA, 17 bp, Arabidopsis thaliana
gtggttgcggctgtgcg

SEQ ID NO: 125495 - DNA, 17 bp, Arabidopsis thaliana
gtggttgcggctgttag

SEQ ID NO: 125496 - DNA, 17 bp, Arabidopsis thaliana
gtggttgcggtttcaag

SEQ ID NO: 125497 - DNA, 17 bp, Arabidopsis thaliana
gtggttgcggtttcagg

SEQ ID NO: 125498 - DNA, 17 bp, Arabidopsis thaliana
gtggttgctcgagtgac

SEQ ID NO: 125499 - DNA, 17 bp, Arabidopsis thaliana
gtggttgctgaggtaca

SEQ ID NO: 125500 - DNA, 17 bp, Arabidopsis thaliana
gtggttgcttcggagaa

SEQ ID NO: 125501 - DNA, 17 bp, Arabidopsis thaliana
gtggttggtgtactaga

SEQ ID NO: 125502 - DNA, 17 bp, Arabidopsis thaliana
gtggttggttctgtgtt

SEQ ID NO: 125503 - DNA, 17 bp, Arabidopsis thaliana
gtggttggtttgtgcag

SEQ ID NO: 125504 - DNA, 17 bp, Arabidopsis thaliana
gtggttgtcaagttctt

SEQ ID NO: 125505 - DNA, 17 bp, Arabidopsis thaliana
gtggttgtctgtcggtt

SEQ ID NO: 125506 - DNA, 17 bp, Arabidopsis thaliana
gtggtttacaattttcg

SEQ ID NO: 125507 - DNA, 17 bp, Arabidopsis thaliana
gtggtttaccggtctcg

SEQ ID NO: 125508 - DNA, 17 bp, Arabidopsis thaliana
gtggtttatcctggtat

SEQ ID NO: 125509 - DNA, 17 bp, Arabidopsis thaliana
gtggtttatttggccga

SEQ ID NO: 125510 - DNA, 17 bp, Arabidopsis thaliana
gtggtttcagacctagg

SEQ ID NO: 125511 - DNA, 17 bp, Arabidopsis thaliana
gtggtttcagacctatg

SEQ ID NO: 125512 - DNA, 17 bp, Arabidopsis thaliana
gtggtttcaggatgtgt

SEQ ID NO: 125513 - DNA, 17 bp, Arabidopsis thaliana
gtggtttcaggcctggg

SEQ ID NO: 125514 - DNA, 17 bp, Arabidopsis thaliana
gtggtttcagggctgga

SEQ ID NO: 125515 - DNA, 17 bp, Arabidopsis thaliana
gtggtttcaggtctggg

SEQ ID NO: 125516 - DNA, 17 bp, Arabidopsis thaliana
gtggtttcaggtctggt

SEQ ID NO: 125517 - DNA, 17 bp, Arabidopsis thaliana
gtggtttcgagcctcga

SEQ ID NO: 125518 - DNA, 17 bp, Arabidopsis thaliana
gtggtttcgggcctaga

SEQ ID NO: 125519 - DNA, 17 bp, Arabidopsis thaliana
gtggtttcgggcctagg

SEQ ID NO: 125520 - DNA, 17 bp, Arabidopsis thaliana
gtggtttcgggcctgga

SEQ ID NO: 125521 - DNA, 17 bp, Arabidopsis thaliana
gtggtttcgggcctggg

SEQ ID NO: 125522 - DNA, 17 bp, Arabidopsis thaliana
gtggtttcgggtcggga

SEQ ID NO: 125523 - DNA, 17 bp, Arabidopsis thaliana
gtggtttcgggtctaga

SEQ ID NO: 125524 - DNA, 17 bp, Arabidopsis thaliana
gtggtttcgggtgtaaa

SEQ ID NO: 125525 - DNA, 17 bp, Arabidopsis thaliana
gtggtttcgtgcctgga

SEQ ID NO: 125526 - DNA, 17 bp, Arabidopsis thaliana
gtggtttcgtgcctggg

SEQ ID NO: 125527 - DNA, 17 bp, Arabidopsis thaliana
gtggtttctcgttcatc

SEQ ID NO: 125528 - DNA, 17 bp, Arabidopsis thaliana
gtggtttgaatgctgac

SEQ ID NO: 125529 - DNA, 17 bp, Arabidopsis thaliana
gtggtttgcggttgcgg

SEQ ID NO: 125530 - DNA, 17 bp, Arabidopsis thaliana
gtggtttgctacggctt

SEQ ID NO: 125531 - DNA, 17 bp, Arabidopsis thaliana
gtggttttactcggatg

SEQ ID NO: 125532 - DNA, 17 bp, Arabidopsis thaliana
gtggttttaggcctgaa

SEQ ID NO: 125533 - DNA, 17 bp, Arabidopsis thaliana
gtggttttgcagattag

SEQ ID NO: 125534 - DNA, 17 bp, Arabidopsis thaliana
gtggttttgcggattag

SEQ ID NO: 125535 - DNA, 17 bp, Arabidopsis thaliana
gtggttttggacctggt

SEQ ID NO: 125536 - DNA, 17 bp, Arabidopsis thaliana
gtggttttgggcctgga

SEQ ID NO: 125537 - DNA, 17 bp, Arabidopsis thaliana
gtggttttgggcctggg

SEQ ID NO: 125538 - DNA, 17 bp, Arabidopsis thaliana
gtggttttgggcctggt

SEQ ID NO: 125539 - DNA, 17 bp, Arabidopsis thaliana
gtggttttgggctgggg

SEQ ID NO: 125540 - DNA, 17 bp, Arabidopsis thaliana
gtggttttggtcctggt

SEQ ID NO: 125541 - DNA, 17 bp, Arabidopsis thaliana
gtggtttttcaagtggc

SEQ ID NO: 125542 - DNA, 17 bp, Arabidopsis thaliana
gtggttttttcagaagc

SEQ ID NO: 125543 - DNA, 17 bp, Arabidopsis thaliana
gtggttttttcagaagg

SEQ ID NO: 125544 - DNA, 17 bp, Arabidopsis thaliana
gtgtaaaacgccgagcc

SEQ ID NO: 125545 - DNA, 17 bp, Arabidopsis thaliana
gtgtaaaagtttctcta

SEQ ID NO: 125546 - DNA, 17 bp, Arabidopsis thaliana
gtgtaaattttgtgctg

SEQ ID NO: 125547 - DNA, 17 bp, Arabidopsis thaliana
gtgtaaccaaaacatat

SEQ ID NO: 125548 - DNA, 17 bp, Arabidopsis thaliana
gtgtaacttgcccattt

SEQ ID NO: 125549 - DNA, 17 bp, Arabidopsis thaliana
gtgtaacttgcctattt

SEQ ID NO: 125550 - DNA, 17 bp, Arabidopsis thaliana
gtgtaagcccaagtgaa

SEQ ID NO: 125551 - DNA, 17 bp, Arabidopsis thaliana
gtgtaaggcaatttttg

SEQ ID NO: 125552 - DNA, 17 bp, Arabidopsis thaliana
gtgtaaggcaatttttt

SEQ ID NO: 125553 - DNA, 17 bp, Arabidopsis thaliana
gtgtaagggtactagca

SEQ ID NO: 125554 - DNA, 17 bp, Arabidopsis thaliana
gtgtaagtgactgtgtt

SEQ ID NO: 125555 - DNA, 17 bp, Arabidopsis thaliana
gtgtaatccaaagtcat

SEQ ID NO: 125556 - DNA, 17 bp, Arabidopsis thaliana
gtgtaatccacttctct

SEQ ID NO: 125557 - DNA, 17 bp, Arabidopsis thaliana
gtgtaatccggcgtttt

SEQ ID NO: 125558 - DNA, 17 bp, Arabidopsis thaliana
gtgtaatctcattgtcg

SEQ ID NO: 125559 - DNA, 17 bp, Arabidopsis thaliana
gtgtaatctcctagatc

SEQ ID NO: 125560 - DNA, 17 bp, Arabidopsis thaliana
gtgtaattcagactctc

SEQ ID NO: 125561 - DNA, 17 bp, Arabidopsis thaliana
gtgtaattccctggttc

SEQ ID NO: 125562 - DNA, 17 bp, Arabidopsis thaliana
gtgtaattgtgtgtcag

SEQ ID NO: 125563 - DNA, 17 bp, Arabidopsis thaliana
gtgtacaaagggcaggg

SEQ ID NO: 125564 - DNA, 17 bp, Arabidopsis thaliana
gtgtacaacgtcccaca

SEQ ID NO: 125565 - DNA, 17 bp, Arabidopsis thaliana
gtgtacaactatgtcat

SEQ ID NO: 125566 - DNA, 17 bp, Arabidopsis thaliana
gtgtacaagggtggatc

SEQ ID NO: 125567 - DNA, 17 bp, Arabidopsis thaliana
gtgtacaatgtcccaca

SEQ ID NO: 125568 - DNA, 17 bp, Arabidopsis thaliana
gtgtacagttagcgatg

SEQ ID NO: 125569 - DNA, 17 bp, Arabidopsis thaliana
gtgtaccacctcgatcc

SEQ ID NO: 125570 - DNA, 17 bp, Arabidopsis thaliana
gtgtaccgcgggttata

SEQ ID NO: 125571 - DNA, 17 bp, Arabidopsis thaliana
gtgtaccgctggtcata

SEQ ID NO: 125572 - DNA, 17 bp, Arabidopsis thaliana
gtgtacctctctcttcc

SEQ ID NO: 125573 - DNA, 17 bp, Arabidopsis thaliana
gtgtacgatgtgttgtc

SEQ ID NO: 125574 - DNA, 17 bp, Arabidopsis thaliana
gtgtacgcgccttcacc

SEQ ID NO: 125575 - DNA, 17 bp, Arabidopsis thaliana
gtgtacgcgccttcgcc

SEQ ID NO: 125576 - DNA, 17 bp, Arabidopsis thaliana
gtgtacggagttgtgga

SEQ ID NO: 125577 - DNA, 17 bp, Arabidopsis thaliana
gtgtacgtaggcagccc

SEQ ID NO: 125578 - DNA, 17 bp, Arabidopsis thaliana
gtgtacgtcctcattta

SEQ ID NO: 125579 - DNA, 17 bp, Arabidopsis thaliana
gtgtacgtgccggagtg

SEQ ID NO: 125580 - DNA, 17 bp, Arabidopsis thaliana
gtgtacgtgccggattg

SEQ ID NO: 125581 - DNA, 17 bp, Arabidopsis thaliana
gtgtactaaccgcactt

SEQ ID NO: 125582 - DNA, 17 bp, Arabidopsis thaliana
gtgtactaactgcagac

SEQ ID NO: 125583 - DNA, 17 bp, Arabidopsis thaliana
gtgtactacaagttgtg

SEQ ID NO: 125584 - DNA, 17 bp, Arabidopsis thaliana
gtgtactatcgcacccg

SEQ ID NO: 125585 - DNA, 17 bp, Arabidopsis thaliana
gtgtactcaaggtggcg

SEQ ID NO: 125586 - DNA, 17 bp, Arabidopsis thaliana
gtgtactcagcaggcac

SEQ ID NO: 125587 - DNA, 17 bp, Arabidopsis thaliana
gtgtacttccacggctt

SEQ ID NO: 125588 - DNA, 17 bp, Arabidopsis thaliana
gtgtacttgcggcagcg

SEQ ID NO: 125589 - DNA, 17 bp, Arabidopsis thaliana
gtgtactttgaaacaag

SEQ ID NO: 125590 - DNA, 17 bp, Arabidopsis thaliana
gtgtagaatgtcgaacc

SEQ ID NO: 125591 - DNA, 17 bp, Arabidopsis thaliana
gtgtagaccgtcgtgag

SEQ ID NO: 125592 - DNA, 17 bp, Arabidopsis thaliana
gtgtagactggagtcga

SEQ ID NO: 125593 - DNA, 17 bp, Arabidopsis thaliana
gtgtagccaaactccat

SEQ ID NO: 125594 - DNA, 17 bp, Arabidopsis thaliana
gtgtagccaaagcccat

SEQ ID NO: 125595 - DNA, 17 bp, Arabidopsis thaliana
gtgtagcgataaagcct

SEQ ID NO: 125596 - DNA, 17 bp, Arabidopsis thaliana
gtgtagcggttatgcac

SEQ ID NO: 125597 - DNA, 17 bp, Arabidopsis thaliana
gtgtagcgtaagactcg

SEQ ID NO: 125598 - DNA, 17 bp, Arabidopsis thaliana
gtgtagcgttccacaca

SEQ ID NO: 125599 - DNA, 17 bp, Arabidopsis thaliana
gtgtagctgactatctc

SEQ ID NO: 125600 - DNA, 17 bp, Arabidopsis thaliana
gtgtaggttgcagcggt

SEQ ID NO: 125601 - DNA, 17 bp, Arabidopsis thaliana
gtgtaggttggctttgc

SEQ ID NO: 125602 - DNA, 17 bp, Arabidopsis thaliana
gtgtagtcctcctcgtg

SEQ ID NO: 125603 - DNA, 17 bp, Arabidopsis thaliana
gtgtagtcgatcaagtc

SEQ ID NO: 125604 - DNA, 17 bp, Arabidopsis thaliana
gtgtatacttggcttag

SEQ ID NO: 125605 - DNA, 17 bp, Arabidopsis thaliana
gtgtatatttggcatgt

SEQ ID NO: 125606 - DNA, 17 bp, Arabidopsis thaliana
gtgtatcagacggtgat

SEQ ID NO: 125607 - DNA, 17 bp, Arabidopsis thaliana
gtgtatcaggtaaacca

SEQ ID NO: 125608 - DNA, 17 bp, Arabidopsis thaliana
gtgtatcatcacatgat

SEQ ID NO: 125609 - DNA, 17 bp, Arabidopsis thaliana
gtgtatcgggccaagat

SEQ ID NO: 125610 - DNA, 17 bp, Arabidopsis thaliana
gtgtatctcacttatcc

SEQ ID NO: 125611 - DNA, 17 bp, Arabidopsis thaliana
gtgtatcttctaggttt

SEQ ID NO: 125612 - DNA, 17 bp, Arabidopsis thaliana
gtgtatgaattttgccg

SEQ ID NO: 125613 - DNA, 17 bp, Arabidopsis thaliana
gtgtatgagaataaccg

SEQ ID NO: 125614 - DNA, 17 bp, Arabidopsis thaliana
gtgtatgagaataagtg

SEQ ID NO: 125615 - DNA, 17 bp, Arabidopsis thaliana
gtgtatgattggtgccg

SEQ ID NO: 125616 - DNA, 17 bp, Arabidopsis thaliana
gtgtatgattggtgctg

SEQ ID NO: 125617 - DNA, 17 bp, Arabidopsis thaliana
gtgtatgcttggcaccg

SEQ ID NO: 125618 - DNA, 17 bp, Arabidopsis thaliana
gtgtatggaacgacatg

SEQ ID NO: 125619 - DNA, 17 bp, Arabidopsis thaliana
gtgtatggaccgtggca

SEQ ID NO: 125620 - DNA, 17 bp, Arabidopsis thaliana
gtgtatggatcttccgc

SEQ ID NO: 125621 - DNA, 17 bp, Arabidopsis thaliana
gtgtatggtgaaggagt

SEQ ID NO: 125622 - DNA, 17 bp, Arabidopsis thaliana
gtgtatgtgacattggg

SEQ ID NO: 125623 - DNA, 17 bp, Arabidopsis thaliana
gtgtatgttcccaaaac

SEQ ID NO: 125624 - DNA, 17 bp, Arabidopsis thaliana
gtgtattaagtggcggt

SEQ ID NO: 125625 - DNA, 17 bp, Arabidopsis thaliana
gtgtattcggcggctcc

SEQ ID NO: 125626 - DNA, 17 bp, Arabidopsis thaliana
gtgtattctctaaccga

SEQ ID NO: 125627 - DNA, 17 bp, Arabidopsis thaliana
gtgtattgcaacttagc

SEQ ID NO: 125628 - DNA, 17 bp, Arabidopsis thaliana
gtgtattgcggatcgga

SEQ ID NO: 125629 - DNA, 17 bp, Arabidopsis thaliana
gtgtatttcttgtggct

SEQ ID NO: 125630 - DNA, 17 bp, Arabidopsis thaliana
gtgtatttgagtgacgc

SEQ ID NO: 125631 - DNA, 17 bp, Arabidopsis thaliana
gtgtatttggatgaatt

SEQ ID NO: 125632 - DNA, 17 bp, Arabidopsis thaliana
gtgtcaaaatgggtcaa

SEQ ID NO: 125633 - DNA, 17 bp, Arabidopsis thaliana
gtgtcaaacgggcttag

SEQ ID NO: 125634 - DNA, 17 bp, Arabidopsis thaliana
gtgtcaaactcgtttca

SEQ ID NO: 125635 - DNA, 17 bp, Arabidopsis thaliana
gtgtcaaataccacttt

SEQ ID NO: 125636 - DNA, 17 bp, Arabidopsis thaliana
gtgtcaaattgtgggag

SEQ ID NO: 125637 - DNA, 17 bp, Arabidopsis thaliana
gtgtcaacatccgatcg

SEQ ID NO: 125638 - DNA, 17 bp, Arabidopsis thaliana
gtgtcaacatctgatcg

SEQ ID NO: 125639 - DNA, 17 bp, Arabidopsis thaliana
gtgtcaactaagatgag

SEQ ID NO: 125640 - DNA, 17 bp, Arabidopsis thaliana
gtgtcaactgagaacgt

SEQ ID NO: 125641 - DNA, 17 bp, Arabidopsis thaliana
gtgtcaactgctggagt

SEQ ID NO: 125642 - DNA, 17 bp, Arabidopsis thaliana
gtgtcaagtctatcgat

SEQ ID NO: 125643 - DNA, 17 bp, Arabidopsis thaliana
gtgtcaagtctatcgtt

SEQ ID NO: 125644 - DNA, 17 bp, Arabidopsis thaliana
gtgtcaagtttatcgat

SEQ ID NO: 125645 - DNA, 17 bp, Arabidopsis thaliana
gtgtcaatcgctaacaa

SEQ ID NO: 125646 - DNA, 17 bp, Arabidopsis thaliana
gtgtcaattcttgtaaa

SEQ ID NO: 125647 - DNA, 17 bp, Arabidopsis thaliana
gtgtcaatttgtccgct

SEQ ID NO: 125648 - DNA, 17 bp, Arabidopsis thaliana
gtgtcacgatcttatga

SEQ ID NO: 125649 - DNA, 17 bp, Arabidopsis thaliana
gtgtcactccgatcatg

SEQ ID NO: 125650 - DNA, 17 bp, Arabidopsis thaliana
gtgtcactcgaaccggc

SEQ ID NO: 125651 - DNA, 17 bp, Arabidopsis thaliana
gtgtcactttgaacctc

SEQ ID NO: 125652 - DNA, 17 bp, Arabidopsis thaliana
gtgtcagaaatgtctag

SEQ ID NO: 125653 - DNA, 17 bp, Arabidopsis thaliana
gtgtcagaaatgtctat

SEQ ID NO: 125654 - DNA, 17 bp, Arabidopsis thaliana
gtgtcagaacgagggcc

SEQ ID NO: 125655 - DNA, 17 bp, Arabidopsis thaliana
gtgtcagaattaggcct

SEQ ID NO: 125656 - DNA, 17 bp, Arabidopsis thaliana
gtgtcagacggcaacat

SEQ ID NO: 125657 - DNA, 17 bp, Arabidopsis thaliana
gtgtcagacgggcgagt

SEQ ID NO: 125658 - DNA, 17 bp, Arabidopsis thaliana
gtgtcagcatcagtgtg

SEQ ID NO: 125659 - DNA, 17 bp, Arabidopsis thaliana
gtgtcagcatgcctgcc

SEQ ID NO: 125660 - DNA, 17 bp, Arabidopsis thaliana
gtgtcagccaaaacttt

SEQ ID NO: 125661 - DNA, 17 bp, Arabidopsis thaliana
gtgtcagcgacggaccg

SEQ ID NO: 125662 - DNA, 17 bp, Arabidopsis thaliana
gtgtcagctaggttttc

SEQ ID NO: 125663 - DNA, 17 bp, Arabidopsis thaliana
gtgtcagctctataagt

SEQ ID NO: 125664 - DNA, 17 bp, Arabidopsis thaliana
gtgtcaggacctacggg

SEQ ID NO: 125665 - DNA, 17 bp, Arabidopsis thaliana
gtgtcaggtttatttca

SEQ ID NO: 125666 - DNA, 17 bp, Arabidopsis thaliana
gtgtcatcaaagtagag

SEQ ID NO: 125667 - DNA, 17 bp, Arabidopsis thaliana
gtgtcatcaagagccac

SEQ ID NO: 125668 - DNA, 17 bp, Arabidopsis thaliana
gtgtcatctatggaagc

SEQ ID NO: 125669 - DNA, 17 bp, Arabidopsis thaliana
gtgtcatctcaaagtgg

SEQ ID NO: 125670 - DNA, 17 bp, Arabidopsis thaliana
gtgtcatcttgttgagt

SEQ ID NO: 125671 - DNA, 17 bp, Arabidopsis thaliana
gtgtcatctttaggctg

SEQ ID NO: 125672 - DNA, 17 bp, Arabidopsis thaliana
gtgtcatgatctcgtga

SEQ ID NO: 125673 - DNA, 17 bp, Arabidopsis thaliana
gtgtcatgatctggtga

SEQ ID NO: 125674 - DNA, 17 bp, Arabidopsis thaliana
gtgtcatgtgcggtgat

SEQ ID NO: 125675 - DNA, 17 bp, Arabidopsis thaliana
gtgtcattggtcggctt

SEQ ID NO: 125676 - DNA, 17 bp, Arabidopsis thaliana
gtgtcatttggaacaag

SEQ ID NO: 125677 - DNA, 17 bp, Arabidopsis thaliana
gtgtccaacatagatca

SEQ ID NO: 125678 - DNA, 17 bp, Arabidopsis thaliana
gtgtccacagaaaagga

SEQ ID NO: 125679 - DNA, 17 bp, Arabidopsis thaliana
gtgtccactgctcaatt

SEQ ID NO: 125680 - DNA, 17 bp, Arabidopsis thaliana
gtgtccagaccacacag

SEQ ID NO: 125681 - DNA, 17 bp, Arabidopsis thaliana
gtgtccagacctggaca

SEQ ID NO: 125682 - DNA, 17 bp, Arabidopsis thaliana
gtgtccagatctaagtt

SEQ ID NO: 125683 - DNA, 17 bp, Arabidopsis thaliana
gtgtccagccccgaccc

SEQ ID NO: 125684 - DNA, 17 bp, Arabidopsis thaliana
gtgtccagctttcacaa

SEQ ID NO: 125685 - DNA, 17 bp, Arabidopsis thaliana
gtgtccagtttgcttca

SEQ ID NO: 125686 - DNA, 17 bp, Arabidopsis thaliana
gtgtccatagctcagtg

SEQ ID NO: 125687 - DNA, 17 bp, Arabidopsis thaliana
gtgtccatgggtgattc

SEQ ID NO: 125688 - DNA, 17 bp, Arabidopsis thaliana
gtgtccattggtcggct

SEQ ID NO: 125689 - DNA, 17 bp, Arabidopsis thaliana
gtgtcccaaacgtccaa

SEQ ID NO: 125690 - DNA, 17 bp, Arabidopsis thaliana
gtgtcccacactctctt

SEQ ID NO: 125691 - DNA, 17 bp, Arabidopsis thaliana
gtgtcccaccgggtgtg

SEQ ID NO: 125692 - DNA, 17 bp, Arabidopsis thaliana
gtgtcccaccgtggtcg

SEQ ID NO: 125693 - DNA, 17 bp, Arabidopsis thaliana
gtgtcccactgggtgtg

SEQ ID NO: 125694 - DNA, 17 bp, Arabidopsis thaliana
gtgtccgacttgttgac

SEQ ID NO: 125695 - DNA, 17 bp, Arabidopsis thaliana
gtgtccgctctatcccc

SEQ ID NO: 125696 - DNA, 17 bp, Arabidopsis thaliana
gtgtccggacttttgat

SEQ ID NO: 125697 - DNA, 17 bp, Arabidopsis thaliana
gtgtccggtgcgccccc

SEQ ID NO: 125698 - DNA, 17 bp, Arabidopsis thaliana
gtgtccggtgcgccctc

SEQ ID NO: 125699 - DNA, 17 bp, Arabidopsis thaliana
gtgtccggtgcgccctt

SEQ ID NO: 125700 - DNA, 17 bp, Arabidopsis thaliana
gtgtccggtgcgccgcc

SEQ ID NO: 125701 - DNA, 17 bp, Arabidopsis thaliana
gtgtccgtcgattattg

SEQ ID NO: 125702 - DNA, 17 bp, Arabidopsis thaliana
gtgtcctaaactattgc

SEQ ID NO: 125703 - DNA, 17 bp, Arabidopsis thaliana
gtgtcctaagatgagca

SEQ ID NO: 125704 - DNA, 17 bp, Arabidopsis thaliana
gtgtcctaagatgagct

SEQ ID NO: 125705 - DNA, 17 bp, Arabidopsis thaliana
gtgtcctaggctattga

SEQ ID NO: 125706 - DNA, 17 bp, Arabidopsis thaliana
gtgtcctcagcgacgga

SEQ ID NO: 125707 - DNA, 17 bp, Arabidopsis thaliana
gtgtcctccaatgactc

SEQ ID NO: 125708 - DNA, 17 bp, Arabidopsis thaliana
gtgtcctctaatgactc

SEQ ID NO: 125709 - DNA, 17 bp, Arabidopsis thaliana
gtgtcctgaaaaataca

SEQ ID NO: 125710 - DNA, 17 bp, Arabidopsis thaliana
gtgtcctggtgttacgc

SEQ ID NO: 125711 - DNA, 17 bp, Arabidopsis thaliana
gtgtcgacaagcggcga

SEQ ID NO: 125712 - DNA, 17 bp, Arabidopsis thaliana
gtgtcgactcatggaac

SEQ ID NO: 125713 - DNA, 17 bp, Arabidopsis thaliana
gtgtcgatcccataatt

SEQ ID NO: 125714 - DNA, 17 bp, Arabidopsis thaliana
gtgtcgatcccatagtt

SEQ ID NO: 125715 - DNA, 17 bp, Arabidopsis thaliana
gtgtcgatcgagaacga

SEQ ID NO: 125716 - DNA, 17 bp, Arabidopsis thaliana
gtgtcgcataagtagtg

SEQ ID NO: 125717 - DNA, 17 bp, Arabidopsis thaliana
gtgtcgccacgggatcg

SEQ ID NO: 125718 - DNA, 17 bp, Arabidopsis thaliana
gtgtcgcccaatgtgag

SEQ ID NO: 125719 - DNA, 17 bp, Arabidopsis thaliana
gtgtcgctccggcggct

SEQ ID NO: 125720 - DNA, 17 bp, Arabidopsis thaliana
gtgtcgcttgtgagatc

SEQ ID NO: 125721 - DNA, 17 bp, Arabidopsis thaliana
gtgtcggacgcgaactt

SEQ ID NO: 125722 - DNA, 17 bp, Arabidopsis thaliana
gtgtcggccagataaat

SEQ ID NO: 125723 - DNA, 17 bp, Arabidopsis thaliana
gtgtcggctgctttgtt

SEQ ID NO: 125724 - DNA, 17 bp, Arabidopsis thaliana
gtgtcgtattttgtgac

SEQ ID NO: 125725 - DNA, 17 bp, Arabidopsis thaliana
gtgtcgtccacgaattt

SEQ ID NO: 125726 - DNA, 17 bp, Arabidopsis thaliana
gtgtcgtcggtagcggc

SEQ ID NO: 125727 - DNA, 17 bp, Arabidopsis thaliana
gtgtcgtcgtgttctga

SEQ ID NO: 125728 - DNA, 17 bp, Arabidopsis thaliana
gtgtcgtctatcgtgga

SEQ ID NO: 125729 - DNA, 17 bp, Arabidopsis thaliana
gtgtcgtctgtcgtgaa

SEQ ID NO: 125730 - DNA, 17 bp, Arabidopsis thaliana
gtgtcgtctgtcgtgga

SEQ ID NO: 125731 - DNA, 17 bp, Arabidopsis thaliana
gtgtcgtctttccacta

SEQ ID NO: 125732 - DNA, 17 bp, Arabidopsis thaliana
gtgtcgtgtcgtgccaa

SEQ ID NO: 125733 - DNA, 17 bp, Arabidopsis thaliana
gtgtcgttacgacaggt

SEQ ID NO: 125734 - DNA, 17 bp, Arabidopsis thaliana
gtgtcgttcgtcgcagt

SEQ ID NO: 125735 - DNA, 17 bp, Arabidopsis thaliana
gtgtcgttcgtctgact

SEQ ID NO: 125736 - DNA, 17 bp, Arabidopsis thaliana
gtgtcgttggctaagtc

SEQ ID NO: 125737 - DNA, 17 bp, Arabidopsis thaliana
gtgtcgtttcccggctg

SEQ ID NO: 125738 - DNA, 17 bp, Arabidopsis thaliana
gtgtcgttttctcgatc

SEQ ID NO: 125739 - DNA, 17 bp, Arabidopsis thaliana
gtgtcgttttctcgttc

SEQ ID NO: 125740 - DNA, 17 bp, Arabidopsis thaliana
gtgtctaagaccatctc

SEQ ID NO: 125741 - DNA, 17 bp, Arabidopsis thaliana
gtgtctaatgacacaag

SEQ ID NO: 125742 - DNA, 17 bp, Arabidopsis thaliana
gtgtctaatgacaccag

SEQ ID NO: 125743 - DNA, 17 bp, Arabidopsis thaliana
gtgtctacacttgtgct

SEQ ID NO: 125744 - DNA, 17 bp, Arabidopsis thaliana
gtgtctacagctctttc

SEQ ID NO: 125745 - DNA, 17 bp, Arabidopsis thaliana
gtgtctacagcttctcc

SEQ ID NO: 125746 - DNA, 17 bp, Arabidopsis thaliana
gtgtctacagcttcttc

SEQ ID NO: 125747 - DNA, 17 bp, Arabidopsis thaliana
gtgtctacaggacaacg

SEQ ID NO: 125748 - DNA, 17 bp, Arabidopsis thaliana
gtgtctacgcttgactt

SEQ ID NO: 125749 - DNA, 17 bp, Arabidopsis thaliana
gtgtctactcctttgga

SEQ ID NO: 125750 - DNA, 17 bp, Arabidopsis thaliana
gtgtctacttctttgga

SEQ ID NO: 125751 - DNA, 17 bp, Arabidopsis thaliana
gtgtctagacctggaca

SEQ ID NO: 125752 - DNA, 17 bp, Arabidopsis thaliana
gtgtctagccgccggag

SEQ ID NO: 125753 - DNA, 17 bp, Arabidopsis thaliana
gtgtctaggcgcgtaag

SEQ ID NO: 125754 - DNA, 17 bp, Arabidopsis thaliana
gtgtctagttctgtatg

SEQ ID NO: 125755 - DNA, 17 bp, Arabidopsis thaliana
gtgtctagtttgccact

SEQ ID NO: 125756 - DNA, 17 bp, Arabidopsis thaliana
gtgtctatgctccgagt

SEQ ID NO: 125757 - DNA, 17 bp, Arabidopsis thaliana
gtgtctatgtgccagct

SEQ ID NO: 125758 - DNA, 17 bp, Arabidopsis thaliana
gtgtctattctgtgcac

SEQ ID NO: 125759 - DNA, 17 bp, Arabidopsis thaliana
gtgtctattgtagtaca

SEQ ID NO: 125760 - DNA, 17 bp, Arabidopsis thaliana
gtgtctattttagagtt

SEQ ID NO: 125761 - DNA, 17 bp, Arabidopsis thaliana
gtgtctcaacgatgaaa

SEQ ID NO: 125762 - DNA, 17 bp, Arabidopsis thaliana
gtgtctcaatggttgca

SEQ ID NO: 125763 - DNA, 17 bp, Arabidopsis thaliana
gtgtctcacgaaactgc

SEQ ID NO: 125764 - DNA, 17 bp, Arabidopsis thaliana
gtgtctcagaccactag

SEQ ID NO: 125765 - DNA, 17 bp, Arabidopsis thaliana
gtgtctcagatggtgac

SEQ ID NO: 125766 - DNA, 17 bp, Arabidopsis thaliana
gtgtctcatccctgaca

SEQ ID NO: 125767 - DNA, 17 bp, Arabidopsis thaliana
gtgtctcatcgatggtc

SEQ ID NO: 125768 - DNA, 17 bp, Arabidopsis thaliana
gtgtctccaactttagt

SEQ ID NO: 125769 - DNA, 17 bp, Arabidopsis thaliana
gtgtctccaggatacaa

SEQ ID NO: 125770 - DNA, 17 bp, Arabidopsis thaliana
gtgtctccgagaagtat

SEQ ID NO: 125771 - DNA, 17 bp, Arabidopsis thaliana
gtgtctccgcccctgtt

SEQ ID NO: 125772 - DNA, 17 bp, Arabidopsis thaliana
gtgtctcgattgtggac

SEQ ID NO: 125773 - DNA, 17 bp, Arabidopsis thaliana
gtgtctcgggaacttgt

SEQ ID NO: 125774 - DNA, 17 bp, Arabidopsis thaliana
gtgtctcttgacgactg

SEQ ID NO: 125775 - DNA, 17 bp, Arabidopsis thaliana
gtgtctgaatttcggcc

SEQ ID NO: 125776 - DNA, 17 bp, Arabidopsis thaliana
gtgtctgacatgtgtgc

SEQ ID NO: 125777 - DNA, 17 bp, Arabidopsis thaliana
gtgtctgacctacgatg

SEQ ID NO: 125778 - DNA, 17 bp, Arabidopsis thaliana
gtgtctgacgttggttt

SEQ ID NO: 125779 - DNA, 17 bp, Arabidopsis thaliana
gtgtctgattggtaacc

SEQ ID NO: 125780 - DNA, 17 bp, Arabidopsis thaliana
gtgtctgcaggtggtcg

SEQ ID NO: 125781 - DNA, 17 bp, Arabidopsis thaliana
gtgtctgcagttcgttg

SEQ ID NO: 125782 - DNA, 17 bp, Arabidopsis thaliana
gtgtctgcctgggtgtc

SEQ ID NO: 125783 - DNA, 17 bp, Arabidopsis thaliana
gtgtctgggatgattac

SEQ ID NO: 125784 - DNA, 17 bp, Arabidopsis thaliana
gtgtctggtgtcggtga

SEQ ID NO: 125785 - DNA, 17 bp, Arabidopsis thaliana
gtgtctgtaatccacgt

SEQ ID NO: 125786 - DNA, 17 bp, Arabidopsis thaliana
gtgtctgtactcgacta

SEQ ID NO: 125787 - DNA, 17 bp, Arabidopsis thaliana
gtgtctgtagtagtgcg

SEQ ID NO: 125788 - DNA, 17 bp, Arabidopsis thaliana
gtgtctgtagtccaacg

SEQ ID NO: 125789 - DNA, 17 bp, Arabidopsis thaliana
gtgtctgttgatcacgc

SEQ ID NO: 125790 - DNA, 17 bp, Arabidopsis thaliana
gtgtctgttggaccaac

SEQ ID NO: 125791 - DNA, 17 bp, Arabidopsis thaliana
gtgtctgttggatgagc

SEQ ID NO: 125792 - DNA, 17 bp, Arabidopsis thaliana
gtgtctgttggatggtc

SEQ ID NO: 125793 - DNA, 17 bp, Arabidopsis thaliana
gtgtctgtttcgtccac

SEQ ID NO: 125794 - DNA, 17 bp, Arabidopsis thaliana
gtgtcttaacatgattg

SEQ ID NO: 125795 - DNA, 17 bp, Arabidopsis thaliana
gtgtcttactcgctaac

SEQ ID NO: 125796 - DNA, 17 bp, Arabidopsis thaliana
gtgtcttcaaggctcct

SEQ ID NO: 125797 - DNA, 17 bp, Arabidopsis thaliana
gtgtcttcaggcagtta

SEQ ID NO: 125798 - DNA, 17 bp, Arabidopsis thaliana
gtgtcttcaggcagttg

SEQ ID NO: 125799 - DNA, 17 bp, Arabidopsis thaliana
gtgtcttcatctgcaca

SEQ ID NO: 125800 - DNA, 17 bp, Arabidopsis thaliana
gtgtcttcggccggtgc

SEQ ID NO: 125801 - DNA, 17 bp, Arabidopsis thaliana
gtgtcttctcattggcc

SEQ ID NO: 125802 - DNA, 17 bp, Arabidopsis thaliana
gtgtcttctccaaccgc

SEQ ID NO: 125803 - DNA, 17 bp, Arabidopsis thaliana
gtgtcttcttcgagcgc

SEQ ID NO: 125804 - DNA, 17 bp, Arabidopsis thaliana
gtgtcttgaaggttgct

SEQ ID NO: 125805 - DNA, 17 bp, Arabidopsis thaliana
gtgtcttgagctggaga

SEQ ID NO: 125806 - DNA, 17 bp, Arabidopsis thaliana
gtgtcttgagtcgtttg

SEQ ID NO: 125807 - DNA, 17 bp, Arabidopsis thaliana
gtgtcttgtgatctccc

SEQ ID NO: 125808 - DNA, 17 bp, Arabidopsis thaliana
gtgtctttcatagcctt

SEQ ID NO: 125809 - DNA, 17 bp, Arabidopsis thaliana
gtgtctttccatggcct

SEQ ID NO: 125810 - DNA, 17 bp, Arabidopsis thaliana
gtgtctttctcatctgt

SEQ ID NO: 125811 - DNA, 17 bp, Arabidopsis thaliana
gtgtcttttccaaccga

SEQ ID NO: 125812 - DNA, 17 bp, Arabidopsis thaliana
gtgtgaaacgcgacgag

SEQ ID NO: 125813 - DNA, 17 bp, Arabidopsis thaliana
gtgtgaaatggccggtc

SEQ ID NO: 125814 - DNA, 17 bp, Arabidopsis thaliana
gtgtgaacgatctgtgt

SEQ ID NO: 125815 - DNA, 17 bp, Arabidopsis thaliana
gtgtgaactagttggat

SEQ ID NO: 125816 - DNA, 17 bp, Arabidopsis thaliana
gtgtgaactttttgctg

SEQ ID NO: 125817 - DNA, 17 bp, Arabidopsis thaliana
gtgtgaagctggctgat

SEQ ID NO: 125818 - DNA, 17 bp, Arabidopsis thaliana
gtgtgaatgccgatgta

SEQ ID NO: 125819 - DNA, 17 bp, Arabidopsis thaliana
gtgtgaatggttttgga

SEQ ID NO: 125820 - DNA, 17 bp, Arabidopsis thaliana
gtgtgaattgcagaatc

SEQ ID NO: 125821 - DNA, 17 bp, Arabidopsis thaliana
gtgtgaattttgtgctg

SEQ ID NO: 125822 - DNA, 17 bp, Arabidopsis thaliana
gtgtgaattttttgctg

SEQ ID NO: 125823 - DNA, 17 bp, Arabidopsis thaliana
gtgtgacaccgcgctcc

SEQ ID NO: 125824 - DNA, 17 bp, Arabidopsis thaliana
gtgtgaccgagatactc

SEQ ID NO: 125825 - DNA, 17 bp, Arabidopsis thaliana
gtgtgaccgtccgatct

SEQ ID NO: 125826 - DNA, 17 bp, Arabidopsis thaliana
gtgtgacctcccgggaa

SEQ ID NO: 125827 - DNA, 17 bp, Arabidopsis thaliana
gtgtgacctgccatcca

SEQ ID NO: 125828 - DNA, 17 bp, Arabidopsis thaliana
gtgtgacgagaagctga

SEQ ID NO: 125829 - DNA, 17 bp, Arabidopsis thaliana
gtgtgacgatgtgttgg

SEQ ID NO: 125830 - DNA, 17 bp, Arabidopsis thaliana
gtgtgactaaactcctc

SEQ ID NO: 125831 - DNA, 17 bp, Arabidopsis thaliana
gtgtgactgtgtgactg

SEQ ID NO: 125832 - DNA, 17 bp, Arabidopsis thaliana
gtgtgacttgaactatt

SEQ ID NO: 125833 - DNA, 17 bp, Arabidopsis thaliana
gtgtgacttgcactctt

SEQ ID NO: 125834 - DNA, 17 bp, Arabidopsis thaliana
gtgtgagactagcgtga

SEQ ID NO: 125835 - DNA, 17 bp, Arabidopsis thaliana
gtgtgagagagatgtgg

SEQ ID NO: 125836 - DNA, 17 bp, Arabidopsis thaliana
gtgtgagatttgtgttg

SEQ ID NO: 125837 - DNA, 17 bp, Arabidopsis thaliana
gtgtgagcatgcctgtc

SEQ ID NO: 125838 - DNA, 17 bp, Arabidopsis thaliana
gtgtgagccaactttat

SEQ ID NO: 125839 - DNA, 17 bp, Arabidopsis thaliana
gtgtgagccagtgactg

SEQ ID NO: 125840 - DNA, 17 bp, Arabidopsis thaliana
gtgtgaggctttcaggc

SEQ ID NO: 125841 - DNA, 17 bp, Arabidopsis thaliana
gtgtgagggatgtgtct

SEQ ID NO: 125842 - DNA, 17 bp, Arabidopsis thaliana
gtgtgagggcgattctg

SEQ ID NO: 125843 - DNA, 17 bp, Arabidopsis thaliana
gtgtgaggtctgctgct

SEQ ID NO: 125844 - DNA, 17 bp, Arabidopsis thaliana
gtgtgagtaagattcct

SEQ ID NO: 125845 - DNA, 17 bp, Arabidopsis thaliana
gtgtgagtcgtgtgact

SEQ ID NO: 125846 - DNA, 17 bp, Arabidopsis thaliana
gtgtgatatccagattt

SEQ ID NO: 125847 - DNA, 17 bp, Arabidopsis thaliana
gtgtgatatttgcacaa

SEQ ID NO: 125848 - DNA, 17 bp, Arabidopsis thaliana
gtgtgatatttgccgga

SEQ ID NO: 125849 - DNA, 17 bp, Arabidopsis thaliana
gtgtgatcacagattat

SEQ ID NO: 125850 - DNA, 17 bp, Arabidopsis thaliana
gtgtgatcaccggcttg

SEQ ID NO: 125851 - DNA, 17 bp, Arabidopsis thaliana
gtgtgatcgcctcattc

SEQ ID NO: 125852 - DNA, 17 bp, Arabidopsis thaliana
gtgtgatctgagagctt

SEQ ID NO: 125853 - DNA, 17 bp, Arabidopsis thaliana
gtgtgatcttgttgtgt

SEQ ID NO: 125854 - DNA, 17 bp, Arabidopsis thaliana
gtgtgatgactgtagct

SEQ ID NO: 125855 - DNA, 17 bp, Arabidopsis thaliana
gtgtgatgggtttagac

SEQ ID NO: 125856 - DNA, 17 bp, Arabidopsis thaliana
gtgtgatggtcagacag

SEQ ID NO: 125857 - DNA, 17 bp, Arabidopsis thaliana
gtgtgatggtggtagct

SEQ ID NO: 125858 - DNA, 17 bp, Arabidopsis thaliana
gtgtgattcaaggatcc

SEQ ID NO: 125859 - DNA, 17 bp, Arabidopsis thaliana
gtgtgattcacgtcggg

SEQ ID NO: 125860 - DNA, 17 bp, Arabidopsis thaliana
gtgtgattccactcttc

SEQ ID NO: 125861 - DNA, 17 bp, Arabidopsis thaliana
gtgtgattgccacagaa

SEQ ID NO: 125862 - DNA, 17 bp, Arabidopsis thaliana
gtgtgatttgttgtcta

SEQ ID NO: 125863 - DNA, 17 bp, Arabidopsis thaliana
gtgtgcaaggcggcggt

SEQ ID NO: 125864 - DNA, 17 bp, Arabidopsis thaliana
gtgtgcagccaaggatg

SEQ ID NO: 125865 - DNA, 17 bp, Arabidopsis thaliana
gtgtgcattggtccgct

SEQ ID NO: 125866 - DNA, 17 bp, Arabidopsis thaliana
gtgtgcattggtcggct

SEQ ID NO: 125867 - DNA, 17 bp, Arabidopsis thaliana
gtgtgcattggtcggtt

SEQ ID NO: 125868 - DNA, 17 bp, Arabidopsis thaliana
gtgtgccaggttcaata

SEQ ID NO: 125869 - DNA, 17 bp, Arabidopsis thaliana
gtgtgccaggttcaatg

SEQ ID NO: 125870 - DNA, 17 bp, Arabidopsis thaliana
gtgtgcccctcgaaagt

SEQ ID NO: 125871 - DNA, 17 bp, Arabidopsis thaliana
gtgtgccggtaacaaca

SEQ ID NO: 125872 - DNA, 17 bp, Arabidopsis thaliana
gtgtgcctctgatgttc

SEQ ID NO: 125873 - DNA, 17 bp, Arabidopsis thaliana
gtgtgcctctgggagat

SEQ ID NO: 125874 - DNA, 17 bp, Arabidopsis thaliana
gtgtgcgaaggtaggct

SEQ ID NO: 125875 - DNA, 17 bp, Arabidopsis thaliana
gtgtgcgaatgaaatta

SEQ ID NO: 125876 - DNA, 17 bp, Arabidopsis thaliana
gtgtgcgagtcaacggg

SEQ ID NO: 125877 - DNA, 17 bp, Arabidopsis thaliana
gtgtgcgatgtgttggc

SEQ ID NO: 125878 - DNA, 17 bp, Arabidopsis thaliana
gtgtgcgccgtttttta

SEQ ID NO: 125879 - DNA, 17 bp, Arabidopsis thaliana
gtgtgcgccgttttttg

SEQ ID NO: 125880 - DNA, 17 bp, Arabidopsis thaliana
gtgtgcggtcggcttgt

SEQ ID NO: 125881 - DNA, 17 bp, Arabidopsis thaliana
gtgtgcggtttttttat

SEQ ID NO: 125882 - DNA, 17 bp, Arabidopsis thaliana
gtgtgcgtaggatataa

SEQ ID NO: 125883 - DNA, 17 bp, Arabidopsis thaliana
gtgtgcgtttgttcctg

SEQ ID NO: 125884 - DNA, 17 bp, Arabidopsis thaliana
gtgtgctactatggctg

SEQ ID NO: 125885 - DNA, 17 bp, Arabidopsis thaliana
gtgtgctactgcctaga

SEQ ID NO: 125886 - DNA, 17 bp, Arabidopsis thaliana
gtgtgctactgtctgga

SEQ ID NO: 125887 - DNA, 17 bp, Arabidopsis thaliana
gtgtgctactgtctgta

SEQ ID NO: 125888 - DNA, 17 bp, Arabidopsis thaliana
gtgtgctagtgcaccgg

SEQ ID NO: 125889 - DNA, 17 bp, Arabidopsis thaliana
gtgtgctagtgcatcgg

SEQ ID NO: 125890 - DNA, 17 bp, Arabidopsis thaliana
gtgtgctcattgtcgca

SEQ ID NO: 125891 - DNA, 17 bp, Arabidopsis thaliana
gtgtgctcatttcatct

SEQ ID NO: 125892 - DNA, 17 bp, Arabidopsis thaliana
gtgtgctgatgtgtcaa

SEQ ID NO: 125893 - DNA, 17 bp, Arabidopsis thaliana
gtgtgctgcacagtgca

SEQ ID NO: 125894 - DNA, 17 bp, Arabidopsis thaliana
gtgtgctggattatgac

SEQ ID NO: 125895 - DNA, 17 bp, Arabidopsis thaliana
gtgtgcttcaagattcc

SEQ ID NO: 125896 - DNA, 17 bp, Arabidopsis thaliana
gtgtgcttgagctggaa

SEQ ID NO: 125897 - DNA, 17 bp, Arabidopsis thaliana
gtgtggaaaattgagcg

SEQ ID NO: 125898 - DNA, 17 bp, Arabidopsis thaliana
gtgtggaaagagcattc

SEQ ID NO: 125899 - DNA, 17 bp, Arabidopsis thaliana
gtgtggacaagccctga

SEQ ID NO: 125900 - DNA, 17 bp, Arabidopsis thaliana
gtgtggacatgtctaat

SEQ ID NO: 125901 - DNA, 17 bp, Arabidopsis thaliana
gtgtggaccaagatcga

SEQ ID NO: 125902 - DNA, 17 bp, Arabidopsis thaliana
gtgtggacccaattaca

SEQ ID NO: 125903 - DNA, 17 bp, Arabidopsis thaliana
gtgtggacccacttggt

SEQ ID NO: 125904 - DNA, 17 bp, Arabidopsis thaliana
gtgtggacttccaacct

SEQ ID NO: 125905 - DNA, 17 bp, Arabidopsis thaliana
gtgtggaggtactaggt

SEQ ID NO: 125906 - DNA, 17 bp, Arabidopsis thaliana
gtgtggatcctgtctct

SEQ ID NO: 125907 - DNA, 17 bp, Arabidopsis thaliana
gtgtggattttggcctg

SEQ ID NO: 125908 - DNA, 17 bp, Arabidopsis thaliana
gtgtggcagactcttcc

SEQ ID NO: 125909 - DNA, 17 bp, Arabidopsis thaliana
gtgtggcataaaccaac

SEQ ID NO: 125910 - DNA, 17 bp, Arabidopsis thaliana
gtgtggcctgcaaatta

SEQ ID NO: 125911 - DNA, 17 bp, Arabidopsis thaliana
gtgtggcgatatgttgg

SEQ ID NO: 125912 - DNA, 17 bp, Arabidopsis thaliana
gtgtggcgatgtgttgg

SEQ ID NO: 125913 - DNA, 17 bp, Arabidopsis thaliana
gtgtggctagcctgaga

SEQ ID NO: 125914 - DNA, 17 bp, Arabidopsis thaliana
gtgtgggacaaaccgct

SEQ ID NO: 125915 - DNA, 17 bp, Arabidopsis thaliana
gtgtgggaggtccctaa

SEQ ID NO: 125916 - DNA, 17 bp, Arabidopsis thaliana
gtgtgggctatattacg

SEQ ID NO: 125917 - DNA, 17 bp, Arabidopsis thaliana
gtgtggtagacccttcc

SEQ ID NO: 125918 - DNA, 17 bp, Arabidopsis thaliana
gtgtggtcagggctttg

SEQ ID NO: 125919 - DNA, 17 bp, Arabidopsis thaliana
gtgtggtctggacacta

SEQ ID NO: 125920 - DNA, 17 bp, Arabidopsis thaliana
gtgtggtgacttaggtt

SEQ ID NO: 125921 - DNA, 17 bp, Arabidopsis thaliana
gtgtggtggagcgattt

SEQ ID NO: 125922 - DNA, 17 bp, Arabidopsis thaliana
gtgtggtggtccatttc

SEQ ID NO: 125923 - DNA, 17 bp, Arabidopsis thaliana
gtgtggttcgtatgcag

SEQ ID NO: 125924 - DNA, 17 bp, Arabidopsis thaliana
gtgtggttcgttgcggt

SEQ ID NO: 125925 - DNA, 17 bp, Arabidopsis thaliana
gtgtggttgtttagggt

SEQ ID NO: 125926 - DNA, 17 bp, Arabidopsis thaliana
gtgtggtttcgggtctg

SEQ ID NO: 125927 - DNA, 17 bp, Arabidopsis thaliana
gtgtgtagtcgatcaag

SEQ ID NO: 125928 - DNA, 17 bp, Arabidopsis thaliana
gtgtgtagtcgctcaag

SEQ ID NO: 125929 - DNA, 17 bp, Arabidopsis thaliana
gtgtgtattatccagga

SEQ ID NO: 125930 - DNA, 17 bp, Arabidopsis thaliana
gtgtgtcaagaccaagt

SEQ ID NO: 125931 - DNA, 17 bp, Arabidopsis thaliana
gtgtgtcaccgatgaag

SEQ ID NO: 125932 - DNA, 17 bp, Arabidopsis thaliana
gtgtgtcactgtagaca

SEQ ID NO: 125933 - DNA, 17 bp, Arabidopsis thaliana
gtgtgtcagccaaaact

SEQ ID NO: 125934 - DNA, 17 bp, Arabidopsis thaliana
gtgtgtcaggttgtttg

SEQ ID NO: 125935 - DNA, 17 bp, Arabidopsis thaliana
gtgtgtcatgatctcgt

SEQ ID NO: 125936 - DNA, 17 bp, Arabidopsis thaliana
gtgtgtccatttcatcc

SEQ ID NO: 125937 - DNA, 17 bp, Arabidopsis thaliana
gtgtgtccgattattga

SEQ ID NO: 125938 - DNA, 17 bp, Arabidopsis thaliana
gtgtgtctaaccacgga

SEQ ID NO: 125939 - DNA, 17 bp, Arabidopsis thaliana
gtgtgtctaggctcaat

SEQ ID NO: 125940 - DNA, 17 bp, Arabidopsis thaliana
gtgtgtctcgaccattg

SEQ ID NO: 125941 - DNA, 17 bp, Arabidopsis thaliana
gtgtgtctcgcctctgg

SEQ ID NO: 125942 - DNA, 17 bp, Arabidopsis thaliana
gtgtgtgactattggtt

SEQ ID NO: 125943 - DNA, 17 bp, Arabidopsis thaliana
gtgtgtgatcgcctcat

SEQ ID NO: 125944 - DNA, 17 bp, Arabidopsis thaliana
gtgtgtgattcggactc

SEQ ID NO: 125945 - DNA, 17 bp, Arabidopsis thaliana
gtgtgtgatttcgggca

SEQ ID NO: 125946 - DNA, 17 bp, Arabidopsis thaliana
gtgtgtgcaaagctctt

SEQ ID NO: 125947 - DNA, 17 bp, Arabidopsis thaliana
gtgtgtgccatgtgtcg

SEQ ID NO: 125948 - DNA, 17 bp, Arabidopsis thaliana
gtgtgtgctgatgtgtc

SEQ ID NO: 125949 - DNA, 17 bp, Arabidopsis thaliana
gtgtgtgggatattgat

SEQ ID NO: 125950 - DNA, 17 bp, Arabidopsis thaliana
gtgtgtgggcttccaat

SEQ ID NO: 125951 - DNA, 17 bp, Arabidopsis thaliana
gtgtgtgtctgtaatcc

SEQ ID NO: 125952 - DNA, 17 bp, Arabidopsis thaliana
gtgtgtgtgtacttctc

SEQ ID NO: 125953 - DNA, 17 bp, Arabidopsis thaliana
gtgtgttagatctgcaa

SEQ ID NO: 125954 - DNA, 17 bp, Arabidopsis thaliana
gtgtgttagggcatccc

SEQ ID NO: 125955 - DNA, 17 bp, Arabidopsis thaliana
gtgtgttagggcatgcg

SEQ ID NO: 125956 - DNA, 17 bp, Arabidopsis thaliana
gtgtgttcacactatgc

SEQ ID NO: 125957 - DNA, 17 bp, Arabidopsis thaliana
gtgtgttccgtcagggc

SEQ ID NO: 125958 - DNA, 17 bp, Arabidopsis thaliana
gtgtgttcgaagacgct

SEQ ID NO: 125959 - DNA, 17 bp, Arabidopsis thaliana
gtgtgttcttcaggcta

SEQ ID NO: 125960 - DNA, 17 bp, Arabidopsis thaliana
gtgtgttcttgtgatct

SEQ ID NO: 125961 - DNA, 17 bp, Arabidopsis thaliana
gtgtgttgaaattacca

SEQ ID NO: 125962 - DNA, 17 bp, Arabidopsis thaliana
gtgtgttgtgtctttgt

SEQ ID NO: 125963 - DNA, 17 bp, Arabidopsis thaliana
gtgtgttgttgaaatcg

SEQ ID NO: 125964 - DNA, 17 bp, Arabidopsis thaliana
gtgtgttgttgagatcg

SEQ ID NO: 125965 - DNA, 17 bp, Arabidopsis thaliana
gtgtgtttctgccaggg

SEQ ID NO: 125966 - DNA, 17 bp, Arabidopsis thaliana
gtgtgtttgatctcgtc

SEQ ID NO: 125967 - DNA, 17 bp, Arabidopsis thaliana
gtgtgtttgatgtcgtc

SEQ ID NO: 125968 - DNA, 17 bp, Arabidopsis thaliana
gtgtgttttgcagggtt

SEQ ID NO: 125969 - DNA, 17 bp, Arabidopsis thaliana
gtgtgttttgcatactt

SEQ ID NO: 125970 - DNA, 17 bp, Arabidopsis thaliana
gtgttaaccgccgtttg

SEQ ID NO: 125971 - DNA, 17 bp, Arabidopsis thaliana
gtgttaacggtgagtct

SEQ ID NO: 125972 - DNA, 17 bp, Arabidopsis thaliana
gtgttaaggcctgttaa

SEQ ID NO: 125973 - DNA, 17 bp, Arabidopsis thaliana
gtgttaattgagttgcc

SEQ ID NO: 125974 - DNA, 17 bp, Arabidopsis thaliana
gtgttacaatgccgacc

SEQ ID NO: 125975 - DNA, 17 bp, Arabidopsis thaliana
gtgttaccattttgcga

SEQ ID NO: 125976 - DNA, 17 bp, Arabidopsis thaliana
gtgttacgactcgattt

SEQ ID NO: 125977 - DNA, 17 bp, Arabidopsis thaliana
gtgttacggaggcgtct

SEQ ID NO: 125978 - DNA, 17 bp, Arabidopsis thaliana
gtgttacgttgccgatc

SEQ ID NO: 125979 - DNA, 17 bp, Arabidopsis thaliana
gtgttactgtaccgcga

SEQ ID NO: 125980 - DNA, 17 bp, Arabidopsis thaliana
gtgttagacaaaccact

SEQ ID NO: 125981 - DNA, 17 bp, Arabidopsis thaliana
gtgttagcttgtcacct

SEQ ID NO: 125982 - DNA, 17 bp, Arabidopsis thaliana
gtgttagtgaggcattt

SEQ ID NO: 125983 - DNA, 17 bp, Arabidopsis thaliana
gtgttagtgcaccctct

SEQ ID NO: 125984 - DNA, 17 bp, Arabidopsis thaliana
gtgttatctaaacgctc

SEQ ID NO: 125985 - DNA, 17 bp, Arabidopsis thaliana
gtgttatcttaggcttt

SEQ ID NO: 125986 - DNA, 17 bp, Arabidopsis thaliana
gtgttatgctatcaacc

SEQ ID NO: 125987 - DNA, 17 bp, Arabidopsis thaliana
gtgttattttgtgattg

SEQ ID NO: 125988 - DNA, 17 bp, Arabidopsis thaliana
gtgttcaaaattagact

SEQ ID NO: 125989 - DNA, 17 bp, Arabidopsis thaliana
gtgttcaaatgctggct

SEQ ID NO: 125990 - DNA, 17 bp, Arabidopsis thaliana
gtgttcaacagtttgtc

SEQ ID NO: 125991 - DNA, 17 bp, Arabidopsis thaliana
gtgttcaacggtgatgt

SEQ ID NO: 125992 - DNA, 17 bp, Arabidopsis thaliana
gtgttcaatcggctatg

SEQ ID NO: 125993 - DNA, 17 bp, Arabidopsis thaliana
gtgttcaccattctgtt

SEQ ID NO: 125994 - DNA, 17 bp, Arabidopsis thaliana
gtgttcaccggcttctt

SEQ ID NO: 125995 - DNA, 17 bp, Arabidopsis thaliana
gtgttcagacaacgctt

SEQ ID NO: 125996 - DNA, 17 bp, Arabidopsis thaliana
gtgttcagacggtggac

SEQ ID NO: 125997 - DNA, 17 bp, Arabidopsis thaliana
gtgttcatcaagactct

SEQ ID NO: 125998 - DNA, 17 bp, Arabidopsis thaliana
gtgttcatcagtcatct

SEQ ID NO: 125999 - DNA, 17 bp, Arabidopsis thaliana
gtgttcatgggtgattc

SEQ ID NO: 126000 - DNA, 17 bp, Arabidopsis thaliana
gtgttccaatcatgaca

SEQ ID NO: 126001 - DNA, 17 bp, Arabidopsis thaliana
gtgttccatctacgaca

SEQ ID NO: 126002 - DNA, 17 bp, Arabidopsis thaliana
gtgttccatgaggctgc

SEQ ID NO: 126003 - DNA, 17 bp, Arabidopsis thaliana
gtgttcccattatccgc

SEQ ID NO: 126004 - DNA, 17 bp, Arabidopsis thaliana
gtgttcccgtcgaagcc

SEQ ID NO: 126005 - DNA, 17 bp, Arabidopsis thaliana
gtgttccgcactaatcg

SEQ ID NO: 126006 - DNA, 17 bp, Arabidopsis thaliana
gtgttccgcataatgcg

SEQ ID NO: 126007 - DNA, 17 bp, Arabidopsis thaliana
gtgttccttgctttggt

SEQ ID NO: 126008 - DNA, 17 bp, Arabidopsis thaliana
gtgttcgatccacgcac

SEQ ID NO: 126009 - DNA, 17 bp, Arabidopsis thaliana
gtgttcgatccacgctc

SEQ ID NO: 126010 - DNA, 17 bp, Arabidopsis thaliana
gtgttcgatcgatcttg

SEQ ID NO: 126011 - DNA, 17 bp, Arabidopsis thaliana
gtgttcgatggtgagac

SEQ ID NO: 126012 - DNA, 17 bp, Arabidopsis thaliana
gtgttcgatgtgggacc

SEQ ID NO: 126013 - DNA, 17 bp, Arabidopsis thaliana
gtgttcgattcacgtcg

SEQ ID NO: 126014 - DNA, 17 bp, Arabidopsis thaliana
gtgttcggaccgcggcg

SEQ ID NO: 126015 - DNA, 17 bp, Arabidopsis thaliana
gtgttcggactaaaaca

SEQ ID NO: 126016 - DNA, 17 bp, Arabidopsis thaliana
gtgttcggatcgtggcg

SEQ ID NO: 126017 - DNA, 17 bp, Arabidopsis thaliana
gtgttcggatgcgagaa

SEQ ID NO: 126018 - DNA, 17 bp, Arabidopsis thaliana
gtgttcggtccacgctc

SEQ ID NO: 126019 - DNA, 17 bp, Arabidopsis thaliana
gtgttcgtgtagatgat

SEQ ID NO: 126020 - DNA, 17 bp, Arabidopsis thaliana
gtgttcgttccacgctc

SEQ ID NO: 126021 - DNA, 17 bp, Arabidopsis thaliana
gtgttcgtttcacgtcg

SEQ ID NO: 126022 - DNA, 17 bp, Arabidopsis thaliana
gtgttctagaacaacct

SEQ ID NO: 126023 - DNA, 17 bp, Arabidopsis thaliana
gtgttctagacctttag

SEQ ID NO: 126024 - DNA, 17 bp, Arabidopsis thaliana
gtgttctattgtgtcca

SEQ ID NO: 126025 - DNA, 17 bp, Arabidopsis thaliana
gtgttctccaacatgtt

SEQ ID NO: 126026 - DNA, 17 bp, Arabidopsis thaliana
gtgttctccatcacgtt

SEQ ID NO: 126027 - DNA, 17 bp, Arabidopsis thaliana
gtgttctctccaaccat

SEQ ID NO: 126028 - DNA, 17 bp, Arabidopsis thaliana
gtgttcttgctcaacgc

SEQ ID NO: 126029 - DNA, 17 bp, Arabidopsis thaliana
gtgttcttggtgtggct

SEQ ID NO: 126030 - DNA, 17 bp, Arabidopsis thaliana
gtgttcttgtgatctgc

SEQ ID NO: 126031 - DNA, 17 bp, Arabidopsis thaliana
gtgttgaaggctatctg

SEQ ID NO: 126032 - DNA, 17 bp, Arabidopsis thaliana
gtgttgacagtgggatg

SEQ ID NO: 126033 - DNA, 17 bp, Arabidopsis thaliana
gtgttgaccaagttcca

SEQ ID NO: 126034 - DNA, 17 bp, Arabidopsis thaliana
gtgttgacccatgaatt

SEQ ID NO: 126035 - DNA, 17 bp, Arabidopsis thaliana
gtgttgaccgcgccatt

SEQ ID NO: 126036 - DNA, 17 bp, Arabidopsis thaliana
gtgttgaccggccttga

SEQ ID NO: 126037 - DNA, 17 bp, Arabidopsis thaliana
gtgttgaccggcgttaa

SEQ ID NO: 126038 - DNA, 17 bp, Arabidopsis thaliana
gtgttgacctgcgttga

SEQ ID NO: 126039 - DNA, 17 bp, Arabidopsis thaliana
gtgttgactacacggct

SEQ ID NO: 126040 - DNA, 17 bp, Arabidopsis thaliana
gtgttgactctagtccg

SEQ ID NO: 126041 - DNA, 17 bp, Arabidopsis thaliana
gtgttgactggcgggtc

SEQ ID NO: 126042 - DNA, 17 bp, Arabidopsis thaliana
gtgttgacttgccgtaa

SEQ ID NO: 126043 - DNA, 17 bp, Arabidopsis thaliana
gtgttgagatggattct

SEQ ID NO: 126044 - DNA, 17 bp, Arabidopsis thaliana
gtgttgagggagtctgg

SEQ ID NO: 126045 - DNA, 17 bp, Arabidopsis thaliana
gtgttgatgatgatggt

SEQ ID NO: 126046 - DNA, 17 bp, Arabidopsis thaliana
gtgttgatgttggactt

SEQ ID NO: 126047 - DNA, 17 bp, Arabidopsis thaliana
gtgttgatgttggattt

SEQ ID NO: 126048 - DNA, 17 bp, Arabidopsis thaliana
gtgttgattatcgctgg

SEQ ID NO: 126049 - DNA, 17 bp, Arabidopsis thaliana
gtgttgattgttttctg

SEQ ID NO: 126050 - DNA, 17 bp, Arabidopsis thaliana
gtgttgcaatcattggg

SEQ ID NO: 126051 - DNA, 17 bp, Arabidopsis thaliana
gtgttgcacaaaggaaa

SEQ ID NO: 126052 - DNA, 17 bp, Arabidopsis thaliana
gtgttgcatggccgacc

SEQ ID NO: 126053 - DNA, 17 bp, Arabidopsis thaliana
gtgttgcctaagttcat

SEQ ID NO: 126054 - DNA, 17 bp, Arabidopsis thaliana
gtgttgcgattttggca

SEQ ID NO: 126055 - DNA, 17 bp, Arabidopsis thaliana
gtgttgcggtttaagtt

SEQ ID NO: 126056 - DNA, 17 bp, Arabidopsis thaliana
gtgttgcgtaagacacg

SEQ ID NO: 126057 - DNA, 17 bp, Arabidopsis thaliana
gtgttgcgtttaacggt

SEQ ID NO: 126058 - DNA, 17 bp, Arabidopsis thaliana
gtgttgctcgacatctt

SEQ ID NO: 126059 - DNA, 17 bp, Arabidopsis thaliana
gtgttgctcggcatctt

SEQ ID NO: 126060 - DNA, 17 bp, Arabidopsis thaliana
gtgttgctggcacgtta

SEQ ID NO: 126061 - DNA, 17 bp, Arabidopsis thaliana
gtgttgctggttgtgaa

SEQ ID NO: 126062 - DNA, 17 bp, Arabidopsis thaliana
gtgttgctggttgtgat

SEQ ID NO: 126063 - DNA, 17 bp, Arabidopsis thaliana
gtgttgctttttgatcc

SEQ ID NO: 126064 - DNA, 17 bp, Arabidopsis thaliana
gtgttggaccagattct

SEQ ID NO: 126065 - DNA, 17 bp, Arabidopsis thaliana
gtgttggagacgtgtac

SEQ ID NO: 126066 - DNA, 17 bp, Arabidopsis thaliana
gtgttggatggggtcgc

SEQ ID NO: 126067 - DNA, 17 bp, Arabidopsis thaliana
gtgttggccttcgggat

SEQ ID NO: 126068 - DNA, 17 bp, Arabidopsis thaliana
gtgttggctgaggcaca

SEQ ID NO: 126069 - DNA, 17 bp, Arabidopsis thaliana
gtgttgggttacccatt

SEQ ID NO: 126070 - DNA, 17 bp, Arabidopsis thaliana
gtgttggtcgattaaga

SEQ ID NO: 126071 - DNA, 17 bp, Arabidopsis thaliana
gtgttgtaagactactt

SEQ ID NO: 126072 - DNA, 17 bp, Arabidopsis thaliana
gtgttgtcttagccggt

SEQ ID NO: 126073 - DNA, 17 bp, Arabidopsis thaliana
gtgttgtgctgctcaga

SEQ ID NO: 126074 - DNA, 17 bp, Arabidopsis thaliana
gtgttgtgctgctcgga

SEQ ID NO: 126075 - DNA, 17 bp, Arabidopsis thaliana
gtgttgtgttaccaatc

SEQ ID NO: 126076 - DNA, 17 bp, Arabidopsis thaliana
gtgttgttcgtcggcgg

SEQ ID NO: 126077 - DNA, 17 bp, Arabidopsis thaliana
gtgttgttcgtttgact

SEQ ID NO: 126078 - DNA, 17 bp, Arabidopsis thaliana
gtgttgttcgtttgatt

SEQ ID NO: 126079 - DNA, 17 bp, Arabidopsis thaliana
gtgttgttctcaatgcc

SEQ ID NO: 126080 - DNA, 17 bp, Arabidopsis thaliana
gtgttgtttgactcagg

SEQ ID NO: 126081 - DNA, 17 bp, Arabidopsis thaliana
gtgttgtttgtgattcg

SEQ ID NO: 126082 - DNA, 17 bp, Arabidopsis thaliana
gtgtttaaaccagtcag

SEQ ID NO: 126083 - DNA, 17 bp, Arabidopsis thaliana
gtgtttaaggaaatctc

SEQ ID NO: 126084 - DNA, 17 bp, Arabidopsis thaliana
gtgtttaccgggactga

SEQ ID NO: 126085 - DNA, 17 bp, Arabidopsis thaliana
gtgtttactgtaccgcg

SEQ ID NO: 126086 - DNA, 17 bp, Arabidopsis thaliana
gtgtttaggaacagcgc

SEQ ID NO: 126087 - DNA, 17 bp, Arabidopsis thaliana
gtgtttaggcggaattg

SEQ ID NO: 126088 - DNA, 17 bp, Arabidopsis thaliana
gtgtttatacgggcaaa

SEQ ID NO: 126089 - DNA, 17 bp, Arabidopsis thaliana
gtgtttatacgggcaag

SEQ ID NO: 126090 - DNA, 17 bp, Arabidopsis thaliana
gtgtttatcatcacagc

SEQ ID NO: 126091 - DNA, 17 bp, Arabidopsis thaliana
gtgtttatgttcctcga

SEQ ID NO: 126092 - DNA, 17 bp, Arabidopsis thaliana
gtgtttcacggccaatt

SEQ ID NO: 126093 - DNA, 17 bp, Arabidopsis thaliana
gtgtttcactttgtgtt

SEQ ID NO: 126094 - DNA, 17 bp, Arabidopsis thaliana
gtgtttcaggtgtatgc

SEQ ID NO: 126095 - DNA, 17 bp, Arabidopsis thaliana
gtgtttcatctcgtagc

SEQ ID NO: 126096 - DNA, 17 bp, Arabidopsis thaliana
gtgtttcatgagcttgc

SEQ ID NO: 126097 - DNA, 17 bp, Arabidopsis thaliana
gtgtttccgtcagggcc

SEQ ID NO: 126098 - DNA, 17 bp, Arabidopsis thaliana
gtgtttcgaacatgatc

SEQ ID NO: 126099 - DNA, 17 bp, Arabidopsis thaliana
gtgtttcgacaactcct

SEQ ID NO: 126100 - DNA, 17 bp, Arabidopsis thaliana
gtgtttcgactggcatt

SEQ ID NO: 126101 - DNA, 17 bp, Arabidopsis thaliana
gtgtttcgactgttgca

SEQ ID NO: 126102 - DNA, 17 bp, Arabidopsis thaliana
gtgtttcgattgggcga

SEQ ID NO: 126103 - DNA, 17 bp, Arabidopsis thaliana
gtgtttcgcgtgacata

SEQ ID NO: 126104 - DNA, 17 bp, Arabidopsis thaliana
gtgtttcgctaggtttc

SEQ ID NO: 126105 - DNA, 17 bp, Arabidopsis thaliana
gtgtttcgctgcaagag

SEQ ID NO: 126106 - DNA, 17 bp, Arabidopsis thaliana
gtgtttctacattgacc

SEQ ID NO: 126107 - DNA, 17 bp, Arabidopsis thaliana
gtgtttctcacagactg

SEQ ID NO: 126108 - DNA, 17 bp, Arabidopsis thaliana
gtgtttctcctgatcga

SEQ ID NO: 126109 - DNA, 17 bp, Arabidopsis thaliana
gtgtttctgaaaaggcc

SEQ ID NO: 126110 - DNA, 17 bp, Arabidopsis thaliana
gtgtttcttggattcga

SEQ ID NO: 126111 - DNA, 17 bp, Arabidopsis thaliana
gtgtttctttgatcatg

SEQ ID NO: 126112 - DNA, 17 bp, Arabidopsis thaliana
gtgtttgagaccagtgc

SEQ ID NO: 126113 - DNA, 17 bp, Arabidopsis thaliana
gtgtttgagaccatggg

SEQ ID NO: 126114 - DNA, 17 bp, Arabidopsis thaliana
gtgtttgataccatgca

SEQ ID NO: 126115 - DNA, 17 bp, Arabidopsis thaliana
gtgtttgatctagagca

SEQ ID NO: 126116 - DNA, 17 bp, Arabidopsis thaliana
gtgtttgatgatggagc

SEQ ID NO: 126117 - DNA, 17 bp, Arabidopsis thaliana
gtgtttgatttaagcgg

SEQ ID NO: 126118 - DNA, 17 bp, Arabidopsis thaliana
gtgtttgcagcttcgaa

SEQ ID NO: 126119 - DNA, 17 bp, Arabidopsis thaliana
gtgtttgccgcttcacg

SEQ ID NO: 126120 - DNA, 17 bp, Arabidopsis thaliana
gtgtttgccttcgtatg

SEQ ID NO: 126121 - DNA, 17 bp, Arabidopsis thaliana
gtgtttgcgacatcgat

SEQ ID NO: 126122 - DNA, 17 bp, Arabidopsis thaliana
gtgtttgctatcccttc

SEQ ID NO: 126123 - DNA, 17 bp, Arabidopsis thaliana
gtgtttggatgtgaaac

SEQ ID NO: 126124 - DNA, 17 bp, Arabidopsis thaliana
gtgtttgggatacattt

SEQ ID NO: 126125 - DNA, 17 bp, Arabidopsis thaliana
gtgtttgggctgaagta

SEQ ID NO: 126126 - DNA, 17 bp, Arabidopsis thaliana
gtgtttggtctagtggt

SEQ ID NO: 126127 - DNA, 17 bp, Arabidopsis thaliana
gtgtttgtcgaacctat

SEQ ID NO: 126128 - DNA, 17 bp, Arabidopsis thaliana
gtgtttgttgaccaggc

SEQ ID NO: 126129 - DNA, 17 bp, Arabidopsis thaliana
gtgtttgttgattcatg

SEQ ID NO: 126130 - DNA, 17 bp, Arabidopsis thaliana
gtgttttacgattaacg

SEQ ID NO: 126131 - DNA, 17 bp, Arabidopsis thaliana
gtgttttagcgttttac

SEQ ID NO: 126132 - DNA, 17 bp, Arabidopsis thaliana
gtgttttcaatattcgt

SEQ ID NO: 126133 - DNA, 17 bp, Arabidopsis thaliana
gtgttttcacatggaca

SEQ ID NO: 126134 - DNA, 17 bp, Arabidopsis thaliana
gtgttttcaccacttca

SEQ ID NO: 126135 - DNA, 17 bp, Arabidopsis thaliana
gtgttttcaggtctggg

SEQ ID NO: 126136 - DNA, 17 bp, Arabidopsis thaliana
gtgttttcaggttcgat

SEQ ID NO: 126137 - DNA, 17 bp, Arabidopsis thaliana
gtgttttcatcacttca

SEQ ID NO: 126138 - DNA, 17 bp, Arabidopsis thaliana
gtgttttcgggttaggc

SEQ ID NO: 126139 - DNA, 17 bp, Arabidopsis thaliana
gtgttttcgtcagggcc

SEQ ID NO: 126140 - DNA, 17 bp, Arabidopsis thaliana
gtgttttcgtgatttgg

SEQ ID NO: 126141 - DNA, 17 bp, Arabidopsis thaliana
gtgttttctgtctggtg

SEQ ID NO: 126142 - DNA, 17 bp, Arabidopsis thaliana
gtgttttgagctcactg

SEQ ID NO: 126143 - DNA, 17 bp, Arabidopsis thaliana
gtgttttgagcttcagg

SEQ ID NO: 126144 - DNA, 17 bp, Arabidopsis thaliana
gtgttttgagtgggtag

SEQ ID NO: 126145 - DNA, 17 bp, Arabidopsis thaliana
gtgttttgagtgggtgg

SEQ ID NO: 126146 - DNA, 17 bp, Arabidopsis thaliana
gtgttttgcctcggttt

SEQ ID NO: 126147 - DNA, 17 bp, Arabidopsis thaliana
gtgttttgcgtgacata

SEQ ID NO: 126148 - DNA, 17 bp, Arabidopsis thaliana
gtgttttgctcagaatt

SEQ ID NO: 126149 - DNA, 17 bp, Arabidopsis thaliana
gtgttttgctcatcctt

SEQ ID NO: 126150 - DNA, 17 bp, Arabidopsis thaliana
gtgttttgcttggttgc

SEQ ID NO: 126151 - DNA, 17 bp, Arabidopsis thaliana
gtgttttggaagcctcg

SEQ ID NO: 126152 - DNA, 17 bp, Arabidopsis thaliana
gtgttttgtaagatgtg

SEQ ID NO: 126153 - DNA, 17 bp, Arabidopsis thaliana
gtgttttgtcctcgttc

SEQ ID NO: 126154 - DNA, 17 bp, Arabidopsis thaliana
gtgttttgtcggcgatt

SEQ ID NO: 126155 - DNA, 17 bp, Arabidopsis thaliana
gtgttttgtctgctgca

SEQ ID NO: 126156 - DNA, 17 bp, Arabidopsis thaliana
gtgttttgtgtttccga

SEQ ID NO: 126157 - DNA, 17 bp, Arabidopsis thaliana
gtgtttttcaggaattt

SEQ ID NO: 126158 - DNA, 17 bp, Arabidopsis thaliana
gtgtttttgactgatcc

SEQ ID NO: 126159 - DNA, 17 bp, Arabidopsis thaliana
gtgtttttggcctgatt

SEQ ID NO: 126160 - DNA, 17 bp, Arabidopsis thaliana
gtgtttttggccttgtc

SEQ ID NO: 126161 - DNA, 17 bp, Arabidopsis thaliana
gtgtttttgttattgca

SEQ ID NO: 126162 - DNA, 17 bp, Arabidopsis thaliana
gtgtttttttattatcc

SEQ ID NO: 126163 - DNA, 17 bp, Arabidopsis thaliana
gttaaaacgaccatttc

SEQ ID NO: 126164 - DNA, 17 bp, Arabidopsis thaliana
gttaaaacggccatttc

SEQ ID NO: 126165 - DNA, 17 bp, Arabidopsis thaliana
gttaaaagataacgcag

SEQ ID NO: 126166 - DNA, 17 bp, Arabidopsis thaliana
gttaaaagttaaggtcg

SEQ ID NO: 126167 - DNA, 17 bp, Arabidopsis thaliana
gttaaaatcttcttcgt

SEQ ID NO: 126168 - DNA, 17 bp, Arabidopsis thaliana
gttaaaatggaactatt

SEQ ID NO: 126169 - DNA, 17 bp, Arabidopsis thaliana
gttaaaatggccattta

SEQ ID NO: 126170 - DNA, 17 bp, Arabidopsis thaliana
gttaaaattccggaacc

SEQ ID NO: 126171 - DNA, 17 bp, Arabidopsis thaliana
gttaaacaccgattttg

SEQ ID NO: 126172 - DNA, 17 bp, Arabidopsis thaliana
gttaaacatttgtatcc

SEQ ID NO: 126173 - DNA, 17 bp, Arabidopsis thaliana
gttaaaccttgggatgg

SEQ ID NO: 126174 - DNA, 17 bp, Arabidopsis thaliana
gttaaactctactgcgg

SEQ ID NO: 126175 - DNA, 17 bp, Arabidopsis thaliana
gttaaagagtggattga

SEQ ID NO: 126176 - DNA, 17 bp, Arabidopsis thaliana
gttaaaggactatgcgg

SEQ ID NO: 126177 - DNA, 17 bp, Arabidopsis thaliana
gttaaagtttgggctct

SEQ ID NO: 126178 - DNA, 17 bp, Arabidopsis thaliana
gttaaatcctctgtggt

SEQ ID NO: 126179 - DNA, 17 bp, Arabidopsis thaliana
gttaaattacatgagca

SEQ ID NO: 126180 - DNA, 17 bp, Arabidopsis thaliana
gttaaattggtccgcca

SEQ ID NO: 126181 - DNA, 17 bp, Arabidopsis thaliana
gttaaattggtccgtca

SEQ ID NO: 126182 - DNA, 17 bp, Arabidopsis thaliana
gttaaattgtcaccgcg

SEQ ID NO: 126183 - DNA, 17 bp, Arabidopsis thaliana
gttaaattgtgttgttg

SEQ ID NO: 126184 - DNA, 17 bp, Arabidopsis thaliana
gttaaattgtgtttttg

SEQ ID NO: 126185 - DNA, 17 bp, Arabidopsis thaliana
gttaaatttctcggatg

SEQ ID NO: 126186 - DNA, 17 bp, Arabidopsis thaliana
gttaacaaccacaactg

SEQ ID NO: 126187 - DNA, 17 bp, Arabidopsis thaliana
gttaacaacccctgaat

SEQ ID NO: 126188 - DNA, 17 bp, Arabidopsis thaliana
gttaacacctaagttaa

SEQ ID NO: 126189 - DNA, 17 bp, Arabidopsis thaliana
gttaacagagtcgataa

SEQ ID NO: 126190 - DNA, 17 bp, Arabidopsis thaliana
gttaacagtggcaaagc

SEQ ID NO: 126191 - DNA, 17 bp, Arabidopsis thaliana
gttaacatctctagctt

SEQ ID NO: 126192 - DNA, 17 bp, Arabidopsis thaliana
gttaaccaaacgatcgt

SEQ ID NO: 126193 - DNA, 17 bp, Arabidopsis thaliana
gttaaccaaacggtcgt

SEQ ID NO: 126194 - DNA, 17 bp, Arabidopsis thaliana
gttaaccaaagcccatg

SEQ ID NO: 126195 - DNA, 17 bp, Arabidopsis thaliana
gttaaccaccgtgacaa

SEQ ID NO: 126196 - DNA, 17 bp, Arabidopsis thaliana
gttaaccaccgtgacac

SEQ ID NO: 126197 - DNA, 17 bp, Arabidopsis thaliana
gttaaccagcaggtgct

SEQ ID NO: 126198 - DNA, 17 bp, Arabidopsis thaliana
gttaaccccgttaacgg

SEQ ID NO: 126199 - DNA, 17 bp, Arabidopsis thaliana
gttaacccgggctcaga

SEQ ID NO: 126200 - DNA, 17 bp, Arabidopsis thaliana
gttaacccttcctttga

SEQ ID NO: 126201 - DNA, 17 bp, Arabidopsis thaliana
gttaaccgagtcgtatc

SEQ ID NO: 126202 - DNA, 17 bp, Arabidopsis thaliana
gttaaccgattatgtgt

SEQ ID NO: 126203 - DNA, 17 bp, Arabidopsis thaliana
gttaaccgccggctttg

SEQ ID NO: 126204 - DNA, 17 bp, Arabidopsis thaliana
gttaaccgctggactga

SEQ ID NO: 126205 - DNA, 17 bp, Arabidopsis thaliana
gttaaccgggtggcctt

SEQ ID NO: 126206 - DNA, 17 bp, Arabidopsis thaliana
gttaaccgggtggtctt

SEQ ID NO: 126207 - DNA, 17 bp, Arabidopsis thaliana
gttaaccggtccactaa

SEQ ID NO: 126208 - DNA, 17 bp, Arabidopsis thaliana
gttaacctaaccgctac

SEQ ID NO: 126209 - DNA, 17 bp, Arabidopsis thaliana
gttaacgaacgagacct

SEQ ID NO: 126210 - DNA, 17 bp, Arabidopsis thaliana
gttaacgaccggttgct

SEQ ID NO: 126211 - DNA, 17 bp, Arabidopsis thaliana
gttaacgagatgtttac

SEQ ID NO: 126212 - DNA, 17 bp, Arabidopsis thaliana
gttaacgaggaaaggct

SEQ ID NO: 126213 - DNA, 17 bp, Arabidopsis thaliana
gttaacggaaacttaac

SEQ ID NO: 126214 - DNA, 17 bp, Arabidopsis thaliana
gttaacggaaattttac

SEQ ID NO: 126215 - DNA, 17 bp, Arabidopsis thaliana
gttaacggagacttaac

SEQ ID NO: 126216 - DNA, 17 bp, Arabidopsis thaliana
gttaacggatgataacg

SEQ ID NO: 126217 - DNA, 17 bp, Arabidopsis thaliana
gttaacggtgagtcgat

SEQ ID NO: 126218 - DNA, 17 bp, Arabidopsis thaliana
gttaacggtgtgtctaa

SEQ ID NO: 126219 - DNA, 17 bp, Arabidopsis thaliana
gttaacggttgagtttg

SEQ ID NO: 126220 - DNA, 17 bp, Arabidopsis thaliana
gttaacgtctcatatcc

SEQ ID NO: 126221 - DNA, 17 bp, Arabidopsis thaliana
gttaacgtctcgggatt

SEQ ID NO: 126222 - DNA, 17 bp, Arabidopsis thaliana
gttaacgtctcggggat

SEQ ID NO: 126223 - DNA, 17 bp, Arabidopsis thaliana
gttaacgtcttgggatt

SEQ ID NO: 126224 - DNA, 17 bp, Arabidopsis thaliana
gttaactattcaatcgc

SEQ ID NO: 126225 - DNA, 17 bp, Arabidopsis thaliana
gttaactcagggtgtct

SEQ ID NO: 126226 - DNA, 17 bp, Arabidopsis thaliana
gttaactccgatggcga

SEQ ID NO: 126227 - DNA, 17 bp, Arabidopsis thaliana
gttaactcgctgattaa

SEQ ID NO: 126228 - DNA, 17 bp, Arabidopsis thaliana
gttaactcggatggctg

SEQ ID NO: 126229 - DNA, 17 bp, Arabidopsis thaliana
gttaactcggatgtctg

SEQ ID NO: 126230 - DNA, 17 bp, Arabidopsis thaliana
gttaactcgtgtcaact

SEQ ID NO: 126231 - DNA, 17 bp, Arabidopsis thaliana
gttaactctgacccctt

SEQ ID NO: 126232 - DNA, 17 bp, Arabidopsis thaliana
gttaactgacgcggtaa

SEQ ID NO: 126233 - DNA, 17 bp, Arabidopsis thaliana
gttaacttatggatagc

SEQ ID NO: 126234 - DNA, 17 bp, Arabidopsis thaliana
gttaacttctgttgact

SEQ ID NO: 126235 - DNA, 17 bp, Arabidopsis thaliana
gttaacttgcttgattg

SEQ ID NO: 126236 - DNA, 17 bp, Arabidopsis thaliana
gttaacttggttggtta

SEQ ID NO: 126237 - DNA, 17 bp, Arabidopsis thaliana
gttaacttgtttgcttg

SEQ ID NO: 126238 - DNA, 17 bp, Arabidopsis thaliana
gttaacttttgttgact

SEQ ID NO: 126239 - DNA, 17 bp, Arabidopsis thaliana
gttaagaaaagggttgg

SEQ ID NO: 126240 - DNA, 17 bp, Arabidopsis thaliana
gttaagacggactgcat

SEQ ID NO: 126241 - DNA, 17 bp, Arabidopsis thaliana
gttaagagtctgatgga

SEQ ID NO: 126242 - DNA, 17 bp, Arabidopsis thaliana
gttaagatgatgttcca

SEQ ID NO: 126243 - DNA, 17 bp, Arabidopsis thaliana
gttaagatggccgagtc

SEQ ID NO: 126244 - DNA, 17 bp, Arabidopsis thaliana
gttaagcacagaagttg

SEQ ID NO: 126245 - DNA, 17 bp, Arabidopsis thaliana
gttaagcaggtcagacc

SEQ ID NO: 126246 - DNA, 17 bp, Arabidopsis thaliana
gttaagcatgcttaggc

SEQ ID NO: 126247 - DNA, 17 bp, Arabidopsis thaliana
gttaagccagtttagac

SEQ ID NO: 126248 - DNA, 17 bp, Arabidopsis thaliana
gttaagcccagcgacgt

SEQ ID NO: 126249 - DNA, 17 bp, Arabidopsis thaliana
gttaagcccgcctaaat

SEQ ID NO: 126250 - DNA, 17 bp, Arabidopsis thaliana
gttaagcccgcctacat

SEQ ID NO: 126251 - DNA, 17 bp, Arabidopsis thaliana
gttaagcgactaccgtt

SEQ ID NO: 126252 - DNA, 17 bp, Arabidopsis thaliana
gttaagcggcctggccc

SEQ ID NO: 126253 - DNA, 17 bp, Arabidopsis thaliana
gttaagcgtgcttaggc

SEQ ID NO: 126254 - DNA, 17 bp, Arabidopsis thaliana
gttaagcgtgcttgggc

SEQ ID NO: 126255 - DNA, 17 bp, Arabidopsis thaliana
gttaagcgtgcttgggt

SEQ ID NO: 126256 - DNA, 17 bp, Arabidopsis thaliana
gttaagcgtttaataat

SEQ ID NO: 126257 - DNA, 17 bp, Arabidopsis thaliana
gttaagctcgagttgcg

SEQ ID NO: 126258 - DNA, 17 bp, Arabidopsis thaliana
gttaagctgaggtggag

SEQ ID NO: 126259 - DNA, 17 bp, Arabidopsis thaliana
gttaaggcgtgtgcctg

SEQ ID NO: 126260 - DNA, 17 bp, Arabidopsis thaliana
gttaagggcgaggttca

SEQ ID NO: 126261 - DNA, 17 bp, Arabidopsis thaliana
gttaaggtgtagtgatg

SEQ ID NO: 126262 - DNA, 17 bp, Arabidopsis thaliana
gttaagtcaactggcga

SEQ ID NO: 126263 - DNA, 17 bp, Arabidopsis thaliana
gttaagtcagattttgt

SEQ ID NO: 126264 - DNA, 17 bp, Arabidopsis thaliana
gttaagtccgcattggt

SEQ ID NO: 126265 - DNA, 17 bp, Arabidopsis thaliana
gttaagtcggatgtctg

SEQ ID NO: 126266 - DNA, 17 bp, Arabidopsis thaliana
gttaagtcgtgcgccgt

SEQ ID NO: 126267 - DNA, 17 bp, Arabidopsis thaliana
gttaagtctatttgatt

SEQ ID NO: 126268 - DNA, 17 bp, Arabidopsis thaliana
gttaagtctctgggatc

SEQ ID NO: 126269 - DNA, 17 bp, Arabidopsis thaliana
gttaagtgactacatcg

SEQ ID NO: 126270 - DNA, 17 bp, Arabidopsis thaliana
gttaagtgccacgtgtc

SEQ ID NO: 126271 - DNA, 17 bp, Arabidopsis thaliana
gttaagtggatgattgg

SEQ ID NO: 126272 - DNA, 17 bp, Arabidopsis thaliana
gttaagttctgctactg

SEQ ID NO: 126273 - DNA, 17 bp, Arabidopsis thaliana
gttaagttgacggcgta

SEQ ID NO: 126274 - DNA, 17 bp, Arabidopsis thaliana
gttaagttgtgttatct

SEQ ID NO: 126275 - DNA, 17 bp, Arabidopsis thaliana
gttaagtttcaccgtta

SEQ ID NO: 126276 - DNA, 17 bp, Arabidopsis thaliana
gttaagttttgttgact

SEQ ID NO: 126277 - DNA, 17 bp, Arabidopsis thaliana
gttaatacttgggttac

SEQ ID NO: 126278 - DNA, 17 bp, Arabidopsis thaliana
gttaatatggttgagtc

SEQ ID NO: 126279 - DNA, 17 bp, Arabidopsis thaliana
gttaatcatagcttgac

SEQ ID NO: 126280 - DNA, 17 bp, Arabidopsis thaliana
gttaatccaccgattca

SEQ ID NO: 126281 - DNA, 17 bp, Arabidopsis thaliana
gttaatcccagaggcaa

SEQ ID NO: 126282 - DNA, 17 bp, Arabidopsis thaliana
gttaatcccagaggcca

SEQ ID NO: 126283 - DNA, 17 bp, Arabidopsis thaliana
gttaatccgacaggttc

SEQ ID NO: 126284 - DNA, 17 bp, Arabidopsis thaliana
gttaatccgacaggttg

SEQ ID NO: 126285 - DNA, 17 bp, Arabidopsis thaliana
gttaatcggaaacttcg

SEQ ID NO: 126286 - DNA, 17 bp, Arabidopsis thaliana
gttaatctcgttcctct

SEQ ID NO: 126287 - DNA, 17 bp, Arabidopsis thaliana
gttaatctgttgtcgat

SEQ ID NO: 126288 - DNA, 17 bp, Arabidopsis thaliana
gttaatgacgaagccat

SEQ ID NO: 126289 - DNA, 17 bp, Arabidopsis thaliana
gttaatgactgataacg

SEQ ID NO: 126290 - DNA, 17 bp, Arabidopsis thaliana
gttaatgactgatagcg

SEQ ID NO: 126291 - DNA, 17 bp, Arabidopsis thaliana
gttaatgattgataaag

SEQ ID NO: 126292 - DNA, 17 bp, Arabidopsis thaliana
gttaatggacatggacc

SEQ ID NO: 126293 - DNA, 17 bp, Arabidopsis thaliana
gttaatggacatgggcc

SEQ ID NO: 126294 - DNA, 17 bp, Arabidopsis thaliana
gttaatggatttgcgga

SEQ ID NO: 126295 - DNA, 17 bp, Arabidopsis thaliana
gttaatgttttacggcg

SEQ ID NO: 126296 - DNA, 17 bp, Arabidopsis thaliana
gttaattattgacgtgg

SEQ ID NO: 126297 - DNA, 17 bp, Arabidopsis thaliana
gttaattcagccgtggt

SEQ ID NO: 126298 - DNA, 17 bp, Arabidopsis thaliana
gttaattctctggtgac

SEQ ID NO: 126299 - DNA, 17 bp, Arabidopsis thaliana
gttaattgagttgccgc

SEQ ID NO: 126300 - DNA, 17 bp, Arabidopsis thaliana
gttaattgatgacatgt

SEQ ID NO: 126301 - DNA, 17 bp, Arabidopsis thaliana
gttacaaaataaccatg

SEQ ID NO: 126302 - DNA, 17 bp, Arabidopsis thaliana
gttacaaaatctacgca

SEQ ID NO: 126303 - DNA, 17 bp, Arabidopsis thaliana
gttacaaacgggtttgc

SEQ ID NO: 126304 - DNA, 17 bp, Arabidopsis thaliana
gttacaaagggtgttgg

SEQ ID NO: 126305 - DNA, 17 bp, Arabidopsis thaliana
gttacaacaagtgcgac

SEQ ID NO: 126306 - DNA, 17 bp, Arabidopsis thaliana
gttacaacgtgcgactg

SEQ ID NO: 126307 - DNA, 17 bp, Arabidopsis thaliana
gttacaactagtgcacc

SEQ ID NO: 126308 - DNA, 17 bp, Arabidopsis thaliana
gttacaactagtgcagc

SEQ ID NO: 126309 - DNA, 17 bp, Arabidopsis thaliana
gttacaacttttttcac

SEQ ID NO: 126310 - DNA, 17 bp, Arabidopsis thaliana
gttacaactttttttac

SEQ ID NO: 126311 - DNA, 17 bp, Arabidopsis thaliana
gttacaagcctttccag

SEQ ID NO: 126312 - DNA, 17 bp, Arabidopsis thaliana
gttacaagcctttcgca

SEQ ID NO: 126313 - DNA, 17 bp, Arabidopsis thaliana
gttacaaggggcggacc

SEQ ID NO: 126314 - DNA, 17 bp, Arabidopsis thaliana
gttacaatctcagtttt

SEQ ID NO: 126315 - DNA, 17 bp, Arabidopsis thaliana
gttacaatgccgaccta

SEQ ID NO: 126316 - DNA, 17 bp, Arabidopsis thaliana
gttacaatgcgcctcta

SEQ ID NO: 126317 - DNA, 17 bp, Arabidopsis thaliana
gttacaattctgcgagg

SEQ ID NO: 126318 - DNA, 17 bp, Arabidopsis thaliana
gttacacatgtaagcgg

SEQ ID NO: 126319 - DNA, 17 bp, Arabidopsis thaliana
gttacactaactaacgc

SEQ ID NO: 126320 - DNA, 17 bp, Arabidopsis thaliana
gttacactttgcgccgt

SEQ ID NO: 126321 - DNA, 17 bp, Arabidopsis thaliana
gttacagaatcatctaa

SEQ ID NO: 126322 - DNA, 17 bp, Arabidopsis thaliana
gttacagacaaaccaac

SEQ ID NO: 126323 - DNA, 17 bp, Arabidopsis thaliana
gttacagacaaaccaat

SEQ ID NO: 126324 - DNA, 17 bp, Arabidopsis thaliana
gttacagacaatgtggt

SEQ ID NO: 126325 - DNA, 17 bp, Arabidopsis thaliana
gttacagactcaggcct

SEQ ID NO: 126326 - DNA, 17 bp, Arabidopsis thaliana
gttacagagtggatttc

SEQ ID NO: 126327 - DNA, 17 bp, Arabidopsis thaliana
gttacagcactgttgcg

SEQ ID NO: 126328 - DNA, 17 bp, Arabidopsis thaliana
gttacagcactttgtcg

SEQ ID NO: 126329 - DNA, 17 bp, Arabidopsis thaliana
gttacagcattgttgcg

SEQ ID NO: 126330 - DNA, 17 bp, Arabidopsis thaliana
gttacagcggcccaacc

SEQ ID NO: 126331 - DNA, 17 bp, Arabidopsis thaliana
gttacagcggcccaagc

SEQ ID NO: 126332 - DNA, 17 bp, Arabidopsis thaliana
gttacagctacagccaa

SEQ ID NO: 126333 - DNA, 17 bp, Arabidopsis thaliana
gttacagggctaatcca

SEQ ID NO: 126334 - DNA, 17 bp, Arabidopsis thaliana
gttacaggtgtgttgct

SEQ ID NO: 126335 - DNA, 17 bp, Arabidopsis thaliana
gttacagtcttatttca

SEQ ID NO: 126336 - DNA, 17 bp, Arabidopsis thaliana
gttacagtgcaaggcgt

SEQ ID NO: 126337 - DNA, 17 bp, Arabidopsis thaliana
gttacagttgcgggcgg

SEQ ID NO: 126338 - DNA, 17 bp, Arabidopsis thaliana
gttacagtttgctaaat

SEQ ID NO: 126339 - DNA, 17 bp, Arabidopsis thaliana
gttacatagacgattct

SEQ ID NO: 126340 - DNA, 17 bp, Arabidopsis thaliana
gttacatattgtggttt

SEQ ID NO: 126341 - DNA, 17 bp, Arabidopsis thaliana
gttacatcactggtcga

SEQ ID NO: 126342 - DNA, 17 bp, Arabidopsis thaliana
gttacatcagatttgga

SEQ ID NO: 126343 - DNA, 17 bp, Arabidopsis thaliana
gttacatcttacacccg

SEQ ID NO: 126344 - DNA, 17 bp, Arabidopsis thaliana
gttacatgaagcggttt

SEQ ID NO: 126345 - DNA, 17 bp, Arabidopsis thaliana
gttacatgagcgagaga

SEQ ID NO: 126346 - DNA, 17 bp, Arabidopsis thaliana
gttacatgcgttgacta

SEQ ID NO: 126347 - DNA, 17 bp, Arabidopsis thaliana
gttacatgggtgactta

SEQ ID NO: 126348 - DNA, 17 bp, Arabidopsis thaliana
gttacatgtctaatggg

SEQ ID NO: 126349 - DNA, 17 bp, Arabidopsis thaliana
gttacatgtctttcgtc

SEQ ID NO: 126350 - DNA, 17 bp, Arabidopsis thaliana
gttacatgtgtcaaacg

SEQ ID NO: 126351 - DNA, 17 bp, Arabidopsis thaliana
gttacatttgtattcgg

SEQ ID NO: 126352 - DNA, 17 bp, Arabidopsis thaliana
gttaccaaaatcgcgat

SEQ ID NO: 126353 - DNA, 17 bp, Arabidopsis thaliana
gttaccacagggataac

SEQ ID NO: 126354 - DNA, 17 bp, Arabidopsis thaliana
gttaccacattgcccct

SEQ ID NO: 126355 - DNA, 17 bp, Arabidopsis thaliana
gttaccacgacgagcca

SEQ ID NO: 126356 - DNA, 17 bp, Arabidopsis thaliana
gttaccattcgaaccct

SEQ ID NO: 126357 - DNA, 17 bp, Arabidopsis thaliana
gttacccgatctttcgc

SEQ ID NO: 126358 - DNA, 17 bp, Arabidopsis thaliana
gttaccgaccagccaac

SEQ ID NO: 126359 - DNA, 17 bp, Arabidopsis thaliana
gttaccgaccagccgac

SEQ ID NO: 126360 - DNA, 17 bp, Arabidopsis thaliana
gttaccgaccagccgag

SEQ ID NO: 126361 - DNA, 17 bp, Arabidopsis thaliana
gttaccgcacgcggttg

SEQ ID NO: 126362 - DNA, 17 bp, Arabidopsis thaliana
gttaccgcgggcaatcg

SEQ ID NO: 126363 - DNA, 17 bp, Arabidopsis thaliana
gttaccggaacagtttg

SEQ ID NO: 126364 - DNA, 17 bp, Arabidopsis thaliana
gttaccggccctacaaa

SEQ ID NO: 126365 - DNA, 17 bp, Arabidopsis thaliana
gttaccgttatcaccgc

SEQ ID NO: 126366 - DNA, 17 bp, Arabidopsis thaliana
gttaccgttgccgctgc

SEQ ID NO: 126367 - DNA, 17 bp, Arabidopsis thaliana
gttaccgttgtggagcg

SEQ ID NO: 126368 - DNA, 17 bp, Arabidopsis thaliana
gttacctgccagccggc

SEQ ID NO: 126369 - DNA, 17 bp, Arabidopsis thaliana
gttacctggaccttggt

SEQ ID NO: 126370 - DNA, 17 bp, Arabidopsis thaliana
gttacctgtcggtttag

SEQ ID NO: 126371 - DNA, 17 bp, Arabidopsis thaliana
gttacctgtctgagaag

SEQ ID NO: 126372 - DNA, 17 bp, Arabidopsis thaliana
gttacctttgacgtcct

SEQ ID NO: 126373 - DNA, 17 bp, Arabidopsis thaliana
gttacgaatctctaact

SEQ ID NO: 126374 - DNA, 17 bp, Arabidopsis thaliana
gttacgactctcggcaa

SEQ ID NO: 126375 - DNA, 17 bp, Arabidopsis thaliana
gttacgactggttgatc

SEQ ID NO: 126376 - DNA, 17 bp, Arabidopsis thaliana
gttacgagactacccgt

SEQ ID NO: 126377 - DNA, 17 bp, Arabidopsis thaliana
gttacgatggaacgaca

SEQ ID NO: 126378 - DNA, 17 bp, Arabidopsis thaliana
gttacgatggaacgccc

SEQ ID NO: 126379 - DNA, 17 bp, Arabidopsis thaliana
gttacgcctttaagatc

SEQ ID NO: 126380 - DNA, 17 bp, Arabidopsis thaliana
gttacgcggattacggt

SEQ ID NO: 126381 - DNA, 17 bp, Arabidopsis thaliana
gttacgcgtgcttgggt

SEQ ID NO: 126382 - DNA, 17 bp, Arabidopsis thaliana
gttacgctatcattttc

SEQ ID NO: 126383 - DNA, 17 bp, Arabidopsis thaliana
gttacgctcgatgataa

SEQ ID NO: 126384 - DNA, 17 bp, Arabidopsis thaliana
gttacgctttcaccctt

SEQ ID NO: 126385 - DNA, 17 bp, Arabidopsis thaliana
gttacggaatctcaggt

SEQ ID NO: 126386 - DNA, 17 bp, Arabidopsis thaliana
gttacggaccggttctt

SEQ ID NO: 126387 - DNA, 17 bp, Arabidopsis thaliana
gttacggatcatatctc

SEQ ID NO: 126388 - DNA, 17 bp, Arabidopsis thaliana
gttacggattcgacaaa

SEQ ID NO: 126389 - DNA, 17 bp, Arabidopsis thaliana
gttacggccgagttgag

SEQ ID NO: 126390 - DNA, 17 bp, Arabidopsis thaliana
gttacggcggttggggc

SEQ ID NO: 126391 - DNA, 17 bp, Arabidopsis thaliana
gttacggctgagttaat

SEQ ID NO: 126392 - DNA, 17 bp, Arabidopsis thaliana
gttacgggagaagtgcg

SEQ ID NO: 126393 - DNA, 17 bp, Arabidopsis thaliana
gttacgggcggtagcgg

SEQ ID NO: 126394 - DNA, 17 bp, Arabidopsis thaliana
gttacgggctttggaga

SEQ ID NO: 126395 - DNA, 17 bp, Arabidopsis thaliana
gttacggggtgctgtaa

SEQ ID NO: 126396 - DNA, 17 bp, Arabidopsis thaliana
gttacgggtttggcagg

SEQ ID NO: 126397 - DNA, 17 bp, Arabidopsis thaliana
gttacggtgcccaactg

SEQ ID NO: 126398 - DNA, 17 bp, Arabidopsis thaliana
gttacggttaataaacg

SEQ ID NO: 126399 - DNA, 17 bp, Arabidopsis thaliana
gttacggttcgaaatgc

SEQ ID NO: 126400 - DNA, 17 bp, Arabidopsis thaliana
gttacgtcctgctaaac

SEQ ID NO: 126401 - DNA, 17 bp, Arabidopsis thaliana
gttactaactcacgaga

SEQ ID NO: 126402 - DNA, 17 bp, Arabidopsis thaliana
gttactaactcatagga

SEQ ID NO: 126403 - DNA, 17 bp, Arabidopsis thaliana
gttactaactcttaaga

SEQ ID NO: 126404 - DNA, 17 bp, Arabidopsis thaliana
gttactaagtaacgtcc

SEQ ID NO: 126405 - DNA, 17 bp, Arabidopsis thaliana
gttactaattcatgatc

SEQ ID NO: 126406 - DNA, 17 bp, Arabidopsis thaliana
gttactaattgagccta

SEQ ID NO: 126407 - DNA, 17 bp, Arabidopsis thaliana
gttactaattgggtcta

SEQ ID NO: 126408 - DNA, 17 bp, Arabidopsis thaliana
gttactagattttgacc

SEQ ID NO: 126409 - DNA, 17 bp, Arabidopsis thaliana
gttactattagaaccgc

SEQ ID NO: 126410 - DNA, 17 bp, Arabidopsis thaliana
gttactatttgaaccgc

SEQ ID NO: 126411 - DNA, 17 bp, Arabidopsis thaliana
gttactatttgaaccgg

SEQ ID NO: 126412 - DNA, 17 bp, Arabidopsis thaliana
gttactatttgaactgc

SEQ ID NO: 126413 - DNA, 17 bp, Arabidopsis thaliana
gttactatttgaatcgc

SEQ ID NO: 126414 - DNA, 17 bp, Arabidopsis thaliana
gttactcaaatcgctct

SEQ ID NO: 126415 - DNA, 17 bp, Arabidopsis thaliana
gttactcatatgcccaa

SEQ ID NO: 126416 - DNA, 17 bp, Arabidopsis thaliana
gttactcgaccgcggct

SEQ ID NO: 126417 - DNA, 17 bp, Arabidopsis thaliana
gttactcgacctaatac

SEQ ID NO: 126418 - DNA, 17 bp, Arabidopsis thaliana
gttactcgacctgtcac

SEQ ID NO: 126419 - DNA, 17 bp, Arabidopsis thaliana
gttactcgacctgttac

SEQ ID NO: 126420 - DNA, 17 bp, Arabidopsis thaliana
gttactcgatcgagggc

SEQ ID NO: 126421 - DNA, 17 bp, Arabidopsis thaliana
gttactcgatctcatac

SEQ ID NO: 126422 - DNA, 17 bp, Arabidopsis thaliana
gttactcgcaaattaga

SEQ ID NO: 126423 - DNA, 17 bp, Arabidopsis thaliana
gttactcgccatcttta

SEQ ID NO: 126424 - DNA, 17 bp, Arabidopsis thaliana
gttactcgctacagtga

SEQ ID NO: 126425 - DNA, 17 bp, Arabidopsis thaliana
gttactctagggataac

SEQ ID NO: 126426 - DNA, 17 bp, Arabidopsis thaliana
gttactctgttgcgccg

SEQ ID NO: 126427 - DNA, 17 bp, Arabidopsis thaliana
gttactcttcggcagac

SEQ ID NO: 126428 - DNA, 17 bp, Arabidopsis thaliana
gttactctttgaaccga

SEQ ID NO: 126429 - DNA, 17 bp, Arabidopsis thaliana
gttactgaaccaaccac

SEQ ID NO: 126430 - DNA, 17 bp, Arabidopsis thaliana
gttactgaaccgacctc

SEQ ID NO: 126431 - DNA, 17 bp, Arabidopsis thaliana
gttactgaggctgaagc

SEQ ID NO: 126432 - DNA, 17 bp, Arabidopsis thaliana
gttactgcactgttgcg

SEQ ID NO: 126433 - DNA, 17 bp, Arabidopsis thaliana
gttactgcgatgggtta

SEQ ID NO: 126434 - DNA, 17 bp, Arabidopsis thaliana
gttactgctccggtcgg

SEQ ID NO: 126435 - DNA, 17 bp, Arabidopsis thaliana
gttactgcttcagaacc

SEQ ID NO: 126436 - DNA, 17 bp, Arabidopsis thaliana
gttactggaccaccaac

SEQ ID NO: 126437 - DNA, 17 bp, Arabidopsis thaliana
gttactggaccaccaag

SEQ ID NO: 126438 - DNA, 17 bp, Arabidopsis thaliana
gttactggaccaccatg

SEQ ID NO: 126439 - DNA, 17 bp, Arabidopsis thaliana
gttactggctcatcttg

SEQ ID NO: 126440 - DNA, 17 bp, Arabidopsis thaliana
gttactggctcgttact

SEQ ID NO: 126441 - DNA, 17 bp, Arabidopsis thaliana
gttactgggccaccatg

SEQ ID NO: 126442 - DNA, 17 bp, Arabidopsis thaliana
gttactggttccgttgg

SEQ ID NO: 126443 - DNA, 17 bp, Arabidopsis thaliana
gttactggtttcagcga

SEQ ID NO: 126444 - DNA, 17 bp, Arabidopsis thaliana
gttactgtcgctggtcg

SEQ ID NO: 126445 - DNA, 17 bp, Arabidopsis thaliana
gttactgtttcggaact

SEQ ID NO: 126446 - DNA, 17 bp, Arabidopsis thaliana
gttacttattgatgtgg

SEQ ID NO: 126447 - DNA, 17 bp, Arabidopsis thaliana
gttacttcaactagttt

SEQ ID NO: 126448 - DNA, 17 bp, Arabidopsis thaliana
gttacttcccctggggg

SEQ ID NO: 126449 - DNA, 17 bp, Arabidopsis thaliana
gttacttcctctttggg

SEQ ID NO: 126450 - DNA, 17 bp, Arabidopsis thaliana
gttacttcgctgcctta

SEQ ID NO: 126451 - DNA, 17 bp, Arabidopsis thaliana
gttacttctcgcttatc

SEQ ID NO: 126452 - DNA, 17 bp, Arabidopsis thaliana
gttacttcttgcctatc

SEQ ID NO: 126453 - DNA, 17 bp, Arabidopsis thaliana
gttacttgctgtgatct

SEQ ID NO: 126454 - DNA, 17 bp, Arabidopsis thaliana
gttacttgctgtggtga

SEQ ID NO: 126455 - DNA, 17 bp, Arabidopsis thaliana
gttacttgggaaccgtg

SEQ ID NO: 126456 - DNA, 17 bp, Arabidopsis thaliana
gttactttggattggtt

SEQ ID NO: 126457 - DNA, 17 bp, Arabidopsis thaliana
gttactttgggattggt

SEQ ID NO: 126458 - DNA, 17 bp, Arabidopsis thaliana
gttacttttcgcttttc

SEQ ID NO: 126459 - DNA, 17 bp, Arabidopsis thaliana
gttagaaaaatctgcgg

SEQ ID NO: 126460 - DNA, 17 bp, Arabidopsis thaliana
gttagaaaccaccactg

SEQ ID NO: 126461 - DNA, 17 bp, Arabidopsis thaliana
gttagaaacccaaaacg

SEQ ID NO: 126462 - DNA, 17 bp, Arabidopsis thaliana
gttagaaacgcgttttg

SEQ ID NO: 126463 - DNA, 17 bp, Arabidopsis thaliana
gttagaaatgcagacgg

SEQ ID NO: 126464 - DNA, 17 bp, Arabidopsis thaliana
gttagaaatgcagccgg

SEQ ID NO: 126465 - DNA, 17 bp, Arabidopsis thaliana
gttagaaatgcaggcgg

SEQ ID NO: 126466 - DNA, 17 bp, Arabidopsis thaliana
gttagaacctacattcc

SEQ ID NO: 126467 - DNA, 17 bp, Arabidopsis thaliana
gttagacaaaccactgc

SEQ ID NO: 126468 - DNA, 17 bp, Arabidopsis thaliana
gttagaccgtcgtgaaa

SEQ ID NO: 126469 - DNA, 17 bp, Arabidopsis thaliana
gttagacttggcacgtt

SEQ ID NO: 126470 - DNA, 17 bp, Arabidopsis thaliana
gttagacttggccgtga

SEQ ID NO: 126471 - DNA, 17 bp, Arabidopsis thaliana
gttagagactcatcaaa

SEQ ID NO: 126472 - DNA, 17 bp, Arabidopsis thaliana
gttagagataggttgaa

SEQ ID NO: 126473 - DNA, 17 bp, Arabidopsis thaliana
gttagagattcgtaacg

SEQ ID NO: 126474 - DNA, 17 bp, Arabidopsis thaliana
gttagagcacccgtttg

SEQ ID NO: 126475 - DNA, 17 bp, Arabidopsis thaliana
gttagagcgagactggg

SEQ ID NO: 126476 - DNA, 17 bp, Arabidopsis thaliana
gttagagctgtcaattg

SEQ ID NO: 126477 - DNA, 17 bp, Arabidopsis thaliana
gttagagcttgtggctg

SEQ ID NO: 126478 - DNA, 17 bp, Arabidopsis thaliana
gttagaggtctttgcgg

SEQ ID NO: 126479 - DNA, 17 bp, Arabidopsis thaliana
gttagataccgctttgg

SEQ ID NO: 126480 - DNA, 17 bp, Arabidopsis thaliana
gttagatactgctttga

SEQ ID NO: 126481 - DNA, 17 bp, Arabidopsis thaliana
gttagatagtgcctcca

SEQ ID NO: 126482 - DNA, 17 bp, Arabidopsis thaliana
gttagatggaatccgtt

SEQ ID NO: 126483 - DNA, 17 bp, Arabidopsis thaliana
gttagatggacctgtta

SEQ ID NO: 126484 - DNA, 17 bp, Arabidopsis thaliana
gttagatggtaagacag

SEQ ID NO: 126485 - DNA, 17 bp, Arabidopsis thaliana
gttagatggtaggacgg

SEQ ID NO: 126486 - DNA, 17 bp, Arabidopsis thaliana
gttagatttcggttcgg

SEQ ID NO: 126487 - DNA, 17 bp, Arabidopsis thaliana
gttagcaacttcgaaaa

SEQ ID NO: 126488 - DNA, 17 bp, Arabidopsis thaliana
gttagcaagtccggtgg

SEQ ID NO: 126489 - DNA, 17 bp, Arabidopsis thaliana
gttagcaccgaggatga

SEQ ID NO: 126490 - DNA, 17 bp, Arabidopsis thaliana
gttagcacctaatcatt

SEQ ID NO: 126491 - DNA, 17 bp, Arabidopsis thaliana
gttagcaggacggattt

SEQ ID NO: 126492 - DNA, 17 bp, Arabidopsis thaliana
gttagcagtcttgacat

SEQ ID NO: 126493 - DNA, 17 bp, Arabidopsis thaliana
gttagccaaggccttag

SEQ ID NO: 126494 - DNA, 17 bp, Arabidopsis thaliana
gttagccaaggcgttag

SEQ ID NO: 126495 - DNA, 17 bp, Arabidopsis thaliana
gttagccagccaaaaag

SEQ ID NO: 126496 - DNA, 17 bp, Arabidopsis thaliana
gttagcggttcaatcca

SEQ ID NO: 126497 - DNA, 17 bp, Arabidopsis thaliana
gttagcgtgtaaggctt

SEQ ID NO: 126498 - DNA, 17 bp, Arabidopsis thaliana
gttaggaatgcaccgaa

SEQ ID NO: 126499 - DNA, 17 bp, Arabidopsis thaliana
gttaggaatttcggttc

SEQ ID NO: 126500 - DNA, 17 bp, Arabidopsis thaliana
gttaggacactagactc

SEQ ID NO: 126501 - DNA, 17 bp, Arabidopsis thaliana
gttaggacctgattgag

SEQ ID NO: 126502 - DNA, 17 bp, Arabidopsis thaliana
gttaggacctgattggg

SEQ ID NO: 126503 - DNA, 17 bp, Arabidopsis thaliana
gttaggaccttgtctca

SEQ ID NO: 126504 - DNA, 17 bp, Arabidopsis thaliana
gttaggacgatgattat

SEQ ID NO: 126505 - DNA, 17 bp, Arabidopsis thaliana
gttaggacgggtttgtg

SEQ ID NO: 126506 - DNA, 17 bp, Arabidopsis thaliana
gttaggagtctgacatg

SEQ ID NO: 126507 - DNA, 17 bp, Arabidopsis thaliana
gttaggatcctgtttga

SEQ ID NO: 126508 - DNA, 17 bp, Arabidopsis thaliana
gttaggattgctcgctc

SEQ ID NO: 126509 - DNA, 17 bp, Arabidopsis thaliana
gttaggcactaatccac

SEQ ID NO: 126510 - DNA, 17 bp, Arabidopsis thaliana
gttaggccacctgtatt

SEQ ID NO: 126511 - DNA, 17 bp, Arabidopsis thaliana
gttaggccgttacgcta

SEQ ID NO: 126512 - DNA, 17 bp, Arabidopsis thaliana
gttaggcgaccccctcg

SEQ ID NO: 126513 - DNA, 17 bp, Arabidopsis thaliana
gttaggcgcgtgctgca

SEQ ID NO: 126514 - DNA, 17 bp, Arabidopsis thaliana
gttaggcggttagtttc

SEQ ID NO: 126515 - DNA, 17 bp, Arabidopsis thaliana
gttagggcacgtctgcc

SEQ ID NO: 126516 - DNA, 17 bp, Arabidopsis thaliana
gttagggcgtgaacttt

SEQ ID NO: 126517 - DNA, 17 bp, Arabidopsis thaliana
gttaggggtcttggaat

SEQ ID NO: 126518 - DNA, 17 bp, Arabidopsis thaliana
gttagggtccttcgatc

SEQ ID NO: 126519 - DNA, 17 bp, Arabidopsis thaliana
gttagggttcatgggtt

SEQ ID NO: 126520 - DNA, 17 bp, Arabidopsis thaliana
gttaggtgatcatccgc

SEQ ID NO: 126521 - DNA, 17 bp, Arabidopsis thaliana
gttaggtttttcggaat

SEQ ID NO: 126522 - DNA, 17 bp, Arabidopsis thaliana
gttagtaactcacaggg

SEQ ID NO: 126523 - DNA, 17 bp, Arabidopsis thaliana
gttagtatttgaaccgc

SEQ ID NO: 126524 - DNA, 17 bp, Arabidopsis thaliana
gttagtcaagccgccag

SEQ ID NO: 126525 - DNA, 17 bp, Arabidopsis thaliana
gttagtccgcagcgatt

SEQ ID NO: 126526 - DNA, 17 bp, Arabidopsis thaliana
gttagtcgcatcctgta

SEQ ID NO: 126527 - DNA, 17 bp, Arabidopsis thaliana
gttagtcgcgtgctgca

SEQ ID NO: 126528 - DNA, 17 bp, Arabidopsis thaliana
gttagtctcatcctgta

SEQ ID NO: 126529 - DNA, 17 bp, Arabidopsis thaliana
gttagtctccagtggcg

SEQ ID NO: 126530 - DNA, 17 bp, Arabidopsis thaliana
gttagtctctgttcttc

SEQ ID NO: 126531 - DNA, 17 bp, Arabidopsis thaliana
gttagtctctgtttttc

SEQ ID NO: 126532 - DNA, 17 bp, Arabidopsis thaliana
gttagtcttcgatggtg

SEQ ID NO: 126533 - DNA, 17 bp, Arabidopsis thaliana
gttagtgaccggcttat

SEQ ID NO: 126534 - DNA, 17 bp, Arabidopsis thaliana
gttagtgactgctccga

SEQ ID NO: 126535 - DNA, 17 bp, Arabidopsis thaliana
gttagtgatgttgctga

SEQ ID NO: 126536 - DNA, 17 bp, Arabidopsis thaliana
gttagtgcgaactaatc

SEQ ID NO: 126537 - DNA, 17 bp, Arabidopsis thaliana
gttagtgcggactaatt

SEQ ID NO: 126538 - DNA, 17 bp, Arabidopsis thaliana
gttagtggagcgatttg

SEQ ID NO: 126539 - DNA, 17 bp, Arabidopsis thaliana
gttagtggattgatcac

SEQ ID NO: 126540 - DNA, 17 bp, Arabidopsis thaliana
gttagtgtcgttcgaca

SEQ ID NO: 126541 - DNA, 17 bp, Arabidopsis thaliana
gttagtgttcattgctg

SEQ ID NO: 126542 - DNA, 17 bp, Arabidopsis thaliana
gttagttagtcgccaaa

SEQ ID NO: 126543 - DNA, 17 bp, Arabidopsis thaliana
gttagttccgttccaag

SEQ ID NO: 126544 - DNA, 17 bp, Arabidopsis thaliana
gttagttgaccttggct

SEQ ID NO: 126545 - DNA, 17 bp, Arabidopsis thaliana
gttagttgcctctgtta

SEQ ID NO: 126546 - DNA, 17 bp, Arabidopsis thaliana
gttagttgtctagtgct

SEQ ID NO: 126547 - DNA, 17 bp, Arabidopsis thaliana
gttagtttgcgaagaag

SEQ ID NO: 126548 - DNA, 17 bp, Arabidopsis thaliana
gttagttttgggaattg

SEQ ID NO: 126549 - DNA, 17 bp, Arabidopsis thaliana
gttataacattgctctg

SEQ ID NO: 126550 - DNA, 17 bp, Arabidopsis thaliana
gttatacaacgggtgaa

SEQ ID NO: 126551 - DNA, 17 bp, Arabidopsis thaliana
gttatacaatggtgctg

SEQ ID NO: 126552 - DNA, 17 bp, Arabidopsis thaliana
gttatagattatgctct

SEQ ID NO: 126553 - DNA, 17 bp, Arabidopsis thaliana
gttatagcgatgatgac

SEQ ID NO: 126554 - DNA, 17 bp, Arabidopsis thaliana
gttatcaagtgccatgt

SEQ ID NO: 126555 - DNA, 17 bp, Arabidopsis thaliana
gttatcagaagacctgc

SEQ ID NO: 126556 - DNA, 17 bp, Arabidopsis thaliana
gttatcagcacgaacga

SEQ ID NO: 126557 - DNA, 17 bp, Arabidopsis thaliana
gttatcagcacgaatcc

SEQ ID NO: 126558 - DNA, 17 bp, Arabidopsis thaliana
gttatcagcacgagtcc

SEQ ID NO: 126559 - DNA, 17 bp, Arabidopsis thaliana
gttatcagcacgatcgt

SEQ ID NO: 126560 - DNA, 17 bp, Arabidopsis thaliana
gttatcagcacgccctt

SEQ ID NO: 126561 - DNA, 17 bp, Arabidopsis thaliana
gttatcagcgattttcg

SEQ ID NO: 126562 - DNA, 17 bp, Arabidopsis thaliana
gttatcagcgctctttg

SEQ ID NO: 126563 - DNA, 17 bp, Arabidopsis thaliana
gttatcagcttcagttg

SEQ ID NO: 126564 - DNA, 17 bp, Arabidopsis thaliana
gttatcaggaaaagact

SEQ ID NO: 126565 - DNA, 17 bp, Arabidopsis thaliana
gttatcaggtcaaccag

SEQ ID NO: 126566 - DNA, 17 bp, Arabidopsis thaliana
gttatcagtaagagcgt

SEQ ID NO: 126567 - DNA, 17 bp, Arabidopsis thaliana
gttatcatccgcactat

SEQ ID NO: 126568 - DNA, 17 bp, Arabidopsis thaliana
gttatcattcggagcct

SEQ ID NO: 126569 - DNA, 17 bp, Arabidopsis thaliana
gttatccaggatccgaa

SEQ ID NO: 126570 - DNA, 17 bp, Arabidopsis thaliana
gttatccaggatctgaa

SEQ ID NO: 126571 - DNA, 17 bp, Arabidopsis thaliana
gttatcccgcatgtcag

SEQ ID NO: 126572 - DNA, 17 bp, Arabidopsis thaliana
gttatccctctcatact

SEQ ID NO: 126573 - DNA, 17 bp, Arabidopsis thaliana
gttatcccttgatgtgc

SEQ ID NO: 126574 - DNA, 17 bp, Arabidopsis thaliana
gttatccggaatgattg

SEQ ID NO: 126575 - DNA, 17 bp, Arabidopsis thaliana
gttatccggcgaaccag

SEQ ID NO: 126576 - DNA, 17 bp, Arabidopsis thaliana
gttatccggcggaccag

SEQ ID NO: 126577 - DNA, 17 bp, Arabidopsis thaliana
gttatccggcggcggtg

SEQ ID NO: 126578 - DNA, 17 bp, Arabidopsis thaliana
gttatccggtttaagct

SEQ ID NO: 126579 - DNA, 17 bp, Arabidopsis thaliana
gttatcgaacggtggtc

SEQ ID NO: 126580 - DNA, 17 bp, Arabidopsis thaliana
gttatcgactctgttaa

SEQ ID NO: 126581 - DNA, 17 bp, Arabidopsis thaliana
gttatcgcagctaaaat

SEQ ID NO: 126582 - DNA, 17 bp, Arabidopsis thaliana
gttatcgggtcaaccag

SEQ ID NO: 126583 - DNA, 17 bp, Arabidopsis thaliana
gttatcgggtccatttt

SEQ ID NO: 126584 - DNA, 17 bp, Arabidopsis thaliana
gttatcgggtccgtttt

SEQ ID NO: 126585 - DNA, 17 bp, Arabidopsis thaliana
gttatcggttcaaggac

SEQ ID NO: 126586 - DNA, 17 bp, Arabidopsis thaliana
gttatcggttcgtttta

SEQ ID NO: 126587 - DNA, 17 bp, Arabidopsis thaliana
gttatcgtctcattcag

SEQ ID NO: 126588 - DNA, 17 bp, Arabidopsis thaliana
gttatcgttgacacggc

SEQ ID NO: 126589 - DNA, 17 bp, Arabidopsis thaliana
gttatcgttgacccggc

SEQ ID NO: 126590 - DNA, 17 bp, Arabidopsis thaliana
gttatctaggatccgaa

SEQ ID NO: 126591 - DNA, 17 bp, Arabidopsis thaliana
gttatctatggctgaga

SEQ ID NO: 126592 - DNA, 17 bp, Arabidopsis thaliana
gttatctcgcagataaa

SEQ ID NO: 126593 - DNA, 17 bp, Arabidopsis thaliana
gttatctgattgcttag

SEQ ID NO: 126594 - DNA, 17 bp, Arabidopsis thaliana
gttatctggcgtaacag

SEQ ID NO: 126595 - DNA, 17 bp, Arabidopsis thaliana
gttatcttgatgatgct

SEQ ID NO: 126596 - DNA, 17 bp, Arabidopsis thaliana
gttatcttgtgattgga

SEQ ID NO: 126597 - DNA, 17 bp, Arabidopsis thaliana
gttatgaacttcaagct

SEQ ID NO: 126598 - DNA, 17 bp, Arabidopsis thaliana
gttatgacctgcttgtc

SEQ ID NO: 126599 - DNA, 17 bp, Arabidopsis thaliana
gttatgagacgttagcc

SEQ ID NO: 126600 - DNA, 17 bp, Arabidopsis thaliana
gttatgagtttgtgaca

SEQ ID NO: 126601 - DNA, 17 bp, Arabidopsis thaliana
gttatgatctcgcgagt

SEQ ID NO: 126602 - DNA, 17 bp, Arabidopsis thaliana
gttatgattatcacagc

SEQ ID NO: 126603 - DNA, 17 bp, Arabidopsis thaliana
gttatgatttcgggtct

SEQ ID NO: 126604 - DNA, 17 bp, Arabidopsis thaliana
gttatgcactcggatgt

SEQ ID NO: 126605 - DNA, 17 bp, Arabidopsis thaliana
gttatgcaggaactgcg

SEQ ID NO: 126606 - DNA, 17 bp, Arabidopsis thaliana
gttatgcgtcctatctt

SEQ ID NO: 126607 - DNA, 17 bp, Arabidopsis thaliana
gttatgcgttacaaacc

SEQ ID NO: 126608 - DNA, 17 bp, Arabidopsis thaliana
gttatgctcattggaca

SEQ ID NO: 126609 - DNA, 17 bp, Arabidopsis thaliana
gttatgctccaaatttc

SEQ ID NO: 126610 - DNA, 17 bp, Arabidopsis thaliana
gttatgcttctgttgat

SEQ ID NO: 126611 - DNA, 17 bp, Arabidopsis thaliana
gttatggacttgttgta

SEQ ID NO: 126612 - DNA, 17 bp, Arabidopsis thaliana
gttatgggacattgacg

SEQ ID NO: 126613 - DNA, 17 bp, Arabidopsis thaliana
gttatgggttgacccag

SEQ ID NO: 126614 - DNA, 17 bp, Arabidopsis thaliana
gttatggtttacgcgat

SEQ ID NO: 126615 - DNA, 17 bp, Arabidopsis thaliana
gttatggtttgacccaa

SEQ ID NO: 126616 - DNA, 17 bp, Arabidopsis thaliana
gttatgtattcgaccca

SEQ ID NO: 126617 - DNA, 17 bp, Arabidopsis thaliana
gttatgtcagataatcc

SEQ ID NO: 126618 - DNA, 17 bp, Arabidopsis thaliana
gttatgtctgccgaacc

SEQ ID NO: 126619 - DNA, 17 bp, Arabidopsis thaliana
gttatgtctttggagcc

SEQ ID NO: 126620 - DNA, 17 bp, Arabidopsis thaliana
gttatgtgacggctgag

SEQ ID NO: 126621 - DNA, 17 bp, Arabidopsis thaliana
gttatgtggatccgtgg

SEQ ID NO: 126622 - DNA, 17 bp, Arabidopsis thaliana
gttatgtgtggctgaga

SEQ ID NO: 126623 - DNA, 17 bp, Arabidopsis thaliana
gttattaagggcctgac

SEQ ID NO: 126624 - DNA, 17 bp, Arabidopsis thaliana
gttattaagtaacatcc

SEQ ID NO: 126625 - DNA, 17 bp, Arabidopsis thaliana
gttattaagtaacgtcc

SEQ ID NO: 126626 - DNA, 17 bp, Arabidopsis thaliana
gttattacagtgcggta

SEQ ID NO: 126627 - DNA, 17 bp, Arabidopsis thaliana
gttattaccagatttac

SEQ ID NO: 126628 - DNA, 17 bp, Arabidopsis thaliana
gttattacgcagatgat

SEQ ID NO: 126629 - DNA, 17 bp, Arabidopsis thaliana
gttattagatctacgac

SEQ ID NO: 126630 - DNA, 17 bp, Arabidopsis thaliana
gttattattgcccagtt

SEQ ID NO: 126631 - DNA, 17 bp, Arabidopsis thaliana
gttattatttgaaccgc

SEQ ID NO: 126632 - DNA, 17 bp, Arabidopsis thaliana
gttattcactacagcag

SEQ ID NO: 126633 - DNA, 17 bp, Arabidopsis thaliana
gttattcactgactgaa

SEQ ID NO: 126634 - DNA, 17 bp, Arabidopsis thaliana
gttattcagttgtcccg

SEQ ID NO: 126635 - DNA, 17 bp, Arabidopsis thaliana
gttattcagtttcacgg

SEQ ID NO: 126636 - DNA, 17 bp, Arabidopsis thaliana
gttattcgaaccgatga

SEQ ID NO: 126637 - DNA, 17 bp, Arabidopsis thaliana
gttattcgacctgatac

SEQ ID NO: 126638 - DNA, 17 bp, Arabidopsis thaliana
gttattcgcagtttcgt

SEQ ID NO: 126639 - DNA, 17 bp, Arabidopsis thaliana
gttattcgcatcctgta

SEQ ID NO: 126640 - DNA, 17 bp, Arabidopsis thaliana
gttattcgggttagtga

SEQ ID NO: 126641 - DNA, 17 bp, Arabidopsis thaliana
gttattcgtggcgattg

SEQ ID NO: 126642 - DNA, 17 bp, Arabidopsis thaliana
gttattctattccacct

SEQ ID NO: 126643 - DNA, 17 bp, Arabidopsis thaliana
gttattctattcttcct

SEQ ID NO: 126644 - DNA, 17 bp, Arabidopsis thaliana
gttattctgcaaatttc

SEQ ID NO: 126645 - DNA, 17 bp, Arabidopsis thaliana
gttattgaatgatccgg

SEQ ID NO: 126646 - DNA, 17 bp, Arabidopsis thaliana
gttattgaccgttgatt

SEQ ID NO: 126647 - DNA, 17 bp, Arabidopsis thaliana
gttattgatcgtcatcg

SEQ ID NO: 126648 - DNA, 17 bp, Arabidopsis thaliana
gttattggaacccggtt

SEQ ID NO: 126649 - DNA, 17 bp, Arabidopsis thaliana
gttattggaaccggtta

SEQ ID NO: 126650 - DNA, 17 bp, Arabidopsis thaliana
gttattggaccaccatg

SEQ ID NO: 126651 - DNA, 17 bp, Arabidopsis thaliana
gttattggcccaatggt

SEQ ID NO: 126652 - DNA, 17 bp, Arabidopsis thaliana
gttattggcccgtctac

SEQ ID NO: 126653 - DNA, 17 bp, Arabidopsis thaliana
gttattgggctgcttct

SEQ ID NO: 126654 - DNA, 17 bp, Arabidopsis thaliana
gttattggggtgcttct

SEQ ID NO: 126655 - DNA, 17 bp, Arabidopsis thaliana
gttattggtgcgcttga

SEQ ID NO: 126656 - DNA, 17 bp, Arabidopsis thaliana
gttattgtcctggttgc

SEQ ID NO: 126657 - DNA, 17 bp, Arabidopsis thaliana
gttatttagggtccgat

SEQ ID NO: 126658 - DNA, 17 bp, Arabidopsis thaliana
gttatttcccagtgtga

SEQ ID NO: 126659 - DNA, 17 bp, Arabidopsis thaliana
gttatttcgtgggccag

SEQ ID NO: 126660 - DNA, 17 bp, Arabidopsis thaliana
gttatttctgactatca

SEQ ID NO: 126661 - DNA, 17 bp, Arabidopsis thaliana
gttatttctgcccagtg

SEQ ID NO: 126662 - DNA, 17 bp, Arabidopsis thaliana
gttatttctgcgaactt

SEQ ID NO: 126663 - DNA, 17 bp, Arabidopsis thaliana
gttatttcttggttgtc

SEQ ID NO: 126664 - DNA, 17 bp, Arabidopsis thaliana
gttatttcttggttttc

SEQ ID NO: 126665 - DNA, 17 bp, Arabidopsis thaliana
gttattttcatactcac

SEQ ID NO: 126666 - DNA, 17 bp, Arabidopsis thaliana
gttcaaaacggcttggt

SEQ ID NO: 126667 - DNA, 17 bp, Arabidopsis thaliana
gttcaaaagagtcattt

SEQ ID NO: 126668 - DNA, 17 bp, Arabidopsis thaliana
gttcaaaatacaacagg

SEQ ID NO: 126669 - DNA, 17 bp, Arabidopsis thaliana
gttcaaaatccaaagga

SEQ ID NO: 126670 - DNA, 17 bp, Arabidopsis thaliana
gttcaaaattagactct

SEQ ID NO: 126671 - DNA, 17 bp, Arabidopsis thaliana
gttcaaaattcgggtcc

SEQ ID NO: 126672 - DNA, 17 bp, Arabidopsis thaliana
gttcaaacacttggatc

SEQ ID NO: 126673 - DNA, 17 bp, Arabidopsis thaliana
gttcaaacccagcagtg

SEQ ID NO: 126674 - DNA, 17 bp, Arabidopsis thaliana
gttcaaaccccacttct

SEQ ID NO: 126675 - DNA, 17 bp, Arabidopsis thaliana
gttcaaaccctgctgtc

SEQ ID NO: 126676 - DNA, 17 bp, Arabidopsis thaliana
gttcaaacctggtgaag

SEQ ID NO: 126677 - DNA, 17 bp, Arabidopsis thaliana
gttcaaacgacgtcgta

SEQ ID NO: 126678 - DNA, 17 bp, Arabidopsis thaliana
gttcaaagacatgttgg

SEQ ID NO: 126679 - DNA, 17 bp, Arabidopsis thaliana
gttcaaagactcgatgg

SEQ ID NO: 126680 - DNA, 17 bp, Arabidopsis thaliana
gttcaaagcaaattgac

SEQ ID NO: 126681 - DNA, 17 bp, Arabidopsis thaliana
gttcaaagctgacaaga

SEQ ID NO: 126682 - DNA, 17 bp, Arabidopsis thaliana
gttcaaatccagctcgg

SEQ ID NO: 126683 - DNA, 17 bp, Arabidopsis thaliana
gttcaaatccaggatcc

SEQ ID NO: 126684 - DNA, 17 bp, Arabidopsis thaliana
gttcaaatccaggatga

SEQ ID NO: 126685 - DNA, 17 bp, Arabidopsis thaliana
gttcaaatccaggatgg

SEQ ID NO: 126686 - DNA, 17 bp, Arabidopsis thaliana
gttcaaatcccacagtt

SEQ ID NO: 126687 - DNA, 17 bp, Arabidopsis thaliana
gttcaaatccgataaga

SEQ ID NO: 126688 - DNA, 17 bp, Arabidopsis thaliana
gttcaaatccgataagg

SEQ ID NO: 126689 - DNA, 17 bp, Arabidopsis thaliana
gttcaaatccgggtgcc

SEQ ID NO: 126690 - DNA, 17 bp, Arabidopsis thaliana
gttcaaatcctacagag

SEQ ID NO: 126691 - DNA, 17 bp, Arabidopsis thaliana
gttcaaatcctacttgg

SEQ ID NO: 126692 - DNA, 17 bp, Arabidopsis thaliana
gttcaaatcctatagag

SEQ ID NO: 126693 - DNA, 17 bp, Arabidopsis thaliana
gttcaaatcctattgaa

SEQ ID NO: 126694 - DNA, 17 bp, Arabidopsis thaliana
gttcaaatcctattgga

SEQ ID NO: 126695 - DNA, 17 bp, Arabidopsis thaliana
gttcaaatcctgtctcc

SEQ ID NO: 126696 - DNA, 17 bp, Arabidopsis thaliana
gttcaaatctcggtagg

SEQ ID NO: 126697 - DNA, 17 bp, Arabidopsis thaliana
gttcaaatcttgtctcc

SEQ ID NO: 126698 - DNA, 17 bp, Arabidopsis thaliana
gttcaaatgcgactgcg

SEQ ID NO: 126699 - DNA, 17 bp, Arabidopsis thaliana
gttcaaatgggccaatg

SEQ ID NO: 126700 - DNA, 17 bp, Arabidopsis thaliana
gttcaaattttctacgc

SEQ ID NO: 126701 - DNA, 17 bp, Arabidopsis thaliana
gttcaacatccaaggga

SEQ ID NO: 126702 - DNA, 17 bp, Arabidopsis thaliana
gttcaaccaagtccgga

SEQ ID NO: 126703 - DNA, 17 bp, Arabidopsis thaliana
gttcaaccggaacaacc

SEQ ID NO: 126704 - DNA, 17 bp, Arabidopsis thaliana
gttcaaccggttcactg

SEQ ID NO: 126705 - DNA, 17 bp, Arabidopsis thaliana
gttcaaccgtgtcaatt

SEQ ID NO: 126706 - DNA, 17 bp, Arabidopsis thaliana
gttcaacctgcatgggc

SEQ ID NO: 126707 - DNA, 17 bp, Arabidopsis thaliana
gttcaacggtgatgtgc

SEQ ID NO: 126708 - DNA, 17 bp, Arabidopsis thaliana
gttcaacgtttcgaagc

SEQ ID NO: 126709 - DNA, 17 bp, Arabidopsis thaliana
gttcaactccggctgcg

SEQ ID NO: 126710 - DNA, 17 bp, Arabidopsis thaliana
gttcaactgccgacgtt

SEQ ID NO: 126711 - DNA, 17 bp, Arabidopsis thaliana
gttcaactgcggataaa

SEQ ID NO: 126712 - DNA, 17 bp, Arabidopsis thaliana
gttcaactgcggtacgt

SEQ ID NO: 126713 - DNA, 17 bp, Arabidopsis thaliana
gttcaactggtaaagat

SEQ ID NO: 126714 - DNA, 17 bp, Arabidopsis thaliana
gttcaactggttcatcg

SEQ ID NO: 126715 - DNA, 17 bp, Arabidopsis thaliana
gttcaactgtttgtgaa

SEQ ID NO: 126716 - DNA, 17 bp, Arabidopsis thaliana
gttcaactgtttgtgat

SEQ ID NO: 126717 - DNA, 17 bp, Arabidopsis thaliana
gttcaacttgaggattt

SEQ ID NO: 126718 - DNA, 17 bp, Arabidopsis thaliana
gttcaagaaagcgttag

SEQ ID NO: 126719 - DNA, 17 bp, Arabidopsis thaliana
gttcaagactaagttac

SEQ ID NO: 126720 - DNA, 17 bp, Arabidopsis thaliana
gttcaagacttttctca

SEQ ID NO: 126721 - DNA, 17 bp, Arabidopsis thaliana
gttcaagacttttctga

SEQ ID NO: 126722 - DNA, 17 bp, Arabidopsis thaliana
gttcaagattatgtgtg

SEQ ID NO: 126723 - DNA, 17 bp, Arabidopsis thaliana
gttcaagattcgacttt

SEQ ID NO: 126724 - DNA, 17 bp, Arabidopsis thaliana
gttcaagcaacgcccat

SEQ ID NO: 126725 - DNA, 17 bp, Arabidopsis thaliana
gttcaagccaatgtgtt

SEQ ID NO: 126726 - DNA, 17 bp, Arabidopsis thaliana
gttcaagcccgcaagga

SEQ ID NO: 126727 - DNA, 17 bp, Arabidopsis thaliana
gttcaagcctgaagacc

SEQ ID NO: 126728 - DNA, 17 bp, Arabidopsis thaliana
gttcaagccttgctacg

SEQ ID NO: 126729 - DNA, 17 bp, Arabidopsis thaliana
gttcaaggacgcaaggt

SEQ ID NO: 126730 - DNA, 17 bp, Arabidopsis thaliana
gttcaaggacttagggc

SEQ ID NO: 126731 - DNA, 17 bp, Arabidopsis thaliana
gttcaaggatgacttgc

SEQ ID NO: 126732 - DNA, 17 bp, Arabidopsis thaliana
gttcaaggcaaggttag

SEQ ID NO: 126733 - DNA, 17 bp, Arabidopsis thaliana
gttcaaggctaagttac

SEQ ID NO: 126734 - DNA, 17 bp, Arabidopsis thaliana
gttcaaggcttcttgag

SEQ ID NO: 126735 - DNA, 17 bp, Arabidopsis thaliana
gttcaagggaatgggtg

SEQ ID NO: 126736 - DNA, 17 bp, Arabidopsis thaliana
gttcaagtcccaactac

SEQ ID NO: 126737 - DNA, 17 bp, Arabidopsis thaliana
gttcaagtccccctttc

SEQ ID NO: 126738 - DNA, 17 bp, Arabidopsis thaliana
gttcaagtccctctatc

SEQ ID NO: 126739 - DNA, 17 bp, Arabidopsis thaliana
gttcaagtctcggtggg

SEQ ID NO: 126740 - DNA, 17 bp, Arabidopsis thaliana
gttcaataagacctctt

SEQ ID NO: 126741 - DNA, 17 bp, Arabidopsis thaliana
gttcaatcaccattcgg

SEQ ID NO: 126742 - DNA, 17 bp, Arabidopsis thaliana
gttcaatcattcattgg

SEQ ID NO: 126743 - DNA, 17 bp, Arabidopsis thaliana
gttcaatccgctgtagg

SEQ ID NO: 126744 - DNA, 17 bp, Arabidopsis thaliana
gttcaatccgcttcgac

SEQ ID NO: 126745 - DNA, 17 bp, Arabidopsis thaliana
gttcaatcctgggcagc

SEQ ID NO: 126746 - DNA, 17 bp, Arabidopsis thaliana
gttcaatcgacggttgc

SEQ ID NO: 126747 - DNA, 17 bp, Arabidopsis thaliana
gttcaatcggttcaccg

SEQ ID NO: 126748 - DNA, 17 bp, Arabidopsis thaliana
gttcaatctccattcgg

SEQ ID NO: 126749 - DNA, 17 bp, Arabidopsis thaliana
gttcaatctgaatgcac

SEQ ID NO: 126750 - DNA, 17 bp, Arabidopsis thaliana
gttcaatgaagaactag

SEQ ID NO: 126751 - DNA, 17 bp, Arabidopsis thaliana
gttcaatgactggtttg

SEQ ID NO: 126752 - DNA, 17 bp, Arabidopsis thaliana
gttcaatgcccaggtag

SEQ ID NO: 126753 - DNA, 17 bp, Arabidopsis thaliana
gttcaatgggctttcga

SEQ ID NO: 126754 - DNA, 17 bp, Arabidopsis thaliana
gttcaatgtctgggact

SEQ ID NO: 126755 - DNA, 17 bp, Arabidopsis thaliana
gttcaatgttctcattg

SEQ ID NO: 126756 - DNA, 17 bp, Arabidopsis thaliana
gttcaatgttttcgcct

SEQ ID NO: 126757 - DNA, 17 bp, Arabidopsis thaliana
gttcaattatggatagg

SEQ ID NO: 126758 - DNA, 17 bp, Arabidopsis thaliana
gttcaattcaccaggat

SEQ ID NO: 126759 - DNA, 17 bp, Arabidopsis thaliana
gttcaattcccatcggt

SEQ ID NO: 126760 - DNA, 17 bp, Arabidopsis thaliana
gttcaattcccggctgg

SEQ ID NO: 126761 - DNA, 17 bp, Arabidopsis thaliana
gttcaattcccgtcgtt

SEQ ID NO: 126762 - DNA, 17 bp, Arabidopsis thaliana
gttcaattcccgttggg

SEQ ID NO: 126763 - DNA, 17 bp, Arabidopsis thaliana
gttcaattcgattcggt

SEQ ID NO: 126764 - DNA, 17 bp, Arabidopsis thaliana
gttcaattcgcttatca

SEQ ID NO: 126765 - DNA, 17 bp, Arabidopsis thaliana
gttcaattctcggaatg

SEQ ID NO: 126766 - DNA, 17 bp, Arabidopsis thaliana
gttcaattggagacgta

SEQ ID NO: 126767 - DNA, 17 bp, Arabidopsis thaliana
gttcaattggaggcgta

SEQ ID NO: 126768 - DNA, 17 bp, Arabidopsis thaliana
gttcacaatgcgttcta

SEQ ID NO: 126769 - DNA, 17 bp, Arabidopsis thaliana
gttcacactacgattat

SEQ ID NO: 126770 - DNA, 17 bp, Arabidopsis thaliana
gttcacactatgcgttc

SEQ ID NO: 126771 - DNA, 17 bp, Arabidopsis thaliana
gttcacagaatcggcgg

SEQ ID NO: 126772 - DNA, 17 bp, Arabidopsis thaliana
gttcacagactcggcgg

SEQ ID NO: 126773 - DNA, 17 bp, Arabidopsis thaliana
gttcacagctttcttga

SEQ ID NO: 126774 - DNA, 17 bp, Arabidopsis thaliana
gttcacatacagcattg

SEQ ID NO: 126775 - DNA, 17 bp, Arabidopsis thaliana
gttcacatatccgattt

SEQ ID NO: 126776 - DNA, 17 bp, Arabidopsis thaliana
gttcacatcaacttcac

SEQ ID NO: 126777 - DNA, 17 bp, Arabidopsis thaliana
gttcacattattcttga

SEQ ID NO: 126778 - DNA, 17 bp, Arabidopsis thaliana
gttcaccaagatcacgc

SEQ ID NO: 126779 - DNA, 17 bp, Arabidopsis thaliana
gttcaccacgattgtac

SEQ ID NO: 126780 - DNA, 17 bp, Arabidopsis thaliana
gttcacccgggcgaagc

SEQ ID NO: 126781 - DNA, 17 bp, Arabidopsis thaliana
gttcacccgggctcaga

SEQ ID NO: 126782 - DNA, 17 bp, Arabidopsis thaliana
gttcaccgagtcacgag

SEQ ID NO: 126783 - DNA, 17 bp, Arabidopsis thaliana
gttcacgattctgattc

SEQ ID NO: 126784 - DNA, 17 bp, Arabidopsis thaliana
gttcacgattgggcgac

SEQ ID NO: 126785 - DNA, 17 bp, Arabidopsis thaliana
gttcacgcgctggatga

SEQ ID NO: 126786 - DNA, 17 bp, Arabidopsis thaliana
gttcacgctccatggtt

SEQ ID NO: 126787 - DNA, 17 bp, Arabidopsis thaliana
gttcacgctcttcttct

SEQ ID NO: 126788 - DNA, 17 bp, Arabidopsis thaliana
gttcacggattgcagga

SEQ ID NO: 126789 - DNA, 17 bp, Arabidopsis thaliana
gttcacgtctgatcggc

SEQ ID NO: 126790 - DNA, 17 bp, Arabidopsis thaliana
gttcacgtctgcctggg

SEQ ID NO: 126791 - DNA, 17 bp, Arabidopsis thaliana
gttcactaagattctac

SEQ ID NO: 126792 - DNA, 17 bp, Arabidopsis thaliana
gttcactcgcatggttc

SEQ ID NO: 126793 - DNA, 17 bp, Arabidopsis thaliana
gttcactgctctatctg

SEQ ID NO: 126794 - DNA, 17 bp, Arabidopsis thaliana
gttcactggaccgggtg

SEQ ID NO: 126795 - DNA, 17 bp, Arabidopsis thaliana
gttcactgttggcaacc

SEQ ID NO: 126796 - DNA, 17 bp, Arabidopsis thaliana
gttcacttggaaatgaa

SEQ ID NO: 126797 - DNA, 17 bp, Arabidopsis thaliana
gttcacttgtcctgtcc

SEQ ID NO: 126798 - DNA, 17 bp, Arabidopsis thaliana
gttcactttccgttaac

SEQ ID NO: 126799 - DNA, 17 bp, Arabidopsis thaliana
gttcagaacgtcgtgag

SEQ ID NO: 126800 - DNA, 17 bp, Arabidopsis thaliana
gttcagaactaagggcc

SEQ ID NO: 126801 - DNA, 17 bp, Arabidopsis thaliana
gttcagaatctcattcg

SEQ ID NO: 126802 - DNA, 17 bp, Arabidopsis thaliana
gttcagaattccattcg

SEQ ID NO: 126803 - DNA, 17 bp, Arabidopsis thaliana
gttcagaattcgtctca

SEQ ID NO: 126804 - DNA, 17 bp, Arabidopsis thaliana
gttcagacctagtgaag

SEQ ID NO: 126805 - DNA, 17 bp, Arabidopsis thaliana
gttcagacctgatgaag

SEQ ID NO: 126806 - DNA, 17 bp, Arabidopsis thaliana
gttcagacctggtgaag

SEQ ID NO: 126807 - DNA, 17 bp, Arabidopsis thaliana
gttcagacgaaatgatg

SEQ ID NO: 126808 - DNA, 17 bp, Arabidopsis thaliana
gttcagacggtggacca

SEQ ID NO: 126809 - DNA, 17 bp, Arabidopsis thaliana
gttcagacttggtgaag

SEQ ID NO: 126810 - DNA, 17 bp, Arabidopsis thaliana
gttcagagaatcgactt

SEQ ID NO: 126811 - DNA, 17 bp, Arabidopsis thaliana
gttcagagcgtaagacc

SEQ ID NO: 126812 - DNA, 17 bp, Arabidopsis thaliana
gttcagagcttactaag

SEQ ID NO: 126813 - DNA, 17 bp, Arabidopsis thaliana
gttcagagttcactacg

SEQ ID NO: 126814 - DNA, 17 bp, Arabidopsis thaliana
gttcagagttcactact

SEQ ID NO: 126815 - DNA, 17 bp, Arabidopsis thaliana
gttcagatcccacagct

SEQ ID NO: 126816 - DNA, 17 bp, Arabidopsis thaliana
gttcagatcccacagtt

SEQ ID NO: 126817 - DNA, 17 bp, Arabidopsis thaliana
gttcagatccggtggag

SEQ ID NO: 126818 - DNA, 17 bp, Arabidopsis thaliana
gttcagatcctggataa

SEQ ID NO: 126819 - DNA, 17 bp, Arabidopsis thaliana
gttcagatcgccgacgt

SEQ ID NO: 126820 - DNA, 17 bp, Arabidopsis thaliana
gttcagatcgtgaacta

SEQ ID NO: 126821 - DNA, 17 bp, Arabidopsis thaliana
gttcagatctcggtagg

SEQ ID NO: 126822 - DNA, 17 bp, Arabidopsis thaliana
gttcagatctggtgaag

SEQ ID NO: 126823 - DNA, 17 bp, Arabidopsis thaliana
gttcagatctggtggag

SEQ ID NO: 126824 - DNA, 17 bp, Arabidopsis thaliana
gttcagatgtgatgaag

SEQ ID NO: 126825 - DNA, 17 bp, Arabidopsis thaliana
gttcagattgccatttt

SEQ ID NO: 126826 - DNA, 17 bp, Arabidopsis thaliana
gttcagatttcggctga

SEQ ID NO: 126827 - DNA, 17 bp, Arabidopsis thaliana
gttcagatttggtgaag

SEQ ID NO: 126828 - DNA, 17 bp, Arabidopsis thaliana
gttcagcaaggcgagga

SEQ ID NO: 126829 - DNA, 17 bp, Arabidopsis thaliana
gttcagccaagtgaatg

SEQ ID NO: 126830 - DNA, 17 bp, Arabidopsis thaliana
gttcagccatattgcaa

SEQ ID NO: 126831 - DNA, 17 bp, Arabidopsis thaliana
gttcagccctttgtcgc

SEQ ID NO: 126832 - DNA, 17 bp, Arabidopsis thaliana
gttcagccgtaacgcga

SEQ ID NO: 126833 - DNA, 17 bp, Arabidopsis thaliana
gttcagccgtcgctgcg

SEQ ID NO: 126834 - DNA, 17 bp, Arabidopsis thaliana
gttcagcctttgccgat

SEQ ID NO: 126835 - DNA, 17 bp, Arabidopsis thaliana
gttcagcgactccattt

SEQ ID NO: 126836 - DNA, 17 bp, Arabidopsis thaliana
gttcagcggatgttgct

SEQ ID NO: 126837 - DNA, 17 bp, Arabidopsis thaliana
gttcagcgtctcatttg

SEQ ID NO: 126838 - DNA, 17 bp, Arabidopsis thaliana
gttcagctacatccagg

SEQ ID NO: 126839 - DNA, 17 bp, Arabidopsis thaliana
gttcaggaaaatgagct

SEQ ID NO: 126840 - DNA, 17 bp, Arabidopsis thaliana
gttcaggagttgcgggg

SEQ ID NO: 126841 - DNA, 17 bp, Arabidopsis thaliana
gttcaggatgaacgctg

SEQ ID NO: 126842 - DNA, 17 bp, Arabidopsis thaliana
gttcaggatttcgtgtc

SEQ ID NO: 126843 - DNA, 17 bp, Arabidopsis thaliana
gttcaggcaatgtaagg

SEQ ID NO: 126844 - DNA, 17 bp, Arabidopsis thaliana
gttcaggcagtgctctt

SEQ ID NO: 126845 - DNA, 17 bp, Arabidopsis thaliana
gttcaggcccaaaatcc

SEQ ID NO: 126846 - DNA, 17 bp, Arabidopsis thaliana
gttcaggccctccttct

SEQ ID NO: 126847 - DNA, 17 bp, Arabidopsis thaliana
gttcaggctcggagcca

SEQ ID NO: 126848 - DNA, 17 bp, Arabidopsis thaliana
gttcaggctgtgttgct

SEQ ID NO: 126849 - DNA, 17 bp, Arabidopsis thaliana
gttcagggactaatcaa

SEQ ID NO: 126850 - DNA, 17 bp, Arabidopsis thaliana
gttcagggatgtttgtt

SEQ ID NO: 126851 - DNA, 17 bp, Arabidopsis thaliana
gttcaggggttaagtaa

SEQ ID NO: 126852 - DNA, 17 bp, Arabidopsis thaliana
gttcagggtcagagtca

SEQ ID NO: 126853 - DNA, 17 bp, Arabidopsis thaliana
gttcaggtccaaaggct

SEQ ID NO: 126854 - DNA, 17 bp, Arabidopsis thaliana
gttcaggtccagacata

SEQ ID NO: 126855 - DNA, 17 bp, Arabidopsis thaliana
gttcaggtcgggctgag

SEQ ID NO: 126856 - DNA, 17 bp, Arabidopsis thaliana
gttcaggtcgggctgga

SEQ ID NO: 126857 - DNA, 17 bp, Arabidopsis thaliana
gttcaggtcgggtcttt

SEQ ID NO: 126858 - DNA, 17 bp, Arabidopsis thaliana
gttcaggtctaatcggg

SEQ ID NO: 126859 - DNA, 17 bp, Arabidopsis thaliana
gttcaggtctcggtgga

SEQ ID NO: 126860 - DNA, 17 bp, Arabidopsis thaliana
gttcaggtctcggtggg

SEQ ID NO: 126861 - DNA, 17 bp, Arabidopsis thaliana
gttcaggtgctgtttga

SEQ ID NO: 126862 - DNA, 17 bp, Arabidopsis thaliana
gttcaggttcctgctgg

SEQ ID NO: 126863 - DNA, 17 bp, Arabidopsis thaliana
gttcaggttcgacgcca

SEQ ID NO: 126864 - DNA, 17 bp, Arabidopsis thaliana
gttcaggttcggttcga

SEQ ID NO: 126865 - DNA, 17 bp, Arabidopsis thaliana
gttcaggttcggttcgg

SEQ ID NO: 126866 - DNA, 17 bp, Arabidopsis thaliana
gttcaggttcgttgatc

SEQ ID NO: 126867 - DNA, 17 bp, Arabidopsis thaliana
gttcaggtttgattttc

SEQ ID NO: 126868 - DNA, 17 bp, Arabidopsis thaliana
gttcaggtttggttttc

SEQ ID NO: 126869 - DNA, 17 bp, Arabidopsis thaliana
gttcagtcagctcagaa

SEQ ID NO: 126870 - DNA, 17 bp, Arabidopsis thaliana
gttcagtcgatcaggca

SEQ ID NO: 126871 - DNA, 17 bp, Arabidopsis thaliana
gttcagtgatgaacgct

SEQ ID NO: 126872 - DNA, 17 bp, Arabidopsis thaliana
gttcagtgcgaactttt

SEQ ID NO: 126873 - DNA, 17 bp, Arabidopsis thaliana
gttcagtgcgatttttt

SEQ ID NO: 126874 - DNA, 17 bp, Arabidopsis thaliana
gttcagtggcaaatgac

SEQ ID NO: 126875 - DNA, 17 bp, Arabidopsis thaliana
gttcagttcccggctgg

SEQ ID NO: 126876 - DNA, 17 bp, Arabidopsis thaliana
gttcagttcggttctac

SEQ ID NO: 126877 - DNA, 17 bp, Arabidopsis thaliana
gttcagttctcggtaga

SEQ ID NO: 126878 - DNA, 17 bp, Arabidopsis thaliana
gttcagttgataagcgg

SEQ ID NO: 126879 - DNA, 17 bp, Arabidopsis thaliana
gttcagttgccgtagac

SEQ ID NO: 126880 - DNA, 17 bp, Arabidopsis thaliana
gttcagtttattcaccc

SEQ ID NO: 126881 - DNA, 17 bp, Arabidopsis thaliana
gttcagtttatttgctt

SEQ ID NO: 126882 - DNA, 17 bp, Arabidopsis thaliana
gttcagtttcgtcttcg

SEQ ID NO: 126883 - DNA, 17 bp, Arabidopsis thaliana
gttcagttttgctcata

SEQ ID NO: 126884 - DNA, 17 bp, Arabidopsis thaliana
gttcagttttgctctta

SEQ ID NO: 126885 - DNA, 17 bp, Arabidopsis thaliana
gttcataaatagagatt

SEQ ID NO: 126886 - DNA, 17 bp, Arabidopsis thaliana
gttcataacggtgatgg

SEQ ID NO: 126887 - DNA, 17 bp, Arabidopsis thaliana
gttcataagacgtgacg

SEQ ID NO: 126888 - DNA, 17 bp, Arabidopsis thaliana
gttcataccccacttct

SEQ ID NO: 126889 - DNA, 17 bp, Arabidopsis thaliana
gttcatacttccgtacc

SEQ ID NO: 126890 - DNA, 17 bp, Arabidopsis thaliana
gttcatagatgggatag

SEQ ID NO: 126891 - DNA, 17 bp, Arabidopsis thaliana
gttcatagcgacgttgc

SEQ ID NO: 126892 - DNA, 17 bp, Arabidopsis thaliana
gttcataggtgcactta

SEQ ID NO: 126893 - DNA, 17 bp, Arabidopsis thaliana
gttcatatattgtgcag

SEQ ID NO: 126894 - DNA, 17 bp, Arabidopsis thaliana
gttcatatcccacagct

SEQ ID NO: 126895 - DNA, 17 bp, Arabidopsis thaliana
gttcatatcccacagtt

SEQ ID NO: 126896 - DNA, 17 bp, Arabidopsis thaliana
gttcatatctaggtcca

SEQ ID NO: 126897 - DNA, 17 bp, Arabidopsis thaliana
gttcatatctcggtagg

SEQ ID NO: 126898 - DNA, 17 bp, Arabidopsis thaliana
gttcatatgccggagaa

SEQ ID NO: 126899 - DNA, 17 bp, Arabidopsis thaliana
gttcatattcggatcgg

SEQ ID NO: 126900 - DNA, 17 bp, Arabidopsis thaliana
gttcatcaaaatctccc

SEQ ID NO: 126901 - DNA, 17 bp, Arabidopsis thaliana
gttcatcaacgatcttt

SEQ ID NO: 126902 - DNA, 17 bp, Arabidopsis thaliana
gttcatcaactgcgctt

SEQ ID NO: 126903 - DNA, 17 bp, Arabidopsis thaliana
gttcatcacatacaatg

SEQ ID NO: 126904 - DNA, 17 bp, Arabidopsis thaliana
gttcatcagaatctgat

SEQ ID NO: 126905 - DNA, 17 bp, Arabidopsis thaliana
gttcatcatcgtctgct

SEQ ID NO: 126906 - DNA, 17 bp, Arabidopsis thaliana
gttcatcatgagctgac

SEQ ID NO: 126907 - DNA, 17 bp, Arabidopsis thaliana
gttcatcatgagctgag

SEQ ID NO: 126908 - DNA, 17 bp, Arabidopsis thaliana
gttcatcatgttcagtg

SEQ ID NO: 126909 - DNA, 17 bp, Arabidopsis thaliana
gttcatccatccacagc

SEQ ID NO: 126910 - DNA, 17 bp, Arabidopsis thaliana
gttcatcccacagctgt

SEQ ID NO: 126911 - DNA, 17 bp, Arabidopsis thaliana
gttcatccgtcggcttg

SEQ ID NO: 126912 - DNA, 17 bp, Arabidopsis thaliana
gttcatcctgctgacgc

SEQ ID NO: 126913 - DNA, 17 bp, Arabidopsis thaliana
gttcatcgaattcgcag

SEQ ID NO: 126914 - DNA, 17 bp, Arabidopsis thaliana
gttcatcgacgagcttt

SEQ ID NO: 126915 - DNA, 17 bp, Arabidopsis thaliana
gttcatcgatgaagtcc

SEQ ID NO: 126916 - DNA, 17 bp, Arabidopsis thaliana
gttcatctaccgaacga

SEQ ID NO: 126917 - DNA, 17 bp, Arabidopsis thaliana
gttcatctccacgtgtc

SEQ ID NO: 126918 - DNA, 17 bp, Arabidopsis thaliana
gttcatctctcaggcga

SEQ ID NO: 126919 - DNA, 17 bp, Arabidopsis thaliana
gttcatctctcaggtgt

SEQ ID NO: 126920 - DNA, 17 bp, Arabidopsis thaliana
gttcatctctgcgtgct

SEQ ID NO: 126921 - DNA, 17 bp, Arabidopsis thaliana
gttcatctctgggtgct

SEQ ID NO: 126922 - DNA, 17 bp, Arabidopsis thaliana
gttcatctgctgctgct

SEQ ID NO: 126923 - DNA, 17 bp, Arabidopsis thaliana
gttcatctgttgtgttc

SEQ ID NO: 126924 - DNA, 17 bp, Arabidopsis thaliana
gttcatcttatttttgg

SEQ ID NO: 126925 - DNA, 17 bp, Arabidopsis thaliana
gttcatcttcaatgaca

SEQ ID NO: 126926 - DNA, 17 bp, Arabidopsis thaliana
gttcatcttcagcatgc

SEQ ID NO: 126927 - DNA, 17 bp, Arabidopsis thaliana
gttcatctttcaggctg

SEQ ID NO: 126928 - DNA, 17 bp, Arabidopsis thaliana
gttcatctttcaggctt

SEQ ID NO: 126929 - DNA, 17 bp, Arabidopsis thaliana
gttcatgagcctttgtt

SEQ ID NO: 126930 - DNA, 17 bp, Arabidopsis thaliana
gttcatgcagtcaactg

SEQ ID NO: 126931 - DNA, 17 bp, Arabidopsis thaliana
gttcatgctttttcgtc

SEQ ID NO: 126932 - DNA, 17 bp, Arabidopsis thaliana
gttcatgcttttttcat

SEQ ID NO: 126933 - DNA, 17 bp, Arabidopsis thaliana
gttcatgtctcggtggg

SEQ ID NO: 126934 - DNA, 17 bp, Arabidopsis thaliana
gttcattccggggtgtt

SEQ ID NO: 126935 - DNA, 17 bp, Arabidopsis thaliana
gttcattcgacttgaat

SEQ ID NO: 126936 - DNA, 17 bp, Arabidopsis thaliana
gttcattctgctggagt

SEQ ID NO: 126937 - DNA, 17 bp, Arabidopsis thaliana
gttcattgacctcgact

SEQ ID NO: 126938 - DNA, 17 bp, Arabidopsis thaliana
gttcattgcagggacct

SEQ ID NO: 126939 - DNA, 17 bp, Arabidopsis thaliana
gttcatttcccggctgg

SEQ ID NO: 126940 - DNA, 17 bp, Arabidopsis thaliana
gttcatttctcatcgtg

SEQ ID NO: 126941 - DNA, 17 bp, Arabidopsis thaliana
gttcatttctcggaacg

SEQ ID NO: 126942 - DNA, 17 bp, Arabidopsis thaliana
gttcatttctcggaatg

SEQ ID NO: 126943 - DNA, 17 bp, Arabidopsis thaliana
gttcatttctcggagaa

SEQ ID NO: 126944 - DNA, 17 bp, Arabidopsis thaliana
gttcatttctcggtaga

SEQ ID NO: 126945 - DNA, 17 bp, Arabidopsis thaliana
gttcatttctctgaatg

SEQ ID NO: 126946 - DNA, 17 bp, Arabidopsis thaliana
gttcatttgactggacc

SEQ ID NO: 126947 - DNA, 17 bp, Arabidopsis thaliana
gttcatttgcctgtcgc

SEQ ID NO: 126948 - DNA, 17 bp, Arabidopsis thaliana
gttcattttcgtgattt

SEQ ID NO: 126949 - DNA, 17 bp, Arabidopsis thaliana
gttcattttggagtaag

SEQ ID NO: 126950 - DNA, 17 bp, Arabidopsis thaliana
gttccaaaacactttgt

SEQ ID NO: 126951 - DNA, 17 bp, Arabidopsis thaliana
gttccaaacgaagagtc

SEQ ID NO: 126952 - DNA, 17 bp, Arabidopsis thaliana
gttccaaatagacccac

SEQ ID NO: 126953 - DNA, 17 bp, Arabidopsis thaliana
gttccaaattcaaggct

SEQ ID NO: 126954 - DNA, 17 bp, Arabidopsis thaliana
gttccaacacgtctgcc

SEQ ID NO: 126955 - DNA, 17 bp, Arabidopsis thaliana
gttccaaccatgtcggg

SEQ ID NO: 126956 - DNA, 17 bp, Arabidopsis thaliana
gttccaaccttttcctg

SEQ ID NO: 126957 - DNA, 17 bp, Arabidopsis thaliana
gttccaactccaagatt

SEQ ID NO: 126958 - DNA, 17 bp, Arabidopsis thaliana
gttccaactctgttgtc

SEQ ID NO: 126959 - DNA, 17 bp, Arabidopsis thaliana
gttccaagactagtgcg

SEQ ID NO: 126960 - DNA, 17 bp, Arabidopsis thaliana
gttccaagactccgtct

SEQ ID NO: 126961 - DNA, 17 bp, Arabidopsis thaliana
gttccaagcgtcactcg

SEQ ID NO: 126962 - DNA, 17 bp, Arabidopsis thaliana
gttccaaggagggtatc

SEQ ID NO: 126963 - DNA, 17 bp, Arabidopsis thaliana
gttccaaggatgacttg

SEQ ID NO: 126964 - DNA, 17 bp, Arabidopsis thaliana
gttccaagggttgggct

SEQ ID NO: 126965 - DNA, 17 bp, Arabidopsis thaliana
gttccaagtgtggtaag

SEQ ID NO: 126966 - DNA, 17 bp, Arabidopsis thaliana
gttccaatcaatttgcc

SEQ ID NO: 126967 - DNA, 17 bp, Arabidopsis thaliana
gttccaatccaagagag

SEQ ID NO: 126968 - DNA, 17 bp, Arabidopsis thaliana
gttccaatgaagtcggg

SEQ ID NO: 126969 - DNA, 17 bp, Arabidopsis thaliana
gttccaatggttgacca

SEQ ID NO: 126970 - DNA, 17 bp, Arabidopsis thaliana
gttccaattttatcgga

SEQ ID NO: 126971 - DNA, 17 bp, Arabidopsis thaliana
gttccacagcgcatgac

SEQ ID NO: 126972 - DNA, 17 bp, Arabidopsis thaliana
gttccacccaaactctt

SEQ ID NO: 126973 - DNA, 17 bp, Arabidopsis thaliana
gttccacgctcaccgca

SEQ ID NO: 126974 - DNA, 17 bp, Arabidopsis thaliana
gttccacggtataatcc

SEQ ID NO: 126975 - DNA, 17 bp, Arabidopsis thaliana
gttccactattgcagca

SEQ ID NO: 126976 - DNA, 17 bp, Arabidopsis thaliana
gttccactctggcttcc

SEQ ID NO: 126977 - DNA, 17 bp, Arabidopsis thaliana
gttccactgtgtgcgat

SEQ ID NO: 126978 - DNA, 17 bp, Arabidopsis thaliana
gttccagagatgttgag

SEQ ID NO: 126979 - DNA, 17 bp, Arabidopsis thaliana
gttccagagtatcttcg

SEQ ID NO: 126980 - DNA, 17 bp, Arabidopsis thaliana
gttccagcggtggtggc

SEQ ID NO: 126981 - DNA, 17 bp, Arabidopsis thaliana
gttccagctacagcgat

SEQ ID NO: 126982 - DNA, 17 bp, Arabidopsis thaliana
gttccagctactgcgat

SEQ ID NO: 126983 - DNA, 17 bp, Arabidopsis thaliana
gttccagctgtgtccag

SEQ ID NO: 126984 - DNA, 17 bp, Arabidopsis thaliana
gttccaggagttttgat

SEQ ID NO: 126985 - DNA, 17 bp, Arabidopsis thaliana
gttccagtactgtcttt

SEQ ID NO: 126986 - DNA, 17 bp, Arabidopsis thaliana
gttccagtagcgatcta

SEQ ID NO: 126987 - DNA, 17 bp, Arabidopsis thaliana
gttccagtggctaagtt

SEQ ID NO: 126988 - DNA, 17 bp, Arabidopsis thaliana
gttccatacggcagcgg

SEQ ID NO: 126989 - DNA, 17 bp, Arabidopsis thaliana
gttccatcaggccacca

SEQ ID NO: 126990 - DNA, 17 bp, Arabidopsis thaliana
gttccatgctgttgacc

SEQ ID NO: 126991 - DNA, 17 bp, Arabidopsis thaliana
gttccatggtctagcgg

SEQ ID NO: 126992 - DNA, 17 bp, Arabidopsis thaliana
gttccatgtagctgcga

SEQ ID NO: 126993 - DNA, 17 bp, Arabidopsis thaliana
gttccatgtcaatcgcg

SEQ ID NO: 126994 - DNA, 17 bp, Arabidopsis thaliana
gttccatgtgaacggca

SEQ ID NO: 126995 - DNA, 17 bp, Arabidopsis thaliana
gttccatgtgaatgact

SEQ ID NO: 126996 - DNA, 17 bp, Arabidopsis thaliana
gttccattcgccgtggg

SEQ ID NO: 126997 - DNA, 17 bp, Arabidopsis thaliana
gttccattgaccaatgt

SEQ ID NO: 126998 - DNA, 17 bp, Arabidopsis thaliana
gttccattgtagccatt

SEQ ID NO: 126999 - DNA, 17 bp, Arabidopsis thaliana
gttccattgtccagctt

SEQ ID NO: 127000 - DNA, 17 bp, Arabidopsis thaliana
gttccattgtcctgctg

SEQ ID NO: 127001 - DNA, 17 bp, Arabidopsis thaliana
gttccattgtcctgctt

SEQ ID NO: 127002 - DNA, 17 bp, Arabidopsis thaliana
gttccattgtcgttgca

SEQ ID NO: 127003 - DNA, 17 bp, Arabidopsis thaliana
gttccattgtgtccaaa

SEQ ID NO: 127004 - DNA, 17 bp, Arabidopsis thaliana
gttcccaatactgcggg

SEQ ID NO: 127005 - DNA, 17 bp, Arabidopsis thaliana
gttcccaccagggttcg

SEQ ID NO: 127006 - DNA, 17 bp, Arabidopsis thaliana
gttcccacggactccgc

SEQ ID NO: 127007 - DNA, 17 bp, Arabidopsis thaliana
gttcccagactcttgat

SEQ ID NO: 127008 - DNA, 17 bp, Arabidopsis thaliana
gttcccagctggaccac

SEQ ID NO: 127009 - DNA, 17 bp, Arabidopsis thaliana
gttcccagtccgtcccc

SEQ ID NO: 127010 - DNA, 17 bp, Arabidopsis thaliana
gttcccagtgcaataga

SEQ ID NO: 127011 - DNA, 17 bp, Arabidopsis thaliana
gttcccagtggcgaatt

SEQ ID NO: 127012 - DNA, 17 bp, Arabidopsis thaliana
gttcccatcagattgag

SEQ ID NO: 127013 - DNA, 17 bp, Arabidopsis thaliana
gttcccattcggatgga

SEQ ID NO: 127014 - DNA, 17 bp, Arabidopsis thaliana
gttccccacagacggcc

SEQ ID NO: 127015 - DNA, 17 bp, Arabidopsis thaliana
gttccccacagacggcg

SEQ ID NO: 127016 - DNA, 17 bp, Arabidopsis thaliana
gttccccacggactgcc

SEQ ID NO: 127017 - DNA, 17 bp, Arabidopsis thaliana
gttccccagcagagtcg

SEQ ID NO: 127018 - DNA, 17 bp, Arabidopsis thaliana
gttccccagtggagtcg

SEQ ID NO: 127019 - DNA, 17 bp, Arabidopsis thaliana
gttccccccctctctct

SEQ ID NO: 127020 - DNA, 17 bp, Arabidopsis thaliana
gttccccccctctttct

SEQ ID NO: 127021 - DNA, 17 bp, Arabidopsis thaliana
gttcccccctacctgcc

SEQ ID NO: 127022 - DNA, 17 bp, Arabidopsis thaliana
gttcccccctacctggc

SEQ ID NO: 127023 - DNA, 17 bp, Arabidopsis thaliana
gttcccccctccttcta

SEQ ID NO: 127024 - DNA, 17 bp, Arabidopsis thaliana
gttcccccctctctcta

SEQ ID NO: 127025 - DNA, 17 bp, Arabidopsis thaliana
gttccccccttcctgcc

SEQ ID NO: 127026 - DNA, 17 bp, Arabidopsis thaliana
gttccccccttcctggc

SEQ ID NO: 127027 - DNA, 17 bp, Arabidopsis thaliana
gttcccccgcatctcca

SEQ ID NO: 127028 - DNA, 17 bp, Arabidopsis thaliana
gttccccctacctgacg

SEQ ID NO: 127029 - DNA, 17 bp, Arabidopsis thaliana
gttccccctacctggcg

SEQ ID NO: 127030 - DNA, 17 bp, Arabidopsis thaliana
gttccccctacctggct

SEQ ID NO: 127031 - DNA, 17 bp, Arabidopsis thaliana
gttccccctctctctag

SEQ ID NO: 127032 - DNA, 17 bp, Arabidopsis thaliana
gttccccctctctctct

SEQ ID NO: 127033 - DNA, 17 bp, Arabidopsis thaliana
gttccccggcaacggcg

SEQ ID NO: 127034 - DNA, 17 bp, Arabidopsis thaliana
gttcccctcaggatagc

SEQ ID NO: 127035 - DNA, 17 bp, Arabidopsis thaliana
gttcccgaagttgtctc

SEQ ID NO: 127036 - DNA, 17 bp, Arabidopsis thaliana
gttcccggagattgtga

SEQ ID NO: 127037 - DNA, 17 bp, Arabidopsis thaliana
gttcccgggccttgtac

SEQ ID NO: 127038 - DNA, 17 bp, Arabidopsis thaliana
gttcccgtagctcagtt

SEQ ID NO: 127039 - DNA, 17 bp, Arabidopsis thaliana
gttccctccgaagtttc

SEQ ID NO: 127040 - DNA, 17 bp, Arabidopsis thaliana
gttccctgggattggct

SEQ ID NO: 127041 - DNA, 17 bp, Arabidopsis thaliana
gttccctgtataggcca

SEQ ID NO: 127042 - DNA, 17 bp, Arabidopsis thaliana
gttcccttttttgtcgg

SEQ ID NO: 127043 - DNA, 17 bp, Arabidopsis thaliana
gttccgaaatatcaggt

SEQ ID NO: 127044 - DNA, 17 bp, Arabidopsis thaliana
gttccgaaattatccgt

SEQ ID NO: 127045 - DNA, 17 bp, Arabidopsis thaliana
gttccgaacccgtcggc

SEQ ID NO: 127046 - DNA, 17 bp, Arabidopsis thaliana
gttccgaagtgattggc

SEQ ID NO: 127047 - DNA, 17 bp, Arabidopsis thaliana
gttccgaatgagtagcg

SEQ ID NO: 127048 - DNA, 17 bp, Arabidopsis thaliana
gttccgacaggccgaaa

SEQ ID NO: 127049 - DNA, 17 bp, Arabidopsis thaliana
gttccgactcggattca

SEQ ID NO: 127050 - DNA, 17 bp, Arabidopsis thaliana
gttccgagactacccgt

SEQ ID NO: 127051 - DNA, 17 bp, Arabidopsis thaliana
gttccgagactacttgt

SEQ ID NO: 127052 - DNA, 17 bp, Arabidopsis thaliana
gttccgagactatccgt

SEQ ID NO: 127053 - DNA, 17 bp, Arabidopsis thaliana
gttccgagatatcaggt

SEQ ID NO: 127054 - DNA, 17 bp, Arabidopsis thaliana
gttccgagattatccat

SEQ ID NO: 127055 - DNA, 17 bp, Arabidopsis thaliana
gttccgagattatccgt

SEQ ID NO: 127056 - DNA, 17 bp, Arabidopsis thaliana
gttccgagtctacttgt

SEQ ID NO: 127057 - DNA, 17 bp, Arabidopsis thaliana
gttccgatgtggagatt

SEQ ID NO: 127058 - DNA, 17 bp, Arabidopsis thaliana
gttccgcaaaacccgcc

SEQ ID NO: 127059 - DNA, 17 bp, Arabidopsis thaliana
gttccgcaaaacccgtc

SEQ ID NO: 127060 - DNA, 17 bp, Arabidopsis thaliana
gttccgcaccaaaaggc

SEQ ID NO: 127061 - DNA, 17 bp, Arabidopsis thaliana
gttccgcactaactgca

SEQ ID NO: 127062 - DNA, 17 bp, Arabidopsis thaliana
gttccgcactaatcgca

SEQ ID NO: 127063 - DNA, 17 bp, Arabidopsis thaliana
gttccgcagtgtacccc

SEQ ID NO: 127064 - DNA, 17 bp, Arabidopsis thaliana
gttccgcagtgtaccgc

SEQ ID NO: 127065 - DNA, 17 bp, Arabidopsis thaliana
gttccgccccgcacgaa

SEQ ID NO: 127066 - DNA, 17 bp, Arabidopsis thaliana
gttccgccgaattggta

SEQ ID NO: 127067 - DNA, 17 bp, Arabidopsis thaliana
gttccgccgcataggta

SEQ ID NO: 127068 - DNA, 17 bp, Arabidopsis thaliana
gttccgcgagatgtctt

SEQ ID NO: 127069 - DNA, 17 bp, Arabidopsis thaliana
gttccgcgattacgatt

SEQ ID NO: 127070 - DNA, 17 bp, Arabidopsis thaliana
gttccgcggtgacttaa

SEQ ID NO: 127071 - DNA, 17 bp, Arabidopsis thaliana
gttccgctactgttcat

SEQ ID NO: 127072 - DNA, 17 bp, Arabidopsis thaliana
gttccgcttgatatgtt

SEQ ID NO: 127073 - DNA, 17 bp, Arabidopsis thaliana
gttccggcaggtcggac

SEQ ID NO: 127074 - DNA, 17 bp, Arabidopsis thaliana
gttccggcgacggcggc

SEQ ID NO: 127075 - DNA, 17 bp, Arabidopsis thaliana
gttccgggcctttcgca

SEQ ID NO: 127076 - DNA, 17 bp, Arabidopsis thaliana
gttccgggttcgagtcc

SEQ ID NO: 127077 - DNA, 17 bp, Arabidopsis thaliana
gttccggtaatgtgaaa

SEQ ID NO: 127078 - DNA, 17 bp, Arabidopsis thaliana
gttccggtatctttgga

SEQ ID NO: 127079 - DNA, 17 bp, Arabidopsis thaliana
gttccggttcagttgaa

SEQ ID NO: 127080 - DNA, 17 bp, Arabidopsis thaliana
gttccggttgatgaaag

SEQ ID NO: 127081 - DNA, 17 bp, Arabidopsis thaliana
gttccggttgtggcgtt

SEQ ID NO: 127082 - DNA, 17 bp, Arabidopsis thaliana
gttccgtacgatattac

SEQ ID NO: 127083 - DNA, 17 bp, Arabidopsis thaliana
gttccgtgaggccaaac

SEQ ID NO: 127084 - DNA, 17 bp, Arabidopsis thaliana
gttccgttaatgactga

SEQ ID NO: 127085 - DNA, 17 bp, Arabidopsis thaliana
gttccgttacaagtgag

SEQ ID NO: 127086 - DNA, 17 bp, Arabidopsis thaliana
gttcctaaaaactcatt

SEQ ID NO: 127087 - DNA, 17 bp, Arabidopsis thaliana
gttcctaaaacgtgacg

SEQ ID NO: 127088 - DNA, 17 bp, Arabidopsis thaliana
gttcctaaggccttttg

SEQ ID NO: 127089 - DNA, 17 bp, Arabidopsis thaliana
gttcctaccgaggtcgg

SEQ ID NO: 127090 - DNA, 17 bp, Arabidopsis thaliana
gttcctagccgtatttt

SEQ ID NO: 127091 - DNA, 17 bp, Arabidopsis thaliana
gttcctatgttgggctg

SEQ ID NO: 127092 - DNA, 17 bp, Arabidopsis thaliana
gttcctcaaagacttga

SEQ ID NO: 127093 - DNA, 17 bp, Arabidopsis thaliana
gttcctcaaccggaatc

SEQ ID NO: 127094 - DNA, 17 bp, Arabidopsis thaliana
gttcctcaatcggaatc

SEQ ID NO: 127095 - DNA, 17 bp, Arabidopsis thaliana
gttcctcactctttctc

SEQ ID NO: 127096 - DNA, 17 bp, Arabidopsis thaliana
gttcctcaggccacagt

SEQ ID NO: 127097 - DNA, 17 bp, Arabidopsis thaliana
gttcctcctcaagtttg

SEQ ID NO: 127098 - DNA, 17 bp, Arabidopsis thaliana
gttcctcctccagttgt

SEQ ID NO: 127099 - DNA, 17 bp, Arabidopsis thaliana
gttcctcgacgaagcat

SEQ ID NO: 127100 - DNA, 17 bp, Arabidopsis thaliana
gttcctcgcaacaattg

SEQ ID NO: 127101 - DNA, 17 bp, Arabidopsis thaliana
gttcctcgccgggggct

SEQ ID NO: 127102 - DNA, 17 bp, Arabidopsis thaliana
gttcctctcgtactagg

SEQ ID NO: 127103 - DNA, 17 bp, Arabidopsis thaliana
gttcctctgagcacttc

SEQ ID NO: 127104 - DNA, 17 bp, Arabidopsis thaliana
gttcctgaatgactctt

SEQ ID NO: 127105 - DNA, 17 bp, Arabidopsis thaliana
gttcctgacttattccc

SEQ ID NO: 127106 - DNA, 17 bp, Arabidopsis thaliana
gttcctgagaactggtc

SEQ ID NO: 127107 - DNA, 17 bp, Arabidopsis thaliana
gttcctgagccagccgg

SEQ ID NO: 127108 - DNA, 17 bp, Arabidopsis thaliana
gttcctgaggtttctag

SEQ ID NO: 127109 - DNA, 17 bp, Arabidopsis thaliana
gttcctgcaatagttat

SEQ ID NO: 127110 - DNA, 17 bp, Arabidopsis thaliana
gttcctgcagatcgggc

SEQ ID NO: 127111 - DNA, 17 bp, Arabidopsis thaliana
gttcctgccctcgagaa

SEQ ID NO: 127112 - DNA, 17 bp, Arabidopsis thaliana
gttcctgcgtgtgggca

SEQ ID NO: 127113 - DNA, 17 bp, Arabidopsis thaliana
gttcctggacggaccat

SEQ ID NO: 127114 - DNA, 17 bp, Arabidopsis thaliana
gttcctgggcagcacca

SEQ ID NO: 127115 - DNA, 17 bp, Arabidopsis thaliana
gttcctgtgggctgttg

SEQ ID NO: 127116 - DNA, 17 bp, Arabidopsis thaliana
gttccttaactgactga

SEQ ID NO: 127117 - DNA, 17 bp, Arabidopsis thaliana
gttccttctggccattt

SEQ ID NO: 127118 - DNA, 17 bp, Arabidopsis thaliana
gttccttctggctattt

SEQ ID NO: 127119 - DNA, 17 bp, Arabidopsis thaliana
gttccttgcgcagtaag

SEQ ID NO: 127120 - DNA, 17 bp, Arabidopsis thaliana
gttccttggctgcaatc

SEQ ID NO: 127121 - DNA, 17 bp, Arabidopsis thaliana
gttcctttgcatgtcgc

SEQ ID NO: 127122 - DNA, 17 bp, Arabidopsis thaliana
gttcctttgtcgctaag

SEQ ID NO: 127123 - DNA, 17 bp, Arabidopsis thaliana
gttcgaaacctgcatgc

SEQ ID NO: 127124 - DNA, 17 bp, Arabidopsis thaliana
gttcgaaacctgcatgg

SEQ ID NO: 127125 - DNA, 17 bp, Arabidopsis thaliana
gttcgaacccaggcgaa

SEQ ID NO: 127126 - DNA, 17 bp, Arabidopsis thaliana
gttcgaacccaggctca

SEQ ID NO: 127127 - DNA, 17 bp, Arabidopsis thaliana
gttcgaaccccacagcc

SEQ ID NO: 127128 - DNA, 17 bp, Arabidopsis thaliana
gttcgaacccccctcag

SEQ ID NO: 127129 - DNA, 17 bp, Arabidopsis thaliana
gttcgaacccgagctca

SEQ ID NO: 127130 - DNA, 17 bp, Arabidopsis thaliana
gttcgaacccgggcgaa

SEQ ID NO: 127131 - DNA, 17 bp, Arabidopsis thaliana
gttcgaacccgggctca

SEQ ID NO: 127132 - DNA, 17 bp, Arabidopsis thaliana
gttcgaaccctgctgtc

SEQ ID NO: 127133 - DNA, 17 bp, Arabidopsis thaliana
gttcgaaccctgctgtt

SEQ ID NO: 127134 - DNA, 17 bp, Arabidopsis thaliana
gttcgaaccctggctca

SEQ ID NO: 127135 - DNA, 17 bp, Arabidopsis thaliana
gttcgaaccctgtccag

SEQ ID NO: 127136 - DNA, 17 bp, Arabidopsis thaliana
gttcgaacctgggcgaa

SEQ ID NO: 127137 - DNA, 17 bp, Arabidopsis thaliana
gttcgaacttgggcgaa

SEQ ID NO: 127138 - DNA, 17 bp, Arabidopsis thaliana
gttcgaagacgatcaga

SEQ ID NO: 127139 - DNA, 17 bp, Arabidopsis thaliana
gttcgaaggtcgtctac

SEQ ID NO: 127140 - DNA, 17 bp, Arabidopsis thaliana
gttcgaagtctgttggg

SEQ ID NO: 127141 - DNA, 17 bp, Arabidopsis thaliana
gttcgaagttcggcatg

SEQ ID NO: 127142 - DNA, 17 bp, Arabidopsis thaliana
gttcgaatccaattcgt

SEQ ID NO: 127143 - DNA, 17 bp, Arabidopsis thaliana
gttcgaatcccatttcc

SEQ ID NO: 127144 - DNA, 17 bp, Arabidopsis thaliana
gttcgaatccctcctcg

SEQ ID NO: 127145 - DNA, 17 bp, Arabidopsis thaliana
gttcgaatccctctctc

SEQ ID NO: 127146 - DNA, 17 bp, Arabidopsis thaliana
gttcgaatccctctctt

SEQ ID NO: 127147 - DNA, 17 bp, Arabidopsis thaliana
gttcgaatccgggctca

SEQ ID NO: 127148 - DNA, 17 bp, Arabidopsis thaliana
gttcgaatcctacttgg

SEQ ID NO: 127149 - DNA, 17 bp, Arabidopsis thaliana
gttcgaatcctaggtcc

SEQ ID NO: 127150 - DNA, 17 bp, Arabidopsis thaliana
gttcgaatcctcctgtt

SEQ ID NO: 127151 - DNA, 17 bp, Arabidopsis thaliana
gttcgaatcctgccgct

SEQ ID NO: 127152 - DNA, 17 bp, Arabidopsis thaliana
gttcgaatcctgccgtt

SEQ ID NO: 127153 - DNA, 17 bp, Arabidopsis thaliana
gttcgaatcctgctcga

SEQ ID NO: 127154 - DNA, 17 bp, Arabidopsis thaliana
gttcgaatcctgctgct

SEQ ID NO: 127155 - DNA, 17 bp, Arabidopsis thaliana
gttcgaatcctgctgtc

SEQ ID NO: 127156 - DNA, 17 bp, Arabidopsis thaliana
gttcgaatcctgctgtg

SEQ ID NO: 127157 - DNA, 17 bp, Arabidopsis thaliana
gttcgaatcctgctgtt

SEQ ID NO: 127158 - DNA, 17 bp, Arabidopsis thaliana
gttcgaatcctgtcacc

SEQ ID NO: 127159 - DNA, 17 bp, Arabidopsis thaliana
gttcgaatcctgttcac

SEQ ID NO: 127160 - DNA, 17 bp, Arabidopsis thaliana
gttcgaatccttcaggc

SEQ ID NO: 127161 - DNA, 17 bp, Arabidopsis thaliana
gttcgaatccttccgtc

SEQ ID NO: 127162 - DNA, 17 bp, Arabidopsis thaliana
gttcgaatccttccgtt

SEQ ID NO: 127163 - DNA, 17 bp, Arabidopsis thaliana
gttcgaatcgtatcggg

SEQ ID NO: 127164 - DNA, 17 bp, Arabidopsis thaliana
gttcgaatctctcaggc

SEQ ID NO: 127165 - DNA, 17 bp, Arabidopsis thaliana
gttcgaatctctcaggt

SEQ ID NO: 127166 - DNA, 17 bp, Arabidopsis thaliana
gttcgaatctttcaggc

SEQ ID NO: 127167 - DNA, 17 bp, Arabidopsis thaliana
gttcgaatctttctcgg

SEQ ID NO: 127168 - DNA, 17 bp, Arabidopsis thaliana
gttcgaattgctgttga

SEQ ID NO: 127169 - DNA, 17 bp, Arabidopsis thaliana
gttcgaatttctcaggc

SEQ ID NO: 127170 - DNA, 17 bp, Arabidopsis thaliana
gttcgacaaactgttcc

SEQ ID NO: 127171 - DNA, 17 bp, Arabidopsis thaliana
gttcgacagagtatcga

SEQ ID NO: 127172 - DNA, 17 bp, Arabidopsis thaliana
gttcgaccacgcgttcc

SEQ ID NO: 127173 - DNA, 17 bp, Arabidopsis thaliana
gttcgaccccggatgga

SEQ ID NO: 127174 - DNA, 17 bp, Arabidopsis thaliana
gttcgaccccgggcgaa

SEQ ID NO: 127175 - DNA, 17 bp, Arabidopsis thaliana
gttcgacccctacctgc

SEQ ID NO: 127176 - DNA, 17 bp, Arabidopsis thaliana
gttcgacccctacctgg

SEQ ID NO: 127177 - DNA, 17 bp, Arabidopsis thaliana
gttcgaccctgggcagc

SEQ ID NO: 127178 - DNA, 17 bp, Arabidopsis thaliana
gttcgacgcccggggaa

SEQ ID NO: 127179 - DNA, 17 bp, Arabidopsis thaliana
gttcgacgcggattacg

SEQ ID NO: 127180 - DNA, 17 bp, Arabidopsis thaliana
gttcgactaaataactt

SEQ ID NO: 127181 - DNA, 17 bp, Arabidopsis thaliana
gttcgactcccactgtg

SEQ ID NO: 127182 - DNA, 17 bp, Arabidopsis thaliana
gttcgactcccggcaga

SEQ ID NO: 127183 - DNA, 17 bp, Arabidopsis thaliana
gttcgactcccggtaga

SEQ ID NO: 127184 - DNA, 17 bp, Arabidopsis thaliana
gttcgactcccggtagg

SEQ ID NO: 127185 - DNA, 17 bp, Arabidopsis thaliana
gttcgactccgtccttg

SEQ ID NO: 127186 - DNA, 17 bp, Arabidopsis thaliana
gttcgacttcttggggc

SEQ ID NO: 127187 - DNA, 17 bp, Arabidopsis thaliana
gttcgactttcttttca

SEQ ID NO: 127188 - DNA, 17 bp, Arabidopsis thaliana
gttcgagacacctgtcg

SEQ ID NO: 127189 - DNA, 17 bp, Arabidopsis thaliana
gttcgagactcatctga

SEQ ID NO: 127190 - DNA, 17 bp, Arabidopsis thaliana
gttcgagacttgtcaaa

SEQ ID NO: 127191 - DNA, 17 bp, Arabidopsis thaliana
gttcgagaggtggcttt

SEQ ID NO: 127192 - DNA, 17 bp, Arabidopsis thaliana
gttcgagatgttgacgt

SEQ ID NO: 127193 - DNA, 17 bp, Arabidopsis thaliana
gttcgagcaaactatca

SEQ ID NO: 127194 - DNA, 17 bp, Arabidopsis thaliana
gttcgagccccgccggg

SEQ ID NO: 127195 - DNA, 17 bp, Arabidopsis thaliana
gttcgagccccgtcagt

SEQ ID NO: 127196 - DNA, 17 bp, Arabidopsis thaliana
gttcgagccctactaag

SEQ ID NO: 127197 - DNA, 17 bp, Arabidopsis thaliana
gttcgagcctgattatc

SEQ ID NO: 127198 - DNA, 17 bp, Arabidopsis thaliana
gttcgagccttgtcagt

SEQ ID NO: 127199 - DNA, 17 bp, Arabidopsis thaliana
gttcgagctccggatgt

SEQ ID NO: 127200 - DNA, 17 bp, Arabidopsis thaliana
gttcgagggcacgtctg

SEQ ID NO: 127201 - DNA, 17 bp, Arabidopsis thaliana
gttcgagggtagaccgg

SEQ ID NO: 127202 - DNA, 17 bp, Arabidopsis thaliana
gttcgagtaccaggcgc

SEQ ID NO: 127203 - DNA, 17 bp, Arabidopsis thaliana
gttcgagtattcagtcc

SEQ ID NO: 127204 - DNA, 17 bp, Arabidopsis thaliana
gttcgagtcccaccggg

SEQ ID NO: 127205 - DNA, 17 bp, Arabidopsis thaliana
gttcgagtcccactggg

SEQ ID NO: 127206 - DNA, 17 bp, Arabidopsis thaliana
gttcgagtcccggcgac

SEQ ID NO: 127207 - DNA, 17 bp, Arabidopsis thaliana
gttcgagtcccgggcaa

SEQ ID NO: 127208 - DNA, 17 bp, Arabidopsis thaliana
gttcgagtccgagtagc

SEQ ID NO: 127209 - DNA, 17 bp, Arabidopsis thaliana
gttcgagtccgcttatc

SEQ ID NO: 127210 - DNA, 17 bp, Arabidopsis thaliana
gttcgagtcctcttcaa

SEQ ID NO: 127211 - DNA, 17 bp, Arabidopsis thaliana
gttcgagtcctgttcgg

SEQ ID NO: 127212 - DNA, 17 bp, Arabidopsis thaliana
gttcgagtcgagttttt

SEQ ID NO: 127213 - DNA, 17 bp, Arabidopsis thaliana
gttcgagtctgatctgt

SEQ ID NO: 127214 - DNA, 17 bp, Arabidopsis thaliana
gttcgagtgacgcttga

SEQ ID NO: 127215 - DNA, 17 bp, Arabidopsis thaliana
gttcgagtgtcgcttgg

SEQ ID NO: 127216 - DNA, 17 bp, Arabidopsis thaliana
gttcgagtgtgagcatg

SEQ ID NO: 127217 - DNA, 17 bp, Arabidopsis thaliana
gttcgagttcggtttct

SEQ ID NO: 127218 - DNA, 17 bp, Arabidopsis thaliana
gttcgagttgcggttta

SEQ ID NO: 127219 - DNA, 17 bp, Arabidopsis thaliana
gttcgagtttcgcatgt

SEQ ID NO: 127220 - DNA, 17 bp, Arabidopsis thaliana
gttcgagttttcaggta

SEQ ID NO: 127221 - DNA, 17 bp, Arabidopsis thaliana
gttcgatcaccattcgg

SEQ ID NO: 127222 - DNA, 17 bp, Arabidopsis thaliana
gttcgatcactcgtgtg

SEQ ID NO: 127223 - DNA, 17 bp, Arabidopsis thaliana
gttcgatccccacagac

SEQ ID NO: 127224 - DNA, 17 bp, Arabidopsis thaliana
gttcgatccccagcaga

SEQ ID NO: 127225 - DNA, 17 bp, Arabidopsis thaliana
gttcgatccccagtgga

SEQ ID NO: 127226 - DNA, 17 bp, Arabidopsis thaliana
gttcgatccccggcaac

SEQ ID NO: 127227 - DNA, 17 bp, Arabidopsis thaliana
gttcgatcccgcttggc

SEQ ID NO: 127228 - DNA, 17 bp, Arabidopsis thaliana
gttcgatccctccttct

SEQ ID NO: 127229 - DNA, 17 bp, Arabidopsis thaliana
gttcgatccctggcaac

SEQ ID NO: 127230 - DNA, 17 bp, Arabidopsis thaliana
gttcgatccctgtatag

SEQ ID NO: 127231 - DNA, 17 bp, Arabidopsis thaliana
gttcgatccgcttcgat

SEQ ID NO: 127232 - DNA, 17 bp, Arabidopsis thaliana
gttcgatccgtttcgac

SEQ ID NO: 127233 - DNA, 17 bp, Arabidopsis thaliana
gttcgatcctcaccgta

SEQ ID NO: 127234 - DNA, 17 bp, Arabidopsis thaliana
gttcgatcctcgccggg

SEQ ID NO: 127235 - DNA, 17 bp, Arabidopsis thaliana
gttcgatcctgcgtgtg

SEQ ID NO: 127236 - DNA, 17 bp, Arabidopsis thaliana
gttcgatcctgcgttgg

SEQ ID NO: 127237 - DNA, 17 bp, Arabidopsis thaliana
gttcgatcctggacagc

SEQ ID NO: 127238 - DNA, 17 bp, Arabidopsis thaliana
gttcgatcctggccatc

SEQ ID NO: 127239 - DNA, 17 bp, Arabidopsis thaliana
gttcgatcctgggcaga

SEQ ID NO: 127240 - DNA, 17 bp, Arabidopsis thaliana
gttcgatcctgggcagc

SEQ ID NO: 127241 - DNA, 17 bp, Arabidopsis thaliana
gttcgatcctggggcac

SEQ ID NO: 127242 - DNA, 17 bp, Arabidopsis thaliana
gttcgatccttgtatag

SEQ ID NO: 127243 - DNA, 17 bp, Arabidopsis thaliana
gttcgatctcttctgaa

SEQ ID NO: 127244 - DNA, 17 bp, Arabidopsis thaliana
gttcgatgaccaatcgc

SEQ ID NO: 127245 - DNA, 17 bp, Arabidopsis thaliana
gttcgatgactggtttg

SEQ ID NO: 127246 - DNA, 17 bp, Arabidopsis thaliana
gttcgatgtccacttgc

SEQ ID NO: 127247 - DNA, 17 bp, Arabidopsis thaliana
gttcgatgtccttccga

SEQ ID NO: 127248 - DNA, 17 bp, Arabidopsis thaliana
gttcgattcacgtcggg

SEQ ID NO: 127249 - DNA, 17 bp, Arabidopsis thaliana
gttcgattcccgctacc

SEQ ID NO: 127250 - DNA, 17 bp, Arabidopsis thaliana
gttcgattcccgctatc

SEQ ID NO: 127251 - DNA, 17 bp, Arabidopsis thaliana
gttcgattcccggctgg

SEQ ID NO: 127252 - DNA, 17 bp, Arabidopsis thaliana
gttcgattccggagagg

SEQ ID NO: 127253 - DNA, 17 bp, Arabidopsis thaliana
gttcgattccggcaggt

SEQ ID NO: 127254 - DNA, 17 bp, Arabidopsis thaliana
gttcgattctcggaacg

SEQ ID NO: 127255 - DNA, 17 bp, Arabidopsis thaliana
gttcgattctcggaatg

SEQ ID NO: 127256 - DNA, 17 bp, Arabidopsis thaliana
gttcgattgagtctctc

SEQ ID NO: 127257 - DNA, 17 bp, Arabidopsis thaliana
gttcgatttgatcctcc

SEQ ID NO: 127258 - DNA, 17 bp, Arabidopsis thaliana
gttcgattttggttcgg

SEQ ID NO: 127259 - DNA, 17 bp, Arabidopsis thaliana
gttcgcaacctgcatgg

SEQ ID NO: 127260 - DNA, 17 bp, Arabidopsis thaliana
gttcgcacccgggcgaa

SEQ ID NO: 127261 - DNA, 17 bp, Arabidopsis thaliana
gttcgcacccgggctca

SEQ ID NO: 127262 - DNA, 17 bp, Arabidopsis thaliana
gttcgcaccttggctta

SEQ ID NO: 127263 - DNA, 17 bp, Arabidopsis thaliana
gttcgcagagtgagagg

SEQ ID NO: 127264 - DNA, 17 bp, Arabidopsis thaliana
gttcgcagttagttcgc

SEQ ID NO: 127265 - DNA, 17 bp, Arabidopsis thaliana
gttcgcagtttcaccat

SEQ ID NO: 127266 - DNA, 17 bp, Arabidopsis thaliana
gttcgcatacagcagag

SEQ ID NO: 127267 - DNA, 17 bp, Arabidopsis thaliana
gttcgccactcgtctac

SEQ ID NO: 127268 - DNA, 17 bp, Arabidopsis thaliana
gttcgccactttgccaa

SEQ ID NO: 127269 - DNA, 17 bp, Arabidopsis thaliana
gttcgccagttgactta

SEQ ID NO: 127270 - DNA, 17 bp, Arabidopsis thaliana
gttcgccccctacctga

SEQ ID NO: 127271 - DNA, 17 bp, Arabidopsis thaliana
gttcgccccctacctgc

SEQ ID NO: 127272 - DNA, 17 bp, Arabidopsis thaliana
gttcgccccctacctgg

SEQ ID NO: 127273 - DNA, 17 bp, Arabidopsis thaliana
gttcgccccctccttct

SEQ ID NO: 127274 - DNA, 17 bp, Arabidopsis thaliana
gttcgccccctctctct

SEQ ID NO: 127275 - DNA, 17 bp, Arabidopsis thaliana
gttcgcccctgggcagc

SEQ ID NO: 127276 - DNA, 17 bp, Arabidopsis thaliana
gttcgccgagagttcaa

SEQ ID NO: 127277 - DNA, 17 bp, Arabidopsis thaliana
gttcgccgcccgcgacg

SEQ ID NO: 127278 - DNA, 17 bp, Arabidopsis thaliana
gttcgccgtgggtccca

SEQ ID NO: 127279 - DNA, 17 bp, Arabidopsis thaliana
gttcgccgttcgttagg

SEQ ID NO: 127280 - DNA, 17 bp, Arabidopsis thaliana
gttcgcctcaaccgccg

SEQ ID NO: 127281 - DNA, 17 bp, Arabidopsis thaliana
gttcgcgagtatggcac

SEQ ID NO: 127282 - DNA, 17 bp, Arabidopsis thaliana
gttcgcggggagattcg

SEQ ID NO: 127283 - DNA, 17 bp, Arabidopsis thaliana
gttcgcgtcccaccggg

SEQ ID NO: 127284 - DNA, 17 bp, Arabidopsis thaliana
gttcgctaaagttgttg

SEQ ID NO: 127285 - DNA, 17 bp, Arabidopsis thaliana
gttcgctcagacgtcga

SEQ ID NO: 127286 - DNA, 17 bp, Arabidopsis thaliana
gttcgctgcagacttga

SEQ ID NO: 127287 - DNA, 17 bp, Arabidopsis thaliana
gttcgctgggtccgtgg

SEQ ID NO: 127288 - DNA, 17 bp, Arabidopsis thaliana
gttcgcttaggactgtt

SEQ ID NO: 127289 - DNA, 17 bp, Arabidopsis thaliana
gttcgcttatgagacag

SEQ ID NO: 127290 - DNA, 17 bp, Arabidopsis thaliana
gttcgcttccggcaggt

SEQ ID NO: 127291 - DNA, 17 bp, Arabidopsis thaliana
gttcgcttggaccgctg

SEQ ID NO: 127292 - DNA, 17 bp, Arabidopsis thaliana
gttcgcttttgttgcct

SEQ ID NO: 127293 - DNA, 17 bp, Arabidopsis thaliana
gttcggaacatgtggcc

SEQ ID NO: 127294 - DNA, 17 bp, Arabidopsis thaliana
gttcggaaccgacttca

SEQ ID NO: 127295 - DNA, 17 bp, Arabidopsis thaliana
gttcggaacctgcatgg

SEQ ID NO: 127296 - DNA, 17 bp, Arabidopsis thaliana
gttcggaactgggaccc

SEQ ID NO: 127297 - DNA, 17 bp, Arabidopsis thaliana
gttcggaatcacaattg

SEQ ID NO: 127298 - DNA, 17 bp, Arabidopsis thaliana
gttcggaattcggcaat

SEQ ID NO: 127299 - DNA, 17 bp, Arabidopsis thaliana
gttcggacagaaacata

SEQ ID NO: 127300 - DNA, 17 bp, Arabidopsis thaliana
gttcggacccgggcgaa

SEQ ID NO: 127301 - DNA, 17 bp, Arabidopsis thaliana
gttcggacccgggctca

SEQ ID NO: 127302 - DNA, 17 bp, Arabidopsis thaliana
gttcggaccgccttgaa

SEQ ID NO: 127303 - DNA, 17 bp, Arabidopsis thaliana
gttcggagaccgccggg

SEQ ID NO: 127304 - DNA, 17 bp, Arabidopsis thaliana
gttcggagctatccgcc

SEQ ID NO: 127305 - DNA, 17 bp, Arabidopsis thaliana
gttcggagggatctctt

SEQ ID NO: 127306 - DNA, 17 bp, Arabidopsis thaliana
gttcggagtcatggcgg

SEQ ID NO: 127307 - DNA, 17 bp, Arabidopsis thaliana
gttcggagtcctgtgat

SEQ ID NO: 127308 - DNA, 17 bp, Arabidopsis thaliana
gttcggatccaatcggt

SEQ ID NO: 127309 - DNA, 17 bp, Arabidopsis thaliana
gttcggatccgggctca

SEQ ID NO: 127310 - DNA, 17 bp, Arabidopsis thaliana
gttcggatcctgccgtt

SEQ ID NO: 127311 - DNA, 17 bp, Arabidopsis thaliana
gttcggatcctggataa

SEQ ID NO: 127312 - DNA, 17 bp, Arabidopsis thaliana
gttcggatcgcgagaag

SEQ ID NO: 127313 - DNA, 17 bp, Arabidopsis thaliana
gttcggatcgcggcgac

SEQ ID NO: 127314 - DNA, 17 bp, Arabidopsis thaliana
gttcggatcgcggcggg

SEQ ID NO: 127315 - DNA, 17 bp, Arabidopsis thaliana
gttcggatctcatcggg

SEQ ID NO: 127316 - DNA, 17 bp, Arabidopsis thaliana
gttcggatctctcaggt

SEQ ID NO: 127317 - DNA, 17 bp, Arabidopsis thaliana
gttcggatctggtgaag

SEQ ID NO: 127318 - DNA, 17 bp, Arabidopsis thaliana
gttcggatcttggattc

SEQ ID NO: 127319 - DNA, 17 bp, Arabidopsis thaliana
gttcggatcttggattg

SEQ ID NO: 127320 - DNA, 17 bp, Arabidopsis thaliana
gttcggatgtttagtaa

SEQ ID NO: 127321 - DNA, 17 bp, Arabidopsis thaliana
gttcggattcgggtttt

SEQ ID NO: 127322 - DNA, 17 bp, Arabidopsis thaliana
gttcggattcggtttca

SEQ ID NO: 127323 - DNA, 17 bp, Arabidopsis thaliana
gttcggattgcaggcag

SEQ ID NO: 127324 - DNA, 17 bp, Arabidopsis thaliana
gttcggattgcaggctg

SEQ ID NO: 127325 - DNA, 17 bp, Arabidopsis thaliana
gttcggattttgtgact

SEQ ID NO: 127326 - DNA, 17 bp, Arabidopsis thaliana
gttcggcaagataggtt

SEQ ID NO: 127327 - DNA, 17 bp, Arabidopsis thaliana
gttcggcccagaacctc

SEQ ID NO: 127328 - DNA, 17 bp, Arabidopsis thaliana
gttcggcccctctctct

SEQ ID NO: 127329 - DNA, 17 bp, Arabidopsis thaliana
gttcggccctgggcagc

SEQ ID NO: 127330 - DNA, 17 bp, Arabidopsis thaliana
gttcggcgatttggaga

SEQ ID NO: 127331 - DNA, 17 bp, Arabidopsis thaliana
gttcggcggaagcgtcg

SEQ ID NO: 127332 - DNA, 17 bp, Arabidopsis thaliana
gttcggcggttatagga

SEQ ID NO: 127333 - DNA, 17 bp, Arabidopsis thaliana
gttcggcgtatgagtgg

SEQ ID NO: 127334 - DNA, 17 bp, Arabidopsis thaliana
gttcggctagctgtgag

SEQ ID NO: 127335 - DNA, 17 bp, Arabidopsis thaliana
gttcggctagctgtgcg

SEQ ID NO: 127336 - DNA, 17 bp, Arabidopsis thaliana
gttcggctcagaacctc

SEQ ID NO: 127337 - DNA, 17 bp, Arabidopsis thaliana
gttcggctcatatggta

SEQ ID NO: 127338 - DNA, 17 bp, Arabidopsis thaliana
gttcggctcccactgtg

SEQ ID NO: 127339 - DNA, 17 bp, Arabidopsis thaliana
gttcggctcccggcaga

SEQ ID NO: 127340 - DNA, 17 bp, Arabidopsis thaliana
gttcggctcccggtagg

SEQ ID NO: 127341 - DNA, 17 bp, Arabidopsis thaliana
gttcggctcccgtagga

SEQ ID NO: 127342 - DNA, 17 bp, Arabidopsis thaliana
gttcggctctcggcaga

SEQ ID NO: 127343 - DNA, 17 bp, Arabidopsis thaliana
gttcggctgtctttttg

SEQ ID NO: 127344 - DNA, 17 bp, Arabidopsis thaliana
gttcggctgttcgtgcg

SEQ ID NO: 127345 - DNA, 17 bp, Arabidopsis thaliana
gttcggcttacgacgtc

SEQ ID NO: 127346 - DNA, 17 bp, Arabidopsis thaliana
gttcggcttggttcaca

SEQ ID NO: 127347 - DNA, 17 bp, Arabidopsis thaliana
gttcggcttgtcccttc

SEQ ID NO: 127348 - DNA, 17 bp, Arabidopsis thaliana
gttcgggagagagaaag

SEQ ID NO: 127349 - DNA, 17 bp, Arabidopsis thaliana
gttcgggatacgtctga

SEQ ID NO: 127350 - DNA, 17 bp, Arabidopsis thaliana
gttcgggcattttcgtg

SEQ ID NO: 127351 - DNA, 17 bp, Arabidopsis thaliana
gttcgggccccgccggg

SEQ ID NO: 127352 - DNA, 17 bp, Arabidopsis thaliana
gttcgggcctctctcac

SEQ ID NO: 127353 - DNA, 17 bp, Arabidopsis thaliana
gttcgggctctatctgg

SEQ ID NO: 127354 - DNA, 17 bp, Arabidopsis thaliana
gttcggggccgagaccc

SEQ ID NO: 127355 - DNA, 17 bp, Arabidopsis thaliana
gttcgggggtcccagtt

SEQ ID NO: 127356 - DNA, 17 bp, Arabidopsis thaliana
gttcgggtcacggttca

SEQ ID NO: 127357 - DNA, 17 bp, Arabidopsis thaliana
gttcgggtccaatcagg

SEQ ID NO: 127358 - DNA, 17 bp, Arabidopsis thaliana
gttcgggtcccaccggg

SEQ ID NO: 127359 - DNA, 17 bp, Arabidopsis thaliana
gttcgggtcccactggg

SEQ ID NO: 127360 - DNA, 17 bp, Arabidopsis thaliana
gttcgggtcccggcaac

SEQ ID NO: 127361 - DNA, 17 bp, Arabidopsis thaliana
gttcgggtcccggcgac

SEQ ID NO: 127362 - DNA, 17 bp, Arabidopsis thaliana
gttcgggtcggatcttt

SEQ ID NO: 127363 - DNA, 17 bp, Arabidopsis thaliana
gttcgggtctaatcagg

SEQ ID NO: 127364 - DNA, 17 bp, Arabidopsis thaliana
gttcgggttcgagattt

SEQ ID NO: 127365 - DNA, 17 bp, Arabidopsis thaliana
gttcgggttcgtttttc

SEQ ID NO: 127366 - DNA, 17 bp, Arabidopsis thaliana
gttcgggttgcggttta

SEQ ID NO: 127367 - DNA, 17 bp, Arabidopsis thaliana
gttcgggttgggctata

SEQ ID NO: 127368 - DNA, 17 bp, Arabidopsis thaliana
gttcggtccacgctcac

SEQ ID NO: 127369 - DNA, 17 bp, Arabidopsis thaliana
gttcggtccatatccgg

SEQ ID NO: 127370 - DNA, 17 bp, Arabidopsis thaliana
gttcggtccccacagac

SEQ ID NO: 127371 - DNA, 17 bp, Arabidopsis thaliana
gttcggtccccggcaac

SEQ ID NO: 127372 - DNA, 17 bp, Arabidopsis thaliana
gttcggtccctgtatag

SEQ ID NO: 127373 - DNA, 17 bp, Arabidopsis thaliana
gttcggtccgcctttgg

SEQ ID NO: 127374 - DNA, 17 bp, Arabidopsis thaliana
gttcggtcctcgccggg

SEQ ID NO: 127375 - DNA, 17 bp, Arabidopsis thaliana
gttcggtcctgcgtgtg

SEQ ID NO: 127376 - DNA, 17 bp, Arabidopsis thaliana
gttcggtcctgggcaga

SEQ ID NO: 127377 - DNA, 17 bp, Arabidopsis thaliana
gttcggtcctgggcagc

SEQ ID NO: 127378 - DNA, 17 bp, Arabidopsis thaliana
gttcggttattttcggg

SEQ ID NO: 127379 - DNA, 17 bp, Arabidopsis thaliana
gttcggttccccgcacc

SEQ ID NO: 127380 - DNA, 17 bp, Arabidopsis thaliana
gttcggttcccggctcg

SEQ ID NO: 127381 - DNA, 17 bp, Arabidopsis thaliana
gttcggttcccggctgg

SEQ ID NO: 127382 - DNA, 17 bp, Arabidopsis thaliana
gttcggttccggcaggt

SEQ ID NO: 127383 - DNA, 17 bp, Arabidopsis thaliana
gttcggttcctatctac

SEQ ID NO: 127384 - DNA, 17 bp, Arabidopsis thaliana
gttcggttcggtttgct

SEQ ID NO: 127385 - DNA, 17 bp, Arabidopsis thaliana
gttcggttcgttagcag

SEQ ID NO: 127386 - DNA, 17 bp, Arabidopsis thaliana
gttcggttctagatagt

SEQ ID NO: 127387 - DNA, 17 bp, Arabidopsis thaliana
gttcggttctcggaatg

SEQ ID NO: 127388 - DNA, 17 bp, Arabidopsis thaliana
gttcggttctcggttcg

SEQ ID NO: 127389 - DNA, 17 bp, Arabidopsis thaliana
gttcggttcttcggtta

SEQ ID NO: 127390 - DNA, 17 bp, Arabidopsis thaliana
gttcggttgaccagtca

SEQ ID NO: 127391 - DNA, 17 bp, Arabidopsis thaliana
gttcggtttaaagtcgt

SEQ ID NO: 127392 - DNA, 17 bp, Arabidopsis thaliana
gttcggtttccactggg

SEQ ID NO: 127393 - DNA, 17 bp, Arabidopsis thaliana
gttcggttttccatttc

SEQ ID NO: 127394 - DNA, 17 bp, Arabidopsis thaliana
gttcgtaaaatggctcg

SEQ ID NO: 127395 - DNA, 17 bp, Arabidopsis thaliana
gttcgtaacctgcatgg

SEQ ID NO: 127396 - DNA, 17 bp, Arabidopsis thaliana
gttcgtacccgcgcgaa

SEQ ID NO: 127397 - DNA, 17 bp, Arabidopsis thaliana
gttcgtacccgggcgaa

SEQ ID NO: 127398 - DNA, 17 bp, Arabidopsis thaliana
gttcgtacccgggcgca

SEQ ID NO: 127399 - DNA, 17 bp, Arabidopsis thaliana
gttcgtacccgggctca

SEQ ID NO: 127400 - DNA, 17 bp, Arabidopsis thaliana
gttcgtacccgggcttg

SEQ ID NO: 127401 - DNA, 17 bp, Arabidopsis thaliana
gttcgtacccgtgcgaa

SEQ ID NO: 127402 - DNA, 17 bp, Arabidopsis thaliana
gttcgtaccctgctgtc

SEQ ID NO: 127403 - DNA, 17 bp, Arabidopsis thaliana
gttcgtacctgggcgaa

SEQ ID NO: 127404 - DNA, 17 bp, Arabidopsis thaliana
gttcgtactgaaccgct

SEQ ID NO: 127405 - DNA, 17 bp, Arabidopsis thaliana
gttcgtaggtataagcg

SEQ ID NO: 127406 - DNA, 17 bp, Arabidopsis thaliana
gttcgtatccctcaggt

SEQ ID NO: 127407 - DNA, 17 bp, Arabidopsis thaliana
gttcgtatccggtaggg

SEQ ID NO: 127408 - DNA, 17 bp, Arabidopsis thaliana
gttcgtatccggttggg

SEQ ID NO: 127409 - DNA, 17 bp, Arabidopsis thaliana
gttcgtatcctgccgtt

SEQ ID NO: 127410 - DNA, 17 bp, Arabidopsis thaliana
gttcgtatcctgctgtt

SEQ ID NO: 127411 - DNA, 17 bp, Arabidopsis thaliana
gttcgtatctctcaggc

SEQ ID NO: 127412 - DNA, 17 bp, Arabidopsis thaliana
gttcgtatctctcaggt

SEQ ID NO: 127413 - DNA, 17 bp, Arabidopsis thaliana
gttcgtatctctcagtt

SEQ ID NO: 127414 - DNA, 17 bp, Arabidopsis thaliana
gttcgtatggaagtcgc

SEQ ID NO: 127415 - DNA, 17 bp, Arabidopsis thaliana
gttcgtatggtggcgcg

SEQ ID NO: 127416 - DNA, 17 bp, Arabidopsis thaliana
gttcgtattgtggatgt

SEQ ID NO: 127417 - DNA, 17 bp, Arabidopsis thaliana
gttcgtcaaggttctac

SEQ ID NO: 127418 - DNA, 17 bp, Arabidopsis thaliana
gttcgtcactgttgtgc

SEQ ID NO: 127419 - DNA, 17 bp, Arabidopsis thaliana
gttcgtccacggagggt

SEQ ID NO: 127420 - DNA, 17 bp, Arabidopsis thaliana
gttcgtcccaccgggcg

SEQ ID NO: 127421 - DNA, 17 bp, Arabidopsis thaliana
gttcgtcccaccgggtg

SEQ ID NO: 127422 - DNA, 17 bp, Arabidopsis thaliana
gttcgtccccacagacg

SEQ ID NO: 127423 - DNA, 17 bp, Arabidopsis thaliana
gttcgtcccctctctct

SEQ ID NO: 127424 - DNA, 17 bp, Arabidopsis thaliana
gttcgtcccggcaacgg

SEQ ID NO: 127425 - DNA, 17 bp, Arabidopsis thaliana
gttcgtcctgggcagca

SEQ ID NO: 127426 - DNA, 17 bp, Arabidopsis thaliana
gttcgtcgacactggat

SEQ ID NO: 127427 - DNA, 17 bp, Arabidopsis thaliana
gttcgtcgacgattttg

SEQ ID NO: 127428 - DNA, 17 bp, Arabidopsis thaliana
gttcgtcgatatgttga

SEQ ID NO: 127429 - DNA, 17 bp, Arabidopsis thaliana
gttcgtcgcactccttt

SEQ ID NO: 127430 - DNA, 17 bp, Arabidopsis thaliana
gttcgtcgctctagttg

SEQ ID NO: 127431 - DNA, 17 bp, Arabidopsis thaliana
gttcgtcggctatgagt

SEQ ID NO: 127432 - DNA, 17 bp, Arabidopsis thaliana
gttcgtcgtcgtcatcg

SEQ ID NO: 127433 - DNA, 17 bp, Arabidopsis thaliana
gttcgtcgtcttcttct

SEQ ID NO: 127434 - DNA, 17 bp, Arabidopsis thaliana
gttcgtctagctcagtt

SEQ ID NO: 127435 - DNA, 17 bp, Arabidopsis thaliana
gttcgtctcaagcgtaa

SEQ ID NO: 127436 - DNA, 17 bp, Arabidopsis thaliana
gttcgtctcaggattga

SEQ ID NO: 127437 - DNA, 17 bp, Arabidopsis thaliana
gttcgtctcaggtcagg

SEQ ID NO: 127438 - DNA, 17 bp, Arabidopsis thaliana
gttcgtctcccggcaga

SEQ ID NO: 127439 - DNA, 17 bp, Arabidopsis thaliana
gttcgtctcccggtagg

SEQ ID NO: 127440 - DNA, 17 bp, Arabidopsis thaliana
gttcgtctcggtgggac

SEQ ID NO: 127441 - DNA, 17 bp, Arabidopsis thaliana
gttcgtctctcggcaga

SEQ ID NO: 127442 - DNA, 17 bp, Arabidopsis thaliana
gttcgtctgacttgggt

SEQ ID NO: 127443 - DNA, 17 bp, Arabidopsis thaliana
gttcgtcttcggagatc

SEQ ID NO: 127444 - DNA, 17 bp, Arabidopsis thaliana
gttcgtcttcttaattt

SEQ ID NO: 127445 - DNA, 17 bp, Arabidopsis thaliana
gttcgtgattttttgga

SEQ ID NO: 127446 - DNA, 17 bp, Arabidopsis thaliana
gttcgtgcccatttctt

SEQ ID NO: 127447 - DNA, 17 bp, Arabidopsis thaliana
gttcgtgccccgccgga

SEQ ID NO: 127448 - DNA, 17 bp, Arabidopsis thaliana
gttcgtgggaaggatat

SEQ ID NO: 127449 - DNA, 17 bp, Arabidopsis thaliana
gttcgtgtagatgattg

SEQ ID NO: 127450 - DNA, 17 bp, Arabidopsis thaliana
gttcgtgtccaaccgca

SEQ ID NO: 127451 - DNA, 17 bp, Arabidopsis thaliana
gttcgtgtcccaccggg

SEQ ID NO: 127452 - DNA, 17 bp, Arabidopsis thaliana
gttcgtgtcccactggg

SEQ ID NO: 127453 - DNA, 17 bp, Arabidopsis thaliana
gttcgtgtcccggcaac

SEQ ID NO: 127454 - DNA, 17 bp, Arabidopsis thaliana
gttcgtgtcccggcgac

SEQ ID NO: 127455 - DNA, 17 bp, Arabidopsis thaliana
gttcgtgtccgctggtt

SEQ ID NO: 127456 - DNA, 17 bp, Arabidopsis thaliana
gttcgtgtgaattttgt

SEQ ID NO: 127457 - DNA, 17 bp, Arabidopsis thaliana
gttcgtgttcggttttc

SEQ ID NO: 127458 - DNA, 17 bp, Arabidopsis thaliana
gttcgtgttgttctctt

SEQ ID NO: 127459 - DNA, 17 bp, Arabidopsis thaliana
gttcgttaagacggact

SEQ ID NO: 127460 - DNA, 17 bp, Arabidopsis thaliana
gttcgttacaaggggcg

SEQ ID NO: 127461 - DNA, 17 bp, Arabidopsis thaliana
gttcgttaccacaggga

SEQ ID NO: 127462 - DNA, 17 bp, Arabidopsis thaliana
gttcgttaccattgaag

SEQ ID NO: 127463 - DNA, 17 bp, Arabidopsis thaliana
gttcgttacgagactac

SEQ ID NO: 127464 - DNA, 17 bp, Arabidopsis thaliana
gttcgttactatttgaa

SEQ ID NO: 127465 - DNA, 17 bp, Arabidopsis thaliana
gttcgttagagcacccg

SEQ ID NO: 127466 - DNA, 17 bp, Arabidopsis thaliana
gttcgttagaggtcttt

SEQ ID NO: 127467 - DNA, 17 bp, Arabidopsis thaliana
gttcgttatcagcacgc

SEQ ID NO: 127468 - DNA, 17 bp, Arabidopsis thaliana
gttcgttatgtattcga

SEQ ID NO: 127469 - DNA, 17 bp, Arabidopsis thaliana
gttcgttattacaggag

SEQ ID NO: 127470 - DNA, 17 bp, Arabidopsis thaliana
gttcgttcaaatccagc

SEQ ID NO: 127471 - DNA, 17 bp, Arabidopsis thaliana
gttcgttcaaatccagg

SEQ ID NO: 127472 - DNA, 17 bp, Arabidopsis thaliana
gttcgttcaaatcccac

SEQ ID NO: 127473 - DNA, 17 bp, Arabidopsis thaliana
gttcgttcaaatccggg

SEQ ID NO: 127474 - DNA, 17 bp, Arabidopsis thaliana
gttcgttcaaatcctac

SEQ ID NO: 127475 - DNA, 17 bp, Arabidopsis thaliana
gttcgttcaacctgcat

SEQ ID NO: 127476 - DNA, 17 bp, Arabidopsis thaliana
gttcgttcaagccaatg

SEQ ID NO: 127477 - DNA, 17 bp, Arabidopsis thaliana
gttcgttcaagcccgca

SEQ ID NO: 127478 - DNA, 17 bp, Arabidopsis thaliana
gttcgttcaagtctcgg

SEQ ID NO: 127479 - DNA, 17 bp, Arabidopsis thaliana
gttcgttcacttccatc

SEQ ID NO: 127480 - DNA, 17 bp, Arabidopsis thaliana
gttcgttcagacctggt

SEQ ID NO: 127481 - DNA, 17 bp, Arabidopsis thaliana
gttcgttcagcgaccaa

SEQ ID NO: 127482 - DNA, 17 bp, Arabidopsis thaliana
gttcgttcaggtctcgg

SEQ ID NO: 127483 - DNA, 17 bp, Arabidopsis thaliana
gttcgttcatatattgt

SEQ ID NO: 127484 - DNA, 17 bp, Arabidopsis thaliana
gttcgttcatttctcgg

SEQ ID NO: 127485 - DNA, 17 bp, Arabidopsis thaliana
gttcgttccaatgaagt

SEQ ID NO: 127486 - DNA, 17 bp, Arabidopsis thaliana
gttcgttccacgctcac

SEQ ID NO: 127487 - DNA, 17 bp, Arabidopsis thaliana
gttcgttccatgtgaat

SEQ ID NO: 127488 - DNA, 17 bp, Arabidopsis thaliana
gttcgttccccacagac

SEQ ID NO: 127489 - DNA, 17 bp, Arabidopsis thaliana
gttcgttccccagcaga

SEQ ID NO: 127490 - DNA, 17 bp, Arabidopsis thaliana
gttcgttcccccctcct

SEQ ID NO: 127491 - DNA, 17 bp, Arabidopsis thaliana
gttcgttcccccgcatc

SEQ ID NO: 127492 - DNA, 17 bp, Arabidopsis thaliana
gttcgttccccctacct

SEQ ID NO: 127493 - DNA, 17 bp, Arabidopsis thaliana
gttcgttccccggcaac

SEQ ID NO: 127494 - DNA, 17 bp, Arabidopsis thaliana
gttcgttccctgtatag

SEQ ID NO: 127495 - DNA, 17 bp, Arabidopsis thaliana
gttcgttccgagattat

SEQ ID NO: 127496 - DNA, 17 bp, Arabidopsis thaliana
gttcgttcctcgccggg

SEQ ID NO: 127497 - DNA, 17 bp, Arabidopsis thaliana
gttcgttcctgcgtgtg

SEQ ID NO: 127498 - DNA, 17 bp, Arabidopsis thaliana
gttcgttcctggacagc

SEQ ID NO: 127499 - DNA, 17 bp, Arabidopsis thaliana
gttcgttcctgggcaga

SEQ ID NO: 127500 - DNA, 17 bp, Arabidopsis thaliana
gttcgttcctgggcagc

SEQ ID NO: 127501 - DNA, 17 bp, Arabidopsis thaliana
gttcgttcgaacccggg

SEQ ID NO: 127502 - DNA, 17 bp, Arabidopsis thaliana
gttcgttcgaatccaat

SEQ ID NO: 127503 - DNA, 17 bp, Arabidopsis thaliana
gttcgttcgaatcctac

SEQ ID NO: 127504 - DNA, 17 bp, Arabidopsis thaliana
gttcgttcgagtcccct

SEQ ID NO: 127505 - DNA, 17 bp, Arabidopsis thaliana
gttcgttcgatcctgga

SEQ ID NO: 127506 - DNA, 17 bp, Arabidopsis thaliana
gttcgttcgatcctggg

SEQ ID NO: 127507 - DNA, 17 bp, Arabidopsis thaliana
gttcgttcgattcccgg

SEQ ID NO: 127508 - DNA, 17 bp, Arabidopsis thaliana
gttcgttcgattccggc

SEQ ID NO: 127509 - DNA, 17 bp, Arabidopsis thaliana
gttcgttcgattttggt

SEQ ID NO: 127510 - DNA, 17 bp, Arabidopsis thaliana
gttcgttcgcagtttga

SEQ ID NO: 127511 - DNA, 17 bp, Arabidopsis thaliana
gttcgttcggaactggg

SEQ ID NO: 127512 - DNA, 17 bp, Arabidopsis thaliana
gttcgttcggacccggg

SEQ ID NO: 127513 - DNA, 17 bp, Arabidopsis thaliana
gttcgttcggatcgcgg

SEQ ID NO: 127514 - DNA, 17 bp, Arabidopsis thaliana
gttcgttcggatctctc

SEQ ID NO: 127515 - DNA, 17 bp, Arabidopsis thaliana
gttcgttcggatcttgg

SEQ ID NO: 127516 - DNA, 17 bp, Arabidopsis thaliana
gttcgttcggcccctct

SEQ ID NO: 127517 - DNA, 17 bp, Arabidopsis thaliana
gttcgttcgggctctat

SEQ ID NO: 127518 - DNA, 17 bp, Arabidopsis thaliana
gttcgttcggtcctggg

SEQ ID NO: 127519 - DNA, 17 bp, Arabidopsis thaliana
gttcgttcggttcccgg

SEQ ID NO: 127520 - DNA, 17 bp, Arabidopsis thaliana
gttcgttcggttcgtta

SEQ ID NO: 127521 - DNA, 17 bp, Arabidopsis thaliana
gttcgttcgtacccggg

SEQ ID NO: 127522 - DNA, 17 bp, Arabidopsis thaliana
gttcgttcgtacctggg

SEQ ID NO: 127523 - DNA, 17 bp, Arabidopsis thaliana
gttcgttcgtcccaccg

SEQ ID NO: 127524 - DNA, 17 bp, Arabidopsis thaliana
gttcgttcgttccccct

SEQ ID NO: 127525 - DNA, 17 bp, Arabidopsis thaliana
gttcgttcgttcctggg

SEQ ID NO: 127526 - DNA, 17 bp, Arabidopsis thaliana
gttcgttcgtttcccgg

SEQ ID NO: 127527 - DNA, 17 bp, Arabidopsis thaliana
gttcgttcgtttccctg

SEQ ID NO: 127528 - DNA, 17 bp, Arabidopsis thaliana
gttcgttcgtttccggc

SEQ ID NO: 127529 - DNA, 17 bp, Arabidopsis thaliana
gttcgttcgttttgtgt

SEQ ID NO: 127530 - DNA, 17 bp, Arabidopsis thaliana
gttcgttctatttgtgt

SEQ ID NO: 127531 - DNA, 17 bp, Arabidopsis thaliana
gttcgttctcccggtag

SEQ ID NO: 127532 - DNA, 17 bp, Arabidopsis thaliana
gttcgttctgagggctg

SEQ ID NO: 127533 - DNA, 17 bp, Arabidopsis thaliana
gttcgttctggtccgaa

SEQ ID NO: 127534 - DNA, 17 bp, Arabidopsis thaliana
gttcgttcttacatcac

SEQ ID NO: 127535 - DNA, 17 bp, Arabidopsis thaliana
gttcgttcttcaactcc

SEQ ID NO: 127536 - DNA, 17 bp, Arabidopsis thaliana
gttcgttcttgctgtgg

SEQ ID NO: 127537 - DNA, 17 bp, Arabidopsis thaliana
gttcgttctttgctgct

SEQ ID NO: 127538 - DNA, 17 bp, Arabidopsis thaliana
gttcgttcttttggacc

SEQ ID NO: 127539 - DNA, 17 bp, Arabidopsis thaliana
gttcgttctttttcggg

SEQ ID NO: 127540 - DNA, 17 bp, Arabidopsis thaliana
gttcgttgaaccagcga

SEQ ID NO: 127541 - DNA, 17 bp, Arabidopsis thaliana
gttcgttgaaccttggg

SEQ ID NO: 127542 - DNA, 17 bp, Arabidopsis thaliana
gttcgttgaccaacaaa

SEQ ID NO: 127543 - DNA, 17 bp, Arabidopsis thaliana
gttcgttgacccagaag

SEQ ID NO: 127544 - DNA, 17 bp, Arabidopsis thaliana
gttcgttgacccgatga

SEQ ID NO: 127545 - DNA, 17 bp, Arabidopsis thaliana
gttcgttgaggcgcagc

SEQ ID NO: 127546 - DNA, 17 bp, Arabidopsis thaliana
gttcgttgagtctgagg

SEQ ID NO: 127547 - DNA, 17 bp, Arabidopsis thaliana
gttcgttgataaggagc

SEQ ID NO: 127548 - DNA, 17 bp, Arabidopsis thaliana
gttcgttgataaggagt

SEQ ID NO: 127549 - DNA, 17 bp, Arabidopsis thaliana
gttcgttgataaggtgc

SEQ ID NO: 127550 - DNA, 17 bp, Arabidopsis thaliana
gttcgttgatgataaca

SEQ ID NO: 127551 - DNA, 17 bp, Arabidopsis thaliana
gttcgttgattcccggc

SEQ ID NO: 127552 - DNA, 17 bp, Arabidopsis thaliana
gttcgttgcatgtcgcc

SEQ ID NO: 127553 - DNA, 17 bp, Arabidopsis thaliana
gttcgttgcatgtcgct

SEQ ID NO: 127554 - DNA, 17 bp, Arabidopsis thaliana
gttcgttgctaactcac

SEQ ID NO: 127555 - DNA, 17 bp, Arabidopsis thaliana
gttcgttgctacccgct

SEQ ID NO: 127556 - DNA, 17 bp, Arabidopsis thaliana
gttcgttgctggtcgac

SEQ ID NO: 127557 - DNA, 17 bp, Arabidopsis thaliana
gttcgttggaaaagtgc

SEQ ID NO: 127558 - DNA, 17 bp, Arabidopsis thaliana
gttcgttggcgggacgg

SEQ ID NO: 127559 - DNA, 17 bp, Arabidopsis thaliana
gttcgttgtcactcgaa

SEQ ID NO: 127560 - DNA, 17 bp, Arabidopsis thaliana
gttcgttgtcagtcgta

SEQ ID NO: 127561 - DNA, 17 bp, Arabidopsis thaliana
gttcgttgtcgatttca

SEQ ID NO: 127562 - DNA, 17 bp, Arabidopsis thaliana
gttcgttgtcggcacca

SEQ ID NO: 127563 - DNA, 17 bp, Arabidopsis thaliana
gttcgttgtctctggtg

SEQ ID NO: 127564 - DNA, 17 bp, Arabidopsis thaliana
gttcgttgtctgttcga

SEQ ID NO: 127565 - DNA, 17 bp, Arabidopsis thaliana
gttcgttgttgactaca

SEQ ID NO: 127566 - DNA, 17 bp, Arabidopsis thaliana
gttcgtttacatgtcgc

SEQ ID NO: 127567 - DNA, 17 bp, Arabidopsis thaliana
gttcgtttacttgtcgc

SEQ ID NO: 127568 - DNA, 17 bp, Arabidopsis thaliana
gttcgtttagttgccgc

SEQ ID NO: 127569 - DNA, 17 bp, Arabidopsis thaliana
gttcgtttattaatcgc

SEQ ID NO: 127570 - DNA, 17 bp, Arabidopsis thaliana
gttcgtttcacgtcggg

SEQ ID NO: 127571 - DNA, 17 bp, Arabidopsis thaliana
gttcgtttcacgttgac

SEQ ID NO: 127572 - DNA, 17 bp, Arabidopsis thaliana
gttcgtttcagatagcg

SEQ ID NO: 127573 - DNA, 17 bp, Arabidopsis thaliana
gttcgtttccatgtcgc

SEQ ID NO: 127574 - DNA, 17 bp, Arabidopsis thaliana
gttcgtttcccacagac

SEQ ID NO: 127575 - DNA, 17 bp, Arabidopsis thaliana
gttcgtttcccagtgca

SEQ ID NO: 127576 - DNA, 17 bp, Arabidopsis thaliana
gttcgtttccccgcacc

SEQ ID NO: 127577 - DNA, 17 bp, Arabidopsis thaliana
gttcgtttccccgcatc

SEQ ID NO: 127578 - DNA, 17 bp, Arabidopsis thaliana
gttcgtttcccggcaga

SEQ ID NO: 127579 - DNA, 17 bp, Arabidopsis thaliana
gttcgtttcccggctgg

SEQ ID NO: 127580 - DNA, 17 bp, Arabidopsis thaliana
gttcgtttcccggctgt

SEQ ID NO: 127581 - DNA, 17 bp, Arabidopsis thaliana
gttcgtttcccggcttg

SEQ ID NO: 127582 - DNA, 17 bp, Arabidopsis thaliana
gttcgtttcccggttgg

SEQ ID NO: 127583 - DNA, 17 bp, Arabidopsis thaliana
gttcgtttccctggatg

SEQ ID NO: 127584 - DNA, 17 bp, Arabidopsis thaliana
gttcgtttccctgtcgc

SEQ ID NO: 127585 - DNA, 17 bp, Arabidopsis thaliana
gttcgtttccggcagct

SEQ ID NO: 127586 - DNA, 17 bp, Arabidopsis thaliana
gttcgtttccggcaggc

SEQ ID NO: 127587 - DNA, 17 bp, Arabidopsis thaliana
gttcgtttccggcaggt

SEQ ID NO: 127588 - DNA, 17 bp, Arabidopsis thaliana
gttcgtttccggcatgt

SEQ ID NO: 127589 - DNA, 17 bp, Arabidopsis thaliana
gttcgtttccggcgggt

SEQ ID NO: 127590 - DNA, 17 bp, Arabidopsis thaliana
gttcgtttccggcgtcg

SEQ ID NO: 127591 - DNA, 17 bp, Arabidopsis thaliana
gttcgtttccgttcttg

SEQ ID NO: 127592 - DNA, 17 bp, Arabidopsis thaliana
gttcgtttcctcagcca

SEQ ID NO: 127593 - DNA, 17 bp, Arabidopsis thaliana
gttcgtttcctgacaca

SEQ ID NO: 127594 - DNA, 17 bp, Arabidopsis thaliana
gttcgtttccttggttc

SEQ ID NO: 127595 - DNA, 17 bp, Arabidopsis thaliana
gttcgtttcgggcctgg

SEQ ID NO: 127596 - DNA, 17 bp, Arabidopsis thaliana
gttcgtttctccgacag

SEQ ID NO: 127597 - DNA, 17 bp, Arabidopsis thaliana
gttcgtttctcggaacg

SEQ ID NO: 127598 - DNA, 17 bp, Arabidopsis thaliana
gttcgtttctcggaatg

SEQ ID NO: 127599 - DNA, 17 bp, Arabidopsis thaliana
gttcgtttctcggctgg

SEQ ID NO: 127600 - DNA, 17 bp, Arabidopsis thaliana
gttcgtttctctgtcgc

SEQ ID NO: 127601 - DNA, 17 bp, Arabidopsis thaliana
gttcgtttctggccaac

SEQ ID NO: 127602 - DNA, 17 bp, Arabidopsis thaliana
gttcgtttctgtgtcgc

SEQ ID NO: 127603 - DNA, 17 bp, Arabidopsis thaliana
gttcgtttctttgtcgc

SEQ ID NO: 127604 - DNA, 17 bp, Arabidopsis thaliana
gttcgtttgactgtcgc

SEQ ID NO: 127605 - DNA, 17 bp, Arabidopsis thaliana
gttcgtttgcatgtcgc

SEQ ID NO: 127606 - DNA, 17 bp, Arabidopsis thaliana
gttcgtttgcatgttgc

SEQ ID NO: 127607 - DNA, 17 bp, Arabidopsis thaliana
gttcgtttgcatttcgc

SEQ ID NO: 127608 - DNA, 17 bp, Arabidopsis thaliana
gttcgtttgcccattcg

SEQ ID NO: 127609 - DNA, 17 bp, Arabidopsis thaliana
gttcgtttgcctgtcgc

SEQ ID NO: 127610 - DNA, 17 bp, Arabidopsis thaliana
gttcgtttgcctgtctc

SEQ ID NO: 127611 - DNA, 17 bp, Arabidopsis thaliana
gttcgtttgcggaaacg

SEQ ID NO: 127612 - DNA, 17 bp, Arabidopsis thaliana
gttcgtttgcggctaaa

SEQ ID NO: 127613 - DNA, 17 bp, Arabidopsis thaliana
gttcgtttgcggttgcg

SEQ ID NO: 127614 - DNA, 17 bp, Arabidopsis thaliana
gttcgtttgctcattca

SEQ ID NO: 127615 - DNA, 17 bp, Arabidopsis thaliana
gttcgtttgctcattcg

SEQ ID NO: 127616 - DNA, 17 bp, Arabidopsis thaliana
gttcgtttgctcattta

SEQ ID NO: 127617 - DNA, 17 bp, Arabidopsis thaliana
gttcgtttgctcatttg

SEQ ID NO: 127618 - DNA, 17 bp, Arabidopsis thaliana
gttcgtttgctcgtggc

SEQ ID NO: 127619 - DNA, 17 bp, Arabidopsis thaliana
gttcgtttgcttgtcgc

SEQ ID NO: 127620 - DNA, 17 bp, Arabidopsis thaliana
gttcgtttggaccgcag

SEQ ID NO: 127621 - DNA, 17 bp, Arabidopsis thaliana
gttcgtttgggactcag

SEQ ID NO: 127622 - DNA, 17 bp, Arabidopsis thaliana
gttcgtttggtcgccgc

SEQ ID NO: 127623 - DNA, 17 bp, Arabidopsis thaliana
gttcgtttgtacccggg

SEQ ID NO: 127624 - DNA, 17 bp, Arabidopsis thaliana
gttcgtttgtctatcgc

SEQ ID NO: 127625 - DNA, 17 bp, Arabidopsis thaliana
gttcgtttgtctgccgt

SEQ ID NO: 127626 - DNA, 17 bp, Arabidopsis thaliana
gttcgtttgtctgtcgc

SEQ ID NO: 127627 - DNA, 17 bp, Arabidopsis thaliana
gttcgttttagtgtgga

SEQ ID NO: 127628 - DNA, 17 bp, Arabidopsis thaliana
gttcgttttcatggcag

SEQ ID NO: 127629 - DNA, 17 bp, Arabidopsis thaliana
gttcgttttccatttat

SEQ ID NO: 127630 - DNA, 17 bp, Arabidopsis thaliana
gttcgttttcccggctg

SEQ ID NO: 127631 - DNA, 17 bp, Arabidopsis thaliana
gttcgttttccgactaa

SEQ ID NO: 127632 - DNA, 17 bp, Arabidopsis thaliana
gttcgttttccggctgg

SEQ ID NO: 127633 - DNA, 17 bp, Arabidopsis thaliana
gttcgttttcgcgctaa

SEQ ID NO: 127634 - DNA, 17 bp, Arabidopsis thaliana
gttcgttttcggcaggt

SEQ ID NO: 127635 - DNA, 17 bp, Arabidopsis thaliana
gttcgttttctgggatt

SEQ ID NO: 127636 - DNA, 17 bp, Arabidopsis thaliana
gttcgttttcttatcgc

SEQ ID NO: 127637 - DNA, 17 bp, Arabidopsis thaliana
gttcgttttgcatgtcg

SEQ ID NO: 127638 - DNA, 17 bp, Arabidopsis thaliana
gttcgttttgggaattg

SEQ ID NO: 127639 - DNA, 17 bp, Arabidopsis thaliana
gttcgttttgggtgtct

SEQ ID NO: 127640 - DNA, 17 bp, Arabidopsis thaliana
gttcgttttgtcgctgg

SEQ ID NO: 127641 - DNA, 17 bp, Arabidopsis thaliana
gttcgttttgtcgtcgt

SEQ ID NO: 127642 - DNA, 17 bp, Arabidopsis thaliana
gttcgttttgtgtgtct

SEQ ID NO: 127643 - DNA, 17 bp, Arabidopsis thaliana
gttcgttttgttcgttt

SEQ ID NO: 127644 - DNA, 17 bp, Arabidopsis thaliana
gttcgtttttcgttgga

SEQ ID NO: 127645 - DNA, 17 bp, Arabidopsis thaliana
gttcgttttttttttca

SEQ ID NO: 127646 - DNA, 17 bp, Arabidopsis thaliana
gttctaaagctctgact

SEQ ID NO: 127647 - DNA, 17 bp, Arabidopsis thaliana
gttctaacaggagagct

SEQ ID NO: 127648 - DNA, 17 bp, Arabidopsis thaliana
gttctaacagtacggtc

SEQ ID NO: 127649 - DNA, 17 bp, Arabidopsis thaliana
gttctaaccccaggatt

SEQ ID NO: 127650 - DNA, 17 bp, Arabidopsis thaliana
gttctaaccgaggcgcg

SEQ ID NO: 127651 - DNA, 17 bp, Arabidopsis thaliana
gttctaacggtggtgta

SEQ ID NO: 127652 - DNA, 17 bp, Arabidopsis thaliana
gttctaactatattacg

SEQ ID NO: 127653 - DNA, 17 bp, Arabidopsis thaliana
gttctaactccaggatt

SEQ ID NO: 127654 - DNA, 17 bp, Arabidopsis thaliana
gttctaagaagcgtttg

SEQ ID NO: 127655 - DNA, 17 bp, Arabidopsis thaliana
gttctaagcgtcactcg

SEQ ID NO: 127656 - DNA, 17 bp, Arabidopsis thaliana
gttctaaggcgaagtcc

SEQ ID NO: 127657 - DNA, 17 bp, Arabidopsis thaliana
gttctaagtccgttcgg

SEQ ID NO: 127658 - DNA, 17 bp, Arabidopsis thaliana
gttctaagtgtgcgttg

SEQ ID NO: 127659 - DNA, 17 bp, Arabidopsis thaliana
gttctaattgggcatat

SEQ ID NO: 127660 - DNA, 17 bp, Arabidopsis thaliana
gttctacaagcgggatt

SEQ ID NO: 127661 - DNA, 17 bp, Arabidopsis thaliana
gttctacacgagtggac

SEQ ID NO: 127662 - DNA, 17 bp, Arabidopsis thaliana
gttctacagatccgttc

SEQ ID NO: 127663 - DNA, 17 bp, Arabidopsis thaliana
gttctacagatgaaagt

SEQ ID NO: 127664 - DNA, 17 bp, Arabidopsis thaliana
gttctacaggcgtgtct

SEQ ID NO: 127665 - DNA, 17 bp, Arabidopsis thaliana
gttctacatgatccgct

SEQ ID NO: 127666 - DNA, 17 bp, Arabidopsis thaliana
gttctaccagtattatc

SEQ ID NO: 127667 - DNA, 17 bp, Arabidopsis thaliana
gttctaccatgtaaact

SEQ ID NO: 127668 - DNA, 17 bp, Arabidopsis thaliana
gttctacctcagcaaca

SEQ ID NO: 127669 - DNA, 17 bp, Arabidopsis thaliana
gttctacctcgacacgt

SEQ ID NO: 127670 - DNA, 17 bp, Arabidopsis thaliana
gttctacctgatcttgc

SEQ ID NO: 127671 - DNA, 17 bp, Arabidopsis thaliana
gttctacctgtttctgc

SEQ ID NO: 127672 - DNA, 17 bp, Arabidopsis thaliana
gttctacgagcctctta

SEQ ID NO: 127673 - DNA, 17 bp, Arabidopsis thaliana
gttctacgccgaatccc

SEQ ID NO: 127674 - DNA, 17 bp, Arabidopsis thaliana
gttctacgggctaaatt

SEQ ID NO: 127675 - DNA, 17 bp, Arabidopsis thaliana
gttctacggttcaggtt

SEQ ID NO: 127676 - DNA, 17 bp, Arabidopsis thaliana
gttctactaccggaggt

SEQ ID NO: 127677 - DNA, 17 bp, Arabidopsis thaliana
gttctacttaactgctc

SEQ ID NO: 127678 - DNA, 17 bp, Arabidopsis thaliana
gttctacttgaaatgct

SEQ ID NO: 127679 - DNA, 17 bp, Arabidopsis thaliana
gttctacttgatccgcc

SEQ ID NO: 127680 - DNA, 17 bp, Arabidopsis thaliana
gttctacttgcctggca

SEQ ID NO: 127681 - DNA, 17 bp, Arabidopsis thaliana
gttctactttccgaata

SEQ ID NO: 127682 - DNA, 17 bp, Arabidopsis thaliana
gttctagaaactgacca

SEQ ID NO: 127683 - DNA, 17 bp, Arabidopsis thaliana
gttctagacgctatgca

SEQ ID NO: 127684 - DNA, 17 bp, Arabidopsis thaliana
gttctagacttctggtc

SEQ ID NO: 127685 - DNA, 17 bp, Arabidopsis thaliana
gttctaggttagcgcgc

SEQ ID NO: 127686 - DNA, 17 bp, Arabidopsis thaliana
gttctaggttagcgggc

SEQ ID NO: 127687 - DNA, 17 bp, Arabidopsis thaliana
gttctaggttttctcag

SEQ ID NO: 127688 - DNA, 17 bp, Arabidopsis thaliana
gttctatacctgttgcg

SEQ ID NO: 127689 - DNA, 17 bp, Arabidopsis thaliana
gttctatcctgagacat

SEQ ID NO: 127690 - DNA, 17 bp, Arabidopsis thaliana
gttctatgctaaatgat

SEQ ID NO: 127691 - DNA, 17 bp, Arabidopsis thaliana
gttctatgcttgttgcg

SEQ ID NO: 127692 - DNA, 17 bp, Arabidopsis thaliana
gttctatggtcgactag

SEQ ID NO: 127693 - DNA, 17 bp, Arabidopsis thaliana
gttctatggtgtagtgg

SEQ ID NO: 127694 - DNA, 17 bp, Arabidopsis thaliana
gttctatggtgtagtgt

SEQ ID NO: 127695 - DNA, 17 bp, Arabidopsis thaliana
gttctatgtttcgttca

SEQ ID NO: 127696 - DNA, 17 bp, Arabidopsis thaliana
gttctattaaccgacta

SEQ ID NO: 127697 - DNA, 17 bp, Arabidopsis thaliana
gttctattagctcagtg

SEQ ID NO: 127698 - DNA, 17 bp, Arabidopsis thaliana
gttctattattgcgtct

SEQ ID NO: 127699 - DNA, 17 bp, Arabidopsis thaliana
gttctattgctgaatgc

SEQ ID NO: 127700 - DNA, 17 bp, Arabidopsis thaliana
gttctattggctctgta

SEQ ID NO: 127701 - DNA, 17 bp, Arabidopsis thaliana
gttctattgtccagctt

SEQ ID NO: 127702 - DNA, 17 bp, Arabidopsis thaliana
gttctattgtctagcgg

SEQ ID NO: 127703 - DNA, 17 bp, Arabidopsis thaliana
gttctattgtggccaaa

SEQ ID NO: 127704 - DNA, 17 bp, Arabidopsis thaliana
gttctatttcggtgggc

SEQ ID NO: 127705 - DNA, 17 bp, Arabidopsis thaliana
gttctatttgggacagc

SEQ ID NO: 127706 - DNA, 17 bp, Arabidopsis thaliana
gttctatttgtgtttgg

SEQ ID NO: 127707 - DNA, 17 bp, Arabidopsis thaliana
gttctcaaagatctgaa

SEQ ID NO: 127708 - DNA, 17 bp, Arabidopsis thaliana
gttctcaaaggccctac

SEQ ID NO: 127709 - DNA, 17 bp, Arabidopsis thaliana
gttctcaacaagatgga

SEQ ID NO: 127710 - DNA, 17 bp, Arabidopsis thaliana
gttctcacacgctttct

SEQ ID NO: 127711 - DNA, 17 bp, Arabidopsis thaliana
gttctcacagcgcctgc

SEQ ID NO: 127712 - DNA, 17 bp, Arabidopsis thaliana
gttctcaccgtttgtgt

SEQ ID NO: 127713 - DNA, 17 bp, Arabidopsis thaliana
gttctcactcacacggt

SEQ ID NO: 127714 - DNA, 17 bp, Arabidopsis thaliana
gttctcagagcagctac

SEQ ID NO: 127715 - DNA, 17 bp, Arabidopsis thaliana
gttctcagagcagctgc

SEQ ID NO: 127716 - DNA, 17 bp, Arabidopsis thaliana
gttctcagcatgacacc

SEQ ID NO: 127717 - DNA, 17 bp, Arabidopsis thaliana
gttctcaggaacaggat

SEQ ID NO: 127718 - DNA, 17 bp, Arabidopsis thaliana
gttctcagtgaatgaac

SEQ ID NO: 127719 - DNA, 17 bp, Arabidopsis thaliana
gttctcagttcgcaata

SEQ ID NO: 127720 - DNA, 17 bp, Arabidopsis thaliana
gttctcagttggttcag

SEQ ID NO: 127721 - DNA, 17 bp, Arabidopsis thaliana
gttctcatcgctgcatg

SEQ ID NO: 127722 - DNA, 17 bp, Arabidopsis thaliana
gttctcatcgctgcatt

SEQ ID NO: 127723 - DNA, 17 bp, Arabidopsis thaliana
gttctccaacgtggacc

SEQ ID NO: 127724 - DNA, 17 bp, Arabidopsis thaliana
gttctccaactggacta

SEQ ID NO: 127725 - DNA, 17 bp, Arabidopsis thaliana
gttctccacagacggcg

SEQ ID NO: 127726 - DNA, 17 bp, Arabidopsis thaliana
gttctccacttagattt

SEQ ID NO: 127727 - DNA, 17 bp, Arabidopsis thaliana
gttctcccatgggagct

SEQ ID NO: 127728 - DNA, 17 bp, Arabidopsis thaliana
gttctccccgaaatgcg

SEQ ID NO: 127729 - DNA, 17 bp, Arabidopsis thaliana
gttctccccggcaacgg

SEQ ID NO: 127730 - DNA, 17 bp, Arabidopsis thaliana
gttctcccggcttgtgc

SEQ ID NO: 127731 - DNA, 17 bp, Arabidopsis thaliana
gttctcccggtaggacc

SEQ ID NO: 127732 - DNA, 17 bp, Arabidopsis thaliana
gttctccgaattcttgt

SEQ ID NO: 127733 - DNA, 17 bp, Arabidopsis thaliana
gttctccggcaggtcgg

SEQ ID NO: 127734 - DNA, 17 bp, Arabidopsis thaliana
gttctcctcaccgtagg

SEQ ID NO: 127735 - DNA, 17 bp, Arabidopsis thaliana
gttctcctcagggcttt

SEQ ID NO: 127736 - DNA, 17 bp, Arabidopsis thaliana
gttctcctctcagggct

SEQ ID NO: 127737 - DNA, 17 bp, Arabidopsis thaliana
gttctcctgggcagcac

SEQ ID NO: 127738 - DNA, 17 bp, Arabidopsis thaliana
gttctcgaagcggtgag

SEQ ID NO: 127739 - DNA, 17 bp, Arabidopsis thaliana
gttctcgaccttctatc

SEQ ID NO: 127740 - DNA, 17 bp, Arabidopsis thaliana
gttctcgactgcagatg

SEQ ID NO: 127741 - DNA, 17 bp, Arabidopsis thaliana
gttctcgacttgagcgt

SEQ ID NO: 127742 - DNA, 17 bp, Arabidopsis thaliana
gttctcgattatcctac

SEQ ID NO: 127743 - DNA, 17 bp, Arabidopsis thaliana
gttctcgcttaagaaac

SEQ ID NO: 127744 - DNA, 17 bp, Arabidopsis thaliana
gttctcgggtcaacggg

SEQ ID NO: 127745 - DNA, 17 bp, Arabidopsis thaliana
gttctcggtcgagaatc

SEQ ID NO: 127746 - DNA, 17 bp, Arabidopsis thaliana
gttctcggtgattgtgc

SEQ ID NO: 127747 - DNA, 17 bp, Arabidopsis thaliana
gttctcggttgccaggt

SEQ ID NO: 127748 - DNA, 17 bp, Arabidopsis thaliana
gttctcgtagcggcggt

SEQ ID NO: 127749 - DNA, 17 bp, Arabidopsis thaliana
gttctcgtccaacggtc

SEQ ID NO: 127750 - DNA, 17 bp, Arabidopsis thaliana
gttctcgtctactctgg

SEQ ID NO: 127751 - DNA, 17 bp, Arabidopsis thaliana
gttctcgtggggaaata

SEQ ID NO: 127752 - DNA, 17 bp, Arabidopsis thaliana
gttctcgttgcacaggc

SEQ ID NO: 127753 - DNA, 17 bp, Arabidopsis thaliana
gttctctaagtggctcg

SEQ ID NO: 127754 - DNA, 17 bp, Arabidopsis thaliana
gttctctacttatctcg

SEQ ID NO: 127755 - DNA, 17 bp, Arabidopsis thaliana
gttctctatgtgcaact

SEQ ID NO: 127756 - DNA, 17 bp, Arabidopsis thaliana
gttctctattcggaacc

SEQ ID NO: 127757 - DNA, 17 bp, Arabidopsis thaliana
gttctctcatcggtcga

SEQ ID NO: 127758 - DNA, 17 bp, Arabidopsis thaliana
gttctctcatcggtgca

SEQ ID NO: 127759 - DNA, 17 bp, Arabidopsis thaliana
gttctctcgctcataat

SEQ ID NO: 127760 - DNA, 17 bp, Arabidopsis thaliana
gttctctcggcaacgga

SEQ ID NO: 127761 - DNA, 17 bp, Arabidopsis thaliana
gttctctcttgcagccg

SEQ ID NO: 127762 - DNA, 17 bp, Arabidopsis thaliana
gttctctgatttggaag

SEQ ID NO: 127763 - DNA, 17 bp, Arabidopsis thaliana
gttctctgctatgccca

SEQ ID NO: 127764 - DNA, 17 bp, Arabidopsis thaliana
gttctctggattcgcgt

SEQ ID NO: 127765 - DNA, 17 bp, Arabidopsis thaliana
gttctctgtctgcttct

SEQ ID NO: 127766 - DNA, 17 bp, Arabidopsis thaliana
gttctctgttgcataac

SEQ ID NO: 127767 - DNA, 17 bp, Arabidopsis thaliana
gttctcttagctgtgtg

SEQ ID NO: 127768 - DNA, 17 bp, Arabidopsis thaliana
gttctcttcggtgtgat

SEQ ID NO: 127769 - DNA, 17 bp, Arabidopsis thaliana
gttctcttcgtcttcac

SEQ ID NO: 127770 - DNA, 17 bp, Arabidopsis thaliana
gttctctttcttgattc

SEQ ID NO: 127771 - DNA, 17 bp, Arabidopsis thaliana
gttctcttttggtccgt

SEQ ID NO: 127772 - DNA, 17 bp, Arabidopsis thaliana
gttctgaaaacagggac

SEQ ID NO: 127773 - DNA, 17 bp, Arabidopsis thaliana
gttctgaacccgcgtgt

SEQ ID NO: 127774 - DNA, 17 bp, Arabidopsis thaliana
gttctgaatgagtagcg

SEQ ID NO: 127775 - DNA, 17 bp, Arabidopsis thaliana
gttctgacgtgggagca

SEQ ID NO: 127776 - DNA, 17 bp, Arabidopsis thaliana
gttctgactagttgaca

SEQ ID NO: 127777 - DNA, 17 bp, Arabidopsis thaliana
gttctgactgatggatg

SEQ ID NO: 127778 - DNA, 17 bp, Arabidopsis thaliana
gttctgacttatgatat

SEQ ID NO: 127779 - DNA, 17 bp, Arabidopsis thaliana
gttctgagactacccgt

SEQ ID NO: 127780 - DNA, 17 bp, Arabidopsis thaliana
gttctgagactactcat

SEQ ID NO: 127781 - DNA, 17 bp, Arabidopsis thaliana
gttctgagccatgagtg

SEQ ID NO: 127782 - DNA, 17 bp, Arabidopsis thaliana
gttctgagctgactgtt

SEQ ID NO: 127783 - DNA, 17 bp, Arabidopsis thaliana
gttctgaggacctctac

SEQ ID NO: 127784 - DNA, 17 bp, Arabidopsis thaliana
gttctgagggctgggct

SEQ ID NO: 127785 - DNA, 17 bp, Arabidopsis thaliana
gttctgatctttgtagc

SEQ ID NO: 127786 - DNA, 17 bp, Arabidopsis thaliana
gttctgatggatttgcg

SEQ ID NO: 127787 - DNA, 17 bp, Arabidopsis thaliana
gttctgatggccgttct

SEQ ID NO: 127788 - DNA, 17 bp, Arabidopsis thaliana
gttctgatggtgtgcat

SEQ ID NO: 127789 - DNA, 17 bp, Arabidopsis thaliana
gttctgatgtgggcatg

SEQ ID NO: 127790 - DNA, 17 bp, Arabidopsis thaliana
gttctgattcgttgacg

SEQ ID NO: 127791 - DNA, 17 bp, Arabidopsis thaliana
gttctgattggctgttg

SEQ ID NO: 127792 - DNA, 17 bp, Arabidopsis thaliana
gttctgattgggtggtg

SEQ ID NO: 127793 - DNA, 17 bp, Arabidopsis thaliana
gttctgcaactacaaga

SEQ ID NO: 127794 - DNA, 17 bp, Arabidopsis thaliana
gttctgcaactgacaaa

SEQ ID NO: 127795 - DNA, 17 bp, Arabidopsis thaliana
gttctgcacctccttcc

SEQ ID NO: 127796 - DNA, 17 bp, Arabidopsis thaliana
gttctgcagataaccgt

SEQ ID NO: 127797 - DNA, 17 bp, Arabidopsis thaliana
gttctgccaaacccgtc

SEQ ID NO: 127798 - DNA, 17 bp, Arabidopsis thaliana
gttctgccaacgaccgt

SEQ ID NO: 127799 - DNA, 17 bp, Arabidopsis thaliana
gttctgcgatgttttac

SEQ ID NO: 127800 - DNA, 17 bp, Arabidopsis thaliana
gttctgcgcagattaaa

SEQ ID NO: 127801 - DNA, 17 bp, Arabidopsis thaliana
gttctgcgcagattaat

SEQ ID NO: 127802 - DNA, 17 bp, Arabidopsis thaliana
gttctgcgctgcacata

SEQ ID NO: 127803 - DNA, 17 bp, Arabidopsis thaliana
gttctgcgctgcacatt

SEQ ID NO: 127804 - DNA, 17 bp, Arabidopsis thaliana
gttctgctaaacccgtt

SEQ ID NO: 127805 - DNA, 17 bp, Arabidopsis thaliana
gttctgctccgagctgc

SEQ ID NO: 127806 - DNA, 17 bp, Arabidopsis thaliana
gttctgctccgtcttaa

SEQ ID NO: 127807 - DNA, 17 bp, Arabidopsis thaliana
gttctgctctctttgtt

SEQ ID NO: 127808 - DNA, 17 bp, Arabidopsis thaliana
gttctgcttgatgtgct

SEQ ID NO: 127809 - DNA, 17 bp, Arabidopsis thaliana
gttctggaaccaccttt

SEQ ID NO: 127810 - DNA, 17 bp, Arabidopsis thaliana
gttctggacagcaggag

SEQ ID NO: 127811 - DNA, 17 bp, Arabidopsis thaliana
gttctggactggggtgg

SEQ ID NO: 127812 - DNA, 17 bp, Arabidopsis thaliana
gttctggatcgacccga

SEQ ID NO: 127813 - DNA, 17 bp, Arabidopsis thaliana
gttctggccgaagcccg

SEQ ID NO: 127814 - DNA, 17 bp, Arabidopsis thaliana
gttctggcggtcttggc

SEQ ID NO: 127815 - DNA, 17 bp, Arabidopsis thaliana
gttctgggatctacctt

SEQ ID NO: 127816 - DNA, 17 bp, Arabidopsis thaliana
gttctgggatctgcctt

SEQ ID NO: 127817 - DNA, 17 bp, Arabidopsis thaliana
gttctgggccgaaacca

SEQ ID NO: 127818 - DNA, 17 bp, Arabidopsis thaliana
gttctgggccgaaaccc

SEQ ID NO: 127819 - DNA, 17 bp, Arabidopsis thaliana
gttctggtccgaaaggg

SEQ ID NO: 127820 - DNA, 17 bp, Arabidopsis thaliana
gttctggtctagcggtt

SEQ ID NO: 127821 - DNA, 17 bp, Arabidopsis thaliana
gttctggttcgaagccc

SEQ ID NO: 127822 - DNA, 17 bp, Arabidopsis thaliana
gttctggttgatcctgc

SEQ ID NO: 127823 - DNA, 17 bp, Arabidopsis thaliana
gttctggtttgtgcgtt

SEQ ID NO: 127824 - DNA, 17 bp, Arabidopsis thaliana
gttctgtaatttcggtt

SEQ ID NO: 127825 - DNA, 17 bp, Arabidopsis thaliana
gttctgtaatttcttta

SEQ ID NO: 127826 - DNA, 17 bp, Arabidopsis thaliana
gttctgtactggaggtg

SEQ ID NO: 127827 - DNA, 17 bp, Arabidopsis thaliana
gttctgtccatacggcg

SEQ ID NO: 127828 - DNA, 17 bp, Arabidopsis thaliana
gttctgtccgatctctt

SEQ ID NO: 127829 - DNA, 17 bp, Arabidopsis thaliana
gttctgtcgaggcgggt

SEQ ID NO: 127830 - DNA, 17 bp, Arabidopsis thaliana
gttctgtctgccgttgg

SEQ ID NO: 127831 - DNA, 17 bp, Arabidopsis thaliana
gttctgtgaattttgtg

SEQ ID NO: 127832 - DNA, 17 bp, Arabidopsis thaliana
gttctgtgacattgtct

SEQ ID NO: 127833 - DNA, 17 bp, Arabidopsis thaliana
gttctgtgactctgttt

SEQ ID NO: 127834 - DNA, 17 bp, Arabidopsis thaliana
gttctgttcagacctgg

SEQ ID NO: 127835 - DNA, 17 bp, Arabidopsis thaliana
gttctgttgatccatag

SEQ ID NO: 127836 - DNA, 17 bp, Arabidopsis thaliana
gttctgtttcagctcga

SEQ ID NO: 127837 - DNA, 17 bp, Arabidopsis thaliana
gttctgttttcggttga

SEQ ID NO: 127838 - DNA, 17 bp, Arabidopsis thaliana
gttctgttttcggttgg

SEQ ID NO: 127839 - DNA, 17 bp, Arabidopsis thaliana
gttctgttttggacagg

SEQ ID NO: 127840 - DNA, 17 bp, Arabidopsis thaliana
gttcttaaaactacgcc

SEQ ID NO: 127841 - DNA, 17 bp, Arabidopsis thaliana
gttcttacaagatcggg

SEQ ID NO: 127842 - DNA, 17 bp, Arabidopsis thaliana
gttcttacatcacaact

SEQ ID NO: 127843 - DNA, 17 bp, Arabidopsis thaliana
gttcttacgtgtcacta

SEQ ID NO: 127844 - DNA, 17 bp, Arabidopsis thaliana
gttcttagatcaggttc

SEQ ID NO: 127845 - DNA, 17 bp, Arabidopsis thaliana
gttcttagcagtgacgg

SEQ ID NO: 127846 - DNA, 17 bp, Arabidopsis thaliana
gttcttagtcacatcct

SEQ ID NO: 127847 - DNA, 17 bp, Arabidopsis thaliana
gttcttagttggggagc

SEQ ID NO: 127848 - DNA, 17 bp, Arabidopsis thaliana
gttcttagttggtggag

SEQ ID NO: 127849 - DNA, 17 bp, Arabidopsis thaliana
gttcttagttgttggag

SEQ ID NO: 127850 - DNA, 17 bp, Arabidopsis thaliana
gttcttcaactcctcct

SEQ ID NO: 127851 - DNA, 17 bp, Arabidopsis thaliana
gttcttcaagagggtgt

SEQ ID NO: 127852 - DNA, 17 bp, Arabidopsis thaliana
gttcttcactacggcca

SEQ ID NO: 127853 - DNA, 17 bp, Arabidopsis thaliana
gttcttcagacaatgct

SEQ ID NO: 127854 - DNA, 17 bp, Arabidopsis thaliana
gttcttcaggctaacga

SEQ ID NO: 127855 - DNA, 17 bp, Arabidopsis thaliana
gttcttcatagttacag

SEQ ID NO: 127856 - DNA, 17 bp, Arabidopsis thaliana
gttcttcccgggctcag

SEQ ID NO: 127857 - DNA, 17 bp, Arabidopsis thaliana
gttcttccgcctgatta

SEQ ID NO: 127858 - DNA, 17 bp, Arabidopsis thaliana
gttcttccggcaggtcg

SEQ ID NO: 127859 - DNA, 17 bp, Arabidopsis thaliana
gttcttccttgtcgctt

SEQ ID NO: 127860 - DNA, 17 bp, Arabidopsis thaliana
gttcttcgaactgagca

SEQ ID NO: 127861 - DNA, 17 bp, Arabidopsis thaliana
gttcttcgctgaaggat

SEQ ID NO: 127862 - DNA, 17 bp, Arabidopsis thaliana
gttcttcgcttttgtct

SEQ ID NO: 127863 - DNA, 17 bp, Arabidopsis thaliana
gttcttcgggaggacgt

SEQ ID NO: 127864 - DNA, 17 bp, Arabidopsis thaliana
gttcttcggttatgtgg

SEQ ID NO: 127865 - DNA, 17 bp, Arabidopsis thaliana
gttcttcggttctgtgg

SEQ ID NO: 127866 - DNA, 17 bp, Arabidopsis thaliana
gttcttcggttttgtgg

SEQ ID NO: 127867 - DNA, 17 bp, Arabidopsis thaliana
gttcttcgtctcattaa

SEQ ID NO: 127868 - DNA, 17 bp, Arabidopsis thaliana
gttcttcgttcttcttc

SEQ ID NO: 127869 - DNA, 17 bp, Arabidopsis thaliana
gttcttctccaatgcca

SEQ ID NO: 127870 - DNA, 17 bp, Arabidopsis thaliana
gttcttctctaagatat

SEQ ID NO: 127871 - DNA, 17 bp, Arabidopsis thaliana
gttcttctctctggttc

SEQ ID NO: 127872 - DNA, 17 bp, Arabidopsis thaliana
gttcttctctttggtgc

SEQ ID NO: 127873 - DNA, 17 bp, Arabidopsis thaliana
gttcttctgaatttgcg

SEQ ID NO: 127874 - DNA, 17 bp, Arabidopsis thaliana
gttcttctgcagaaggt

SEQ ID NO: 127875 - DNA, 17 bp, Arabidopsis thaliana
gttcttctggcatggaa

SEQ ID NO: 127876 - DNA, 17 bp, Arabidopsis thaliana
gttcttcttcttcgggt

SEQ ID NO: 127877 - DNA, 17 bp, Arabidopsis thaliana
gttcttcttcttctgca

SEQ ID NO: 127878 - DNA, 17 bp, Arabidopsis thaliana
gttcttcttgatcttgc

SEQ ID NO: 127879 - DNA, 17 bp, Arabidopsis thaliana
gttcttcttgtggttgt

SEQ ID NO: 127880 - DNA, 17 bp, Arabidopsis thaliana
gttcttgaaaaaacttt

SEQ ID NO: 127881 - DNA, 17 bp, Arabidopsis thaliana
gttcttgaaaacgcagg

SEQ ID NO: 127882 - DNA, 17 bp, Arabidopsis thaliana
gttcttgaatggctctc

SEQ ID NO: 127883 - DNA, 17 bp, Arabidopsis thaliana
gttcttgacattttgga

SEQ ID NO: 127884 - DNA, 17 bp, Arabidopsis thaliana
gttcttgagctgcttct

SEQ ID NO: 127885 - DNA, 17 bp, Arabidopsis thaliana
gttcttgatctgctcag

SEQ ID NO: 127886 - DNA, 17 bp, Arabidopsis thaliana
gttcttgatgtactaaa

SEQ ID NO: 127887 - DNA, 17 bp, Arabidopsis thaliana
gttcttgattgctctat

SEQ ID NO: 127888 - DNA, 17 bp, Arabidopsis thaliana
gttcttgattgtcttgt

SEQ ID NO: 127889 - DNA, 17 bp, Arabidopsis thaliana
gttcttgcggtccagtg

SEQ ID NO: 127890 - DNA, 17 bp, Arabidopsis thaliana
gttcttgctgtggctgt

SEQ ID NO: 127891 - DNA, 17 bp, Arabidopsis thaliana
gttcttggaccgttggt

SEQ ID NO: 127892 - DNA, 17 bp, Arabidopsis thaliana
gttcttggcaaatgtga

SEQ ID NO: 127893 - DNA, 17 bp, Arabidopsis thaliana
gttcttggtgcaggtcg

SEQ ID NO: 127894 - DNA, 17 bp, Arabidopsis thaliana
gttcttgtctagcggtt

SEQ ID NO: 127895 - DNA, 17 bp, Arabidopsis thaliana
gttcttgtgatctgctc

SEQ ID NO: 127896 - DNA, 17 bp, Arabidopsis thaliana
gttcttgttggactact

SEQ ID NO: 127897 - DNA, 17 bp, Arabidopsis thaliana
gttcttgtttttgcttt

SEQ ID NO: 127898 - DNA, 17 bp, Arabidopsis thaliana
gttctttaacagggtct

SEQ ID NO: 127899 - DNA, 17 bp, Arabidopsis thaliana
gttctttacagactgtt

SEQ ID NO: 127900 - DNA, 17 bp, Arabidopsis thaliana
gttctttacgaaacttt

SEQ ID NO: 127901 - DNA, 17 bp, Arabidopsis thaliana
gttctttacgagacttt

SEQ ID NO: 127902 - DNA, 17 bp, Arabidopsis thaliana
gttctttagtgatcacc

SEQ ID NO: 127903 - DNA, 17 bp, Arabidopsis thaliana
gttctttagttaatggt

SEQ ID NO: 127904 - DNA, 17 bp, Arabidopsis thaliana
gttctttcaggaccact

SEQ ID NO: 127905 - DNA, 17 bp, Arabidopsis thaliana
gttctttgattcattct

SEQ ID NO: 127906 - DNA, 17 bp, Arabidopsis thaliana
gttctttgattgggcag

SEQ ID NO: 127907 - DNA, 17 bp, Arabidopsis thaliana
gttctttgcactacatg

SEQ ID NO: 127908 - DNA, 17 bp, Arabidopsis thaliana
gttctttgcgaaacttt

SEQ ID NO: 127909 - DNA, 17 bp, Arabidopsis thaliana
gttctttgctgctttgt

SEQ ID NO: 127910 - DNA, 17 bp, Arabidopsis thaliana
gttctttggtccaagcg

SEQ ID NO: 127911 - DNA, 17 bp, Arabidopsis thaliana
gttctttgtcaagtcga

SEQ ID NO: 127912 - DNA, 17 bp, Arabidopsis thaliana
gttctttgtggcggtgc

SEQ ID NO: 127913 - DNA, 17 bp, Arabidopsis thaliana
gttctttgttcgagcca

SEQ ID NO: 127914 - DNA, 17 bp, Arabidopsis thaliana
gttcttttcagggtggt

SEQ ID NO: 127915 - DNA, 17 bp, Arabidopsis thaliana
gttcttttctagcaacc

SEQ ID NO: 127916 - DNA, 17 bp, Arabidopsis thaliana
gttcttttcttttgatc

SEQ ID NO: 127917 - DNA, 17 bp, Arabidopsis thaliana
gttcttttgccaaacca

SEQ ID NO: 127918 - DNA, 17 bp, Arabidopsis thaliana
gttcttttggaccgcag

SEQ ID NO: 127919 - DNA, 17 bp, Arabidopsis thaliana
gttcttttgttgttgac

SEQ ID NO: 127920 - DNA, 17 bp, Arabidopsis thaliana
gttctttttccagacgc

SEQ ID NO: 127921 - DNA, 17 bp, Arabidopsis thaliana
gttctttttcgggattt

SEQ ID NO: 127922 - DNA, 17 bp, Arabidopsis thaliana
gttctttttggcttaac

SEQ ID NO: 127923 - DNA, 17 bp, Arabidopsis thaliana
gttcttttttcacacgc

SEQ ID NO: 127924 - DNA, 17 bp, Arabidopsis thaliana
gttcttttttgggtgtg

SEQ ID NO: 127925 - DNA, 17 bp, Arabidopsis thaliana
gttgaaaaacttctaca

SEQ ID NO: 127926 - DNA, 17 bp, Arabidopsis thaliana
gttgaaaacaggtgcgt

SEQ ID NO: 127927 - DNA, 17 bp, Arabidopsis thaliana
gttgaaaacgctggcca

SEQ ID NO: 127928 - DNA, 17 bp, Arabidopsis thaliana
gttgaaaacgctggtca

SEQ ID NO: 127929 - DNA, 17 bp, Arabidopsis thaliana
gttgaaaatccggggtt

SEQ ID NO: 127930 - DNA, 17 bp, Arabidopsis thaliana
gttgaaaattcaggcaa

SEQ ID NO: 127931 - DNA, 17 bp, Arabidopsis thaliana
gttgaaaatttcagcgt

SEQ ID NO: 127932 - DNA, 17 bp, Arabidopsis thaliana
gttgaaactaattaggc

SEQ ID NO: 127933 - DNA, 17 bp, Arabidopsis thaliana
gttgaaagtctgtcagt

SEQ ID NO: 127934 - DNA, 17 bp, Arabidopsis thaliana
gttgaaagtgtcaaggc

SEQ ID NO: 127935 - DNA, 17 bp, Arabidopsis thaliana
gttgaaagttaaaacgg

SEQ ID NO: 127936 - DNA, 17 bp, Arabidopsis thaliana
gttgaaatccaggaggt

SEQ ID NO: 127937 - DNA, 17 bp, Arabidopsis thaliana
gttgaaatcgtcgacca

SEQ ID NO: 127938 - DNA, 17 bp, Arabidopsis thaliana
gttgaaatcgtcgaccg

SEQ ID NO: 127939 - DNA, 17 bp, Arabidopsis thaliana
gttgaaatgttatgctc

SEQ ID NO: 127940 - DNA, 17 bp, Arabidopsis thaliana
gttgaaattagtcgtct

SEQ ID NO: 127941 - DNA, 17 bp, Arabidopsis thaliana
gttgaaattgtgtaatc

SEQ ID NO: 127942 - DNA, 17 bp, Arabidopsis thaliana
gttgaaatttcaaaatt

SEQ ID NO: 127943 - DNA, 17 bp, Arabidopsis thaliana
gttgaaattttaatctt

SEQ ID NO: 127944 - DNA, 17 bp, Arabidopsis thaliana
gttgaacaaaaacaggc

SEQ ID NO: 127945 - DNA, 17 bp, Arabidopsis thaliana
gttgaacaagcggaggt

SEQ ID NO: 127946 - DNA, 17 bp, Arabidopsis thaliana
gttgaaccaaatacatc

SEQ ID NO: 127947 - DNA, 17 bp, Arabidopsis thaliana
gttgaaccagcgacagg

SEQ ID NO: 127948 - DNA, 17 bp, Arabidopsis thaliana
gttgaaccctgggatgg

SEQ ID NO: 127949 - DNA, 17 bp, Arabidopsis thaliana
gttgaaccgaccgggtg

SEQ ID NO: 127950 - DNA, 17 bp, Arabidopsis thaliana
gttgaaccgattggatg

SEQ ID NO: 127951 - DNA, 17 bp, Arabidopsis thaliana
gttgaaccgcacgttac

SEQ ID NO: 127952 - DNA, 17 bp, Arabidopsis thaliana
gttgaaccgcttgatct

SEQ ID NO: 127953 - DNA, 17 bp, Arabidopsis thaliana
gttgaaccggccgggtg

SEQ ID NO: 127954 - DNA, 17 bp, Arabidopsis thaliana
gttgaaccggctgggtg

SEQ ID NO: 127955 - DNA, 17 bp, Arabidopsis thaliana
gttgaaccgtaccgcac

SEQ ID NO: 127956 - DNA, 17 bp, Arabidopsis thaliana
gttgaaccgtaccgcat

SEQ ID NO: 127957 - DNA, 17 bp, Arabidopsis thaliana
gttgaacctcctgacct

SEQ ID NO: 127958 - DNA, 17 bp, Arabidopsis thaliana
gttgaaccttcggatgg

SEQ ID NO: 127959 - DNA, 17 bp, Arabidopsis thaliana
gttgaaccttggaatgg

SEQ ID NO: 127960 - DNA, 17 bp, Arabidopsis thaliana
gttgaaccttggatggg

SEQ ID NO: 127961 - DNA, 17 bp, Arabidopsis thaliana
gttgaaccttgggaggg

SEQ ID NO: 127962 - DNA, 17 bp, Arabidopsis thaliana
gttgaaccttgggatcg

SEQ ID NO: 127963 - DNA, 17 bp, Arabidopsis thaliana
gttgaaccttgggatga

SEQ ID NO: 127964 - DNA, 17 bp, Arabidopsis thaliana
gttgaaccttgggatgg

SEQ ID NO: 127965 - DNA, 17 bp, Arabidopsis thaliana
gttgaaccttgggatgt

SEQ ID NO: 127966 - DNA, 17 bp, Arabidopsis thaliana
gttgaaccttggggtgg

SEQ ID NO: 127967 - DNA, 17 bp, Arabidopsis thaliana
gttgaaccttgtgggtc

SEQ ID NO: 127968 - DNA, 17 bp, Arabidopsis thaliana
gttgaacgacctgtgtc

SEQ ID NO: 127969 - DNA, 17 bp, Arabidopsis thaliana
gttgaacgtcgatggtc

SEQ ID NO: 127970 - DNA, 17 bp, Arabidopsis thaliana
gttgaactcgacttgct

SEQ ID NO: 127971 - DNA, 17 bp, Arabidopsis thaliana
gttgaactcttcgtcgc

SEQ ID NO: 127972 - DNA, 17 bp, Arabidopsis thaliana
gttgaactggccgggtg

SEQ ID NO: 127973 - DNA, 17 bp, Arabidopsis thaliana
gttgaacttgttgtcta

SEQ ID NO: 127974 - DNA, 17 bp, Arabidopsis thaliana
gttgaagaatcggttcg

SEQ ID NO: 127975 - DNA, 17 bp, Arabidopsis thaliana
gttgaagactgcaggga

SEQ ID NO: 127976 - DNA, 17 bp, Arabidopsis thaliana
gttgaagatcagcgttt

SEQ ID NO: 127977 - DNA, 17 bp, Arabidopsis thaliana
gttgaagcctaggtatc

SEQ ID NO: 127978 - DNA, 17 bp, Arabidopsis thaliana
gttgaagcctccaacgc

SEQ ID NO: 127979 - DNA, 17 bp, Arabidopsis thaliana
gttgaagctgcttctgc

SEQ ID NO: 127980 - DNA, 17 bp, Arabidopsis thaliana
gttgaagctgggctcac

SEQ ID NO: 127981 - DNA, 17 bp, Arabidopsis thaliana
gttgaaggagattgccc

SEQ ID NO: 127982 - DNA, 17 bp, Arabidopsis thaliana
gttgaaggattacgggc

SEQ ID NO: 127983 - DNA, 17 bp, Arabidopsis thaliana
gttgaagtccgaggtgt

SEQ ID NO: 127984 - DNA, 17 bp, Arabidopsis thaliana
gttgaagttaagcagtc

SEQ ID NO: 127985 - DNA, 17 bp, Arabidopsis thaliana
gttgaagttgaagtcgc

SEQ ID NO: 127986 - DNA, 17 bp, Arabidopsis thaliana
gttgaagtttgggctca

SEQ ID NO: 127987 - DNA, 17 bp, Arabidopsis thaliana
gttgaatcagcggattg

SEQ ID NO: 127988 - DNA, 17 bp, Arabidopsis thaliana
gttgaatcctggattcc

SEQ ID NO: 127989 - DNA, 17 bp, Arabidopsis thaliana
gttgaatcgcacgtctc

SEQ ID NO: 127990 - DNA, 17 bp, Arabidopsis thaliana
gttgaatcttccaagag

SEQ ID NO: 127991 - DNA, 17 bp, Arabidopsis thaliana
gttgaatctttaatctt

SEQ ID NO: 127992 - DNA, 17 bp, Arabidopsis thaliana
gttgaatgactagggtt

SEQ ID NO: 127993 - DNA, 17 bp, Arabidopsis thaliana
gttgaatgatctattgg

SEQ ID NO: 127994 - DNA, 17 bp, Arabidopsis thaliana
gttgaatgcggtgtctt

SEQ ID NO: 127995 - DNA, 17 bp, Arabidopsis thaliana
gttgaatgctctatgcg

SEQ ID NO: 127996 - DNA, 17 bp, Arabidopsis thaliana
gttgaatggatcagttg

SEQ ID NO: 127997 - DNA, 17 bp, Arabidopsis thaliana
gttgaatggcgttgttc

SEQ ID NO: 127998 - DNA, 17 bp, Arabidopsis thaliana
gttgaatggctctcctg

SEQ ID NO: 127999 - DNA, 17 bp, Arabidopsis thaliana
gttgaatggcttatgcg

SEQ ID NO: 128000 - DNA, 17 bp, Arabidopsis thaliana
gttgaatggtgaatgcg

SEQ ID NO: 128001 - DNA, 17 bp, Arabidopsis thaliana
gttgaatgtcgtttttg

SEQ ID NO: 128002 - DNA, 17 bp, Arabidopsis thaliana
gttgaattactatcgcg

SEQ ID NO: 128003 - DNA, 17 bp, Arabidopsis thaliana
gttgaattatggctcaa

SEQ ID NO: 128004 - DNA, 17 bp, Arabidopsis thaliana
gttgaattcggcaggca

SEQ ID NO: 128005 - DNA, 17 bp, Arabidopsis thaliana
gttgaattgggccggtt

SEQ ID NO: 128006 - DNA, 17 bp, Arabidopsis thaliana
gttgacaatcgccggtc

SEQ ID NO: 128007 - DNA, 17 bp, Arabidopsis thaliana
gttgacaccgttaacgt

SEQ ID NO: 128008 - DNA, 17 bp, Arabidopsis thaliana
gttgacagaccgattgg

SEQ ID NO: 128009 - DNA, 17 bp, Arabidopsis thaliana
gttgacagagtcatcag

SEQ ID NO: 128010 - DNA, 17 bp, Arabidopsis thaliana
gttgacagcgatcagcg

SEQ ID NO: 128011 - DNA, 17 bp, Arabidopsis thaliana
gttgacaggttgcaaac

SEQ ID NO: 128012 - DNA, 17 bp, Arabidopsis thaliana
gttgacagttgctgcaa

SEQ ID NO: 128013 - DNA, 17 bp, Arabidopsis thaliana
gttgacagttgctgcta

SEQ ID NO: 128014 - DNA, 17 bp, Arabidopsis thaliana
gttgacagttggtgcaa

SEQ ID NO: 128015 - DNA, 17 bp, Arabidopsis thaliana
gttgacatctccgatct

SEQ ID NO: 128016 - DNA, 17 bp, Arabidopsis thaliana
gttgacatgtccatcta

SEQ ID NO: 128017 - DNA, 17 bp, Arabidopsis thaliana
gttgaccaaagttcgat

SEQ ID NO: 128018 - DNA, 17 bp, Arabidopsis thaliana
gttgaccaacaaatctg

SEQ ID NO: 128019 - DNA, 17 bp, Arabidopsis thaliana
gttgaccaacagatccc

SEQ ID NO: 128020 - DNA, 17 bp, Arabidopsis thaliana
gttgaccaagattcagc

SEQ ID NO: 128021 - DNA, 17 bp, Arabidopsis thaliana
gttgaccaagcttgcca

SEQ ID NO: 128022 - DNA, 17 bp, Arabidopsis thaliana
gttgaccaagttccaga

SEQ ID NO: 128023 - DNA, 17 bp, Arabidopsis thaliana
gttgaccaatgtacacg

SEQ ID NO: 128024 - DNA, 17 bp, Arabidopsis thaliana
gttgaccacaggttcat

SEQ ID NO: 128025 - DNA, 17 bp, Arabidopsis thaliana
gttgaccagtccgccag

SEQ ID NO: 128026 - DNA, 17 bp, Arabidopsis thaliana
gttgaccatgtattcgg

SEQ ID NO: 128027 - DNA, 17 bp, Arabidopsis thaliana
gttgaccatgttttatt

SEQ ID NO: 128028 - DNA, 17 bp, Arabidopsis thaliana
gttgacccaaggttcat

SEQ ID NO: 128029 - DNA, 17 bp, Arabidopsis thaliana
gttgacccaccctaaat

SEQ ID NO: 128030 - DNA, 17 bp, Arabidopsis thaliana
gttgacccagaagatta

SEQ ID NO: 128031 - DNA, 17 bp, Arabidopsis thaliana
gttgacccgataactta

SEQ ID NO: 128032 - DNA, 17 bp, Arabidopsis thaliana
gttgacccgatgacccg

SEQ ID NO: 128033 - DNA, 17 bp, Arabidopsis thaliana
gttgacccggtcaaagc

SEQ ID NO: 128034 - DNA, 17 bp, Arabidopsis thaliana
gttgacccgtcgttgag

SEQ ID NO: 128035 - DNA, 17 bp, Arabidopsis thaliana
gttgaccgaagtcagtt

SEQ ID NO: 128036 - DNA, 17 bp, Arabidopsis thaliana
gttgaccgagccgttaa

SEQ ID NO: 128037 - DNA, 17 bp, Arabidopsis thaliana
gttgaccgagctaccgg

SEQ ID NO: 128038 - DNA, 17 bp, Arabidopsis thaliana
gttgaccgagctgccgg

SEQ ID NO: 128039 - DNA, 17 bp, Arabidopsis thaliana
gttgaccggatcagccg

SEQ ID NO: 128040 - DNA, 17 bp, Arabidopsis thaliana
gttgaccggtcatttca

SEQ ID NO: 128041 - DNA, 17 bp, Arabidopsis thaliana
gttgacgaagcgttgat

SEQ ID NO: 128042 - DNA, 17 bp, Arabidopsis thaliana
gttgacgatagcgataa

SEQ ID NO: 128043 - DNA, 17 bp, Arabidopsis thaliana
gttgacgatttactcaa

SEQ ID NO: 128044 - DNA, 17 bp, Arabidopsis thaliana
gttgacgcagcttttgg

SEQ ID NO: 128045 - DNA, 17 bp, Arabidopsis thaliana
gttgacgcgatcggttc

SEQ ID NO: 128046 - DNA, 17 bp, Arabidopsis thaliana
gttgacgcgattcagtt

SEQ ID NO: 128047 - DNA, 17 bp, Arabidopsis thaliana
gttgacgcgattcggtt

SEQ ID NO: 128048 - DNA, 17 bp, Arabidopsis thaliana
gttgacgctaccgctgc

SEQ ID NO: 128049 - DNA, 17 bp, Arabidopsis thaliana
gttgacggaaacttaac

SEQ ID NO: 128050 - DNA, 17 bp, Arabidopsis thaliana
gttgacggactgggaac

SEQ ID NO: 128051 - DNA, 17 bp, Arabidopsis thaliana
gttgacggcaacgttag

SEQ ID NO: 128052 - DNA, 17 bp, Arabidopsis thaliana
gttgacgggacggattt

SEQ ID NO: 128053 - DNA, 17 bp, Arabidopsis thaliana
gttgacgggacgggttt

SEQ ID NO: 128054 - DNA, 17 bp, Arabidopsis thaliana
gttgacgtctgcctggg

SEQ ID NO: 128055 - DNA, 17 bp, Arabidopsis thaliana
gttgacgtgccggagtg

SEQ ID NO: 128056 - DNA, 17 bp, Arabidopsis thaliana
gttgacgttcttaaccc

SEQ ID NO: 128057 - DNA, 17 bp, Arabidopsis thaliana
gttgactaagccaattg

SEQ ID NO: 128058 - DNA, 17 bp, Arabidopsis thaliana
gttgactaagcgttggt

SEQ ID NO: 128059 - DNA, 17 bp, Arabidopsis thaliana
gttgactacgtccctgc

SEQ ID NO: 128060 - DNA, 17 bp, Arabidopsis thaliana
gttgactagaagcactg

SEQ ID NO: 128061 - DNA, 17 bp, Arabidopsis thaliana
gttgactaggtttccct

SEQ ID NO: 128062 - DNA, 17 bp, Arabidopsis thaliana
gttgactagtggatgtg

SEQ ID NO: 128063 - DNA, 17 bp, Arabidopsis thaliana
gttgactagtgttgacc

SEQ ID NO: 128064 - DNA, 17 bp, Arabidopsis thaliana
gttgactatccacctaa

SEQ ID NO: 128065 - DNA, 17 bp, Arabidopsis thaliana
gttgactcaggcgttga

SEQ ID NO: 128066 - DNA, 17 bp, Arabidopsis thaliana
gttgactcctggcaagc

SEQ ID NO: 128067 - DNA, 17 bp, Arabidopsis thaliana
gttgactcctggcaagt

SEQ ID NO: 128068 - DNA, 17 bp, Arabidopsis thaliana
gttgactctcggcaacg

SEQ ID NO: 128069 - DNA, 17 bp, Arabidopsis thaliana
gttgactctgtgcctcg

SEQ ID NO: 128070 - DNA, 17 bp, Arabidopsis thaliana
gttgactgatttttggt

SEQ ID NO: 128071 - DNA, 17 bp, Arabidopsis thaliana
gttgactgcatggactg

SEQ ID NO: 128072 - DNA, 17 bp, Arabidopsis thaliana
gttgactgccaacttct

SEQ ID NO: 128073 - DNA, 17 bp, Arabidopsis thaliana
gttgactgcggtgtctt

SEQ ID NO: 128074 - DNA, 17 bp, Arabidopsis thaliana
gttgactgtgccatttc

SEQ ID NO: 128075 - DNA, 17 bp, Arabidopsis thaliana
gttgacttagccatttt

SEQ ID NO: 128076 - DNA, 17 bp, Arabidopsis thaliana
gttgacttcccctgggg

SEQ ID NO: 128077 - DNA, 17 bp, Arabidopsis thaliana
gttgacttctcccaatt

SEQ ID NO: 128078 - DNA, 17 bp, Arabidopsis thaliana
gttgacttgaccatttt

SEQ ID NO: 128079 - DNA, 17 bp, Arabidopsis thaliana
gttgacttgagttgacc

SEQ ID NO: 128080 - DNA, 17 bp, Arabidopsis thaliana
gttgacttgcgattcaa

SEQ ID NO: 128081 - DNA, 17 bp, Arabidopsis thaliana
gttgacttggtcatttc

SEQ ID NO: 128082 - DNA, 17 bp, Arabidopsis thaliana
gttgactttagcccgaa

SEQ ID NO: 128083 - DNA, 17 bp, Arabidopsis thaliana
gttgactttgctatttt

SEQ ID NO: 128084 - DNA, 17 bp, Arabidopsis thaliana
gttgactttttgtcgac

SEQ ID NO: 128085 - DNA, 17 bp, Arabidopsis thaliana
gttgagaaagctccgac

SEQ ID NO: 128086 - DNA, 17 bp, Arabidopsis thaliana
gttgagaactaagtttg

SEQ ID NO: 128087 - DNA, 17 bp, Arabidopsis thaliana
gttgagaatctcatttg

SEQ ID NO: 128088 - DNA, 17 bp, Arabidopsis thaliana
gttgagaatgattcgga

SEQ ID NO: 128089 - DNA, 17 bp, Arabidopsis thaliana
gttgagacacaggtgca

SEQ ID NO: 128090 - DNA, 17 bp, Arabidopsis thaliana
gttgagacccgggacca

SEQ ID NO: 128091 - DNA, 17 bp, Arabidopsis thaliana
gttgagactgagttttg

SEQ ID NO: 128092 - DNA, 17 bp, Arabidopsis thaliana
gttgagacttgggatgg

SEQ ID NO: 128093 - DNA, 17 bp, Arabidopsis thaliana
gttgagagataaaacga

SEQ ID NO: 128094 - DNA, 17 bp, Arabidopsis thaliana
gttgagagataaaacgg

SEQ ID NO: 128095 - DNA, 17 bp, Arabidopsis thaliana
gttgagagttaaaacga

SEQ ID NO: 128096 - DNA, 17 bp, Arabidopsis thaliana
gttgagagttaaaacgg

SEQ ID NO: 128097 - DNA, 17 bp, Arabidopsis thaliana
gttgagatatctttttg

SEQ ID NO: 128098 - DNA, 17 bp, Arabidopsis thaliana
gttgagatgtgggttat

SEQ ID NO: 128099 - DNA, 17 bp, Arabidopsis thaliana
gttgagattagtggtca

SEQ ID NO: 128100 - DNA, 17 bp, Arabidopsis thaliana
gttgagattccaaccga

SEQ ID NO: 128101 - DNA, 17 bp, Arabidopsis thaliana
gttgagattccaactag

SEQ ID NO: 128102 - DNA, 17 bp, Arabidopsis thaliana
gttgagattccaactat

SEQ ID NO: 128103 - DNA, 17 bp, Arabidopsis thaliana
gttgagattgatggaat

SEQ ID NO: 128104 - DNA, 17 bp, Arabidopsis thaliana
gttgagattgcacagat

SEQ ID NO: 128105 - DNA, 17 bp, Arabidopsis thaliana
gttgagcagtctattga

SEQ ID NO: 128106 - DNA, 17 bp, Arabidopsis thaliana
gttgagcataaggatcc

SEQ ID NO: 128107 - DNA, 17 bp, Arabidopsis thaliana
gttgagcatttacggag

SEQ ID NO: 128108 - DNA, 17 bp, Arabidopsis thaliana
gttgagccggcaaatcc

SEQ ID NO: 128109 - DNA, 17 bp, Arabidopsis thaliana
gttgagcctagccaagg

SEQ ID NO: 128110 - DNA, 17 bp, Arabidopsis thaliana
gttgagcctttggtcca

SEQ ID NO: 128111 - DNA, 17 bp, Arabidopsis thaliana
gttgagcgatttgtcta

SEQ ID NO: 128112 - DNA, 17 bp, Arabidopsis thaliana
gttgagcggtcttgccc

SEQ ID NO: 128113 - DNA, 17 bp, Arabidopsis thaliana
gttgagctcgcggttcc

SEQ ID NO: 128114 - DNA, 17 bp, Arabidopsis thaliana
gttgagctgttgctgaa

SEQ ID NO: 128115 - DNA, 17 bp, Arabidopsis thaliana
gttgagcttcagaccga

SEQ ID NO: 128116 - DNA, 17 bp, Arabidopsis thaliana
gttgagcttgactagtc

SEQ ID NO: 128117 - DNA, 17 bp, Arabidopsis thaliana
gttgagcttgactctag

SEQ ID NO: 128118 - DNA, 17 bp, Arabidopsis thaliana
gttgagcttgactctat

SEQ ID NO: 128119 - DNA, 17 bp, Arabidopsis thaliana
gttgagctttcaggacc

SEQ ID NO: 128120 - DNA, 17 bp, Arabidopsis thaliana
gttgagctttgccccaa

SEQ ID NO: 128121 - DNA, 17 bp, Arabidopsis thaliana
gttgaggcaggctcggc

SEQ ID NO: 128122 - DNA, 17 bp, Arabidopsis thaliana
gttgaggccttggcgga

SEQ ID NO: 128123 - DNA, 17 bp, Arabidopsis thaliana
gttgaggcgcagcagtt

SEQ ID NO: 128124 - DNA, 17 bp, Arabidopsis thaliana
gttgaggctcacaaatt

SEQ ID NO: 128125 - DNA, 17 bp, Arabidopsis thaliana
gttgaggctccatctac

SEQ ID NO: 128126 - DNA, 17 bp, Arabidopsis thaliana
gttgaggctgaggaaga

SEQ ID NO: 128127 - DNA, 17 bp, Arabidopsis thaliana
gttgagggagtctggac

SEQ ID NO: 128128 - DNA, 17 bp, Arabidopsis thaliana
gttgagggagtctgggc

SEQ ID NO: 128129 - DNA, 17 bp, Arabidopsis thaliana
gttgagggcacgtctgc

SEQ ID NO: 128130 - DNA, 17 bp, Arabidopsis thaliana
gttgagggccgcaactc

SEQ ID NO: 128131 - DNA, 17 bp, Arabidopsis thaliana
gttgagggtgtcgatcc

SEQ ID NO: 128132 - DNA, 17 bp, Arabidopsis thaliana
gttgaggtataaaacgg

SEQ ID NO: 128133 - DNA, 17 bp, Arabidopsis thaliana
gttgaggtcattgtttt

SEQ ID NO: 128134 - DNA, 17 bp, Arabidopsis thaliana
gttgaggtccgtgaaat

SEQ ID NO: 128135 - DNA, 17 bp, Arabidopsis thaliana
gttgaggttgctcttga

SEQ ID NO: 128136 - DNA, 17 bp, Arabidopsis thaliana
gttgaggtttcacatga

SEQ ID NO: 128137 - DNA, 17 bp, Arabidopsis thaliana
gttgagtaatgcctttc

SEQ ID NO: 128138 - DNA, 17 bp, Arabidopsis thaliana
gttgagtaggatcttaa

SEQ ID NO: 128139 - DNA, 17 bp, Arabidopsis thaliana
gttgagtatgtacggat

SEQ ID NO: 128140 - DNA, 17 bp, Arabidopsis thaliana
gttgagtatgtgcggac

SEQ ID NO: 128141 - DNA, 17 bp, Arabidopsis thaliana
gttgagtatgtgcggat

SEQ ID NO: 128142 - DNA, 17 bp, Arabidopsis thaliana
gttgagtcgctgcgatt

SEQ ID NO: 128143 - DNA, 17 bp, Arabidopsis thaliana
gttgagtctccagtcgg

SEQ ID NO: 128144 - DNA, 17 bp, Arabidopsis thaliana
gttgagtcttatattgc

SEQ ID NO: 128145 - DNA, 17 bp, Arabidopsis thaliana
gttgagtgagtgagagg

SEQ ID NO: 128146 - DNA, 17 bp, Arabidopsis thaliana
gttgagttacggtatgt

SEQ ID NO: 128147 - DNA, 17 bp, Arabidopsis thaliana
gttgagttcgcgcttca

SEQ ID NO: 128148 - DNA, 17 bp, Arabidopsis thaliana
gttgagttgacccatga

SEQ ID NO: 128149 - DNA, 17 bp, Arabidopsis thaliana
gttgagttgagcgaact

SEQ ID NO: 128150 - DNA, 17 bp, Arabidopsis thaliana
gttgagttgagttggcc

SEQ ID NO: 128151 - DNA, 17 bp, Arabidopsis thaliana
gttgagttgatccatga

SEQ ID NO: 128152 - DNA, 17 bp, Arabidopsis thaliana
gttgagttgggttaccc

SEQ ID NO: 128153 - DNA, 17 bp, Arabidopsis thaliana
gttgagtttatcggtgc

SEQ ID NO: 128154 - DNA, 17 bp, Arabidopsis thaliana
gttgagtttgacagcct

SEQ ID NO: 128155 - DNA, 17 bp, Arabidopsis thaliana
gttgagtttgcgcttca

SEQ ID NO: 128156 - DNA, 17 bp, Arabidopsis thaliana
gttgagtttgcgcttga

SEQ ID NO: 128157 - DNA, 17 bp, Arabidopsis thaliana
gttgagtttgcgtctag

SEQ ID NO: 128158 - DNA, 17 bp, Arabidopsis thaliana
gttgagttttcaggacc

SEQ ID NO: 128159 - DNA, 17 bp, Arabidopsis thaliana
gttgataacccttttcc

SEQ ID NO: 128160 - DNA, 17 bp, Arabidopsis thaliana
gttgatagcctagaaca

SEQ ID NO: 128161 - DNA, 17 bp, Arabidopsis thaliana
gttgataggtcgccccg

SEQ ID NO: 128162 - DNA, 17 bp, Arabidopsis thaliana
gttgatatatggccgtg

SEQ ID NO: 128163 - DNA, 17 bp, Arabidopsis thaliana
gttgatatctatgaatg

SEQ ID NO: 128164 - DNA, 17 bp, Arabidopsis thaliana
gttgatatgaccgagtt

SEQ ID NO: 128165 - DNA, 17 bp, Arabidopsis thaliana
gttgatatggccaagtt

SEQ ID NO: 128166 - DNA, 17 bp, Arabidopsis thaliana
gttgatatggccgagga

SEQ ID NO: 128167 - DNA, 17 bp, Arabidopsis thaliana
gttgatatggccgaggg

SEQ ID NO: 128168 - DNA, 17 bp, Arabidopsis thaliana
gttgatatggccgagta

SEQ ID NO: 128169 - DNA, 17 bp, Arabidopsis thaliana
gttgatatggccgagtc

SEQ ID NO: 128170 - DNA, 17 bp, Arabidopsis thaliana
gttgatatggccgagtt

SEQ ID NO: 128171 - DNA, 17 bp, Arabidopsis thaliana
gttgatatgtcaccatc

SEQ ID NO: 128172 - DNA, 17 bp, Arabidopsis thaliana
gttgatcaaattgctta

SEQ ID NO: 128173 - DNA, 17 bp, Arabidopsis thaliana
gttgatcaaattgcttg

SEQ ID NO: 128174 - DNA, 17 bp, Arabidopsis thaliana
gttgatcaagacaagtg

SEQ ID NO: 128175 - DNA, 17 bp, Arabidopsis thaliana
gttgatcaccgttcgca

SEQ ID NO: 128176 - DNA, 17 bp, Arabidopsis thaliana
gttgatcacggacaaca

SEQ ID NO: 128177 - DNA, 17 bp, Arabidopsis thaliana
gttgatcactccagctg

SEQ ID NO: 128178 - DNA, 17 bp, Arabidopsis thaliana
gttgatcagccattttg

SEQ ID NO: 128179 - DNA, 17 bp, Arabidopsis thaliana
gttgatccatagaagct

SEQ ID NO: 128180 - DNA, 17 bp, Arabidopsis thaliana
gttgatccatagcagct

SEQ ID NO: 128181 - DNA, 17 bp, Arabidopsis thaliana
gttgatccatgaattta

SEQ ID NO: 128182 - DNA, 17 bp, Arabidopsis thaliana
gttgatcccaatctaac

SEQ ID NO: 128183 - DNA, 17 bp, Arabidopsis thaliana
gttgatccgatcagctt

SEQ ID NO: 128184 - DNA, 17 bp, Arabidopsis thaliana
gttgatccgcgcgattt

SEQ ID NO: 128185 - DNA, 17 bp, Arabidopsis thaliana
gttgatccgctggagca

SEQ ID NO: 128186 - DNA, 17 bp, Arabidopsis thaliana
gttgatccgtctgatat

SEQ ID NO: 128187 - DNA, 17 bp, Arabidopsis thaliana
gttgatcctgggcagca

SEQ ID NO: 128188 - DNA, 17 bp, Arabidopsis thaliana
gttgatcgctgcgacaa

SEQ ID NO: 128189 - DNA, 17 bp, Arabidopsis thaliana
gttgatcggagttgact

SEQ ID NO: 128190 - DNA, 17 bp, Arabidopsis thaliana
gttgatcgtttgactga

SEQ ID NO: 128191 - DNA, 17 bp, Arabidopsis thaliana
gttgatctatgcatgta

SEQ ID NO: 128192 - DNA, 17 bp, Arabidopsis thaliana
gttgatctcaaggtcgt

SEQ ID NO: 128193 - DNA, 17 bp, Arabidopsis thaliana
gttgatctcatgtcgcg

SEQ ID NO: 128194 - DNA, 17 bp, Arabidopsis thaliana
gttgatctcgtcttcgg

SEQ ID NO: 128195 - DNA, 17 bp, Arabidopsis thaliana
gttgatctcgttgtgca

SEQ ID NO: 128196 - DNA, 17 bp, Arabidopsis thaliana
gttgatcttacgtggtt

SEQ ID NO: 128197 - DNA, 17 bp, Arabidopsis thaliana
gttgatcttgccagtag

SEQ ID NO: 128198 - DNA, 17 bp, Arabidopsis thaliana
gttgatcttggagcaaa

SEQ ID NO: 128199 - DNA, 17 bp, Arabidopsis thaliana
gttgatgaaactaaccg

SEQ ID NO: 128200 - DNA, 17 bp, Arabidopsis thaliana
gttgatgaatacctccg

SEQ ID NO: 128201 - DNA, 17 bp, Arabidopsis thaliana
gttgatgacgagccggt

SEQ ID NO: 128202 - DNA, 17 bp, Arabidopsis thaliana
gttgatgacggtcttat

SEQ ID NO: 128203 - DNA, 17 bp, Arabidopsis thaliana
gttgatgactaggcttc

SEQ ID NO: 128204 - DNA, 17 bp, Arabidopsis thaliana
gttgatgagacgcaagg

SEQ ID NO: 128205 - DNA, 17 bp, Arabidopsis thaliana
gttgatgataacaagct

SEQ ID NO: 128206 - DNA, 17 bp, Arabidopsis thaliana
gttgatgataataagcg

SEQ ID NO: 128207 - DNA, 17 bp, Arabidopsis thaliana
gttgatgatgtgaactg

SEQ ID NO: 128208 - DNA, 17 bp, Arabidopsis thaliana
gttgatgatgttctggc

SEQ ID NO: 128209 - DNA, 17 bp, Arabidopsis thaliana
gttgatgatgttgtggc

SEQ ID NO: 128210 - DNA, 17 bp, Arabidopsis thaliana
gttgatgccaaactgca

SEQ ID NO: 128211 - DNA, 17 bp, Arabidopsis thaliana
gttgatggattgcgtgg

SEQ ID NO: 128212 - DNA, 17 bp, Arabidopsis thaliana
gttgatggattgttggc

SEQ ID NO: 128213 - DNA, 17 bp, Arabidopsis thaliana
gttgatgtaacagtgca

SEQ ID NO: 128214 - DNA, 17 bp, Arabidopsis thaliana
gttgatgtcacttcgga

SEQ ID NO: 128215 - DNA, 17 bp, Arabidopsis thaliana
gttgatgtcagggctgc

SEQ ID NO: 128216 - DNA, 17 bp, Arabidopsis thaliana
gttgatgtcccaccaca

SEQ ID NO: 128217 - DNA, 17 bp, Arabidopsis thaliana
gttgatgtcctttgtgt

SEQ ID NO: 128218 - DNA, 17 bp, Arabidopsis thaliana
gttgatgtcgtctctgt

SEQ ID NO: 128219 - DNA, 17 bp, Arabidopsis thaliana
gttgattaagattcggg

SEQ ID NO: 128220 - DNA, 17 bp, Arabidopsis thaliana
gttgattaagggaactg

SEQ ID NO: 128221 - DNA, 17 bp, Arabidopsis thaliana
gttgattatcgctggag

SEQ ID NO: 128222 - DNA, 17 bp, Arabidopsis thaliana
gttgattcaaaaacccg

SEQ ID NO: 128223 - DNA, 17 bp, Arabidopsis thaliana
gttgattcagaagggtg

SEQ ID NO: 128224 - DNA, 17 bp, Arabidopsis thaliana
gttgattcagctcaggc

SEQ ID NO: 128225 - DNA, 17 bp, Arabidopsis thaliana
gttgattccataatgcc

SEQ ID NO: 128226 - DNA, 17 bp, Arabidopsis thaliana
gttgattcccggctgct

SEQ ID NO: 128227 - DNA, 17 bp, Arabidopsis thaliana
gttgattcccggctggt

SEQ ID NO: 128228 - DNA, 17 bp, Arabidopsis thaliana
gttgattccggcaggtc

SEQ ID NO: 128229 - DNA, 17 bp, Arabidopsis thaliana
gttgattccggttgttc

SEQ ID NO: 128230 - DNA, 17 bp, Arabidopsis thaliana
gttgattcgacttcccc

SEQ ID NO: 128231 - DNA, 17 bp, Arabidopsis thaliana
gttgattcgataatgcc

SEQ ID NO: 128232 - DNA, 17 bp, Arabidopsis thaliana
gttgattcgatgtgaat

SEQ ID NO: 128233 - DNA, 17 bp, Arabidopsis thaliana
gttgattcggtgacggg

SEQ ID NO: 128234 - DNA, 17 bp, Arabidopsis thaliana
gttgattcgtaatgcct

SEQ ID NO: 128235 - DNA, 17 bp, Arabidopsis thaliana
gttgattcgtaatggcg

SEQ ID NO: 128236 - DNA, 17 bp, Arabidopsis thaliana
gttgattctgacaatgg

SEQ ID NO: 128237 - DNA, 17 bp, Arabidopsis thaliana
gttgattctggccctag

SEQ ID NO: 128238 - DNA, 17 bp, Arabidopsis thaliana
gttgattgagacagata

SEQ ID NO: 128239 - DNA, 17 bp, Arabidopsis thaliana
gttgattgagacagtta

SEQ ID NO: 128240 - DNA, 17 bp, Arabidopsis thaliana
gttgattgagacgatgt

SEQ ID NO: 128241 - DNA, 17 bp, Arabidopsis thaliana
gttgattgatgtctcag

SEQ ID NO: 128242 - DNA, 17 bp, Arabidopsis thaliana
gttgattgattacgggt

SEQ ID NO: 128243 - DNA, 17 bp, Arabidopsis thaliana
gttgattgattgtgttg

SEQ ID NO: 128244 - DNA, 17 bp, Arabidopsis thaliana
gttgattgcgagtgtgg

SEQ ID NO: 128245 - DNA, 17 bp, Arabidopsis thaliana
gttgattgcgcattcgt

SEQ ID NO: 128246 - DNA, 17 bp, Arabidopsis thaliana
gttgattgctgcgtcag

SEQ ID NO: 128247 - DNA, 17 bp, Arabidopsis thaliana
gttgattgtgccaagct

SEQ ID NO: 128248 - DNA, 17 bp, Arabidopsis thaliana
gttgatttacgtttttg

SEQ ID NO: 128249 - DNA, 17 bp, Arabidopsis thaliana
gttgatttcggatatcc

SEQ ID NO: 128250 - DNA, 17 bp, Arabidopsis thaliana
gttgatttctgacctgc

SEQ ID NO: 128251 - DNA, 17 bp, Arabidopsis thaliana
gttgatttgaccgcgga

SEQ ID NO: 128252 - DNA, 17 bp, Arabidopsis thaliana
gttgatttggccggtga

SEQ ID NO: 128253 - DNA, 17 bp, Arabidopsis thaliana
gttgatttgttgatctg

SEQ ID NO: 128254 - DNA, 17 bp, Arabidopsis thaliana
gttgattttgctccatc

SEQ ID NO: 128255 - DNA, 17 bp, Arabidopsis thaliana
gttgcaaagatttttga

SEQ ID NO: 128256 - DNA, 17 bp, Arabidopsis thaliana
gttgcaaagggaccgtc

SEQ ID NO: 128257 - DNA, 17 bp, Arabidopsis thaliana
gttgcaaagtgcgactg

SEQ ID NO: 128258 - DNA, 17 bp, Arabidopsis thaliana
gttgcaaattttgcgac

SEQ ID NO: 128259 - DNA, 17 bp, Arabidopsis thaliana
gttgcaacgtgcgactg

SEQ ID NO: 128260 - DNA, 17 bp, Arabidopsis thaliana
gttgcaactccaagatt

SEQ ID NO: 128261 - DNA, 17 bp, Arabidopsis thaliana
gttgcaactccacccat

SEQ ID NO: 128262 - DNA, 17 bp, Arabidopsis thaliana
gttgcaactggcggcgg

SEQ ID NO: 128263 - DNA, 17 bp, Arabidopsis thaliana
gttgcaatgattctgat

SEQ ID NO: 128264 - DNA, 17 bp, Arabidopsis thaliana
gttgcaattgctagccg

SEQ ID NO: 128265 - DNA, 17 bp, Arabidopsis thaliana
gttgcacacatcgattt

SEQ ID NO: 128266 - DNA, 17 bp, Arabidopsis thaliana
gttgcaccagctccgac

SEQ ID NO: 128267 - DNA, 17 bp, Arabidopsis thaliana
gttgcaccagtttgttg

SEQ ID NO: 128268 - DNA, 17 bp, Arabidopsis thaliana
gttgcacctggagaccc

SEQ ID NO: 128269 - DNA, 17 bp, Arabidopsis thaliana
gttgcacgtcgttttcg

SEQ ID NO: 128270 - DNA, 17 bp, Arabidopsis thaliana
gttgcacgtctgcctgg

SEQ ID NO: 128271 - DNA, 17 bp, Arabidopsis thaliana
gttgcactgtaccatgt

SEQ ID NO: 128272 - DNA, 17 bp, Arabidopsis thaliana
gttgcactgttccatgt

SEQ ID NO: 128273 - DNA, 17 bp, Arabidopsis thaliana
gttgcagaagtagttcg

SEQ ID NO: 128274 - DNA, 17 bp, Arabidopsis thaliana
gttgcagaccaagaagc

SEQ ID NO: 128275 - DNA, 17 bp, Arabidopsis thaliana
gttgcagacgcgttgag

SEQ ID NO: 128276 - DNA, 17 bp, Arabidopsis thaliana
gttgcagactctctcct

SEQ ID NO: 128277 - DNA, 17 bp, Arabidopsis thaliana
gttgcagagcctatcga

SEQ ID NO: 128278 - DNA, 17 bp, Arabidopsis thaliana
gttgcagaggattggca

SEQ ID NO: 128279 - DNA, 17 bp, Arabidopsis thaliana
gttgcagagtttaccga

SEQ ID NO: 128280 - DNA, 17 bp, Arabidopsis thaliana
gttgcagcaagacccac

SEQ ID NO: 128281 - DNA, 17 bp, Arabidopsis thaliana
gttgcaggagtcaccga

SEQ ID NO: 128282 - DNA, 17 bp, Arabidopsis thaliana
gttgcaggggtatgcaa

SEQ ID NO: 128283 - DNA, 17 bp, Arabidopsis thaliana
gttgcagtactcgacca

SEQ ID NO: 128284 - DNA, 17 bp, Arabidopsis thaliana
gttgcagtcggcgagtg

SEQ ID NO: 128285 - DNA, 17 bp, Arabidopsis thaliana
gttgcagtcgtcgattt

SEQ ID NO: 128286 - DNA, 17 bp, Arabidopsis thaliana
gttgcagtgcggtttcg

SEQ ID NO: 128287 - DNA, 17 bp, Arabidopsis thaliana
gttgcagtgcggtttta

SEQ ID NO: 128288 - DNA, 17 bp, Arabidopsis thaliana
gttgcagtttgcttgag

SEQ ID NO: 128289 - DNA, 17 bp, Arabidopsis thaliana
gttgcataaactggttt

SEQ ID NO: 128290 - DNA, 17 bp, Arabidopsis thaliana
gttgcataaccgattgt

SEQ ID NO: 128291 - DNA, 17 bp, Arabidopsis thaliana
gttgcatatgttttcca

SEQ ID NO: 128292 - DNA, 17 bp, Arabidopsis thaliana
gttgcatgactagggtt

SEQ ID NO: 128293 - DNA, 17 bp, Arabidopsis thaliana
gttgcatgttgatggat

SEQ ID NO: 128294 - DNA, 17 bp, Arabidopsis thaliana
gttgcatgttggttcta

SEQ ID NO: 128295 - DNA, 17 bp, Arabidopsis thaliana
gttgcattctcagaact

SEQ ID NO: 128296 - DNA, 17 bp, Arabidopsis thaliana
gttgcattgcggtttta

SEQ ID NO: 128297 - DNA, 17 bp, Arabidopsis thaliana
gttgcattggttcagtg

SEQ ID NO: 128298 - DNA, 17 bp, Arabidopsis thaliana
gttgcattgttgtaagc

SEQ ID NO: 128299 - DNA, 17 bp, Arabidopsis thaliana
gttgcatttgcaaacgg

SEQ ID NO: 128300 - DNA, 17 bp, Arabidopsis thaliana
gttgccaacaagtctcg

SEQ ID NO: 128301 - DNA, 17 bp, Arabidopsis thaliana
gttgccaatcagactaa

SEQ ID NO: 128302 - DNA, 17 bp, Arabidopsis thaliana
gttgccaatcttcgtgt

SEQ ID NO: 128303 - DNA, 17 bp, Arabidopsis thaliana
gttgccaccgttgagtt

SEQ ID NO: 128304 - DNA, 17 bp, Arabidopsis thaliana
gttgccacgagtgaacc

SEQ ID NO: 128305 - DNA, 17 bp, Arabidopsis thaliana
gttgccactaaagttgc

SEQ ID NO: 128306 - DNA, 17 bp, Arabidopsis thaliana
gttgccactggatttta

SEQ ID NO: 128307 - DNA, 17 bp, Arabidopsis thaliana
gttgccactgttgagtt

SEQ ID NO: 128308 - DNA, 17 bp, Arabidopsis thaliana
gttgccagacactgggt

SEQ ID NO: 128309 - DNA, 17 bp, Arabidopsis thaliana
gttgccagacattgggt

SEQ ID NO: 128310 - DNA, 17 bp, Arabidopsis thaliana
gttgccagacgctcaag

SEQ ID NO: 128311 - DNA, 17 bp, Arabidopsis thaliana
gttgccagcgaccggcg

SEQ ID NO: 128312 - DNA, 17 bp, Arabidopsis thaliana
gttgccagcgatcagcg

SEQ ID NO: 128313 - DNA, 17 bp, Arabidopsis thaliana
gttgccaggttgtgtga

SEQ ID NO: 128314 - DNA, 17 bp, Arabidopsis thaliana
gttgccatcttgtccac

SEQ ID NO: 128315 - DNA, 17 bp, Arabidopsis thaliana
gttgccatgtcgtcgag

SEQ ID NO: 128316 - DNA, 17 bp, Arabidopsis thaliana
gttgcccaattctactt

SEQ ID NO: 128317 - DNA, 17 bp, Arabidopsis thaliana
gttgcccgtaggtacac

SEQ ID NO: 128318 - DNA, 17 bp, Arabidopsis thaliana
gttgccctctgctgtag

SEQ ID NO: 128319 - DNA, 17 bp, Arabidopsis thaliana
gttgcccttggcttgtc

SEQ ID NO: 128320 - DNA, 17 bp, Arabidopsis thaliana
gttgccgagggcacgtc

SEQ ID NO: 128321 - DNA, 17 bp, Arabidopsis thaliana
gttgccgccgtccgttg

SEQ ID NO: 128322 - DNA, 17 bp, Arabidopsis thaliana
gttgccggaaagttttt

SEQ ID NO: 128323 - DNA, 17 bp, Arabidopsis thaliana
gttgccggaagtgtaga

SEQ ID NO: 128324 - DNA, 17 bp, Arabidopsis thaliana
gttgccggttcgagtga

SEQ ID NO: 128325 - DNA, 17 bp, Arabidopsis thaliana
gttgccggtttgagtga

SEQ ID NO: 128326 - DNA, 17 bp, Arabidopsis thaliana
gttgccgtagaccaggt

SEQ ID NO: 128327 - DNA, 17 bp, Arabidopsis thaliana
gttgccgtctctcattc

SEQ ID NO: 128328 - DNA, 17 bp, Arabidopsis thaliana
gttgcctcaagactgtc

SEQ ID NO: 128329 - DNA, 17 bp, Arabidopsis thaliana
gttgcctctacagggcc

SEQ ID NO: 128330 - DNA, 17 bp, Arabidopsis thaliana
gttgcctctggcttgtt

SEQ ID NO: 128331 - DNA, 17 bp, Arabidopsis thaliana
gttgcctgagttacggc

SEQ ID NO: 128332 - DNA, 17 bp, Arabidopsis thaliana
gttgccttaagttccgc

SEQ ID NO: 128333 - DNA, 17 bp, Arabidopsis thaliana
gttgccttgagaggatg

SEQ ID NO: 128334 - DNA, 17 bp, Arabidopsis thaliana
gttgccttgatcgagta

SEQ ID NO: 128335 - DNA, 17 bp, Arabidopsis thaliana
gttgcctttcactaact

SEQ ID NO: 128336 - DNA, 17 bp, Arabidopsis thaliana
gttgcctttggtgatcg

SEQ ID NO: 128337 - DNA, 17 bp, Arabidopsis thaliana
gttgcgaactaactgcg

SEQ ID NO: 128338 - DNA, 17 bp, Arabidopsis thaliana
gttgcgaatgttctgac

SEQ ID NO: 128339 - DNA, 17 bp, Arabidopsis thaliana
gttgcgaattacagtag

SEQ ID NO: 128340 - DNA, 17 bp, Arabidopsis thaliana
gttgcgacctatacccg

SEQ ID NO: 128341 - DNA, 17 bp, Arabidopsis thaliana
gttgcgacggatttgtt

SEQ ID NO: 128342 - DNA, 17 bp, Arabidopsis thaliana
gttgcgactgtgtcaac

SEQ ID NO: 128343 - DNA, 17 bp, Arabidopsis thaliana
gttgcgagagaaacagt

SEQ ID NO: 128344 - DNA, 17 bp, Arabidopsis thaliana
gttgcgagaggtcccga

SEQ ID NO: 128345 - DNA, 17 bp, Arabidopsis thaliana
gttgcgagcagtagcga

SEQ ID NO: 128346 - DNA, 17 bp, Arabidopsis thaliana
gttgcgaggtgttgacc

SEQ ID NO: 128347 - DNA, 17 bp, Arabidopsis thaliana
gttgcgagtccttggca

SEQ ID NO: 128348 - DNA, 17 bp, Arabidopsis thaliana
gttgcgatacggttttg

SEQ ID NO: 128349 - DNA, 17 bp, Arabidopsis thaliana
gttgcgatagagttttg

SEQ ID NO: 128350 - DNA, 17 bp, Arabidopsis thaliana
gttgcgatggccggctt

SEQ ID NO: 128351 - DNA, 17 bp, Arabidopsis thaliana
gttgcgcaccaagttta

SEQ ID NO: 128352 - DNA, 17 bp, Arabidopsis thaliana
gttgcgcttattgctta

SEQ ID NO: 128353 - DNA, 17 bp, Arabidopsis thaliana
gttgcgctttgacatga

SEQ ID NO: 128354 - DNA, 17 bp, Arabidopsis thaliana
gttgcggacaagcccgt

SEQ ID NO: 128355 - DNA, 17 bp, Arabidopsis thaliana
gttgcggaccatctgcg

SEQ ID NO: 128356 - DNA, 17 bp, Arabidopsis thaliana
gttgcggactaactgca

SEQ ID NO: 128357 - DNA, 17 bp, Arabidopsis thaliana
gttgcggactgcgggta

SEQ ID NO: 128358 - DNA, 17 bp, Arabidopsis thaliana
gttgcggatctgactcg

SEQ ID NO: 128359 - DNA, 17 bp, Arabidopsis thaliana
gttgcggatctgcctcc

SEQ ID NO: 128360 - DNA, 17 bp, Arabidopsis thaliana
gttgcggatgtgtgtct

SEQ ID NO: 128361 - DNA, 17 bp, Arabidopsis thaliana
gttgcggcccagagaag

SEQ ID NO: 128362 - DNA, 17 bp, Arabidopsis thaliana
gttgcggcccgttttca

SEQ ID NO: 128363 - DNA, 17 bp, Arabidopsis thaliana
gttgcggcggaggttgc

SEQ ID NO: 128364 - DNA, 17 bp, Arabidopsis thaliana
gttgcggctgacttacg

SEQ ID NO: 128365 - DNA, 17 bp, Arabidopsis thaliana
gttgcggcttttctggt

SEQ ID NO: 128366 - DNA, 17 bp, Arabidopsis thaliana
gttgcgggcggtagcag

SEQ ID NO: 128367 - DNA, 17 bp, Arabidopsis thaliana
gttgcgggcggtagcgg

SEQ ID NO: 128368 - DNA, 17 bp, Arabidopsis thaliana
gttgcgggtggtagcgg

SEQ ID NO: 128369 - DNA, 17 bp, Arabidopsis thaliana
gttgcggtccaaaactt

SEQ ID NO: 128370 - DNA, 17 bp, Arabidopsis thaliana
gttgcggtcctatctct

SEQ ID NO: 128371 - DNA, 17 bp, Arabidopsis thaliana
gttgcggtgaacagtaa

SEQ ID NO: 128372 - DNA, 17 bp, Arabidopsis thaliana
gttgcggtgcggttttg

SEQ ID NO: 128373 - DNA, 17 bp, Arabidopsis thaliana
gttgcggttctaggttt

SEQ ID NO: 128374 - DNA, 17 bp, Arabidopsis thaliana
gttgcggttctcttcat

SEQ ID NO: 128375 - DNA, 17 bp, Arabidopsis thaliana
gttgcggttgcagacgg

SEQ ID NO: 128376 - DNA, 17 bp, Arabidopsis thaliana
gttgcggttgcgggagt

SEQ ID NO: 128377 - DNA, 17 bp, Arabidopsis thaliana
gttgcggttgtggtttg

SEQ ID NO: 128378 - DNA, 17 bp, Arabidopsis thaliana
gttgcggtttaagttgt

SEQ ID NO: 128379 - DNA, 17 bp, Arabidopsis thaliana
gttgcgtcatcaggcgg

SEQ ID NO: 128380 - DNA, 17 bp, Arabidopsis thaliana
gttgcgtcgctaatcga

SEQ ID NO: 128381 - DNA, 17 bp, Arabidopsis thaliana
gttgcgtcgttgagctt

SEQ ID NO: 128382 - DNA, 17 bp, Arabidopsis thaliana
gttgcgtctgatacggt

SEQ ID NO: 128383 - DNA, 17 bp, Arabidopsis thaliana
gttgcgtgagattgttg

SEQ ID NO: 128384 - DNA, 17 bp, Arabidopsis thaliana
gttgcgttgagttcccg

SEQ ID NO: 128385 - DNA, 17 bp, Arabidopsis thaliana
gttgcgtttactggatt

SEQ ID NO: 128386 - DNA, 17 bp, Arabidopsis thaliana
gttgctaaacaccgccg

SEQ ID NO: 128387 - DNA, 17 bp, Arabidopsis thaliana
gttgctaaatcggccgg

SEQ ID NO: 128388 - DNA, 17 bp, Arabidopsis thaliana
gttgctaactcacgaga

SEQ ID NO: 128389 - DNA, 17 bp, Arabidopsis thaliana
gttgctaactcacgtga

SEQ ID NO: 128390 - DNA, 17 bp, Arabidopsis thaliana
gttgctaactcaggtga

SEQ ID NO: 128391 - DNA, 17 bp, Arabidopsis thaliana
gttgctaactcatacaa

SEQ ID NO: 128392 - DNA, 17 bp, Arabidopsis thaliana
gttgctaactcatacga

SEQ ID NO: 128393 - DNA, 17 bp, Arabidopsis thaliana
gttgctaactcatagga

SEQ ID NO: 128394 - DNA, 17 bp, Arabidopsis thaliana
gttgctacgagtcgctg

SEQ ID NO: 128395 - DNA, 17 bp, Arabidopsis thaliana
gttgctactcgccaatg

SEQ ID NO: 128396 - DNA, 17 bp, Arabidopsis thaliana
gttgctacttttgatcg

SEQ ID NO: 128397 - DNA, 17 bp, Arabidopsis thaliana
gttgctagctggaagag

SEQ ID NO: 128398 - DNA, 17 bp, Arabidopsis thaliana
gttgctagtcgagcgac

SEQ ID NO: 128399 - DNA, 17 bp, Arabidopsis thaliana
gttgctatgaagtcttt

SEQ ID NO: 128400 - DNA, 17 bp, Arabidopsis thaliana
gttgctatggtgccatc

SEQ ID NO: 128401 - DNA, 17 bp, Arabidopsis thaliana
gttgctcaagccccatc

SEQ ID NO: 128402 - DNA, 17 bp, Arabidopsis thaliana
gttgctcacgcccggtc

SEQ ID NO: 128403 - DNA, 17 bp, Arabidopsis thaliana
gttgctcacttgcccga

SEQ ID NO: 128404 - DNA, 17 bp, Arabidopsis thaliana
gttgctcatagttggcc

SEQ ID NO: 128405 - DNA, 17 bp, Arabidopsis thaliana
gttgctccaatggtcac

SEQ ID NO: 128406 - DNA, 17 bp, Arabidopsis thaliana
gttgctccaggtcatca

SEQ ID NO: 128407 - DNA, 17 bp, Arabidopsis thaliana
gttgctccagttgcaac

SEQ ID NO: 128408 - DNA, 17 bp, Arabidopsis thaliana
gttgctccattttgttg

SEQ ID NO: 128409 - DNA, 17 bp, Arabidopsis thaliana
gttgctcccaaatcgcg

SEQ ID NO: 128410 - DNA, 17 bp, Arabidopsis thaliana
gttgctccgaagctgct

SEQ ID NO: 128411 - DNA, 17 bp, Arabidopsis thaliana
gttgctcgaactcgact

SEQ ID NO: 128412 - DNA, 17 bp, Arabidopsis thaliana
gttgctcgattaagacc

SEQ ID NO: 128413 - DNA, 17 bp, Arabidopsis thaliana
gttgctcgattacttat

SEQ ID NO: 128414 - DNA, 17 bp, Arabidopsis thaliana
gttgctcgggtcatatg

SEQ ID NO: 128415 - DNA, 17 bp, Arabidopsis thaliana
gttgctctaaggtgcca

SEQ ID NO: 128416 - DNA, 17 bp, Arabidopsis thaliana
gttgctctctcgatccg

SEQ ID NO: 128417 - DNA, 17 bp, Arabidopsis thaliana
gttgctctgatcagttt

SEQ ID NO: 128418 - DNA, 17 bp, Arabidopsis thaliana
gttgctctgatgattca

SEQ ID NO: 128419 - DNA, 17 bp, Arabidopsis thaliana
gttgctctgctttgctg

SEQ ID NO: 128420 - DNA, 17 bp, Arabidopsis thaliana
gttgctcttagtcggtc

SEQ ID NO: 128421 - DNA, 17 bp, Arabidopsis thaliana
gttgctcttgctcatct

SEQ ID NO: 128422 - DNA, 17 bp, Arabidopsis thaliana
gttgctcttggcccttg

SEQ ID NO: 128423 - DNA, 17 bp, Arabidopsis thaliana
gttgctgaatactgtgt

SEQ ID NO: 128424 - DNA, 17 bp, Arabidopsis thaliana
gttgctgaatccaacga

SEQ ID NO: 128425 - DNA, 17 bp, Arabidopsis thaliana
gttgctgagaccgaaac

SEQ ID NO: 128426 - DNA, 17 bp, Arabidopsis thaliana
gttgctgataggtgttg

SEQ ID NO: 128427 - DNA, 17 bp, Arabidopsis thaliana
gttgctgctctgccatg

SEQ ID NO: 128428 - DNA, 17 bp, Arabidopsis thaliana
gttgctgcttaggattg

SEQ ID NO: 128429 - DNA, 17 bp, Arabidopsis thaliana
gttgctgggctcggggt

SEQ ID NO: 128430 - DNA, 17 bp, Arabidopsis thaliana
gttgctggtcctgacaa

SEQ ID NO: 128431 - DNA, 17 bp, Arabidopsis thaliana
gttgctggtcgaccgac

SEQ ID NO: 128432 - DNA, 17 bp, Arabidopsis thaliana
gttgctgtcgctggtcg

SEQ ID NO: 128433 - DNA, 17 bp, Arabidopsis thaliana
gttgctgtcgctgtcgc

SEQ ID NO: 128434 - DNA, 17 bp, Arabidopsis thaliana
gttgctgtgattgcttt

SEQ ID NO: 128435 - DNA, 17 bp, Arabidopsis thaliana
gttgcttaaagacaaag

SEQ ID NO: 128436 - DNA, 17 bp, Arabidopsis thaliana
gttgcttaccgggtatg

SEQ ID NO: 128437 - DNA, 17 bp, Arabidopsis thaliana
gttgcttaggtacaggg

SEQ ID NO: 128438 - DNA, 17 bp, Arabidopsis thaliana
gttgcttagtctgtcgc

SEQ ID NO: 128439 - DNA, 17 bp, Arabidopsis thaliana
gttgcttataggactcc

SEQ ID NO: 128440 - DNA, 17 bp, Arabidopsis thaliana
gttgcttcacgcgctac

SEQ ID NO: 128441 - DNA, 17 bp, Arabidopsis thaliana
gttgcttcagcttcttc

SEQ ID NO: 128442 - DNA, 17 bp, Arabidopsis thaliana
gttgcttccagcttttg

SEQ ID NO: 128443 - DNA, 17 bp, Arabidopsis thaliana
gttgcttcctcttcatg

SEQ ID NO: 128444 - DNA, 17 bp, Arabidopsis thaliana
gttgcttcgagacatgt

SEQ ID NO: 128445 - DNA, 17 bp, Arabidopsis thaliana
gttgcttcggcttggtc

SEQ ID NO: 128446 - DNA, 17 bp, Arabidopsis thaliana
gttgcttgacttcttgg

SEQ ID NO: 128447 - DNA, 17 bp, Arabidopsis thaliana
gttgcttgaggtcttgt

SEQ ID NO: 128448 - DNA, 17 bp, Arabidopsis thaliana
gttgcttgctaccttct

SEQ ID NO: 128449 - DNA, 17 bp, Arabidopsis thaliana
gttgcttggaacctggt

SEQ ID NO: 128450 - DNA, 17 bp, Arabidopsis thaliana
gttgcttgtaaggcttc

SEQ ID NO: 128451 - DNA, 17 bp, Arabidopsis thaliana
gttgctttacggaattg

SEQ ID NO: 128452 - DNA, 17 bp, Arabidopsis thaliana
gttgctttcagactttc

SEQ ID NO: 128453 - DNA, 17 bp, Arabidopsis thaliana
gttgctttcatgtgtac

SEQ ID NO: 128454 - DNA, 17 bp, Arabidopsis thaliana
gttgctttcggactttc

SEQ ID NO: 128455 - DNA, 17 bp, Arabidopsis thaliana
gttgctttgaccgagcc

SEQ ID NO: 128456 - DNA, 17 bp, Arabidopsis thaliana
gttgctttggccgactc

SEQ ID NO: 128457 - DNA, 17 bp, Arabidopsis thaliana
gttgctttggccgagtg

SEQ ID NO: 128458 - DNA, 17 bp, Arabidopsis thaliana
gttgctttgttgagccg

SEQ ID NO: 128459 - DNA, 17 bp, Arabidopsis thaliana
gttgcttttggttgtgg

SEQ ID NO: 128460 - DNA, 17 bp, Arabidopsis thaliana
gttgctttttgatcctt

SEQ ID NO: 128461 - DNA, 17 bp, Arabidopsis thaliana
gttggaaaaagacgatc

SEQ ID NO: 128462 - DNA, 17 bp, Arabidopsis thaliana
gttggaaaactagacca

SEQ ID NO: 128463 - DNA, 17 bp, Arabidopsis thaliana
gttggaaaagtgcctca

SEQ ID NO: 128464 - DNA, 17 bp, Arabidopsis thaliana
gttggaaatctcttgca

SEQ ID NO: 128465 - DNA, 17 bp, Arabidopsis thaliana
gttggaacgattgatga

SEQ ID NO: 128466 - DNA, 17 bp, Arabidopsis thaliana
gttggaactcctgcttt

SEQ ID NO: 128467 - DNA, 17 bp, Arabidopsis thaliana
gttggaacttatttaca

SEQ ID NO: 128468 - DNA, 17 bp, Arabidopsis thaliana
gttggaagcacttgatt

SEQ ID NO: 128469 - DNA, 17 bp, Arabidopsis thaliana
gttggaagcccacagtc

SEQ ID NO: 128470 - DNA, 17 bp, Arabidopsis thaliana
gttggaagcccataaat

SEQ ID NO: 128471 - DNA, 17 bp, Arabidopsis thaliana
gttggaagcttatcaat

SEQ ID NO: 128472 - DNA, 17 bp, Arabidopsis thaliana
gttggaagtttgcgtgg

SEQ ID NO: 128473 - DNA, 17 bp, Arabidopsis thaliana
gttggaatccaattgac

SEQ ID NO: 128474 - DNA, 17 bp, Arabidopsis thaliana
gttggaatctcaacttt

SEQ ID NO: 128475 - DNA, 17 bp, Arabidopsis thaliana
gttggaatttcggcgag

SEQ ID NO: 128476 - DNA, 17 bp, Arabidopsis thaliana
gttggacaaaacgactg

SEQ ID NO: 128477 - DNA, 17 bp, Arabidopsis thaliana
gttggacaaagacccaa

SEQ ID NO: 128478 - DNA, 17 bp, Arabidopsis thaliana
gttggacacctgacttt

SEQ ID NO: 128479 - DNA, 17 bp, Arabidopsis thaliana
gttggacaggtcctggt

SEQ ID NO: 128480 - DNA, 17 bp, Arabidopsis thaliana
gttggacattgactaag

SEQ ID NO: 128481 - DNA, 17 bp, Arabidopsis thaliana
gttggaccaaccatgga

SEQ ID NO: 128482 - DNA, 17 bp, Arabidopsis thaliana
gttggaccaaccatggg

SEQ ID NO: 128483 - DNA, 17 bp, Arabidopsis thaliana
gttggaccacgggttaa

SEQ ID NO: 128484 - DNA, 17 bp, Arabidopsis thaliana
gttggaccataggtgcg

SEQ ID NO: 128485 - DNA, 17 bp, Arabidopsis thaliana
gttggacccgcgagcaa

SEQ ID NO: 128486 - DNA, 17 bp, Arabidopsis thaliana
gttggacccgcgagcca

SEQ ID NO: 128487 - DNA, 17 bp, Arabidopsis thaliana
gttggaccgcatgatta

SEQ ID NO: 128488 - DNA, 17 bp, Arabidopsis thaliana
gttggaccggctctgtg

SEQ ID NO: 128489 - DNA, 17 bp, Arabidopsis thaliana
gttggaccgtagggtaa

SEQ ID NO: 128490 - DNA, 17 bp, Arabidopsis thaliana
gttggaccgtttcccac

SEQ ID NO: 128491 - DNA, 17 bp, Arabidopsis thaliana
gttggaccgtttcccat

SEQ ID NO: 128492 - DNA, 17 bp, Arabidopsis thaliana
gttggaccttgggatgg

SEQ ID NO: 128493 - DNA, 17 bp, Arabidopsis thaliana
gttggactacgggtcaa

SEQ ID NO: 128494 - DNA, 17 bp, Arabidopsis thaliana
gttggactacgggttaa

SEQ ID NO: 128495 - DNA, 17 bp, Arabidopsis thaliana
gttggactctccatgac

SEQ ID NO: 128496 - DNA, 17 bp, Arabidopsis thaliana
gttggacttagaatacg

SEQ ID NO: 128497 - DNA, 17 bp, Arabidopsis thaliana
gttggacttatttacat

SEQ ID NO: 128498 - DNA, 17 bp, Arabidopsis thaliana
gttggacttctcatttt

SEQ ID NO: 128499 - DNA, 17 bp, Arabidopsis thaliana
gttggactttggaccaa

SEQ ID NO: 128500 - DNA, 17 bp, Arabidopsis thaliana
gttggagaagacaccat

SEQ ID NO: 128501 - DNA, 17 bp, Arabidopsis thaliana
gttggagacatatctat

SEQ ID NO: 128502 - DNA, 17 bp, Arabidopsis thaliana
gttggagaccattagcc

SEQ ID NO: 128503 - DNA, 17 bp, Arabidopsis thaliana
gttggagactgaatatc

SEQ ID NO: 128504 - DNA, 17 bp, Arabidopsis thaliana
gttggagatcttttgca

SEQ ID NO: 128505 - DNA, 17 bp, Arabidopsis thaliana
gttggagatggattgca

SEQ ID NO: 128506 - DNA, 17 bp, Arabidopsis thaliana
gttggagatgggattgc

SEQ ID NO: 128507 - DNA, 17 bp, Arabidopsis thaliana
gttggagccgtagcgtc

SEQ ID NO: 128508 - DNA, 17 bp, Arabidopsis thaliana
gttggaggacatggaaa

SEQ ID NO: 128509 - DNA, 17 bp, Arabidopsis thaliana
gttggaggcaccattac

SEQ ID NO: 128510 - DNA, 17 bp, Arabidopsis thaliana
gttggaggtgcgaatgt

SEQ ID NO: 128511 - DNA, 17 bp, Arabidopsis thaliana
gttggaggtggtcttac

SEQ ID NO: 128512 - DNA, 17 bp, Arabidopsis thaliana
gttggaggttaagacag

SEQ ID NO: 128513 - DNA, 17 bp, Arabidopsis thaliana
gttggagtcggtccccc

SEQ ID NO: 128514 - DNA, 17 bp, Arabidopsis thaliana
gttggagttggacttgg

SEQ ID NO: 128515 - DNA, 17 bp, Arabidopsis thaliana
gttggagttggtctgac

SEQ ID NO: 128516 - DNA, 17 bp, Arabidopsis thaliana
gttggagtttgtccggc

SEQ ID NO: 128517 - DNA, 17 bp, Arabidopsis thaliana
gttggatacatcagttg

SEQ ID NO: 128518 - DNA, 17 bp, Arabidopsis thaliana
gttggatacctcagctt

SEQ ID NO: 128519 - DNA, 17 bp, Arabidopsis thaliana
gttggatcaacccataa

SEQ ID NO: 128520 - DNA, 17 bp, Arabidopsis thaliana
gttggatcaggcccgac

SEQ ID NO: 128521 - DNA, 17 bp, Arabidopsis thaliana
gttggatcccaaactta

SEQ ID NO: 128522 - DNA, 17 bp, Arabidopsis thaliana
gttggatccctgtatag

SEQ ID NO: 128523 - DNA, 17 bp, Arabidopsis thaliana
gttggatcctggataac

SEQ ID NO: 128524 - DNA, 17 bp, Arabidopsis thaliana
gttggatcgaattttgc

SEQ ID NO: 128525 - DNA, 17 bp, Arabidopsis thaliana
gttggatcggatcggcc

SEQ ID NO: 128526 - DNA, 17 bp, Arabidopsis thaliana
gttggatcggtcctgaa

SEQ ID NO: 128527 - DNA, 17 bp, Arabidopsis thaliana
gttggatcgtagggttg

SEQ ID NO: 128528 - DNA, 17 bp, Arabidopsis thaliana
gttggatctattatttg

SEQ ID NO: 128529 - DNA, 17 bp, Arabidopsis thaliana
gttggatggagatgatt

SEQ ID NO: 128530 - DNA, 17 bp, Arabidopsis thaliana
gttggatgtcaacaatg

SEQ ID NO: 128531 - DNA, 17 bp, Arabidopsis thaliana
gttggattgagggtgta

SEQ ID NO: 128532 - DNA, 17 bp, Arabidopsis thaliana
gttggatttggcgaagt

SEQ ID NO: 128533 - DNA, 17 bp, Arabidopsis thaliana
gttggatttgtggaatc

SEQ ID NO: 128534 - DNA, 17 bp, Arabidopsis thaliana
gttggcaaaccagagct

SEQ ID NO: 128535 - DNA, 17 bp, Arabidopsis thaliana
gttggcaatatgtctac

SEQ ID NO: 128536 - DNA, 17 bp, Arabidopsis thaliana
gttggcacatattgcag

SEQ ID NO: 128537 - DNA, 17 bp, Arabidopsis thaliana
gttggcactcatttcct

SEQ ID NO: 128538 - DNA, 17 bp, Arabidopsis thaliana
gttggcagagaccctgt

SEQ ID NO: 128539 - DNA, 17 bp, Arabidopsis thaliana
gttggcaggacgggttt

SEQ ID NO: 128540 - DNA, 17 bp, Arabidopsis thaliana
gttggcagtcggtctct

SEQ ID NO: 128541 - DNA, 17 bp, Arabidopsis thaliana
gttggcatgcttgctct

SEQ ID NO: 128542 - DNA, 17 bp, Arabidopsis thaliana
gttggcatgtgtgacca

SEQ ID NO: 128543 - DNA, 17 bp, Arabidopsis thaliana
gttggccaacactttcc

SEQ ID NO: 128544 - DNA, 17 bp, Arabidopsis thaliana
gttggcccagtccactt

SEQ ID NO: 128545 - DNA, 17 bp, Arabidopsis thaliana
gttggcccgatctatct

SEQ ID NO: 128546 - DNA, 17 bp, Arabidopsis thaliana
gttggccgcttaatttg

SEQ ID NO: 128547 - DNA, 17 bp, Arabidopsis thaliana
gttggccggaatcacaa

SEQ ID NO: 128548 - DNA, 17 bp, Arabidopsis thaliana
gttggccggttttctgt

SEQ ID NO: 128549 - DNA, 17 bp, Arabidopsis thaliana
gttggccgtagagactg

SEQ ID NO: 128550 - DNA, 17 bp, Arabidopsis thaliana
gttggccttcgggatcg

SEQ ID NO: 128551 - DNA, 17 bp, Arabidopsis thaliana
gttggcgaaatgaccgg

SEQ ID NO: 128552 - DNA, 17 bp, Arabidopsis thaliana
gttggcgactgaaacca

SEQ ID NO: 128553 - DNA, 17 bp, Arabidopsis thaliana
gttggcgagacgggttt

SEQ ID NO: 128554 - DNA, 17 bp, Arabidopsis thaliana
gttggcgctgtcgctgg

SEQ ID NO: 128555 - DNA, 17 bp, Arabidopsis thaliana
gttggcggcggaggaat

SEQ ID NO: 128556 - DNA, 17 bp, Arabidopsis thaliana
gttggcggcgtgcctaa

SEQ ID NO: 128557 - DNA, 17 bp, Arabidopsis thaliana
gttggcgggacgagttt

SEQ ID NO: 128558 - DNA, 17 bp, Arabidopsis thaliana
gttggcgggacgggttt

SEQ ID NO: 128559 - DNA, 17 bp, Arabidopsis thaliana
gttggcggtggacatgg

SEQ ID NO: 128560 - DNA, 17 bp, Arabidopsis thaliana
gttggcgttcaatacgg

SEQ ID NO: 128561 - DNA, 17 bp, Arabidopsis thaliana
gttggctaactaggata

SEQ ID NO: 128562 - DNA, 17 bp, Arabidopsis thaliana
gttggctaagtccgttc

SEQ ID NO: 128563 - DNA, 17 bp, Arabidopsis thaliana
gttggctacagctgtaa

SEQ ID NO: 128564 - DNA, 17 bp, Arabidopsis thaliana
gttggctactggccgac

SEQ ID NO: 128565 - DNA, 17 bp, Arabidopsis thaliana
gttggctagcgcttagg

SEQ ID NO: 128566 - DNA, 17 bp, Arabidopsis thaliana
gttggctattggccgac

SEQ ID NO: 128567 - DNA, 17 bp, Arabidopsis thaliana
gttggctccgacccaac

SEQ ID NO: 128568 - DNA, 17 bp, Arabidopsis thaliana
gttggctgaggcacacg

SEQ ID NO: 128569 - DNA, 17 bp, Arabidopsis thaliana
gttggctggctctggtg

SEQ ID NO: 128570 - DNA, 17 bp, Arabidopsis thaliana
gttggctgtagctgtaa

SEQ ID NO: 128571 - DNA, 17 bp, Arabidopsis thaliana
gttggcttcttggctat

SEQ ID NO: 128572 - DNA, 17 bp, Arabidopsis thaliana
gttggctttggttctgt

SEQ ID NO: 128573 - DNA, 17 bp, Arabidopsis thaliana
gttgggaagacaccttc

SEQ ID NO: 128574 - DNA, 17 bp, Arabidopsis thaliana
gttgggaagcatttgca

SEQ ID NO: 128575 - DNA, 17 bp, Arabidopsis thaliana
gttgggactgtttcgac

SEQ ID NO: 128576 - DNA, 17 bp, Arabidopsis thaliana
gttgggatagctcagtt

SEQ ID NO: 128577 - DNA, 17 bp, Arabidopsis thaliana
gttgggatcttctatac

SEQ ID NO: 128578 - DNA, 17 bp, Arabidopsis thaliana
gttgggatggtcatcag

SEQ ID NO: 128579 - DNA, 17 bp, Arabidopsis thaliana
gttgggattctgtctga

SEQ ID NO: 128580 - DNA, 17 bp, Arabidopsis thaliana
gttgggatttggaaact

SEQ ID NO: 128581 - DNA, 17 bp, Arabidopsis thaliana
gttgggcatatgaccag

SEQ ID NO: 128582 - DNA, 17 bp, Arabidopsis thaliana
gttgggcatatgagtaa

SEQ ID NO: 128583 - DNA, 17 bp, Arabidopsis thaliana
gttgggcattgacctag

SEQ ID NO: 128584 - DNA, 17 bp, Arabidopsis thaliana
gttgggccaacctatgg

SEQ ID NO: 128585 - DNA, 17 bp, Arabidopsis thaliana
gttgggccgtttcccat

SEQ ID NO: 128586 - DNA, 17 bp, Arabidopsis thaliana
gttgggcctttgaacgg

SEQ ID NO: 128587 - DNA, 17 bp, Arabidopsis thaliana
gttgggcggtgatgaag

SEQ ID NO: 128588 - DNA, 17 bp, Arabidopsis thaliana
gttgggctcagaagttt

SEQ ID NO: 128589 - DNA, 17 bp, Arabidopsis thaliana
gttgggcttgaccatat

SEQ ID NO: 128590 - DNA, 17 bp, Arabidopsis thaliana
gttgggctttggcccca

SEQ ID NO: 128591 - DNA, 17 bp, Arabidopsis thaliana
gttggggctgctcttaa

SEQ ID NO: 128592 - DNA, 17 bp, Arabidopsis thaliana
gttgggggagcgatttg

SEQ ID NO: 128593 - DNA, 17 bp, Arabidopsis thaliana
gttgggtacagaccaaa

SEQ ID NO: 128594 - DNA, 17 bp, Arabidopsis thaliana
gttgggtacccacgggt

SEQ ID NO: 128595 - DNA, 17 bp, Arabidopsis thaliana
gttgggtcaacccataa

SEQ ID NO: 128596 - DNA, 17 bp, Arabidopsis thaliana
gttgggtcgaccgtgac

SEQ ID NO: 128597 - DNA, 17 bp, Arabidopsis thaliana
gttgggtcggggctgga

SEQ ID NO: 128598 - DNA, 17 bp, Arabidopsis thaliana
gttgggtctgatactaa

SEQ ID NO: 128599 - DNA, 17 bp, Arabidopsis thaliana
gttgggtgtcggttgat

SEQ ID NO: 128600 - DNA, 17 bp, Arabidopsis thaliana
gttgggttaaccatttt

SEQ ID NO: 128601 - DNA, 17 bp, Arabidopsis thaliana
gttgggttacccatttt

SEQ ID NO: 128602 - DNA, 17 bp, Arabidopsis thaliana
gttgggttagatttttg

SEQ ID NO: 128603 - DNA, 17 bp, Arabidopsis thaliana
gttgggttcaggtcaga

SEQ ID NO: 128604 - DNA, 17 bp, Arabidopsis thaliana
gttgggttgacccatga

SEQ ID NO: 128605 - DNA, 17 bp, Arabidopsis thaliana
gttgggtttgagaccag

SEQ ID NO: 128606 - DNA, 17 bp, Arabidopsis thaliana
gttgggtttgatactaa

SEQ ID NO: 128607 - DNA, 17 bp, Arabidopsis thaliana
gttgggtttggtggacg

SEQ ID NO: 128608 - DNA, 17 bp, Arabidopsis thaliana
gttgggtttgtgaccag

SEQ ID NO: 128609 - DNA, 17 bp, Arabidopsis thaliana
gttggtaatgtgcttcg

SEQ ID NO: 128610 - DNA, 17 bp, Arabidopsis thaliana
gttggtagcggttgtta

SEQ ID NO: 128611 - DNA, 17 bp, Arabidopsis thaliana
gttggtagctgacttag

SEQ ID NO: 128612 - DNA, 17 bp, Arabidopsis thaliana
gttggtcccaaaaggct

SEQ ID NO: 128613 - DNA, 17 bp, Arabidopsis thaliana
gttggtccgtaagtggt

SEQ ID NO: 128614 - DNA, 17 bp, Arabidopsis thaliana
gttggtcctattgctag

SEQ ID NO: 128615 - DNA, 17 bp, Arabidopsis thaliana
gttggtcgagcgatttg

SEQ ID NO: 128616 - DNA, 17 bp, Arabidopsis thaliana
gttggtcgattaagaca

SEQ ID NO: 128617 - DNA, 17 bp, Arabidopsis thaliana
gttggtcgattaattaa

SEQ ID NO: 128618 - DNA, 17 bp, Arabidopsis thaliana
gttggtcgctgtcgcgg

SEQ ID NO: 128619 - DNA, 17 bp, Arabidopsis thaliana
gttggtcggacggttga

SEQ ID NO: 128620 - DNA, 17 bp, Arabidopsis thaliana
gttggtcgtcaatggct

SEQ ID NO: 128621 - DNA, 17 bp, Arabidopsis thaliana
gttggtctacgctatcg

SEQ ID NO: 128622 - DNA, 17 bp, Arabidopsis thaliana
gttggtctgtcacttag

SEQ ID NO: 128623 - DNA, 17 bp, Arabidopsis thaliana
gttggtcttcaacgagg

SEQ ID NO: 128624 - DNA, 17 bp, Arabidopsis thaliana
gttggtgacctcgtcga

SEQ ID NO: 128625 - DNA, 17 bp, Arabidopsis thaliana
gttggtgacctgatgac

SEQ ID NO: 128626 - DNA, 17 bp, Arabidopsis thaliana
gttggtgagcggcggcg

SEQ ID NO: 128627 - DNA, 17 bp, Arabidopsis thaliana
gttggtgagggtcgatt

SEQ ID NO: 128628 - DNA, 17 bp, Arabidopsis thaliana
gttggtgccaagaggga

SEQ ID NO: 128629 - DNA, 17 bp, Arabidopsis thaliana
gttggtgccagcggagt

SEQ ID NO: 128630 - DNA, 17 bp, Arabidopsis thaliana
gttggtgcgttgttgag

SEQ ID NO: 128631 - DNA, 17 bp, Arabidopsis thaliana
gttggtgctgctattgc

SEQ ID NO: 128632 - DNA, 17 bp, Arabidopsis thaliana
gttggtggaacactggc

SEQ ID NO: 128633 - DNA, 17 bp, Arabidopsis thaliana
gttggtggaacattggc

SEQ ID NO: 128634 - DNA, 17 bp, Arabidopsis thaliana
gttggtggagcgaatta

SEQ ID NO: 128635 - DNA, 17 bp, Arabidopsis thaliana
gttggtggagcgaattg

SEQ ID NO: 128636 - DNA, 17 bp, Arabidopsis thaliana
gttggtggagcgattta

SEQ ID NO: 128637 - DNA, 17 bp, Arabidopsis thaliana
gttggtggagcgatttc

SEQ ID NO: 128638 - DNA, 17 bp, Arabidopsis thaliana
gttggtggagcgatttg

SEQ ID NO: 128639 - DNA, 17 bp, Arabidopsis thaliana
gttggtggcacttgctc

SEQ ID NO: 128640 - DNA, 17 bp, Arabidopsis thaliana
gttggtggtgctcttat

SEQ ID NO: 128641 - DNA, 17 bp, Arabidopsis thaliana
gttggtgtccggtgcgc

SEQ ID NO: 128642 - DNA, 17 bp, Arabidopsis thaliana
gttggttagagcttgtg

SEQ ID NO: 128643 - DNA, 17 bp, Arabidopsis thaliana
gttggttatcaggtccg

SEQ ID NO: 128644 - DNA, 17 bp, Arabidopsis thaliana
gttggttatcgggtccg

SEQ ID NO: 128645 - DNA, 17 bp, Arabidopsis thaliana
gttggttattgggtccg

SEQ ID NO: 128646 - DNA, 17 bp, Arabidopsis thaliana
gttggttcaaatccagc

SEQ ID NO: 128647 - DNA, 17 bp, Arabidopsis thaliana
gttggttcaaggactta

SEQ ID NO: 128648 - DNA, 17 bp, Arabidopsis thaliana
gttggttcaggagagtc

SEQ ID NO: 128649 - DNA, 17 bp, Arabidopsis thaliana
gttggttccagttacgc

SEQ ID NO: 128650 - DNA, 17 bp, Arabidopsis thaliana
gttggttcgatgactgc

SEQ ID NO: 128651 - DNA, 17 bp, Arabidopsis thaliana
gttggttcggatccggg

SEQ ID NO: 128652 - DNA, 17 bp, Arabidopsis thaliana
gttggttcgtacccggg

SEQ ID NO: 128653 - DNA, 17 bp, Arabidopsis thaliana
gttggttcgtgtcccac

SEQ ID NO: 128654 - DNA, 17 bp, Arabidopsis thaliana
gttggttcgtttcccgg

SEQ ID NO: 128655 - DNA, 17 bp, Arabidopsis thaliana
gttggttctatggaaaa

SEQ ID NO: 128656 - DNA, 17 bp, Arabidopsis thaliana
gttggttctgggaaata

SEQ ID NO: 128657 - DNA, 17 bp, Arabidopsis thaliana
gttggttctttgcgcct

SEQ ID NO: 128658 - DNA, 17 bp, Arabidopsis thaliana
gttggttgattcgggtt

SEQ ID NO: 128659 - DNA, 17 bp, Arabidopsis thaliana
gttggttgcaggttttg

SEQ ID NO: 128660 - DNA, 17 bp, Arabidopsis thaliana
gttggttgccttcagag

SEQ ID NO: 128661 - DNA, 17 bp, Arabidopsis thaliana
gttggttgcgacggttt

SEQ ID NO: 128662 - DNA, 17 bp, Arabidopsis thaliana
gttggttgctgtcgctg

SEQ ID NO: 128663 - DNA, 17 bp, Arabidopsis thaliana
gttggttggtgctgcta

SEQ ID NO: 128664 - DNA, 17 bp, Arabidopsis thaliana
gttggttgtaccctctt

SEQ ID NO: 128665 - DNA, 17 bp, Arabidopsis thaliana
gttggttgtagctgtaa

SEQ ID NO: 128666 - DNA, 17 bp, Arabidopsis thaliana
gttggttgtggttgttc

SEQ ID NO: 128667 - DNA, 17 bp, Arabidopsis thaliana
gttggtttactctatgc

SEQ ID NO: 128668 - DNA, 17 bp, Arabidopsis thaliana
gttggtttatcagggag

SEQ ID NO: 128669 - DNA, 17 bp, Arabidopsis thaliana
gttggtttctctgatgg

SEQ ID NO: 128670 - DNA, 17 bp, Arabidopsis thaliana
gttggtttggagtgaat

SEQ ID NO: 128671 - DNA, 17 bp, Arabidopsis thaliana
gttgtaaaattcatccg

SEQ ID NO: 128672 - DNA, 17 bp, Arabidopsis thaliana
gttgtaaacccgggtca

SEQ ID NO: 128673 - DNA, 17 bp, Arabidopsis thaliana
gttgtaaagctctgcct

SEQ ID NO: 128674 - DNA, 17 bp, Arabidopsis thaliana
gttgtaactgtgggcga

SEQ ID NO: 128675 - DNA, 17 bp, Arabidopsis thaliana
gttgtaacttaaccgct

SEQ ID NO: 128676 - DNA, 17 bp, Arabidopsis thaliana
gttgtaacttgtgctgg

SEQ ID NO: 128677 - DNA, 17 bp, Arabidopsis thaliana
gttgtaagactacttgc

SEQ ID NO: 128678 - DNA, 17 bp, Arabidopsis thaliana
gttgtaagctccggtca

SEQ ID NO: 128679 - DNA, 17 bp, Arabidopsis thaliana
gttgtaagtccaggacg

SEQ ID NO: 128680 - DNA, 17 bp, Arabidopsis thaliana
gttgtaatgattgtgga

SEQ ID NO: 128681 - DNA, 17 bp, Arabidopsis thaliana
gttgtaattagtccgcg

SEQ ID NO: 128682 - DNA, 17 bp, Arabidopsis thaliana
gttgtaattgccatctg

SEQ ID NO: 128683 - DNA, 17 bp, Arabidopsis thaliana
gttgtacacgagtgtac

SEQ ID NO: 128684 - DNA, 17 bp, Arabidopsis thaliana
gttgtacacggtcggct

SEQ ID NO: 128685 - DNA, 17 bp, Arabidopsis thaliana
gttgtacattccaccgt

SEQ ID NO: 128686 - DNA, 17 bp, Arabidopsis thaliana
gttgtaccccgcctccg

SEQ ID NO: 128687 - DNA, 17 bp, Arabidopsis thaliana
gttgtacctaaacgctt

SEQ ID NO: 128688 - DNA, 17 bp, Arabidopsis thaliana
gttgtacctgatcttgc

SEQ ID NO: 128689 - DNA, 17 bp, Arabidopsis thaliana
gttgtacggactggagc

SEQ ID NO: 128690 - DNA, 17 bp, Arabidopsis thaliana
gttgtacggcggttgag

SEQ ID NO: 128691 - DNA, 17 bp, Arabidopsis thaliana
gttgtactgcacatttc

SEQ ID NO: 128692 - DNA, 17 bp, Arabidopsis thaliana
gttgtactgcgcatttc

SEQ ID NO: 128693 - DNA, 17 bp, Arabidopsis thaliana
gttgtactgttccatgt

SEQ ID NO: 128694 - DNA, 17 bp, Arabidopsis thaliana
gttgtagaccgttcatg

SEQ ID NO: 128695 - DNA, 17 bp, Arabidopsis thaliana
gttgtagatctcgtgga

SEQ ID NO: 128696 - DNA, 17 bp, Arabidopsis thaliana
gttgtagattttggtga

SEQ ID NO: 128697 - DNA, 17 bp, Arabidopsis thaliana
gttgtagccaaagtcca

SEQ ID NO: 128698 - DNA, 17 bp, Arabidopsis thaliana
gttgtagccgcttgagt

SEQ ID NO: 128699 - DNA, 17 bp, Arabidopsis thaliana
gttgtagctccttcggt

SEQ ID NO: 128700 - DNA, 17 bp, Arabidopsis thaliana
gttgtagctttggtgtg

SEQ ID NO: 128701 - DNA, 17 bp, Arabidopsis thaliana
gttgtaggacgtttctg

SEQ ID NO: 128702 - DNA, 17 bp, Arabidopsis thaliana
gttgtaggagagagttg

SEQ ID NO: 128703 - DNA, 17 bp, Arabidopsis thaliana
gttgtaggatgtacgcg

SEQ ID NO: 128704 - DNA, 17 bp, Arabidopsis thaliana
gttgtagtctaactggt

SEQ ID NO: 128705 - DNA, 17 bp, Arabidopsis thaliana
gttgtagtctagctggt

SEQ ID NO: 128706 - DNA, 17 bp, Arabidopsis thaliana
gttgtagtgacggcttg

SEQ ID NO: 128707 - DNA, 17 bp, Arabidopsis thaliana
gttgtagtgatttgctg

SEQ ID NO: 128708 - DNA, 17 bp, Arabidopsis thaliana
gttgtagtttcgggcct

SEQ ID NO: 128709 - DNA, 17 bp, Arabidopsis thaliana
gttgtatacctcagctt

SEQ ID NO: 128710 - DNA, 17 bp, Arabidopsis thaliana
gttgtatacggtcggct

SEQ ID NO: 128711 - DNA, 17 bp, Arabidopsis thaliana
gttgtatcagggactta

SEQ ID NO: 128712 - DNA, 17 bp, Arabidopsis thaliana
gttgtatccacacattt

SEQ ID NO: 128713 - DNA, 17 bp, Arabidopsis thaliana
gttgtatctgcacaacg

SEQ ID NO: 128714 - DNA, 17 bp, Arabidopsis thaliana
gttgtatctgtgttggc

SEQ ID NO: 128715 - DNA, 17 bp, Arabidopsis thaliana
gttgtatcttgtgaatg

SEQ ID NO: 128716 - DNA, 17 bp, Arabidopsis thaliana
gttgtatgctgctcttg

SEQ ID NO: 128717 - DNA, 17 bp, Arabidopsis thaliana
gttgtatggaactccgg

SEQ ID NO: 128718 - DNA, 17 bp, Arabidopsis thaliana
gttgtattctaccttgg

SEQ ID NO: 128719 - DNA, 17 bp, Arabidopsis thaliana
gttgtattgcactattg

SEQ ID NO: 128720 - DNA, 17 bp, Arabidopsis thaliana
gttgtatttccgagatg

SEQ ID NO: 128721 - DNA, 17 bp, Arabidopsis thaliana
gttgtattttgccatgg

SEQ ID NO: 128722 - DNA, 17 bp, Arabidopsis thaliana
gttgtattttttctcac

SEQ ID NO: 128723 - DNA, 17 bp, Arabidopsis thaliana
gttgtattttttctcag

SEQ ID NO: 128724 - DNA, 17 bp, Arabidopsis thaliana
gttgtcaaatcggggtg

SEQ ID NO: 128725 - DNA, 17 bp, Arabidopsis thaliana
gttgtcaaatgtaataa

SEQ ID NO: 128726 - DNA, 17 bp, Arabidopsis thaliana
gttgtcaaccttgggct

SEQ ID NO: 128727 - DNA, 17 bp, Arabidopsis thaliana
gttgtcaatccaaatgg

SEQ ID NO: 128728 - DNA, 17 bp, Arabidopsis thaliana
gttgtcaatccaatctg

SEQ ID NO: 128729 - DNA, 17 bp, Arabidopsis thaliana
gttgtcaatcttgggct

SEQ ID NO: 128730 - DNA, 17 bp, Arabidopsis thaliana
gttgtcaccataaagct

SEQ ID NO: 128731 - DNA, 17 bp, Arabidopsis thaliana
gttgtcactcgaaccgg

SEQ ID NO: 128732 - DNA, 17 bp, Arabidopsis thaliana
gttgtcagcaatcctag

SEQ ID NO: 128733 - DNA, 17 bp, Arabidopsis thaliana
gttgtcagcctatcact

SEQ ID NO: 128734 - DNA, 17 bp, Arabidopsis thaliana
gttgtcaggtgagtttg

SEQ ID NO: 128735 - DNA, 17 bp, Arabidopsis thaliana
gttgtcagtcgtatgtc

SEQ ID NO: 128736 - DNA, 17 bp, Arabidopsis thaliana
gttgtcagtcgtatgtt

SEQ ID NO: 128737 - DNA, 17 bp, Arabidopsis thaliana
gttgtcatcaagtatgt

SEQ ID NO: 128738 - DNA, 17 bp, Arabidopsis thaliana
gttgtcatgcaaagctt

SEQ ID NO: 128739 - DNA, 17 bp, Arabidopsis thaliana
gttgtcatgtaaccaag

SEQ ID NO: 128740 - DNA, 17 bp, Arabidopsis thaliana
gttgtcattgtcataaa

SEQ ID NO: 128741 - DNA, 17 bp, Arabidopsis thaliana
gttgtccaaggatgtgc

SEQ ID NO: 128742 - DNA, 17 bp, Arabidopsis thaliana
gttgtccacagaagtct

SEQ ID NO: 128743 - DNA, 17 bp, Arabidopsis thaliana
gttgtccacataggttt

SEQ ID NO: 128744 - DNA, 17 bp, Arabidopsis thaliana
gttgtccactcagcagc

SEQ ID NO: 128745 - DNA, 17 bp, Arabidopsis thaliana
gttgtccagtctctgag

SEQ ID NO: 128746 - DNA, 17 bp, Arabidopsis thaliana
gttgtccatccttaagg

SEQ ID NO: 128747 - DNA, 17 bp, Arabidopsis thaliana
gttgtcccagcgtttga

SEQ ID NO: 128748 - DNA, 17 bp, Arabidopsis thaliana
gttgtcccagttccgaa

SEQ ID NO: 128749 - DNA, 17 bp, Arabidopsis thaliana
gttgtccccgctatcag

SEQ ID NO: 128750 - DNA, 17 bp, Arabidopsis thaliana
gttgtccgagtcgtcat

SEQ ID NO: 128751 - DNA, 17 bp, Arabidopsis thaliana
gttgtccggcggtggcg

SEQ ID NO: 128752 - DNA, 17 bp, Arabidopsis thaliana
gttgtccgtcgaagcga

SEQ ID NO: 128753 - DNA, 17 bp, Arabidopsis thaliana
gttgtcctagttggccg

SEQ ID NO: 128754 - DNA, 17 bp, Arabidopsis thaliana
gttgtcctccgctaaca

SEQ ID NO: 128755 - DNA, 17 bp, Arabidopsis thaliana
gttgtcctccgctaata

SEQ ID NO: 128756 - DNA, 17 bp, Arabidopsis thaliana
gttgtcgaaaaccgtct

SEQ ID NO: 128757 - DNA, 17 bp, Arabidopsis thaliana
gttgtcgactcgcaact

SEQ ID NO: 128758 - DNA, 17 bp, Arabidopsis thaliana
gttgtcgatggttgctg

SEQ ID NO: 128759 - DNA, 17 bp, Arabidopsis thaliana
gttgtcgatttcaccgt

SEQ ID NO: 128760 - DNA, 17 bp, Arabidopsis thaliana
gttgtcgatttgcggat

SEQ ID NO: 128761 - DNA, 17 bp, Arabidopsis thaliana
gttgtcgctggttgctg

SEQ ID NO: 128762 - DNA, 17 bp, Arabidopsis thaliana
gttgtcggcaccaatca

SEQ ID NO: 128763 - DNA, 17 bp, Arabidopsis thaliana
gttgtcggtgaacttct

SEQ ID NO: 128764 - DNA, 17 bp, Arabidopsis thaliana
gttgtcggtgccaatca

SEQ ID NO: 128765 - DNA, 17 bp, Arabidopsis thaliana
gttgtcgtaattaagcc

SEQ ID NO: 128766 - DNA, 17 bp, Arabidopsis thaliana
gttgtcgtcattaggct

SEQ ID NO: 128767 - DNA, 17 bp, Arabidopsis thaliana
gttgtcgtccagcggtt

SEQ ID NO: 128768 - DNA, 17 bp, Arabidopsis thaliana
gttgtcgttggattcag

SEQ ID NO: 128769 - DNA, 17 bp, Arabidopsis thaliana
gttgtctacgcgatgtg

SEQ ID NO: 128770 - DNA, 17 bp, Arabidopsis thaliana
gttgtctacttagagtc

SEQ ID NO: 128771 - DNA, 17 bp, Arabidopsis thaliana
gttgtctatccaagtcg

SEQ ID NO: 128772 - DNA, 17 bp, Arabidopsis thaliana
gttgtctattggttcta

SEQ ID NO: 128773 - DNA, 17 bp, Arabidopsis thaliana
gttgtctattggttttt

SEQ ID NO: 128774 - DNA, 17 bp, Arabidopsis thaliana
gttgtctcaagtgaatc

SEQ ID NO: 128775 - DNA, 17 bp, Arabidopsis thaliana
gttgtctcatcgcagct

SEQ ID NO: 128776 - DNA, 17 bp, Arabidopsis thaliana
gttgtctccagtttttg

SEQ ID NO: 128777 - DNA, 17 bp, Arabidopsis thaliana
gttgtctctggtgagac

SEQ ID NO: 128778 - DNA, 17 bp, Arabidopsis thaliana
gttgtctgccgacttag

SEQ ID NO: 128779 - DNA, 17 bp, Arabidopsis thaliana
gttgtctgccgacttga

SEQ ID NO: 128780 - DNA, 17 bp, Arabidopsis thaliana
gttgtctgcctgcttag

SEQ ID NO: 128781 - DNA, 17 bp, Arabidopsis thaliana
gttgtctgcctgggtgt

SEQ ID NO: 128782 - DNA, 17 bp, Arabidopsis thaliana
gttgtctgctcgaaccg

SEQ ID NO: 128783 - DNA, 17 bp, Arabidopsis thaliana
gttgtctgtcggttcgg

SEQ ID NO: 128784 - DNA, 17 bp, Arabidopsis thaliana
gttgtcttaggctatct

SEQ ID NO: 128785 - DNA, 17 bp, Arabidopsis thaliana
gttgtcttgcgagtcca

SEQ ID NO: 128786 - DNA, 17 bp, Arabidopsis thaliana
gttgtcttgcgctatct

SEQ ID NO: 128787 - DNA, 17 bp, Arabidopsis thaliana
gttgtcttggggatgtt

SEQ ID NO: 128788 - DNA, 17 bp, Arabidopsis thaliana
gttgtgaacgccaaaat

SEQ ID NO: 128789 - DNA, 17 bp, Arabidopsis thaliana
gttgtgaagagttctag

SEQ ID NO: 128790 - DNA, 17 bp, Arabidopsis thaliana
gttgtgaagccatctcg

SEQ ID NO: 128791 - DNA, 17 bp, Arabidopsis thaliana
gttgtgacaccgattct

SEQ ID NO: 128792 - DNA, 17 bp, Arabidopsis thaliana
gttgtgacatagttacc

SEQ ID NO: 128793 - DNA, 17 bp, Arabidopsis thaliana
gttgtgaccaacattta

SEQ ID NO: 128794 - DNA, 17 bp, Arabidopsis thaliana
gttgtgaccggtcgcga

SEQ ID NO: 128795 - DNA, 17 bp, Arabidopsis thaliana
gttgtgacttaggttct

SEQ ID NO: 128796 - DNA, 17 bp, Arabidopsis thaliana
gttgtgagacagttcgg

SEQ ID NO: 128797 - DNA, 17 bp, Arabidopsis thaliana
gttgtgatacgattttg

SEQ ID NO: 128798 - DNA, 17 bp, Arabidopsis thaliana
gttgtgatcagttccgg

SEQ ID NO: 128799 - DNA, 17 bp, Arabidopsis thaliana
gttgtgatgattgccct

SEQ ID NO: 128800 - DNA, 17 bp, Arabidopsis thaliana
gttgtgattcaagccgt

SEQ ID NO: 128801 - DNA, 17 bp, Arabidopsis thaliana
gttgtgattcaagcgta

SEQ ID NO: 128802 - DNA, 17 bp, Arabidopsis thaliana
gttgtgattgcgcttga

SEQ ID NO: 128803 - DNA, 17 bp, Arabidopsis thaliana
gttgtgatttgcgcttt

SEQ ID NO: 128804 - DNA, 17 bp, Arabidopsis thaliana
gttgtgcactggtcggc

SEQ ID NO: 128805 - DNA, 17 bp, Arabidopsis thaliana
gttgtgcattggtcgac

SEQ ID NO: 128806 - DNA, 17 bp, Arabidopsis thaliana
gttgtgcattggtcggc

SEQ ID NO: 128807 - DNA, 17 bp, Arabidopsis thaliana
gttgtgcattgttcggc

SEQ ID NO: 128808 - DNA, 17 bp, Arabidopsis thaliana
gttgtgccaactcggac

SEQ ID NO: 128809 - DNA, 17 bp, Arabidopsis thaliana
gttgtgctgatgtgtca

SEQ ID NO: 128810 - DNA, 17 bp, Arabidopsis thaliana
gttgtgctgctcagata

SEQ ID NO: 128811 - DNA, 17 bp, Arabidopsis thaliana
gttgtggaagcacttgg

SEQ ID NO: 128812 - DNA, 17 bp, Arabidopsis thaliana
gttgtggaccaattgca

SEQ ID NO: 128813 - DNA, 17 bp, Arabidopsis thaliana
gttgtggacggtagcgg

SEQ ID NO: 128814 - DNA, 17 bp, Arabidopsis thaliana
gttgtggactgagttgt

SEQ ID NO: 128815 - DNA, 17 bp, Arabidopsis thaliana
gttgtggacttgttgcc

SEQ ID NO: 128816 - DNA, 17 bp, Arabidopsis thaliana
gttgtggctgagatgat

SEQ ID NO: 128817 - DNA, 17 bp, Arabidopsis thaliana
gttgtggctttactcgt

SEQ ID NO: 128818 - DNA, 17 bp, Arabidopsis thaliana
gttgtgggagagagtta

SEQ ID NO: 128819 - DNA, 17 bp, Arabidopsis thaliana
gttgtggtcgagtgatt

SEQ ID NO: 128820 - DNA, 17 bp, Arabidopsis thaliana
gttgtggtctctctgac

SEQ ID NO: 128821 - DNA, 17 bp, Arabidopsis thaliana
gttgtggttacgggcct

SEQ ID NO: 128822 - DNA, 17 bp, Arabidopsis thaliana
gttgtggtttcagacct

SEQ ID NO: 128823 - DNA, 17 bp, Arabidopsis thaliana
gttgtggtttcggacct

SEQ ID NO: 128824 - DNA, 17 bp, Arabidopsis thaliana
gttgtggtttgaatgct

SEQ ID NO: 128825 - DNA, 17 bp, Arabidopsis thaliana
gttgtggttttaggtgt

SEQ ID NO: 128826 - DNA, 17 bp, Arabidopsis thaliana
gttgtggttttgcgcct

SEQ ID NO: 128827 - DNA, 17 bp, Arabidopsis thaliana
gttgtggttttgggcct

SEQ ID NO: 128828 - DNA, 17 bp, Arabidopsis thaliana
gttgtgtccgacttgtt

SEQ ID NO: 128829 - DNA, 17 bp, Arabidopsis thaliana
gttgtgtctctctacgg

SEQ ID NO: 128830 - DNA, 17 bp, Arabidopsis thaliana
gttgtgtgattctgagc

SEQ ID NO: 128831 - DNA, 17 bp, Arabidopsis thaliana
gttgtgtgctcttggga

SEQ ID NO: 128832 - DNA, 17 bp, Arabidopsis thaliana
gttgtgtgtaactattc

SEQ ID NO: 128833 - DNA, 17 bp, Arabidopsis thaliana
gttgtgtgttgcttgct

SEQ ID NO: 128834 - DNA, 17 bp, Arabidopsis thaliana
gttgtgttgatgacgat

SEQ ID NO: 128835 - DNA, 17 bp, Arabidopsis thaliana
gttgtgttgtcattgag

SEQ ID NO: 128836 - DNA, 17 bp, Arabidopsis thaliana
gttgttaaatgggttaa

SEQ ID NO: 128837 - DNA, 17 bp, Arabidopsis thaliana
gttgttaacgcggaatg

SEQ ID NO: 128838 - DNA, 17 bp, Arabidopsis thaliana
gttgttaactcagcgag

SEQ ID NO: 128839 - DNA, 17 bp, Arabidopsis thaliana
gttgttaactgacgcgg

SEQ ID NO: 128840 - DNA, 17 bp, Arabidopsis thaliana
gttgttaccatgcgagc

SEQ ID NO: 128841 - DNA, 17 bp, Arabidopsis thaliana
gttgttagatggacctg

SEQ ID NO: 128842 - DNA, 17 bp, Arabidopsis thaliana
gttgttagcgattggca

SEQ ID NO: 128843 - DNA, 17 bp, Arabidopsis thaliana
gttgttagggcagatga

SEQ ID NO: 128844 - DNA, 17 bp, Arabidopsis thaliana
gttgttccagaggttgc

SEQ ID NO: 128845 - DNA, 17 bp, Arabidopsis thaliana
gttgttcctgtccattc

SEQ ID NO: 128846 - DNA, 17 bp, Arabidopsis thaliana
gttgttcgccaagattc

SEQ ID NO: 128847 - DNA, 17 bp, Arabidopsis thaliana
gttgttcggagtcatgg

SEQ ID NO: 128848 - DNA, 17 bp, Arabidopsis thaliana
gttgttcgtcaccaatg

SEQ ID NO: 128849 - DNA, 17 bp, Arabidopsis thaliana
gttgttcgtttacttgt

SEQ ID NO: 128850 - DNA, 17 bp, Arabidopsis thaliana
gttgttcgtttgactgt

SEQ ID NO: 128851 - DNA, 17 bp, Arabidopsis thaliana
gttgttcgtttgcatgt

SEQ ID NO: 128852 - DNA, 17 bp, Arabidopsis thaliana
gttgttcgtttgcctgt

SEQ ID NO: 128853 - DNA, 17 bp, Arabidopsis thaliana
gttgttcgtttgtctat

SEQ ID NO: 128854 - DNA, 17 bp, Arabidopsis thaliana
gttgttcgtttgtctgt

SEQ ID NO: 128855 - DNA, 17 bp, Arabidopsis thaliana
gttgttctaaggttgaa

SEQ ID NO: 128856 - DNA, 17 bp, Arabidopsis thaliana
gttgttctccactattt

SEQ ID NO: 128857 - DNA, 17 bp, Arabidopsis thaliana
gttgttctgatggatcg

SEQ ID NO: 128858 - DNA, 17 bp, Arabidopsis thaliana
gttgttctgatgggccg

SEQ ID NO: 128859 - DNA, 17 bp, Arabidopsis thaliana
gttgttgaaaactttgt

SEQ ID NO: 128860 - DNA, 17 bp, Arabidopsis thaliana
gttgttgaaattgctgc

SEQ ID NO: 128861 - DNA, 17 bp, Arabidopsis thaliana
gttgttgaattaggatg

SEQ ID NO: 128862 - DNA, 17 bp, Arabidopsis thaliana
gttgttgacagccacat

SEQ ID NO: 128863 - DNA, 17 bp, Arabidopsis thaliana
gttgttgacatagcctt

SEQ ID NO: 128864 - DNA, 17 bp, Arabidopsis thaliana
gttgttgacggagtccc

SEQ ID NO: 128865 - DNA, 17 bp, Arabidopsis thaliana
gttgttgactacacgcc

SEQ ID NO: 128866 - DNA, 17 bp, Arabidopsis thaliana
gttgttgactacacggc

SEQ ID NO: 128867 - DNA, 17 bp, Arabidopsis thaliana
gttgttgactatacggc

SEQ ID NO: 128868 - DNA, 17 bp, Arabidopsis thaliana
gttgttgacttgatcct

SEQ ID NO: 128869 - DNA, 17 bp, Arabidopsis thaliana
gttgttgattttgttat

SEQ ID NO: 128870 - DNA, 17 bp, Arabidopsis thaliana
gttgttgccggaaagtt

SEQ ID NO: 128871 - DNA, 17 bp, Arabidopsis thaliana
gttgttgcctgggccgc

SEQ ID NO: 128872 - DNA, 17 bp, Arabidopsis thaliana
gttgttgcgctccatgt

SEQ ID NO: 128873 - DNA, 17 bp, Arabidopsis thaliana
gttgttgcgttgcagac

SEQ ID NO: 128874 - DNA, 17 bp, Arabidopsis thaliana
gttgttgctgctgtgtg

SEQ ID NO: 128875 - DNA, 17 bp, Arabidopsis thaliana
gttgttgctgtgtagga

SEQ ID NO: 128876 - DNA, 17 bp, Arabidopsis thaliana
gttgttggcccagtggt

SEQ ID NO: 128877 - DNA, 17 bp, Arabidopsis thaliana
gttgttggctaagtccg

SEQ ID NO: 128878 - DNA, 17 bp, Arabidopsis thaliana
gttgttggctacgtcca

SEQ ID NO: 128879 - DNA, 17 bp, Arabidopsis thaliana
gttgttggctgatctga

SEQ ID NO: 128880 - DNA, 17 bp, Arabidopsis thaliana
gttgttgggcttggact

SEQ ID NO: 128881 - DNA, 17 bp, Arabidopsis thaliana
gttgttgtcatcgccgg

SEQ ID NO: 128882 - DNA, 17 bp, Arabidopsis thaliana
gttgttgtcttaggcta

SEQ ID NO: 128883 - DNA, 17 bp, Arabidopsis thaliana
gttgttgtcttcgtcgc

SEQ ID NO: 128884 - DNA, 17 bp, Arabidopsis thaliana
gttgttgttcgttttgc

SEQ ID NO: 128885 - DNA, 17 bp, Arabidopsis thaliana
gttgttgttctgcacag

SEQ ID NO: 128886 - DNA, 17 bp, Arabidopsis thaliana
gttgttgttcttcttct

SEQ ID NO: 128887 - DNA, 17 bp, Arabidopsis thaliana
gttgttgttgcgagagt

SEQ ID NO: 128888 - DNA, 17 bp, Arabidopsis thaliana
gttgtttagggatagat

SEQ ID NO: 128889 - DNA, 17 bp, Arabidopsis thaliana
gttgtttagggatagct

SEQ ID NO: 128890 - DNA, 17 bp, Arabidopsis thaliana
gttgtttatcaccgctt

SEQ ID NO: 128891 - DNA, 17 bp, Arabidopsis thaliana
gttgtttcgatgtgaat

SEQ ID NO: 128892 - DNA, 17 bp, Arabidopsis thaliana
gttgtttcgggcctggg

SEQ ID NO: 128893 - DNA, 17 bp, Arabidopsis thaliana
gttgtttctacagacca

SEQ ID NO: 128894 - DNA, 17 bp, Arabidopsis thaliana
gttgtttgactctggag

SEQ ID NO: 128895 - DNA, 17 bp, Arabidopsis thaliana
gttgtttgcgagaacaa

SEQ ID NO: 128896 - DNA, 17 bp, Arabidopsis thaliana
gttgtttgcgtggatga

SEQ ID NO: 128897 - DNA, 17 bp, Arabidopsis thaliana
gttgtttgctcgattgc

SEQ ID NO: 128898 - DNA, 17 bp, Arabidopsis thaliana
gttgttttaggccatct

SEQ ID NO: 128899 - DNA, 17 bp, Arabidopsis thaliana
gttgttttcgctttgct

SEQ ID NO: 128900 - DNA, 17 bp, Arabidopsis thaliana
gttgttttctcaatcgg

SEQ ID NO: 128901 - DNA, 17 bp, Arabidopsis thaliana
gttgttttgacgggaaa

SEQ ID NO: 128902 - DNA, 17 bp, Arabidopsis thaliana
gttgttttggatgtaat

SEQ ID NO: 128903 - DNA, 17 bp, Arabidopsis thaliana
gttgttttgttagtttg

SEQ ID NO: 128904 - DNA, 17 bp, Arabidopsis thaliana
gtttaaaccgcaacccg

SEQ ID NO: 128905 - DNA, 17 bp, Arabidopsis thaliana
gtttaaacctccgtcag

SEQ ID NO: 128906 - DNA, 17 bp, Arabidopsis thaliana
gtttaaatctccgtcag

SEQ ID NO: 128907 - DNA, 17 bp, Arabidopsis thaliana
gtttaacagggtattct

SEQ ID NO: 128908 - DNA, 17 bp, Arabidopsis thaliana
gtttaacagggtcttct

SEQ ID NO: 128909 - DNA, 17 bp, Arabidopsis thaliana
gtttaaccgcaaacctc

SEQ ID NO: 128910 - DNA, 17 bp, Arabidopsis thaliana
gtttaaccgtcggttat

SEQ ID NO: 128911 - DNA, 17 bp, Arabidopsis thaliana
gtttaacgacacttggt

SEQ ID NO: 128912 - DNA, 17 bp, Arabidopsis thaliana
gtttaactgcggtgcgg

SEQ ID NO: 128913 - DNA, 17 bp, Arabidopsis thaliana
gtttaagccccgattaa

SEQ ID NO: 128914 - DNA, 17 bp, Arabidopsis thaliana
gtttaagcgaccaagca

SEQ ID NO: 128915 - DNA, 17 bp, Arabidopsis thaliana
gtttaagcgctttccga

SEQ ID NO: 128916 - DNA, 17 bp, Arabidopsis thaliana
gtttaagcgtctgtttt

SEQ ID NO: 128917 - DNA, 17 bp, Arabidopsis thaliana
gtttaaggtttggggga

SEQ ID NO: 128918 - DNA, 17 bp, Arabidopsis thaliana
gtttaatcaaccggccc

SEQ ID NO: 128919 - DNA, 17 bp, Arabidopsis thaliana
gtttaatcacgggacag

SEQ ID NO: 128920 - DNA, 17 bp, Arabidopsis thaliana
gtttaatcacgggaccg

SEQ ID NO: 128921 - DNA, 17 bp, Arabidopsis thaliana
gtttaatcgcaggtcaa

SEQ ID NO: 128922 - DNA, 17 bp, Arabidopsis thaliana
gtttaatcgctaagtcc

SEQ ID NO: 128923 - DNA, 17 bp, Arabidopsis thaliana
gtttaatcttgtctcag

SEQ ID NO: 128924 - DNA, 17 bp, Arabidopsis thaliana
gtttaatctttgccaca

SEQ ID NO: 128925 - DNA, 17 bp, Arabidopsis thaliana
gtttaatttcaccgaac

SEQ ID NO: 128926 - DNA, 17 bp, Arabidopsis thaliana
gtttaatttcacgggac

SEQ ID NO: 128927 - DNA, 17 bp, Arabidopsis thaliana
gtttaatttcactgcac

SEQ ID NO: 128928 - DNA, 17 bp, Arabidopsis thaliana
gtttaatttcactgtgc

SEQ ID NO: 128929 - DNA, 17 bp, Arabidopsis thaliana
gtttaatttggccattt

SEQ ID NO: 128930 - DNA, 17 bp, Arabidopsis thaliana
gtttaatttggccgacc

SEQ ID NO: 128931 - DNA, 17 bp, Arabidopsis thaliana
gtttaatttgtcgccgt

SEQ ID NO: 128932 - DNA, 17 bp, Arabidopsis thaliana
gtttacaagccaagcta

SEQ ID NO: 128933 - DNA, 17 bp, Arabidopsis thaliana
gtttacactgctcttgc

SEQ ID NO: 128934 - DNA, 17 bp, Arabidopsis thaliana
gtttacagaaccgataa

SEQ ID NO: 128935 - DNA, 17 bp, Arabidopsis thaliana
gtttacagggccacggg

SEQ ID NO: 128936 - DNA, 17 bp, Arabidopsis thaliana
gtttacaggtgattgac

SEQ ID NO: 128937 - DNA, 17 bp, Arabidopsis thaliana
gtttacagttgcctaag

SEQ ID NO: 128938 - DNA, 17 bp, Arabidopsis thaliana
gtttacagttgcgggcg

SEQ ID NO: 128939 - DNA, 17 bp, Arabidopsis thaliana
gtttacatagaccctgt

SEQ ID NO: 128940 - DNA, 17 bp, Arabidopsis thaliana
gtttacatcaagtgcac

SEQ ID NO: 128941 - DNA, 17 bp, Arabidopsis thaliana
gtttacatcagtggtct

SEQ ID NO: 128942 - DNA, 17 bp, Arabidopsis thaliana
gtttaccaaaaacacag

SEQ ID NO: 128943 - DNA, 17 bp, Arabidopsis thaliana
gtttaccaagtaaggcg

SEQ ID NO: 128944 - DNA, 17 bp, Arabidopsis thaliana
gtttaccagtttagcca

SEQ ID NO: 128945 - DNA, 17 bp, Arabidopsis thaliana
gtttaccatccgggatg

SEQ ID NO: 128946 - DNA, 17 bp, Arabidopsis thaliana
gtttaccattgcgttgc

SEQ ID NO: 128947 - DNA, 17 bp, Arabidopsis thaliana
gtttaccgacgaaatga

SEQ ID NO: 128948 - DNA, 17 bp, Arabidopsis thaliana
gtttaccgatggattgc

SEQ ID NO: 128949 - DNA, 17 bp, Arabidopsis thaliana
gtttaccgcagtttgcg

SEQ ID NO: 128950 - DNA, 17 bp, Arabidopsis thaliana
gtttaccgcctgcattt

SEQ ID NO: 128951 - DNA, 17 bp, Arabidopsis thaliana
gtttaccggatacataa

SEQ ID NO: 128952 - DNA, 17 bp, Arabidopsis thaliana
gtttaccggatacatac

SEQ ID NO: 128953 - DNA, 17 bp, Arabidopsis thaliana
gtttaccgggactgagc

SEQ ID NO: 128954 - DNA, 17 bp, Arabidopsis thaliana
gtttaccgggggcctca

SEQ ID NO: 128955 - DNA, 17 bp, Arabidopsis thaliana
gtttaccttttttggcc

SEQ ID NO: 128956 - DNA, 17 bp, Arabidopsis thaliana
gtttaccttttttggtc

SEQ ID NO: 128957 - DNA, 17 bp, Arabidopsis thaliana
gtttacgaaaattttac

SEQ ID NO: 128958 - DNA, 17 bp, Arabidopsis thaliana
gtttacgccacagccat

SEQ ID NO: 128959 - DNA, 17 bp, Arabidopsis thaliana
gtttacggaaacctgcg

SEQ ID NO: 128960 - DNA, 17 bp, Arabidopsis thaliana
gtttacggatctaaact

SEQ ID NO: 128961 - DNA, 17 bp, Arabidopsis thaliana
gtttacggattgagttg

SEQ ID NO: 128962 - DNA, 17 bp, Arabidopsis thaliana
gtttacggttaatttgg

SEQ ID NO: 128963 - DNA, 17 bp, Arabidopsis thaliana
gtttacggttggattac

SEQ ID NO: 128964 - DNA, 17 bp, Arabidopsis thaliana
gtttacgtctgggtatg

SEQ ID NO: 128965 - DNA, 17 bp, Arabidopsis thaliana
gtttacgtctttcgcgg

SEQ ID NO: 128966 - DNA, 17 bp, Arabidopsis thaliana
gtttacgtttttggcgg

SEQ ID NO: 128967 - DNA, 17 bp, Arabidopsis thaliana
gtttactagattctgac

SEQ ID NO: 128968 - DNA, 17 bp, Arabidopsis thaliana
gtttactaggttatccg

SEQ ID NO: 128969 - DNA, 17 bp, Arabidopsis thaliana
gtttactgaattcagac

SEQ ID NO: 128970 - DNA, 17 bp, Arabidopsis thaliana
gtttactgaccaagcat

SEQ ID NO: 128971 - DNA, 17 bp, Arabidopsis thaliana
gtttactgcagcttgtg

SEQ ID NO: 128972 - DNA, 17 bp, Arabidopsis thaliana
gtttacttatcgactca

SEQ ID NO: 128973 - DNA, 17 bp, Arabidopsis thaliana
gtttagaaaagcgtcga

SEQ ID NO: 128974 - DNA, 17 bp, Arabidopsis thaliana
gtttagaaagtctgtca

SEQ ID NO: 128975 - DNA, 17 bp, Arabidopsis thaliana
gtttagacattgggtgc

SEQ ID NO: 128976 - DNA, 17 bp, Arabidopsis thaliana
gtttagacccgttcgag

SEQ ID NO: 128977 - DNA, 17 bp, Arabidopsis thaliana
gtttagaccgtcgtgac

SEQ ID NO: 128978 - DNA, 17 bp, Arabidopsis thaliana
gtttagaccgtcgtgag

SEQ ID NO: 128979 - DNA, 17 bp, Arabidopsis thaliana
gtttagacctggtgaag

SEQ ID NO: 128980 - DNA, 17 bp, Arabidopsis thaliana
gtttagacgaggccaag

SEQ ID NO: 128981 - DNA, 17 bp, Arabidopsis thaliana
gtttagagttccggaga

SEQ ID NO: 128982 - DNA, 17 bp, Arabidopsis thaliana
gtttagatacactctga

SEQ ID NO: 128983 - DNA, 17 bp, Arabidopsis thaliana
gtttagatctgtcgctg

SEQ ID NO: 128984 - DNA, 17 bp, Arabidopsis thaliana
gtttagatctgttcgag

SEQ ID NO: 128985 - DNA, 17 bp, Arabidopsis thaliana
gtttagcattagaccga

SEQ ID NO: 128986 - DNA, 17 bp, Arabidopsis thaliana
gtttagcccgtcgtgag

SEQ ID NO: 128987 - DNA, 17 bp, Arabidopsis thaliana
gtttagccgatatgaga

SEQ ID NO: 128988 - DNA, 17 bp, Arabidopsis thaliana
gtttagctcagggttag

SEQ ID NO: 128989 - DNA, 17 bp, Arabidopsis thaliana
gtttagctcagtccact

SEQ ID NO: 128990 - DNA, 17 bp, Arabidopsis thaliana
gtttagcttcatctcta

SEQ ID NO: 128991 - DNA, 17 bp, Arabidopsis thaliana
gtttagcttcccgataa

SEQ ID NO: 128992 - DNA, 17 bp, Arabidopsis thaliana
gtttaggaaaattacag

SEQ ID NO: 128993 - DNA, 17 bp, Arabidopsis thaliana
gtttaggacaattgggg

SEQ ID NO: 128994 - DNA, 17 bp, Arabidopsis thaliana
gtttaggcacttccaaa

SEQ ID NO: 128995 - DNA, 17 bp, Arabidopsis thaliana
gtttaggccaaggaagt

SEQ ID NO: 128996 - DNA, 17 bp, Arabidopsis thaliana
gtttaggccaatgtcag

SEQ ID NO: 128997 - DNA, 17 bp, Arabidopsis thaliana
gtttaggcgcaaatgct

SEQ ID NO: 128998 - DNA, 17 bp, Arabidopsis thaliana
gtttagggaaatctcag

SEQ ID NO: 128999 - DNA, 17 bp, Arabidopsis thaliana
gtttagggaaattacag

SEQ ID NO: 129000 - DNA, 17 bp, Arabidopsis thaliana
gtttagggtgctgccat

SEQ ID NO: 129001 - DNA, 17 bp, Arabidopsis thaliana
gtttagggtttaggggt

SEQ ID NO: 129002 - DNA, 17 bp, Arabidopsis thaliana
gtttaggtgcggttagt

SEQ ID NO: 129003 - DNA, 17 bp, Arabidopsis thaliana
gtttaggttaggattct

SEQ ID NO: 129004 - DNA, 17 bp, Arabidopsis thaliana
gtttaggttccgactaa

SEQ ID NO: 129005 - DNA, 17 bp, Arabidopsis thaliana
gtttaggttctgagccg

SEQ ID NO: 129006 - DNA, 17 bp, Arabidopsis thaliana
gtttagtcccaagcgtc

SEQ ID NO: 129007 - DNA, 17 bp, Arabidopsis thaliana
gtttagtcccgagttat

SEQ ID NO: 129008 - DNA, 17 bp, Arabidopsis thaliana
gtttagtcgcaccctgt

SEQ ID NO: 129009 - DNA, 17 bp, Arabidopsis thaliana
gtttagtcgcatcctgt

SEQ ID NO: 129010 - DNA, 17 bp, Arabidopsis thaliana
gtttagtcggttggttg

SEQ ID NO: 129011 - DNA, 17 bp, Arabidopsis thaliana
gtttagtctcgcgacaa

SEQ ID NO: 129012 - DNA, 17 bp, Arabidopsis thaliana
gtttagtcttgacgccg

SEQ ID NO: 129013 - DNA, 17 bp, Arabidopsis thaliana
gtttagtgaccgcatag

SEQ ID NO: 129014 - DNA, 17 bp, Arabidopsis thaliana
gtttagtgcctaggcgc

SEQ ID NO: 129015 - DNA, 17 bp, Arabidopsis thaliana
gtttagtggatgtgtgt

SEQ ID NO: 129016 - DNA, 17 bp, Arabidopsis thaliana
gtttagtgtcgacaagc

SEQ ID NO: 129017 - DNA, 17 bp, Arabidopsis thaliana
gtttagttactgttccg

SEQ ID NO: 129018 - DNA, 17 bp, Arabidopsis thaliana
gtttagttgatcttgag

SEQ ID NO: 129019 - DNA, 17 bp, Arabidopsis thaliana
gtttagtttagccttgt

SEQ ID NO: 129020 - DNA, 17 bp, Arabidopsis thaliana
gtttagtttcaccgaac

SEQ ID NO: 129021 - DNA, 17 bp, Arabidopsis thaliana
gtttagtttcactgaac

SEQ ID NO: 129022 - DNA, 17 bp, Arabidopsis thaliana
gtttatcagctcgttgt

SEQ ID NO: 129023 - DNA, 17 bp, Arabidopsis thaliana
gtttatcagcttggccc

SEQ ID NO: 129024 - DNA, 17 bp, Arabidopsis thaliana
gtttatcaggtatcctg

SEQ ID NO: 129025 - DNA, 17 bp, Arabidopsis thaliana
gtttatccacatcctgt

SEQ ID NO: 129026 - DNA, 17 bp, Arabidopsis thaliana
gtttatccctaggtggc

SEQ ID NO: 129027 - DNA, 17 bp, Arabidopsis thaliana
gtttatccgctgagcat

SEQ ID NO: 129028 - DNA, 17 bp, Arabidopsis thaliana
gtttatcctccgaaggt

SEQ ID NO: 129029 - DNA, 17 bp, Arabidopsis thaliana
gtttatcgacgtcgacg

SEQ ID NO: 129030 - DNA, 17 bp, Arabidopsis thaliana
gtttatcgggccaagat

SEQ ID NO: 129031 - DNA, 17 bp, Arabidopsis thaliana
gtttatctcagtgcgtc

SEQ ID NO: 129032 - DNA, 17 bp, Arabidopsis thaliana
gtttatcttacgcaggt

SEQ ID NO: 129033 - DNA, 17 bp, Arabidopsis thaliana
gtttatcttctggacgg

SEQ ID NO: 129034 - DNA, 17 bp, Arabidopsis thaliana
gtttatgatcctgttcg

SEQ ID NO: 129035 - DNA, 17 bp, Arabidopsis thaliana
gtttatgatttggatgt

SEQ ID NO: 129036 - DNA, 17 bp, Arabidopsis thaliana
gtttatgcaagctcaat

SEQ ID NO: 129037 - DNA, 17 bp, Arabidopsis thaliana
gtttatgcagaatccgc

SEQ ID NO: 129038 - DNA, 17 bp, Arabidopsis thaliana
gtttatgctttgttcgt

SEQ ID NO: 129039 - DNA, 17 bp, Arabidopsis thaliana
gtttatggacagtagcg

SEQ ID NO: 129040 - DNA, 17 bp, Arabidopsis thaliana
gtttatggccacgtgtt

SEQ ID NO: 129041 - DNA, 17 bp, Arabidopsis thaliana
gtttatgggctatttga

SEQ ID NO: 129042 - DNA, 17 bp, Arabidopsis thaliana
gtttatgttaccgcatc

SEQ ID NO: 129043 - DNA, 17 bp, Arabidopsis thaliana
gtttattaatcgctgtg

SEQ ID NO: 129044 - DNA, 17 bp, Arabidopsis thaliana
gtttattagcggttggc

SEQ ID NO: 129045 - DNA, 17 bp, Arabidopsis thaliana
gtttattcagatttgcc

SEQ ID NO: 129046 - DNA, 17 bp, Arabidopsis thaliana
gtttattctctgccaca

SEQ ID NO: 129047 - DNA, 17 bp, Arabidopsis thaliana
gtttattgtgccaaacc

SEQ ID NO: 129048 - DNA, 17 bp, Arabidopsis thaliana
gtttatttatcgccgat

SEQ ID NO: 129049 - DNA, 17 bp, Arabidopsis thaliana
gtttatttttgtgcggt

SEQ ID NO: 129050 - DNA, 17 bp, Arabidopsis thaliana
gtttatttttgtgcgtt

SEQ ID NO: 129051 - DNA, 17 bp, Arabidopsis thaliana
gtttcaaaaccgatgga

SEQ ID NO: 129052 - DNA, 17 bp, Arabidopsis thaliana
gtttcaaacgcctgaca

SEQ ID NO: 129053 - DNA, 17 bp, Arabidopsis thaliana
gtttcaaagcggctctg

SEQ ID NO: 129054 - DNA, 17 bp, Arabidopsis thaliana
gtttcaaagtgtgattc

SEQ ID NO: 129055 - DNA, 17 bp, Arabidopsis thaliana
gtttcaaccgattcctg

SEQ ID NO: 129056 - DNA, 17 bp, Arabidopsis thaliana
gtttcaactggctcacg

SEQ ID NO: 129057 - DNA, 17 bp, Arabidopsis thaliana
gtttcaagatcagacgc

SEQ ID NO: 129058 - DNA, 17 bp, Arabidopsis thaliana
gtttcaagatcatacgc

SEQ ID NO: 129059 - DNA, 17 bp, Arabidopsis thaliana
gtttcaatgtcgttggt

SEQ ID NO: 129060 - DNA, 17 bp, Arabidopsis thaliana
gtttcaatttccgctgg

SEQ ID NO: 129061 - DNA, 17 bp, Arabidopsis thaliana
gtttcacaaccaaccaa

SEQ ID NO: 129062 - DNA, 17 bp, Arabidopsis thaliana
gtttcacagtctgaatt

SEQ ID NO: 129063 - DNA, 17 bp, Arabidopsis thaliana
gtttcacagttgttgac

SEQ ID NO: 129064 - DNA, 17 bp, Arabidopsis thaliana
gtttcaccaactttaga

SEQ ID NO: 129065 - DNA, 17 bp, Arabidopsis thaliana
gtttcaccaactttagc

SEQ ID NO: 129066 - DNA, 17 bp, Arabidopsis thaliana
gtttcaccacttttggc

SEQ ID NO: 129067 - DNA, 17 bp, Arabidopsis thaliana
gtttcacctacgtagca

SEQ ID NO: 129068 - DNA, 17 bp, Arabidopsis thaliana
gtttcaccttccatcgt

SEQ ID NO: 129069 - DNA, 17 bp, Arabidopsis thaliana
gtttcacggtgtatcgc

SEQ ID NO: 129070 - DNA, 17 bp, Arabidopsis thaliana
gtttcacggtgtctcca

SEQ ID NO: 129071 - DNA, 17 bp, Arabidopsis thaliana
gtttcacgtcgggttca

SEQ ID NO: 129072 - DNA, 17 bp, Arabidopsis thaliana
gtttcacgttgacgcga

SEQ ID NO: 129073 - DNA, 17 bp, Arabidopsis thaliana
gtttcacgttggaccgt

SEQ ID NO: 129074 - DNA, 17 bp, Arabidopsis thaliana
gtttcactccaacgcac

SEQ ID NO: 129075 - DNA, 17 bp, Arabidopsis thaliana
gtttcactgatcatgcg

SEQ ID NO: 129076 - DNA, 17 bp, Arabidopsis thaliana
gtttcactttgaggagt

SEQ ID NO: 129077 - DNA, 17 bp, Arabidopsis thaliana
gtttcactttgctgtgc

SEQ ID NO: 129078 - DNA, 17 bp, Arabidopsis thaliana
gtttcactttgttgtgc

SEQ ID NO: 129079 - DNA, 17 bp, Arabidopsis thaliana
gtttcagaaatatgcaa

SEQ ID NO: 129080 - DNA, 17 bp, Arabidopsis thaliana
gtttcagaaatcacatg

SEQ ID NO: 129081 - DNA, 17 bp, Arabidopsis thaliana
gtttcagaatatagctg

SEQ ID NO: 129082 - DNA, 17 bp, Arabidopsis thaliana
gtttcagacctatgaga

SEQ ID NO: 129083 - DNA, 17 bp, Arabidopsis thaliana
gtttcagacggtagcgg

SEQ ID NO: 129084 - DNA, 17 bp, Arabidopsis thaliana
gtttcagactcgtttcg

SEQ ID NO: 129085 - DNA, 17 bp, Arabidopsis thaliana
gtttcagaggtacaccc

SEQ ID NO: 129086 - DNA, 17 bp, Arabidopsis thaliana
gtttcagaggtacaccg

SEQ ID NO: 129087 - DNA, 17 bp, Arabidopsis thaliana
gtttcagagtgtggcca

SEQ ID NO: 129088 - DNA, 17 bp, Arabidopsis thaliana
gtttcagattgcgttgc

SEQ ID NO: 129089 - DNA, 17 bp, Arabidopsis thaliana
gtttcagatttgggagg

SEQ ID NO: 129090 - DNA, 17 bp, Arabidopsis thaliana
gtttcagatttttgcct

SEQ ID NO: 129091 - DNA, 17 bp, Arabidopsis thaliana
gtttcagccctttgtcg

SEQ ID NO: 129092 - DNA, 17 bp, Arabidopsis thaliana
gtttcagccttgcgacc

SEQ ID NO: 129093 - DNA, 17 bp, Arabidopsis thaliana
gtttcagcgaccaaaag

SEQ ID NO: 129094 - DNA, 17 bp, Arabidopsis thaliana
gtttcagcgtcttggca

SEQ ID NO: 129095 - DNA, 17 bp, Arabidopsis thaliana
gtttcaggatcactcta

SEQ ID NO: 129096 - DNA, 17 bp, Arabidopsis thaliana
gtttcaggatgggtggc

SEQ ID NO: 129097 - DNA, 17 bp, Arabidopsis thaliana
gtttcaggatgtgtgat

SEQ ID NO: 129098 - DNA, 17 bp, Arabidopsis thaliana
gtttcaggcctagagaa

SEQ ID NO: 129099 - DNA, 17 bp, Arabidopsis thaliana
gtttcaggcctggggga

SEQ ID NO: 129100 - DNA, 17 bp, Arabidopsis thaliana
gtttcaggcctgggggg

SEQ ID NO: 129101 - DNA, 17 bp, Arabidopsis thaliana
gtttcagggaacactgc

SEQ ID NO: 129102 - DNA, 17 bp, Arabidopsis thaliana
gtttcagggagaaatag

SEQ ID NO: 129103 - DNA, 17 bp, Arabidopsis thaliana
gtttcaggtaccttgca

SEQ ID NO: 129104 - DNA, 17 bp, Arabidopsis thaliana
gtttcaggtctggggga

SEQ ID NO: 129105 - DNA, 17 bp, Arabidopsis thaliana
gtttcaggtttgtatgt

SEQ ID NO: 129106 - DNA, 17 bp, Arabidopsis thaliana
gtttcagtcgccagcga

SEQ ID NO: 129107 - DNA, 17 bp, Arabidopsis thaliana
gtttcagtcgtcagcga

SEQ ID NO: 129108 - DNA, 17 bp, Arabidopsis thaliana
gtttcagtcgtcagcgg

SEQ ID NO: 129109 - DNA, 17 bp, Arabidopsis thaliana
gtttcagtgcggttttg

SEQ ID NO: 129110 - DNA, 17 bp, Arabidopsis thaliana
gtttcagttcggattcg

SEQ ID NO: 129111 - DNA, 17 bp, Arabidopsis thaliana
gtttcagtttcgcaact

SEQ ID NO: 129112 - DNA, 17 bp, Arabidopsis thaliana
gtttcagtttgaggagc

SEQ ID NO: 129113 - DNA, 17 bp, Arabidopsis thaliana
gtttcataactggatgt

SEQ ID NO: 129114 - DNA, 17 bp, Arabidopsis thaliana
gtttcataagttttcca

SEQ ID NO: 129115 - DNA, 17 bp, Arabidopsis thaliana
gtttcatatcctgtctg

SEQ ID NO: 129116 - DNA, 17 bp, Arabidopsis thaliana
gtttcatcaactttagc

SEQ ID NO: 129117 - DNA, 17 bp, Arabidopsis thaliana
gtttcatccacgcataa

SEQ ID NO: 129118 - DNA, 17 bp, Arabidopsis thaliana
gtttcatccgaaaggta

SEQ ID NO: 129119 - DNA, 17 bp, Arabidopsis thaliana
gtttcatcgaatctttg

SEQ ID NO: 129120 - DNA, 17 bp, Arabidopsis thaliana
gtttcatctaagcccat

SEQ ID NO: 129121 - DNA, 17 bp, Arabidopsis thaliana
gtttcatctacgtagca

SEQ ID NO: 129122 - DNA, 17 bp, Arabidopsis thaliana
gtttcatctcttccgcg

SEQ ID NO: 129123 - DNA, 17 bp, Arabidopsis thaliana
gtttcatgcggcttaca

SEQ ID NO: 129124 - DNA, 17 bp, Arabidopsis thaliana
gtttcatggcttgccaa

SEQ ID NO: 129125 - DNA, 17 bp, Arabidopsis thaliana
gtttcatgtaaggttcc

SEQ ID NO: 129126 - DNA, 17 bp, Arabidopsis thaliana
gtttcatgtctaatggg

SEQ ID NO: 129127 - DNA, 17 bp, Arabidopsis thaliana
gtttcatgtgctgtcta

SEQ ID NO: 129128 - DNA, 17 bp, Arabidopsis thaliana
gtttcattaccgggata

SEQ ID NO: 129129 - DNA, 17 bp, Arabidopsis thaliana
gtttcattcacacatgc

SEQ ID NO: 129130 - DNA, 17 bp, Arabidopsis thaliana
gtttcattctctggtgc

SEQ ID NO: 129131 - DNA, 17 bp, Arabidopsis thaliana
gtttcatttggtgcgag

SEQ ID NO: 129132 - DNA, 17 bp, Arabidopsis thaliana
gtttcatttttcgtatt

SEQ ID NO: 129133 - DNA, 17 bp, Arabidopsis thaliana
gtttccaagcgagtata

SEQ ID NO: 129134 - DNA, 17 bp, Arabidopsis thaliana
gtttccaaggaatacag

SEQ ID NO: 129135 - DNA, 17 bp, Arabidopsis thaliana
gtttccaataggtctag

SEQ ID NO: 129136 - DNA, 17 bp, Arabidopsis thaliana
gtttccacaagtcatca

SEQ ID NO: 129137 - DNA, 17 bp, Arabidopsis thaliana
gtttccagagaggatcg

SEQ ID NO: 129138 - DNA, 17 bp, Arabidopsis thaliana
gtttccagagtacgagc

SEQ ID NO: 129139 - DNA, 17 bp, Arabidopsis thaliana
gtttccagataaatgtg

SEQ ID NO: 129140 - DNA, 17 bp, Arabidopsis thaliana
gtttccagggtgggcag

SEQ ID NO: 129141 - DNA, 17 bp, Arabidopsis thaliana
gtttccagtctccttgg

SEQ ID NO: 129142 - DNA, 17 bp, Arabidopsis thaliana
gtttccagtggcggacg

SEQ ID NO: 129143 - DNA, 17 bp, Arabidopsis thaliana
gtttccatcgtgtttct

SEQ ID NO: 129144 - DNA, 17 bp, Arabidopsis thaliana
gtttccatctggatgac

SEQ ID NO: 129145 - DNA, 17 bp, Arabidopsis thaliana
gtttccatgggccggac

SEQ ID NO: 129146 - DNA, 17 bp, Arabidopsis thaliana
gtttccattcgaagcct

SEQ ID NO: 129147 - DNA, 17 bp, Arabidopsis thaliana
gtttccattctccttgg

SEQ ID NO: 129148 - DNA, 17 bp, Arabidopsis thaliana
gtttccattggaggcgg

SEQ ID NO: 129149 - DNA, 17 bp, Arabidopsis thaliana
gtttcccaaacgtagtg

SEQ ID NO: 129150 - DNA, 17 bp, Arabidopsis thaliana
gtttcccacttatgtgg

SEQ ID NO: 129151 - DNA, 17 bp, Arabidopsis thaliana
gtttcccagtgcaatag

SEQ ID NO: 129152 - DNA, 17 bp, Arabidopsis thaliana
gtttcccattggaccgt

SEQ ID NO: 129153 - DNA, 17 bp, Arabidopsis thaliana
gtttccccacgagaact

SEQ ID NO: 129154 - DNA, 17 bp, Arabidopsis thaliana
gtttcccccacctccac

SEQ ID NO: 129155 - DNA, 17 bp, Arabidopsis thaliana
gtttccccgtcaacttg

SEQ ID NO: 129156 - DNA, 17 bp, Arabidopsis thaliana
gtttcccgcctggtgca

SEQ ID NO: 129157 - DNA, 17 bp, Arabidopsis thaliana
gtttcccggctcgtgca

SEQ ID NO: 129158 - DNA, 17 bp, Arabidopsis thaliana
gtttcccggctggtgca

SEQ ID NO: 129159 - DNA, 17 bp, Arabidopsis thaliana
gtttcccggctggtgcg

SEQ ID NO: 129160 - DNA, 17 bp, Arabidopsis thaliana
gtttcccggcttgtgca

SEQ ID NO: 129161 - DNA, 17 bp, Arabidopsis thaliana
gtttccctcaggatagc

SEQ ID NO: 129162 - DNA, 17 bp, Arabidopsis thaliana
gtttccctctgctcagc

SEQ ID NO: 129163 - DNA, 17 bp, Arabidopsis thaliana
gtttcccttagataggg

SEQ ID NO: 129164 - DNA, 17 bp, Arabidopsis thaliana
gtttccctttctacact

SEQ ID NO: 129165 - DNA, 17 bp, Arabidopsis thaliana
gtttccgaagagtttcc

SEQ ID NO: 129166 - DNA, 17 bp, Arabidopsis thaliana
gtttccgacaagatact

SEQ ID NO: 129167 - DNA, 17 bp, Arabidopsis thaliana
gtttccgatggagatct

SEQ ID NO: 129168 - DNA, 17 bp, Arabidopsis thaliana
gtttccgcaaactcccg

SEQ ID NO: 129169 - DNA, 17 bp, Arabidopsis thaliana
gtttccgcaaacttccg

SEQ ID NO: 129170 - DNA, 17 bp, Arabidopsis thaliana
gtttccgcgacaagtcc

SEQ ID NO: 129171 - DNA, 17 bp, Arabidopsis thaliana
gtttccgcttatgtatt

SEQ ID NO: 129172 - DNA, 17 bp, Arabidopsis thaliana
gtttccggcaggtcgga

SEQ ID NO: 129173 - DNA, 17 bp, Arabidopsis thaliana
gtttccggcaggtctga

SEQ ID NO: 129174 - DNA, 17 bp, Arabidopsis thaliana
gtttccggctccgtttt

SEQ ID NO: 129175 - DNA, 17 bp, Arabidopsis thaliana
gtttccggtgccccccg

SEQ ID NO: 129176 - DNA, 17 bp, Arabidopsis thaliana
gtttccgtccacgaaag

SEQ ID NO: 129177 - DNA, 17 bp, Arabidopsis thaliana
gtttccgtctgggtatg

SEQ ID NO: 129178 - DNA, 17 bp, Arabidopsis thaliana
gtttccgttcttggtta

SEQ ID NO: 129179 - DNA, 17 bp, Arabidopsis thaliana
gtttccgttgcagcgtt

SEQ ID NO: 129180 - DNA, 17 bp, Arabidopsis thaliana
gtttccgtttccgtttc

SEQ ID NO: 129181 - DNA, 17 bp, Arabidopsis thaliana
gtttcctaagagcatgt

SEQ ID NO: 129182 - DNA, 17 bp, Arabidopsis thaliana
gtttcctaatccagaga

SEQ ID NO: 129183 - DNA, 17 bp, Arabidopsis thaliana
gtttcctatggttgcag

SEQ ID NO: 129184 - DNA, 17 bp, Arabidopsis thaliana
gtttcctcagagcggtg

SEQ ID NO: 129185 - DNA, 17 bp, Arabidopsis thaliana
gtttcctcagccagttt

SEQ ID NO: 129186 - DNA, 17 bp, Arabidopsis thaliana
gtttcctcagcgacgga

SEQ ID NO: 129187 - DNA, 17 bp, Arabidopsis thaliana
gtttcctcagtttacag

SEQ ID NO: 129188 - DNA, 17 bp, Arabidopsis thaliana
gtttcctctgtgagttt

SEQ ID NO: 129189 - DNA, 17 bp, Arabidopsis thaliana
gtttcctgacacaaagc

SEQ ID NO: 129190 - DNA, 17 bp, Arabidopsis thaliana
gtttcctgacacaaggc

SEQ ID NO: 129191 - DNA, 17 bp, Arabidopsis thaliana
gtttcctggctggtgca

SEQ ID NO: 129192 - DNA, 17 bp, Arabidopsis thaliana
gtttccttcttgtaggt

SEQ ID NO: 129193 - DNA, 17 bp, Arabidopsis thaliana
gtttccttcttttgggc

SEQ ID NO: 129194 - DNA, 17 bp, Arabidopsis thaliana
gtttccttggttcagtg

SEQ ID NO: 129195 - DNA, 17 bp, Arabidopsis thaliana
gtttcgaagacatcttg

SEQ ID NO: 129196 - DNA, 17 bp, Arabidopsis thaliana
gtttcgaatcgtttaac

SEQ ID NO: 129197 - DNA, 17 bp, Arabidopsis thaliana
gtttcgaccagtgtttg

SEQ ID NO: 129198 - DNA, 17 bp, Arabidopsis thaliana
gtttcgaccgcagtaac

SEQ ID NO: 129199 - DNA, 17 bp, Arabidopsis thaliana
gtttcgacgaggagtga

SEQ ID NO: 129200 - DNA, 17 bp, Arabidopsis thaliana
gtttcgacgaggagtgt

SEQ ID NO: 129201 - DNA, 17 bp, Arabidopsis thaliana
gtttcgacgggaaaacg

SEQ ID NO: 129202 - DNA, 17 bp, Arabidopsis thaliana
gtttcgagatatcaggt

SEQ ID NO: 129203 - DNA, 17 bp, Arabidopsis thaliana
gtttcgagatccaatgc

SEQ ID NO: 129204 - DNA, 17 bp, Arabidopsis thaliana
gtttcgagttttgcttg

SEQ ID NO: 129205 - DNA, 17 bp, Arabidopsis thaliana
gtttcgatccagatcct

SEQ ID NO: 129206 - DNA, 17 bp, Arabidopsis thaliana
gtttcgcaaagttgtga

SEQ ID NO: 129207 - DNA, 17 bp, Arabidopsis thaliana
gtttcgcagatgggtaa

SEQ ID NO: 129208 - DNA, 17 bp, Arabidopsis thaliana
gtttcgcagatgggtac

SEQ ID NO: 129209 - DNA, 17 bp, Arabidopsis thaliana
gtttcgcagttagttcg

SEQ ID NO: 129210 - DNA, 17 bp, Arabidopsis thaliana
gtttcgcatcctgtaga

SEQ ID NO: 129211 - DNA, 17 bp, Arabidopsis thaliana
gtttcgcctagggtctt

SEQ ID NO: 129212 - DNA, 17 bp, Arabidopsis thaliana
gtttcgcctcagaacct

SEQ ID NO: 129213 - DNA, 17 bp, Arabidopsis thaliana
gtttcgcgattttggag

SEQ ID NO: 129214 - DNA, 17 bp, Arabidopsis thaliana
gtttcgcggacttgaaa

SEQ ID NO: 129215 - DNA, 17 bp, Arabidopsis thaliana
gtttcgcgtccaagtta

SEQ ID NO: 129216 - DNA, 17 bp, Arabidopsis thaliana
gtttcgcgttacgatta

SEQ ID NO: 129217 - DNA, 17 bp, Arabidopsis thaliana
gtttcgctaattagcct

SEQ ID NO: 129218 - DNA, 17 bp, Arabidopsis thaliana
gtttcgctataggcctt

SEQ ID NO: 129219 - DNA, 17 bp, Arabidopsis thaliana
gtttcgctataggcttt

SEQ ID NO: 129220 - DNA, 17 bp, Arabidopsis thaliana
gtttcgcttggattagc

SEQ ID NO: 129221 - DNA, 17 bp, Arabidopsis thaliana
gtttcggaaatttgcgt

SEQ ID NO: 129222 - DNA, 17 bp, Arabidopsis thaliana
gtttcggatgacgtgga

SEQ ID NO: 129223 - DNA, 17 bp, Arabidopsis thaliana
gtttcggattgcgttcc

SEQ ID NO: 129224 - DNA, 17 bp, Arabidopsis thaliana
gtttcggattgcgttgc

SEQ ID NO: 129225 - DNA, 17 bp, Arabidopsis thaliana
gtttcggccaagacatg

SEQ ID NO: 129226 - DNA, 17 bp, Arabidopsis thaliana
gtttcggcccagagtct

SEQ ID NO: 129227 - DNA, 17 bp, Arabidopsis thaliana
gtttcggcccagcaaag

SEQ ID NO: 129228 - DNA, 17 bp, Arabidopsis thaliana
gtttcggcgatgtccgg

SEQ ID NO: 129229 - DNA, 17 bp, Arabidopsis thaliana
gtttcggctcatgttat

SEQ ID NO: 129230 - DNA, 17 bp, Arabidopsis thaliana
gtttcggctctgaacca

SEQ ID NO: 129231 - DNA, 17 bp, Arabidopsis thaliana
gtttcggctctgaacct

SEQ ID NO: 129232 - DNA, 17 bp, Arabidopsis thaliana
gtttcggcttaaaacct

SEQ ID NO: 129233 - DNA, 17 bp, Arabidopsis thaliana
gtttcggcttggtgttc

SEQ ID NO: 129234 - DNA, 17 bp, Arabidopsis thaliana
gtttcggcttggttcac

SEQ ID NO: 129235 - DNA, 17 bp, Arabidopsis thaliana
gtttcgggaagcgcatg

SEQ ID NO: 129236 - DNA, 17 bp, Arabidopsis thaliana
gtttcgggattttggca

SEQ ID NO: 129237 - DNA, 17 bp, Arabidopsis thaliana
gtttcgggcctagggga

SEQ ID NO: 129238 - DNA, 17 bp, Arabidopsis thaliana
gtttcgggcctggggga

SEQ ID NO: 129239 - DNA, 17 bp, Arabidopsis thaliana
gtttcgggcctgggggg

SEQ ID NO: 129240 - DNA, 17 bp, Arabidopsis thaliana
gtttcgggcttggggat

SEQ ID NO: 129241 - DNA, 17 bp, Arabidopsis thaliana
gtttcgggtaaaggatt

SEQ ID NO: 129242 - DNA, 17 bp, Arabidopsis thaliana
gtttcgggtcataacgg

SEQ ID NO: 129243 - DNA, 17 bp, Arabidopsis thaliana
gtttcgggtgtaaagga

SEQ ID NO: 129244 - DNA, 17 bp, Arabidopsis thaliana
gtttcgggtttaggatt

SEQ ID NO: 129245 - DNA, 17 bp, Arabidopsis thaliana
gtttcgggttttttgga

SEQ ID NO: 129246 - DNA, 17 bp, Arabidopsis thaliana
gtttcggttcagaacct

SEQ ID NO: 129247 - DNA, 17 bp, Arabidopsis thaliana
gtttcggttcgagtttt

SEQ ID NO: 129248 - DNA, 17 bp, Arabidopsis thaliana
gtttcggttctatttac

SEQ ID NO: 129249 - DNA, 17 bp, Arabidopsis thaliana
gtttcggttgaccagtc

SEQ ID NO: 129250 - DNA, 17 bp, Arabidopsis thaliana
gtttcgtaaatgggata

SEQ ID NO: 129251 - DNA, 17 bp, Arabidopsis thaliana
gtttcgtacccaggcct

SEQ ID NO: 129252 - DNA, 17 bp, Arabidopsis thaliana
gtttcgtcaggtcgtca

SEQ ID NO: 129253 - DNA, 17 bp, Arabidopsis thaliana
gtttcgtccaccacttg

SEQ ID NO: 129254 - DNA, 17 bp, Arabidopsis thaliana
gtttcgtcccaagcgtc

SEQ ID NO: 129255 - DNA, 17 bp, Arabidopsis thaliana
gtttcgtcgccgcaggt

SEQ ID NO: 129256 - DNA, 17 bp, Arabidopsis thaliana
gtttcgtctcaagcgtc

SEQ ID NO: 129257 - DNA, 17 bp, Arabidopsis thaliana
gtttcgtctcgggttcc

SEQ ID NO: 129258 - DNA, 17 bp, Arabidopsis thaliana
gtttcgtcttcgatgtt

SEQ ID NO: 129259 - DNA, 17 bp, Arabidopsis thaliana
gtttcgtgattttggcc

SEQ ID NO: 129260 - DNA, 17 bp, Arabidopsis thaliana
gtttcgtgcctagatct

SEQ ID NO: 129261 - DNA, 17 bp, Arabidopsis thaliana
gtttcgtgctaaacgtg

SEQ ID NO: 129262 - DNA, 17 bp, Arabidopsis thaliana
gtttcgttcttcttcgg

SEQ ID NO: 129263 - DNA, 17 bp, Arabidopsis thaliana
gtttcgtttactgttca

SEQ ID NO: 129264 - DNA, 17 bp, Arabidopsis thaliana
gtttcgtttcccggctg

SEQ ID NO: 129265 - DNA, 17 bp, Arabidopsis thaliana
gtttcgtttccggcagg

SEQ ID NO: 129266 - DNA, 17 bp, Arabidopsis thaliana
gtttcgtttcctcagtt

SEQ ID NO: 129267 - DNA, 17 bp, Arabidopsis thaliana
gtttctaacaactatca

SEQ ID NO: 129268 - DNA, 17 bp, Arabidopsis thaliana
gtttctaactcatagga

SEQ ID NO: 129269 - DNA, 17 bp, Arabidopsis thaliana
gtttctaagaccatctc

SEQ ID NO: 129270 - DNA, 17 bp, Arabidopsis thaliana
gtttctaatgtcgcttc

SEQ ID NO: 129271 - DNA, 17 bp, Arabidopsis thaliana
gtttctacaattgtggt

SEQ ID NO: 129272 - DNA, 17 bp, Arabidopsis thaliana
gtttctacagtgcttcg

SEQ ID NO: 129273 - DNA, 17 bp, Arabidopsis thaliana
gtttctaccgaaactaa

SEQ ID NO: 129274 - DNA, 17 bp, Arabidopsis thaliana
gtttctacggagccata

SEQ ID NO: 129275 - DNA, 17 bp, Arabidopsis thaliana
gtttctactaaagctga

SEQ ID NO: 129276 - DNA, 17 bp, Arabidopsis thaliana
gtttctactccacgatt

SEQ ID NO: 129277 - DNA, 17 bp, Arabidopsis thaliana
gtttctagatggcgaac

SEQ ID NO: 129278 - DNA, 17 bp, Arabidopsis thaliana
gtttctagtgacgctta

SEQ ID NO: 129279 - DNA, 17 bp, Arabidopsis thaliana
gtttctagtgttccgtg

SEQ ID NO: 129280 - DNA, 17 bp, Arabidopsis thaliana
gtttctatcgctaacaa

SEQ ID NO: 129281 - DNA, 17 bp, Arabidopsis thaliana
gtttctatgagcctcac

SEQ ID NO: 129282 - DNA, 17 bp, Arabidopsis thaliana
gtttctatgattggtgc

SEQ ID NO: 129283 - DNA, 17 bp, Arabidopsis thaliana
gtttctatgtacccgtc

SEQ ID NO: 129284 - DNA, 17 bp, Arabidopsis thaliana
gtttctattgtgcgagt

SEQ ID NO: 129285 - DNA, 17 bp, Arabidopsis thaliana
gtttctcaagactgaaa

SEQ ID NO: 129286 - DNA, 17 bp, Arabidopsis thaliana
gtttctcaagtgaggaa

SEQ ID NO: 129287 - DNA, 17 bp, Arabidopsis thaliana
gtttctcacagactgtt

SEQ ID NO: 129288 - DNA, 17 bp, Arabidopsis thaliana
gtttctcacgagaacgg

SEQ ID NO: 129289 - DNA, 17 bp, Arabidopsis thaliana
gtttctcagggtgttct

SEQ ID NO: 129290 - DNA, 17 bp, Arabidopsis thaliana
gtttctccatccagatg

SEQ ID NO: 129291 - DNA, 17 bp, Arabidopsis thaliana
gtttctccatcctagac

SEQ ID NO: 129292 - DNA, 17 bp, Arabidopsis thaliana
gtttctccatcttctgt

SEQ ID NO: 129293 - DNA, 17 bp, Arabidopsis thaliana
gtttctccatttgagtg

SEQ ID NO: 129294 - DNA, 17 bp, Arabidopsis thaliana
gtttctcccgatcccca

SEQ ID NO: 129295 - DNA, 17 bp, Arabidopsis thaliana
gtttctccgacagtctg

SEQ ID NO: 129296 - DNA, 17 bp, Arabidopsis thaliana
gtttctccgacttgttt

SEQ ID NO: 129297 - DNA, 17 bp, Arabidopsis thaliana
gtttctccggcaggtcg

SEQ ID NO: 129298 - DNA, 17 bp, Arabidopsis thaliana
gtttctccggcgagacg

SEQ ID NO: 129299 - DNA, 17 bp, Arabidopsis thaliana
gtttctcggaacgcccc

SEQ ID NO: 129300 - DNA, 17 bp, Arabidopsis thaliana
gtttctcggaatgcccc

SEQ ID NO: 129301 - DNA, 17 bp, Arabidopsis thaliana
gtttctcggcagctaag

SEQ ID NO: 129302 - DNA, 17 bp, Arabidopsis thaliana
gtttctcggccgaatcc

SEQ ID NO: 129303 - DNA, 17 bp, Arabidopsis thaliana
gtttctcggctggtgca

SEQ ID NO: 129304 - DNA, 17 bp, Arabidopsis thaliana
gtttctcgtcgagcgct

SEQ ID NO: 129305 - DNA, 17 bp, Arabidopsis thaliana
gtttctcgttgactgct

SEQ ID NO: 129306 - DNA, 17 bp, Arabidopsis thaliana
gtttctcgttttggttg

SEQ ID NO: 129307 - DNA, 17 bp, Arabidopsis thaliana
gtttctctacaaacttt

SEQ ID NO: 129308 - DNA, 17 bp, Arabidopsis thaliana
gtttctctcaccgacgt

SEQ ID NO: 129309 - DNA, 17 bp, Arabidopsis thaliana
gtttctctctcaaatgg

SEQ ID NO: 129310 - DNA, 17 bp, Arabidopsis thaliana
gtttctctctgagggcg

SEQ ID NO: 129311 - DNA, 17 bp, Arabidopsis thaliana
gtttctctgacagaatc

SEQ ID NO: 129312 - DNA, 17 bp, Arabidopsis thaliana
gtttctctgacgtgcta

SEQ ID NO: 129313 - DNA, 17 bp, Arabidopsis thaliana
gtttctctgcagataaa

SEQ ID NO: 129314 - DNA, 17 bp, Arabidopsis thaliana
gtttctctgctttgctt

SEQ ID NO: 129315 - DNA, 17 bp, Arabidopsis thaliana
gtttctcttcgcagcgt

SEQ ID NO: 129316 - DNA, 17 bp, Arabidopsis thaliana
gtttctgaaaacaggga

SEQ ID NO: 129317 - DNA, 17 bp, Arabidopsis thaliana
gtttctgaccatgtgtt

SEQ ID NO: 129318 - DNA, 17 bp, Arabidopsis thaliana
gtttctgagtgactttt

SEQ ID NO: 129319 - DNA, 17 bp, Arabidopsis thaliana
gtttctgatcgtttgac

SEQ ID NO: 129320 - DNA, 17 bp, Arabidopsis thaliana
gtttctgatggtgtgct

SEQ ID NO: 129321 - DNA, 17 bp, Arabidopsis thaliana
gtttctgcaatgggtgt

SEQ ID NO: 129322 - DNA, 17 bp, Arabidopsis thaliana
gtttctgcaggaaaatc

SEQ ID NO: 129323 - DNA, 17 bp, Arabidopsis thaliana
gtttctgccagggctaa

SEQ ID NO: 129324 - DNA, 17 bp, Arabidopsis thaliana
gtttctgcggaaaaatc

SEQ ID NO: 129325 - DNA, 17 bp, Arabidopsis thaliana
gtttctgctgatagttg

SEQ ID NO: 129326 - DNA, 17 bp, Arabidopsis thaliana
gtttctgctgcgtttgt

SEQ ID NO: 129327 - DNA, 17 bp, Arabidopsis thaliana
gtttctgctgctggagc

SEQ ID NO: 129328 - DNA, 17 bp, Arabidopsis thaliana
gtttctgctgtgtacca

SEQ ID NO: 129329 - DNA, 17 bp, Arabidopsis thaliana
gtttctgctgttttgtt

SEQ ID NO: 129330 - DNA, 17 bp, Arabidopsis thaliana
gtttctgcttcttcgcc

SEQ ID NO: 129331 - DNA, 17 bp, Arabidopsis thaliana
gtttctgcttcttcgct

SEQ ID NO: 129332 - DNA, 17 bp, Arabidopsis thaliana
gtttctgcttctttgcg

SEQ ID NO: 129333 - DNA, 17 bp, Arabidopsis thaliana
gtttctgcttgcgaagc

SEQ ID NO: 129334 - DNA, 17 bp, Arabidopsis thaliana
gtttctgcttgtgacga

SEQ ID NO: 129335 - DNA, 17 bp, Arabidopsis thaliana
gtttctggagtgaccca

SEQ ID NO: 129336 - DNA, 17 bp, Arabidopsis thaliana
gtttctggatattcgct

SEQ ID NO: 129337 - DNA, 17 bp, Arabidopsis thaliana
gtttctggattgccgaa

SEQ ID NO: 129338 - DNA, 17 bp, Arabidopsis thaliana
gtttctggcatgactac

SEQ ID NO: 129339 - DNA, 17 bp, Arabidopsis thaliana
gtttctggccaactcgt

SEQ ID NO: 129340 - DNA, 17 bp, Arabidopsis thaliana
gtttctggccacgtgtt

SEQ ID NO: 129341 - DNA, 17 bp, Arabidopsis thaliana
gtttctgggaatccggt

SEQ ID NO: 129342 - DNA, 17 bp, Arabidopsis thaliana
gtttctggggacttttc

SEQ ID NO: 129343 - DNA, 17 bp, Arabidopsis thaliana
gtttctgggtggtgttc

SEQ ID NO: 129344 - DNA, 17 bp, Arabidopsis thaliana
gtttctggtgtacgcta

SEQ ID NO: 129345 - DNA, 17 bp, Arabidopsis thaliana
gtttctggtgtcctagg

SEQ ID NO: 129346 - DNA, 17 bp, Arabidopsis thaliana
gtttctggttttcctgc

SEQ ID NO: 129347 - DNA, 17 bp, Arabidopsis thaliana
gtttctggttttcctgt

SEQ ID NO: 129348 - DNA, 17 bp, Arabidopsis thaliana
gtttctgtcagttgggt

SEQ ID NO: 129349 - DNA, 17 bp, Arabidopsis thaliana
gtttctgtgtcgcctaa

SEQ ID NO: 129350 - DNA, 17 bp, Arabidopsis thaliana
gtttctgttaaaatggc

SEQ ID NO: 129351 - DNA, 17 bp, Arabidopsis thaliana
gtttctgtttctgctgt

SEQ ID NO: 129352 - DNA, 17 bp, Arabidopsis thaliana
gtttctgtttggctttc

SEQ ID NO: 129353 - DNA, 17 bp, Arabidopsis thaliana
gtttcttaagcgagagc

SEQ ID NO: 129354 - DNA, 17 bp, Arabidopsis thaliana
gtttcttaataaatcac

SEQ ID NO: 129355 - DNA, 17 bp, Arabidopsis thaliana
gtttcttagccaattga

SEQ ID NO: 129356 - DNA, 17 bp, Arabidopsis thaliana
gtttcttatcttgtgtc

SEQ ID NO: 129357 - DNA, 17 bp, Arabidopsis thaliana
gtttcttatgagctgag

SEQ ID NO: 129358 - DNA, 17 bp, Arabidopsis thaliana
gtttcttatggttgcag

SEQ ID NO: 129359 - DNA, 17 bp, Arabidopsis thaliana
gtttcttcacactgcgt

SEQ ID NO: 129360 - DNA, 17 bp, Arabidopsis thaliana
gtttcttcaccttggga

SEQ ID NO: 129361 - DNA, 17 bp, Arabidopsis thaliana
gtttcttccaccacttg

SEQ ID NO: 129362 - DNA, 17 bp, Arabidopsis thaliana
gtttcttcctgaacagt

SEQ ID NO: 129363 - DNA, 17 bp, Arabidopsis thaliana
gtttcttcctgtttgga

SEQ ID NO: 129364 - DNA, 17 bp, Arabidopsis thaliana
gtttcttcgattcatgt

SEQ ID NO: 129365 - DNA, 17 bp, Arabidopsis thaliana
gtttcttcggatcacag

SEQ ID NO: 129366 - DNA, 17 bp, Arabidopsis thaliana
gtttcttcgggagacga

SEQ ID NO: 129367 - DNA, 17 bp, Arabidopsis thaliana
gtttcttctgattggtc

SEQ ID NO: 129368 - DNA, 17 bp, Arabidopsis thaliana
gtttcttctgggtttcg

SEQ ID NO: 129369 - DNA, 17 bp, Arabidopsis thaliana
gtttcttctgtgtacca

SEQ ID NO: 129370 - DNA, 17 bp, Arabidopsis thaliana
gtttcttcttatcaagg

SEQ ID NO: 129371 - DNA, 17 bp, Arabidopsis thaliana
gtttcttcttttctggc

SEQ ID NO: 129372 - DNA, 17 bp, Arabidopsis thaliana
gtttcttcttttgtttc

SEQ ID NO: 129373 - DNA, 17 bp, Arabidopsis thaliana
gtttcttgaggaatctg

SEQ ID NO: 129374 - DNA, 17 bp, Arabidopsis thaliana
gtttcttgattgcgctg

SEQ ID NO: 129375 - DNA, 17 bp, Arabidopsis thaliana
gtttcttgcattggctt

SEQ ID NO: 129376 - DNA, 17 bp, Arabidopsis thaliana
gtttcttgccggtagcg

SEQ ID NO: 129377 - DNA, 17 bp, Arabidopsis thaliana
gtttcttgcgcagtaag

SEQ ID NO: 129378 - DNA, 17 bp, Arabidopsis thaliana
gtttcttgcgctcgtaa

SEQ ID NO: 129379 - DNA, 17 bp, Arabidopsis thaliana
gtttcttggacctccat

SEQ ID NO: 129380 - DNA, 17 bp, Arabidopsis thaliana
gtttcttggagtgatct

SEQ ID NO: 129381 - DNA, 17 bp, Arabidopsis thaliana
gtttcttggcctcgtct

SEQ ID NO: 129382 - DNA, 17 bp, Arabidopsis thaliana
gtttcttgggccattca

SEQ ID NO: 129383 - DNA, 17 bp, Arabidopsis thaliana
gtttcttggtctctgac

SEQ ID NO: 129384 - DNA, 17 bp, Arabidopsis thaliana
gtttcttggttaaagca

SEQ ID NO: 129385 - DNA, 17 bp, Arabidopsis thaliana
gtttcttgtaaggttcc

SEQ ID NO: 129386 - DNA, 17 bp, Arabidopsis thaliana
gtttcttgtcatagacc

SEQ ID NO: 129387 - DNA, 17 bp, Arabidopsis thaliana
gtttcttgtgcgtcaag

SEQ ID NO: 129388 - DNA, 17 bp, Arabidopsis thaliana
gtttctttcaccagagc

SEQ ID NO: 129389 - DNA, 17 bp, Arabidopsis thaliana
gtttctttcatcccagg

SEQ ID NO: 129390 - DNA, 17 bp, Arabidopsis thaliana
gtttctttcgtcggagg

SEQ ID NO: 129391 - DNA, 17 bp, Arabidopsis thaliana
gtttctttctccttctc

SEQ ID NO: 129392 - DNA, 17 bp, Arabidopsis thaliana
gtttctttgtcgctggc

SEQ ID NO: 129393 - DNA, 17 bp, Arabidopsis thaliana
gtttctttgtgtggtag

SEQ ID NO: 129394 - DNA, 17 bp, Arabidopsis thaliana
gtttcttttgggcccga

SEQ ID NO: 129395 - DNA, 17 bp, Arabidopsis thaliana
gtttgaaaaagctgaga

SEQ ID NO: 129396 - DNA, 17 bp, Arabidopsis thaliana
gtttgaaaaagtgacta

SEQ ID NO: 129397 - DNA, 17 bp, Arabidopsis thaliana
gtttgaaatctcttgcg

SEQ ID NO: 129398 - DNA, 17 bp, Arabidopsis thaliana
gtttgaaatgctttccg

SEQ ID NO: 129399 - DNA, 17 bp, Arabidopsis thaliana
gtttgaaccacttgatc

SEQ ID NO: 129400 - DNA, 17 bp, Arabidopsis thaliana
gtttgaacccgggcgaa

SEQ ID NO: 129401 - DNA, 17 bp, Arabidopsis thaliana
gtttgaacccgggctca

SEQ ID NO: 129402 - DNA, 17 bp, Arabidopsis thaliana
gtttgaagatagaccgg

SEQ ID NO: 129403 - DNA, 17 bp, Arabidopsis thaliana
gtttgaagatctctcct

SEQ ID NO: 129404 - DNA, 17 bp, Arabidopsis thaliana
gtttgaatcaaatttgc

SEQ ID NO: 129405 - DNA, 17 bp, Arabidopsis thaliana
gtttgaatcatcattgc

SEQ ID NO: 129406 - DNA, 17 bp, Arabidopsis thaliana
gtttgaatttgaggatc

SEQ ID NO: 129407 - DNA, 17 bp, Arabidopsis thaliana
gtttgaatttgattgca

SEQ ID NO: 129408 - DNA, 17 bp, Arabidopsis thaliana
gtttgacacgccttcta

SEQ ID NO: 129409 - DNA, 17 bp, Arabidopsis thaliana
gtttgacagaatcaggc

SEQ ID NO: 129410 - DNA, 17 bp, Arabidopsis thaliana
gtttgaccaaaaaacgc

SEQ ID NO: 129411 - DNA, 17 bp, Arabidopsis thaliana
gtttgaccatattttac

SEQ ID NO: 129412 - DNA, 17 bp, Arabidopsis thaliana
gtttgaccatgtatcca

SEQ ID NO: 129413 - DNA, 17 bp, Arabidopsis thaliana
gtttgaccggtacaacc

SEQ ID NO: 129414 - DNA, 17 bp, Arabidopsis thaliana
gtttgacctcggttcct

SEQ ID NO: 129415 - DNA, 17 bp, Arabidopsis thaliana
gtttgacctggcagctc

SEQ ID NO: 129416 - DNA, 17 bp, Arabidopsis thaliana
gtttgaccttaagagca

SEQ ID NO: 129417 - DNA, 17 bp, Arabidopsis thaliana
gtttgaccttccatcgt

SEQ ID NO: 129418 - DNA, 17 bp, Arabidopsis thaliana
gtttgacctttccacaa

SEQ ID NO: 129419 - DNA, 17 bp, Arabidopsis thaliana
gtttgacgatatatccc

SEQ ID NO: 129420 - DNA, 17 bp, Arabidopsis thaliana
gtttgactatgaatcgg

SEQ ID NO: 129421 - DNA, 17 bp, Arabidopsis thaliana
gtttgactctagtccga

SEQ ID NO: 129422 - DNA, 17 bp, Arabidopsis thaliana
gtttgacttgacacgtt

SEQ ID NO: 129423 - DNA, 17 bp, Arabidopsis thaliana
gtttgacttgacactgt

SEQ ID NO: 129424 - DNA, 17 bp, Arabidopsis thaliana
gtttgagaaatcgaaga

SEQ ID NO: 129425 - DNA, 17 bp, Arabidopsis thaliana
gtttgagactagtggga

SEQ ID NO: 129426 - DNA, 17 bp, Arabidopsis thaliana
gtttgagacttgtcgat

SEQ ID NO: 129427 - DNA, 17 bp, Arabidopsis thaliana
gtttgagcaggtgctat

SEQ ID NO: 129428 - DNA, 17 bp, Arabidopsis thaliana
gtttgagccgactttga

SEQ ID NO: 129429 - DNA, 17 bp, Arabidopsis thaliana
gtttgagcctccaatgt

SEQ ID NO: 129430 - DNA, 17 bp, Arabidopsis thaliana
gtttgagcggatgtgct

SEQ ID NO: 129431 - DNA, 17 bp, Arabidopsis thaliana
gtttgaggatagaccgg

SEQ ID NO: 129432 - DNA, 17 bp, Arabidopsis thaliana
gtttgaggcacttttca

SEQ ID NO: 129433 - DNA, 17 bp, Arabidopsis thaliana
gtttgagtatgaccggg

SEQ ID NO: 129434 - DNA, 17 bp, Arabidopsis thaliana
gtttgagtgacgcttgg

SEQ ID NO: 129435 - DNA, 17 bp, Arabidopsis thaliana
gtttgagttgttttgtc

SEQ ID NO: 129436 - DNA, 17 bp, Arabidopsis thaliana
gtttgataatgagtgcg

SEQ ID NO: 129437 - DNA, 17 bp, Arabidopsis thaliana
gtttgataatgggtgcg

SEQ ID NO: 129438 - DNA, 17 bp, Arabidopsis thaliana
gtttgatagtgcagttc

SEQ ID NO: 129439 - DNA, 17 bp, Arabidopsis thaliana
gtttgatcaccgttggc

SEQ ID NO: 129440 - DNA, 17 bp, Arabidopsis thaliana
gtttgatcagcgggtac

SEQ ID NO: 129441 - DNA, 17 bp, Arabidopsis thaliana
gtttgatcagttaggta

SEQ ID NO: 129442 - DNA, 17 bp, Arabidopsis thaliana
gtttgatcatcttcctt

SEQ ID NO: 129443 - DNA, 17 bp, Arabidopsis thaliana
gtttgatccgcctgata

SEQ ID NO: 129444 - DNA, 17 bp, Arabidopsis thaliana
gtttgatccgtctgata

SEQ ID NO: 129445 - DNA, 17 bp, Arabidopsis thaliana
gtttgatccttcgatgt

SEQ ID NO: 129446 - DNA, 17 bp, Arabidopsis thaliana
gtttgatgacgattcca

SEQ ID NO: 129447 - DNA, 17 bp, Arabidopsis thaliana
gtttgatgagatgatcc

SEQ ID NO: 129448 - DNA, 17 bp, Arabidopsis thaliana
gtttgatggctgagaaa

SEQ ID NO: 129449 - DNA, 17 bp, Arabidopsis thaliana
gtttgatgtccacggat

SEQ ID NO: 129450 - DNA, 17 bp, Arabidopsis thaliana
gtttgatgtcgtctcat

SEQ ID NO: 129451 - DNA, 17 bp, Arabidopsis thaliana
gtttgattcattctgtg

SEQ ID NO: 129452 - DNA, 17 bp, Arabidopsis thaliana
gtttgattccggcaggt

SEQ ID NO: 129453 - DNA, 17 bp, Arabidopsis thaliana
gtttgattccttcttgg

SEQ ID NO: 129454 - DNA, 17 bp, Arabidopsis thaliana
gtttgattcgtaaactg

SEQ ID NO: 129455 - DNA, 17 bp, Arabidopsis thaliana
gtttgattcgtacactc

SEQ ID NO: 129456 - DNA, 17 bp, Arabidopsis thaliana
gtttgattcgtacactg

SEQ ID NO: 129457 - DNA, 17 bp, Arabidopsis thaliana
gtttgattcgtacactt

SEQ ID NO: 129458 - DNA, 17 bp, Arabidopsis thaliana
gtttgattgatttgcga

SEQ ID NO: 129459 - DNA, 17 bp, Arabidopsis thaliana
gtttgattgtgtgtttt

SEQ ID NO: 129460 - DNA, 17 bp, Arabidopsis thaliana
gtttgattgttgctggt

SEQ ID NO: 129461 - DNA, 17 bp, Arabidopsis thaliana
gtttgatttccaggctt

SEQ ID NO: 129462 - DNA, 17 bp, Arabidopsis thaliana
gtttgatttgaaccttg

SEQ ID NO: 129463 - DNA, 17 bp, Arabidopsis thaliana
gtttgatttgacacgtg

SEQ ID NO: 129464 - DNA, 17 bp, Arabidopsis thaliana
gtttgcaatggttgacg

SEQ ID NO: 129465 - DNA, 17 bp, Arabidopsis thaliana
gtttgcagagagccttc

SEQ ID NO: 129466 - DNA, 17 bp, Arabidopsis thaliana
gtttgcatgtcgctgga

SEQ ID NO: 129467 - DNA, 17 bp, Arabidopsis thaliana
gtttgcattacgaggga

SEQ ID NO: 129468 - DNA, 17 bp, Arabidopsis thaliana
gtttgccattctcgtgc

SEQ ID NO: 129469 - DNA, 17 bp, Arabidopsis thaliana
gtttgcctgtcgctggc

SEQ ID NO: 129470 - DNA, 17 bp, Arabidopsis thaliana
gtttgcctgtcgctggt

SEQ ID NO: 129471 - DNA, 17 bp, Arabidopsis thaliana
gtttgcgacaccgaaaa

SEQ ID NO: 129472 - DNA, 17 bp, Arabidopsis thaliana
gtttgcgagagttttat

SEQ ID NO: 129473 - DNA, 17 bp, Arabidopsis thaliana
gtttgcgcgatggcacc

SEQ ID NO: 129474 - DNA, 17 bp, Arabidopsis thaliana
gtttgcggaaacggagg

SEQ ID NO: 129475 - DNA, 17 bp, Arabidopsis thaliana
gtttgcggaaacgggcg

SEQ ID NO: 129476 - DNA, 17 bp, Arabidopsis thaliana
gtttgcggagaagctgt

SEQ ID NO: 129477 - DNA, 17 bp, Arabidopsis thaliana
gtttgcggctaaagtct

SEQ ID NO: 129478 - DNA, 17 bp, Arabidopsis thaliana
gtttgcggctccttggc

SEQ ID NO: 129479 - DNA, 17 bp, Arabidopsis thaliana
gtttgcgggaacttaat

SEQ ID NO: 129480 - DNA, 17 bp, Arabidopsis thaliana
gtttgcgggagatttac

SEQ ID NO: 129481 - DNA, 17 bp, Arabidopsis thaliana
gtttgcgggagcttaat

SEQ ID NO: 129482 - DNA, 17 bp, Arabidopsis thaliana
gtttgcgggagttttat

SEQ ID NO: 129483 - DNA, 17 bp, Arabidopsis thaliana
gtttgcgggcggtagcg

SEQ ID NO: 129484 - DNA, 17 bp, Arabidopsis thaliana
gtttgcgggtgatagcg

SEQ ID NO: 129485 - DNA, 17 bp, Arabidopsis thaliana
gtttgcgggtggtagaa

SEQ ID NO: 129486 - DNA, 17 bp, Arabidopsis thaliana
gtttgcgggttttgatg

SEQ ID NO: 129487 - DNA, 17 bp, Arabidopsis thaliana
gtttgcggtgtgagtga

SEQ ID NO: 129488 - DNA, 17 bp, Arabidopsis thaliana
gtttgcggttgcgaacg

SEQ ID NO: 129489 - DNA, 17 bp, Arabidopsis thaliana
gtttgcggttgcgagcg

SEQ ID NO: 129490 - DNA, 17 bp, Arabidopsis thaliana
gtttgcggttgcggcgg

SEQ ID NO: 129491 - DNA, 17 bp, Arabidopsis thaliana
gtttgcggttgcgggcg

SEQ ID NO: 129492 - DNA, 17 bp, Arabidopsis thaliana
gtttgcggttgctggcg

SEQ ID NO: 129493 - DNA, 17 bp, Arabidopsis thaliana
gtttgcgtaggtgtgtg

SEQ ID NO: 129494 - DNA, 17 bp, Arabidopsis thaliana
gtttgcgtcaacgatta

SEQ ID NO: 129495 - DNA, 17 bp, Arabidopsis thaliana
gtttgcgtccacataca

SEQ ID NO: 129496 - DNA, 17 bp, Arabidopsis thaliana
gtttgcgttcgcgcagc

SEQ ID NO: 129497 - DNA, 17 bp, Arabidopsis thaliana
gtttgcgttgactcggt

SEQ ID NO: 129498 - DNA, 17 bp, Arabidopsis thaliana
gtttgctcgcggtggtc

SEQ ID NO: 129499 - DNA, 17 bp, Arabidopsis thaliana
gtttgctcgtggcaaat

SEQ ID NO: 129500 - DNA, 17 bp, Arabidopsis thaliana
gtttgctctgccatata

SEQ ID NO: 129501 - DNA, 17 bp, Arabidopsis thaliana
gtttgctgaaggtgtag

SEQ ID NO: 129502 - DNA, 17 bp, Arabidopsis thaliana
gtttgctgagcgtctag

SEQ ID NO: 129503 - DNA, 17 bp, Arabidopsis thaliana
gtttgctgagctaccct

SEQ ID NO: 129504 - DNA, 17 bp, Arabidopsis thaliana
gtttgcttccacaacct

SEQ ID NO: 129505 - DNA, 17 bp, Arabidopsis thaliana
gtttgcttccctttcct

SEQ ID NO: 129506 - DNA, 17 bp, Arabidopsis thaliana
gtttgcttgtcgctggt

SEQ ID NO: 129507 - DNA, 17 bp, Arabidopsis thaliana
gtttgcttttggttgtg

SEQ ID NO: 129508 - DNA, 17 bp, Arabidopsis thaliana
gtttggaaaattcgtgc

SEQ ID NO: 129509 - DNA, 17 bp, Arabidopsis thaliana
gtttggaataggcttgt

SEQ ID NO: 129510 - DNA, 17 bp, Arabidopsis thaliana
gtttggaatccgtattg

SEQ ID NO: 129511 - DNA, 17 bp, Arabidopsis thaliana
gtttggaatcgctaacg

SEQ ID NO: 129512 - DNA, 17 bp, Arabidopsis thaliana
gtttggaatcggtgttt

SEQ ID NO: 129513 - DNA, 17 bp, Arabidopsis thaliana
gtttggaatcttctggg

SEQ ID NO: 129514 - DNA, 17 bp, Arabidopsis thaliana
gtttggacaaaagatga

SEQ ID NO: 129515 - DNA, 17 bp, Arabidopsis thaliana
gtttggacaggtatcga

SEQ ID NO: 129516 - DNA, 17 bp, Arabidopsis thaliana
gtttggaccatcgtcta

SEQ ID NO: 129517 - DNA, 17 bp, Arabidopsis thaliana
gtttggaccgcagtaac

SEQ ID NO: 129518 - DNA, 17 bp, Arabidopsis thaliana
gtttggaccgctgtaat

SEQ ID NO: 129519 - DNA, 17 bp, Arabidopsis thaliana
gtttggacctacgatca

SEQ ID NO: 129520 - DNA, 17 bp, Arabidopsis thaliana
gtttggacgtttgggac

SEQ ID NO: 129521 - DNA, 17 bp, Arabidopsis thaliana
gtttggactcaagatga

SEQ ID NO: 129522 - DNA, 17 bp, Arabidopsis thaliana
gtttggactgaattcat

SEQ ID NO: 129523 - DNA, 17 bp, Arabidopsis thaliana
gtttggacttggggggc

SEQ ID NO: 129524 - DNA, 17 bp, Arabidopsis thaliana
gtttggagacccgctat

SEQ ID NO: 129525 - DNA, 17 bp, Arabidopsis thaliana
gtttggatacctattcg

SEQ ID NO: 129526 - DNA, 17 bp, Arabidopsis thaliana
gtttggatctgactctg

SEQ ID NO: 129527 - DNA, 17 bp, Arabidopsis thaliana
gtttggatgatgagctg

SEQ ID NO: 129528 - DNA, 17 bp, Arabidopsis thaliana
gtttggattgggtaggt

SEQ ID NO: 129529 - DNA, 17 bp, Arabidopsis thaliana
gtttggatttgggtcaa

SEQ ID NO: 129530 - DNA, 17 bp, Arabidopsis thaliana
gtttggcaggacgggtt

SEQ ID NO: 129531 - DNA, 17 bp, Arabidopsis thaliana
gtttggcaggacgttac

SEQ ID NO: 129532 - DNA, 17 bp, Arabidopsis thaliana
gtttggcaggacgttag

SEQ ID NO: 129533 - DNA, 17 bp, Arabidopsis thaliana
gtttggcaggacgttgc

SEQ ID NO: 129534 - DNA, 17 bp, Arabidopsis thaliana
gtttggcatttcggaat

SEQ ID NO: 129535 - DNA, 17 bp, Arabidopsis thaliana
gtttggccatttggatg

SEQ ID NO: 129536 - DNA, 17 bp, Arabidopsis thaliana
gtttggcctaaactgaa

SEQ ID NO: 129537 - DNA, 17 bp, Arabidopsis thaliana
gtttggcgactcattga

SEQ ID NO: 129538 - DNA, 17 bp, Arabidopsis thaliana
gtttggcgggacgggtt

SEQ ID NO: 129539 - DNA, 17 bp, Arabidopsis thaliana
gtttggcgggatgagtt

SEQ ID NO: 129540 - DNA, 17 bp, Arabidopsis thaliana
gtttggcgggcctgctg

SEQ ID NO: 129541 - DNA, 17 bp, Arabidopsis thaliana
gtttggctaagcacttt

SEQ ID NO: 129542 - DNA, 17 bp, Arabidopsis thaliana
gtttggctctatttggc

SEQ ID NO: 129543 - DNA, 17 bp, Arabidopsis thaliana
gtttggctgatgcggtt

SEQ ID NO: 129544 - DNA, 17 bp, Arabidopsis thaliana
gtttggctggggcggca

SEQ ID NO: 129545 - DNA, 17 bp, Arabidopsis thaliana
gtttggcttggcttttt

SEQ ID NO: 129546 - DNA, 17 bp, Arabidopsis thaliana
gtttggctttccgtgga

SEQ ID NO: 129547 - DNA, 17 bp, Arabidopsis thaliana
gtttgggaaatctgtca

SEQ ID NO: 129548 - DNA, 17 bp, Arabidopsis thaliana
gtttgggaaccaacttt

SEQ ID NO: 129549 - DNA, 17 bp, Arabidopsis thaliana
gtttgggaagaagtcag

SEQ ID NO: 129550 - DNA, 17 bp, Arabidopsis thaliana
gtttgggaatgcagccc

SEQ ID NO: 129551 - DNA, 17 bp, Arabidopsis thaliana
gtttgggacagtacact

SEQ ID NO: 129552 - DNA, 17 bp, Arabidopsis thaliana
gtttgggactcagatca

SEQ ID NO: 129553 - DNA, 17 bp, Arabidopsis thaliana
gtttgggacttatttac

SEQ ID NO: 129554 - DNA, 17 bp, Arabidopsis thaliana
gtttgggattgtgacac

SEQ ID NO: 129555 - DNA, 17 bp, Arabidopsis thaliana
gtttgggctctatctgg

SEQ ID NO: 129556 - DNA, 17 bp, Arabidopsis thaliana
gtttgggcttggaggcc

SEQ ID NO: 129557 - DNA, 17 bp, Arabidopsis thaliana
gtttggggcttggtcgg

SEQ ID NO: 129558 - DNA, 17 bp, Arabidopsis thaliana
gtttggggtgtgtccgt

SEQ ID NO: 129559 - DNA, 17 bp, Arabidopsis thaliana
gtttgggtcaactatgg

SEQ ID NO: 129560 - DNA, 17 bp, Arabidopsis thaliana
gtttgggtcagtttgca

SEQ ID NO: 129561 - DNA, 17 bp, Arabidopsis thaliana
gtttgggtcatgtcttt

SEQ ID NO: 129562 - DNA, 17 bp, Arabidopsis thaliana
gtttgggttagctacaa

SEQ ID NO: 129563 - DNA, 17 bp, Arabidopsis thaliana
gtttgggtttccgattg

SEQ ID NO: 129564 - DNA, 17 bp, Arabidopsis thaliana
gtttgggtttgggcctg

SEQ ID NO: 129565 - DNA, 17 bp, Arabidopsis thaliana
gtttgggtttgggtcaa

SEQ ID NO: 129566 - DNA, 17 bp, Arabidopsis thaliana
gtttgggtttgggtttg

SEQ ID NO: 129567 - DNA, 17 bp, Arabidopsis thaliana
gtttggtatgcagggcc

SEQ ID NO: 129568 - DNA, 17 bp, Arabidopsis thaliana
gtttggtcatgatgtgg

SEQ ID NO: 129569 - DNA, 17 bp, Arabidopsis thaliana
gtttggtctctccttct

SEQ ID NO: 129570 - DNA, 17 bp, Arabidopsis thaliana
gtttggtgacctgcgaa

SEQ ID NO: 129571 - DNA, 17 bp, Arabidopsis thaliana
gtttggtgattttgaac

SEQ ID NO: 129572 - DNA, 17 bp, Arabidopsis thaliana
gtttggtgccgacaacc

SEQ ID NO: 129573 - DNA, 17 bp, Arabidopsis thaliana
gtttggtggatgtgcat

SEQ ID NO: 129574 - DNA, 17 bp, Arabidopsis thaliana
gtttggttactattcga

SEQ ID NO: 129575 - DNA, 17 bp, Arabidopsis thaliana
gtttggttagacggaat

SEQ ID NO: 129576 - DNA, 17 bp, Arabidopsis thaliana
gtttggttcaccgcacc

SEQ ID NO: 129577 - DNA, 17 bp, Arabidopsis thaliana
gtttggttgccactgga

SEQ ID NO: 129578 - DNA, 17 bp, Arabidopsis thaliana
gtttggtttcgcttcgg

SEQ ID NO: 129579 - DNA, 17 bp, Arabidopsis thaliana
gtttggtttcggctctg

SEQ ID NO: 129580 - DNA, 17 bp, Arabidopsis thaliana
gtttggtttcggttcgg

SEQ ID NO: 129581 - DNA, 17 bp, Arabidopsis thaliana
gtttggtttcttgtaag

SEQ ID NO: 129582 - DNA, 17 bp, Arabidopsis thaliana
gtttgtaagaccttgct

SEQ ID NO: 129583 - DNA, 17 bp, Arabidopsis thaliana
gtttgtaagtgccaatc

SEQ ID NO: 129584 - DNA, 17 bp, Arabidopsis thaliana
gtttgtaagtgtggctt

SEQ ID NO: 129585 - DNA, 17 bp, Arabidopsis thaliana
gtttgtacatcacgctc

SEQ ID NO: 129586 - DNA, 17 bp, Arabidopsis thaliana
gtttgtacatctcgctc

SEQ ID NO: 129587 - DNA, 17 bp, Arabidopsis thaliana
gtttgtacccgggctca

SEQ ID NO: 129588 - DNA, 17 bp, Arabidopsis thaliana
gtttgtaccgaaccgtt

SEQ ID NO: 129589 - DNA, 17 bp, Arabidopsis thaliana
gtttgtaccgcagtaac

SEQ ID NO: 129590 - DNA, 17 bp, Arabidopsis thaliana
gtttgtaccgcagttac

SEQ ID NO: 129591 - DNA, 17 bp, Arabidopsis thaliana
gtttgtacgtacggatc

SEQ ID NO: 129592 - DNA, 17 bp, Arabidopsis thaliana
gtttgtcaacgccgaag

SEQ ID NO: 129593 - DNA, 17 bp, Arabidopsis thaliana
gtttgtcaggtggattc

SEQ ID NO: 129594 - DNA, 17 bp, Arabidopsis thaliana
gtttgtcagttgggcct

SEQ ID NO: 129595 - DNA, 17 bp, Arabidopsis thaliana
gtttgtcatccgagtga

SEQ ID NO: 129596 - DNA, 17 bp, Arabidopsis thaliana
gtttgtccaacagttgt

SEQ ID NO: 129597 - DNA, 17 bp, Arabidopsis thaliana
gtttgtccatccacatg

SEQ ID NO: 129598 - DNA, 17 bp, Arabidopsis thaliana
gtttgtccattgtgccg

SEQ ID NO: 129599 - DNA, 17 bp, Arabidopsis thaliana
gtttgtcccaggctagt

SEQ ID NO: 129600 - DNA, 17 bp, Arabidopsis thaliana
gtttgtccgcttgaacc

SEQ ID NO: 129601 - DNA, 17 bp, Arabidopsis thaliana
gtttgtcgagatggtaa

SEQ ID NO: 129602 - DNA, 17 bp, Arabidopsis thaliana
gtttgtcgtgtgcgagc

SEQ ID NO: 129603 - DNA, 17 bp, Arabidopsis thaliana
gtttgtctcataaattg

SEQ ID NO: 129604 - DNA, 17 bp, Arabidopsis thaliana
gtttgtctgtcggttcg

SEQ ID NO: 129605 - DNA, 17 bp, Arabidopsis thaliana
gtttgtcttctattcgg

SEQ ID NO: 129606 - DNA, 17 bp, Arabidopsis thaliana
gtttgtgaacttattga

SEQ ID NO: 129607 - DNA, 17 bp, Arabidopsis thaliana
gtttgtgaagttactag

SEQ ID NO: 129608 - DNA, 17 bp, Arabidopsis thaliana
gtttgtgaatccggcca

SEQ ID NO: 129609 - DNA, 17 bp, Arabidopsis thaliana
gtttgtgacgcactgtg

SEQ ID NO: 129610 - DNA, 17 bp, Arabidopsis thaliana
gtttgtgactaagagcc

SEQ ID NO: 129611 - DNA, 17 bp, Arabidopsis thaliana
gtttgtgagaccaaatg

SEQ ID NO: 129612 - DNA, 17 bp, Arabidopsis thaliana
gtttgtgattccggcca

SEQ ID NO: 129613 - DNA, 17 bp, Arabidopsis thaliana
gtttgtgccatggcttc

SEQ ID NO: 129614 - DNA, 17 bp, Arabidopsis thaliana
gtttgtgccatggcttt

SEQ ID NO: 129615 - DNA, 17 bp, Arabidopsis thaliana
gtttgtgccatttctag

SEQ ID NO: 129616 - DNA, 17 bp, Arabidopsis thaliana
gtttgtgcgccaaattc

SEQ ID NO: 129617 - DNA, 17 bp, Arabidopsis thaliana
gtttgtgcgctcaggcc

SEQ ID NO: 129618 - DNA, 17 bp, Arabidopsis thaliana
gtttgtgctatggcttc

SEQ ID NO: 129619 - DNA, 17 bp, Arabidopsis thaliana
gtttgtgctatggcttt

SEQ ID NO: 129620 - DNA, 17 bp, Arabidopsis thaliana
gtttgtgctgaaccgct

SEQ ID NO: 129621 - DNA, 17 bp, Arabidopsis thaliana
gtttgtgctggagcaat

SEQ ID NO: 129622 - DNA, 17 bp, Arabidopsis thaliana
gtttgtgtcggccattg

SEQ ID NO: 129623 - DNA, 17 bp, Arabidopsis thaliana
gtttgtgttacgccgct

SEQ ID NO: 129624 - DNA, 17 bp, Arabidopsis thaliana
gtttgtgttgtgatagg

SEQ ID NO: 129625 - DNA, 17 bp, Arabidopsis thaliana
gtttgttaactcgattc

SEQ ID NO: 129626 - DNA, 17 bp, Arabidopsis thaliana
gtttgttactggaccac

SEQ ID NO: 129627 - DNA, 17 bp, Arabidopsis thaliana
gtttgttagttatgggt

SEQ ID NO: 129628 - DNA, 17 bp, Arabidopsis thaliana
gtttgttcaccggagcc

SEQ ID NO: 129629 - DNA, 17 bp, Arabidopsis thaliana
gtttgttcacggatgta

SEQ ID NO: 129630 - DNA, 17 bp, Arabidopsis thaliana
gtttgttcatccaaatg

SEQ ID NO: 129631 - DNA, 17 bp, Arabidopsis thaliana
gtttgttcatccatttt

SEQ ID NO: 129632 - DNA, 17 bp, Arabidopsis thaliana
gtttgttcgatgaaacc

SEQ ID NO: 129633 - DNA, 17 bp, Arabidopsis thaliana
gtttgttcgtggcaact

SEQ ID NO: 129634 - DNA, 17 bp, Arabidopsis thaliana
gtttgttctattgggtt

SEQ ID NO: 129635 - DNA, 17 bp, Arabidopsis thaliana
gtttgttctgaccctac

SEQ ID NO: 129636 - DNA, 17 bp, Arabidopsis thaliana
gtttgttctgttttcgg

SEQ ID NO: 129637 - DNA, 17 bp, Arabidopsis thaliana
gtttgttgaacttgtgc

SEQ ID NO: 129638 - DNA, 17 bp, Arabidopsis thaliana
gtttgttgtagttcaca

SEQ ID NO: 129639 - DNA, 17 bp, Arabidopsis thaliana
gtttgttgtttcactgg

SEQ ID NO: 129640 - DNA, 17 bp, Arabidopsis thaliana
gtttgtttcccggctgg

SEQ ID NO: 129641 - DNA, 17 bp, Arabidopsis thaliana
gtttgtttctattggtg

SEQ ID NO: 129642 - DNA, 17 bp, Arabidopsis thaliana
gtttgtttgagccgagc

SEQ ID NO: 129643 - DNA, 17 bp, Arabidopsis thaliana
gtttgtttgatcgccgt

SEQ ID NO: 129644 - DNA, 17 bp, Arabidopsis thaliana
gtttgtttttgaatacc

SEQ ID NO: 129645 - DNA, 17 bp, Arabidopsis thaliana
gttttaaccttcaagtt

SEQ ID NO: 129646 - DNA, 17 bp, Arabidopsis thaliana
gttttacagatttgcac

SEQ ID NO: 129647 - DNA, 17 bp, Arabidopsis thaliana
gttttaccatctggtgc

SEQ ID NO: 129648 - DNA, 17 bp, Arabidopsis thaliana
gttttaccattacgggg

SEQ ID NO: 129649 - DNA, 17 bp, Arabidopsis thaliana
gttttaccatttgtccc

SEQ ID NO: 129650 - DNA, 17 bp, Arabidopsis thaliana
gttttactttggcactt

SEQ ID NO: 129651 - DNA, 17 bp, Arabidopsis thaliana
gttttagatttcgaatg

SEQ ID NO: 129652 - DNA, 17 bp, Arabidopsis thaliana
gttttagccgacggatt

SEQ ID NO: 129653 - DNA, 17 bp, Arabidopsis thaliana
gttttagctgagactgt

SEQ ID NO: 129654 - DNA, 17 bp, Arabidopsis thaliana
gttttagcttgccaact

SEQ ID NO: 129655 - DNA, 17 bp, Arabidopsis thaliana
gttttagtccatcctgt

SEQ ID NO: 129656 - DNA, 17 bp, Arabidopsis thaliana
gttttagtgtggacttc

SEQ ID NO: 129657 - DNA, 17 bp, Arabidopsis thaliana
gttttagttgcgggctg

SEQ ID NO: 129658 - DNA, 17 bp, Arabidopsis thaliana
gttttatccctttgtcg

SEQ ID NO: 129659 - DNA, 17 bp, Arabidopsis thaliana
gttttatcgactgaccg

SEQ ID NO: 129660 - DNA, 17 bp, Arabidopsis thaliana
gttttatgattggttaa

SEQ ID NO: 129661 - DNA, 17 bp, Arabidopsis thaliana
gttttatgttgcggtgc

SEQ ID NO: 129662 - DNA, 17 bp, Arabidopsis thaliana
gttttattcgtacactt

SEQ ID NO: 129663 - DNA, 17 bp, Arabidopsis thaliana
gttttatttgcagtgat

SEQ ID NO: 129664 - DNA, 17 bp, Arabidopsis thaliana
gttttattttcagggat

SEQ ID NO: 129665 - DNA, 17 bp, Arabidopsis thaliana
gttttattttcaggggt

SEQ ID NO: 129666 - DNA, 17 bp, Arabidopsis thaliana
gttttcaaatcctactt

SEQ ID NO: 129667 - DNA, 17 bp, Arabidopsis thaliana
gttttcaactaggtcac

SEQ ID NO: 129668 - DNA, 17 bp, Arabidopsis thaliana
gttttcaagtttagacc

SEQ ID NO: 129669 - DNA, 17 bp, Arabidopsis thaliana
gttttcaatggtgagat

SEQ ID NO: 129670 - DNA, 17 bp, Arabidopsis thaliana
gttttcaattccgatcg

SEQ ID NO: 129671 - DNA, 17 bp, Arabidopsis thaliana
gttttcacaatcgagga

SEQ ID NO: 129672 - DNA, 17 bp, Arabidopsis thaliana
gttttcacgccgattct

SEQ ID NO: 129673 - DNA, 17 bp, Arabidopsis thaliana
gttttcacggcgagtaa

SEQ ID NO: 129674 - DNA, 17 bp, Arabidopsis thaliana
gttttcactatcttcgc

SEQ ID NO: 129675 - DNA, 17 bp, Arabidopsis thaliana
gttttcagacctagggg

SEQ ID NO: 129676 - DNA, 17 bp, Arabidopsis thaliana
gttttcagagccatatt

SEQ ID NO: 129677 - DNA, 17 bp, Arabidopsis thaliana
gttttcagagcgcagtt

SEQ ID NO: 129678 - DNA, 17 bp, Arabidopsis thaliana
gttttcagatggcgact

SEQ ID NO: 129679 - DNA, 17 bp, Arabidopsis thaliana
gttttcagccagcctaa

SEQ ID NO: 129680 - DNA, 17 bp, Arabidopsis thaliana
gttttcaggagctatca

SEQ ID NO: 129681 - DNA, 17 bp, Arabidopsis thaliana
gttttcaggattgggct

SEQ ID NO: 129682 - DNA, 17 bp, Arabidopsis thaliana
gttttcagggaggatcg

SEQ ID NO: 129683 - DNA, 17 bp, Arabidopsis thaliana
gttttcagggtgtagcc

SEQ ID NO: 129684 - DNA, 17 bp, Arabidopsis thaliana
gttttcagtcgccagcg

SEQ ID NO: 129685 - DNA, 17 bp, Arabidopsis thaliana
gttttcagtttgggagg

SEQ ID NO: 129686 - DNA, 17 bp, Arabidopsis thaliana
gttttcatcgtcgtgac

SEQ ID NO: 129687 - DNA, 17 bp, Arabidopsis thaliana
gttttcatctcaagaag

SEQ ID NO: 129688 - DNA, 17 bp, Arabidopsis thaliana
gttttcatgccagatcc

SEQ ID NO: 129689 - DNA, 17 bp, Arabidopsis thaliana
gttttcatttgctgtgc

SEQ ID NO: 129690 - DNA, 17 bp, Arabidopsis thaliana
gttttccaaataagctg

SEQ ID NO: 129691 - DNA, 17 bp, Arabidopsis thaliana
gttttccaagtgtgacg

SEQ ID NO: 129692 - DNA, 17 bp, Arabidopsis thaliana
gttttccagaagatcat

SEQ ID NO: 129693 - DNA, 17 bp, Arabidopsis thaliana
gttttccagaatgctga

SEQ ID NO: 129694 - DNA, 17 bp, Arabidopsis thaliana
gttttccagacgactca

SEQ ID NO: 129695 - DNA, 17 bp, Arabidopsis thaliana
gttttccagcaacaagt

SEQ ID NO: 129696 - DNA, 17 bp, Arabidopsis thaliana
gttttccagtgttgcag

SEQ ID NO: 129697 - DNA, 17 bp, Arabidopsis thaliana
gttttccatacaccgag

SEQ ID NO: 129698 - DNA, 17 bp, Arabidopsis thaliana
gttttccatctctaagg

SEQ ID NO: 129699 - DNA, 17 bp, Arabidopsis thaliana
gttttccattcatccag

SEQ ID NO: 129700 - DNA, 17 bp, Arabidopsis thaliana
gttttccatttatgagc

SEQ ID NO: 129701 - DNA, 17 bp, Arabidopsis thaliana
gttttcccacaccgatc

SEQ ID NO: 129702 - DNA, 17 bp, Arabidopsis thaliana
gttttcccagggtaatt

SEQ ID NO: 129703 - DNA, 17 bp, Arabidopsis thaliana
gttttcccgtggggaag

SEQ ID NO: 129704 - DNA, 17 bp, Arabidopsis thaliana
gttttcccttaacggtt

SEQ ID NO: 129705 - DNA, 17 bp, Arabidopsis thaliana
gttttccgactaactac

SEQ ID NO: 129706 - DNA, 17 bp, Arabidopsis thaliana
gttttccgactaatgcc

SEQ ID NO: 129707 - DNA, 17 bp, Arabidopsis thaliana
gttttccgactacctac

SEQ ID NO: 129708 - DNA, 17 bp, Arabidopsis thaliana
gttttccgatcgggacg

SEQ ID NO: 129709 - DNA, 17 bp, Arabidopsis thaliana
gttttccgccgaatttt

SEQ ID NO: 129710 - DNA, 17 bp, Arabidopsis thaliana
gttttccgccggcttat

SEQ ID NO: 129711 - DNA, 17 bp, Arabidopsis thaliana
gttttccgccggctttg

SEQ ID NO: 129712 - DNA, 17 bp, Arabidopsis thaliana
gttttccgcggccgttc

SEQ ID NO: 129713 - DNA, 17 bp, Arabidopsis thaliana
gttttccggagagatgt

SEQ ID NO: 129714 - DNA, 17 bp, Arabidopsis thaliana
gttttccggattgcctc

SEQ ID NO: 129715 - DNA, 17 bp, Arabidopsis thaliana
gttttccggcaggtcgg

SEQ ID NO: 129716 - DNA, 17 bp, Arabidopsis thaliana
gttttccggcatgcata

SEQ ID NO: 129717 - DNA, 17 bp, Arabidopsis thaliana
gttttccggcgagtgag

SEQ ID NO: 129718 - DNA, 17 bp, Arabidopsis thaliana
gttttccggcgagtgat

SEQ ID NO: 129719 - DNA, 17 bp, Arabidopsis thaliana
gttttcctccagaatgc

SEQ ID NO: 129720 - DNA, 17 bp, Arabidopsis thaliana
gttttcctccattactg

SEQ ID NO: 129721 - DNA, 17 bp, Arabidopsis thaliana
gttttcctctgttttcg

SEQ ID NO: 129722 - DNA, 17 bp, Arabidopsis thaliana
gttttcctgtccagttt

SEQ ID NO: 129723 - DNA, 17 bp, Arabidopsis thaliana
gttttccttaccagatt

SEQ ID NO: 129724 - DNA, 17 bp, Arabidopsis thaliana
gttttccttagattcat

SEQ ID NO: 129725 - DNA, 17 bp, Arabidopsis thaliana
gttttccttcttagccc

SEQ ID NO: 129726 - DNA, 17 bp, Arabidopsis thaliana
gttttccttcttcggcg

SEQ ID NO: 129727 - DNA, 17 bp, Arabidopsis thaliana
gttttcgaaaaccgact

SEQ ID NO: 129728 - DNA, 17 bp, Arabidopsis thaliana
gttttcgaaaaccgcct

SEQ ID NO: 129729 - DNA, 17 bp, Arabidopsis thaliana
gttttcgaaaaccgtct

SEQ ID NO: 129730 - DNA, 17 bp, Arabidopsis thaliana
gttttcgaaaaccgttt

SEQ ID NO: 129731 - DNA, 17 bp, Arabidopsis thaliana
gttttcgaatcagcatt

SEQ ID NO: 129732 - DNA, 17 bp, Arabidopsis thaliana
gttttcgaccaggctta

SEQ ID NO: 129733 - DNA, 17 bp, Arabidopsis thaliana
gttttcgacctgattta

SEQ ID NO: 129734 - DNA, 17 bp, Arabidopsis thaliana
gttttcgacggacgtcc

SEQ ID NO: 129735 - DNA, 17 bp, Arabidopsis thaliana
gttttcgcatccggaat

SEQ ID NO: 129736 - DNA, 17 bp, Arabidopsis thaliana
gttttcgctcagtgact

SEQ ID NO: 129737 - DNA, 17 bp, Arabidopsis thaliana
gttttcgctcggagata

SEQ ID NO: 129738 - DNA, 17 bp, Arabidopsis thaliana
gttttcgctgaaccaat

SEQ ID NO: 129739 - DNA, 17 bp, Arabidopsis thaliana
gttttcggaaattacgg

SEQ ID NO: 129740 - DNA, 17 bp, Arabidopsis thaliana
gttttcggacctggagg

SEQ ID NO: 129741 - DNA, 17 bp, Arabidopsis thaliana
gttttcggcgtaagacc

SEQ ID NO: 129742 - DNA, 17 bp, Arabidopsis thaliana
gttttcgggatacggtt

SEQ ID NO: 129743 - DNA, 17 bp, Arabidopsis thaliana
gttttcggttggaccgc

SEQ ID NO: 129744 - DNA, 17 bp, Arabidopsis thaliana
gttttcgtaagcccgct

SEQ ID NO: 129745 - DNA, 17 bp, Arabidopsis thaliana
gttttcgtacaacatag

SEQ ID NO: 129746 - DNA, 17 bp, Arabidopsis thaliana
gttttcgtccggttaag

SEQ ID NO: 129747 - DNA, 17 bp, Arabidopsis thaliana
gttttcgtctgggtatg

SEQ ID NO: 129748 - DNA, 17 bp, Arabidopsis thaliana
gttttcgtcttgtccaa

SEQ ID NO: 129749 - DNA, 17 bp, Arabidopsis thaliana
gttttcgtgacttttta

SEQ ID NO: 129750 - DNA, 17 bp, Arabidopsis thaliana
gttttcgtgagttgcaa

SEQ ID NO: 129751 - DNA, 17 bp, Arabidopsis thaliana
gttttcgtgccaaatta

SEQ ID NO: 129752 - DNA, 17 bp, Arabidopsis thaliana
gttttcgtgccccacgg

SEQ ID NO: 129753 - DNA, 17 bp, Arabidopsis thaliana
gttttcgtggcagatca

SEQ ID NO: 129754 - DNA, 17 bp, Arabidopsis thaliana
gttttcgtggtttcgca

SEQ ID NO: 129755 - DNA, 17 bp, Arabidopsis thaliana
gttttcgttggaccgtt

SEQ ID NO: 129756 - DNA, 17 bp, Arabidopsis thaliana
gttttcgttttaggttc

SEQ ID NO: 129757 - DNA, 17 bp, Arabidopsis thaliana
gttttctaagcaagttt

SEQ ID NO: 129758 - DNA, 17 bp, Arabidopsis thaliana
gttttctaatgtaatcg

SEQ ID NO: 129759 - DNA, 17 bp, Arabidopsis thaliana
gttttctactgcgttga

SEQ ID NO: 129760 - DNA, 17 bp, Arabidopsis thaliana
gttttctactgtttccg

SEQ ID NO: 129761 - DNA, 17 bp, Arabidopsis thaliana
gttttctactttcacgc

SEQ ID NO: 129762 - DNA, 17 bp, Arabidopsis thaliana
gttttctatcaagtccc

SEQ ID NO: 129763 - DNA, 17 bp, Arabidopsis thaliana
gttttctatgcggcgca

SEQ ID NO: 129764 - DNA, 17 bp, Arabidopsis thaliana
gttttctatgtacccgt

SEQ ID NO: 129765 - DNA, 17 bp, Arabidopsis thaliana
gttttctccgaatttcg

SEQ ID NO: 129766 - DNA, 17 bp, Arabidopsis thaliana
gttttctccggtgtctg

SEQ ID NO: 129767 - DNA, 17 bp, Arabidopsis thaliana
gttttctcgcaagacct

SEQ ID NO: 129768 - DNA, 17 bp, Arabidopsis thaliana
gttttctcggtttcttc

SEQ ID NO: 129769 - DNA, 17 bp, Arabidopsis thaliana
gttttctctatagcaca

SEQ ID NO: 129770 - DNA, 17 bp, Arabidopsis thaliana
gttttctctatgtgcaa

SEQ ID NO: 129771 - DNA, 17 bp, Arabidopsis thaliana
gttttctctcctctaaa

SEQ ID NO: 129772 - DNA, 17 bp, Arabidopsis thaliana
gttttctctcgggttga

SEQ ID NO: 129773 - DNA, 17 bp, Arabidopsis thaliana
gttttctctctgaccaa

SEQ ID NO: 129774 - DNA, 17 bp, Arabidopsis thaliana
gttttctcttcacattt

SEQ ID NO: 129775 - DNA, 17 bp, Arabidopsis thaliana
gttttctgacggaccga

SEQ ID NO: 129776 - DNA, 17 bp, Arabidopsis thaliana
gttttctgagccgaaag

SEQ ID NO: 129777 - DNA, 17 bp, Arabidopsis thaliana
gttttctgcaaagcaaa

SEQ ID NO: 129778 - DNA, 17 bp, Arabidopsis thaliana
gttttctgcacgttcgc

SEQ ID NO: 129779 - DNA, 17 bp, Arabidopsis thaliana
gttttctgcaggtaatg

SEQ ID NO: 129780 - DNA, 17 bp, Arabidopsis thaliana
gttttctgcatgttcac

SEQ ID NO: 129781 - DNA, 17 bp, Arabidopsis thaliana
gttttctgccggttttg

SEQ ID NO: 129782 - DNA, 17 bp, Arabidopsis thaliana
gttttctgctaagatcg

SEQ ID NO: 129783 - DNA, 17 bp, Arabidopsis thaliana
gttttctgctattgttg

SEQ ID NO: 129784 - DNA, 17 bp, Arabidopsis thaliana
gttttctgggattcgct

SEQ ID NO: 129785 - DNA, 17 bp, Arabidopsis thaliana
gttttctggtttgtgct

SEQ ID NO: 129786 - DNA, 17 bp, Arabidopsis thaliana
gttttcttgtagtctgg

SEQ ID NO: 129787 - DNA, 17 bp, Arabidopsis thaliana
gttttctttcttcttgt

SEQ ID NO: 129788 - DNA, 17 bp, Arabidopsis thaliana
gttttctttgccaacgt

SEQ ID NO: 129789 - DNA, 17 bp, Arabidopsis thaliana
gttttctttgtaacgcc

SEQ ID NO: 129790 - DNA, 17 bp, Arabidopsis thaliana
gttttcttttgcgcaat

SEQ ID NO: 129791 - DNA, 17 bp, Arabidopsis thaliana
gttttctttttataccc

SEQ ID NO: 129792 - DNA, 17 bp, Arabidopsis thaliana
gttttgaaaggtgcgaa

SEQ ID NO: 129793 - DNA, 17 bp, Arabidopsis thaliana
gttttgaacatgggttg

SEQ ID NO: 129794 - DNA, 17 bp, Arabidopsis thaliana
gttttgacacggacatt

SEQ ID NO: 129795 - DNA, 17 bp, Arabidopsis thaliana
gttttgacagtaatgtg

SEQ ID NO: 129796 - DNA, 17 bp, Arabidopsis thaliana
gttttgaccctacatgc

SEQ ID NO: 129797 - DNA, 17 bp, Arabidopsis thaliana
gttttgaccgtccgatc

SEQ ID NO: 129798 - DNA, 17 bp, Arabidopsis thaliana
gttttgacgttcgtttg

SEQ ID NO: 129799 - DNA, 17 bp, Arabidopsis thaliana
gttttgagacttggtgg

SEQ ID NO: 129800 - DNA, 17 bp, Arabidopsis thaliana
gttttgagaggtgcgaa

SEQ ID NO: 129801 - DNA, 17 bp, Arabidopsis thaliana
gttttgaggagtgaatt

SEQ ID NO: 129802 - DNA, 17 bp, Arabidopsis thaliana
gttttgagtgcggtttt

SEQ ID NO: 129803 - DNA, 17 bp, Arabidopsis thaliana
gttttgatagtactgtt

SEQ ID NO: 129804 - DNA, 17 bp, Arabidopsis thaliana
gttttgatcttactcgg

SEQ ID NO: 129805 - DNA, 17 bp, Arabidopsis thaliana
gttttgatgatgtctgt

SEQ ID NO: 129806 - DNA, 17 bp, Arabidopsis thaliana
gttttgatgtgtctgta

SEQ ID NO: 129807 - DNA, 17 bp, Arabidopsis thaliana
gttttgattcagaacca

SEQ ID NO: 129808 - DNA, 17 bp, Arabidopsis thaliana
gttttgatttcacggag

SEQ ID NO: 129809 - DNA, 17 bp, Arabidopsis thaliana
gttttgattttgtgggc

SEQ ID NO: 129810 - DNA, 17 bp, Arabidopsis thaliana
gttttgcaaggaactgt

SEQ ID NO: 129811 - DNA, 17 bp, Arabidopsis thaliana
gttttgcactattccga

SEQ ID NO: 129812 - DNA, 17 bp, Arabidopsis thaliana
gttttgcaggagttagt

SEQ ID NO: 129813 - DNA, 17 bp, Arabidopsis thaliana
gttttgcaggcttcaga

SEQ ID NO: 129814 - DNA, 17 bp, Arabidopsis thaliana
gttttgcagttctttca

SEQ ID NO: 129815 - DNA, 17 bp, Arabidopsis thaliana
gttttgcccgcgcagga

SEQ ID NO: 129816 - DNA, 17 bp, Arabidopsis thaliana
gttttgcccttgtgttg

SEQ ID NO: 129817 - DNA, 17 bp, Arabidopsis thaliana
gttttgccgtctggtat

SEQ ID NO: 129818 - DNA, 17 bp, Arabidopsis thaliana
gttttgcctaaggttgt

SEQ ID NO: 129819 - DNA, 17 bp, Arabidopsis thaliana
gttttgccttccgacat

SEQ ID NO: 129820 - DNA, 17 bp, Arabidopsis thaliana
gttttgccttccgcagt

SEQ ID NO: 129821 - DNA, 17 bp, Arabidopsis thaliana
gttttgccttccggatg

SEQ ID NO: 129822 - DNA, 17 bp, Arabidopsis thaliana
gttttgcctttggttcc

SEQ ID NO: 129823 - DNA, 17 bp, Arabidopsis thaliana
gttttgcgagctcggaa

SEQ ID NO: 129824 - DNA, 17 bp, Arabidopsis thaliana
gttttgcgatgtaacag

SEQ ID NO: 129825 - DNA, 17 bp, Arabidopsis thaliana
gttttgcgcgacatatg

SEQ ID NO: 129826 - DNA, 17 bp, Arabidopsis thaliana
gttttgcgctacgggag

SEQ ID NO: 129827 - DNA, 17 bp, Arabidopsis thaliana
gttttgcggcgaaaatt

SEQ ID NO: 129828 - DNA, 17 bp, Arabidopsis thaliana
gttttgcgggaaaattt

SEQ ID NO: 129829 - DNA, 17 bp, Arabidopsis thaliana
gttttgcgggaagccga

SEQ ID NO: 129830 - DNA, 17 bp, Arabidopsis thaliana
gttttgcgggacgggtt

SEQ ID NO: 129831 - DNA, 17 bp, Arabidopsis thaliana
gttttgcggtacgggag

SEQ ID NO: 129832 - DNA, 17 bp, Arabidopsis thaliana
gttttgcggtgcaggag

SEQ ID NO: 129833 - DNA, 17 bp, Arabidopsis thaliana
gttttgcggtgcgggac

SEQ ID NO: 129834 - DNA, 17 bp, Arabidopsis thaliana
gttttgcggtgcgggag

SEQ ID NO: 129835 - DNA, 17 bp, Arabidopsis thaliana
gttttgcgtgttgacta

SEQ ID NO: 129836 - DNA, 17 bp, Arabidopsis thaliana
gttttgcgttacgggag

SEQ ID NO: 129837 - DNA, 17 bp, Arabidopsis thaliana
gttttgcgttttcaaca

SEQ ID NO: 129838 - DNA, 17 bp, Arabidopsis thaliana
gttttgcgttttcaact

SEQ ID NO: 129839 - DNA, 17 bp, Arabidopsis thaliana
gttttgctaagcacttt

SEQ ID NO: 129840 - DNA, 17 bp, Arabidopsis thaliana
gttttgctcatttgcgc

SEQ ID NO: 129841 - DNA, 17 bp, Arabidopsis thaliana
gttttgctccacaagat

SEQ ID NO: 129842 - DNA, 17 bp, Arabidopsis thaliana
gttttgctccagaatgc

SEQ ID NO: 129843 - DNA, 17 bp, Arabidopsis thaliana
gttttgctccattgtat

SEQ ID NO: 129844 - DNA, 17 bp, Arabidopsis thaliana
gttttgctctactgtga

SEQ ID NO: 129845 - DNA, 17 bp, Arabidopsis thaliana
gttttgctctactgtta

SEQ ID NO: 129846 - DNA, 17 bp, Arabidopsis thaliana
gttttgctctagaatgc

SEQ ID NO: 129847 - DNA, 17 bp, Arabidopsis thaliana
gttttgctgcagaatca

SEQ ID NO: 129848 - DNA, 17 bp, Arabidopsis thaliana
gttttgctgtcggcgct

SEQ ID NO: 129849 - DNA, 17 bp, Arabidopsis thaliana
gttttgcttccaaatag

SEQ ID NO: 129850 - DNA, 17 bp, Arabidopsis thaliana
gttttgcttgcttctgg

SEQ ID NO: 129851 - DNA, 17 bp, Arabidopsis thaliana
gttttgcttggttgcga

SEQ ID NO: 129852 - DNA, 17 bp, Arabidopsis thaliana
gttttggaaaacgggac

SEQ ID NO: 129853 - DNA, 17 bp, Arabidopsis thaliana
gttttggacaggtatcg

SEQ ID NO: 129854 - DNA, 17 bp, Arabidopsis thaliana
gttttggactccgatca

SEQ ID NO: 129855 - DNA, 17 bp, Arabidopsis thaliana
gttttggactcgaatat

SEQ ID NO: 129856 - DNA, 17 bp, Arabidopsis thaliana
gttttggactctttgct

SEQ ID NO: 129857 - DNA, 17 bp, Arabidopsis thaliana
gttttggactgaaaccc

SEQ ID NO: 129858 - DNA, 17 bp, Arabidopsis thaliana
gttttggactgaagccc

SEQ ID NO: 129859 - DNA, 17 bp, Arabidopsis thaliana
gttttggactgaagctc

SEQ ID NO: 129860 - DNA, 17 bp, Arabidopsis thaliana
gttttggatcacggttt

SEQ ID NO: 129861 - DNA, 17 bp, Arabidopsis thaliana
gttttggattgacgatg

SEQ ID NO: 129862 - DNA, 17 bp, Arabidopsis thaliana
gttttggcactattcga

SEQ ID NO: 129863 - DNA, 17 bp, Arabidopsis thaliana
gttttggcaggaaatca

SEQ ID NO: 129864 - DNA, 17 bp, Arabidopsis thaliana
gttttggccaacgaatt

SEQ ID NO: 129865 - DNA, 17 bp, Arabidopsis thaliana
gttttggcccaggaaag

SEQ ID NO: 129866 - DNA, 17 bp, Arabidopsis thaliana
gttttggccgacgaatt

SEQ ID NO: 129867 - DNA, 17 bp, Arabidopsis thaliana
gttttggccggctgatt

SEQ ID NO: 129868 - DNA, 17 bp, Arabidopsis thaliana
gttttggccgttgctac

SEQ ID NO: 129869 - DNA, 17 bp, Arabidopsis thaliana
gttttggcctatccatg

SEQ ID NO: 129870 - DNA, 17 bp, Arabidopsis thaliana
gttttggcggaaaaatg

SEQ ID NO: 129871 - DNA, 17 bp, Arabidopsis thaliana
gttttggcgggaaaatg

SEQ ID NO: 129872 - DNA, 17 bp, Arabidopsis thaliana
gttttggcgtctggaga

SEQ ID NO: 129873 - DNA, 17 bp, Arabidopsis thaliana
gttttggctgacacaca

SEQ ID NO: 129874 - DNA, 17 bp, Arabidopsis thaliana
gttttggcttcatcttc

SEQ ID NO: 129875 - DNA, 17 bp, Arabidopsis thaliana
gttttgggaattgtgac

SEQ ID NO: 129876 - DNA, 17 bp, Arabidopsis thaliana
gttttgggaattgtgat

SEQ ID NO: 129877 - DNA, 17 bp, Arabidopsis thaliana
gttttgggactgagatg

SEQ ID NO: 129878 - DNA, 17 bp, Arabidopsis thaliana
gttttgggatcatactg

SEQ ID NO: 129879 - DNA, 17 bp, Arabidopsis thaliana
gttttgggatcgcgcat

SEQ ID NO: 129880 - DNA, 17 bp, Arabidopsis thaliana
gttttgggcctgggagg

SEQ ID NO: 129881 - DNA, 17 bp, Arabidopsis thaliana
gttttgggcctgggggt

SEQ ID NO: 129882 - DNA, 17 bp, Arabidopsis thaliana
gttttgggctggaagaa

SEQ ID NO: 129883 - DNA, 17 bp, Arabidopsis thaliana
gttttgggtctgggatg

SEQ ID NO: 129884 - DNA, 17 bp, Arabidopsis thaliana
gttttgggtgcagtttt

SEQ ID NO: 129885 - DNA, 17 bp, Arabidopsis thaliana
gttttgggtgcggtgta

SEQ ID NO: 129886 - DNA, 17 bp, Arabidopsis thaliana
gttttgggtgcggtgtt

SEQ ID NO: 129887 - DNA, 17 bp, Arabidopsis thaliana
gttttgggtgcggtttt

SEQ ID NO: 129888 - DNA, 17 bp, Arabidopsis thaliana
gttttgggtgtggttaa

SEQ ID NO: 129889 - DNA, 17 bp, Arabidopsis thaliana
gttttggtaacaatcgg

SEQ ID NO: 129890 - DNA, 17 bp, Arabidopsis thaliana
gttttggtatgcgtttg

SEQ ID NO: 129891 - DNA, 17 bp, Arabidopsis thaliana
gttttggtgtgtgcgtt

SEQ ID NO: 129892 - DNA, 17 bp, Arabidopsis thaliana
gttttggttacgggttg

SEQ ID NO: 129893 - DNA, 17 bp, Arabidopsis thaliana
gttttggttatgagggt

SEQ ID NO: 129894 - DNA, 17 bp, Arabidopsis thaliana
gttttggttcaaggact

SEQ ID NO: 129895 - DNA, 17 bp, Arabidopsis thaliana
gttttggttgtctattg

SEQ ID NO: 129896 - DNA, 17 bp, Arabidopsis thaliana
gttttggttgtgtcttt

SEQ ID NO: 129897 - DNA, 17 bp, Arabidopsis thaliana
gttttggtttcaggtac

SEQ ID NO: 129898 - DNA, 17 bp, Arabidopsis thaliana
gttttggtttcggacct

SEQ ID NO: 129899 - DNA, 17 bp, Arabidopsis thaliana
gttttggttttccagtg

SEQ ID NO: 129900 - DNA, 17 bp, Arabidopsis thaliana
gttttgtaccccagact

SEQ ID NO: 129901 - DNA, 17 bp, Arabidopsis thaliana
gttttgtagactgtgcc

SEQ ID NO: 129902 - DNA, 17 bp, Arabidopsis thaliana
gttttgtcaaccgtctg

SEQ ID NO: 129903 - DNA, 17 bp, Arabidopsis thaliana
gttttgtccgaccgttg

SEQ ID NO: 129904 - DNA, 17 bp, Arabidopsis thaliana
gttttgtgacaatttat

SEQ ID NO: 129905 - DNA, 17 bp, Arabidopsis thaliana
gttttgtgacattttgg

SEQ ID NO: 129906 - DNA, 17 bp, Arabidopsis thaliana
gttttgtgactaaattg

SEQ ID NO: 129907 - DNA, 17 bp, Arabidopsis thaliana
gttttgtgactattgcg

SEQ ID NO: 129908 - DNA, 17 bp, Arabidopsis thaliana
gttttgtgggtgattgg

SEQ ID NO: 129909 - DNA, 17 bp, Arabidopsis thaliana
gttttgttactaaagct

SEQ ID NO: 129910 - DNA, 17 bp, Arabidopsis thaliana
gttttgttcgtttggac

SEQ ID NO: 129911 - DNA, 17 bp, Arabidopsis thaliana
gttttgttcgtttgtac

SEQ ID NO: 129912 - DNA, 17 bp, Arabidopsis thaliana
gttttgttgactgtgcc

SEQ ID NO: 129913 - DNA, 17 bp, Arabidopsis thaliana
gttttgttgactttgcc

SEQ ID NO: 129914 - DNA, 17 bp, Arabidopsis thaliana
gttttgtttctggcctt

SEQ ID NO: 129915 - DNA, 17 bp, Arabidopsis thaliana
gttttgtttcttgcgct

SEQ ID NO: 129916 - DNA, 17 bp, Arabidopsis thaliana
gttttgttttcactcac

SEQ ID NO: 129917 - DNA, 17 bp, Arabidopsis thaliana
gttttgttttgaatgcg

SEQ ID NO: 129918 - DNA, 17 bp, Arabidopsis thaliana
gttttgtttttcctgga

SEQ ID NO: 129919 - DNA, 17 bp, Arabidopsis thaliana
gtttttaacttttgcat

SEQ ID NO: 129920 - DNA, 17 bp, Arabidopsis thaliana
gtttttacaacttgtgc

SEQ ID NO: 129921 - DNA, 17 bp, Arabidopsis thaliana
gtttttactagggctaa

SEQ ID NO: 129922 - DNA, 17 bp, Arabidopsis thaliana
gtttttacttgtcgtct

SEQ ID NO: 129923 - DNA, 17 bp, Arabidopsis thaliana
gtttttagagcctctca

SEQ ID NO: 129924 - DNA, 17 bp, Arabidopsis thaliana
gtttttaggttgattat

SEQ ID NO: 129925 - DNA, 17 bp, Arabidopsis thaliana
gtttttatcgaagctga

SEQ ID NO: 129926 - DNA, 17 bp, Arabidopsis thaliana
gtttttcaaaagatgtg

SEQ ID NO: 129927 - DNA, 17 bp, Arabidopsis thaliana
gtttttcacatcaagat

SEQ ID NO: 129928 - DNA, 17 bp, Arabidopsis thaliana
gtttttcaccagagctt

SEQ ID NO: 129929 - DNA, 17 bp, Arabidopsis thaliana
gtttttccatcattact

SEQ ID NO: 129930 - DNA, 17 bp, Arabidopsis thaliana
gtttttccatttagtgc

SEQ ID NO: 129931 - DNA, 17 bp, Arabidopsis thaliana
gtttttccgcagacctt

SEQ ID NO: 129932 - DNA, 17 bp, Arabidopsis thaliana
gtttttccgctactcgc

SEQ ID NO: 129933 - DNA, 17 bp, Arabidopsis thaliana
gtttttccgtggttggt

SEQ ID NO: 129934 - DNA, 17 bp, Arabidopsis thaliana
gtttttcctacctaccg

SEQ ID NO: 129935 - DNA, 17 bp, Arabidopsis thaliana
gtttttccttgcggcgc

SEQ ID NO: 129936 - DNA, 17 bp, Arabidopsis thaliana
gtttttcgagaatgttg

SEQ ID NO: 129937 - DNA, 17 bp, Arabidopsis thaliana
gtttttcgagttcgcga

SEQ ID NO: 129938 - DNA, 17 bp, Arabidopsis thaliana
gtttttcgcttcagaga

SEQ ID NO: 129939 - DNA, 17 bp, Arabidopsis thaliana
gtttttcggaaccctta

SEQ ID NO: 129940 - DNA, 17 bp, Arabidopsis thaliana
gtttttcgttggaccga

SEQ ID NO: 129941 - DNA, 17 bp, Arabidopsis thaliana
gtttttcgttggaccgg

SEQ ID NO: 129942 - DNA, 17 bp, Arabidopsis thaliana
gtttttcgttggaccgt

SEQ ID NO: 129943 - DNA, 17 bp, Arabidopsis thaliana
gtttttctatgtatctg

SEQ ID NO: 129944 - DNA, 17 bp, Arabidopsis thaliana
gtttttctccagaatgc

SEQ ID NO: 129945 - DNA, 17 bp, Arabidopsis thaliana
gtttttctgcgggccgg

SEQ ID NO: 129946 - DNA, 17 bp, Arabidopsis thaliana
gtttttcttagttcagt

SEQ ID NO: 129947 - DNA, 17 bp, Arabidopsis thaliana
gtttttcttctttgcga

SEQ ID NO: 129948 - DNA, 17 bp, Arabidopsis thaliana
gtttttctttgagatag

SEQ ID NO: 129949 - DNA, 17 bp, Arabidopsis thaliana
gtttttctttttcggtg

SEQ ID NO: 129950 - DNA, 17 bp, Arabidopsis thaliana
gtttttgaatctatcgt

SEQ ID NO: 129951 - DNA, 17 bp, Arabidopsis thaliana
gtttttgacccaggtga

SEQ ID NO: 129952 - DNA, 17 bp, Arabidopsis thaliana
gtttttgagaagtcggt

SEQ ID NO: 129953 - DNA, 17 bp, Arabidopsis thaliana
gtttttgcaaaaaatca

SEQ ID NO: 129954 - DNA, 17 bp, Arabidopsis thaliana
gtttttgcaattactcg

SEQ ID NO: 129955 - DNA, 17 bp, Arabidopsis thaliana
gtttttgcattcgtcat

SEQ ID NO: 129956 - DNA, 17 bp, Arabidopsis thaliana
gtttttgcccaattggt

SEQ ID NO: 129957 - DNA, 17 bp, Arabidopsis thaliana
gtttttgccgatggaga

SEQ ID NO: 129958 - DNA, 17 bp, Arabidopsis thaliana
gtttttgccgcaggttg

SEQ ID NO: 129959 - DNA, 17 bp, Arabidopsis thaliana
gtttttgcgaccaaagg

SEQ ID NO: 129960 - DNA, 17 bp, Arabidopsis thaliana
gtttttgcgacgacaac

SEQ ID NO: 129961 - DNA, 17 bp, Arabidopsis thaliana
gtttttgcgaggatagg

SEQ ID NO: 129962 - DNA, 17 bp, Arabidopsis thaliana
gtttttgctgctagctt

SEQ ID NO: 129963 - DNA, 17 bp, Arabidopsis thaliana
gtttttgcttagctaag

SEQ ID NO: 129964 - DNA, 17 bp, Arabidopsis thaliana
gtttttgcttcagtgga

SEQ ID NO: 129965 - DNA, 17 bp, Arabidopsis thaliana
gtttttgcttctggtcc

SEQ ID NO: 129966 - DNA, 17 bp, Arabidopsis thaliana
gtttttggatggttatt

SEQ ID NO: 129967 - DNA, 17 bp, Arabidopsis thaliana
gtttttggcaggaaaaa

SEQ ID NO: 129968 - DNA, 17 bp, Arabidopsis thaliana
gtttttggccatgtgtt

SEQ ID NO: 129969 - DNA, 17 bp, Arabidopsis thaliana
gtttttgggttaagtta

SEQ ID NO: 129970 - DNA, 17 bp, Arabidopsis thaliana
gtttttgggtttagacc

SEQ ID NO: 129971 - DNA, 17 bp, Arabidopsis thaliana
gtttttggtcccaaggc

SEQ ID NO: 129972 - DNA, 17 bp, Arabidopsis thaliana
gtttttggttattggac

SEQ ID NO: 129973 - DNA, 17 bp, Arabidopsis thaliana
gtttttggttcagtgag

SEQ ID NO: 129974 - DNA, 17 bp, Arabidopsis thaliana
gtttttgtcaaatgtga

SEQ ID NO: 129975 - DNA, 17 bp, Arabidopsis thaliana
gtttttgtcatgacacc

SEQ ID NO: 129976 - DNA, 17 bp, Arabidopsis thaliana
gtttttgtcgtgcggtt

SEQ ID NO: 129977 - DNA, 17 bp, Arabidopsis thaliana
gtttttgtctccagatc

SEQ ID NO: 129978 - DNA, 17 bp, Arabidopsis thaliana
gtttttgtggtgcggga

SEQ ID NO: 129979 - DNA, 17 bp, Arabidopsis thaliana
gtttttgtggtgcggtt

SEQ ID NO: 129980 - DNA, 17 bp, Arabidopsis thaliana
gtttttgttcagggttt

SEQ ID NO: 129981 - DNA, 17 bp, Arabidopsis thaliana
gtttttgttccgtgaag

SEQ ID NO: 129982 - DNA, 17 bp, Arabidopsis thaliana
gtttttgttggatttac

SEQ ID NO: 129983 - DNA, 17 bp, Arabidopsis thaliana
gttttttacattcgaga

SEQ ID NO: 129984 - DNA, 17 bp, Arabidopsis thaliana
gttttttacccgtccag

SEQ ID NO: 129985 - DNA, 17 bp, Arabidopsis thaliana
gttttttacgggacggg

SEQ ID NO: 129986 - DNA, 17 bp, Arabidopsis thaliana
gttttttacttaatggt

SEQ ID NO: 129987 - DNA, 17 bp, Arabidopsis thaliana
gttttttacttgcttcg

SEQ ID NO: 129988 - DNA, 17 bp, Arabidopsis thaliana
gttttttagatgtctgc

SEQ ID NO: 129989 - DNA, 17 bp, Arabidopsis thaliana
gttttttagtggattcc

SEQ ID NO: 129990 - DNA, 17 bp, Arabidopsis thaliana
gttttttagtttgtgag

SEQ ID NO: 129991 - DNA, 17 bp, Arabidopsis thaliana
gttttttcaggagtttt

SEQ ID NO: 129992 - DNA, 17 bp, Arabidopsis thaliana
gttttttcatccaaatg

SEQ ID NO: 129993 - DNA, 17 bp, Arabidopsis thaliana
gttttttccacgttgtt

SEQ ID NO: 129994 - DNA, 17 bp, Arabidopsis thaliana
gttttttccagttgcct

SEQ ID NO: 129995 - DNA, 17 bp, Arabidopsis thaliana
gttttttccagttgcgg

SEQ ID NO: 129996 - DNA, 17 bp, Arabidopsis thaliana
gttttttcccttttcca

SEQ ID NO: 129997 - DNA, 17 bp, Arabidopsis thaliana
gttttttccgcgactgc

SEQ ID NO: 129998 - DNA, 17 bp, Arabidopsis thaliana
gttttttccgtgactgc

SEQ ID NO: 129999 - DNA, 17 bp, Arabidopsis thaliana
gttttttcctattccct

SEQ ID NO: 130000 - DNA, 17 bp, Arabidopsis thaliana
gttttttcctattctat

SEQ ID NO: 130001 - DNA, 17 bp, Arabidopsis thaliana
gttttttcgcatatgcc

SEQ ID NO: 130002 - DNA, 17 bp, Arabidopsis thaliana
gttttttcgggctttac

SEQ ID NO: 130003 - DNA, 17 bp, Arabidopsis thaliana
gttttttcttgggatgg

SEQ ID NO: 130004 - DNA, 17 bp, Arabidopsis thaliana
gttttttgagtccttgg

SEQ ID NO: 130005 - DNA, 17 bp, Arabidopsis thaliana
gttttttgcccaggcct

SEQ ID NO: 130006 - DNA, 17 bp, Arabidopsis thaliana
gttttttgcggtaaatg

SEQ ID NO: 130007 - DNA, 17 bp, Arabidopsis thaliana
gttttttgcttgtagcg

SEQ ID NO: 130008 - DNA, 17 bp, Arabidopsis thaliana
gttttttggagctttac

SEQ ID NO: 130009 - DNA, 17 bp, Arabidopsis thaliana
gttttttggtccagaat

SEQ ID NO: 130010 - DNA, 17 bp, Arabidopsis thaliana
gtttttttacgagacgg

SEQ ID NO: 130011 - DNA, 17 bp, Arabidopsis thaliana
gtttttttacgggacat

SEQ ID NO: 130012 - DNA, 17 bp, Arabidopsis thaliana
gtttttttacgggacgg

SEQ ID NO: 130013 - DNA, 17 bp, Arabidopsis thaliana
gtttttttacggtgcgt

SEQ ID NO: 130014 - DNA, 17 bp, Arabidopsis thaliana
gtttttttatgggacga

SEQ ID NO: 130015 - DNA, 17 bp, Arabidopsis thaliana
gtttttttgaagacttg

SEQ ID NO: 130016 - DNA, 17 bp, Arabidopsis thaliana
gtttttttgcccaggcc

SEQ ID NO: 130017 - DNA, 17 bp, Arabidopsis thaliana
gtttttttggcccaatg

SEQ ID NO: 130018 - DNA, 17 bp, Arabidopsis thaliana
gtttttttggcgagaaa

SEQ ID NO: 130019 - DNA, 17 bp, Arabidopsis thaliana
gtttttttggcgggaaa

SEQ ID NO: 130020 - DNA, 17 bp, Arabidopsis thaliana
gtttttttgtaggttag

SEQ ID NO: 130021 - DNA, 17 bp, Arabidopsis thaliana
gtttttttgtgtggtag

SEQ ID NO: 130022 - DNA, 17 bp, Arabidopsis thaliana
gttttttttacgggaca

SEQ ID NO: 130023 - DNA, 17 bp, Arabidopsis thaliana
gttttttttggtccaag

SEQ ID NO: 130024 - DNA, 17 bp, Arabidopsis thaliana
gttttttttgtggacgg

SEQ ID NO: 130025 - DNA, 17 bp, Arabidopsis thaliana
gttttttttttcaggtg

SEQ ID NO: 130026 - DNA, 17 bp, Arabidopsis thaliana
taaaaaaagaatgccac

SEQ ID NO: 130027 - DNA, 17 bp, Arabidopsis thaliana
taaaaaaccgtgggtac

SEQ ID NO: 130028 - DNA, 17 bp, Arabidopsis thaliana
taaaaaacgctgagagg

SEQ ID NO: 130029 - DNA, 17 bp, Arabidopsis thaliana
taaaaaatctgttgagg

SEQ ID NO: 130030 - DNA, 17 bp, Arabidopsis thaliana
taaaaaccattgctgga

SEQ ID NO: 130031 - DNA, 17 bp, Arabidopsis thaliana
taaaaacggttaccgtc

SEQ ID NO: 130032 - DNA, 17 bp, Arabidopsis thaliana
taaaaacgttgacccgc

SEQ ID NO: 130033 - DNA, 17 bp, Arabidopsis thaliana
taaaaactgttcatgtg

SEQ ID NO: 130034 - DNA, 17 bp, Arabidopsis thaliana
taaaaagccatctggtg

SEQ ID NO: 130035 - DNA, 17 bp, Arabidopsis thaliana
taaaaagctgcttgatc

SEQ ID NO: 130036 - DNA, 17 bp, Arabidopsis thaliana
taaaaaggggtagggct

SEQ ID NO: 130037 - DNA, 17 bp, Arabidopsis thaliana
taaaaaggtttcctggg

SEQ ID NO: 130038 - DNA, 17 bp, Arabidopsis thaliana
taaaaatcgtcacgagg

SEQ ID NO: 130039 - DNA, 17 bp, Arabidopsis thaliana
taaaaatctctcagatg

SEQ ID NO: 130040 - DNA, 17 bp, Arabidopsis thaliana
taaaaatctgacaagtg

SEQ ID NO: 130041 - DNA, 17 bp, Arabidopsis thaliana
taaaaatctgctgggcc

SEQ ID NO: 130042 - DNA, 17 bp, Arabidopsis thaliana
taaaaatgatgttgacg

SEQ ID NO: 130043 - DNA, 17 bp, Arabidopsis thaliana
taaaaatggatctggcc

SEQ ID NO: 130044 - DNA, 17 bp, Arabidopsis thaliana
taaaaatggtcggattg

SEQ ID NO: 130045 - DNA, 17 bp, Arabidopsis thaliana
taaaacaaagcattgaa

SEQ ID NO: 130046 - DNA, 17 bp, Arabidopsis thaliana
taaaacaaagcattgcg

SEQ ID NO: 130047 - DNA, 17 bp, Arabidopsis thaliana
taaaacaacccacggtg

SEQ ID NO: 130048 - DNA, 17 bp, Arabidopsis thaliana
taaaacaactctcggca

SEQ ID NO: 130049 - DNA, 17 bp, Arabidopsis thaliana
taaaacaagcattgcga

SEQ ID NO: 130050 - DNA, 17 bp, Arabidopsis thaliana
taaaacaagttccacag

SEQ ID NO: 130051 - DNA, 17 bp, Arabidopsis thaliana
taaaaccaaacattgtg

SEQ ID NO: 130052 - DNA, 17 bp, Arabidopsis thaliana
taaaaccaactgctgtg

SEQ ID NO: 130053 - DNA, 17 bp, Arabidopsis thaliana
taaaaccatgggctgtc

SEQ ID NO: 130054 - DNA, 17 bp, Arabidopsis thaliana
taaaacccacacccggc

SEQ ID NO: 130055 - DNA, 17 bp, Arabidopsis thaliana
taaaacccttttgaact

SEQ ID NO: 130056 - DNA, 17 bp, Arabidopsis thaliana
taaaaccgacagaaaat

SEQ ID NO: 130057 - DNA, 17 bp, Arabidopsis thaliana
taaaaccgggttgcggt

SEQ ID NO: 130058 - DNA, 17 bp, Arabidopsis thaliana
taaaacctcttccacgg

SEQ ID NO: 130059 - DNA, 17 bp, Arabidopsis thaliana
taaaacctggttgggcc

SEQ ID NO: 130060 - DNA, 17 bp, Arabidopsis thaliana
taaaacctttccatttc

SEQ ID NO: 130061 - DNA, 17 bp, Arabidopsis thaliana
taaaacgactatcggca

SEQ ID NO: 130062 - DNA, 17 bp, Arabidopsis thaliana
taaaacgactcccggca

SEQ ID NO: 130063 - DNA, 17 bp, Arabidopsis thaliana
taaaacgactctcagca

SEQ ID NO: 130064 - DNA, 17 bp, Arabidopsis thaliana
taaaacgactctcggca

SEQ ID NO: 130065 - DNA, 17 bp, Arabidopsis thaliana
taaaacgactctctgca

SEQ ID NO: 130066 - DNA, 17 bp, Arabidopsis thaliana
taaaacgactcttggca

SEQ ID NO: 130067 - DNA, 17 bp, Arabidopsis thaliana
taaaacgactgtgagaa

SEQ ID NO: 130068 - DNA, 17 bp, Arabidopsis thaliana
taaaacgacttcggcaa

SEQ ID NO: 130069 - DNA, 17 bp, Arabidopsis thaliana
taaaacgacttctccac

SEQ ID NO: 130070 - DNA, 17 bp, Arabidopsis thaliana
taaaacgatcctcggca

SEQ ID NO: 130071 - DNA, 17 bp, Arabidopsis thaliana
taaaacggacggttgta

SEQ ID NO: 130072 - DNA, 17 bp, Arabidopsis thaliana
taaaacggacggttgtg

SEQ ID NO: 130073 - DNA, 17 bp, Arabidopsis thaliana
taaaacggccatttcac

SEQ ID NO: 130074 - DNA, 17 bp, Arabidopsis thaliana
taaaacggctgctgagt

SEQ ID NO: 130075 - DNA, 17 bp, Arabidopsis thaliana
taaaacggttcgtagtt

SEQ ID NO: 130076 - DNA, 17 bp, Arabidopsis thaliana
taaaactaagtccgcag

SEQ ID NO: 130077 - DNA, 17 bp, Arabidopsis thaliana
taaaactgagaagtgca

SEQ ID NO: 130078 - DNA, 17 bp, Arabidopsis thaliana
taaaactgatacttccc

SEQ ID NO: 130079 - DNA, 17 bp, Arabidopsis thaliana
taaaactgtcaaactag

SEQ ID NO: 130080 - DNA, 17 bp, Arabidopsis thaliana
taaaactgtgcagttaa

SEQ ID NO: 130081 - DNA, 17 bp, Arabidopsis thaliana
taaaactgttcatgtga

SEQ ID NO: 130082 - DNA, 17 bp, Arabidopsis thaliana
taaaacttccgcaaaac

SEQ ID NO: 130083 - DNA, 17 bp, Arabidopsis thaliana
taaaacttggttggctc

SEQ ID NO: 130084 - DNA, 17 bp, Arabidopsis thaliana
taaaacttgtgtcctct

SEQ ID NO: 130085 - DNA, 17 bp, Arabidopsis thaliana
taaaagaaaaccgcagc

SEQ ID NO: 130086 - DNA, 17 bp, Arabidopsis thaliana
taaaagagaactcggcc

SEQ ID NO: 130087 - DNA, 17 bp, Arabidopsis thaliana
taaaagataaattgtca

SEQ ID NO: 130088 - DNA, 17 bp, Arabidopsis thaliana
taaaagataacgcaggt

SEQ ID NO: 130089 - DNA, 17 bp, Arabidopsis thaliana
taaaagccatagccagt

SEQ ID NO: 130090 - DNA, 17 bp, Arabidopsis thaliana
taaaagcctaagcaggg

SEQ ID NO: 130091 - DNA, 17 bp, Arabidopsis thaliana
taaaagcgtgctctctg

SEQ ID NO: 130092 - DNA, 17 bp, Arabidopsis thaliana
taaaagcttgggagtgc

SEQ ID NO: 130093 - DNA, 17 bp, Arabidopsis thaliana
taaaaggcaaagagaca

SEQ ID NO: 130094 - DNA, 17 bp, Arabidopsis thaliana
taaaaggcggccaggcg

SEQ ID NO: 130095 - DNA, 17 bp, Arabidopsis thaliana
taaaaggtcgacgcggg

SEQ ID NO: 130096 - DNA, 17 bp, Arabidopsis thaliana
taaaaggtgttaggcgc

SEQ ID NO: 130097 - DNA, 17 bp, Arabidopsis thaliana
taaaagtcgacgcgggc

SEQ ID NO: 130098 - DNA, 17 bp, Arabidopsis thaliana
taaaagtctctcctgtg

SEQ ID NO: 130099 - DNA, 17 bp, Arabidopsis thaliana
taaaagtctctcgtgtg

SEQ ID NO: 130100 - DNA, 17 bp, Arabidopsis thaliana
taaaagtgcattcagga

SEQ ID NO: 130101 - DNA, 17 bp, Arabidopsis thaliana
taaaagtgcattcgggt

SEQ ID NO: 130102 - DNA, 17 bp, Arabidopsis thaliana
taaaagtgcctaaacgt

SEQ ID NO: 130103 - DNA, 17 bp, Arabidopsis thaliana
taaaagtggatcaacgg

SEQ ID NO: 130104 - DNA, 17 bp, Arabidopsis thaliana
taaaagtggccgcagcg

SEQ ID NO: 130105 - DNA, 17 bp, Arabidopsis thaliana
taaaagtgggtcaacga

SEQ ID NO: 130106 - DNA, 17 bp, Arabidopsis thaliana
taaaagtgggtcaacgg

SEQ ID NO: 130107 - DNA, 17 bp, Arabidopsis thaliana
taaaagttcgacgcggg

SEQ ID NO: 130108 - DNA, 17 bp, Arabidopsis thaliana
taaaagtttcttcgtcg

SEQ ID NO: 130109 - DNA, 17 bp, Arabidopsis thaliana
taaaagtttgcaaattg

SEQ ID NO: 130110 - DNA, 17 bp, Arabidopsis thaliana
taaaatccaggtggtcc

SEQ ID NO: 130111 - DNA, 17 bp, Arabidopsis thaliana
taaaatccaggtggtcg

SEQ ID NO: 130112 - DNA, 17 bp, Arabidopsis thaliana
taaaatccgctcagtat

SEQ ID NO: 130113 - DNA, 17 bp, Arabidopsis thaliana
taaaatccgctgagatt

SEQ ID NO: 130114 - DNA, 17 bp, Arabidopsis thaliana
taaaatccggttgcggt

SEQ ID NO: 130115 - DNA, 17 bp, Arabidopsis thaliana
taaaatcctatgtggac

SEQ ID NO: 130116 - DNA, 17 bp, Arabidopsis thaliana
taaaatcctggcccacg

SEQ ID NO: 130117 - DNA, 17 bp, Arabidopsis thaliana
taaaatcgattgtaatc

SEQ ID NO: 130118 - DNA, 17 bp, Arabidopsis thaliana
taaaatcggcgaagctg

SEQ ID NO: 130119 - DNA, 17 bp, Arabidopsis thaliana
taaaatcgtcaatcggc

SEQ ID NO: 130120 - DNA, 17 bp, Arabidopsis thaliana
taaaatcgttcaggttc

SEQ ID NO: 130121 - DNA, 17 bp, Arabidopsis thaliana
taaaatctccggagaca

SEQ ID NO: 130122 - DNA, 17 bp, Arabidopsis thaliana
taaaatctcctcctacg

SEQ ID NO: 130123 - DNA, 17 bp, Arabidopsis thaliana
taaaatctctcgacctt

SEQ ID NO: 130124 - DNA, 17 bp, Arabidopsis thaliana
taaaatctggttgggcc

SEQ ID NO: 130125 - DNA, 17 bp, Arabidopsis thaliana
taaaatcttcgaggctc

SEQ ID NO: 130126 - DNA, 17 bp, Arabidopsis thaliana
taaaatgaactgtgtcc

SEQ ID NO: 130127 - DNA, 17 bp, Arabidopsis thaliana
taaaatgaccgcatgta

SEQ ID NO: 130128 - DNA, 17 bp, Arabidopsis thaliana
taaaatgctaagcgaac

SEQ ID NO: 130129 - DNA, 17 bp, Arabidopsis thaliana
taaaatgctctgcacgg

SEQ ID NO: 130130 - DNA, 17 bp, Arabidopsis thaliana
taaaatgggctgaccaa

SEQ ID NO: 130131 - DNA, 17 bp, Arabidopsis thaliana
taaaatgggctgaccac

SEQ ID NO: 130132 - DNA, 17 bp, Arabidopsis thaliana
taaaatgtctaaaccgg

SEQ ID NO: 130133 - DNA, 17 bp, Arabidopsis thaliana
taaaatgtgctgaccta

SEQ ID NO: 130134 - DNA, 17 bp, Arabidopsis thaliana
taaaattcatccgcttg

SEQ ID NO: 130135 - DNA, 17 bp, Arabidopsis thaliana
taaaattccggaaccgg

SEQ ID NO: 130136 - DNA, 17 bp, Arabidopsis thaliana
taaaattccggaaccgt

SEQ ID NO: 130137 - DNA, 17 bp, Arabidopsis thaliana
taaaattgttctacggc

SEQ ID NO: 130138 - DNA, 17 bp, Arabidopsis thaliana
taaaatttcaagattcc

SEQ ID NO: 130139 - DNA, 17 bp, Arabidopsis thaliana
taaacaaaaatccagct

SEQ ID NO: 130140 - DNA, 17 bp, Arabidopsis thaliana
taaacaaacagacaagc

SEQ ID NO: 130141 - DNA, 17 bp, Arabidopsis thaliana
taaacaacacatgggct

SEQ ID NO: 130142 - DNA, 17 bp, Arabidopsis thaliana
taaacaactttctcaca

SEQ ID NO: 130143 - DNA, 17 bp, Arabidopsis thaliana
taaacagacctcgcaga

SEQ ID NO: 130144 - DNA, 17 bp, Arabidopsis thaliana
taaacagccattctact

SEQ ID NO: 130145 - DNA, 17 bp, Arabidopsis thaliana
taaacagtccgcagatg

SEQ ID NO: 130146 - DNA, 17 bp, Arabidopsis thaliana
taaacagtttggacttt

SEQ ID NO: 130147 - DNA, 17 bp, Arabidopsis thaliana
taaacataccttggttg

SEQ ID NO: 130148 - DNA, 17 bp, Arabidopsis thaliana
taaacatcatggagctg

SEQ ID NO: 130149 - DNA, 17 bp, Arabidopsis thaliana
taaacatctaattgcgt

SEQ ID NO: 130150 - DNA, 17 bp, Arabidopsis thaliana
taaacatctgatcgttt

SEQ ID NO: 130151 - DNA, 17 bp, Arabidopsis thaliana
taaacatcttaccgccc

SEQ ID NO: 130152 - DNA, 17 bp, Arabidopsis thaliana
taaacatcttaccgtta

SEQ ID NO: 130153 - DNA, 17 bp, Arabidopsis thaliana
taaacatgactgcttcc

SEQ ID NO: 130154 - DNA, 17 bp, Arabidopsis thaliana
taaacatggatactagg

SEQ ID NO: 130155 - DNA, 17 bp, Arabidopsis thaliana
taaacatgttatccagg

SEQ ID NO: 130156 - DNA, 17 bp, Arabidopsis thaliana
taaaccaacgataacgg

SEQ ID NO: 130157 - DNA, 17 bp, Arabidopsis thaliana
taaaccaacgatttcag

SEQ ID NO: 130158 - DNA, 17 bp, Arabidopsis thaliana
taaaccaactaggtcaa

SEQ ID NO: 130159 - DNA, 17 bp, Arabidopsis thaliana
taaaccaattgacccaa

SEQ ID NO: 130160 - DNA, 17 bp, Arabidopsis thaliana
taaaccaattggaccaa

SEQ ID NO: 130161 - DNA, 17 bp, Arabidopsis thaliana
taaaccaattggcccaa

SEQ ID NO: 130162 - DNA, 17 bp, Arabidopsis thaliana
taaaccacagttgctta

SEQ ID NO: 130163 - DNA, 17 bp, Arabidopsis thaliana
taaaccaccatcgagac

SEQ ID NO: 130164 - DNA, 17 bp, Arabidopsis thaliana
taaaccacggtctatgc

SEQ ID NO: 130165 - DNA, 17 bp, Arabidopsis thaliana
taaaccagaccttccag

SEQ ID NO: 130166 - DNA, 17 bp, Arabidopsis thaliana
taaaccagagaatgggc

SEQ ID NO: 130167 - DNA, 17 bp, Arabidopsis thaliana
taaaccagcgggtgcga

SEQ ID NO: 130168 - DNA, 17 bp, Arabidopsis thaliana
taaaccatcggctggcg

SEQ ID NO: 130169 - DNA, 17 bp, Arabidopsis thaliana
taaaccatttgcagtgc

SEQ ID NO: 130170 - DNA, 17 bp, Arabidopsis thaliana
taaacccagttctatca

SEQ ID NO: 130171 - DNA, 17 bp, Arabidopsis thaliana
taaacccgatccgaaaa

SEQ ID NO: 130172 - DNA, 17 bp, Arabidopsis thaliana
taaacccgctttcacct

SEQ ID NO: 130173 - DNA, 17 bp, Arabidopsis thaliana
taaaccctgttgagctt

SEQ ID NO: 130174 - DNA, 17 bp, Arabidopsis thaliana
taaaccgaaatcaagtg

SEQ ID NO: 130175 - DNA, 17 bp, Arabidopsis thaliana
taaaccgaacagggtct

SEQ ID NO: 130176 - DNA, 17 bp, Arabidopsis thaliana
taaaccgaccgagccag

SEQ ID NO: 130177 - DNA, 17 bp, Arabidopsis thaliana
taaaccgactatcgttt

SEQ ID NO: 130178 - DNA, 17 bp, Arabidopsis thaliana
taaaccgatcagttgac

SEQ ID NO: 130179 - DNA, 17 bp, Arabidopsis thaliana
taaaccgcaacgggatc

SEQ ID NO: 130180 - DNA, 17 bp, Arabidopsis thaliana
taaaccgcagacaaatt

SEQ ID NO: 130181 - DNA, 17 bp, Arabidopsis thaliana
taaaccgcagataaata

SEQ ID NO: 130182 - DNA, 17 bp, Arabidopsis thaliana
taaaccgcctccgtcag

SEQ ID NO: 130183 - DNA, 17 bp, Arabidopsis thaliana
taaaccgcggccggtaa

SEQ ID NO: 130184 - DNA, 17 bp, Arabidopsis thaliana
taaaccgcttcatgtca

SEQ ID NO: 130185 - DNA, 17 bp, Arabidopsis thaliana
taaaccgcttgttctgc

SEQ ID NO: 130186 - DNA, 17 bp, Arabidopsis thaliana
taaaccggcctgggtgt

SEQ ID NO: 130187 - DNA, 17 bp, Arabidopsis thaliana
taaaccgtcagctgcat

SEQ ID NO: 130188 - DNA, 17 bp, Arabidopsis thaliana
taaaccgtcgcagattg

SEQ ID NO: 130189 - DNA, 17 bp, Arabidopsis thaliana
taaaccgtgggcggtcg

SEQ ID NO: 130190 - DNA, 17 bp, Arabidopsis thaliana
taaaccgttgcggagca

SEQ ID NO: 130191 - DNA, 17 bp, Arabidopsis thaliana
taaacctaatccagatg

SEQ ID NO: 130192 - DNA, 17 bp, Arabidopsis thaliana
taaacctgaggatggct

SEQ ID NO: 130193 - DNA, 17 bp, Arabidopsis thaliana
taaacgacggtaagtca

SEQ ID NO: 130194 - DNA, 17 bp, Arabidopsis thaliana
taaacgactctcggcaa

SEQ ID NO: 130195 - DNA, 17 bp, Arabidopsis thaliana
taaacgaggactctggt

SEQ ID NO: 130196 - DNA, 17 bp, Arabidopsis thaliana
taaacgataccgaccag

SEQ ID NO: 130197 - DNA, 17 bp, Arabidopsis thaliana
taaacgatgccgaccag

SEQ ID NO: 130198 - DNA, 17 bp, Arabidopsis thaliana
taaacgcaaatatccgc

SEQ ID NO: 130199 - DNA, 17 bp, Arabidopsis thaliana
taaacgcaactggccgc

SEQ ID NO: 130200 - DNA, 17 bp, Arabidopsis thaliana
taaacgcaggcggcggc

SEQ ID NO: 130201 - DNA, 17 bp, Arabidopsis thaliana
taaacgccaatcaaagc

SEQ ID NO: 130202 - DNA, 17 bp, Arabidopsis thaliana
taaacgcgatttcccga

SEQ ID NO: 130203 - DNA, 17 bp, Arabidopsis thaliana
taaacgcggattacggt

SEQ ID NO: 130204 - DNA, 17 bp, Arabidopsis thaliana
taaacgcggatttgtgg

SEQ ID NO: 130205 - DNA, 17 bp, Arabidopsis thaliana
taaacgctccactgctc

SEQ ID NO: 130206 - DNA, 17 bp, Arabidopsis thaliana
taaacggcagcggttgc

SEQ ID NO: 130207 - DNA, 17 bp, Arabidopsis thaliana
taaacggccatttcacg

SEQ ID NO: 130208 - DNA, 17 bp, Arabidopsis thaliana
taaacggccgcatacga

SEQ ID NO: 130209 - DNA, 17 bp, Arabidopsis thaliana
taaacggcgggagtaac

SEQ ID NO: 130210 - DNA, 17 bp, Arabidopsis thaliana
taaacggtctggttacg

SEQ ID NO: 130211 - DNA, 17 bp, Arabidopsis thaliana
taaacgtcttaggcgct

SEQ ID NO: 130212 - DNA, 17 bp, Arabidopsis thaliana
taaacgtggagcctgga

SEQ ID NO: 130213 - DNA, 17 bp, Arabidopsis thaliana
taaacgttgacttagtt

SEQ ID NO: 130214 - DNA, 17 bp, Arabidopsis thaliana
taaactaaggttgctga

SEQ ID NO: 130215 - DNA, 17 bp, Arabidopsis thaliana
taaactaagtccgcatc

SEQ ID NO: 130216 - DNA, 17 bp, Arabidopsis thaliana
taaactaagtgtgcagt

SEQ ID NO: 130217 - DNA, 17 bp, Arabidopsis thaliana
taaactaagtttgcagc

SEQ ID NO: 130218 - DNA, 17 bp, Arabidopsis thaliana
taaactactttctcccc

SEQ ID NO: 130219 - DNA, 17 bp, Arabidopsis thaliana
taaactactttgtccgc

SEQ ID NO: 130220 - DNA, 17 bp, Arabidopsis thaliana
taaactagttaagtccc

SEQ ID NO: 130221 - DNA, 17 bp, Arabidopsis thaliana
taaactagtttgtccgc

SEQ ID NO: 130222 - DNA, 17 bp, Arabidopsis thaliana
taaactcaccttcttgt

SEQ ID NO: 130223 - DNA, 17 bp, Arabidopsis thaliana
taaactcatagccgacg

SEQ ID NO: 130224 - DNA, 17 bp, Arabidopsis thaliana
taaactccccttgagtc

SEQ ID NO: 130225 - DNA, 17 bp, Arabidopsis thaliana
taaactcctcggttggc

SEQ ID NO: 130226 - DNA, 17 bp, Arabidopsis thaliana
taaactcggcgcggtct

SEQ ID NO: 130227 - DNA, 17 bp, Arabidopsis thaliana
taaactcgtaacggctg

SEQ ID NO: 130228 - DNA, 17 bp, Arabidopsis thaliana
taaactctactgcggtg

SEQ ID NO: 130229 - DNA, 17 bp, Arabidopsis thaliana
taaactctggacttggt

SEQ ID NO: 130230 - DNA, 17 bp, Arabidopsis thaliana
taaactgaaggtccgta

SEQ ID NO: 130231 - DNA, 17 bp, Arabidopsis thaliana
taaactgaagtcggccc

SEQ ID NO: 130232 - DNA, 17 bp, Arabidopsis thaliana
taaactgaattcgtcga

SEQ ID NO: 130233 - DNA, 17 bp, Arabidopsis thaliana
taaactgacggacgtaa

SEQ ID NO: 130234 - DNA, 17 bp, Arabidopsis thaliana
taaactgagatccgttg

SEQ ID NO: 130235 - DNA, 17 bp, Arabidopsis thaliana
taaactgatcgacggtt

SEQ ID NO: 130236 - DNA, 17 bp, Arabidopsis thaliana
taaactgccaacagctg

SEQ ID NO: 130237 - DNA, 17 bp, Arabidopsis thaliana
taaactgcggttccaga

SEQ ID NO: 130238 - DNA, 17 bp, Arabidopsis thaliana
taaactgctggttccgc

SEQ ID NO: 130239 - DNA, 17 bp, Arabidopsis thaliana
taaactgctgtggactt

SEQ ID NO: 130240 - DNA, 17 bp, Arabidopsis thaliana
taaactggagatcacct

SEQ ID NO: 130241 - DNA, 17 bp, Arabidopsis thaliana
taaactggatcgcttgg

SEQ ID NO: 130242 - DNA, 17 bp, Arabidopsis thaliana
taaactggttgatcgga

SEQ ID NO: 130243 - DNA, 17 bp, Arabidopsis thaliana
taaactgtcacactacg

SEQ ID NO: 130244 - DNA, 17 bp, Arabidopsis thaliana
taaactgtcagctgcat

SEQ ID NO: 130245 - DNA, 17 bp, Arabidopsis thaliana
taaactgtgaatgcgct

SEQ ID NO: 130246 - DNA, 17 bp, Arabidopsis thaliana
taaactgtgagatctat

SEQ ID NO: 130247 - DNA, 17 bp, Arabidopsis thaliana
taaacttaggctatgcc

SEQ ID NO: 130248 - DNA, 17 bp, Arabidopsis thaliana
taaacttcatgtagcct

SEQ ID NO: 130249 - DNA, 17 bp, Arabidopsis thaliana
taaacttcctgcaagtc

SEQ ID NO: 130250 - DNA, 17 bp, Arabidopsis thaliana
taaacttcgcctagggt

SEQ ID NO: 130251 - DNA, 17 bp, Arabidopsis thaliana
taaacttctgctgcttc

SEQ ID NO: 130252 - DNA, 17 bp, Arabidopsis thaliana
taaacttcttctgagat

SEQ ID NO: 130253 - DNA, 17 bp, Arabidopsis thaliana
taaacttgccatcgtcc

SEQ ID NO: 130254 - DNA, 17 bp, Arabidopsis thaliana
taaacttgcggcgtaca

SEQ ID NO: 130255 - DNA, 17 bp, Arabidopsis thaliana
taaacttggcatgtggg

SEQ ID NO: 130256 - DNA, 17 bp, Arabidopsis thaliana
taaacttggtccgcagc

SEQ ID NO: 130257 - DNA, 17 bp, Arabidopsis thaliana
taaacttggtgtgcaac

SEQ ID NO: 130258 - DNA, 17 bp, Arabidopsis thaliana
taaacttgtgttgaccg

SEQ ID NO: 130259 - DNA, 17 bp, Arabidopsis thaliana
taaactttagcttggat

SEQ ID NO: 130260 - DNA, 17 bp, Arabidopsis thaliana
taaactttgctttgtcc

SEQ ID NO: 130261 - DNA, 17 bp, Arabidopsis thaliana
taaactttgctttgtcg

SEQ ID NO: 130262 - DNA, 17 bp, Arabidopsis thaliana
taaacttttgaccaatt

SEQ ID NO: 130263 - DNA, 17 bp, Arabidopsis thaliana
taaagaaattcatcgga

SEQ ID NO: 130264 - DNA, 17 bp, Arabidopsis thaliana
taaagaagtgggacccg

SEQ ID NO: 130265 - DNA, 17 bp, Arabidopsis thaliana
taaagaatctgtgcagg

SEQ ID NO: 130266 - DNA, 17 bp, Arabidopsis thaliana
taaagacaactctcagt

SEQ ID NO: 130267 - DNA, 17 bp, Arabidopsis thaliana
taaagacaggtttggcc

SEQ ID NO: 130268 - DNA, 17 bp, Arabidopsis thaliana
taaagacgggtcatcaa

SEQ ID NO: 130269 - DNA, 17 bp, Arabidopsis thaliana
taaagacggtccgcagt

SEQ ID NO: 130270 - DNA, 17 bp, Arabidopsis thaliana
taaagacggtgagaagc

SEQ ID NO: 130271 - DNA, 17 bp, Arabidopsis thaliana
taaagactcaggtggat

SEQ ID NO: 130272 - DNA, 17 bp, Arabidopsis thaliana
taaagactctaggcgaa

SEQ ID NO: 130273 - DNA, 17 bp, Arabidopsis thaliana
taaagacttttatggcc

SEQ ID NO: 130274 - DNA, 17 bp, Arabidopsis thaliana
taaagaggctacgaaat

SEQ ID NO: 130275 - DNA, 17 bp, Arabidopsis thaliana
taaagaggctcgaacat

SEQ ID NO: 130276 - DNA, 17 bp, Arabidopsis thaliana
taaagaggtgtcagaaa

SEQ ID NO: 130277 - DNA, 17 bp, Arabidopsis thaliana
taaagatgattcaggcc

SEQ ID NO: 130278 - DNA, 17 bp, Arabidopsis thaliana
taaagatggcaaagtgc

SEQ ID NO: 130279 - DNA, 17 bp, Arabidopsis thaliana
taaagattttccagtga

SEQ ID NO: 130280 - DNA, 17 bp, Arabidopsis thaliana
taaagcaagcgacgatc

SEQ ID NO: 130281 - DNA, 17 bp, Arabidopsis thaliana
taaagcatgagtttcac

SEQ ID NO: 130282 - DNA, 17 bp, Arabidopsis thaliana
taaagccacgtcagcac

SEQ ID NO: 130283 - DNA, 17 bp, Arabidopsis thaliana
taaagccacgtcagctc

SEQ ID NO: 130284 - DNA, 17 bp, Arabidopsis thaliana
taaagccctaattacta

SEQ ID NO: 130285 - DNA, 17 bp, Arabidopsis thaliana
taaagccctaatttcga

SEQ ID NO: 130286 - DNA, 17 bp, Arabidopsis thaliana
taaagccctaatttcgt

SEQ ID NO: 130287 - DNA, 17 bp, Arabidopsis thaliana
taaagccgcttggagtt

SEQ ID NO: 130288 - DNA, 17 bp, Arabidopsis thaliana
taaagcctctgacgctg

SEQ ID NO: 130289 - DNA, 17 bp, Arabidopsis thaliana
taaagcctgggctctat

SEQ ID NO: 130290 - DNA, 17 bp, Arabidopsis thaliana
taaagcgggaatgtagt

SEQ ID NO: 130291 - DNA, 17 bp, Arabidopsis thaliana
taaagcggttcgtagct

SEQ ID NO: 130292 - DNA, 17 bp, Arabidopsis thaliana
taaagcgtctgcaggtg

SEQ ID NO: 130293 - DNA, 17 bp, Arabidopsis thaliana
taaagcgtctgtaggta

SEQ ID NO: 130294 - DNA, 17 bp, Arabidopsis thaliana
taaagcgtctgtaggtg

SEQ ID NO: 130295 - DNA, 17 bp, Arabidopsis thaliana
taaagcgttttctttgg

SEQ ID NO: 130296 - DNA, 17 bp, Arabidopsis thaliana
taaagctaccagcatga

SEQ ID NO: 130297 - DNA, 17 bp, Arabidopsis thaliana
taaagctacctgcctga

SEQ ID NO: 130298 - DNA, 17 bp, Arabidopsis thaliana
taaagctgccagcatga

SEQ ID NO: 130299 - DNA, 17 bp, Arabidopsis thaliana
taaagctgccagcatgc

SEQ ID NO: 130300 - DNA, 17 bp, Arabidopsis thaliana
taaagcttgtctgtaag

SEQ ID NO: 130301 - DNA, 17 bp, Arabidopsis thaliana
taaagcttgtctgtatg

SEQ ID NO: 130302 - DNA, 17 bp, Arabidopsis thaliana
taaaggagggtttctct

SEQ ID NO: 130303 - DNA, 17 bp, Arabidopsis thaliana
taaaggatctggtcagc

SEQ ID NO: 130304 - DNA, 17 bp, Arabidopsis thaliana
taaaggattggctctga

SEQ ID NO: 130305 - DNA, 17 bp, Arabidopsis thaliana
taaaggccaatttttga

SEQ ID NO: 130306 - DNA, 17 bp, Arabidopsis thaliana
taaaggcccctgcccgg

SEQ ID NO: 130307 - DNA, 17 bp, Arabidopsis thaliana
taaaggcctcagtgtga

SEQ ID NO: 130308 - DNA, 17 bp, Arabidopsis thaliana
taaaggccttgctgtca

SEQ ID NO: 130309 - DNA, 17 bp, Arabidopsis thaliana
taaaggcgagtacccaa

SEQ ID NO: 130310 - DNA, 17 bp, Arabidopsis thaliana
taaaggcggacaacaac

SEQ ID NO: 130311 - DNA, 17 bp, Arabidopsis thaliana
taaaggctacgacaagt

SEQ ID NO: 130312 - DNA, 17 bp, Arabidopsis thaliana
taaaggctgatgttgtg

SEQ ID NO: 130313 - DNA, 17 bp, Arabidopsis thaliana
taaaggcttgtttaccg

SEQ ID NO: 130314 - DNA, 17 bp, Arabidopsis thaliana
taaaggctttgtccacc

SEQ ID NO: 130315 - DNA, 17 bp, Arabidopsis thaliana
taaagggaacctgcgga

SEQ ID NO: 130316 - DNA, 17 bp, Arabidopsis thaliana
taaagggaatgtgacac

SEQ ID NO: 130317 - DNA, 17 bp, Arabidopsis thaliana
taaagggattgacctgc

SEQ ID NO: 130318 - DNA, 17 bp, Arabidopsis thaliana
taaagggcacgtctgcc

SEQ ID NO: 130319 - DNA, 17 bp, Arabidopsis thaliana
taaagggcccgtctggc

SEQ ID NO: 130320 - DNA, 17 bp, Arabidopsis thaliana
taaagggtggtccaagt

SEQ ID NO: 130321 - DNA, 17 bp, Arabidopsis thaliana
taaaggtaagtcccaag

SEQ ID NO: 130322 - DNA, 17 bp, Arabidopsis thaliana
taaaggtcaaaatttgg

SEQ ID NO: 130323 - DNA, 17 bp, Arabidopsis thaliana
taaaggtcaaaattttg

SEQ ID NO: 130324 - DNA, 17 bp, Arabidopsis thaliana
taaaggtcaaatctgcc

SEQ ID NO: 130325 - DNA, 17 bp, Arabidopsis thaliana
taaaggtcgaaatttgg

SEQ ID NO: 130326 - DNA, 17 bp, Arabidopsis thaliana
taaaggtcgccagcgct

SEQ ID NO: 130327 - DNA, 17 bp, Arabidopsis thaliana
taaaggtgtagtgcttg

SEQ ID NO: 130328 - DNA, 17 bp, Arabidopsis thaliana
taaagtatgtgttttgc

SEQ ID NO: 130329 - DNA, 17 bp, Arabidopsis thaliana
taaagtatttcggtgcg

SEQ ID NO: 130330 - DNA, 17 bp, Arabidopsis thaliana
taaagtcccgacttcag

SEQ ID NO: 130331 - DNA, 17 bp, Arabidopsis thaliana
taaagtcccgaggtgct

SEQ ID NO: 130332 - DNA, 17 bp, Arabidopsis thaliana
taaagtcctaagcacgg

SEQ ID NO: 130333 - DNA, 17 bp, Arabidopsis thaliana
taaagtcgctccaaccg

SEQ ID NO: 130334 - DNA, 17 bp, Arabidopsis thaliana
taaagtcgtccaggcat

SEQ ID NO: 130335 - DNA, 17 bp, Arabidopsis thaliana
taaagtcgtccgacccg

SEQ ID NO: 130336 - DNA, 17 bp, Arabidopsis thaliana
taaagtctacatgtgtg

SEQ ID NO: 130337 - DNA, 17 bp, Arabidopsis thaliana
taaagtctggatgagct

SEQ ID NO: 130338 - DNA, 17 bp, Arabidopsis thaliana
taaagtctgtgatgttg

SEQ ID NO: 130339 - DNA, 17 bp, Arabidopsis thaliana
taaagtgaggcgttctt

SEQ ID NO: 130340 - DNA, 17 bp, Arabidopsis thaliana
taaagtgccgcagttgc

SEQ ID NO: 130341 - DNA, 17 bp, Arabidopsis thaliana
taaagtgcggtgcagtt

SEQ ID NO: 130342 - DNA, 17 bp, Arabidopsis thaliana
taaagtgggtcagcgct

SEQ ID NO: 130343 - DNA, 17 bp, Arabidopsis thaliana
taaagttagtaactgac

SEQ ID NO: 130344 - DNA, 17 bp, Arabidopsis thaliana
taaagttccattgtctt

SEQ ID NO: 130345 - DNA, 17 bp, Arabidopsis thaliana
taaagttgaccttggct

SEQ ID NO: 130346 - DNA, 17 bp, Arabidopsis thaliana
taaagttgtatggcagg

SEQ ID NO: 130347 - DNA, 17 bp, Arabidopsis thaliana
taaagttgtctacgcga

SEQ ID NO: 130348 - DNA, 17 bp, Arabidopsis thaliana
taaagtttagacccgtt

SEQ ID NO: 130349 - DNA, 17 bp, Arabidopsis thaliana
taaagtttgggctctat

SEQ ID NO: 130350 - DNA, 17 bp, Arabidopsis thaliana
taaagtttgtaccgaac

SEQ ID NO: 130351 - DNA, 17 bp, Arabidopsis thaliana
taaagtttttgaacctc

SEQ ID NO: 130352 - DNA, 17 bp, Arabidopsis thaliana
taaataagccaaagttg

SEQ ID NO: 130353 - DNA, 17 bp, Arabidopsis thaliana
taaataagctccattcg

SEQ ID NO: 130354 - DNA, 17 bp, Arabidopsis thaliana
taaataccaggaggttt

SEQ ID NO: 130355 - DNA, 17 bp, Arabidopsis thaliana
taaataccgttttggct

SEQ ID NO: 130356 - DNA, 17 bp, Arabidopsis thaliana
taaatactaccacggac

SEQ ID NO: 130357 - DNA, 17 bp, Arabidopsis thaliana
taaatactaccacggga

SEQ ID NO: 130358 - DNA, 17 bp, Arabidopsis thaliana
taaatactaccacgggc

SEQ ID NO: 130359 - DNA, 17 bp, Arabidopsis thaliana
taaatactcctgggtga

SEQ ID NO: 130360 - DNA, 17 bp, Arabidopsis thaliana
taaatacttagtgaggc

SEQ ID NO: 130361 - DNA, 17 bp, Arabidopsis thaliana
taaatagacccaagttc

SEQ ID NO: 130362 - DNA, 17 bp, Arabidopsis thaliana
taaatagataggacgtg

SEQ ID NO: 130363 - DNA, 17 bp, Arabidopsis thaliana
taaatagctcatgccag

SEQ ID NO: 130364 - DNA, 17 bp, Arabidopsis thaliana
taaataggctattcggc

SEQ ID NO: 130365 - DNA, 17 bp, Arabidopsis thaliana
taaataggtaggacgtg

SEQ ID NO: 130366 - DNA, 17 bp, Arabidopsis thaliana
taaatattcgggtctgg

SEQ ID NO: 130367 - DNA, 17 bp, Arabidopsis thaliana
taaatcatgaactgcga

SEQ ID NO: 130368 - DNA, 17 bp, Arabidopsis thaliana
taaatccagtggcagcc

SEQ ID NO: 130369 - DNA, 17 bp, Arabidopsis thaliana
taaatcccgagttagag

SEQ ID NO: 130370 - DNA, 17 bp, Arabidopsis thaliana
taaatccgagtctgagg

SEQ ID NO: 130371 - DNA, 17 bp, Arabidopsis thaliana
taaatccgtcagcggtt

SEQ ID NO: 130372 - DNA, 17 bp, Arabidopsis thaliana
taaatcctcaagtttag

SEQ ID NO: 130373 - DNA, 17 bp, Arabidopsis thaliana
taaatcctgagcttagt

SEQ ID NO: 130374 - DNA, 17 bp, Arabidopsis thaliana
taaatcctggatttgga

SEQ ID NO: 130375 - DNA, 17 bp, Arabidopsis thaliana
taaatcgaggattggtg

SEQ ID NO: 130376 - DNA, 17 bp, Arabidopsis thaliana
taaatcgcggattgtta

SEQ ID NO: 130377 - DNA, 17 bp, Arabidopsis thaliana
taaatcggaccaaactt

SEQ ID NO: 130378 - DNA, 17 bp, Arabidopsis thaliana
taaatcggccggtttag

SEQ ID NO: 130379 - DNA, 17 bp, Arabidopsis thaliana
taaatcggcgcacttga

SEQ ID NO: 130380 - DNA, 17 bp, Arabidopsis thaliana
taaatcgttaaatgcac

SEQ ID NO: 130381 - DNA, 17 bp, Arabidopsis thaliana
taaatctactttgtgct

SEQ ID NO: 130382 - DNA, 17 bp, Arabidopsis thaliana
taaatctatttcccgcc

SEQ ID NO: 130383 - DNA, 17 bp, Arabidopsis thaliana
taaatctcagtggatcg

SEQ ID NO: 130384 - DNA, 17 bp, Arabidopsis thaliana
taaatctgctccgcctg

SEQ ID NO: 130385 - DNA, 17 bp, Arabidopsis thaliana
taaatctgtggctcttg

SEQ ID NO: 130386 - DNA, 17 bp, Arabidopsis thaliana
taaatctgtgtgtgggc

SEQ ID NO: 130387 - DNA, 17 bp, Arabidopsis thaliana
taaatcttatcggctgt

SEQ ID NO: 130388 - DNA, 17 bp, Arabidopsis thaliana
taaatcttggccccatc

SEQ ID NO: 130389 - DNA, 17 bp, Arabidopsis thaliana
taaatcttggcccgata

SEQ ID NO: 130390 - DNA, 17 bp, Arabidopsis thaliana
taaatgaagtaatgccc

SEQ ID NO: 130391 - DNA, 17 bp, Arabidopsis thaliana
taaatgaccgctacact

SEQ ID NO: 130392 - DNA, 17 bp, Arabidopsis thaliana
taaatgaccgctcagtg

SEQ ID NO: 130393 - DNA, 17 bp, Arabidopsis thaliana
taaatgacttagcgctt

SEQ ID NO: 130394 - DNA, 17 bp, Arabidopsis thaliana
taaatgcatgattggtt

SEQ ID NO: 130395 - DNA, 17 bp, Arabidopsis thaliana
taaatgccagtggcagc

SEQ ID NO: 130396 - DNA, 17 bp, Arabidopsis thaliana
taaatgcggtaatctcc

SEQ ID NO: 130397 - DNA, 17 bp, Arabidopsis thaliana
taaatgctaagcgaacg

SEQ ID NO: 130398 - DNA, 17 bp, Arabidopsis thaliana
taaatgctccgccgtga

SEQ ID NO: 130399 - DNA, 17 bp, Arabidopsis thaliana
taaatgctctgatctcc

SEQ ID NO: 130400 - DNA, 17 bp, Arabidopsis thaliana
taaatggcttatccgta

SEQ ID NO: 130401 - DNA, 17 bp, Arabidopsis thaliana
taaatgggacggaccga

SEQ ID NO: 130402 - DNA, 17 bp, Arabidopsis thaliana
taaatgggcgatgtcac

SEQ ID NO: 130403 - DNA, 17 bp, Arabidopsis thaliana
taaatgggttgatcatg

SEQ ID NO: 130404 - DNA, 17 bp, Arabidopsis thaliana
taaatgtactttttcgg

SEQ ID NO: 130405 - DNA, 17 bp, Arabidopsis thaliana
taaatgtaggacgtgtc

SEQ ID NO: 130406 - DNA, 17 bp, Arabidopsis thaliana
taaatgttaaccggtga

SEQ ID NO: 130407 - DNA, 17 bp, Arabidopsis thaliana
taaatgttggggttggg

SEQ ID NO: 130408 - DNA, 17 bp, Arabidopsis thaliana
taaatgttgtggtttcg

SEQ ID NO: 130409 - DNA, 17 bp, Arabidopsis thaliana
taaatgttttctgggtt

SEQ ID NO: 130410 - DNA, 17 bp, Arabidopsis thaliana
taaattaagtctaggcc

SEQ ID NO: 130411 - DNA, 17 bp, Arabidopsis thaliana
taaattaagtttaggcc

SEQ ID NO: 130412 - DNA, 17 bp, Arabidopsis thaliana
taaattaattgcggcag

SEQ ID NO: 130413 - DNA, 17 bp, Arabidopsis thaliana
taaattcacatggctca

SEQ ID NO: 130414 - DNA, 17 bp, Arabidopsis thaliana
taaattccgtccaaggc

SEQ ID NO: 130415 - DNA, 17 bp, Arabidopsis thaliana
taaattcgttgaccaga

SEQ ID NO: 130416 - DNA, 17 bp, Arabidopsis thaliana
taaattgaccttcgccg

SEQ ID NO: 130417 - DNA, 17 bp, Arabidopsis thaliana
taaattgccctctgaac

SEQ ID NO: 130418 - DNA, 17 bp, Arabidopsis thaliana
taaattgcggttgcggt

SEQ ID NO: 130419 - DNA, 17 bp, Arabidopsis thaliana
taaattgctcgctttga

SEQ ID NO: 130420 - DNA, 17 bp, Arabidopsis thaliana
taaattggtccgtcagt

SEQ ID NO: 130421 - DNA, 17 bp, Arabidopsis thaliana
taaattgtccaatttgc

SEQ ID NO: 130422 - DNA, 17 bp, Arabidopsis thaliana
taaattgtccccgcaat

SEQ ID NO: 130423 - DNA, 17 bp, Arabidopsis thaliana
taaattgtggcccattg

SEQ ID NO: 130424 - DNA, 17 bp, Arabidopsis thaliana
taaatttagcatgtgcg

SEQ ID NO: 130425 - DNA, 17 bp, Arabidopsis thaliana
taaatttatttacagcg

SEQ ID NO: 130426 - DNA, 17 bp, Arabidopsis thaliana
taaatttcccgccaaaa

SEQ ID NO: 130427 - DNA, 17 bp, Arabidopsis thaliana
taaattttgggccacag

SEQ ID NO: 130428 - DNA, 17 bp, Arabidopsis thaliana
taaatttttcttcttcg

SEQ ID NO: 130429 - DNA, 17 bp, Arabidopsis thaliana
taaatttttttgtgcga

SEQ ID NO: 130430 - DNA, 17 bp, Arabidopsis thaliana
taacaaaatagccatgg

SEQ ID NO: 130431 - DNA, 17 bp, Arabidopsis thaliana
taacaaactgttgtgga

SEQ ID NO: 130432 - DNA, 17 bp, Arabidopsis thaliana
taacaaagcaggtgtgc

SEQ ID NO: 130433 - DNA, 17 bp, Arabidopsis thaliana
taacaaagcagtctgtt

SEQ ID NO: 130434 - DNA, 17 bp, Arabidopsis thaliana
taacaaagcattgcgat

SEQ ID NO: 130435 - DNA, 17 bp, Arabidopsis thaliana
taacaaagctaccattc

SEQ ID NO: 130436 - DNA, 17 bp, Arabidopsis thaliana
taacaaatctattgact

SEQ ID NO: 130437 - DNA, 17 bp, Arabidopsis thaliana
taacaaatgcgctgcct

SEQ ID NO: 130438 - DNA, 17 bp, Arabidopsis thaliana
taacaaccctgatacgc

SEQ ID NO: 130439 - DNA, 17 bp, Arabidopsis thaliana
taacaaccgctaccacc

SEQ ID NO: 130440 - DNA, 17 bp, Arabidopsis thaliana
taacaaccgtgatttcc

SEQ ID NO: 130441 - DNA, 17 bp, Arabidopsis thaliana
taacaactcacctgccg

SEQ ID NO: 130442 - DNA, 17 bp, Arabidopsis thaliana
taacaactgcctacgag

SEQ ID NO: 130443 - DNA, 17 bp, Arabidopsis thaliana
taacaacttggcgcaat

SEQ ID NO: 130444 - DNA, 17 bp, Arabidopsis thaliana
taacaagaagcatgccg

SEQ ID NO: 130445 - DNA, 17 bp, Arabidopsis thaliana
taacaagcgtatcgaat

SEQ ID NO: 130446 - DNA, 17 bp, Arabidopsis thaliana
taacaagcgtcctgtta

SEQ ID NO: 130447 - DNA, 17 bp, Arabidopsis thaliana
taacaaggaacggtata

SEQ ID NO: 130448 - DNA, 17 bp, Arabidopsis thaliana
taacaaggaagaacggc

SEQ ID NO: 130449 - DNA, 17 bp, Arabidopsis thaliana
taacaagtttacaagcc

SEQ ID NO: 130450 - DNA, 17 bp, Arabidopsis thaliana
taacaagtttcgtcaag

SEQ ID NO: 130451 - DNA, 17 bp, Arabidopsis thaliana
taacaagttttggtgtg

SEQ ID NO: 130452 - DNA, 17 bp, Arabidopsis thaliana
taacaataccgggctct

SEQ ID NO: 130453 - DNA, 17 bp, Arabidopsis thaliana
taacaatagccggtcgg

SEQ ID NO: 130454 - DNA, 17 bp, Arabidopsis thaliana
taacaatcagcacgtgt

SEQ ID NO: 130455 - DNA, 17 bp, Arabidopsis thaliana
taacacagagaatcatg

SEQ ID NO: 130456 - DNA, 17 bp, Arabidopsis thaliana
taacacagccggcgtga

SEQ ID NO: 130457 - DNA, 17 bp, Arabidopsis thaliana
taacacatgttgcccaa

SEQ ID NO: 130458 - DNA, 17 bp, Arabidopsis thaliana
taacaccgaaatcaggg

SEQ ID NO: 130459 - DNA, 17 bp, Arabidopsis thaliana
taacaccggcattgacg

SEQ ID NO: 130460 - DNA, 17 bp, Arabidopsis thaliana
taacaccgtatttgacc

SEQ ID NO: 130461 - DNA, 17 bp, Arabidopsis thaliana
taacaccgtttgtctcc

SEQ ID NO: 130462 - DNA, 17 bp, Arabidopsis thaliana
taacacctcgtcgctaa

SEQ ID NO: 130463 - DNA, 17 bp, Arabidopsis thaliana
taacacctcttacagac

SEQ ID NO: 130464 - DNA, 17 bp, Arabidopsis thaliana
taacacgtctgcctggg

SEQ ID NO: 130465 - DNA, 17 bp, Arabidopsis thaliana
taacacgttatcagcac

SEQ ID NO: 130466 - DNA, 17 bp, Arabidopsis thaliana
taacacgttcggcttca

SEQ ID NO: 130467 - DNA, 17 bp, Arabidopsis thaliana
taacactagataaggcc

SEQ ID NO: 130468 - DNA, 17 bp, Arabidopsis thaliana
taacactccccctgatg

SEQ ID NO: 130469 - DNA, 17 bp, Arabidopsis thaliana
taacactggagtcgcaa

SEQ ID NO: 130470 - DNA, 17 bp, Arabidopsis thaliana
taacagaccggtagact

SEQ ID NO: 130471 - DNA, 17 bp, Arabidopsis thaliana
taacagactgggaactg

SEQ ID NO: 130472 - DNA, 17 bp, Arabidopsis thaliana
taacagacttgcaacca

SEQ ID NO: 130473 - DNA, 17 bp, Arabidopsis thaliana
taacagagggtagtgtt

SEQ ID NO: 130474 - DNA, 17 bp, Arabidopsis thaliana
taacagcctgcaaagtt

SEQ ID NO: 130475 - DNA, 17 bp, Arabidopsis thaliana
taacagccttgcggacg

SEQ ID NO: 130476 - DNA, 17 bp, Arabidopsis thaliana
taacagcgaagttctga

SEQ ID NO: 130477 - DNA, 17 bp, Arabidopsis thaliana
taacagcgatgatgatc

SEQ ID NO: 130478 - DNA, 17 bp, Arabidopsis thaliana
taacagcgcctcgaaaa

SEQ ID NO: 130479 - DNA, 17 bp, Arabidopsis thaliana
taacagctcatttggat

SEQ ID NO: 130480 - DNA, 17 bp, Arabidopsis thaliana
taacaggattttcggtc

SEQ ID NO: 130481 - DNA, 17 bp, Arabidopsis thaliana
taacaggccgttttgat

SEQ ID NO: 130482 - DNA, 17 bp, Arabidopsis thaliana
taacagggacagtaggg

SEQ ID NO: 130483 - DNA, 17 bp, Arabidopsis thaliana
taacagggacagtcgga

SEQ ID NO: 130484 - DNA, 17 bp, Arabidopsis thaliana
taacagggacagtcggg

SEQ ID NO: 130485 - DNA, 17 bp, Arabidopsis thaliana
taacagggacattcgga

SEQ ID NO: 130486 - DNA, 17 bp, Arabidopsis thaliana
taacagggacattcggg

SEQ ID NO: 130487 - DNA, 17 bp, Arabidopsis thaliana
taacagggactcggggg

SEQ ID NO: 130488 - DNA, 17 bp, Arabidopsis thaliana
taacagggattaccatg

SEQ ID NO: 130489 - DNA, 17 bp, Arabidopsis thaliana
taacagggattggcttc

SEQ ID NO: 130490 - DNA, 17 bp, Arabidopsis thaliana
taacaggtctgtgaatg

SEQ ID NO: 130491 - DNA, 17 bp, Arabidopsis thaliana
taacaggtctgtgatcc

SEQ ID NO: 130492 - DNA, 17 bp, Arabidopsis thaliana
taacaggtctgtgatgc

SEQ ID NO: 130493 - DNA, 17 bp, Arabidopsis thaliana
taacaggtctgtgattc

SEQ ID NO: 130494 - DNA, 17 bp, Arabidopsis thaliana
taacaggtctgtggtgc

SEQ ID NO: 130495 - DNA, 17 bp, Arabidopsis thaliana
taacaggtttgcccgag

SEQ ID NO: 130496 - DNA, 17 bp, Arabidopsis thaliana
taacaggtttgtgttgc

SEQ ID NO: 130497 - DNA, 17 bp, Arabidopsis thaliana
taacagtcattttcggc

SEQ ID NO: 130498 - DNA, 17 bp, Arabidopsis thaliana
taacagtgccgataaac

SEQ ID NO: 130499 - DNA, 17 bp, Arabidopsis thaliana
taacagttaggcttcga

SEQ ID NO: 130500 - DNA, 17 bp, Arabidopsis thaliana
taacagtttgttgaccg

SEQ ID NO: 130501 - DNA, 17 bp, Arabidopsis thaliana
taacatagatactcgac

SEQ ID NO: 130502 - DNA, 17 bp, Arabidopsis thaliana
taacatagcgtttgatt

SEQ ID NO: 130503 - DNA, 17 bp, Arabidopsis thaliana
taacatattgcgttcac

SEQ ID NO: 130504 - DNA, 17 bp, Arabidopsis thaliana
taacatcactgcaagta

SEQ ID NO: 130505 - DNA, 17 bp, Arabidopsis thaliana
taacatcatctgcaggc

SEQ ID NO: 130506 - DNA, 17 bp, Arabidopsis thaliana
taacatccccccagccc

SEQ ID NO: 130507 - DNA, 17 bp, Arabidopsis thaliana
taacatccccctagccc

SEQ ID NO: 130508 - DNA, 17 bp, Arabidopsis thaliana
taacatccgttcccccc

SEQ ID NO: 130509 - DNA, 17 bp, Arabidopsis thaliana
taacatccgtttgcggt

SEQ ID NO: 130510 - DNA, 17 bp, Arabidopsis thaliana
taacatctagatgatgg

SEQ ID NO: 130511 - DNA, 17 bp, Arabidopsis thaliana
taacatctagggatttt

SEQ ID NO: 130512 - DNA, 17 bp, Arabidopsis thaliana
taacatctctggaactt

SEQ ID NO: 130513 - DNA, 17 bp, Arabidopsis thaliana
taacatcttcatcgcgt

SEQ ID NO: 130514 - DNA, 17 bp, Arabidopsis thaliana
taacatcttcgaatgtc

SEQ ID NO: 130515 - DNA, 17 bp, Arabidopsis thaliana
taacatgccagtctagg

SEQ ID NO: 130516 - DNA, 17 bp, Arabidopsis thaliana
taacatgcggtgtacct

SEQ ID NO: 130517 - DNA, 17 bp, Arabidopsis thaliana
taacatggattctgacg

SEQ ID NO: 130518 - DNA, 17 bp, Arabidopsis thaliana
taacatggtgattgact

SEQ ID NO: 130519 - DNA, 17 bp, Arabidopsis thaliana
taacattcggttcttca

SEQ ID NO: 130520 - DNA, 17 bp, Arabidopsis thaliana
taacattgcgtcctcta

SEQ ID NO: 130521 - DNA, 17 bp, Arabidopsis thaliana
taacattgctatgtcac

SEQ ID NO: 130522 - DNA, 17 bp, Arabidopsis thaliana
taacatttctcactcgg

SEQ ID NO: 130523 - DNA, 17 bp, Arabidopsis thaliana
taacatttggtccgtcc

SEQ ID NO: 130524 - DNA, 17 bp, Arabidopsis thaliana
taacattttgcggtgaa

SEQ ID NO: 130525 - DNA, 17 bp, Arabidopsis thaliana
taaccaaaacggtgtta

SEQ ID NO: 130526 - DNA, 17 bp, Arabidopsis thaliana
taaccaaacggtcgtga

SEQ ID NO: 130527 - DNA, 17 bp, Arabidopsis thaliana
taaccaaactatcgaga

SEQ ID NO: 130528 - DNA, 17 bp, Arabidopsis thaliana
taaccaaccgatcgtct

SEQ ID NO: 130529 - DNA, 17 bp, Arabidopsis thaliana
taaccaaccgtatgctg

SEQ ID NO: 130530 - DNA, 17 bp, Arabidopsis thaliana
taaccaaccttcatctt

SEQ ID NO: 130531 - DNA, 17 bp, Arabidopsis thaliana
taaccaaccttcttctt

SEQ ID NO: 130532 - DNA, 17 bp, Arabidopsis thaliana
taaccaacgtgttcttg

SEQ ID NO: 130533 - DNA, 17 bp, Arabidopsis thaliana
taaccaagcttcttctt

SEQ ID NO: 130534 - DNA, 17 bp, Arabidopsis thaliana
taaccaaggatgacttg

SEQ ID NO: 130535 - DNA, 17 bp, Arabidopsis thaliana
taaccaatcatctaacc

SEQ ID NO: 130536 - DNA, 17 bp, Arabidopsis thaliana
taaccaatcatctgacg

SEQ ID NO: 130537 - DNA, 17 bp, Arabidopsis thaliana
taaccacacttcacgcc

SEQ ID NO: 130538 - DNA, 17 bp, Arabidopsis thaliana
taaccacatgaccagat

SEQ ID NO: 130539 - DNA, 17 bp, Arabidopsis thaliana
taaccactccggcacgt

SEQ ID NO: 130540 - DNA, 17 bp, Arabidopsis thaliana
taaccactcggacatct

SEQ ID NO: 130541 - DNA, 17 bp, Arabidopsis thaliana
taaccactcggccaaag

SEQ ID NO: 130542 - DNA, 17 bp, Arabidopsis thaliana
taaccagacccaagctt

SEQ ID NO: 130543 - DNA, 17 bp, Arabidopsis thaliana
taaccagaccggtgtcc

SEQ ID NO: 130544 - DNA, 17 bp, Arabidopsis thaliana
taaccagatcagccgat

SEQ ID NO: 130545 - DNA, 17 bp, Arabidopsis thaliana
taaccagattaggcgat

SEQ ID NO: 130546 - DNA, 17 bp, Arabidopsis thaliana
taaccaggaggttcggg

SEQ ID NO: 130547 - DNA, 17 bp, Arabidopsis thaliana
taaccagtcttctccga

SEQ ID NO: 130548 - DNA, 17 bp, Arabidopsis thaliana
taaccataaagggttgc

SEQ ID NO: 130549 - DNA, 17 bp, Arabidopsis thaliana
taaccatctactcttcg

SEQ ID NO: 130550 - DNA, 17 bp, Arabidopsis thaliana
taaccatgactccaaca

SEQ ID NO: 130551 - DNA, 17 bp, Arabidopsis thaliana
taaccatgctatttgac

SEQ ID NO: 130552 - DNA, 17 bp, Arabidopsis thaliana
taaccatggacccacgt

SEQ ID NO: 130553 - DNA, 17 bp, Arabidopsis thaliana
taacccaaagcgaaccc

SEQ ID NO: 130554 - DNA, 17 bp, Arabidopsis thaliana
taacccaagtttaagcc

SEQ ID NO: 130555 - DNA, 17 bp, Arabidopsis thaliana
taacccaatctactcgt

SEQ ID NO: 130556 - DNA, 17 bp, Arabidopsis thaliana
taacccacaggtcccaa

SEQ ID NO: 130557 - DNA, 17 bp, Arabidopsis thaliana
taacccacaggtcccag

SEQ ID NO: 130558 - DNA, 17 bp, Arabidopsis thaliana
taacccacggtatatcg

SEQ ID NO: 130559 - DNA, 17 bp, Arabidopsis thaliana
taacccacttagaccga

SEQ ID NO: 130560 - DNA, 17 bp, Arabidopsis thaliana
taacccaggtatcccaa

SEQ ID NO: 130561 - DNA, 17 bp, Arabidopsis thaliana
taacccatccgcaaggc

SEQ ID NO: 130562 - DNA, 17 bp, Arabidopsis thaliana
taacccatccgcgagat

SEQ ID NO: 130563 - DNA, 17 bp, Arabidopsis thaliana
taacccatgtgggtggc

SEQ ID NO: 130564 - DNA, 17 bp, Arabidopsis thaliana
taaccccagcggaggag

SEQ ID NO: 130565 - DNA, 17 bp, Arabidopsis thaliana
taacccccgatggtgct

SEQ ID NO: 130566 - DNA, 17 bp, Arabidopsis thaliana
taaccccgttcagtgaa

SEQ ID NO: 130567 - DNA, 17 bp, Arabidopsis thaliana
taacccgagaggcccga

SEQ ID NO: 130568 - DNA, 17 bp, Arabidopsis thaliana
taacccgagttcaggtc

SEQ ID NO: 130569 - DNA, 17 bp, Arabidopsis thaliana
taacccgatgacccggt

SEQ ID NO: 130570 - DNA, 17 bp, Arabidopsis thaliana
taacccgccgtatcgcc

SEQ ID NO: 130571 - DNA, 17 bp, Arabidopsis thaliana
taacccgcggtacaccg

SEQ ID NO: 130572 - DNA, 17 bp, Arabidopsis thaliana
taacccgtcattctagg

SEQ ID NO: 130573 - DNA, 17 bp, Arabidopsis thaliana
taacccgtgacccggtg

SEQ ID NO: 130574 - DNA, 17 bp, Arabidopsis thaliana
taacccgtgttgcgtcc

SEQ ID NO: 130575 - DNA, 17 bp, Arabidopsis thaliana
taacccgttgttcatgc

SEQ ID NO: 130576 - DNA, 17 bp, Arabidopsis thaliana
taaccctattcgcagcc

SEQ ID NO: 130577 - DNA, 17 bp, Arabidopsis thaliana
taaccctgcggtgctgc

SEQ ID NO: 130578 - DNA, 17 bp, Arabidopsis thaliana
taaccctttgggttgcg

SEQ ID NO: 130579 - DNA, 17 bp, Arabidopsis thaliana
taaccctttgtcgctaa

SEQ ID NO: 130580 - DNA, 17 bp, Arabidopsis thaliana
taaccgaacccgattgg

SEQ ID NO: 130581 - DNA, 17 bp, Arabidopsis thaliana
taaccgaaggttactat

SEQ ID NO: 130582 - DNA, 17 bp, Arabidopsis thaliana
taaccgaatcagccgat

SEQ ID NO: 130583 - DNA, 17 bp, Arabidopsis thaliana
taaccgaatgaccagtg

SEQ ID NO: 130584 - DNA, 17 bp, Arabidopsis thaliana
taaccgacggatcgcat

SEQ ID NO: 130585 - DNA, 17 bp, Arabidopsis thaliana
taaccgacttgttttcg

SEQ ID NO: 130586 - DNA, 17 bp, Arabidopsis thaliana
taaccgagtcgtatcag

SEQ ID NO: 130587 - DNA, 17 bp, Arabidopsis thaliana
taaccgagttcacggcc

SEQ ID NO: 130588 - DNA, 17 bp, Arabidopsis thaliana
taaccgccttgcggatg

SEQ ID NO: 130589 - DNA, 17 bp, Arabidopsis thaliana
taaccgcgcctaggcat

SEQ ID NO: 130590 - DNA, 17 bp, Arabidopsis thaliana
taaccgcgcctatgcat

SEQ ID NO: 130591 - DNA, 17 bp, Arabidopsis thaliana
taaccgcgggtcttggc

SEQ ID NO: 130592 - DNA, 17 bp, Arabidopsis thaliana
taaccgcttgtctcgca

SEQ ID NO: 130593 - DNA, 17 bp, Arabidopsis thaliana
taaccggattagccgat

SEQ ID NO: 130594 - DNA, 17 bp, Arabidopsis thaliana
taaccggcctaaccctg

SEQ ID NO: 130595 - DNA, 17 bp, Arabidopsis thaliana
taaccgggtggtctttt

SEQ ID NO: 130596 - DNA, 17 bp, Arabidopsis thaliana
taaccgtaggaccaaaa

SEQ ID NO: 130597 - DNA, 17 bp, Arabidopsis thaliana
taaccgtgaactcttga

SEQ ID NO: 130598 - DNA, 17 bp, Arabidopsis thaliana
taaccgtgactaattta

SEQ ID NO: 130599 - DNA, 17 bp, Arabidopsis thaliana
taaccgtgcctaggcat

SEQ ID NO: 130600 - DNA, 17 bp, Arabidopsis thaliana
taaccgtgctgattcgc

SEQ ID NO: 130601 - DNA, 17 bp, Arabidopsis thaliana
taaccgtggtcattgcg

SEQ ID NO: 130602 - DNA, 17 bp, Arabidopsis thaliana
taaccgttcgccaggat

SEQ ID NO: 130603 - DNA, 17 bp, Arabidopsis thaliana
taaccgttcttgggcga

SEQ ID NO: 130604 - DNA, 17 bp, Arabidopsis thaliana
taaccgttgcagcatac

SEQ ID NO: 130605 - DNA, 17 bp, Arabidopsis thaliana
taaccgttggacatgct

SEQ ID NO: 130606 - DNA, 17 bp, Arabidopsis thaliana
taaccgttttggatcat

SEQ ID NO: 130607 - DNA, 17 bp, Arabidopsis thaliana
taacctaaccgctaccg

SEQ ID NO: 130608 - DNA, 17 bp, Arabidopsis thaliana
taacctaagtggaggga

SEQ ID NO: 130609 - DNA, 17 bp, Arabidopsis thaliana
taacctagaacccacaa

SEQ ID NO: 130610 - DNA, 17 bp, Arabidopsis thaliana
taacctagattactagc

SEQ ID NO: 130611 - DNA, 17 bp, Arabidopsis thaliana
taacctagtcccagact

SEQ ID NO: 130612 - DNA, 17 bp, Arabidopsis thaliana
taacctcgagaccttgg

SEQ ID NO: 130613 - DNA, 17 bp, Arabidopsis thaliana
taacctcggtccatatg

SEQ ID NO: 130614 - DNA, 17 bp, Arabidopsis thaliana
taacctcgtctaatgga

SEQ ID NO: 130615 - DNA, 17 bp, Arabidopsis thaliana
taacctctcagttgtag

SEQ ID NO: 130616 - DNA, 17 bp, Arabidopsis thaliana
taacctctgtgagtggt

SEQ ID NO: 130617 - DNA, 17 bp, Arabidopsis thaliana
taacctgattagacggc

SEQ ID NO: 130618 - DNA, 17 bp, Arabidopsis thaliana
taacctgcgaatactcg

SEQ ID NO: 130619 - DNA, 17 bp, Arabidopsis thaliana
taacctgcggtacatcg

SEQ ID NO: 130620 - DNA, 17 bp, Arabidopsis thaliana
taacctggtgtcggtct

SEQ ID NO: 130621 - DNA, 17 bp, Arabidopsis thaliana
taacctggtgtggatca

SEQ ID NO: 130622 - DNA, 17 bp, Arabidopsis thaliana
taacctggtgtggatcc

SEQ ID NO: 130623 - DNA, 17 bp, Arabidopsis thaliana
taacctggtgtgggtcc

SEQ ID NO: 130624 - DNA, 17 bp, Arabidopsis thaliana
taacctggtgtgggttc

SEQ ID NO: 130625 - DNA, 17 bp, Arabidopsis thaliana
taacctgtagatggatc

SEQ ID NO: 130626 - DNA, 17 bp, Arabidopsis thaliana
taacctgtgacactttg

SEQ ID NO: 130627 - DNA, 17 bp, Arabidopsis thaliana
taacctgttctttcgga

SEQ ID NO: 130628 - DNA, 17 bp, Arabidopsis thaliana
taaccttcaggttgcag

SEQ ID NO: 130629 - DNA, 17 bp, Arabidopsis thaliana
taaccttcatctcttcc

SEQ ID NO: 130630 - DNA, 17 bp, Arabidopsis thaliana
taaccttcctggtgctg

SEQ ID NO: 130631 - DNA, 17 bp, Arabidopsis thaliana
taaccttcgtgtcttgt

SEQ ID NO: 130632 - DNA, 17 bp, Arabidopsis thaliana
taaccttgacaatgttt

SEQ ID NO: 130633 - DNA, 17 bp, Arabidopsis thaliana
taaccttgcaacaggat

SEQ ID NO: 130634 - DNA, 17 bp, Arabidopsis thaliana
taaccttgggatgggtc

SEQ ID NO: 130635 - DNA, 17 bp, Arabidopsis thaliana
taaccttgtgtcaggac

SEQ ID NO: 130636 - DNA, 17 bp, Arabidopsis thaliana
taaccttttcggtcccg

SEQ ID NO: 130637 - DNA, 17 bp, Arabidopsis thaliana
taacgaaccagacctcc

SEQ ID NO: 130638 - DNA, 17 bp, Arabidopsis thaliana
taacgaacgagacctca

SEQ ID NO: 130639 - DNA, 17 bp, Arabidopsis thaliana
taacgaattctgttgac

SEQ ID NO: 130640 - DNA, 17 bp, Arabidopsis thaliana
taacgacaatcgccagt

SEQ ID NO: 130641 - DNA, 17 bp, Arabidopsis thaliana
taacgacacttggtatc

SEQ ID NO: 130642 - DNA, 17 bp, Arabidopsis thaliana
taacgacacttggtctt

SEQ ID NO: 130643 - DNA, 17 bp, Arabidopsis thaliana
taacgacacttggttat

SEQ ID NO: 130644 - DNA, 17 bp, Arabidopsis thaliana
taacgacagtcgccagc

SEQ ID NO: 130645 - DNA, 17 bp, Arabidopsis thaliana
taacgaccatatcgttt

SEQ ID NO: 130646 - DNA, 17 bp, Arabidopsis thaliana
taacgacccagaaagct

SEQ ID NO: 130647 - DNA, 17 bp, Arabidopsis thaliana
taacgacgaagtcccga

SEQ ID NO: 130648 - DNA, 17 bp, Arabidopsis thaliana
taacgacggatcgcatg

SEQ ID NO: 130649 - DNA, 17 bp, Arabidopsis thaliana
taacgacgtattggttt

SEQ ID NO: 130650 - DNA, 17 bp, Arabidopsis thaliana
taacgacgtgcccaaaa

SEQ ID NO: 130651 - DNA, 17 bp, Arabidopsis thaliana
taacgactaatctgcga

SEQ ID NO: 130652 - DNA, 17 bp, Arabidopsis thaliana
taacgactaatgctgga

SEQ ID NO: 130653 - DNA, 17 bp, Arabidopsis thaliana
taacgactgatggctga

SEQ ID NO: 130654 - DNA, 17 bp, Arabidopsis thaliana
taacgactgccccgctg

SEQ ID NO: 130655 - DNA, 17 bp, Arabidopsis thaliana
taacgactgctaacgtc

SEQ ID NO: 130656 - DNA, 17 bp, Arabidopsis thaliana
taacgacttgggcgctg

SEQ ID NO: 130657 - DNA, 17 bp, Arabidopsis thaliana
taacgactttaaattct

SEQ ID NO: 130658 - DNA, 17 bp, Arabidopsis thaliana
taacgagaccgagtatc

SEQ ID NO: 130659 - DNA, 17 bp, Arabidopsis thaliana
taacgagattcccactc

SEQ ID NO: 130660 - DNA, 17 bp, Arabidopsis thaliana
taacgagattcccactg

SEQ ID NO: 130661 - DNA, 17 bp, Arabidopsis thaliana
taacgagccaatcctga

SEQ ID NO: 130662 - DNA, 17 bp, Arabidopsis thaliana
taacgaggatccattga

SEQ ID NO: 130663 - DNA, 17 bp, Arabidopsis thaliana
taacgaggatccattgg

SEQ ID NO: 130664 - DNA, 17 bp, Arabidopsis thaliana
taacgaggttccattgg

SEQ ID NO: 130665 - DNA, 17 bp, Arabidopsis thaliana
taacgagtttcccactg

SEQ ID NO: 130666 - DNA, 17 bp, Arabidopsis thaliana
taacgatcgacattacg

SEQ ID NO: 130667 - DNA, 17 bp, Arabidopsis thaliana
taacgatctgggcactg

SEQ ID NO: 130668 - DNA, 17 bp, Arabidopsis thaliana
taacgatgacgttcacg

SEQ ID NO: 130669 - DNA, 17 bp, Arabidopsis thaliana
taacgatgattccaact

SEQ ID NO: 130670 - DNA, 17 bp, Arabidopsis thaliana
taacgattttgagggtc

SEQ ID NO: 130671 - DNA, 17 bp, Arabidopsis thaliana
taacgcaacaggtgcgg

SEQ ID NO: 130672 - DNA, 17 bp, Arabidopsis thaliana
taacgcaatgtgatttc

SEQ ID NO: 130673 - DNA, 17 bp, Arabidopsis thaliana
taacgcagcgtcagcga

SEQ ID NO: 130674 - DNA, 17 bp, Arabidopsis thaliana
taacgcaggtgtcctaa

SEQ ID NO: 130675 - DNA, 17 bp, Arabidopsis thaliana
taacgcatttgaccaca

SEQ ID NO: 130676 - DNA, 17 bp, Arabidopsis thaliana
taacgcccgttaactcg

SEQ ID NO: 130677 - DNA, 17 bp, Arabidopsis thaliana
taacgccgttgagtcgc

SEQ ID NO: 130678 - DNA, 17 bp, Arabidopsis thaliana
taacgcctgttatcgac

SEQ ID NO: 130679 - DNA, 17 bp, Arabidopsis thaliana
taacgcgatatagcggc

SEQ ID NO: 130680 - DNA, 17 bp, Arabidopsis thaliana
taacgcgtaagaacctg

SEQ ID NO: 130681 - DNA, 17 bp, Arabidopsis thaliana
taacgctaagttgttcg

SEQ ID NO: 130682 - DNA, 17 bp, Arabidopsis thaliana
taacgctgactctgttt

SEQ ID NO: 130683 - DNA, 17 bp, Arabidopsis thaliana
taacgctgacttgtgta

SEQ ID NO: 130684 - DNA, 17 bp, Arabidopsis thaliana
taacgctgcgcttttct

SEQ ID NO: 130685 - DNA, 17 bp, Arabidopsis thaliana
taacgctggaggtatgc

SEQ ID NO: 130686 - DNA, 17 bp, Arabidopsis thaliana
taacgcttcgtcagttc

SEQ ID NO: 130687 - DNA, 17 bp, Arabidopsis thaliana
taacgctttctccgcac

SEQ ID NO: 130688 - DNA, 17 bp, Arabidopsis thaliana
taacgctttggttggaa

SEQ ID NO: 130689 - DNA, 17 bp, Arabidopsis thaliana
taacggaacagtgatag

SEQ ID NO: 130690 - DNA, 17 bp, Arabidopsis thaliana
taacggaagcacgatca

SEQ ID NO: 130691 - DNA, 17 bp, Arabidopsis thaliana
taacggaatcgctaacc

SEQ ID NO: 130692 - DNA, 17 bp, Arabidopsis thaliana
taacggaatcgctaact

SEQ ID NO: 130693 - DNA, 17 bp, Arabidopsis thaliana
taacggaatctaactat

SEQ ID NO: 130694 - DNA, 17 bp, Arabidopsis thaliana
taacggacgttacggta

SEQ ID NO: 130695 - DNA, 17 bp, Arabidopsis thaliana
taacggacgttagaagt

SEQ ID NO: 130696 - DNA, 17 bp, Arabidopsis thaliana
taacggactcaggccgg

SEQ ID NO: 130697 - DNA, 17 bp, Arabidopsis thaliana
taacggatcattatgcg

SEQ ID NO: 130698 - DNA, 17 bp, Arabidopsis thaliana
taacggatggtctaact

SEQ ID NO: 130699 - DNA, 17 bp, Arabidopsis thaliana
taacggatgttctgtaa

SEQ ID NO: 130700 - DNA, 17 bp, Arabidopsis thaliana
taacggcagcccgagat

SEQ ID NO: 130701 - DNA, 17 bp, Arabidopsis thaliana
taacggcattttgactg

SEQ ID NO: 130702 - DNA, 17 bp, Arabidopsis thaliana
taacggcgagcgaaccg

SEQ ID NO: 130703 - DNA, 17 bp, Arabidopsis thaliana
taacggcgtgcctcggc

SEQ ID NO: 130704 - DNA, 17 bp, Arabidopsis thaliana
taacggctcagaaatct

SEQ ID NO: 130705 - DNA, 17 bp, Arabidopsis thaliana
taacgggtaatttccgg

SEQ ID NO: 130706 - DNA, 17 bp, Arabidopsis thaliana
taacgggtttgcaggct

SEQ ID NO: 130707 - DNA, 17 bp, Arabidopsis thaliana
taacggtcctaaggtag

SEQ ID NO: 130708 - DNA, 17 bp, Arabidopsis thaliana
taacggtcgttaccaat

SEQ ID NO: 130709 - DNA, 17 bp, Arabidopsis thaliana
taacggtctgctctttt

SEQ ID NO: 130710 - DNA, 17 bp, Arabidopsis thaliana
taacggtctggctatct

SEQ ID NO: 130711 - DNA, 17 bp, Arabidopsis thaliana
taacggtgaatcgattt

SEQ ID NO: 130712 - DNA, 17 bp, Arabidopsis thaliana
taacggtgagtcgattt

SEQ ID NO: 130713 - DNA, 17 bp, Arabidopsis thaliana
taacggtgatggtaaca

SEQ ID NO: 130714 - DNA, 17 bp, Arabidopsis thaliana
taacggttacggttaaa

SEQ ID NO: 130715 - DNA, 17 bp, Arabidopsis thaliana
taacgtagcttgtgaca

SEQ ID NO: 130716 - DNA, 17 bp, Arabidopsis thaliana
taacgtcaagagcaaat

SEQ ID NO: 130717 - DNA, 17 bp, Arabidopsis thaliana
taacgtcctactagttg

SEQ ID NO: 130718 - DNA, 17 bp, Arabidopsis thaliana
taacgtcctgacaatgc

SEQ ID NO: 130719 - DNA, 17 bp, Arabidopsis thaliana
taacgtcctgccaaacc

SEQ ID NO: 130720 - DNA, 17 bp, Arabidopsis thaliana
taacgtcctgccaaact

SEQ ID NO: 130721 - DNA, 17 bp, Arabidopsis thaliana
taacgtcgcagggtttt

SEQ ID NO: 130722 - DNA, 17 bp, Arabidopsis thaliana
taacgtcgcaggttttt

SEQ ID NO: 130723 - DNA, 17 bp, Arabidopsis thaliana
taacgtcggttaactta

SEQ ID NO: 130724 - DNA, 17 bp, Arabidopsis thaliana
taacgtcgtgtggattt

SEQ ID NO: 130725 - DNA, 17 bp, Arabidopsis thaliana
taacgtctgcctgggtg

SEQ ID NO: 130726 - DNA, 17 bp, Arabidopsis thaliana
taacgtctggctgagtt

SEQ ID NO: 130727 - DNA, 17 bp, Arabidopsis thaliana
taacgtcttgccaaacc

SEQ ID NO: 130728 - DNA, 17 bp, Arabidopsis thaliana
taacgtcttgggatttt

SEQ ID NO: 130729 - DNA, 17 bp, Arabidopsis thaliana
taacgttatttgattcc

SEQ ID NO: 130730 - DNA, 17 bp, Arabidopsis thaliana
taacgttgacgtcttct

SEQ ID NO: 130731 - DNA, 17 bp, Arabidopsis thaliana
taacgttgtcagggtta

SEQ ID NO: 130732 - DNA, 17 bp, Arabidopsis thaliana
taactaaaacgactctc

SEQ ID NO: 130733 - DNA, 17 bp, Arabidopsis thaliana
taactaaaatcggcgaa

SEQ ID NO: 130734 - DNA, 17 bp, Arabidopsis thaliana
taactaaaatctccgga

SEQ ID NO: 130735 - DNA, 17 bp, Arabidopsis thaliana
taactaaaatctggttg

SEQ ID NO: 130736 - DNA, 17 bp, Arabidopsis thaliana
taactaaaccattggga

SEQ ID NO: 130737 - DNA, 17 bp, Arabidopsis thaliana
taactaaaccgaacagg

SEQ ID NO: 130738 - DNA, 17 bp, Arabidopsis thaliana
taactaaaccgttgcgg

SEQ ID NO: 130739 - DNA, 17 bp, Arabidopsis thaliana
taactaaactgagatcc

SEQ ID NO: 130740 - DNA, 17 bp, Arabidopsis thaliana
taactaaactgccaaca

SEQ ID NO: 130741 - DNA, 17 bp, Arabidopsis thaliana
taactaaacttggtccg

SEQ ID NO: 130742 - DNA, 17 bp, Arabidopsis thaliana
taactaaacttttgacc

SEQ ID NO: 130743 - DNA, 17 bp, Arabidopsis thaliana
taactaaagtctggatg

SEQ ID NO: 130744 - DNA, 17 bp, Arabidopsis thaliana
taactaaatctttctgc

SEQ ID NO: 130745 - DNA, 17 bp, Arabidopsis thaliana
taactaacaaagcaggt

SEQ ID NO: 130746 - DNA, 17 bp, Arabidopsis thaliana
taactaacaccgaaatc

SEQ ID NO: 130747 - DNA, 17 bp, Arabidopsis thaliana
taactaacagggacagt

SEQ ID NO: 130748 - DNA, 17 bp, Arabidopsis thaliana
taactaacatccgtttg

SEQ ID NO: 130749 - DNA, 17 bp, Arabidopsis thaliana
taactaacccaaaataa

SEQ ID NO: 130750 - DNA, 17 bp, Arabidopsis thaliana
taactaacccgagttca

SEQ ID NO: 130751 - DNA, 17 bp, Arabidopsis thaliana
taactaacctagtccca

SEQ ID NO: 130752 - DNA, 17 bp, Arabidopsis thaliana
taactaacctgcgaata

SEQ ID NO: 130753 - DNA, 17 bp, Arabidopsis thaliana
taactaaccttgcaaca

SEQ ID NO: 130754 - DNA, 17 bp, Arabidopsis thaliana
taactaacgagatccct

SEQ ID NO: 130755 - DNA, 17 bp, Arabidopsis thaliana
taactaacgcaatgtga

SEQ ID NO: 130756 - DNA, 17 bp, Arabidopsis thaliana
taactaacgccgtagcc

SEQ ID NO: 130757 - DNA, 17 bp, Arabidopsis thaliana
taactaacggacgttac

SEQ ID NO: 130758 - DNA, 17 bp, Arabidopsis thaliana
taactaacggtcgttac

SEQ ID NO: 130759 - DNA, 17 bp, Arabidopsis thaliana
taactaacgtttttgtt

SEQ ID NO: 130760 - DNA, 17 bp, Arabidopsis thaliana
taactaactcgacggat

SEQ ID NO: 130761 - DNA, 17 bp, Arabidopsis thaliana
taactaactcggccttt

SEQ ID NO: 130762 - DNA, 17 bp, Arabidopsis thaliana
taactaactctgtgcca

SEQ ID NO: 130763 - DNA, 17 bp, Arabidopsis thaliana
taactaactgcagttct

SEQ ID NO: 130764 - DNA, 17 bp, Arabidopsis thaliana
taactaacttcttcgag

SEQ ID NO: 130765 - DNA, 17 bp, Arabidopsis thaliana
taactaacttttagacc

SEQ ID NO: 130766 - DNA, 17 bp, Arabidopsis thaliana
taactaagactaccatt

SEQ ID NO: 130767 - DNA, 17 bp, Arabidopsis thaliana
taactaagagcatgcac

SEQ ID NO: 130768 - DNA, 17 bp, Arabidopsis thaliana
taactaagattccaggt

SEQ ID NO: 130769 - DNA, 17 bp, Arabidopsis thaliana
taactaagcttagttag

SEQ ID NO: 130770 - DNA, 17 bp, Arabidopsis thaliana
taactaagcttcagggc

SEQ ID NO: 130771 - DNA, 17 bp, Arabidopsis thaliana
taactaaggattctgat

SEQ ID NO: 130772 - DNA, 17 bp, Arabidopsis thaliana
taactaagtaacgtcct

SEQ ID NO: 130773 - DNA, 17 bp, Arabidopsis thaliana
taactaagtctcagagc

SEQ ID NO: 130774 - DNA, 17 bp, Arabidopsis thaliana
taactaagttcaatgcc

SEQ ID NO: 130775 - DNA, 17 bp, Arabidopsis thaliana
taactaatccgagaaga

SEQ ID NO: 130776 - DNA, 17 bp, Arabidopsis thaliana
taactaatcgcaggtca

SEQ ID NO: 130777 - DNA, 17 bp, Arabidopsis thaliana
taactaatcgcaggtcg

SEQ ID NO: 130778 - DNA, 17 bp, Arabidopsis thaliana
taactaatctagctgaa

SEQ ID NO: 130779 - DNA, 17 bp, Arabidopsis thaliana
taactaatgatcattgc

SEQ ID NO: 130780 - DNA, 17 bp, Arabidopsis thaliana
taactaattcggagata

SEQ ID NO: 130781 - DNA, 17 bp, Arabidopsis thaliana
taactaattttgcggtc

SEQ ID NO: 130782 - DNA, 17 bp, Arabidopsis thaliana
taactacactcagacat

SEQ ID NO: 130783 - DNA, 17 bp, Arabidopsis thaliana
taactacatttgccacg

SEQ ID NO: 130784 - DNA, 17 bp, Arabidopsis thaliana
taactacccctggcatt

SEQ ID NO: 130785 - DNA, 17 bp, Arabidopsis thaliana
taactacctcgtcacgg

SEQ ID NO: 130786 - DNA, 17 bp, Arabidopsis thaliana
taactacctgatgtata

SEQ ID NO: 130787 - DNA, 17 bp, Arabidopsis thaliana
taactacggaagatgga

SEQ ID NO: 130788 - DNA, 17 bp, Arabidopsis thaliana
taactacgtgccagcag

SEQ ID NO: 130789 - DNA, 17 bp, Arabidopsis thaliana
taactactggacccagg

SEQ ID NO: 130790 - DNA, 17 bp, Arabidopsis thaliana
taactagatattgaccc

SEQ ID NO: 130791 - DNA, 17 bp, Arabidopsis thaliana
taactagattttgatcc

SEQ ID NO: 130792 - DNA, 17 bp, Arabidopsis thaliana
taactagctacgtggag

SEQ ID NO: 130793 - DNA, 17 bp, Arabidopsis thaliana
taactaggatatgaccc

SEQ ID NO: 130794 - DNA, 17 bp, Arabidopsis thaliana
taactagggagaacgag

SEQ ID NO: 130795 - DNA, 17 bp, Arabidopsis thaliana
taactaggtgagtgccc

SEQ ID NO: 130796 - DNA, 17 bp, Arabidopsis thaliana
taactatatgtcgctac

SEQ ID NO: 130797 - DNA, 17 bp, Arabidopsis thaliana
taactatcaaagcggta

SEQ ID NO: 130798 - DNA, 17 bp, Arabidopsis thaliana
taactatcgagggttga

SEQ ID NO: 130799 - DNA, 17 bp, Arabidopsis thaliana
taactatgactctcttt

SEQ ID NO: 130800 - DNA, 17 bp, Arabidopsis thaliana
taactatggaccacgtt

SEQ ID NO: 130801 - DNA, 17 bp, Arabidopsis thaliana
taactatgtctctttca

SEQ ID NO: 130802 - DNA, 17 bp, Arabidopsis thaliana
taactatgttgtgcccc

SEQ ID NO: 130803 - DNA, 17 bp, Arabidopsis thaliana
taactatgttgtgccct

SEQ ID NO: 130804 - DNA, 17 bp, Arabidopsis thaliana
taactattagctcagtg

SEQ ID NO: 130805 - DNA, 17 bp, Arabidopsis thaliana
taactcaaagattatcg

SEQ ID NO: 130806 - DNA, 17 bp, Arabidopsis thaliana
taactcaaccgggacaa

SEQ ID NO: 130807 - DNA, 17 bp, Arabidopsis thaliana
taactcaacgaatcaag

SEQ ID NO: 130808 - DNA, 17 bp, Arabidopsis thaliana
taactcaacggatcgca

SEQ ID NO: 130809 - DNA, 17 bp, Arabidopsis thaliana
taactcaagaacagctc

SEQ ID NO: 130810 - DNA, 17 bp, Arabidopsis thaliana
taactcaagaatagggc

SEQ ID NO: 130811 - DNA, 17 bp, Arabidopsis thaliana
taactcagccgtaactg

SEQ ID NO: 130812 - DNA, 17 bp, Arabidopsis thaliana
taactcagggatgtgtt

SEQ ID NO: 130813 - DNA, 17 bp, Arabidopsis thaliana
taactcaggtgtggctg

SEQ ID NO: 130814 - DNA, 17 bp, Arabidopsis thaliana
taactcataggatcgtg

SEQ ID NO: 130815 - DNA, 17 bp, Arabidopsis thaliana
taactccaaggtcgttg

SEQ ID NO: 130816 - DNA, 17 bp, Arabidopsis thaliana
taactccagttctgcga

SEQ ID NO: 130817 - DNA, 17 bp, Arabidopsis thaliana
taactccctcattagct

SEQ ID NO: 130818 - DNA, 17 bp, Arabidopsis thaliana
taactccggtctacatg

SEQ ID NO: 130819 - DNA, 17 bp, Arabidopsis thaliana
taactcgacggatcatg

SEQ ID NO: 130820 - DNA, 17 bp, Arabidopsis thaliana
taactcgacggatcgaa

SEQ ID NO: 130821 - DNA, 17 bp, Arabidopsis thaliana
taactcgacggatcgat

SEQ ID NO: 130822 - DNA, 17 bp, Arabidopsis thaliana
taactcgacggatcgca

SEQ ID NO: 130823 - DNA, 17 bp, Arabidopsis thaliana
taactcgacggatcgcc

SEQ ID NO: 130824 - DNA, 17 bp, Arabidopsis thaliana
taactcgacggatcgcg

SEQ ID NO: 130825 - DNA, 17 bp, Arabidopsis thaliana
taactcgacggatcgct

SEQ ID NO: 130826 - DNA, 17 bp, Arabidopsis thaliana
taactcgacggatcgta

SEQ ID NO: 130827 - DNA, 17 bp, Arabidopsis thaliana
taactcgacttgactcc

SEQ ID NO: 130828 - DNA, 17 bp, Arabidopsis thaliana
taactcgatttcgtctt

SEQ ID NO: 130829 - DNA, 17 bp, Arabidopsis thaliana
taactcgccgtatgcac

SEQ ID NO: 130830 - DNA, 17 bp, Arabidopsis thaliana
taactcgctgattaacc

SEQ ID NO: 130831 - DNA, 17 bp, Arabidopsis thaliana
taactcgctggtgagtc

SEQ ID NO: 130832 - DNA, 17 bp, Arabidopsis thaliana
taactcggcgatcaacc

SEQ ID NO: 130833 - DNA, 17 bp, Arabidopsis thaliana
taactcgggacacaggc

SEQ ID NO: 130834 - DNA, 17 bp, Arabidopsis thaliana
taactcggtcattgtgt

SEQ ID NO: 130835 - DNA, 17 bp, Arabidopsis thaliana
taactcggtctcaggca

SEQ ID NO: 130836 - DNA, 17 bp, Arabidopsis thaliana
taactcgttggctaaac

SEQ ID NO: 130837 - DNA, 17 bp, Arabidopsis thaliana
taactctagaacttgga

SEQ ID NO: 130838 - DNA, 17 bp, Arabidopsis thaliana
taactctctcccacaac

SEQ ID NO: 130839 - DNA, 17 bp, Arabidopsis thaliana
taactctctccttctgc

SEQ ID NO: 130840 - DNA, 17 bp, Arabidopsis thaliana
taactctcttccacaac

SEQ ID NO: 130841 - DNA, 17 bp, Arabidopsis thaliana
taactctgaatgtgaat

SEQ ID NO: 130842 - DNA, 17 bp, Arabidopsis thaliana
taactctgtgccagcag

SEQ ID NO: 130843 - DNA, 17 bp, Arabidopsis thaliana
taactctgttcagatcc

SEQ ID NO: 130844 - DNA, 17 bp, Arabidopsis thaliana
taactctgttcgaatcc

SEQ ID NO: 130845 - DNA, 17 bp, Arabidopsis thaliana
taactctgttcggatca

SEQ ID NO: 130846 - DNA, 17 bp, Arabidopsis thaliana
taactctgttcggatcc

SEQ ID NO: 130847 - DNA, 17 bp, Arabidopsis thaliana
taactctgttcggatct

SEQ ID NO: 130848 - DNA, 17 bp, Arabidopsis thaliana
taactcttcagctaact

SEQ ID NO: 130849 - DNA, 17 bp, Arabidopsis thaliana
taactcttggtctggac

SEQ ID NO: 130850 - DNA, 17 bp, Arabidopsis thaliana
taactctttggcatgaa

SEQ ID NO: 130851 - DNA, 17 bp, Arabidopsis thaliana
taactgaaaagtctcac

SEQ ID NO: 130852 - DNA, 17 bp, Arabidopsis thaliana
taactgaaagttaacgc

SEQ ID NO: 130853 - DNA, 17 bp, Arabidopsis thaliana
taactgaaccgcaccgt

SEQ ID NO: 130854 - DNA, 17 bp, Arabidopsis thaliana
taactgaaccgggtctg

SEQ ID NO: 130855 - DNA, 17 bp, Arabidopsis thaliana
taactgacggatcgcat

SEQ ID NO: 130856 - DNA, 17 bp, Arabidopsis thaliana
taactgagaggtgttgc

SEQ ID NO: 130857 - DNA, 17 bp, Arabidopsis thaliana
taactgagattttagac

SEQ ID NO: 130858 - DNA, 17 bp, Arabidopsis thaliana
taactgatctgtgcgta

SEQ ID NO: 130859 - DNA, 17 bp, Arabidopsis thaliana
taactgatttcggccaa

SEQ ID NO: 130860 - DNA, 17 bp, Arabidopsis thaliana
taactgcaacaacatat

SEQ ID NO: 130861 - DNA, 17 bp, Arabidopsis thaliana
taactgcaatagaatcg

SEQ ID NO: 130862 - DNA, 17 bp, Arabidopsis thaliana
taactgcagttcttgcc

SEQ ID NO: 130863 - DNA, 17 bp, Arabidopsis thaliana
taactgcatgcaggtgt

SEQ ID NO: 130864 - DNA, 17 bp, Arabidopsis thaliana
taactgcgaactaacca

SEQ ID NO: 130865 - DNA, 17 bp, Arabidopsis thaliana
taactgcgaactaaccg

SEQ ID NO: 130866 - DNA, 17 bp, Arabidopsis thaliana
taactgcgaactaactg

SEQ ID NO: 130867 - DNA, 17 bp, Arabidopsis thaliana
taactgcgaagttctga

SEQ ID NO: 130868 - DNA, 17 bp, Arabidopsis thaliana
taactgcgatcgtctca

SEQ ID NO: 130869 - DNA, 17 bp, Arabidopsis thaliana
taactgcggaccgtcct

SEQ ID NO: 130870 - DNA, 17 bp, Arabidopsis thaliana
taactgcggaccgtctt

SEQ ID NO: 130871 - DNA, 17 bp, Arabidopsis thaliana
taactgcggagttctga

SEQ ID NO: 130872 - DNA, 17 bp, Arabidopsis thaliana
taactgcggctctttac

SEQ ID NO: 130873 - DNA, 17 bp, Arabidopsis thaliana
taactgcggcttgctat

SEQ ID NO: 130874 - DNA, 17 bp, Arabidopsis thaliana
taactgcttgatccgct

SEQ ID NO: 130875 - DNA, 17 bp, Arabidopsis thaliana
taactggagccagatcc

SEQ ID NO: 130876 - DNA, 17 bp, Arabidopsis thaliana
taactggattttctgca

SEQ ID NO: 130877 - DNA, 17 bp, Arabidopsis thaliana
taactggattttggatc

SEQ ID NO: 130878 - DNA, 17 bp, Arabidopsis thaliana
taactggcttgtggcag

SEQ ID NO: 130879 - DNA, 17 bp, Arabidopsis thaliana
taactgggctcaattca

SEQ ID NO: 130880 - DNA, 17 bp, Arabidopsis thaliana
taactggtacggacaag

SEQ ID NO: 130881 - DNA, 17 bp, Arabidopsis thaliana
taactggtcatgttaaa

SEQ ID NO: 130882 - DNA, 17 bp, Arabidopsis thaliana
taactgtacagccgcac

SEQ ID NO: 130883 - DNA, 17 bp, Arabidopsis thaliana
taactgtcctgacagac

SEQ ID NO: 130884 - DNA, 17 bp, Arabidopsis thaliana
taactgtcggaatacag

SEQ ID NO: 130885 - DNA, 17 bp, Arabidopsis thaliana
taactgtgggcgaatct

SEQ ID NO: 130886 - DNA, 17 bp, Arabidopsis thaliana
taactgttgtagtgacg

SEQ ID NO: 130887 - DNA, 17 bp, Arabidopsis thaliana
taacttaaaccgcaacc

SEQ ID NO: 130888 - DNA, 17 bp, Arabidopsis thaliana
taacttacgagatgtgc

SEQ ID NO: 130889 - DNA, 17 bp, Arabidopsis thaliana
taacttagctcatggac

SEQ ID NO: 130890 - DNA, 17 bp, Arabidopsis thaliana
taacttagggtccgaat

SEQ ID NO: 130891 - DNA, 17 bp, Arabidopsis thaliana
taacttatgattacacc

SEQ ID NO: 130892 - DNA, 17 bp, Arabidopsis thaliana
taacttatggcagtcca

SEQ ID NO: 130893 - DNA, 17 bp, Arabidopsis thaliana
taacttatgtgtgattg

SEQ ID NO: 130894 - DNA, 17 bp, Arabidopsis thaliana
taacttatttacaatgg

SEQ ID NO: 130895 - DNA, 17 bp, Arabidopsis thaliana
taacttcacagtgtgac

SEQ ID NO: 130896 - DNA, 17 bp, Arabidopsis thaliana
taacttcactaggtctg

SEQ ID NO: 130897 - DNA, 17 bp, Arabidopsis thaliana
taacttccgatgtggga

SEQ ID NO: 130898 - DNA, 17 bp, Arabidopsis thaliana
taacttcgccagactac

SEQ ID NO: 130899 - DNA, 17 bp, Arabidopsis thaliana
taacttcggattcggtt

SEQ ID NO: 130900 - DNA, 17 bp, Arabidopsis thaliana
taacttcgggaaaagga

SEQ ID NO: 130901 - DNA, 17 bp, Arabidopsis thaliana
taacttcgggagaaggg

SEQ ID NO: 130902 - DNA, 17 bp, Arabidopsis thaliana
taacttctaacaatggc

SEQ ID NO: 130903 - DNA, 17 bp, Arabidopsis thaliana
taacttctagaccgtga

SEQ ID NO: 130904 - DNA, 17 bp, Arabidopsis thaliana
taacttctataccgtga

SEQ ID NO: 130905 - DNA, 17 bp, Arabidopsis thaliana
taacttctatattgtga

SEQ ID NO: 130906 - DNA, 17 bp, Arabidopsis thaliana
taacttctgagcccgtg

SEQ ID NO: 130907 - DNA, 17 bp, Arabidopsis thaliana
taacttctgtaccgtga

SEQ ID NO: 130908 - DNA, 17 bp, Arabidopsis thaliana
taacttcttcgagaagt

SEQ ID NO: 130909 - DNA, 17 bp, Arabidopsis thaliana
taacttgacatgtggca

SEQ ID NO: 130910 - DNA, 17 bp, Arabidopsis thaliana
taacttgatgtgtcctt

SEQ ID NO: 130911 - DNA, 17 bp, Arabidopsis thaliana
taacttgcggacggttt

SEQ ID NO: 130912 - DNA, 17 bp, Arabidopsis thaliana
taacttgcttgattggg

SEQ ID NO: 130913 - DNA, 17 bp, Arabidopsis thaliana
taacttggctctgatac

SEQ ID NO: 130914 - DNA, 17 bp, Arabidopsis thaliana
taacttggtccgcagcg

SEQ ID NO: 130915 - DNA, 17 bp, Arabidopsis thaliana
taacttggtgcgaattc

SEQ ID NO: 130916 - DNA, 17 bp, Arabidopsis thaliana
taacttggtgtagatcc

SEQ ID NO: 130917 - DNA, 17 bp, Arabidopsis thaliana
taacttggtgtgagtcc

SEQ ID NO: 130918 - DNA, 17 bp, Arabidopsis thaliana
taacttggtgtgggtcc

SEQ ID NO: 130919 - DNA, 17 bp, Arabidopsis thaliana
taacttggtgtgtgtct

SEQ ID NO: 130920 - DNA, 17 bp, Arabidopsis thaliana
taacttgtctcggagcg

SEQ ID NO: 130921 - DNA, 17 bp, Arabidopsis thaliana
taacttgtggtcatttc

SEQ ID NO: 130922 - DNA, 17 bp, Arabidopsis thaliana
taacttgttggctacca

SEQ ID NO: 130923 - DNA, 17 bp, Arabidopsis thaliana
taactttaagaccgtga

SEQ ID NO: 130924 - DNA, 17 bp, Arabidopsis thaliana
taactttagagatggta

SEQ ID NO: 130925 - DNA, 17 bp, Arabidopsis thaliana
taactttattgtagaaa

SEQ ID NO: 130926 - DNA, 17 bp, Arabidopsis thaliana
taactttctccaggttc

SEQ ID NO: 130927 - DNA, 17 bp, Arabidopsis thaliana
taactttctccagttgc

SEQ ID NO: 130928 - DNA, 17 bp, Arabidopsis thaliana
taactttgccaaccctt

SEQ ID NO: 130929 - DNA, 17 bp, Arabidopsis thaliana
taactttgtcaaagcct

SEQ ID NO: 130930 - DNA, 17 bp, Arabidopsis thaliana
taactttgtcaactcca

SEQ ID NO: 130931 - DNA, 17 bp, Arabidopsis thaliana
taactttgtgtaaatcc

SEQ ID NO: 130932 - DNA, 17 bp, Arabidopsis thaliana
taacttttagaccgtca

SEQ ID NO: 130933 - DNA, 17 bp, Arabidopsis thaliana
taacttttagaccgtga

SEQ ID NO: 130934 - DNA, 17 bp, Arabidopsis thaliana
taacttttaggcgcaat

SEQ ID NO: 130935 - DNA, 17 bp, Arabidopsis thaliana
taacttttcataatgtt

SEQ ID NO: 130936 - DNA, 17 bp, Arabidopsis thaliana
taacttttgctcttgga

SEQ ID NO: 130937 - DNA, 17 bp, Arabidopsis thaliana
taacttttggagcgtct

SEQ ID NO: 130938 - DNA, 17 bp, Arabidopsis thaliana
taacttttgtcgctaag

SEQ ID NO: 130939 - DNA, 17 bp, Arabidopsis thaliana
taagaaaagggttggct

SEQ ID NO: 130940 - DNA, 17 bp, Arabidopsis thaliana
taagaaaatttaaggcg

SEQ ID NO: 130941 - DNA, 17 bp, Arabidopsis thaliana
taagaaacgatagtcgc

SEQ ID NO: 130942 - DNA, 17 bp, Arabidopsis thaliana
taagaaacgatggtggt

SEQ ID NO: 130943 - DNA, 17 bp, Arabidopsis thaliana
taagaaaggacggaact

SEQ ID NO: 130944 - DNA, 17 bp, Arabidopsis thaliana
taagaacaggttgcggt

SEQ ID NO: 130945 - DNA, 17 bp, Arabidopsis thaliana
taagaaccagttgcggt

SEQ ID NO: 130946 - DNA, 17 bp, Arabidopsis thaliana
taagaacttaaaccgca

SEQ ID NO: 130947 - DNA, 17 bp, Arabidopsis thaliana
taagaacttaaaccgta

SEQ ID NO: 130948 - DNA, 17 bp, Arabidopsis thaliana
taagaagaccctgttga

SEQ ID NO: 130949 - DNA, 17 bp, Arabidopsis thaliana
taagaagcacaaggtct

SEQ ID NO: 130950 - DNA, 17 bp, Arabidopsis thaliana
taagaagtcgagtggca

SEQ ID NO: 130951 - DNA, 17 bp, Arabidopsis thaliana
taagaagtctaggtggc

SEQ ID NO: 130952 - DNA, 17 bp, Arabidopsis thaliana
taagaagttcattgagg

SEQ ID NO: 130953 - DNA, 17 bp, Arabidopsis thaliana
taagaatcggattcggt

SEQ ID NO: 130954 - DNA, 17 bp, Arabidopsis thaliana
taagaatgtgttgtgcg

SEQ ID NO: 130955 - DNA, 17 bp, Arabidopsis thaliana
taagaattagattctga

SEQ ID NO: 130956 - DNA, 17 bp, Arabidopsis thaliana
taagacagcaggacggt

SEQ ID NO: 130957 - DNA, 17 bp, Arabidopsis thaliana
taagacagttgccagcg

SEQ ID NO: 130958 - DNA, 17 bp, Arabidopsis thaliana
taagaccatctccattg

SEQ ID NO: 130959 - DNA, 17 bp, Arabidopsis thaliana
taagacccacggcgaat

SEQ ID NO: 130960 - DNA, 17 bp, Arabidopsis thaliana
taagacccatcattaag

SEQ ID NO: 130961 - DNA, 17 bp, Arabidopsis thaliana
taagacctgtttgcggt

SEQ ID NO: 130962 - DNA, 17 bp, Arabidopsis thaliana
taagaccttgtggagct

SEQ ID NO: 130963 - DNA, 17 bp, Arabidopsis thaliana
taagacgatggtatccg

SEQ ID NO: 130964 - DNA, 17 bp, Arabidopsis thaliana
taagacgcagggcagat

SEQ ID NO: 130965 - DNA, 17 bp, Arabidopsis thaliana
taagacggactgagcgg

SEQ ID NO: 130966 - DNA, 17 bp, Arabidopsis thaliana
taagacgggtttggtcg

SEQ ID NO: 130967 - DNA, 17 bp, Arabidopsis thaliana
taagacggtgacagatt

SEQ ID NO: 130968 - DNA, 17 bp, Arabidopsis thaliana
taagacgtgacgcttgt

SEQ ID NO: 130969 - DNA, 17 bp, Arabidopsis thaliana
taagactacaagcgttg

SEQ ID NO: 130970 - DNA, 17 bp, Arabidopsis thaliana
taagactaccattgctc

SEQ ID NO: 130971 - DNA, 17 bp, Arabidopsis thaliana
taagactagtgcccgct

SEQ ID NO: 130972 - DNA, 17 bp, Arabidopsis thaliana
taagactctcggcaacg

SEQ ID NO: 130973 - DNA, 17 bp, Arabidopsis thaliana
taagactgagatacgcg

SEQ ID NO: 130974 - DNA, 17 bp, Arabidopsis thaliana
taagacttcgggtttgg

SEQ ID NO: 130975 - DNA, 17 bp, Arabidopsis thaliana
taagacttgtcatgata

SEQ ID NO: 130976 - DNA, 17 bp, Arabidopsis thaliana
taagactttttcgggca

SEQ ID NO: 130977 - DNA, 17 bp, Arabidopsis thaliana
taagagaaccaggcgct

SEQ ID NO: 130978 - DNA, 17 bp, Arabidopsis thaliana
taagagacgtttttggc

SEQ ID NO: 130979 - DNA, 17 bp, Arabidopsis thaliana
taagagattacgggttt

SEQ ID NO: 130980 - DNA, 17 bp, Arabidopsis thaliana
taagagcaaggccaatg

SEQ ID NO: 130981 - DNA, 17 bp, Arabidopsis thaliana
taagagcaccgcttacc

SEQ ID NO: 130982 - DNA, 17 bp, Arabidopsis thaliana
taagagcacctccaaag

SEQ ID NO: 130983 - DNA, 17 bp, Arabidopsis thaliana
taagagctacaaagtgc

SEQ ID NO: 130984 - DNA, 17 bp, Arabidopsis thaliana
taagagctcaaggtcgg

SEQ ID NO: 130985 - DNA, 17 bp, Arabidopsis thaliana
taagaggatgattctgc

SEQ ID NO: 130986 - DNA, 17 bp, Arabidopsis thaliana
taagagggcacgtctgc

SEQ ID NO: 130987 - DNA, 17 bp, Arabidopsis thaliana
taagagggcgtgggtgc

SEQ ID NO: 130988 - DNA, 17 bp, Arabidopsis thaliana
taagagggcgtgggttc

SEQ ID NO: 130989 - DNA, 17 bp, Arabidopsis thaliana
taagaggttttgggccg

SEQ ID NO: 130990 - DNA, 17 bp, Arabidopsis thaliana
taagagtcttgcaaact

SEQ ID NO: 130991 - DNA, 17 bp, Arabidopsis thaliana
taagatacagccacgtc

SEQ ID NO: 130992 - DNA, 17 bp, Arabidopsis thaliana
taagatagcaagtcctc

SEQ ID NO: 130993 - DNA, 17 bp, Arabidopsis thaliana
taagatagcggcctctc

SEQ ID NO: 130994 - DNA, 17 bp, Arabidopsis thaliana
taagatatctcaagctc

SEQ ID NO: 130995 - DNA, 17 bp, Arabidopsis thaliana
taagatcaggttacggt

SEQ ID NO: 130996 - DNA, 17 bp, Arabidopsis thaliana
taagatcaggttgcggt

SEQ ID NO: 130997 - DNA, 17 bp, Arabidopsis thaliana
taagatccaactgacag

SEQ ID NO: 130998 - DNA, 17 bp, Arabidopsis thaliana
taagatccagttgcggt

SEQ ID NO: 130999 - DNA, 17 bp, Arabidopsis thaliana
taagatcccgttgcggt

SEQ ID NO: 131000 - DNA, 17 bp, Arabidopsis thaliana
taagatccgttgcggtt

SEQ ID NO: 131001 - DNA, 17 bp, Arabidopsis thaliana
taagatccttttgcggt

SEQ ID NO: 131002 - DNA, 17 bp, Arabidopsis thaliana
taagatcgagactcgtg

SEQ ID NO: 131003 - DNA, 17 bp, Arabidopsis thaliana
taagatcgagttgcgga

SEQ ID NO: 131004 - DNA, 17 bp, Arabidopsis thaliana
taagatcgagttgcggt

SEQ ID NO: 131005 - DNA, 17 bp, Arabidopsis thaliana
taagatcgcagggattc

SEQ ID NO: 131006 - DNA, 17 bp, Arabidopsis thaliana
taagatcgccaacacca

SEQ ID NO: 131007 - DNA, 17 bp, Arabidopsis thaliana
taagatcgccggatagg

SEQ ID NO: 131008 - DNA, 17 bp, Arabidopsis thaliana
taagatcgggttgcagt

SEQ ID NO: 131009 - DNA, 17 bp, Arabidopsis thaliana
taagatcgggttgcgga

SEQ ID NO: 131010 - DNA, 17 bp, Arabidopsis thaliana
taagatcgggttgcggt

SEQ ID NO: 131011 - DNA, 17 bp, Arabidopsis thaliana
taagatcgggttggagt

SEQ ID NO: 131012 - DNA, 17 bp, Arabidopsis thaliana
taagatcgggttgtggt

SEQ ID NO: 131013 - DNA, 17 bp, Arabidopsis thaliana
taagatcggttgcggtt

SEQ ID NO: 131014 - DNA, 17 bp, Arabidopsis thaliana
taagatcgtagaaggag

SEQ ID NO: 131015 - DNA, 17 bp, Arabidopsis thaliana
taagatcgtgccactta

SEQ ID NO: 131016 - DNA, 17 bp, Arabidopsis thaliana
taagatcgtgttgcggt

SEQ ID NO: 131017 - DNA, 17 bp, Arabidopsis thaliana
taagatctggttgccgg

SEQ ID NO: 131018 - DNA, 17 bp, Arabidopsis thaliana
taagatctggttgcggt

SEQ ID NO: 131019 - DNA, 17 bp, Arabidopsis thaliana
taagatctttaggtcgg

SEQ ID NO: 131020 - DNA, 17 bp, Arabidopsis thaliana
taagatgagatgtcacc

SEQ ID NO: 131021 - DNA, 17 bp, Arabidopsis thaliana
taagatgagattccagc

SEQ ID NO: 131022 - DNA, 17 bp, Arabidopsis thaliana
taagatgaggattccag

SEQ ID NO: 131023 - DNA, 17 bp, Arabidopsis thaliana
taagatgccaaaacaga

SEQ ID NO: 131024 - DNA, 17 bp, Arabidopsis thaliana
taagatgcggttgcagt

SEQ ID NO: 131025 - DNA, 17 bp, Arabidopsis thaliana
taagatgcggttgcggt

SEQ ID NO: 131026 - DNA, 17 bp, Arabidopsis thaliana
taagatgctgcttgtcg

SEQ ID NO: 131027 - DNA, 17 bp, Arabidopsis thaliana
taagatgggtgacctcc

SEQ ID NO: 131028 - DNA, 17 bp, Arabidopsis thaliana
taagatggtttccaagt

SEQ ID NO: 131029 - DNA, 17 bp, Arabidopsis thaliana
taagatgttctggccac

SEQ ID NO: 131030 - DNA, 17 bp, Arabidopsis thaliana
taagattagatctcatc

SEQ ID NO: 131031 - DNA, 17 bp, Arabidopsis thaliana
taagattatgccacgtg

SEQ ID NO: 131032 - DNA, 17 bp, Arabidopsis thaliana
taagattccaggtgatg

SEQ ID NO: 131033 - DNA, 17 bp, Arabidopsis thaliana
taagattccgagcttgg

SEQ ID NO: 131034 - DNA, 17 bp, Arabidopsis thaliana
taagattcggttgcggt

SEQ ID NO: 131035 - DNA, 17 bp, Arabidopsis thaliana
taagattcttagccatg

SEQ ID NO: 131036 - DNA, 17 bp, Arabidopsis thaliana
taagattgagtttggct

SEQ ID NO: 131037 - DNA, 17 bp, Arabidopsis thaliana
taagattgcaggagcct

SEQ ID NO: 131038 - DNA, 17 bp, Arabidopsis thaliana
taagattgcatggttca

SEQ ID NO: 131039 - DNA, 17 bp, Arabidopsis thaliana
taagattgtgactaaga

SEQ ID NO: 131040 - DNA, 17 bp, Arabidopsis thaliana
taagattgtgccacgtg

SEQ ID NO: 131041 - DNA, 17 bp, Arabidopsis thaliana
taagattgtgcgcgtag

SEQ ID NO: 131042 - DNA, 17 bp, Arabidopsis thaliana
taagattgtgggattga

SEQ ID NO: 131043 - DNA, 17 bp, Arabidopsis thaliana
taagatttcatttgcgc

SEQ ID NO: 131044 - DNA, 17 bp, Arabidopsis thaliana
taagatttccaaggttt

SEQ ID NO: 131045 - DNA, 17 bp, Arabidopsis thaliana
taagatttggacccatg

SEQ ID NO: 131046 - DNA, 17 bp, Arabidopsis thaliana
taagatttttgcgcttg

SEQ ID NO: 131047 - DNA, 17 bp, Arabidopsis thaliana
taagatttttgtgccgg

SEQ ID NO: 131048 - DNA, 17 bp, Arabidopsis thaliana
taagcaagttttgttga

SEQ ID NO: 131049 - DNA, 17 bp, Arabidopsis thaliana
taagcaatgtgtgacct

SEQ ID NO: 131050 - DNA, 17 bp, Arabidopsis thaliana
taagcaatttgcgccat

SEQ ID NO: 131051 - DNA, 17 bp, Arabidopsis thaliana
taagcaccgacatgcct

SEQ ID NO: 131052 - DNA, 17 bp, Arabidopsis thaliana
taagcacgattaaatgg

SEQ ID NO: 131053 - DNA, 17 bp, Arabidopsis thaliana
taagcacgcttaatcct

SEQ ID NO: 131054 - DNA, 17 bp, Arabidopsis thaliana
taagcacggtgccgcga

SEQ ID NO: 131055 - DNA, 17 bp, Arabidopsis thaliana
taagcactcggtggccg

SEQ ID NO: 131056 - DNA, 17 bp, Arabidopsis thaliana
taagcagatttactagt

SEQ ID NO: 131057 - DNA, 17 bp, Arabidopsis thaliana
taagcagatttctcacc

SEQ ID NO: 131058 - DNA, 17 bp, Arabidopsis thaliana
taagcagctactgtcac

SEQ ID NO: 131059 - DNA, 17 bp, Arabidopsis thaliana
taagcaggacaatggaa

SEQ ID NO: 131060 - DNA, 17 bp, Arabidopsis thaliana
taagcaggttagacggt

SEQ ID NO: 131061 - DNA, 17 bp, Arabidopsis thaliana
taagcagtaggtgccag

SEQ ID NO: 131062 - DNA, 17 bp, Arabidopsis thaliana
taagcagtgtagcggtc

SEQ ID NO: 131063 - DNA, 17 bp, Arabidopsis thaliana
taagcatgctctaacca

SEQ ID NO: 131064 - DNA, 17 bp, Arabidopsis thaliana
taagccaaatgggtgtg

SEQ ID NO: 131065 - DNA, 17 bp, Arabidopsis thaliana
taagccaatcacacagc

SEQ ID NO: 131066 - DNA, 17 bp, Arabidopsis thaliana
taagccacgtttctgca

SEQ ID NO: 131067 - DNA, 17 bp, Arabidopsis thaliana
taagccatactcttcag

SEQ ID NO: 131068 - DNA, 17 bp, Arabidopsis thaliana
taagcccaaggtatgtt

SEQ ID NO: 131069 - DNA, 17 bp, Arabidopsis thaliana
taagcccaccccaagat

SEQ ID NO: 131070 - DNA, 17 bp, Arabidopsis thaliana
taagcccgcgaccaggg

SEQ ID NO: 131071 - DNA, 17 bp, Arabidopsis thaliana
taagcccgggcttttga

SEQ ID NO: 131072 - DNA, 17 bp, Arabidopsis thaliana
taagcccgggcttttgt

SEQ ID NO: 131073 - DNA, 17 bp, Arabidopsis thaliana
taagccgatgtcgttac

SEQ ID NO: 131074 - DNA, 17 bp, Arabidopsis thaliana
taagccgattacctttg

SEQ ID NO: 131075 - DNA, 17 bp, Arabidopsis thaliana
taagccgattctacctt

SEQ ID NO: 131076 - DNA, 17 bp, Arabidopsis thaliana
taagccgccagcccaaa

SEQ ID NO: 131077 - DNA, 17 bp, Arabidopsis thaliana
taagccgcgaaacctta

SEQ ID NO: 131078 - DNA, 17 bp, Arabidopsis thaliana
taagccgcgaggtgtac

SEQ ID NO: 131079 - DNA, 17 bp, Arabidopsis thaliana
taagccgctccgattgg

SEQ ID NO: 131080 - DNA, 17 bp, Arabidopsis thaliana
taagccgggttacggtg

SEQ ID NO: 131081 - DNA, 17 bp, Arabidopsis thaliana
taagcctaacgggtttg

SEQ ID NO: 131082 - DNA, 17 bp, Arabidopsis thaliana
taagcctaagtaatgtt

SEQ ID NO: 131083 - DNA, 17 bp, Arabidopsis thaliana
taagcctacttagatca

SEQ ID NO: 131084 - DNA, 17 bp, Arabidopsis thaliana
taagcctacttgcggta

SEQ ID NO: 131085 - DNA, 17 bp, Arabidopsis thaliana
taagcctatcggctgat

SEQ ID NO: 131086 - DNA, 17 bp, Arabidopsis thaliana
taagccttagtgggcaa

SEQ ID NO: 131087 - DNA, 17 bp, Arabidopsis thaliana
taagcgacaccgtttaa

SEQ ID NO: 131088 - DNA, 17 bp, Arabidopsis thaliana
taagcgacgagagtggc

SEQ ID NO: 131089 - DNA, 17 bp, Arabidopsis thaliana
taagcgacttcagaatg

SEQ ID NO: 131090 - DNA, 17 bp, Arabidopsis thaliana
taagcgagagccgtccg

SEQ ID NO: 131091 - DNA, 17 bp, Arabidopsis thaliana
taagcgccttatgtctc

SEQ ID NO: 131092 - DNA, 17 bp, Arabidopsis thaliana
taagcgcgcgagcgcgc

SEQ ID NO: 131093 - DNA, 17 bp, Arabidopsis thaliana
taagcggactaggtggt

SEQ ID NO: 131094 - DNA, 17 bp, Arabidopsis thaliana
taagcggatgggggccg

SEQ ID NO: 131095 - DNA, 17 bp, Arabidopsis thaliana
taagcggcggatggaga

SEQ ID NO: 131096 - DNA, 17 bp, Arabidopsis thaliana
taagcggcgtcatcgtt

SEQ ID NO: 131097 - DNA, 17 bp, Arabidopsis thaliana
taagcggctgcataggg

SEQ ID NO: 131098 - DNA, 17 bp, Arabidopsis thaliana
taagcgggtcgggttcg

SEQ ID NO: 131099 - DNA, 17 bp, Arabidopsis thaliana
taagcggtgtcctaggt

SEQ ID NO: 131100 - DNA, 17 bp, Arabidopsis thaliana
taagcgtctgtaggtgg

SEQ ID NO: 131101 - DNA, 17 bp, Arabidopsis thaliana
taagcgtgcttgggcga

SEQ ID NO: 131102 - DNA, 17 bp, Arabidopsis thaliana
taagcgttttgagacat

SEQ ID NO: 131103 - DNA, 17 bp, Arabidopsis thaliana
taagctaaaaacgggcg

SEQ ID NO: 131104 - DNA, 17 bp, Arabidopsis thaliana
taagctagattttgggc

SEQ ID NO: 131105 - DNA, 17 bp, Arabidopsis thaliana
taagctaggttaatgga

SEQ ID NO: 131106 - DNA, 17 bp, Arabidopsis thaliana
taagctaggttaatggc

SEQ ID NO: 131107 - DNA, 17 bp, Arabidopsis thaliana
taagctatcggtcatgc

SEQ ID NO: 131108 - DNA, 17 bp, Arabidopsis thaliana
taagctcaaaatttggg

SEQ ID NO: 131109 - DNA, 17 bp, Arabidopsis thaliana
taagctcaagtcaaatg

SEQ ID NO: 131110 - DNA, 17 bp, Arabidopsis thaliana
taagctcactcttggat

SEQ ID NO: 131111 - DNA, 17 bp, Arabidopsis thaliana
taagctcaggtctgtgc

SEQ ID NO: 131112 - DNA, 17 bp, Arabidopsis thaliana
taagctcagtgccctcg

SEQ ID NO: 131113 - DNA, 17 bp, Arabidopsis thaliana
taagctcctactgaggg

SEQ ID NO: 131114 - DNA, 17 bp, Arabidopsis thaliana
taagctcgagttgcggt

SEQ ID NO: 131115 - DNA, 17 bp, Arabidopsis thaliana
taagctcgtccaccggg

SEQ ID NO: 131116 - DNA, 17 bp, Arabidopsis thaliana
taagctctatctgctgc

SEQ ID NO: 131117 - DNA, 17 bp, Arabidopsis thaliana
taagctctccttgaccg

SEQ ID NO: 131118 - DNA, 17 bp, Arabidopsis thaliana
taagctctctagcaata

SEQ ID NO: 131119 - DNA, 17 bp, Arabidopsis thaliana
taagctgaacacacgcc

SEQ ID NO: 131120 - DNA, 17 bp, Arabidopsis thaliana
taagctgacagtccggg

SEQ ID NO: 131121 - DNA, 17 bp, Arabidopsis thaliana
taagctgccagcatgat

SEQ ID NO: 131122 - DNA, 17 bp, Arabidopsis thaliana
taagctgctgacacggg

SEQ ID NO: 131123 - DNA, 17 bp, Arabidopsis thaliana
taagctgcttgatccac

SEQ ID NO: 131124 - DNA, 17 bp, Arabidopsis thaliana
taagctggtattgtcgg

SEQ ID NO: 131125 - DNA, 17 bp, Arabidopsis thaliana
taagctgtcctgtagac

SEQ ID NO: 131126 - DNA, 17 bp, Arabidopsis thaliana
taagctgtgtggcgaag

SEQ ID NO: 131127 - DNA, 17 bp, Arabidopsis thaliana
taagctgttgatcaatc

SEQ ID NO: 131128 - DNA, 17 bp, Arabidopsis thaliana
taagcttagcctaggat

SEQ ID NO: 131129 - DNA, 17 bp, Arabidopsis thaliana
taagcttagggatcggc

SEQ ID NO: 131130 - DNA, 17 bp, Arabidopsis thaliana
taagcttagttaggccc

SEQ ID NO: 131131 - DNA, 17 bp, Arabidopsis thaliana
taagcttcagggccagt

SEQ ID NO: 131132 - DNA, 17 bp, Arabidopsis thaliana
taagcttcgcctaggat

SEQ ID NO: 131133 - DNA, 17 bp, Arabidopsis thaliana
taagcttgaggatagtg

SEQ ID NO: 131134 - DNA, 17 bp, Arabidopsis thaliana
taagctttggccgagtg

SEQ ID NO: 131135 - DNA, 17 bp, Arabidopsis thaliana
taaggaaatctcaggtg

SEQ ID NO: 131136 - DNA, 17 bp, Arabidopsis thaliana
taaggaacacagttttt

SEQ ID NO: 131137 - DNA, 17 bp, Arabidopsis thaliana
taaggaacctgcggaag

SEQ ID NO: 131138 - DNA, 17 bp, Arabidopsis thaliana
taaggaacgcctctcga

SEQ ID NO: 131139 - DNA, 17 bp, Arabidopsis thaliana
taaggaagcataaagga

SEQ ID NO: 131140 - DNA, 17 bp, Arabidopsis thaliana
taaggaagctaagattc

SEQ ID NO: 131141 - DNA, 17 bp, Arabidopsis thaliana
taaggaagctccgatgg

SEQ ID NO: 131142 - DNA, 17 bp, Arabidopsis thaliana
taaggaatggactcacc

SEQ ID NO: 131143 - DNA, 17 bp, Arabidopsis thaliana
taaggacacgtgtttgc

SEQ ID NO: 131144 - DNA, 17 bp, Arabidopsis thaliana
taaggacatccggtcgg

SEQ ID NO: 131145 - DNA, 17 bp, Arabidopsis thaliana
taaggaccgcccaatat

SEQ ID NO: 131146 - DNA, 17 bp, Arabidopsis thaliana
taaggacgaggcctcca

SEQ ID NO: 131147 - DNA, 17 bp, Arabidopsis thaliana
taaggacgcacctatgg

SEQ ID NO: 131148 - DNA, 17 bp, Arabidopsis thaliana
taaggacgcacctctgg

SEQ ID NO: 131149 - DNA, 17 bp, Arabidopsis thaliana
taaggacgccgccggcg

SEQ ID NO: 131150 - DNA, 17 bp, Arabidopsis thaliana
taaggactgtaaccatc

SEQ ID NO: 131151 - DNA, 17 bp, Arabidopsis thaliana
taaggagagagatgtaa

SEQ ID NO: 131152 - DNA, 17 bp, Arabidopsis thaliana
taaggagcccggtgcgt

SEQ ID NO: 131153 - DNA, 17 bp, Arabidopsis thaliana
taaggagtcattgggac

SEQ ID NO: 131154 - DNA, 17 bp, Arabidopsis thaliana
taaggatatttgggtgc

SEQ ID NO: 131155 - DNA, 17 bp, Arabidopsis thaliana
taaggatcggaaggaat

SEQ ID NO: 131156 - DNA, 17 bp, Arabidopsis thaliana
taaggatctctttgatt

SEQ ID NO: 131157 - DNA, 17 bp, Arabidopsis thaliana
taaggattgacagactg

SEQ ID NO: 131158 - DNA, 17 bp, Arabidopsis thaliana
taaggattgcggtcgcc

SEQ ID NO: 131159 - DNA, 17 bp, Arabidopsis thaliana
taaggattggccgaaat

SEQ ID NO: 131160 - DNA, 17 bp, Arabidopsis thaliana
taaggattggccgaagt

SEQ ID NO: 131161 - DNA, 17 bp, Arabidopsis thaliana
taaggatttttctttca

SEQ ID NO: 131162 - DNA, 17 bp, Arabidopsis thaliana
taaggcaacgtccaaca

SEQ ID NO: 131163 - DNA, 17 bp, Arabidopsis thaliana
taaggcacttgtgaggg

SEQ ID NO: 131164 - DNA, 17 bp, Arabidopsis thaliana
taaggcagactcttgga

SEQ ID NO: 131165 - DNA, 17 bp, Arabidopsis thaliana
taaggcgaagtccgtaa

SEQ ID NO: 131166 - DNA, 17 bp, Arabidopsis thaliana
taaggcgcaaggaagct

SEQ ID NO: 131167 - DNA, 17 bp, Arabidopsis thaliana
taaggcgcctgagcaag

SEQ ID NO: 131168 - DNA, 17 bp, Arabidopsis thaliana
taaggcgggattgtgaa

SEQ ID NO: 131169 - DNA, 17 bp, Arabidopsis thaliana
taaggcggggtgtttcc

SEQ ID NO: 131170 - DNA, 17 bp, Arabidopsis thaliana
taaggcgtatgaccgag

SEQ ID NO: 131171 - DNA, 17 bp, Arabidopsis thaliana
taaggcgtggcgacctt

SEQ ID NO: 131172 - DNA, 17 bp, Arabidopsis thaliana
taaggctaatatctcca

SEQ ID NO: 131173 - DNA, 17 bp, Arabidopsis thaliana
taaggctctcgcctccg

SEQ ID NO: 131174 - DNA, 17 bp, Arabidopsis thaliana
taaggctgcaaatggtt

SEQ ID NO: 131175 - DNA, 17 bp, Arabidopsis thaliana
taaggctgcattggatt

SEQ ID NO: 131176 - DNA, 17 bp, Arabidopsis thaliana
taaggctgccgtggacc

SEQ ID NO: 131177 - DNA, 17 bp, Arabidopsis thaliana
taaggctgttctggttc

SEQ ID NO: 131178 - DNA, 17 bp, Arabidopsis thaliana
taaggcttggaatcaca

SEQ ID NO: 131179 - DNA, 17 bp, Arabidopsis thaliana
taagggaacccaccgaa

SEQ ID NO: 131180 - DNA, 17 bp, Arabidopsis thaliana
taagggaacccaccgga

SEQ ID NO: 131181 - DNA, 17 bp, Arabidopsis thaliana
taagggaatgtgacacg

SEQ ID NO: 131182 - DNA, 17 bp, Arabidopsis thaliana
taagggaattacgggct

SEQ ID NO: 131183 - DNA, 17 bp, Arabidopsis thaliana
taagggagtgtaggttg

SEQ ID NO: 131184 - DNA, 17 bp, Arabidopsis thaliana
taagggatactgggact

SEQ ID NO: 131185 - DNA, 17 bp, Arabidopsis thaliana
taagggccaggtcggac

SEQ ID NO: 131186 - DNA, 17 bp, Arabidopsis thaliana
taagggcccaaaagtcc

SEQ ID NO: 131187 - DNA, 17 bp, Arabidopsis thaliana
taaggggacacaggtcg

SEQ ID NO: 131188 - DNA, 17 bp, Arabidopsis thaliana
taagggtccgaatggta

SEQ ID NO: 131189 - DNA, 17 bp, Arabidopsis thaliana
taagggtctcggccccg

SEQ ID NO: 131190 - DNA, 17 bp, Arabidopsis thaliana
taaggtaccgtagaaat

SEQ ID NO: 131191 - DNA, 17 bp, Arabidopsis thaliana
taaggtagccaaatgcc

SEQ ID NO: 131192 - DNA, 17 bp, Arabidopsis thaliana
taaggtcatcatctcca

SEQ ID NO: 131193 - DNA, 17 bp, Arabidopsis thaliana
taaggtccacaggattt

SEQ ID NO: 131194 - DNA, 17 bp, Arabidopsis thaliana
taaggtcccagtaatcg

SEQ ID NO: 131195 - DNA, 17 bp, Arabidopsis thaliana
taaggtcgcttcaggac

SEQ ID NO: 131196 - DNA, 17 bp, Arabidopsis thaliana
taaggtcggtcccatct

SEQ ID NO: 131197 - DNA, 17 bp, Arabidopsis thaliana
taaggtctatgatggga

SEQ ID NO: 131198 - DNA, 17 bp, Arabidopsis thaliana
taaggtgcgctgacggg

SEQ ID NO: 131199 - DNA, 17 bp, Arabidopsis thaliana
taaggtgggtcagcgct

SEQ ID NO: 131200 - DNA, 17 bp, Arabidopsis thaliana
taaggtgtcatctctcg

SEQ ID NO: 131201 - DNA, 17 bp, Arabidopsis thaliana
taaggtgtcctacccat

SEQ ID NO: 131202 - DNA, 17 bp, Arabidopsis thaliana
taaggtgttgggttaag

SEQ ID NO: 131203 - DNA, 17 bp, Arabidopsis thaliana
taaggttccagattgtt

SEQ ID NO: 131204 - DNA, 17 bp, Arabidopsis thaliana
taaggttccatctcaag

SEQ ID NO: 131205 - DNA, 17 bp, Arabidopsis thaliana
taaggttcgctgacgtg

SEQ ID NO: 131206 - DNA, 17 bp, Arabidopsis thaliana
taaggtttctactcggg

SEQ ID NO: 131207 - DNA, 17 bp, Arabidopsis thaliana
taaggtttctcaagttt

SEQ ID NO: 131208 - DNA, 17 bp, Arabidopsis thaliana
taaggttttccagaggc

SEQ ID NO: 131209 - DNA, 17 bp, Arabidopsis thaliana
taagtaacgctatgcca

SEQ ID NO: 131210 - DNA, 17 bp, Arabidopsis thaliana
taagtaacgtcctgcca

SEQ ID NO: 131211 - DNA, 17 bp, Arabidopsis thaliana
taagtaacgtcctgtca

SEQ ID NO: 131212 - DNA, 17 bp, Arabidopsis thaliana
taagtactttttcgggc

SEQ ID NO: 131213 - DNA, 17 bp, Arabidopsis thaliana
taagtagagctatgtgt

SEQ ID NO: 131214 - DNA, 17 bp, Arabidopsis thaliana
taagtagaggagtgact

SEQ ID NO: 131215 - DNA, 17 bp, Arabidopsis thaliana
taagtaggattctccag

SEQ ID NO: 131216 - DNA, 17 bp, Arabidopsis thaliana
taagtaggattctcccc

SEQ ID NO: 131217 - DNA, 17 bp, Arabidopsis thaliana
taagtatcgtcatgcca

SEQ ID NO: 131218 - DNA, 17 bp, Arabidopsis thaliana
taagtatgaacgaattc

SEQ ID NO: 131219 - DNA, 17 bp, Arabidopsis thaliana
taagtatgaacggattc

SEQ ID NO: 131220 - DNA, 17 bp, Arabidopsis thaliana
taagtattcccgcctgt

SEQ ID NO: 131221 - DNA, 17 bp, Arabidopsis thaliana
taagtattgttttgcga

SEQ ID NO: 131222 - DNA, 17 bp, Arabidopsis thaliana
taagtcaaacgcaaatg

SEQ ID NO: 131223 - DNA, 17 bp, Arabidopsis thaliana
taagtcaaaggtgtgtg

SEQ ID NO: 131224 - DNA, 17 bp, Arabidopsis thaliana
taagtcacggtgattgg

SEQ ID NO: 131225 - DNA, 17 bp, Arabidopsis thaliana
taagtcagaatccgggc

SEQ ID NO: 131226 - DNA, 17 bp, Arabidopsis thaliana
taagtcagctacctgcg

SEQ ID NO: 131227 - DNA, 17 bp, Arabidopsis thaliana
taagtcatcggctggcg

SEQ ID NO: 131228 - DNA, 17 bp, Arabidopsis thaliana
taagtccgcagcggttt

SEQ ID NO: 131229 - DNA, 17 bp, Arabidopsis thaliana
taagtccgggtggtcac

SEQ ID NO: 131230 - DNA, 17 bp, Arabidopsis thaliana
taagtccgttcggcgga

SEQ ID NO: 131231 - DNA, 17 bp, Arabidopsis thaliana
taagtcgccgccggtcc

SEQ ID NO: 131232 - DNA, 17 bp, Arabidopsis thaliana
taagtcggggtttgtgg

SEQ ID NO: 131233 - DNA, 17 bp, Arabidopsis thaliana
taagtcggtattgtcga

SEQ ID NO: 131234 - DNA, 17 bp, Arabidopsis thaliana
taagtcgtctatcggaa

SEQ ID NO: 131235 - DNA, 17 bp, Arabidopsis thaliana
taagtcgtggcccactt

SEQ ID NO: 131236 - DNA, 17 bp, Arabidopsis thaliana
taagtcgtggtcgttca

SEQ ID NO: 131237 - DNA, 17 bp, Arabidopsis thaliana
taagtctaggcctccgt

SEQ ID NO: 131238 - DNA, 17 bp, Arabidopsis thaliana
taagtctatttggttca

SEQ ID NO: 131239 - DNA, 17 bp, Arabidopsis thaliana
taagtctatttggttct

SEQ ID NO: 131240 - DNA, 17 bp, Arabidopsis thaliana
taagtctcagagcgttt

SEQ ID NO: 131241 - DNA, 17 bp, Arabidopsis thaliana
taagtctgcagccgttt

SEQ ID NO: 131242 - DNA, 17 bp, Arabidopsis thaliana
taagtctgcctgggtgt

SEQ ID NO: 131243 - DNA, 17 bp, Arabidopsis thaliana
taagtctgctttgaccc

SEQ ID NO: 131244 - DNA, 17 bp, Arabidopsis thaliana
taagtctgtagcagttg

SEQ ID NO: 131245 - DNA, 17 bp, Arabidopsis thaliana
taagtctgtcacttggt

SEQ ID NO: 131246 - DNA, 17 bp, Arabidopsis thaliana
taagtcttacacgggtt

SEQ ID NO: 131247 - DNA, 17 bp, Arabidopsis thaliana
taagtcttgatgaaccg

SEQ ID NO: 131248 - DNA, 17 bp, Arabidopsis thaliana
taagtcttgcggtgttc

SEQ ID NO: 131249 - DNA, 17 bp, Arabidopsis thaliana
taagtcttttgagaagc

SEQ ID NO: 131250 - DNA, 17 bp, Arabidopsis thaliana
taagtgaacctgcggaa

SEQ ID NO: 131251 - DNA, 17 bp, Arabidopsis thaliana
taagtgaagtgccgcta

SEQ ID NO: 131252 - DNA, 17 bp, Arabidopsis thaliana
taagtgacagaaaggtg

SEQ ID NO: 131253 - DNA, 17 bp, Arabidopsis thaliana
taagtgaccaggcccgg

SEQ ID NO: 131254 - DNA, 17 bp, Arabidopsis thaliana
taagtgacgatggaacc

SEQ ID NO: 131255 - DNA, 17 bp, Arabidopsis thaliana
taagtgactgtgttgcc

SEQ ID NO: 131256 - DNA, 17 bp, Arabidopsis thaliana
taagtgagcttgcttct

SEQ ID NO: 131257 - DNA, 17 bp, Arabidopsis thaliana
taagtgatgtgattcgg

SEQ ID NO: 131258 - DNA, 17 bp, Arabidopsis thaliana
taagtgatttaccagaa

SEQ ID NO: 131259 - DNA, 17 bp, Arabidopsis thaliana
taagtgcatgattggtt

SEQ ID NO: 131260 - DNA, 17 bp, Arabidopsis thaliana
taagtgcattggtcggc

SEQ ID NO: 131261 - DNA, 17 bp, Arabidopsis thaliana
taagtgccaatctattt

SEQ ID NO: 131262 - DNA, 17 bp, Arabidopsis thaliana
taagtgccacgtgtcac

SEQ ID NO: 131263 - DNA, 17 bp, Arabidopsis thaliana
taagtgcgagactgagc

SEQ ID NO: 131264 - DNA, 17 bp, Arabidopsis thaliana
taagtgcggttttgatt

SEQ ID NO: 131265 - DNA, 17 bp, Arabidopsis thaliana
taagtgctacgtgtcag

SEQ ID NO: 131266 - DNA, 17 bp, Arabidopsis thaliana
taagtggatgtgtgtgt

SEQ ID NO: 131267 - DNA, 17 bp, Arabidopsis thaliana
taagtggattttggcct

SEQ ID NO: 131268 - DNA, 17 bp, Arabidopsis thaliana
taagtggcagagtggcc

SEQ ID NO: 131269 - DNA, 17 bp, Arabidopsis thaliana
taagtggctaaaagact

SEQ ID NO: 131270 - DNA, 17 bp, Arabidopsis thaliana
taagtggtttcgaaccg

SEQ ID NO: 131271 - DNA, 17 bp, Arabidopsis thaliana
taagtgtggagctcggc

SEQ ID NO: 131272 - DNA, 17 bp, Arabidopsis thaliana
taagtgtgtcaactgtc

SEQ ID NO: 131273 - DNA, 17 bp, Arabidopsis thaliana
taagtgtttcaggcttc

SEQ ID NO: 131274 - DNA, 17 bp, Arabidopsis thaliana
taagttaggtcgcgttc

SEQ ID NO: 131275 - DNA, 17 bp, Arabidopsis thaliana
taagttcaatgcccagc

SEQ ID NO: 131276 - DNA, 17 bp, Arabidopsis thaliana
taagttcaatgcccagg

SEQ ID NO: 131277 - DNA, 17 bp, Arabidopsis thaliana
taagttcagctgctcct

SEQ ID NO: 131278 - DNA, 17 bp, Arabidopsis thaliana
taagttccatacggcag

SEQ ID NO: 131279 - DNA, 17 bp, Arabidopsis thaliana
taagttccggttgcggt

SEQ ID NO: 131280 - DNA, 17 bp, Arabidopsis thaliana
taagttcgggttgcggt

SEQ ID NO: 131281 - DNA, 17 bp, Arabidopsis thaliana
taagttcggtgatgaaa

SEQ ID NO: 131282 - DNA, 17 bp, Arabidopsis thaliana
taagttcggtgccgtct

SEQ ID NO: 131283 - DNA, 17 bp, Arabidopsis thaliana
taagttgacggttttcg

SEQ ID NO: 131284 - DNA, 17 bp, Arabidopsis thaliana
taagttgagttgagttg

SEQ ID NO: 131285 - DNA, 17 bp, Arabidopsis thaliana
taagttgcgattgagtc

SEQ ID NO: 131286 - DNA, 17 bp, Arabidopsis thaliana
taagttggacagaatcg

SEQ ID NO: 131287 - DNA, 17 bp, Arabidopsis thaliana
taagttggccaactctt

SEQ ID NO: 131288 - DNA, 17 bp, Arabidopsis thaliana
taagttggtccttgggt

SEQ ID NO: 131289 - DNA, 17 bp, Arabidopsis thaliana
taagttgtcccagttgg

SEQ ID NO: 131290 - DNA, 17 bp, Arabidopsis thaliana
taagttgtcgtggtcac

SEQ ID NO: 131291 - DNA, 17 bp, Arabidopsis thaliana
taagttgttatcgagga

SEQ ID NO: 131292 - DNA, 17 bp, Arabidopsis thaliana
taagttgttcgtttgca

SEQ ID NO: 131293 - DNA, 17 bp, Arabidopsis thaliana
taagtttaaatggttgc

SEQ ID NO: 131294 - DNA, 17 bp, Arabidopsis thaliana
taagtttatgtgaaatg

SEQ ID NO: 131295 - DNA, 17 bp, Arabidopsis thaliana
taagtttcgttgaccga

SEQ ID NO: 131296 - DNA, 17 bp, Arabidopsis thaliana
taagtttgaaattttct

SEQ ID NO: 131297 - DNA, 17 bp, Arabidopsis thaliana
taagtttgacgtttcca

SEQ ID NO: 131298 - DNA, 17 bp, Arabidopsis thaliana
taagtttgcagcggttt

SEQ ID NO: 131299 - DNA, 17 bp, Arabidopsis thaliana
taagtttgccaacttct

SEQ ID NO: 131300 - DNA, 17 bp, Arabidopsis thaliana
taagtttgcgttgactc

SEQ ID NO: 131301 - DNA, 17 bp, Arabidopsis thaliana
taagtttgggaagtctt

SEQ ID NO: 131302 - DNA, 17 bp, Arabidopsis thaliana
taagtttgtgtgaaatg

SEQ ID NO: 131303 - DNA, 17 bp, Arabidopsis thaliana
taagtttgtgttgactc

SEQ ID NO: 131304 - DNA, 17 bp, Arabidopsis thaliana
taagtttgtttttcgtt

SEQ ID NO: 131305 - DNA, 17 bp, Arabidopsis thaliana
taagttttctttcccag

SEQ ID NO: 131306 - DNA, 17 bp, Arabidopsis thaliana
taagttttgtgaaatga

SEQ ID NO: 131307 - DNA, 17 bp, Arabidopsis thaliana
taagttttgttgactgt

SEQ ID NO: 131308 - DNA, 17 bp, Arabidopsis thaliana
taagttttgtttactgg

SEQ ID NO: 131309 - DNA, 17 bp, Arabidopsis thaliana
taagtttttcgtttgca

SEQ ID NO: 131310 - DNA, 17 bp, Arabidopsis thaliana
taagttttttgacagga

SEQ ID NO: 131311 - DNA, 17 bp, Arabidopsis thaliana
taataaaacttctgttt

SEQ ID NO: 131312 - DNA, 17 bp, Arabidopsis thaliana
taataaaccgtggaagt

SEQ ID NO: 131313 - DNA, 17 bp, Arabidopsis thaliana
taataaaccgttgcgga

SEQ ID NO: 131314 - DNA, 17 bp, Arabidopsis thaliana
taataacgggtttctag

SEQ ID NO: 131315 - DNA, 17 bp, Arabidopsis thaliana
taataacttttttgtgg

SEQ ID NO: 131316 - DNA, 17 bp, Arabidopsis thaliana
taataagaccttggtcc

SEQ ID NO: 131317 - DNA, 17 bp, Arabidopsis thaliana
taataagccagtgccag

SEQ ID NO: 131318 - DNA, 17 bp, Arabidopsis thaliana
taataattcgctttggt

SEQ ID NO: 131319 - DNA, 17 bp, Arabidopsis thaliana
taatacagtaaacgcgg

SEQ ID NO: 131320 - DNA, 17 bp, Arabidopsis thaliana
taataccaggaggttct

SEQ ID NO: 131321 - DNA, 17 bp, Arabidopsis thaliana
taataccgattaatccg

SEQ ID NO: 131322 - DNA, 17 bp, Arabidopsis thaliana
taataccgattgatccg

SEQ ID NO: 131323 - DNA, 17 bp, Arabidopsis thaliana
taatacgataaagcaat

SEQ ID NO: 131324 - DNA, 17 bp, Arabidopsis thaliana
taatacgcaggagttac

SEQ ID NO: 131325 - DNA, 17 bp, Arabidopsis thaliana
taatagaccaacgtgta

SEQ ID NO: 131326 - DNA, 17 bp, Arabidopsis thaliana
taatagactgtgaatta

SEQ ID NO: 131327 - DNA, 17 bp, Arabidopsis thaliana
taatagataattttccg

SEQ ID NO: 131328 - DNA, 17 bp, Arabidopsis thaliana
taataggccttgattgt

SEQ ID NO: 131329 - DNA, 17 bp, Arabidopsis thaliana
taatagtcgctcctgta

SEQ ID NO: 131330 - DNA, 17 bp, Arabidopsis thaliana
taatagtgcctcagagc

SEQ ID NO: 131331 - DNA, 17 bp, Arabidopsis thaliana
taatagtgcggtgagcg

SEQ ID NO: 131332 - DNA, 17 bp, Arabidopsis thaliana
taatatcgtcaatcggc

SEQ ID NO: 131333 - DNA, 17 bp, Arabidopsis thaliana
taatatcttcggatttt

SEQ ID NO: 131334 - DNA, 17 bp, Arabidopsis thaliana
taatatgaggtccttaa

SEQ ID NO: 131335 - DNA, 17 bp, Arabidopsis thaliana
taatatgccaaatgact

SEQ ID NO: 131336 - DNA, 17 bp, Arabidopsis thaliana
taatattagtttcgtcc

SEQ ID NO: 131337 - DNA, 17 bp, Arabidopsis thaliana
taatattcagccaattt

SEQ ID NO: 131338 - DNA, 17 bp, Arabidopsis thaliana
taatattcaggtcctcg

SEQ ID NO: 131339 - DNA, 17 bp, Arabidopsis thaliana
taatattgaccaacacc

SEQ ID NO: 131340 - DNA, 17 bp, Arabidopsis thaliana
taatcaaacgattgtgg

SEQ ID NO: 131341 - DNA, 17 bp, Arabidopsis thaliana
taatcaaatctgctggc

SEQ ID NO: 131342 - DNA, 17 bp, Arabidopsis thaliana
taatcaaatctgctgtc

SEQ ID NO: 131343 - DNA, 17 bp, Arabidopsis thaliana
taatcaacgtctcatat

SEQ ID NO: 131344 - DNA, 17 bp, Arabidopsis thaliana
taatcaagcgattgtgg

SEQ ID NO: 131345 - DNA, 17 bp, Arabidopsis thaliana
taatcacatgagcgttt

SEQ ID NO: 131346 - DNA, 17 bp, Arabidopsis thaliana
taatcacgggtttacgt

SEQ ID NO: 131347 - DNA, 17 bp, Arabidopsis thaliana
taatcacggtaggactg

SEQ ID NO: 131348 - DNA, 17 bp, Arabidopsis thaliana
taatcacgtttacgttg

SEQ ID NO: 131349 - DNA, 17 bp, Arabidopsis thaliana
taatcactaatcgctgc

SEQ ID NO: 131350 - DNA, 17 bp, Arabidopsis thaliana
taatcactgaattttgc

SEQ ID NO: 131351 - DNA, 17 bp, Arabidopsis thaliana
taatcactgtggttgct

SEQ ID NO: 131352 - DNA, 17 bp, Arabidopsis thaliana
taatcagaaatgcatgc

SEQ ID NO: 131353 - DNA, 17 bp, Arabidopsis thaliana
taatcagacggtggact

SEQ ID NO: 131354 - DNA, 17 bp, Arabidopsis thaliana
taatcagccattctact

SEQ ID NO: 131355 - DNA, 17 bp, Arabidopsis thaliana
taatcagctacgtggag

SEQ ID NO: 131356 - DNA, 17 bp, Arabidopsis thaliana
taatcagctagcaggct

SEQ ID NO: 131357 - DNA, 17 bp, Arabidopsis thaliana
taatcaggccgcctgta

SEQ ID NO: 131358 - DNA, 17 bp, Arabidopsis thaliana
taatcaggtcgtctgca

SEQ ID NO: 131359 - DNA, 17 bp, Arabidopsis thaliana
taatcaggttaacgccg

SEQ ID NO: 131360 - DNA, 17 bp, Arabidopsis thaliana
taatcagtatgttgctc

SEQ ID NO: 131361 - DNA, 17 bp, Arabidopsis thaliana
taatcatcggttaggaa

SEQ ID NO: 131362 - DNA, 17 bp, Arabidopsis thaliana
taatcatggtcatctcg

SEQ ID NO: 131363 - DNA, 17 bp, Arabidopsis thaliana
taatcatgtcccggttg

SEQ ID NO: 131364 - DNA, 17 bp, Arabidopsis thaliana
taatcattgagcgtgcg

SEQ ID NO: 131365 - DNA, 17 bp, Arabidopsis thaliana
taatcattgctgattct

SEQ ID NO: 131366 - DNA, 17 bp, Arabidopsis thaliana
taatcatttgtgcgaga

SEQ ID NO: 131367 - DNA, 17 bp, Arabidopsis thaliana
taatccacaggtcccag

SEQ ID NO: 131368 - DNA, 17 bp, Arabidopsis thaliana
taatccacgtttctgca

SEQ ID NO: 131369 - DNA, 17 bp, Arabidopsis thaliana
taatccagatgttgctc

SEQ ID NO: 131370 - DNA, 17 bp, Arabidopsis thaliana
taatccaggaagttttg

SEQ ID NO: 131371 - DNA, 17 bp, Arabidopsis thaliana
taatccaggttcaattg

SEQ ID NO: 131372 - DNA, 17 bp, Arabidopsis thaliana
taatcccagccgacagt

SEQ ID NO: 131373 - DNA, 17 bp, Arabidopsis thaliana
taatccccttggcccaa

SEQ ID NO: 131374 - DNA, 17 bp, Arabidopsis thaliana
taatccgacagaaccgt

SEQ ID NO: 131375 - DNA, 17 bp, Arabidopsis thaliana
taatccgagaagaccgg

SEQ ID NO: 131376 - DNA, 17 bp, Arabidopsis thaliana
taatccgcgtcggtcca

SEQ ID NO: 131377 - DNA, 17 bp, Arabidopsis thaliana
taatccgcgtcggtccg

SEQ ID NO: 131378 - DNA, 17 bp, Arabidopsis thaliana
taatccgctctgctaga

SEQ ID NO: 131379 - DNA, 17 bp, Arabidopsis thaliana
taatccgctgaatatcg

SEQ ID NO: 131380 - DNA, 17 bp, Arabidopsis thaliana
taatccgctttgccaat

SEQ ID NO: 131381 - DNA, 17 bp, Arabidopsis thaliana
taatccgggtgccgcct

SEQ ID NO: 131382 - DNA, 17 bp, Arabidopsis thaliana
taatccgtcagcggtgc

SEQ ID NO: 131383 - DNA, 17 bp, Arabidopsis thaliana
taatccgtcagcggttc

SEQ ID NO: 131384 - DNA, 17 bp, Arabidopsis thaliana
taatccgtgctagaagc

SEQ ID NO: 131385 - DNA, 17 bp, Arabidopsis thaliana
taatccgttagcggttc

SEQ ID NO: 131386 - DNA, 17 bp, Arabidopsis thaliana
taatccgtttgtgtctt

SEQ ID NO: 131387 - DNA, 17 bp, Arabidopsis thaliana
taatcctcctaggttcg

SEQ ID NO: 131388 - DNA, 17 bp, Arabidopsis thaliana
taatcctgaaattgctc

SEQ ID NO: 131389 - DNA, 17 bp, Arabidopsis thaliana
taatcctggtccgccac

SEQ ID NO: 131390 - DNA, 17 bp, Arabidopsis thaliana
taatccttttcagactt

SEQ ID NO: 131391 - DNA, 17 bp, Arabidopsis thaliana
taatcgactcgagattg

SEQ ID NO: 131392 - DNA, 17 bp, Arabidopsis thaliana
taatcgagcacctgctg

SEQ ID NO: 131393 - DNA, 17 bp, Arabidopsis thaliana
taatcgcaggtcaagtc

SEQ ID NO: 131394 - DNA, 17 bp, Arabidopsis thaliana
taatcgcaggtcgctag

SEQ ID NO: 131395 - DNA, 17 bp, Arabidopsis thaliana
taatcgcaggtcgctat

SEQ ID NO: 131396 - DNA, 17 bp, Arabidopsis thaliana
taatcgcatcctgtaga

SEQ ID NO: 131397 - DNA, 17 bp, Arabidopsis thaliana
taatcgccggtcagcca

SEQ ID NO: 131398 - DNA, 17 bp, Arabidopsis thaliana
taatcgcctatgtggat

SEQ ID NO: 131399 - DNA, 17 bp, Arabidopsis thaliana
taatcgctctgttgctg

SEQ ID NO: 131400 - DNA, 17 bp, Arabidopsis thaliana
taatcgcttggcgtgta

SEQ ID NO: 131401 - DNA, 17 bp, Arabidopsis thaliana
taatcggaacatgggtg

SEQ ID NO: 131402 - DNA, 17 bp, Arabidopsis thaliana
taatcggcccgccgtcc

SEQ ID NO: 131403 - DNA, 17 bp, Arabidopsis thaliana
taatcgggtgtcctagc

SEQ ID NO: 131404 - DNA, 17 bp, Arabidopsis thaliana
taatcggtcgagatttt

SEQ ID NO: 131405 - DNA, 17 bp, Arabidopsis thaliana
taatcgtacatcgttgg

SEQ ID NO: 131406 - DNA, 17 bp, Arabidopsis thaliana
taatcgtactccaagct

SEQ ID NO: 131407 - DNA, 17 bp, Arabidopsis thaliana
taatcgtcggcttagtt

SEQ ID NO: 131408 - DNA, 17 bp, Arabidopsis thaliana
taatcgtcttgcagatg

SEQ ID NO: 131409 - DNA, 17 bp, Arabidopsis thaliana
taatcgtcttgccgatg

SEQ ID NO: 131410 - DNA, 17 bp, Arabidopsis thaliana
taatcgtcttgcgaata

SEQ ID NO: 131411 - DNA, 17 bp, Arabidopsis thaliana
taatcgtcttgcgaatg

SEQ ID NO: 131412 - DNA, 17 bp, Arabidopsis thaliana
taatcgtcttgcggatg

SEQ ID NO: 131413 - DNA, 17 bp, Arabidopsis thaliana
taatcgtcttgctgatg

SEQ ID NO: 131414 - DNA, 17 bp, Arabidopsis thaliana
taatcgttcaccaatca

SEQ ID NO: 131415 - DNA, 17 bp, Arabidopsis thaliana
taatcgttccccggcaa

SEQ ID NO: 131416 - DNA, 17 bp, Arabidopsis thaliana
taatcgttggcggttca

SEQ ID NO: 131417 - DNA, 17 bp, Arabidopsis thaliana
taatcgttttgcggatg

SEQ ID NO: 131418 - DNA, 17 bp, Arabidopsis thaliana
taatcgttttgtctccg

SEQ ID NO: 131419 - DNA, 17 bp, Arabidopsis thaliana
taatctaccgaagtact

SEQ ID NO: 131420 - DNA, 17 bp, Arabidopsis thaliana
taatctagaaaatgcat

SEQ ID NO: 131421 - DNA, 17 bp, Arabidopsis thaliana
taatctagaaattgcag

SEQ ID NO: 131422 - DNA, 17 bp, Arabidopsis thaliana
taatctagatctggcat

SEQ ID NO: 131423 - DNA, 17 bp, Arabidopsis thaliana
taatctagtttgtgtct

SEQ ID NO: 131424 - DNA, 17 bp, Arabidopsis thaliana
taatctcccctaggccc

SEQ ID NO: 131425 - DNA, 17 bp, Arabidopsis thaliana
taatctcctgggttaac

SEQ ID NO: 131426 - DNA, 17 bp, Arabidopsis thaliana
taatctcggtccagacg

SEQ ID NO: 131427 - DNA, 17 bp, Arabidopsis thaliana
taatctcggtcgcactc

SEQ ID NO: 131428 - DNA, 17 bp, Arabidopsis thaliana
taatctcgttagttggt

SEQ ID NO: 131429 - DNA, 17 bp, Arabidopsis thaliana
taatctctccaggcgca

SEQ ID NO: 131430 - DNA, 17 bp, Arabidopsis thaliana
taatctgacagaatcgc

SEQ ID NO: 131431 - DNA, 17 bp, Arabidopsis thaliana
taatctgagcctttctt

SEQ ID NO: 131432 - DNA, 17 bp, Arabidopsis thaliana
taatctgctaaccggtt

SEQ ID NO: 131433 - DNA, 17 bp, Arabidopsis thaliana
taatctgctaacttgct

SEQ ID NO: 131434 - DNA, 17 bp, Arabidopsis thaliana
taatctgctaattagtt

SEQ ID NO: 131435 - DNA, 17 bp, Arabidopsis thaliana
taatctgctctgtgcct

SEQ ID NO: 131436 - DNA, 17 bp, Arabidopsis thaliana
taatctggctggactta

SEQ ID NO: 131437 - DNA, 17 bp, Arabidopsis thaliana
taatctggtgctctaca

SEQ ID NO: 131438 - DNA, 17 bp, Arabidopsis thaliana
taatctggtgtgcctct

SEQ ID NO: 131439 - DNA, 17 bp, Arabidopsis thaliana
taatctgtcagttgggc

SEQ ID NO: 131440 - DNA, 17 bp, Arabidopsis thaliana
taatctgtggaccaaaa

SEQ ID NO: 131441 - DNA, 17 bp, Arabidopsis thaliana
taatctgtgttaggccg

SEQ ID NO: 131442 - DNA, 17 bp, Arabidopsis thaliana
taatctgttagcggtcg

SEQ ID NO: 131443 - DNA, 17 bp, Arabidopsis thaliana
taatctgttggaccaac

SEQ ID NO: 131444 - DNA, 17 bp, Arabidopsis thaliana
taatcttcggaacctca

SEQ ID NO: 131445 - DNA, 17 bp, Arabidopsis thaliana
taatcttcggcaaatag

SEQ ID NO: 131446 - DNA, 17 bp, Arabidopsis thaliana
taatcttctcgggccca

SEQ ID NO: 131447 - DNA, 17 bp, Arabidopsis thaliana
taatcttgaggtcccta

SEQ ID NO: 131448 - DNA, 17 bp, Arabidopsis thaliana
taatcttgggtatcagg

SEQ ID NO: 131449 - DNA, 17 bp, Arabidopsis thaliana
taatcttgtgtccgaca

SEQ ID NO: 131450 - DNA, 17 bp, Arabidopsis thaliana
taatcttgttgtgattg

SEQ ID NO: 131451 - DNA, 17 bp, Arabidopsis thaliana
taatctttgctctttgg

SEQ ID NO: 131452 - DNA, 17 bp, Arabidopsis thaliana
taatctttggggatgtt

SEQ ID NO: 131453 - DNA, 17 bp, Arabidopsis thaliana
taatgaacctgtggtca

SEQ ID NO: 131454 - DNA, 17 bp, Arabidopsis thaliana
taatgaacgcagcgtca

SEQ ID NO: 131455 - DNA, 17 bp, Arabidopsis thaliana
taatgaccacggttaaa

SEQ ID NO: 131456 - DNA, 17 bp, Arabidopsis thaliana
taatgaccgttttctcg

SEQ ID NO: 131457 - DNA, 17 bp, Arabidopsis thaliana
taatgaccgttttcttg

SEQ ID NO: 131458 - DNA, 17 bp, Arabidopsis thaliana
taatgacgtggcggctt

SEQ ID NO: 131459 - DNA, 17 bp, Arabidopsis thaliana
taatgactgagatcaag

SEQ ID NO: 131460 - DNA, 17 bp, Arabidopsis thaliana
taatgacttagtccgag

SEQ ID NO: 131461 - DNA, 17 bp, Arabidopsis thaliana
taatgagccattcgcag

SEQ ID NO: 131462 - DNA, 17 bp, Arabidopsis thaliana
taatgagttttgccaca

SEQ ID NO: 131463 - DNA, 17 bp, Arabidopsis thaliana
taatgataccatgagtg

SEQ ID NO: 131464 - DNA, 17 bp, Arabidopsis thaliana
taatgatcaaacgcctt

SEQ ID NO: 131465 - DNA, 17 bp, Arabidopsis thaliana
taatgatcattgccggc

SEQ ID NO: 131466 - DNA, 17 bp, Arabidopsis thaliana
taatgatgcgtcgccag

SEQ ID NO: 131467 - DNA, 17 bp, Arabidopsis thaliana
taatgcagatgttgagg

SEQ ID NO: 131468 - DNA, 17 bp, Arabidopsis thaliana
taatgccaagggataat

SEQ ID NO: 131469 - DNA, 17 bp, Arabidopsis thaliana
taatgccgtcgaaaatg

SEQ ID NO: 131470 - DNA, 17 bp, Arabidopsis thaliana
taatgcctttgctgctt

SEQ ID NO: 131471 - DNA, 17 bp, Arabidopsis thaliana
taatgctcaggaggtgc

SEQ ID NO: 131472 - DNA, 17 bp, Arabidopsis thaliana
taatgctccttcttgcc

SEQ ID NO: 131473 - DNA, 17 bp, Arabidopsis thaliana
taatgctgacaattttg

SEQ ID NO: 131474 - DNA, 17 bp, Arabidopsis thaliana
taatgcttcgggtgccc

SEQ ID NO: 131475 - DNA, 17 bp, Arabidopsis thaliana
taatgcttctacagcaa

SEQ ID NO: 131476 - DNA, 17 bp, Arabidopsis thaliana
taatgcttctacatcca

SEQ ID NO: 131477 - DNA, 17 bp, Arabidopsis thaliana
taatgctttgactgaat

SEQ ID NO: 131478 - DNA, 17 bp, Arabidopsis thaliana
taatggaatcaaaagtt

SEQ ID NO: 131479 - DNA, 17 bp, Arabidopsis thaliana
taatggaatccagatgg

SEQ ID NO: 131480 - DNA, 17 bp, Arabidopsis thaliana
taatggacatggacctt

SEQ ID NO: 131481 - DNA, 17 bp, Arabidopsis thaliana
taatggagttcgcgtct

SEQ ID NO: 131482 - DNA, 17 bp, Arabidopsis thaliana
taatggagtttccgtcc

SEQ ID NO: 131483 - DNA, 17 bp, Arabidopsis thaliana
taatggcaggacgaaat

SEQ ID NO: 131484 - DNA, 17 bp, Arabidopsis thaliana
taatggcccgactgagc

SEQ ID NO: 131485 - DNA, 17 bp, Arabidopsis thaliana
taatggcgatgatgatg

SEQ ID NO: 131486 - DNA, 17 bp, Arabidopsis thaliana
taatggcgtctctggca

SEQ ID NO: 131487 - DNA, 17 bp, Arabidopsis thaliana
taatggcgttgtattct

SEQ ID NO: 131488 - DNA, 17 bp, Arabidopsis thaliana
taatggctcctgcaagg

SEQ ID NO: 131489 - DNA, 17 bp, Arabidopsis thaliana
taatggctctctggcag

SEQ ID NO: 131490 - DNA, 17 bp, Arabidopsis thaliana
taatgggtgcgtttgcg

SEQ ID NO: 131491 - DNA, 17 bp, Arabidopsis thaliana
taatgggtgctcaagcg

SEQ ID NO: 131492 - DNA, 17 bp, Arabidopsis thaliana
taatgggttggctgatt

SEQ ID NO: 131493 - DNA, 17 bp, Arabidopsis thaliana
taatggtccgcagtggg

SEQ ID NO: 131494 - DNA, 17 bp, Arabidopsis thaliana
taatggtgtgttagaca

SEQ ID NO: 131495 - DNA, 17 bp, Arabidopsis thaliana
taatgtcattgtgtttt

SEQ ID NO: 131496 - DNA, 17 bp, Arabidopsis thaliana
taatgtccacttctgta

SEQ ID NO: 131497 - DNA, 17 bp, Arabidopsis thaliana
taatgtcccagggtttg

SEQ ID NO: 131498 - DNA, 17 bp, Arabidopsis thaliana
taatgtctcaactgagt

SEQ ID NO: 131499 - DNA, 17 bp, Arabidopsis thaliana
taatgtctcaagtggtg

SEQ ID NO: 131500 - DNA, 17 bp, Arabidopsis thaliana
taatgtctcggatgacc

SEQ ID NO: 131501 - DNA, 17 bp, Arabidopsis thaliana
taatgtgacacgtttag

SEQ ID NO: 131502 - DNA, 17 bp, Arabidopsis thaliana
taatgtgagcagcccct

SEQ ID NO: 131503 - DNA, 17 bp, Arabidopsis thaliana
taatgtgcggaccgata

SEQ ID NO: 131504 - DNA, 17 bp, Arabidopsis thaliana
taatgtggttgcagacg

SEQ ID NO: 131505 - DNA, 17 bp, Arabidopsis thaliana
taatgtgttttggctgt

SEQ ID NO: 131506 - DNA, 17 bp, Arabidopsis thaliana
taatgttccgtctatct

SEQ ID NO: 131507 - DNA, 17 bp, Arabidopsis thaliana
taatgttcctacatcag

SEQ ID NO: 131508 - DNA, 17 bp, Arabidopsis thaliana
taatgttgattcaaaaa

SEQ ID NO: 131509 - DNA, 17 bp, Arabidopsis thaliana
taatgttggcagggcca

SEQ ID NO: 131510 - DNA, 17 bp, Arabidopsis thaliana
taatgttgtgaaggcga

SEQ ID NO: 131511 - DNA, 17 bp, Arabidopsis thaliana
taatgttgtggcggctg

SEQ ID NO: 131512 - DNA, 17 bp, Arabidopsis thaliana
taattaaaacaaagcat

SEQ ID NO: 131513 - DNA, 17 bp, Arabidopsis thaliana
taattaactgatctgtg

SEQ ID NO: 131514 - DNA, 17 bp, Arabidopsis thaliana
taattacaggtttacgt

SEQ ID NO: 131515 - DNA, 17 bp, Arabidopsis thaliana
taattacagtggcagtt

SEQ ID NO: 131516 - DNA, 17 bp, Arabidopsis thaliana
taattaccaacgagcgg

SEQ ID NO: 131517 - DNA, 17 bp, Arabidopsis thaliana
taattaccacccagcga

SEQ ID NO: 131518 - DNA, 17 bp, Arabidopsis thaliana
taattaccaccgagcga

SEQ ID NO: 131519 - DNA, 17 bp, Arabidopsis thaliana
taattaccaccgagcgg

SEQ ID NO: 131520 - DNA, 17 bp, Arabidopsis thaliana
taattacggcgtgacgg

SEQ ID NO: 131521 - DNA, 17 bp, Arabidopsis thaliana
taattactatcgcaccc

SEQ ID NO: 131522 - DNA, 17 bp, Arabidopsis thaliana
taattagctacttggac

SEQ ID NO: 131523 - DNA, 17 bp, Arabidopsis thaliana
taattaggtttttctgc

SEQ ID NO: 131524 - DNA, 17 bp, Arabidopsis thaliana
taattatagacgatcgc

SEQ ID NO: 131525 - DNA, 17 bp, Arabidopsis thaliana
taattatcagtttagcc

SEQ ID NO: 131526 - DNA, 17 bp, Arabidopsis thaliana
taattatcattgcacct

SEQ ID NO: 131527 - DNA, 17 bp, Arabidopsis thaliana
taattatcctctccttt

SEQ ID NO: 131528 - DNA, 17 bp, Arabidopsis thaliana
taattattgcaatctca

SEQ ID NO: 131529 - DNA, 17 bp, Arabidopsis thaliana
taattcacgggcgatgt

SEQ ID NO: 131530 - DNA, 17 bp, Arabidopsis thaliana
taattcactaagccaag

SEQ ID NO: 131531 - DNA, 17 bp, Arabidopsis thaliana
taattcagatatgtggc

SEQ ID NO: 131532 - DNA, 17 bp, Arabidopsis thaliana
taattcataggatcgtg

SEQ ID NO: 131533 - DNA, 17 bp, Arabidopsis thaliana
taattcataggattgtg

SEQ ID NO: 131534 - DNA, 17 bp, Arabidopsis thaliana
taattcatcctcggttg

SEQ ID NO: 131535 - DNA, 17 bp, Arabidopsis thaliana
taattcatctcttgact

SEQ ID NO: 131536 - DNA, 17 bp, Arabidopsis thaliana
taattcatctgtctccg

SEQ ID NO: 131537 - DNA, 17 bp, Arabidopsis thaliana
taattcatgtcttgact

SEQ ID NO: 131538 - DNA, 17 bp, Arabidopsis thaliana
taattccagctccaata

SEQ ID NO: 131539 - DNA, 17 bp, Arabidopsis thaliana
taattcccccaggcccg

SEQ ID NO: 131540 - DNA, 17 bp, Arabidopsis thaliana
taattccctggtggcca

SEQ ID NO: 131541 - DNA, 17 bp, Arabidopsis thaliana
taattccgttaacgaac

SEQ ID NO: 131542 - DNA, 17 bp, Arabidopsis thaliana
taattccgttcagccgt

SEQ ID NO: 131543 - DNA, 17 bp, Arabidopsis thaliana
taattcctccaggtccg

SEQ ID NO: 131544 - DNA, 17 bp, Arabidopsis thaliana
taattcctgggaccgtt

SEQ ID NO: 131545 - DNA, 17 bp, Arabidopsis thaliana
taattccttagaatagc

SEQ ID NO: 131546 - DNA, 17 bp, Arabidopsis thaliana
taattcgatctcacatt

SEQ ID NO: 131547 - DNA, 17 bp, Arabidopsis thaliana
taattcgattttggacc

SEQ ID NO: 131548 - DNA, 17 bp, Arabidopsis thaliana
taattcgcacatttgct

SEQ ID NO: 131549 - DNA, 17 bp, Arabidopsis thaliana
taattcgcgtctgagaa

SEQ ID NO: 131550 - DNA, 17 bp, Arabidopsis thaliana
taattcggagatacggt

SEQ ID NO: 131551 - DNA, 17 bp, Arabidopsis thaliana
taattcggtattgtgcg

SEQ ID NO: 131552 - DNA, 17 bp, Arabidopsis thaliana
taattcgtaaacggcgg

SEQ ID NO: 131553 - DNA, 17 bp, Arabidopsis thaliana
taattcgtagttcctct

SEQ ID NO: 131554 - DNA, 17 bp, Arabidopsis thaliana
taattctattaagtcgg

SEQ ID NO: 131555 - DNA, 17 bp, Arabidopsis thaliana
taattctccaaagatcc

SEQ ID NO: 131556 - DNA, 17 bp, Arabidopsis thaliana
taattctccaagtccag

SEQ ID NO: 131557 - DNA, 17 bp, Arabidopsis thaliana
taattctcgacgaacac

SEQ ID NO: 131558 - DNA, 17 bp, Arabidopsis thaliana
taattctctggtggcca

SEQ ID NO: 131559 - DNA, 17 bp, Arabidopsis thaliana
taattctgagccgaaag

SEQ ID NO: 131560 - DNA, 17 bp, Arabidopsis thaliana
taattcttttctgatcc

SEQ ID NO: 131561 - DNA, 17 bp, Arabidopsis thaliana
taattcttttgggtttg

SEQ ID NO: 131562 - DNA, 17 bp, Arabidopsis thaliana
taattgacttatggtcc

SEQ ID NO: 131563 - DNA, 17 bp, Arabidopsis thaliana
taattgagtatgtgcgg

SEQ ID NO: 131564 - DNA, 17 bp, Arabidopsis thaliana
taattgagttgccgcag

SEQ ID NO: 131565 - DNA, 17 bp, Arabidopsis thaliana
taattgatccaaccaag

SEQ ID NO: 131566 - DNA, 17 bp, Arabidopsis thaliana
taattgattgtctactg

SEQ ID NO: 131567 - DNA, 17 bp, Arabidopsis thaliana
taattgcagataaagtg

SEQ ID NO: 131568 - DNA, 17 bp, Arabidopsis thaliana
taattgcgtcttcatgt

SEQ ID NO: 131569 - DNA, 17 bp, Arabidopsis thaliana
taattggatagtcatag

SEQ ID NO: 131570 - DNA, 17 bp, Arabidopsis thaliana
taattggattttggatc

SEQ ID NO: 131571 - DNA, 17 bp, Arabidopsis thaliana
taattggccgggtcgtg

SEQ ID NO: 131572 - DNA, 17 bp, Arabidopsis thaliana
taattggcgggtttaga

SEQ ID NO: 131573 - DNA, 17 bp, Arabidopsis thaliana
taattggtccgtaagtc

SEQ ID NO: 131574 - DNA, 17 bp, Arabidopsis thaliana
taattggtctgtcagtt

SEQ ID NO: 131575 - DNA, 17 bp, Arabidopsis thaliana
taattgtcctgcggtat

SEQ ID NO: 131576 - DNA, 17 bp, Arabidopsis thaliana
taattgtcggaactgtg

SEQ ID NO: 131577 - DNA, 17 bp, Arabidopsis thaliana
taattgtcgtggcctat

SEQ ID NO: 131578 - DNA, 17 bp, Arabidopsis thaliana
taattgtgaaagtttga

SEQ ID NO: 131579 - DNA, 17 bp, Arabidopsis thaliana
taattgtgacaaacgga

SEQ ID NO: 131580 - DNA, 17 bp, Arabidopsis thaliana
taattgtgtatctaacc

SEQ ID NO: 131581 - DNA, 17 bp, Arabidopsis thaliana
taattgtgtgtcagcca

SEQ ID NO: 131582 - DNA, 17 bp, Arabidopsis thaliana
taattgtttgccttctc

SEQ ID NO: 131583 - DNA, 17 bp, Arabidopsis thaliana
taatttaagtcaccacc

SEQ ID NO: 131584 - DNA, 17 bp, Arabidopsis thaliana
taatttcaccgaacggg

SEQ ID NO: 131585 - DNA, 17 bp, Arabidopsis thaliana
taatttcacgggaaggg

SEQ ID NO: 131586 - DNA, 17 bp, Arabidopsis thaliana
taatttcacgggacggg

SEQ ID NO: 131587 - DNA, 17 bp, Arabidopsis thaliana
taatttcactgaacggg

SEQ ID NO: 131588 - DNA, 17 bp, Arabidopsis thaliana
taatttcagtttctgcc

SEQ ID NO: 131589 - DNA, 17 bp, Arabidopsis thaliana
taatttcatcgtcgttg

SEQ ID NO: 131590 - DNA, 17 bp, Arabidopsis thaliana
taatttcatctcaggcg

SEQ ID NO: 131591 - DNA, 17 bp, Arabidopsis thaliana
taatttcattggatcct

SEQ ID NO: 131592 - DNA, 17 bp, Arabidopsis thaliana
taatttccaccgcaatg

SEQ ID NO: 131593 - DNA, 17 bp, Arabidopsis thaliana
taatttcgacacagtcc

SEQ ID NO: 131594 - DNA, 17 bp, Arabidopsis thaliana
taatttcgatagggttc

SEQ ID NO: 131595 - DNA, 17 bp, Arabidopsis thaliana
taatttctactctacct

SEQ ID NO: 131596 - DNA, 17 bp, Arabidopsis thaliana
taatttctcgttcaggt

SEQ ID NO: 131597 - DNA, 17 bp, Arabidopsis thaliana
taatttcttcgagaagt

SEQ ID NO: 131598 - DNA, 17 bp, Arabidopsis thaliana
taatttgacacgtttag

SEQ ID NO: 131599 - DNA, 17 bp, Arabidopsis thaliana
taatttgacactgactc

SEQ ID NO: 131600 - DNA, 17 bp, Arabidopsis thaliana
taatttgacagacggtg

SEQ ID NO: 131601 - DNA, 17 bp, Arabidopsis thaliana
taatttgacagtgtctc

SEQ ID NO: 131602 - DNA, 17 bp, Arabidopsis thaliana
taatttgaccacttgcc

SEQ ID NO: 131603 - DNA, 17 bp, Arabidopsis thaliana
taatttgacccatttac

SEQ ID NO: 131604 - DNA, 17 bp, Arabidopsis thaliana
taatttgcaggtcacac

SEQ ID NO: 131605 - DNA, 17 bp, Arabidopsis thaliana
taatttgcggaccacac

SEQ ID NO: 131606 - DNA, 17 bp, Arabidopsis thaliana
taatttggcagcaatgt

SEQ ID NO: 131607 - DNA, 17 bp, Arabidopsis thaliana
taatttggccacttatt

SEQ ID NO: 131608 - DNA, 17 bp, Arabidopsis thaliana
taatttggtctcagacg

SEQ ID NO: 131609 - DNA, 17 bp, Arabidopsis thaliana
taatttggtgtgagtcc

SEQ ID NO: 131610 - DNA, 17 bp, Arabidopsis thaliana
taatttgtctcgtctcg

SEQ ID NO: 131611 - DNA, 17 bp, Arabidopsis thaliana
taatttgtctgcggttt

SEQ ID NO: 131612 - DNA, 17 bp, Arabidopsis thaliana
taatttgttctgaacaa

SEQ ID NO: 131613 - DNA, 17 bp, Arabidopsis thaliana
taattttaacctccgaa

SEQ ID NO: 131614 - DNA, 17 bp, Arabidopsis thaliana
taattttagaccccgtt

SEQ ID NO: 131615 - DNA, 17 bp, Arabidopsis thaliana
taattttatttgccttt

SEQ ID NO: 131616 - DNA, 17 bp, Arabidopsis thaliana
taattttcagggcaaat

SEQ ID NO: 131617 - DNA, 17 bp, Arabidopsis thaliana
taattttgcggccgtct

SEQ ID NO: 131618 - DNA, 17 bp, Arabidopsis thaliana
taattttgcggtcatca

SEQ ID NO: 131619 - DNA, 17 bp, Arabidopsis thaliana
taattttgggtccgtca

SEQ ID NO: 131620 - DNA, 17 bp, Arabidopsis thaliana
taattttgtcccaagcg

SEQ ID NO: 131621 - DNA, 17 bp, Arabidopsis thaliana
taattttgtcgctacgg

SEQ ID NO: 131622 - DNA, 17 bp, Arabidopsis thaliana
taattttgtcgctacgt

SEQ ID NO: 131623 - DNA, 17 bp, Arabidopsis thaliana
taattttgtcgttcggt

SEQ ID NO: 131624 - DNA, 17 bp, Arabidopsis thaliana
taatttttagccgcaac

SEQ ID NO: 131625 - DNA, 17 bp, Arabidopsis thaliana
taatttttcactcatag

SEQ ID NO: 131626 - DNA, 17 bp, Arabidopsis thaliana
taatttttggagccgtt

SEQ ID NO: 131627 - DNA, 17 bp, Arabidopsis thaliana
taatttttttcagacag

SEQ ID NO: 131628 - DNA, 17 bp, Arabidopsis thaliana
taatttttttttcacca

SEQ ID NO: 131629 - DNA, 17 bp, Arabidopsis thaliana
tacaaaaacatttttgg

SEQ ID NO: 131630 - DNA, 17 bp, Arabidopsis thaliana
tacaaaagttcacccct

SEQ ID NO: 131631 - DNA, 17 bp, Arabidopsis thaliana
tacaaaatcaactatga

SEQ ID NO: 131632 - DNA, 17 bp, Arabidopsis thaliana
tacaaaccgagaccttg

SEQ ID NO: 131633 - DNA, 17 bp, Arabidopsis thaliana
tacaaactgttcagacc

SEQ ID NO: 131634 - DNA, 17 bp, Arabidopsis thaliana
tacaaacttcgtggtgc

SEQ ID NO: 131635 - DNA, 17 bp, Arabidopsis thaliana
tacaaagagttgaactt

SEQ ID NO: 131636 - DNA, 17 bp, Arabidopsis thaliana
tacaaagatcagctgtt

SEQ ID NO: 131637 - DNA, 17 bp, Arabidopsis thaliana
tacaaagccacgtctgt

SEQ ID NO: 131638 - DNA, 17 bp, Arabidopsis thaliana
tacaaagttttgatgtc

SEQ ID NO: 131639 - DNA, 17 bp, Arabidopsis thaliana
tacaaattctggggctg

SEQ ID NO: 131640 - DNA, 17 bp, Arabidopsis thaliana
tacaacaagcgcttctt

SEQ ID NO: 131641 - DNA, 17 bp, Arabidopsis thaliana
tacaacagcaattcgta

SEQ ID NO: 131642 - DNA, 17 bp, Arabidopsis thaliana
tacaacaggtttgtgtg

SEQ ID NO: 131643 - DNA, 17 bp, Arabidopsis thaliana
tacaacagttacgatcg

SEQ ID NO: 131644 - DNA, 17 bp, Arabidopsis thaliana
tacaacatgcggtgcgg

SEQ ID NO: 131645 - DNA, 17 bp, Arabidopsis thaliana
tacaacattgtagctgc

SEQ ID NO: 131646 - DNA, 17 bp, Arabidopsis thaliana
tacaaccaagattcgag

SEQ ID NO: 131647 - DNA, 17 bp, Arabidopsis thaliana
tacaaccatgagctgtt

SEQ ID NO: 131648 - DNA, 17 bp, Arabidopsis thaliana
tacaaccgctagatccg

SEQ ID NO: 131649 - DNA, 17 bp, Arabidopsis thaliana
tacaacgacagtcgcca

SEQ ID NO: 131650 - DNA, 17 bp, Arabidopsis thaliana
tacaacgaggactgtga

SEQ ID NO: 131651 - DNA, 17 bp, Arabidopsis thaliana
tacaacgctcttctgct

SEQ ID NO: 131652 - DNA, 17 bp, Arabidopsis thaliana
tacaacggaattcgtct

SEQ ID NO: 131653 - DNA, 17 bp, Arabidopsis thaliana
tacaacggcttgcttct

SEQ ID NO: 131654 - DNA, 17 bp, Arabidopsis thaliana
tacaacggtggatttgg

SEQ ID NO: 131655 - DNA, 17 bp, Arabidopsis thaliana
tacaacgtctaacaggc

SEQ ID NO: 131656 - DNA, 17 bp, Arabidopsis thaliana
tacaacgtgcgactgtg

SEQ ID NO: 131657 - DNA, 17 bp, Arabidopsis thaliana
tacaactaccgccaaca

SEQ ID NO: 131658 - DNA, 17 bp, Arabidopsis thaliana
tacaactagtgcatcag

SEQ ID NO: 131659 - DNA, 17 bp, Arabidopsis thaliana
tacaactccttctaaga

SEQ ID NO: 131660 - DNA, 17 bp, Arabidopsis thaliana
tacaactcttgcgggag

SEQ ID NO: 131661 - DNA, 17 bp, Arabidopsis thaliana
tacaactctttctaaca

SEQ ID NO: 131662 - DNA, 17 bp, Arabidopsis thaliana
tacaactttgacagtta

SEQ ID NO: 131663 - DNA, 17 bp, Arabidopsis thaliana
tacaactttttctaaca

SEQ ID NO: 131664 - DNA, 17 bp, Arabidopsis thaliana
tacaagagttcagccct

SEQ ID NO: 131665 - DNA, 17 bp, Arabidopsis thaliana
tacaagatcgggttgcg

SEQ ID NO: 131666 - DNA, 17 bp, Arabidopsis thaliana
tacaagatcggtttgcg

SEQ ID NO: 131667 - DNA, 17 bp, Arabidopsis thaliana
tacaagatcggtttgtg

SEQ ID NO: 131668 - DNA, 17 bp, Arabidopsis thaliana
tacaagccgtccgattt

SEQ ID NO: 131669 - DNA, 17 bp, Arabidopsis thaliana
tacaagcctttcgcagg

SEQ ID NO: 131670 - DNA, 17 bp, Arabidopsis thaliana
tacaagcgaatagacca

SEQ ID NO: 131671 - DNA, 17 bp, Arabidopsis thaliana
tacaagcgaatgagtca

SEQ ID NO: 131672 - DNA, 17 bp, Arabidopsis thaliana
tacaagcgttgcagctc

SEQ ID NO: 131673 - DNA, 17 bp, Arabidopsis thaliana
tacaagctgacacgtgg

SEQ ID NO: 131674 - DNA, 17 bp, Arabidopsis thaliana
tacaagctggccaatgt

SEQ ID NO: 131675 - DNA, 17 bp, Arabidopsis thaliana
tacaagctggtaaccgc

SEQ ID NO: 131676 - DNA, 17 bp, Arabidopsis thaliana
tacaaggaaaactagaa

SEQ ID NO: 131677 - DNA, 17 bp, Arabidopsis thaliana
tacaaggagtcaagcat

SEQ ID NO: 131678 - DNA, 17 bp, Arabidopsis thaliana
tacaagggttttggcca

SEQ ID NO: 131679 - DNA, 17 bp, Arabidopsis thaliana
tacaagtccccaccacc

SEQ ID NO: 131680 - DNA, 17 bp, Arabidopsis thaliana
tacaagtctctcttctg

SEQ ID NO: 131681 - DNA, 17 bp, Arabidopsis thaliana
tacaagtctttcctgtg

SEQ ID NO: 131682 - DNA, 17 bp, Arabidopsis thaliana
tacaagtgactacatcg

SEQ ID NO: 131683 - DNA, 17 bp, Arabidopsis thaliana
tacaagtgcgtaacaac

SEQ ID NO: 131684 - DNA, 17 bp, Arabidopsis thaliana
tacaagtgtcactcgaa

SEQ ID NO: 131685 - DNA, 17 bp, Arabidopsis thaliana
tacaagttgatgaatgg

SEQ ID NO: 131686 - DNA, 17 bp, Arabidopsis thaliana
tacaatcacaatctaag

SEQ ID NO: 131687 - DNA, 17 bp, Arabidopsis thaliana
tacaatcaggaacgcag

SEQ ID NO: 131688 - DNA, 17 bp, Arabidopsis thaliana
tacaatcatttggaccc

SEQ ID NO: 131689 - DNA, 17 bp, Arabidopsis thaliana
tacaatccatcttacca

SEQ ID NO: 131690 - DNA, 17 bp, Arabidopsis thaliana
tacaatctcaagatggc

SEQ ID NO: 131691 - DNA, 17 bp, Arabidopsis thaliana
tacaatggcggtcctta

SEQ ID NO: 131692 - DNA, 17 bp, Arabidopsis thaliana
tacaatgtcattggccg

SEQ ID NO: 131693 - DNA, 17 bp, Arabidopsis thaliana
tacaattatcgaatcga

SEQ ID NO: 131694 - DNA, 17 bp, Arabidopsis thaliana
tacaattcattgatcaa

SEQ ID NO: 131695 - DNA, 17 bp, Arabidopsis thaliana
tacaatttttgtatgtc

SEQ ID NO: 131696 - DNA, 17 bp, Arabidopsis thaliana
tacacaaatttcagacc

SEQ ID NO: 131697 - DNA, 17 bp, Arabidopsis thaliana
tacacaccgcccgacgc

SEQ ID NO: 131698 - DNA, 17 bp, Arabidopsis thaliana
tacacaccgcccgtcac

SEQ ID NO: 131699 - DNA, 17 bp, Arabidopsis thaliana
tacacaccgcccgtcgc

SEQ ID NO: 131700 - DNA, 17 bp, Arabidopsis thaliana
tacacaccgctcgtcgc

SEQ ID NO: 131701 - DNA, 17 bp, Arabidopsis thaliana
tacacagatgggatctg

SEQ ID NO: 131702 - DNA, 17 bp, Arabidopsis thaliana
tacacagcgtccgaaac

SEQ ID NO: 131703 - DNA, 17 bp, Arabidopsis thaliana
tacacaggcatggacat

SEQ ID NO: 131704 - DNA, 17 bp, Arabidopsis thaliana
tacacaggtccgaaact

SEQ ID NO: 131705 - DNA, 17 bp, Arabidopsis thaliana
tacacaggtcgagtaga

SEQ ID NO: 131706 - DNA, 17 bp, Arabidopsis thaliana
tacacagtttgacttta

SEQ ID NO: 131707 - DNA, 17 bp, Arabidopsis thaliana
tacacatcgctctatgg

SEQ ID NO: 131708 - DNA, 17 bp, Arabidopsis thaliana
tacacatctgatcgttt

SEQ ID NO: 131709 - DNA, 17 bp, Arabidopsis thaliana
tacaccaaaaggtctgg

SEQ ID NO: 131710 - DNA, 17 bp, Arabidopsis thaliana
tacaccaaccacatcat

SEQ ID NO: 131711 - DNA, 17 bp, Arabidopsis thaliana
tacaccacctcgaatgt

SEQ ID NO: 131712 - DNA, 17 bp, Arabidopsis thaliana
tacaccagattggacac

SEQ ID NO: 131713 - DNA, 17 bp, Arabidopsis thaliana
tacacccatctatttag

SEQ ID NO: 131714 - DNA, 17 bp, Arabidopsis thaliana
tacaccgcaaccgtccg

SEQ ID NO: 131715 - DNA, 17 bp, Arabidopsis thaliana
tacaccgcgggttattt

SEQ ID NO: 131716 - DNA, 17 bp, Arabidopsis thaliana
tacaccgctgacggatt

SEQ ID NO: 131717 - DNA, 17 bp, Arabidopsis thaliana
tacaccggagtcaaact

SEQ ID NO: 131718 - DNA, 17 bp, Arabidopsis thaliana
tacacctcactaagtct

SEQ ID NO: 131719 - DNA, 17 bp, Arabidopsis thaliana
tacacctgtggatgtag

SEQ ID NO: 131720 - DNA, 17 bp, Arabidopsis thaliana
tacacgcggagacactg

SEQ ID NO: 131721 - DNA, 17 bp, Arabidopsis thaliana
tacacgcggattacggt

SEQ ID NO: 131722 - DNA, 17 bp, Arabidopsis thaliana
tacacgcggtaagatgt

SEQ ID NO: 131723 - DNA, 17 bp, Arabidopsis thaliana
tacacggagtcacggat

SEQ ID NO: 131724 - DNA, 17 bp, Arabidopsis thaliana
tacacggatacacttac

SEQ ID NO: 131725 - DNA, 17 bp, Arabidopsis thaliana
tacacggatccgcatgt

SEQ ID NO: 131726 - DNA, 17 bp, Arabidopsis thaliana
tacacggctcaggcgtt

SEQ ID NO: 131727 - DNA, 17 bp, Arabidopsis thaliana
tacacgggatacactta

SEQ ID NO: 131728 - DNA, 17 bp, Arabidopsis thaliana
tacacggtcccacgtct

SEQ ID NO: 131729 - DNA, 17 bp, Arabidopsis thaliana
tacacgtgtcaacatct

SEQ ID NO: 131730 - DNA, 17 bp, Arabidopsis thaliana
tacacgttcgtgcggga

SEQ ID NO: 131731 - DNA, 17 bp, Arabidopsis thaliana
tacactactttgtccgc

SEQ ID NO: 131732 - DNA, 17 bp, Arabidopsis thaliana
tacactagaggttacag

SEQ ID NO: 131733 - DNA, 17 bp, Arabidopsis thaliana
tacactccatggctctg

SEQ ID NO: 131734 - DNA, 17 bp, Arabidopsis thaliana
tacactccattttcgat

SEQ ID NO: 131735 - DNA, 17 bp, Arabidopsis thaliana
tacactcgaccagttta

SEQ ID NO: 131736 - DNA, 17 bp, Arabidopsis thaliana
tacactcgatctccgac

SEQ ID NO: 131737 - DNA, 17 bp, Arabidopsis thaliana
tacactctgatggtgca

SEQ ID NO: 131738 - DNA, 17 bp, Arabidopsis thaliana
tacactgatgctgacac

SEQ ID NO: 131739 - DNA, 17 bp, Arabidopsis thaliana
tacactgatgtattcaa

SEQ ID NO: 131740 - DNA, 17 bp, Arabidopsis thaliana
tacactgcctcttccct

SEQ ID NO: 131741 - DNA, 17 bp, Arabidopsis thaliana
tacactgcctgttcagg

SEQ ID NO: 131742 - DNA, 17 bp, Arabidopsis thaliana
tacactgctgctctcga

SEQ ID NO: 131743 - DNA, 17 bp, Arabidopsis thaliana
tacactgtggaagcccc

SEQ ID NO: 131744 - DNA, 17 bp, Arabidopsis thaliana
tacacttaccaggttag

SEQ ID NO: 131745 - DNA, 17 bp, Arabidopsis thaliana
tacacttcagtgcgttc

SEQ ID NO: 131746 - DNA, 17 bp, Arabidopsis thaliana
tacacttgactgtgatc

SEQ ID NO: 131747 - DNA, 17 bp, Arabidopsis thaliana
tacactttattcgccgt

SEQ ID NO: 131748 - DNA, 17 bp, Arabidopsis thaliana
tacactttcggactagt

SEQ ID NO: 131749 - DNA, 17 bp, Arabidopsis thaliana
tacactttgcgccgttc

SEQ ID NO: 131750 - DNA, 17 bp, Arabidopsis thaliana
tacagaacagggcggcg

SEQ ID NO: 131751 - DNA, 17 bp, Arabidopsis thaliana
tacagaacagggcggct

SEQ ID NO: 131752 - DNA, 17 bp, Arabidopsis thaliana
tacagaagttggtgatt

SEQ ID NO: 131753 - DNA, 17 bp, Arabidopsis thaliana
tacagacagtagcacac

SEQ ID NO: 131754 - DNA, 17 bp, Arabidopsis thaliana
tacagacattttgacca

SEQ ID NO: 131755 - DNA, 17 bp, Arabidopsis thaliana
tacagaccaatctctcc

SEQ ID NO: 131756 - DNA, 17 bp, Arabidopsis thaliana
tacagacccggggattc

SEQ ID NO: 131757 - DNA, 17 bp, Arabidopsis thaliana
tacagacccgggttcga

SEQ ID NO: 131758 - DNA, 17 bp, Arabidopsis thaliana
tacagacccgggttcgt

SEQ ID NO: 131759 - DNA, 17 bp, Arabidopsis thaliana
tacagacccgggtttcc

SEQ ID NO: 131760 - DNA, 17 bp, Arabidopsis thaliana
tacagaccgaaattttt

SEQ ID NO: 131761 - DNA, 17 bp, Arabidopsis thaliana
tacagacgaagtagttt

SEQ ID NO: 131762 - DNA, 17 bp, Arabidopsis thaliana
tacagactgttcagacc

SEQ ID NO: 131763 - DNA, 17 bp, Arabidopsis thaliana
tacagactgttcagact

SEQ ID NO: 131764 - DNA, 17 bp, Arabidopsis thaliana
tacagacttcgtggtgc

SEQ ID NO: 131765 - DNA, 17 bp, Arabidopsis thaliana
tacagagaatggggtct

SEQ ID NO: 131766 - DNA, 17 bp, Arabidopsis thaliana
tacagagagaatcaagc

SEQ ID NO: 131767 - DNA, 17 bp, Arabidopsis thaliana
tacagaggtgtcctccg

SEQ ID NO: 131768 - DNA, 17 bp, Arabidopsis thaliana
tacagaggtgtcctcct

SEQ ID NO: 131769 - DNA, 17 bp, Arabidopsis thaliana
tacagaggttaatcgtc

SEQ ID NO: 131770 - DNA, 17 bp, Arabidopsis thaliana
tacagagtcttccagga

SEQ ID NO: 131771 - DNA, 17 bp, Arabidopsis thaliana
tacagagtgaaatcgca

SEQ ID NO: 131772 - DNA, 17 bp, Arabidopsis thaliana
tacagagtggacatctc

SEQ ID NO: 131773 - DNA, 17 bp, Arabidopsis thaliana
tacagatccttctgctt

SEQ ID NO: 131774 - DNA, 17 bp, Arabidopsis thaliana
tacagatgagatgaaat

SEQ ID NO: 131775 - DNA, 17 bp, Arabidopsis thaliana
tacagattaagccatgc

SEQ ID NO: 131776 - DNA, 17 bp, Arabidopsis thaliana
tacagcacagttgcgga

SEQ ID NO: 131777 - DNA, 17 bp, Arabidopsis thaliana
tacagcacagttgcggt

SEQ ID NO: 131778 - DNA, 17 bp, Arabidopsis thaliana
tacagcactgttgcgat

SEQ ID NO: 131779 - DNA, 17 bp, Arabidopsis thaliana
tacagcactgttgcgct

SEQ ID NO: 131780 - DNA, 17 bp, Arabidopsis thaliana
tacagcactgttgcggt

SEQ ID NO: 131781 - DNA, 17 bp, Arabidopsis thaliana
tacagcactgttgtgat

SEQ ID NO: 131782 - DNA, 17 bp, Arabidopsis thaliana
tacagcactttgtcggg

SEQ ID NO: 131783 - DNA, 17 bp, Arabidopsis thaliana
tacagcagaatgtgtcc

SEQ ID NO: 131784 - DNA, 17 bp, Arabidopsis thaliana
tacagcagtggacggat

SEQ ID NO: 131785 - DNA, 17 bp, Arabidopsis thaliana
tacagccaaggatgact

SEQ ID NO: 131786 - DNA, 17 bp, Arabidopsis thaliana
tacagccacgtcagcgc

SEQ ID NO: 131787 - DNA, 17 bp, Arabidopsis thaliana
tacagccggcggtgcaa

SEQ ID NO: 131788 - DNA, 17 bp, Arabidopsis thaliana
tacagccggtatgacgt

SEQ ID NO: 131789 - DNA, 17 bp, Arabidopsis thaliana
tacagcctgaattgcgg

SEQ ID NO: 131790 - DNA, 17 bp, Arabidopsis thaliana
tacagcgacaatcagtt

SEQ ID NO: 131791 - DNA, 17 bp, Arabidopsis thaliana
tacagcggcccaagcgg

SEQ ID NO: 131792 - DNA, 17 bp, Arabidopsis thaliana
tacagcggctgtcattg

SEQ ID NO: 131793 - DNA, 17 bp, Arabidopsis thaliana
tacagcggtccaagcgg

SEQ ID NO: 131794 - DNA, 17 bp, Arabidopsis thaliana
tacagctggagctttgt

SEQ ID NO: 131795 - DNA, 17 bp, Arabidopsis thaliana
tacagcttcttcgcaaa

SEQ ID NO: 131796 - DNA, 17 bp, Arabidopsis thaliana
tacaggacgggtttggc

SEQ ID NO: 131797 - DNA, 17 bp, Arabidopsis thaliana
tacaggagcttttatct

SEQ ID NO: 131798 - DNA, 17 bp, Arabidopsis thaliana
tacaggccaagtatgtg

SEQ ID NO: 131799 - DNA, 17 bp, Arabidopsis thaliana
tacaggcctagaccgtc

SEQ ID NO: 131800 - DNA, 17 bp, Arabidopsis thaliana
tacagggaagacgaaag

SEQ ID NO: 131801 - DNA, 17 bp, Arabidopsis thaliana
tacaggtgcaactgtgt

SEQ ID NO: 131802 - DNA, 17 bp, Arabidopsis thaliana
tacaggtgctgcatggc

SEQ ID NO: 131803 - DNA, 17 bp, Arabidopsis thaliana
tacaggtgctgccgctg

SEQ ID NO: 131804 - DNA, 17 bp, Arabidopsis thaliana
tacaggtggttcatttg

SEQ ID NO: 131805 - DNA, 17 bp, Arabidopsis thaliana
tacaggtttacgttttt

SEQ ID NO: 131806 - DNA, 17 bp, Arabidopsis thaliana
tacaggtttttttggtt

SEQ ID NO: 131807 - DNA, 17 bp, Arabidopsis thaliana
tacagtaaacgcggatt

SEQ ID NO: 131808 - DNA, 17 bp, Arabidopsis thaliana
tacagtaacacttacgg

SEQ ID NO: 131809 - DNA, 17 bp, Arabidopsis thaliana
tacagtaatgttgcaat

SEQ ID NO: 131810 - DNA, 17 bp, Arabidopsis thaliana
tacagtactgttgcgat

SEQ ID NO: 131811 - DNA, 17 bp, Arabidopsis thaliana
tacagtactgttgcggt

SEQ ID NO: 131812 - DNA, 17 bp, Arabidopsis thaliana
tacagtagctgtcactg

SEQ ID NO: 131813 - DNA, 17 bp, Arabidopsis thaliana
tacagtatcgtgtgggc

SEQ ID NO: 131814 - DNA, 17 bp, Arabidopsis thaliana
tacagtcaacttcctgg

SEQ ID NO: 131815 - DNA, 17 bp, Arabidopsis thaliana
tacagtcgcagagacta

SEQ ID NO: 131816 - DNA, 17 bp, Arabidopsis thaliana
tacagtcgcagagactg

SEQ ID NO: 131817 - DNA, 17 bp, Arabidopsis thaliana
tacagtcggtaacgacc

SEQ ID NO: 131818 - DNA, 17 bp, Arabidopsis thaliana
tacagtcggttcgcgat

SEQ ID NO: 131819 - DNA, 17 bp, Arabidopsis thaliana
tacagtctcctgtacac

SEQ ID NO: 131820 - DNA, 17 bp, Arabidopsis thaliana
tacagtctctaggatca

SEQ ID NO: 131821 - DNA, 17 bp, Arabidopsis thaliana
tacagtcttcaagattt

SEQ ID NO: 131822 - DNA, 17 bp, Arabidopsis thaliana
tacagtcttcgtgccac

SEQ ID NO: 131823 - DNA, 17 bp, Arabidopsis thaliana
tacagtgacgtgagctc

SEQ ID NO: 131824 - DNA, 17 bp, Arabidopsis thaliana
tacagtgaggtctacct

SEQ ID NO: 131825 - DNA, 17 bp, Arabidopsis thaliana
tacagtgcgctggttgg

SEQ ID NO: 131826 - DNA, 17 bp, Arabidopsis thaliana
tacagtgcggtacggtt

SEQ ID NO: 131827 - DNA, 17 bp, Arabidopsis thaliana
tacagtgcttggcacag

SEQ ID NO: 131828 - DNA, 17 bp, Arabidopsis thaliana
tacagtgggaagcatat

SEQ ID NO: 131829 - DNA, 17 bp, Arabidopsis thaliana
tacagttaacgactgtt

SEQ ID NO: 131830 - DNA, 17 bp, Arabidopsis thaliana
tacagttaagcgtgctt

SEQ ID NO: 131831 - DNA, 17 bp, Arabidopsis thaliana
tacagttcacctccagg

SEQ ID NO: 131832 - DNA, 17 bp, Arabidopsis thaliana
tacagttctacgcaagg

SEQ ID NO: 131833 - DNA, 17 bp, Arabidopsis thaliana
tacagttctgtggtcag

SEQ ID NO: 131834 - DNA, 17 bp, Arabidopsis thaliana
tacagttgcgggcggta

SEQ ID NO: 131835 - DNA, 17 bp, Arabidopsis thaliana
tacagttgttgagtcga

SEQ ID NO: 131836 - DNA, 17 bp, Arabidopsis thaliana
tacagtttccgactgcg

SEQ ID NO: 131837 - DNA, 17 bp, Arabidopsis thaliana
tacagtttccgtcgagc

SEQ ID NO: 131838 - DNA, 17 bp, Arabidopsis thaliana
tacagtttctggtctct

SEQ ID NO: 131839 - DNA, 17 bp, Arabidopsis thaliana
tacagtttgttgtcggt

SEQ ID NO: 131840 - DNA, 17 bp, Arabidopsis thaliana
tacataaaggtgaattg

SEQ ID NO: 131841 - DNA, 17 bp, Arabidopsis thaliana
tacatactcttcacctt

SEQ ID NO: 131842 - DNA, 17 bp, Arabidopsis thaliana
tacatacttgggtgaac

SEQ ID NO: 131843 - DNA, 17 bp, Arabidopsis thaliana
tacatagaccaaaccaa

SEQ ID NO: 131844 - DNA, 17 bp, Arabidopsis thaliana
tacatagctaactgtac

SEQ ID NO: 131845 - DNA, 17 bp, Arabidopsis thaliana
tacatagctgctgggac

SEQ ID NO: 131846 - DNA, 17 bp, Arabidopsis thaliana
tacataggccatgattg

SEQ ID NO: 131847 - DNA, 17 bp, Arabidopsis thaliana
tacataggcttcatgtt

SEQ ID NO: 131848 - DNA, 17 bp, Arabidopsis thaliana
tacatcaactccgtatg

SEQ ID NO: 131849 - DNA, 17 bp, Arabidopsis thaliana
tacatcaacttcacatg

SEQ ID NO: 131850 - DNA, 17 bp, Arabidopsis thaliana
tacatcaacttcgtatg

SEQ ID NO: 131851 - DNA, 17 bp, Arabidopsis thaliana
tacatcaagtgcggctt

SEQ ID NO: 131852 - DNA, 17 bp, Arabidopsis thaliana
tacatcaatttcgtatg

SEQ ID NO: 131853 - DNA, 17 bp, Arabidopsis thaliana
tacatcatgctcagtca

SEQ ID NO: 131854 - DNA, 17 bp, Arabidopsis thaliana
tacatcattttcccgtt

SEQ ID NO: 131855 - DNA, 17 bp, Arabidopsis thaliana
tacatcctcccgagccg

SEQ ID NO: 131856 - DNA, 17 bp, Arabidopsis thaliana
tacatcctctagaagcg

SEQ ID NO: 131857 - DNA, 17 bp, Arabidopsis thaliana
tacatcgacggcttgca

SEQ ID NO: 131858 - DNA, 17 bp, Arabidopsis thaliana
tacatcgaggccttaga

SEQ ID NO: 131859 - DNA, 17 bp, Arabidopsis thaliana
tacatcgagttatcgtc

SEQ ID NO: 131860 - DNA, 17 bp, Arabidopsis thaliana
tacatcgccgctctttt

SEQ ID NO: 131861 - DNA, 17 bp, Arabidopsis thaliana
tacatcgcggtagagat

SEQ ID NO: 131862 - DNA, 17 bp, Arabidopsis thaliana
tacatcgctatctgtac

SEQ ID NO: 131863 - DNA, 17 bp, Arabidopsis thaliana
tacatcggatggatcta

SEQ ID NO: 131864 - DNA, 17 bp, Arabidopsis thaliana
tacatcgtcatgtagtg

SEQ ID NO: 131865 - DNA, 17 bp, Arabidopsis thaliana
tacatcgttccaatcag

SEQ ID NO: 131866 - DNA, 17 bp, Arabidopsis thaliana
tacatcgttccagtcag

SEQ ID NO: 131867 - DNA, 17 bp, Arabidopsis thaliana
tacatctactcgctttg

SEQ ID NO: 131868 - DNA, 17 bp, Arabidopsis thaliana
tacatctagggacggat

SEQ ID NO: 131869 - DNA, 17 bp, Arabidopsis thaliana
tacatctattgcccgca

SEQ ID NO: 131870 - DNA, 17 bp, Arabidopsis thaliana
tacatctcacccgtggt

SEQ ID NO: 131871 - DNA, 17 bp, Arabidopsis thaliana
tacatctcccagaggca

SEQ ID NO: 131872 - DNA, 17 bp, Arabidopsis thaliana
tacatctcccagaggcg

SEQ ID NO: 131873 - DNA, 17 bp, Arabidopsis thaliana
tacatctccgagaggtg

SEQ ID NO: 131874 - DNA, 17 bp, Arabidopsis thaliana
tacatctctccgatgga

SEQ ID NO: 131875 - DNA, 17 bp, Arabidopsis thaliana
tacatcttccagaggcg

SEQ ID NO: 131876 - DNA, 17 bp, Arabidopsis thaliana
tacatcttctaaaggcg

SEQ ID NO: 131877 - DNA, 17 bp, Arabidopsis thaliana
tacatcttctagaggca

SEQ ID NO: 131878 - DNA, 17 bp, Arabidopsis thaliana
tacatcttggttatcgg

SEQ ID NO: 131879 - DNA, 17 bp, Arabidopsis thaliana
tacatcttggttgtcgg

SEQ ID NO: 131880 - DNA, 17 bp, Arabidopsis thaliana
tacatcttggttgtctc

SEQ ID NO: 131881 - DNA, 17 bp, Arabidopsis thaliana
tacatgaatgagtctag

SEQ ID NO: 131882 - DNA, 17 bp, Arabidopsis thaliana
tacatgacccgaatgca

SEQ ID NO: 131883 - DNA, 17 bp, Arabidopsis thaliana
tacatgatgtggtttca

SEQ ID NO: 131884 - DNA, 17 bp, Arabidopsis thaliana
tacatgatgtggtttcg

SEQ ID NO: 131885 - DNA, 17 bp, Arabidopsis thaliana
tacatgcggtatactgc

SEQ ID NO: 131886 - DNA, 17 bp, Arabidopsis thaliana
tacatgctatggtttca

SEQ ID NO: 131887 - DNA, 17 bp, Arabidopsis thaliana
tacatgctatggtttcg

SEQ ID NO: 131888 - DNA, 17 bp, Arabidopsis thaliana
tacatgctgtggtttcg

SEQ ID NO: 131889 - DNA, 17 bp, Arabidopsis thaliana
tacatggacttgcccat

SEQ ID NO: 131890 - DNA, 17 bp, Arabidopsis thaliana
tacatggagtcgatatt

SEQ ID NO: 131891 - DNA, 17 bp, Arabidopsis thaliana
tacatggccgttcttag

SEQ ID NO: 131892 - DNA, 17 bp, Arabidopsis thaliana
tacatggcgggtgggac

SEQ ID NO: 131893 - DNA, 17 bp, Arabidopsis thaliana
tacatggcgggtgggag

SEQ ID NO: 131894 - DNA, 17 bp, Arabidopsis thaliana
tacatggtagattgccc

SEQ ID NO: 131895 - DNA, 17 bp, Arabidopsis thaliana
tacatggtggacgattg

SEQ ID NO: 131896 - DNA, 17 bp, Arabidopsis thaliana
tacatggtgtggtttcg

SEQ ID NO: 131897 - DNA, 17 bp, Arabidopsis thaliana
tacatggtttgccctca

SEQ ID NO: 131898 - DNA, 17 bp, Arabidopsis thaliana
tacatgtgctcaggatt

SEQ ID NO: 131899 - DNA, 17 bp, Arabidopsis thaliana
tacatgtgcttagcctg

SEQ ID NO: 131900 - DNA, 17 bp, Arabidopsis thaliana
tacatgtggtatactgc

SEQ ID NO: 131901 - DNA, 17 bp, Arabidopsis thaliana
tacatgttggtggctcg

SEQ ID NO: 131902 - DNA, 17 bp, Arabidopsis thaliana
tacatgttgtggtttca

SEQ ID NO: 131903 - DNA, 17 bp, Arabidopsis thaliana
tacattagtgctggtat

SEQ ID NO: 131904 - DNA, 17 bp, Arabidopsis thaliana
tacattatggtctcccc

SEQ ID NO: 131905 - DNA, 17 bp, Arabidopsis thaliana
tacattcccctcccccc

SEQ ID NO: 131906 - DNA, 17 bp, Arabidopsis thaliana
tacattcttctttgggt

SEQ ID NO: 131907 - DNA, 17 bp, Arabidopsis thaliana
tacattgatttggcgga

SEQ ID NO: 131908 - DNA, 17 bp, Arabidopsis thaliana
tacattggtcggcttgt

SEQ ID NO: 131909 - DNA, 17 bp, Arabidopsis thaliana
tacattgtctctggacc

SEQ ID NO: 131910 - DNA, 17 bp, Arabidopsis thaliana
tacattgtgagttgtga

SEQ ID NO: 131911 - DNA, 17 bp, Arabidopsis thaliana
tacattgttccatcgac

SEQ ID NO: 131912 - DNA, 17 bp, Arabidopsis thaliana
tacatttcattgcccag

SEQ ID NO: 131913 - DNA, 17 bp, Arabidopsis thaliana
tacatttgaccactgaa

SEQ ID NO: 131914 - DNA, 17 bp, Arabidopsis thaliana
tacatttgaccactgta

SEQ ID NO: 131915 - DNA, 17 bp, Arabidopsis thaliana
tacatttgtatggcctc

SEQ ID NO: 131916 - DNA, 17 bp, Arabidopsis thaliana
tacattttcgggcattt

SEQ ID NO: 131917 - DNA, 17 bp, Arabidopsis thaliana
tacattttgggtggtat

SEQ ID NO: 131918 - DNA, 17 bp, Arabidopsis thaliana
tacatttttgcagccac

SEQ ID NO: 131919 - DNA, 17 bp, Arabidopsis thaliana
tacatttttgcagccat

SEQ ID NO: 131920 - DNA, 17 bp, Arabidopsis thaliana
taccaaaaaacttctga

SEQ ID NO: 131921 - DNA, 17 bp, Arabidopsis thaliana
taccaaaaagactcttg

SEQ ID NO: 131922 - DNA, 17 bp, Arabidopsis thaliana
taccaaaactgaccgga

SEQ ID NO: 131923 - DNA, 17 bp, Arabidopsis thaliana
taccaaaatcttctggg

SEQ ID NO: 131924 - DNA, 17 bp, Arabidopsis thaliana
taccaaacgctacaccg

SEQ ID NO: 131925 - DNA, 17 bp, Arabidopsis thaliana
taccaaactgctctacc

SEQ ID NO: 131926 - DNA, 17 bp, Arabidopsis thaliana
taccaaactttggttga

SEQ ID NO: 131927 - DNA, 17 bp, Arabidopsis thaliana
taccaaatcagaaagtt

SEQ ID NO: 131928 - DNA, 17 bp, Arabidopsis thaliana
taccaaatttagtgtga

SEQ ID NO: 131929 - DNA, 17 bp, Arabidopsis thaliana
taccaacatcatctgac

SEQ ID NO: 131930 - DNA, 17 bp, Arabidopsis thaliana
taccaacccttcatcgt

SEQ ID NO: 131931 - DNA, 17 bp, Arabidopsis thaliana
taccaacctgaggaagt

SEQ ID NO: 131932 - DNA, 17 bp, Arabidopsis thaliana
taccaaccttcatcgtt

SEQ ID NO: 131933 - DNA, 17 bp, Arabidopsis thaliana
taccaacctttcatcgt

SEQ ID NO: 131934 - DNA, 17 bp, Arabidopsis thaliana
taccaacgacctgagca

SEQ ID NO: 131935 - DNA, 17 bp, Arabidopsis thaliana
taccaacgtcttcaggg

SEQ ID NO: 131936 - DNA, 17 bp, Arabidopsis thaliana
taccaactctgtccggc

SEQ ID NO: 131937 - DNA, 17 bp, Arabidopsis thaliana
taccaacttcagggcct

SEQ ID NO: 131938 - DNA, 17 bp, Arabidopsis thaliana
taccaagcttcagggga

SEQ ID NO: 131939 - DNA, 17 bp, Arabidopsis thaliana
taccaaggcgatgatca

SEQ ID NO: 131940 - DNA, 17 bp, Arabidopsis thaliana
taccaaggtaagacgtt

SEQ ID NO: 131941 - DNA, 17 bp, Arabidopsis thaliana
taccaagtgattcagtt

SEQ ID NO: 131942 - DNA, 17 bp, Arabidopsis thaliana
taccaagtttggcctca

SEQ ID NO: 131943 - DNA, 17 bp, Arabidopsis thaliana
taccaatacgacatttg

SEQ ID NO: 131944 - DNA, 17 bp, Arabidopsis thaliana
taccaatatccagggtg

SEQ ID NO: 131945 - DNA, 17 bp, Arabidopsis thaliana
taccaatgggctgatac

SEQ ID NO: 131946 - DNA, 17 bp, Arabidopsis thaliana
taccaatggtgcgggtc

SEQ ID NO: 131947 - DNA, 17 bp, Arabidopsis thaliana
taccaatgttacggatc

SEQ ID NO: 131948 - DNA, 17 bp, Arabidopsis thaliana
taccaatgtttctcttc

SEQ ID NO: 131949 - DNA, 17 bp, Arabidopsis thaliana
taccaattccttgataa

SEQ ID NO: 131950 - DNA, 17 bp, Arabidopsis thaliana
taccacacctggtaacc

SEQ ID NO: 131951 - DNA, 17 bp, Arabidopsis thaliana
taccacactccttggtg

SEQ ID NO: 131952 - DNA, 17 bp, Arabidopsis thaliana
taccacactttgaaccg

SEQ ID NO: 131953 - DNA, 17 bp, Arabidopsis thaliana
taccacagcaacacgat

SEQ ID NO: 131954 - DNA, 17 bp, Arabidopsis thaliana
taccacagggataacta

SEQ ID NO: 131955 - DNA, 17 bp, Arabidopsis thaliana
taccacagggataactg

SEQ ID NO: 131956 - DNA, 17 bp, Arabidopsis thaliana
taccacatattgcagcg

SEQ ID NO: 131957 - DNA, 17 bp, Arabidopsis thaliana
taccacatccaaggaag

SEQ ID NO: 131958 - DNA, 17 bp, Arabidopsis thaliana
taccacatgagaggcta

SEQ ID NO: 131959 - DNA, 17 bp, Arabidopsis thaliana
taccaccaggagtggag

SEQ ID NO: 131960 - DNA, 17 bp, Arabidopsis thaliana
taccaccgagcgacggg

SEQ ID NO: 131961 - DNA, 17 bp, Arabidopsis thaliana
taccaccgagcggcgga

SEQ ID NO: 131962 - DNA, 17 bp, Arabidopsis thaliana
taccaccgagcggcggg

SEQ ID NO: 131963 - DNA, 17 bp, Arabidopsis thaliana
taccaccggtgggaaga

SEQ ID NO: 131964 - DNA, 17 bp, Arabidopsis thaliana
taccaccgtttgtgtcc

SEQ ID NO: 131965 - DNA, 17 bp, Arabidopsis thaliana
taccacctttgcctcat

SEQ ID NO: 131966 - DNA, 17 bp, Arabidopsis thaliana
taccacgaggttgaacg

SEQ ID NO: 131967 - DNA, 17 bp, Arabidopsis thaliana
taccacgcagttgccca

SEQ ID NO: 131968 - DNA, 17 bp, Arabidopsis thaliana
taccacggctgaattaa

SEQ ID NO: 131969 - DNA, 17 bp, Arabidopsis thaliana
taccacggtgggctctt

SEQ ID NO: 131970 - DNA, 17 bp, Arabidopsis thaliana
taccacggtggggtctt

SEQ ID NO: 131971 - DNA, 17 bp, Arabidopsis thaliana
taccacgtctgcctggg

SEQ ID NO: 131972 - DNA, 17 bp, Arabidopsis thaliana
taccacgtggacatggg

SEQ ID NO: 131973 - DNA, 17 bp, Arabidopsis thaliana
taccactaatgcaccgg

SEQ ID NO: 131974 - DNA, 17 bp, Arabidopsis thaliana
taccactccttgatgtg

SEQ ID NO: 131975 - DNA, 17 bp, Arabidopsis thaliana
taccactctatgggtcg

SEQ ID NO: 131976 - DNA, 17 bp, Arabidopsis thaliana
taccactgcagggagag

SEQ ID NO: 131977 - DNA, 17 bp, Arabidopsis thaliana
taccactgcttttctat

SEQ ID NO: 131978 - DNA, 17 bp, Arabidopsis thaliana
taccactgcttttcttt

SEQ ID NO: 131979 - DNA, 17 bp, Arabidopsis thaliana
taccactgggccaacaa

SEQ ID NO: 131980 - DNA, 17 bp, Arabidopsis thaliana
taccactgggccaacag

SEQ ID NO: 131981 - DNA, 17 bp, Arabidopsis thaliana
taccactgggccaacca

SEQ ID NO: 131982 - DNA, 17 bp, Arabidopsis thaliana
taccactgttgaagcat

SEQ ID NO: 131983 - DNA, 17 bp, Arabidopsis thaliana
taccactgtttcgagtt

SEQ ID NO: 131984 - DNA, 17 bp, Arabidopsis thaliana
taccactttggttgcat

SEQ ID NO: 131985 - DNA, 17 bp, Arabidopsis thaliana
taccacttttgccgatg

SEQ ID NO: 131986 - DNA, 17 bp, Arabidopsis thaliana
taccagaatgtttcagt

SEQ ID NO: 131987 - DNA, 17 bp, Arabidopsis thaliana
taccagacaacagggtg

SEQ ID NO: 131988 - DNA, 17 bp, Arabidopsis thaliana
taccagataaactgctt

SEQ ID NO: 131989 - DNA, 17 bp, Arabidopsis thaliana
taccagatttaccgcag

SEQ ID NO: 131990 - DNA, 17 bp, Arabidopsis thaliana
taccagcactaatgcac

SEQ ID NO: 131991 - DNA, 17 bp, Arabidopsis thaliana
taccagcttggcccaat

SEQ ID NO: 131992 - DNA, 17 bp, Arabidopsis thaliana
taccaggagattctgga

SEQ ID NO: 131993 - DNA, 17 bp, Arabidopsis thaliana
taccaggatttgtggtc

SEQ ID NO: 131994 - DNA, 17 bp, Arabidopsis thaliana
taccagggattggcttc

SEQ ID NO: 131995 - DNA, 17 bp, Arabidopsis thaliana
taccaggggtggtgtca

SEQ ID NO: 131996 - DNA, 17 bp, Arabidopsis thaliana
taccaggtaaaccaatg

SEQ ID NO: 131997 - DNA, 17 bp, Arabidopsis thaliana
taccaggtaaaccaatt

SEQ ID NO: 131998 - DNA, 17 bp, Arabidopsis thaliana
taccaggtaaatcaatt

SEQ ID NO: 131999 - DNA, 17 bp, Arabidopsis thaliana
taccaggtccagacata

SEQ ID NO: 132000 - DNA, 17 bp, Arabidopsis thaliana
taccagtaagttgtcta

SEQ ID NO: 132001 - DNA, 17 bp, Arabidopsis thaliana
taccagtaatcgctctg

SEQ ID NO: 132002 - DNA, 17 bp, Arabidopsis thaliana
taccagtatcttatgcg

SEQ ID NO: 132003 - DNA, 17 bp, Arabidopsis thaliana
taccagtatgttatgcg

SEQ ID NO: 132004 - DNA, 17 bp, Arabidopsis thaliana
taccagtgttcagacgg

SEQ ID NO: 132005 - DNA, 17 bp, Arabidopsis thaliana
taccagttaccacgcag

SEQ ID NO: 132006 - DNA, 17 bp, Arabidopsis thaliana
taccataagttattcag

SEQ ID NO: 132007 - DNA, 17 bp, Arabidopsis thaliana
taccataatgtgcggtt

SEQ ID NO: 132008 - DNA, 17 bp, Arabidopsis thaliana
taccatatgaactgttt

SEQ ID NO: 132009 - DNA, 17 bp, Arabidopsis thaliana
taccatatgacccgaat

SEQ ID NO: 132010 - DNA, 17 bp, Arabidopsis thaliana
taccatatgacccgtct

SEQ ID NO: 132011 - DNA, 17 bp, Arabidopsis thaliana
taccatatgagccgaac

SEQ ID NO: 132012 - DNA, 17 bp, Arabidopsis thaliana
taccatcacgatggatg

SEQ ID NO: 132013 - DNA, 17 bp, Arabidopsis thaliana
taccatcacgatggatt

SEQ ID NO: 132014 - DNA, 17 bp, Arabidopsis thaliana
taccatcacgatgtccg

SEQ ID NO: 132015 - DNA, 17 bp, Arabidopsis thaliana
taccatcctgcaaagtg

SEQ ID NO: 132016 - DNA, 17 bp, Arabidopsis thaliana
taccatcgcagagctca

SEQ ID NO: 132017 - DNA, 17 bp, Arabidopsis thaliana
taccatcggagcgttct

SEQ ID NO: 132018 - DNA, 17 bp, Arabidopsis thaliana
taccatctatgaggtcg

SEQ ID NO: 132019 - DNA, 17 bp, Arabidopsis thaliana
taccatctgagctacat

SEQ ID NO: 132020 - DNA, 17 bp, Arabidopsis thaliana
taccatctgccatccgg

SEQ ID NO: 132021 - DNA, 17 bp, Arabidopsis thaliana
taccatgacctgcttca

SEQ ID NO: 132022 - DNA, 17 bp, Arabidopsis thaliana
taccatgaccttgcttg

SEQ ID NO: 132023 - DNA, 17 bp, Arabidopsis thaliana
taccatggtggtaacgg

SEQ ID NO: 132024 - DNA, 17 bp, Arabidopsis thaliana
taccattacctctgttg

SEQ ID NO: 132025 - DNA, 17 bp, Arabidopsis thaliana
taccattcaaagcacct

SEQ ID NO: 132026 - DNA, 17 bp, Arabidopsis thaliana
taccattcagacgctaa

SEQ ID NO: 132027 - DNA, 17 bp, Arabidopsis thaliana
taccattcagttcgagt

SEQ ID NO: 132028 - DNA, 17 bp, Arabidopsis thaliana
taccattcggagcctta

SEQ ID NO: 132029 - DNA, 17 bp, Arabidopsis thaliana
taccattgcagggagag

SEQ ID NO: 132030 - DNA, 17 bp, Arabidopsis thaliana
taccattgctgcctaag

SEQ ID NO: 132031 - DNA, 17 bp, Arabidopsis thaliana
taccattggaccaacag

SEQ ID NO: 132032 - DNA, 17 bp, Arabidopsis thaliana
taccattggactaaccg

SEQ ID NO: 132033 - DNA, 17 bp, Arabidopsis thaliana
tacccaaaatggtcaag

SEQ ID NO: 132034 - DNA, 17 bp, Arabidopsis thaliana
tacccaaccaacggcag

SEQ ID NO: 132035 - DNA, 17 bp, Arabidopsis thaliana
tacccaagacttggtgg

SEQ ID NO: 132036 - DNA, 17 bp, Arabidopsis thaliana
tacccaaggatgacttg

SEQ ID NO: 132037 - DNA, 17 bp, Arabidopsis thaliana
tacccaatcctgacacg

SEQ ID NO: 132038 - DNA, 17 bp, Arabidopsis thaliana
tacccaatctctcccag

SEQ ID NO: 132039 - DNA, 17 bp, Arabidopsis thaliana
tacccacccacccaccc

SEQ ID NO: 132040 - DNA, 17 bp, Arabidopsis thaliana
tacccaccttgatcgat

SEQ ID NO: 132041 - DNA, 17 bp, Arabidopsis thaliana
tacccacgggtagtctc

SEQ ID NO: 132042 - DNA, 17 bp, Arabidopsis thaliana
tacccacgtgcgtagat

SEQ ID NO: 132043 - DNA, 17 bp, Arabidopsis thaliana
tacccataggtgcgatg

SEQ ID NO: 132044 - DNA, 17 bp, Arabidopsis thaliana
tacccatgggataccct

SEQ ID NO: 132045 - DNA, 17 bp, Arabidopsis thaliana
tacccattccgctgttg

SEQ ID NO: 132046 - DNA, 17 bp, Arabidopsis thaliana
tacccattctgcagcac

SEQ ID NO: 132047 - DNA, 17 bp, Arabidopsis thaliana
tacccattcttggtgct

SEQ ID NO: 132048 - DNA, 17 bp, Arabidopsis thaliana
taccccagctcaggcgg

SEQ ID NO: 132049 - DNA, 17 bp, Arabidopsis thaliana
taccccaggtcaggcgg

SEQ ID NO: 132050 - DNA, 17 bp, Arabidopsis thaliana
taccccattgtggtgca

SEQ ID NO: 132051 - DNA, 17 bp, Arabidopsis thaliana
tacccccattaccacat

SEQ ID NO: 132052 - DNA, 17 bp, Arabidopsis thaliana
taccccgggaccaccgt

SEQ ID NO: 132053 - DNA, 17 bp, Arabidopsis thaliana
tacccctacctgacgcg

SEQ ID NO: 132054 - DNA, 17 bp, Arabidopsis thaliana
tacccctgcggttttac

SEQ ID NO: 132055 - DNA, 17 bp, Arabidopsis thaliana
tacccctggcaggcttt

SEQ ID NO: 132056 - DNA, 17 bp, Arabidopsis thaliana
taccccttgtttgtcat

SEQ ID NO: 132057 - DNA, 17 bp, Arabidopsis thaliana
tacccctttgtcgctaa

SEQ ID NO: 132058 - DNA, 17 bp, Arabidopsis thaliana
tacccgaatagacccga

SEQ ID NO: 132059 - DNA, 17 bp, Arabidopsis thaliana
tacccgagggtgtcgat

SEQ ID NO: 132060 - DNA, 17 bp, Arabidopsis thaliana
tacccgatctcatctga

SEQ ID NO: 132061 - DNA, 17 bp, Arabidopsis thaliana
tacccgccgctcggtgg

SEQ ID NO: 132062 - DNA, 17 bp, Arabidopsis thaliana
tacccgccggatccgtg

SEQ ID NO: 132063 - DNA, 17 bp, Arabidopsis thaliana
tacccgccgttcgatca

SEQ ID NO: 132064 - DNA, 17 bp, Arabidopsis thaliana
tacccgccttcctctcc

SEQ ID NO: 132065 - DNA, 17 bp, Arabidopsis thaliana
tacccgctctacgaggt

SEQ ID NO: 132066 - DNA, 17 bp, Arabidopsis thaliana
tacccggaccgagtctt

SEQ ID NO: 132067 - DNA, 17 bp, Arabidopsis thaliana
tacccggccgtcggggg

SEQ ID NO: 132068 - DNA, 17 bp, Arabidopsis thaliana
tacccggtcgttctgtt

SEQ ID NO: 132069 - DNA, 17 bp, Arabidopsis thaliana
tacccgtcagttttgtc

SEQ ID NO: 132070 - DNA, 17 bp, Arabidopsis thaliana
taccctaagtttgcacg

SEQ ID NO: 132071 - DNA, 17 bp, Arabidopsis thaliana
taccctactaatgcccg

SEQ ID NO: 132072 - DNA, 17 bp, Arabidopsis thaliana
taccctactcatgcccg

SEQ ID NO: 132073 - DNA, 17 bp, Arabidopsis thaliana
taccctactgatgtccg

SEQ ID NO: 132074 - DNA, 17 bp, Arabidopsis thaliana
taccctatcgcctaatc

SEQ ID NO: 132075 - DNA, 17 bp, Arabidopsis thaliana
taccctatcggctaatg

SEQ ID NO: 132076 - DNA, 17 bp, Arabidopsis thaliana
taccctcaagactctgg

SEQ ID NO: 132077 - DNA, 17 bp, Arabidopsis thaliana
taccctcacttaaactg

SEQ ID NO: 132078 - DNA, 17 bp, Arabidopsis thaliana
taccctcatcactaatg

SEQ ID NO: 132079 - DNA, 17 bp, Arabidopsis thaliana
taccctcttgcaacaat

SEQ ID NO: 132080 - DNA, 17 bp, Arabidopsis thaliana
tacccttcgtttgcagt

SEQ ID NO: 132081 - DNA, 17 bp, Arabidopsis thaliana
tacccttctcggtcctt

SEQ ID NO: 132082 - DNA, 17 bp, Arabidopsis thaliana
tacccttgaccctggtt

SEQ ID NO: 132083 - DNA, 17 bp, Arabidopsis thaliana
taccctttcgggtatcg

SEQ ID NO: 132084 - DNA, 17 bp, Arabidopsis thaliana
taccctttcgggtttgg

SEQ ID NO: 132085 - DNA, 17 bp, Arabidopsis thaliana
tacccttttgtgttgtc

SEQ ID NO: 132086 - DNA, 17 bp, Arabidopsis thaliana
taccgaaactcttggct

SEQ ID NO: 132087 - DNA, 17 bp, Arabidopsis thaliana
taccgaacagtggctgg

SEQ ID NO: 132088 - DNA, 17 bp, Arabidopsis thaliana
taccgaacgatcaacca

SEQ ID NO: 132089 - DNA, 17 bp, Arabidopsis thaliana
taccgaactaaaaaccg

SEQ ID NO: 132090 - DNA, 17 bp, Arabidopsis thaliana
taccgaaggatcatctt

SEQ ID NO: 132091 - DNA, 17 bp, Arabidopsis thaliana
taccgaattgacgttca

SEQ ID NO: 132092 - DNA, 17 bp, Arabidopsis thaliana
taccgaccagattacgg

SEQ ID NO: 132093 - DNA, 17 bp, Arabidopsis thaliana
taccgacccagaggcat

SEQ ID NO: 132094 - DNA, 17 bp, Arabidopsis thaliana
taccgaccctgttcttt

SEQ ID NO: 132095 - DNA, 17 bp, Arabidopsis thaliana
taccgacctactcgacc

SEQ ID NO: 132096 - DNA, 17 bp, Arabidopsis thaliana
taccgaccttaggccga

SEQ ID NO: 132097 - DNA, 17 bp, Arabidopsis thaliana
taccgacgcggattaag

SEQ ID NO: 132098 - DNA, 17 bp, Arabidopsis thaliana
taccgacgcggattacg

SEQ ID NO: 132099 - DNA, 17 bp, Arabidopsis thaliana
taccgacggctgatttg

SEQ ID NO: 132100 - DNA, 17 bp, Arabidopsis thaliana
taccgacgtttttccgc

SEQ ID NO: 132101 - DNA, 17 bp, Arabidopsis thaliana
taccgagctgccggtgt

SEQ ID NO: 132102 - DNA, 17 bp, Arabidopsis thaliana
taccgaggcctgttcct

SEQ ID NO: 132103 - DNA, 17 bp, Arabidopsis thaliana
taccgagggcacgtctg

SEQ ID NO: 132104 - DNA, 17 bp, Arabidopsis thaliana
taccgaggggcttgccg

SEQ ID NO: 132105 - DNA, 17 bp, Arabidopsis thaliana
taccgaggtcggccgaa

SEQ ID NO: 132106 - DNA, 17 bp, Arabidopsis thaliana
taccgatcagtccctgg

SEQ ID NO: 132107 - DNA, 17 bp, Arabidopsis thaliana
taccgatgaagatggtc

SEQ ID NO: 132108 - DNA, 17 bp, Arabidopsis thaliana
taccgatgctctaagag

SEQ ID NO: 132109 - DNA, 17 bp, Arabidopsis thaliana
taccgattgaatgatcc

SEQ ID NO: 132110 - DNA, 17 bp, Arabidopsis thaliana
taccgatttatctgcaa

SEQ ID NO: 132111 - DNA, 17 bp, Arabidopsis thaliana
taccgatttctccgagt

SEQ ID NO: 132112 - DNA, 17 bp, Arabidopsis thaliana
taccgattttcgataca

SEQ ID NO: 132113 - DNA, 17 bp, Arabidopsis thaliana
taccgcaagagttgcag

SEQ ID NO: 132114 - DNA, 17 bp, Arabidopsis thaliana
taccgcaagatcaaagt

SEQ ID NO: 132115 - DNA, 17 bp, Arabidopsis thaliana
taccgcaatatctactt

SEQ ID NO: 132116 - DNA, 17 bp, Arabidopsis thaliana
taccgcaccacgaggcg

SEQ ID NO: 132117 - DNA, 17 bp, Arabidopsis thaliana
taccgcaggttgttgtt

SEQ ID NO: 132118 - DNA, 17 bp, Arabidopsis thaliana
taccgcagtttgcaaga

SEQ ID NO: 132119 - DNA, 17 bp, Arabidopsis thaliana
taccgcagtttgcgaga

SEQ ID NO: 132120 - DNA, 17 bp, Arabidopsis thaliana
taccgcagtttgcgagg

SEQ ID NO: 132121 - DNA, 17 bp, Arabidopsis thaliana
taccgccagttgatgaa

SEQ ID NO: 132122 - DNA, 17 bp, Arabidopsis thaliana
taccgcctgggaaatta

SEQ ID NO: 132123 - DNA, 17 bp, Arabidopsis thaliana
taccgcctgtggtgtac

SEQ ID NO: 132124 - DNA, 17 bp, Arabidopsis thaliana
taccgccttgcggatgg

SEQ ID NO: 132125 - DNA, 17 bp, Arabidopsis thaliana
taccgcgaagctaccgt

SEQ ID NO: 132126 - DNA, 17 bp, Arabidopsis thaliana
taccgcgatgattcccc

SEQ ID NO: 132127 - DNA, 17 bp, Arabidopsis thaliana
taccgcggacggtgttc

SEQ ID NO: 132128 - DNA, 17 bp, Arabidopsis thaliana
taccgcggagacaattg

SEQ ID NO: 132129 - DNA, 17 bp, Arabidopsis thaliana
taccgcgggacgattta

SEQ ID NO: 132130 - DNA, 17 bp, Arabidopsis thaliana
taccgcgggtcaaaatc

SEQ ID NO: 132131 - DNA, 17 bp, Arabidopsis thaliana
taccgcgggtcaatatc

SEQ ID NO: 132132 - DNA, 17 bp, Arabidopsis thaliana
taccgcgggtgaaaatc

SEQ ID NO: 132133 - DNA, 17 bp, Arabidopsis thaliana
taccgcgggttaaactc

SEQ ID NO: 132134 - DNA, 17 bp, Arabidopsis thaliana
taccgcgggttaagtcc

SEQ ID NO: 132135 - DNA, 17 bp, Arabidopsis thaliana
taccgcgggttaatatc

SEQ ID NO: 132136 - DNA, 17 bp, Arabidopsis thaliana
taccgcggtgacaattt

SEQ ID NO: 132137 - DNA, 17 bp, Arabidopsis thaliana
taccgctattgtgattt

SEQ ID NO: 132138 - DNA, 17 bp, Arabidopsis thaliana
taccgctcaggacaggg

SEQ ID NO: 132139 - DNA, 17 bp, Arabidopsis thaliana
taccgcttagctcagag

SEQ ID NO: 132140 - DNA, 17 bp, Arabidopsis thaliana
taccggagctgaccgga

SEQ ID NO: 132141 - DNA, 17 bp, Arabidopsis thaliana
taccggcaaatgccggc

SEQ ID NO: 132142 - DNA, 17 bp, Arabidopsis thaliana
taccggccgggggacgg

SEQ ID NO: 132143 - DNA, 17 bp, Arabidopsis thaliana
taccggcgagttgattg

SEQ ID NO: 132144 - DNA, 17 bp, Arabidopsis thaliana
taccggcttgtcccttc

SEQ ID NO: 132145 - DNA, 17 bp, Arabidopsis thaliana
taccgggaccggtttta

SEQ ID NO: 132146 - DNA, 17 bp, Arabidopsis thaliana
taccgggactaaccgaa

SEQ ID NO: 132147 - DNA, 17 bp, Arabidopsis thaliana
taccgggagggtgctat

SEQ ID NO: 132148 - DNA, 17 bp, Arabidopsis thaliana
taccgggctctttccag

SEQ ID NO: 132149 - DNA, 17 bp, Arabidopsis thaliana
taccggtggagcgatgg

SEQ ID NO: 132150 - DNA, 17 bp, Arabidopsis thaliana
taccggttttgacccag

SEQ ID NO: 132151 - DNA, 17 bp, Arabidopsis thaliana
taccgtaaacctgttgg

SEQ ID NO: 132152 - DNA, 17 bp, Arabidopsis thaliana
taccgtacgtccgtagg

SEQ ID NO: 132153 - DNA, 17 bp, Arabidopsis thaliana
taccgtacttcaagtgg

SEQ ID NO: 132154 - DNA, 17 bp, Arabidopsis thaliana
taccgtagatggaacaa

SEQ ID NO: 132155 - DNA, 17 bp, Arabidopsis thaliana
taccgtatacagggccg

SEQ ID NO: 132156 - DNA, 17 bp, Arabidopsis thaliana
taccgtcaatgtgccac

SEQ ID NO: 132157 - DNA, 17 bp, Arabidopsis thaliana
taccgtcaggtctgttg

SEQ ID NO: 132158 - DNA, 17 bp, Arabidopsis thaliana
taccgtcatgtacttca

SEQ ID NO: 132159 - DNA, 17 bp, Arabidopsis thaliana
taccgtccggatgtcct

SEQ ID NO: 132160 - DNA, 17 bp, Arabidopsis thaliana
taccgtcgctaaggagg

SEQ ID NO: 132161 - DNA, 17 bp, Arabidopsis thaliana
taccgtcgtatacaagg

SEQ ID NO: 132162 - DNA, 17 bp, Arabidopsis thaliana
taccgtcgtttagatct

SEQ ID NO: 132163 - DNA, 17 bp, Arabidopsis thaliana
taccgtgaggccaaact

SEQ ID NO: 132164 - DNA, 17 bp, Arabidopsis thaliana
taccgtgatccggtaca

SEQ ID NO: 132165 - DNA, 17 bp, Arabidopsis thaliana
taccgtgatcgtggtct

SEQ ID NO: 132166 - DNA, 17 bp, Arabidopsis thaliana
taccgtgcgctggatta

SEQ ID NO: 132167 - DNA, 17 bp, Arabidopsis thaliana
taccgtgcggaagggtt

SEQ ID NO: 132168 - DNA, 17 bp, Arabidopsis thaliana
taccgtggaatctcact

SEQ ID NO: 132169 - DNA, 17 bp, Arabidopsis thaliana
taccgtggaatctcatt

SEQ ID NO: 132170 - DNA, 17 bp, Arabidopsis thaliana
taccgtgtgttctccac

SEQ ID NO: 132171 - DNA, 17 bp, Arabidopsis thaliana
taccgttagacttggca

SEQ ID NO: 132172 - DNA, 17 bp, Arabidopsis thaliana
taccgttgagagccttc

SEQ ID NO: 132173 - DNA, 17 bp, Arabidopsis thaliana
taccgttgctacagtag

SEQ ID NO: 132174 - DNA, 17 bp, Arabidopsis thaliana
taccgttgtggagcgaa

SEQ ID NO: 132175 - DNA, 17 bp, Arabidopsis thaliana
taccgtttccggcaggt

SEQ ID NO: 132176 - DNA, 17 bp, Arabidopsis thaliana
tacctaagcaccgagct

SEQ ID NO: 132177 - DNA, 17 bp, Arabidopsis thaliana
tacctaagcaccgggct

SEQ ID NO: 132178 - DNA, 17 bp, Arabidopsis thaliana
tacctacacaggtcgag

SEQ ID NO: 132179 - DNA, 17 bp, Arabidopsis thaliana
tacctacacctcctctg

SEQ ID NO: 132180 - DNA, 17 bp, Arabidopsis thaliana
tacctacactttgcgcc

SEQ ID NO: 132181 - DNA, 17 bp, Arabidopsis thaliana
tacctacagaacagggc

SEQ ID NO: 132182 - DNA, 17 bp, Arabidopsis thaliana
tacctacagaatcaagg

SEQ ID NO: 132183 - DNA, 17 bp, Arabidopsis thaliana
tacctacatcgtcatgt

SEQ ID NO: 132184 - DNA, 17 bp, Arabidopsis thaliana
tacctaccaccgagcgg

SEQ ID NO: 132185 - DNA, 17 bp, Arabidopsis thaliana
tacctaccacttttgcc

SEQ ID NO: 132186 - DNA, 17 bp, Arabidopsis thaliana
tacctaccaggatttgt

SEQ ID NO: 132187 - DNA, 17 bp, Arabidopsis thaliana
tacctaccagtgttcag

SEQ ID NO: 132188 - DNA, 17 bp, Arabidopsis thaliana
tacctacccaaggatga

SEQ ID NO: 132189 - DNA, 17 bp, Arabidopsis thaliana
tacctacccaatcctga

SEQ ID NO: 132190 - DNA, 17 bp, Arabidopsis thaliana
tacctacctacgggcca

SEQ ID NO: 132191 - DNA, 17 bp, Arabidopsis thaliana
tacctacctgcaatagt

SEQ ID NO: 132192 - DNA, 17 bp, Arabidopsis thaliana
tacctacctggttgatc

SEQ ID NO: 132193 - DNA, 17 bp, Arabidopsis thaliana
tacctacctgttatggt

SEQ ID NO: 132194 - DNA, 17 bp, Arabidopsis thaliana
tacctacgcctaaatag

SEQ ID NO: 132195 - DNA, 17 bp, Arabidopsis thaliana
tacctacgcggatcgac

SEQ ID NO: 132196 - DNA, 17 bp, Arabidopsis thaliana
tacctacgcttgtggag

SEQ ID NO: 132197 - DNA, 17 bp, Arabidopsis thaliana
tacctacggctgacact

SEQ ID NO: 132198 - DNA, 17 bp, Arabidopsis thaliana
tacctacggctgactta

SEQ ID NO: 132199 - DNA, 17 bp, Arabidopsis thaliana
tacctacggctttggct

SEQ ID NO: 132200 - DNA, 17 bp, Arabidopsis thaliana
tacctacgggccaaggg

SEQ ID NO: 132201 - DNA, 17 bp, Arabidopsis thaliana
tacctacggtggcggcc

SEQ ID NO: 132202 - DNA, 17 bp, Arabidopsis thaliana
tacctacgtcttgcgtc

SEQ ID NO: 132203 - DNA, 17 bp, Arabidopsis thaliana
tacctactacagtccga

SEQ ID NO: 132204 - DNA, 17 bp, Arabidopsis thaliana
tacctactcaacttccg

SEQ ID NO: 132205 - DNA, 17 bp, Arabidopsis thaliana
tacctactcaatcctct

SEQ ID NO: 132206 - DNA, 17 bp, Arabidopsis thaliana
tacctactcggctgtca

SEQ ID NO: 132207 - DNA, 17 bp, Arabidopsis thaliana
tacctactgggacttgc

SEQ ID NO: 132208 - DNA, 17 bp, Arabidopsis thaliana
tacctacttagtcctgg

SEQ ID NO: 132209 - DNA, 17 bp, Arabidopsis thaliana
tacctacttagtgagcc

SEQ ID NO: 132210 - DNA, 17 bp, Arabidopsis thaliana
tacctacttcttggttg

SEQ ID NO: 132211 - DNA, 17 bp, Arabidopsis thaliana
tacctagctgctgttga

SEQ ID NO: 132212 - DNA, 17 bp, Arabidopsis thaliana
tacctaggtttgggatt

SEQ ID NO: 132213 - DNA, 17 bp, Arabidopsis thaliana
tacctattagctcagtg

SEQ ID NO: 132214 - DNA, 17 bp, Arabidopsis thaliana
tacctatttggcttgat

SEQ ID NO: 132215 - DNA, 17 bp, Arabidopsis thaliana
tacctcaaacaatcaag

SEQ ID NO: 132216 - DNA, 17 bp, Arabidopsis thaliana
tacctcagcagccgtct

SEQ ID NO: 132217 - DNA, 17 bp, Arabidopsis thaliana
tacctcagcctgctaac

SEQ ID NO: 132218 - DNA, 17 bp, Arabidopsis thaliana
tacctcagcttaccaaa

SEQ ID NO: 132219 - DNA, 17 bp, Arabidopsis thaliana
tacctcagcttgggatg

SEQ ID NO: 132220 - DNA, 17 bp, Arabidopsis thaliana
tacctcagctttgggat

SEQ ID NO: 132221 - DNA, 17 bp, Arabidopsis thaliana
tacctcattgatccagt

SEQ ID NO: 132222 - DNA, 17 bp, Arabidopsis thaliana
tacctccaatcagcgct

SEQ ID NO: 132223 - DNA, 17 bp, Arabidopsis thaliana
tacctccacctcagctt

SEQ ID NO: 132224 - DNA, 17 bp, Arabidopsis thaliana
tacctcctctggcattg

SEQ ID NO: 132225 - DNA, 17 bp, Arabidopsis thaliana
tacctcctgggcagcac

SEQ ID NO: 132226 - DNA, 17 bp, Arabidopsis thaliana
tacctcgaacccagcac

SEQ ID NO: 132227 - DNA, 17 bp, Arabidopsis thaliana
tacctcgtcttgcttta

SEQ ID NO: 132228 - DNA, 17 bp, Arabidopsis thaliana
tacctcgttaagcacag

SEQ ID NO: 132229 - DNA, 17 bp, Arabidopsis thaliana
tacctcgttgatcctgc

SEQ ID NO: 132230 - DNA, 17 bp, Arabidopsis thaliana
tacctcgtttggcagat

SEQ ID NO: 132231 - DNA, 17 bp, Arabidopsis thaliana
tacctcgttttgcagat

SEQ ID NO: 132232 - DNA, 17 bp, Arabidopsis thaliana
tacctctactttgagag

SEQ ID NO: 132233 - DNA, 17 bp, Arabidopsis thaliana
tacctctatttgggttg

SEQ ID NO: 132234 - DNA, 17 bp, Arabidopsis thaliana
tacctctcataatcgcg

SEQ ID NO: 132235 - DNA, 17 bp, Arabidopsis thaliana
tacctctcccagaggcg

SEQ ID NO: 132236 - DNA, 17 bp, Arabidopsis thaliana
tacctctcgaatggagt

SEQ ID NO: 132237 - DNA, 17 bp, Arabidopsis thaliana
tacctctcgttgctcat

SEQ ID NO: 132238 - DNA, 17 bp, Arabidopsis thaliana
tacctctgaggctgtga

SEQ ID NO: 132239 - DNA, 17 bp, Arabidopsis thaliana
tacctctggagcttaaa

SEQ ID NO: 132240 - DNA, 17 bp, Arabidopsis thaliana
tacctcttcggatgtcc

SEQ ID NO: 132241 - DNA, 17 bp, Arabidopsis thaliana
tacctctttgaccgtct

SEQ ID NO: 132242 - DNA, 17 bp, Arabidopsis thaliana
tacctctttgatggtga

SEQ ID NO: 132243 - DNA, 17 bp, Arabidopsis thaliana
tacctgacagacgtggc

SEQ ID NO: 132244 - DNA, 17 bp, Arabidopsis thaliana
tacctgagatcggacgc

SEQ ID NO: 132245 - DNA, 17 bp, Arabidopsis thaliana
tacctgaggcagtcaac

SEQ ID NO: 132246 - DNA, 17 bp, Arabidopsis thaliana
tacctgaggcagtcagg

SEQ ID NO: 132247 - DNA, 17 bp, Arabidopsis thaliana
tacctgaggcagtcagt

SEQ ID NO: 132248 - DNA, 17 bp, Arabidopsis thaliana
tacctgataccggggga

SEQ ID NO: 132249 - DNA, 17 bp, Arabidopsis thaliana
tacctgatcttgctagg

SEQ ID NO: 132250 - DNA, 17 bp, Arabidopsis thaliana
tacctgcaacgggcgaa

SEQ ID NO: 132251 - DNA, 17 bp, Arabidopsis thaliana
tacctgcaatagtgcgg

SEQ ID NO: 132252 - DNA, 17 bp, Arabidopsis thaliana
tacctgccctacagact

SEQ ID NO: 132253 - DNA, 17 bp, Arabidopsis thaliana
tacctgcgcattgtgtg

SEQ ID NO: 132254 - DNA, 17 bp, Arabidopsis thaliana
tacctgctatctcctct

SEQ ID NO: 132255 - DNA, 17 bp, Arabidopsis thaliana
tacctgcttggtgtctt

SEQ ID NO: 132256 - DNA, 17 bp, Arabidopsis thaliana
tacctggagtgtggtaa

SEQ ID NO: 132257 - DNA, 17 bp, Arabidopsis thaliana
tacctggcggagataac

SEQ ID NO: 132258 - DNA, 17 bp, Arabidopsis thaliana
tacctggctccctgtat

SEQ ID NO: 132259 - DNA, 17 bp, Arabidopsis thaliana
tacctggcttcctgtat

SEQ ID NO: 132260 - DNA, 17 bp, Arabidopsis thaliana
tacctggtagttagaaa

SEQ ID NO: 132261 - DNA, 17 bp, Arabidopsis thaliana
tacctggtcattaggct

SEQ ID NO: 132262 - DNA, 17 bp, Arabidopsis thaliana
tacctggtcgttctgtt

SEQ ID NO: 132263 - DNA, 17 bp, Arabidopsis thaliana
tacctggtctggcttcg

SEQ ID NO: 132264 - DNA, 17 bp, Arabidopsis thaliana
tacctggtggatcctgc

SEQ ID NO: 132265 - DNA, 17 bp, Arabidopsis thaliana
tacctggttcaaatcca

SEQ ID NO: 132266 - DNA, 17 bp, Arabidopsis thaliana
tacctggttcatcctgc

SEQ ID NO: 132267 - DNA, 17 bp, Arabidopsis thaliana
tacctggttgaccctgc

SEQ ID NO: 132268 - DNA, 17 bp, Arabidopsis thaliana
tacctggttgatccacc

SEQ ID NO: 132269 - DNA, 17 bp, Arabidopsis thaliana
tacctggttgatccccc

SEQ ID NO: 132270 - DNA, 17 bp, Arabidopsis thaliana
tacctggttgatcccgc

SEQ ID NO: 132271 - DNA, 17 bp, Arabidopsis thaliana
tacctggttgatcctcc

SEQ ID NO: 132272 - DNA, 17 bp, Arabidopsis thaliana
tacctggttgatcctga

SEQ ID NO: 132273 - DNA, 17 bp, Arabidopsis thaliana
tacctggttgatcctgc

SEQ ID NO: 132274 - DNA, 17 bp, Arabidopsis thaliana
tacctggttgatccttc

SEQ ID NO: 132275 - DNA, 17 bp, Arabidopsis thaliana
tacctggttgatcttgc

SEQ ID NO: 132276 - DNA, 17 bp, Arabidopsis thaliana
tacctggttgattctgc

SEQ ID NO: 132277 - DNA, 17 bp, Arabidopsis thaliana
tacctgtggctggattg

SEQ ID NO: 132278 - DNA, 17 bp, Arabidopsis thaliana
tacctgtgtccgagtat

SEQ ID NO: 132279 - DNA, 17 bp, Arabidopsis thaliana
tacctgtgtcggctgta

SEQ ID NO: 132280 - DNA, 17 bp, Arabidopsis thaliana
tacctgttatggtttcg

SEQ ID NO: 132281 - DNA, 17 bp, Arabidopsis thaliana
tacctgttgcagtgcgg

SEQ ID NO: 132282 - DNA, 17 bp, Arabidopsis thaliana
tacctgtttgatcctgc

SEQ ID NO: 132283 - DNA, 17 bp, Arabidopsis thaliana
taccttagaatcattgg

SEQ ID NO: 132284 - DNA, 17 bp, Arabidopsis thaliana
taccttagccccttggg

SEQ ID NO: 132285 - DNA, 17 bp, Arabidopsis thaliana
taccttattgaccgcaa

SEQ ID NO: 132286 - DNA, 17 bp, Arabidopsis thaliana
taccttcaacatctgca

SEQ ID NO: 132287 - DNA, 17 bp, Arabidopsis thaliana
taccttcagccgacacg

SEQ ID NO: 132288 - DNA, 17 bp, Arabidopsis thaliana
taccttcaggacatttg

SEQ ID NO: 132289 - DNA, 17 bp, Arabidopsis thaliana
taccttcgaccagctcg

SEQ ID NO: 132290 - DNA, 17 bp, Arabidopsis thaliana
taccttcgacctgtagt

SEQ ID NO: 132291 - DNA, 17 bp, Arabidopsis thaliana
taccttcggtgcggtgg

SEQ ID NO: 132292 - DNA, 17 bp, Arabidopsis thaliana
taccttctgagtcactg

SEQ ID NO: 132293 - DNA, 17 bp, Arabidopsis thaliana
taccttgaccgcaactt

SEQ ID NO: 132294 - DNA, 17 bp, Arabidopsis thaliana
taccttgaccggcgtcg

SEQ ID NO: 132295 - DNA, 17 bp, Arabidopsis thaliana
taccttgactgactcca

SEQ ID NO: 132296 - DNA, 17 bp, Arabidopsis thaliana
taccttgagctgtgatc

SEQ ID NO: 132297 - DNA, 17 bp, Arabidopsis thaliana
taccttgcaccatcaga

SEQ ID NO: 132298 - DNA, 17 bp, Arabidopsis thaliana
taccttgctcaacgctt

SEQ ID NO: 132299 - DNA, 17 bp, Arabidopsis thaliana
taccttggacttcaact

SEQ ID NO: 132300 - DNA, 17 bp, Arabidopsis thaliana
taccttggctgagggca

SEQ ID NO: 132301 - DNA, 17 bp, Arabidopsis thaliana
taccttggtcgcttgcc

SEQ ID NO: 132302 - DNA, 17 bp, Arabidopsis thaliana
taccttggtgcaggtcg

SEQ ID NO: 132303 - DNA, 17 bp, Arabidopsis thaliana
taccttggttgcgtcac

SEQ ID NO: 132304 - DNA, 17 bp, Arabidopsis thaliana
taccttgtaggtgcttc

SEQ ID NO: 132305 - DNA, 17 bp, Arabidopsis thaliana
taccttgtccggaatcc

SEQ ID NO: 132306 - DNA, 17 bp, Arabidopsis thaliana
taccttgtccggaatgc

SEQ ID NO: 132307 - DNA, 17 bp, Arabidopsis thaliana
taccttgtgccatggct

SEQ ID NO: 132308 - DNA, 17 bp, Arabidopsis thaliana
tacctttaagatccggt

SEQ ID NO: 132309 - DNA, 17 bp, Arabidopsis thaliana
tacctttccatgtttat

SEQ ID NO: 132310 - DNA, 17 bp, Arabidopsis thaliana
tacctttgcggtgagtt

SEQ ID NO: 132311 - DNA, 17 bp, Arabidopsis thaliana
tacctttggagttccgt

SEQ ID NO: 132312 - DNA, 17 bp, Arabidopsis thaliana
taccttttcggaaagcc

SEQ ID NO: 132313 - DNA, 17 bp, Arabidopsis thaliana
taccttttcttatttcc

SEQ ID NO: 132314 - DNA, 17 bp, Arabidopsis thaliana
taccttttcttatttgc

SEQ ID NO: 132315 - DNA, 17 bp, Arabidopsis thaliana
taccttttggttaccaa

SEQ ID NO: 132316 - DNA, 17 bp, Arabidopsis thaliana
tacgaaaacgcattcca

SEQ ID NO: 132317 - DNA, 17 bp, Arabidopsis thaliana
tacgaaaagttaactcc

SEQ ID NO: 132318 - DNA, 17 bp, Arabidopsis thaliana
tacgaaagtcgtttgcg

SEQ ID NO: 132319 - DNA, 17 bp, Arabidopsis thaliana
tacgaaagttggccaac

SEQ ID NO: 132320 - DNA, 17 bp, Arabidopsis thaliana
tacgaaattcagtttgg

SEQ ID NO: 132321 - DNA, 17 bp, Arabidopsis thaliana
tacgaaatttcctacgt

SEQ ID NO: 132322 - DNA, 17 bp, Arabidopsis thaliana
tacgaaccattggagat

SEQ ID NO: 132323 - DNA, 17 bp, Arabidopsis thaliana
tacgaaccgtgaaagcg

SEQ ID NO: 132324 - DNA, 17 bp, Arabidopsis thaliana
tacgaacgttgacggct

SEQ ID NO: 132325 - DNA, 17 bp, Arabidopsis thaliana
tacgaagacaatgcagc

SEQ ID NO: 132326 - DNA, 17 bp, Arabidopsis thaliana
tacgaagatgggcttgt

SEQ ID NO: 132327 - DNA, 17 bp, Arabidopsis thaliana
tacgaagccctcattgc

SEQ ID NO: 132328 - DNA, 17 bp, Arabidopsis thaliana
tacgaagcgtgaaagcg

SEQ ID NO: 132329 - DNA, 17 bp, Arabidopsis thaliana
tacgaagttaccatttt

SEQ ID NO: 132330 - DNA, 17 bp, Arabidopsis thaliana
tacgaatatttcacggc

SEQ ID NO: 132331 - DNA, 17 bp, Arabidopsis thaliana
tacgaatccaagacttg

SEQ ID NO: 132332 - DNA, 17 bp, Arabidopsis thaliana
tacgacaactggcgaat

SEQ ID NO: 132333 - DNA, 17 bp, Arabidopsis thaliana
tacgacaagaacagagc

SEQ ID NO: 132334 - DNA, 17 bp, Arabidopsis thaliana
tacgacaattcgggctg

SEQ ID NO: 132335 - DNA, 17 bp, Arabidopsis thaliana
tacgacacatcttggcg

SEQ ID NO: 132336 - DNA, 17 bp, Arabidopsis thaliana
tacgacacgtctggtac

SEQ ID NO: 132337 - DNA, 17 bp, Arabidopsis thaliana
tacgacactttcagaac

SEQ ID NO: 132338 - DNA, 17 bp, Arabidopsis thaliana
tacgacagccgccacca

SEQ ID NO: 132339 - DNA, 17 bp, Arabidopsis thaliana
tacgacattgctgccaa

SEQ ID NO: 132340 - DNA, 17 bp, Arabidopsis thaliana
tacgaccggtgatttgt

SEQ ID NO: 132341 - DNA, 17 bp, Arabidopsis thaliana
tacgacgcttgccggct

SEQ ID NO: 132342 - DNA, 17 bp, Arabidopsis thaliana
tacgacggcgaagatgg

SEQ ID NO: 132343 - DNA, 17 bp, Arabidopsis thaliana
tacgacggtgtcgatcg

SEQ ID NO: 132344 - DNA, 17 bp, Arabidopsis thaliana
tacgacgtgccggagtg

SEQ ID NO: 132345 - DNA, 17 bp, Arabidopsis thaliana
tacgacgtggttccgca

SEQ ID NO: 132346 - DNA, 17 bp, Arabidopsis thaliana
tacgactaagtttgggt

SEQ ID NO: 132347 - DNA, 17 bp, Arabidopsis thaliana
tacgactacattgcgac

SEQ ID NO: 132348 - DNA, 17 bp, Arabidopsis thaliana
tacgactcgcagtttac

SEQ ID NO: 132349 - DNA, 17 bp, Arabidopsis thaliana
tacgactcgtttcatgt

SEQ ID NO: 132350 - DNA, 17 bp, Arabidopsis thaliana
tacgactctcggcaacg

SEQ ID NO: 132351 - DNA, 17 bp, Arabidopsis thaliana
tacgactgctctgtccc

SEQ ID NO: 132352 - DNA, 17 bp, Arabidopsis thaliana
tacgactggttgatcag

SEQ ID NO: 132353 - DNA, 17 bp, Arabidopsis thaliana
tacgacttaggcccaaa

SEQ ID NO: 132354 - DNA, 17 bp, Arabidopsis thaliana
tacgacttgccgtcggg

SEQ ID NO: 132355 - DNA, 17 bp, Arabidopsis thaliana
tacgactttgtttgctc

SEQ ID NO: 132356 - DNA, 17 bp, Arabidopsis thaliana
tacgagaaagctccgac

SEQ ID NO: 132357 - DNA, 17 bp, Arabidopsis thaliana
tacgagaactggtacag

SEQ ID NO: 132358 - DNA, 17 bp, Arabidopsis thaliana
tacgagacgatatacca

SEQ ID NO: 132359 - DNA, 17 bp, Arabidopsis thaliana
tacgagacgggtttggc

SEQ ID NO: 132360 - DNA, 17 bp, Arabidopsis thaliana
tacgagactacccgtgg

SEQ ID NO: 132361 - DNA, 17 bp, Arabidopsis thaliana
tacgagactgcagaagt

SEQ ID NO: 132362 - DNA, 17 bp, Arabidopsis thaliana
tacgagaggaaccgttg

SEQ ID NO: 132363 - DNA, 17 bp, Arabidopsis thaliana
tacgagagtcagccgtt

SEQ ID NO: 132364 - DNA, 17 bp, Arabidopsis thaliana
tacgagatattggtgcg

SEQ ID NO: 132365 - DNA, 17 bp, Arabidopsis thaliana
tacgagatctcagtaat

SEQ ID NO: 132366 - DNA, 17 bp, Arabidopsis thaliana
tacgagattgcagaagt

SEQ ID NO: 132367 - DNA, 17 bp, Arabidopsis thaliana
tacgagatttcctgagg

SEQ ID NO: 132368 - DNA, 17 bp, Arabidopsis thaliana
tacgagcatttaatgcg

SEQ ID NO: 132369 - DNA, 17 bp, Arabidopsis thaliana
tacgagcggccggcgga

SEQ ID NO: 132370 - DNA, 17 bp, Arabidopsis thaliana
tacgagcttcgacccag

SEQ ID NO: 132371 - DNA, 17 bp, Arabidopsis thaliana
tacgaggacttcccggg

SEQ ID NO: 132372 - DNA, 17 bp, Arabidopsis thaliana
tacgaggtcccgacagg

SEQ ID NO: 132373 - DNA, 17 bp, Arabidopsis thaliana
tacgaggttccgacagg

SEQ ID NO: 132374 - DNA, 17 bp, Arabidopsis thaliana
tacgagtccaaactttc

SEQ ID NO: 132375 - DNA, 17 bp, Arabidopsis thaliana
tacgagtccggcttcac

SEQ ID NO: 132376 - DNA, 17 bp, Arabidopsis thaliana
tacgagttctacagatc

SEQ ID NO: 132377 - DNA, 17 bp, Arabidopsis thaliana
tacgagtttcgacccat

SEQ ID NO: 132378 - DNA, 17 bp, Arabidopsis thaliana
tacgagtttcggcccag

SEQ ID NO: 132379 - DNA, 17 bp, Arabidopsis thaliana
tacgagtttgattggtt

SEQ ID NO: 132380 - DNA, 17 bp, Arabidopsis thaliana
tacgagtttgtttggtt

SEQ ID NO: 132381 - DNA, 17 bp, Arabidopsis thaliana
tacgatactttccgata

SEQ ID NO: 132382 - DNA, 17 bp, Arabidopsis thaliana
tacgatatttgattttg

SEQ ID NO: 132383 - DNA, 17 bp, Arabidopsis thaliana
tacgatcaggggcggac

SEQ ID NO: 132384 - DNA, 17 bp, Arabidopsis thaliana
tacgatctaacgactga

SEQ ID NO: 132385 - DNA, 17 bp, Arabidopsis thaliana
tacgatgagatggaacc

SEQ ID NO: 132386 - DNA, 17 bp, Arabidopsis thaliana
tacgatgatgtgacact

SEQ ID NO: 132387 - DNA, 17 bp, Arabidopsis thaliana
tacgattacggtcgggg

SEQ ID NO: 132388 - DNA, 17 bp, Arabidopsis thaliana
tacgattagtcgctggt

SEQ ID NO: 132389 - DNA, 17 bp, Arabidopsis thaliana
tacgattataccacgtg

SEQ ID NO: 132390 - DNA, 17 bp, Arabidopsis thaliana
tacgattcaagtgcgga

SEQ ID NO: 132391 - DNA, 17 bp, Arabidopsis thaliana
tacgattcggattctgc

SEQ ID NO: 132392 - DNA, 17 bp, Arabidopsis thaliana
tacgattgacagcccat

SEQ ID NO: 132393 - DNA, 17 bp, Arabidopsis thaliana
tacgattgagcccaacg

SEQ ID NO: 132394 - DNA, 17 bp, Arabidopsis thaliana
tacgattgccggtggtt

SEQ ID NO: 132395 - DNA, 17 bp, Arabidopsis thaliana
tacgattggcggcgatc

SEQ ID NO: 132396 - DNA, 17 bp, Arabidopsis thaliana
tacgattgtgccacgtg

SEQ ID NO: 132397 - DNA, 17 bp, Arabidopsis thaliana
tacgatttctacagatc

SEQ ID NO: 132398 - DNA, 17 bp, Arabidopsis thaliana
tacgcaaatgtcatggg

SEQ ID NO: 132399 - DNA, 17 bp, Arabidopsis thaliana
tacgcacaaggggaatc

SEQ ID NO: 132400 - DNA, 17 bp, Arabidopsis thaliana
tacgcagagaagttgcc

SEQ ID NO: 132401 - DNA, 17 bp, Arabidopsis thaliana
tacgcagcgattagtga

SEQ ID NO: 132402 - DNA, 17 bp, Arabidopsis thaliana
tacgcagcggtttattg

SEQ ID NO: 132403 - DNA, 17 bp, Arabidopsis thaliana
tacgcattgagtttcgt

SEQ ID NO: 132404 - DNA, 17 bp, Arabidopsis thaliana
tacgcatttcccgagat

SEQ ID NO: 132405 - DNA, 17 bp, Arabidopsis thaliana
tacgccacagccattga

SEQ ID NO: 132406 - DNA, 17 bp, Arabidopsis thaliana
tacgccatgattttctc

SEQ ID NO: 132407 - DNA, 17 bp, Arabidopsis thaliana
tacgccattacgggctt

SEQ ID NO: 132408 - DNA, 17 bp, Arabidopsis thaliana
tacgcccttaaatctgg

SEQ ID NO: 132409 - DNA, 17 bp, Arabidopsis thaliana
tacgccgaatcccgtaa

SEQ ID NO: 132410 - DNA, 17 bp, Arabidopsis thaliana
tacgccgcagtctttcg

SEQ ID NO: 132411 - DNA, 17 bp, Arabidopsis thaliana
tacgccgcagttttttc

SEQ ID NO: 132412 - DNA, 17 bp, Arabidopsis thaliana
tacgccgcggttttttt

SEQ ID NO: 132413 - DNA, 17 bp, Arabidopsis thaliana
tacgccgctaaatccgt

SEQ ID NO: 132414 - DNA, 17 bp, Arabidopsis thaliana
tacgccgctgcagtcga

SEQ ID NO: 132415 - DNA, 17 bp, Arabidopsis thaliana
tacgccgtgaataagag

SEQ ID NO: 132416 - DNA, 17 bp, Arabidopsis thaliana
tacgccgtgaatacgag

SEQ ID NO: 132417 - DNA, 17 bp, Arabidopsis thaliana
tacgcctaaatagatcc

SEQ ID NO: 132418 - DNA, 17 bp, Arabidopsis thaliana
tacgcctatcaaggtct

SEQ ID NO: 132419 - DNA, 17 bp, Arabidopsis thaliana
tacgcctctaagatcca

SEQ ID NO: 132420 - DNA, 17 bp, Arabidopsis thaliana
tacgcctgctcggctac

SEQ ID NO: 132421 - DNA, 17 bp, Arabidopsis thaliana
tacgcgaagtgactgtt

SEQ ID NO: 132422 - DNA, 17 bp, Arabidopsis thaliana
tacgcgacggggtattg

SEQ ID NO: 132423 - DNA, 17 bp, Arabidopsis thaliana
tacgcgactgccgtctt

SEQ ID NO: 132424 - DNA, 17 bp, Arabidopsis thaliana
tacgcggatcgactggt

SEQ ID NO: 132425 - DNA, 17 bp, Arabidopsis thaliana
tacgcggatcgggttcg

SEQ ID NO: 132426 - DNA, 17 bp, Arabidopsis thaliana
tacgcgtgcttgggcga

SEQ ID NO: 132427 - DNA, 17 bp, Arabidopsis thaliana
tacgcgttcatcttcgt

SEQ ID NO: 132428 - DNA, 17 bp, Arabidopsis thaliana
tacgcgttctttggacc

SEQ ID NO: 132429 - DNA, 17 bp, Arabidopsis thaliana
tacgcgtttgggtattc

SEQ ID NO: 132430 - DNA, 17 bp, Arabidopsis thaliana
tacgctaaggtccctaa

SEQ ID NO: 132431 - DNA, 17 bp, Arabidopsis thaliana
tacgctagattttgacc

SEQ ID NO: 132432 - DNA, 17 bp, Arabidopsis thaliana
tacgctatggctgagtt

SEQ ID NO: 132433 - DNA, 17 bp, Arabidopsis thaliana
tacgctattggagctgg

SEQ ID NO: 132434 - DNA, 17 bp, Arabidopsis thaliana
tacgctcaagaacctca

SEQ ID NO: 132435 - DNA, 17 bp, Arabidopsis thaliana
tacgctcattccatctg

SEQ ID NO: 132436 - DNA, 17 bp, Arabidopsis thaliana
tacgctcattgcggctg

SEQ ID NO: 132437 - DNA, 17 bp, Arabidopsis thaliana
tacgctccaggcgtctt

SEQ ID NO: 132438 - DNA, 17 bp, Arabidopsis thaliana
tacgctcctggtcttaa

SEQ ID NO: 132439 - DNA, 17 bp, Arabidopsis thaliana
tacgctcgacaattggt

SEQ ID NO: 132440 - DNA, 17 bp, Arabidopsis thaliana
tacgctctggatacatt

SEQ ID NO: 132441 - DNA, 17 bp, Arabidopsis thaliana
tacgctgagccggttgt

SEQ ID NO: 132442 - DNA, 17 bp, Arabidopsis thaliana
tacgctgctactgctca

SEQ ID NO: 132443 - DNA, 17 bp, Arabidopsis thaliana
tacgctgctccgaccgc

SEQ ID NO: 132444 - DNA, 17 bp, Arabidopsis thaliana
tacgctggttcaaatcc

SEQ ID NO: 132445 - DNA, 17 bp, Arabidopsis thaliana
tacgctggttccaatcc

SEQ ID NO: 132446 - DNA, 17 bp, Arabidopsis thaliana
tacgctggttccattcc

SEQ ID NO: 132447 - DNA, 17 bp, Arabidopsis thaliana
tacgctggttccgccac

SEQ ID NO: 132448 - DNA, 17 bp, Arabidopsis thaliana
tacgctgtttccgattg

SEQ ID NO: 132449 - DNA, 17 bp, Arabidopsis thaliana
tacgcttatctgcctcg

SEQ ID NO: 132450 - DNA, 17 bp, Arabidopsis thaliana
tacgcttcttctctggt

SEQ ID NO: 132451 - DNA, 17 bp, Arabidopsis thaliana
tacgcttgtggagacgt

SEQ ID NO: 132452 - DNA, 17 bp, Arabidopsis thaliana
tacgctttaaccgcttg

SEQ ID NO: 132453 - DNA, 17 bp, Arabidopsis thaliana
tacgctttcagattcat

SEQ ID NO: 132454 - DNA, 17 bp, Arabidopsis thaliana
tacgctttctccattcg

SEQ ID NO: 132455 - DNA, 17 bp, Arabidopsis thaliana
tacggaacgcgctgcac

SEQ ID NO: 132456 - DNA, 17 bp, Arabidopsis thaliana
tacggaacgggtttggc

SEQ ID NO: 132457 - DNA, 17 bp, Arabidopsis thaliana
tacggaagacatcatct

SEQ ID NO: 132458 - DNA, 17 bp, Arabidopsis thaliana
tacggaatcatccaacg

SEQ ID NO: 132459 - DNA, 17 bp, Arabidopsis thaliana
tacggaatggccgaatt

SEQ ID NO: 132460 - DNA, 17 bp, Arabidopsis thaliana
tacggacaaggcgaccc

SEQ ID NO: 132461 - DNA, 17 bp, Arabidopsis thaliana
tacggacaaggggaatc

SEQ ID NO: 132462 - DNA, 17 bp, Arabidopsis thaliana
tacggacaaggggagtc

SEQ ID NO: 132463 - DNA, 17 bp, Arabidopsis thaliana
tacggacaaggggtatc

SEQ ID NO: 132464 - DNA, 17 bp, Arabidopsis thaliana
tacggaccagaccgtcc

SEQ ID NO: 132465 - DNA, 17 bp, Arabidopsis thaliana
tacggaccaggcttcat

SEQ ID NO: 132466 - DNA, 17 bp, Arabidopsis thaliana
tacggacccagatttgg

SEQ ID NO: 132467 - DNA, 17 bp, Arabidopsis thaliana
tacggactggttggtgg

SEQ ID NO: 132468 - DNA, 17 bp, Arabidopsis thaliana
tacggactgttcagacc

SEQ ID NO: 132469 - DNA, 17 bp, Arabidopsis thaliana
tacggacttacgttttt

SEQ ID NO: 132470 - DNA, 17 bp, Arabidopsis thaliana
tacggacttcggcagtg

SEQ ID NO: 132471 - DNA, 17 bp, Arabidopsis thaliana
tacggactttgacccag

SEQ ID NO: 132472 - DNA, 17 bp, Arabidopsis thaliana
tacggactttggagatt

SEQ ID NO: 132473 - DNA, 17 bp, Arabidopsis thaliana
tacggactttggctaca

SEQ ID NO: 132474 - DNA, 17 bp, Arabidopsis thaliana
tacggagagccacggac

SEQ ID NO: 132475 - DNA, 17 bp, Arabidopsis thaliana
tacggagagccacggcc

SEQ ID NO: 132476 - DNA, 17 bp, Arabidopsis thaliana
tacggaggaagcggagt

SEQ ID NO: 132477 - DNA, 17 bp, Arabidopsis thaliana
tacggagggtgctatag

SEQ ID NO: 132478 - DNA, 17 bp, Arabidopsis thaliana
tacggagtggagttagt

SEQ ID NO: 132479 - DNA, 17 bp, Arabidopsis thaliana
tacggagttcgctttaa

SEQ ID NO: 132480 - DNA, 17 bp, Arabidopsis thaliana
tacggataatggttggc

SEQ ID NO: 132481 - DNA, 17 bp, Arabidopsis thaliana
tacggatcaagcagcac

SEQ ID NO: 132482 - DNA, 17 bp, Arabidopsis thaliana
tacggatcatatctcac

SEQ ID NO: 132483 - DNA, 17 bp, Arabidopsis thaliana
tacggatccattttgcc

SEQ ID NO: 132484 - DNA, 17 bp, Arabidopsis thaliana
tacggatcgcatggcct

SEQ ID NO: 132485 - DNA, 17 bp, Arabidopsis thaliana
tacggattcatgttgga

SEQ ID NO: 132486 - DNA, 17 bp, Arabidopsis thaliana
tacggcaaatcgtcctc

SEQ ID NO: 132487 - DNA, 17 bp, Arabidopsis thaliana
tacggcaactgaatcac

SEQ ID NO: 132488 - DNA, 17 bp, Arabidopsis thaliana
tacggcaactgaattac

SEQ ID NO: 132489 - DNA, 17 bp, Arabidopsis thaliana
tacggcaatgtcagacc

SEQ ID NO: 132490 - DNA, 17 bp, Arabidopsis thaliana
tacggcacgtctgggtg

SEQ ID NO: 132491 - DNA, 17 bp, Arabidopsis thaliana
tacggcagtctgtaggt

SEQ ID NO: 132492 - DNA, 17 bp, Arabidopsis thaliana
tacggcatggccgagtg

SEQ ID NO: 132493 - DNA, 17 bp, Arabidopsis thaliana
tacggccagtgttggca

SEQ ID NO: 132494 - DNA, 17 bp, Arabidopsis thaliana
tacggccggtcagtcgt

SEQ ID NO: 132495 - DNA, 17 bp, Arabidopsis thaliana
tacggccggttagttgt

SEQ ID NO: 132496 - DNA, 17 bp, Arabidopsis thaliana
tacggccgtttatgcag

SEQ ID NO: 132497 - DNA, 17 bp, Arabidopsis thaliana
tacggccttttttcagc

SEQ ID NO: 132498 - DNA, 17 bp, Arabidopsis thaliana
tacggcgacgggaggga

SEQ ID NO: 132499 - DNA, 17 bp, Arabidopsis thaliana
tacggcgctgaagtaac

SEQ ID NO: 132500 - DNA, 17 bp, Arabidopsis thaliana
tacggcggaggacattg

SEQ ID NO: 132501 - DNA, 17 bp, Arabidopsis thaliana
tacggcggtcaattcgt

SEQ ID NO: 132502 - DNA, 17 bp, Arabidopsis thaliana
tacggcggtgaattcgt

SEQ ID NO: 132503 - DNA, 17 bp, Arabidopsis thaliana
tacggcggtgcagggat

SEQ ID NO: 132504 - DNA, 17 bp, Arabidopsis thaliana
tacggcgtttaggtgcg

SEQ ID NO: 132505 - DNA, 17 bp, Arabidopsis thaliana
tacggctaatgcgcagt

SEQ ID NO: 132506 - DNA, 17 bp, Arabidopsis thaliana
tacggctattcctcgat

SEQ ID NO: 132507 - DNA, 17 bp, Arabidopsis thaliana
tacggctctgagggctg

SEQ ID NO: 132508 - DNA, 17 bp, Arabidopsis thaliana
tacggctgacacttgct

SEQ ID NO: 132509 - DNA, 17 bp, Arabidopsis thaliana
tacggctgacttacggt

SEQ ID NO: 132510 - DNA, 17 bp, Arabidopsis thaliana
tacggctgagttaatgt

SEQ ID NO: 132511 - DNA, 17 bp, Arabidopsis thaliana
tacggctgagttatgca

SEQ ID NO: 132512 - DNA, 17 bp, Arabidopsis thaliana
tacggctgagtttggtg

SEQ ID NO: 132513 - DNA, 17 bp, Arabidopsis thaliana
tacggctgatttacggt

SEQ ID NO: 132514 - DNA, 17 bp, Arabidopsis thaliana
tacggcttgtgttgctt

SEQ ID NO: 132515 - DNA, 17 bp, Arabidopsis thaliana
tacggctttggcccgat

SEQ ID NO: 132516 - DNA, 17 bp, Arabidopsis thaliana
tacggctttggctcaga

SEQ ID NO: 132517 - DNA, 17 bp, Arabidopsis thaliana
tacggctttggctcgga

SEQ ID NO: 132518 - DNA, 17 bp, Arabidopsis thaliana
tacggctttggttcaga

SEQ ID NO: 132519 - DNA, 17 bp, Arabidopsis thaliana
tacgggaaaagtacggt

SEQ ID NO: 132520 - DNA, 17 bp, Arabidopsis thaliana
tacgggaagcatttgca

SEQ ID NO: 132521 - DNA, 17 bp, Arabidopsis thaliana
tacgggacagacttagc

SEQ ID NO: 132522 - DNA, 17 bp, Arabidopsis thaliana
tacgggacagattggcg

SEQ ID NO: 132523 - DNA, 17 bp, Arabidopsis thaliana
tacgggacgaagagtgt

SEQ ID NO: 132524 - DNA, 17 bp, Arabidopsis thaliana
tacgggacgggttggcg

SEQ ID NO: 132525 - DNA, 17 bp, Arabidopsis thaliana
tacgggacgggttgtcg

SEQ ID NO: 132526 - DNA, 17 bp, Arabidopsis thaliana
tacgggacgggtttggc

SEQ ID NO: 132527 - DNA, 17 bp, Arabidopsis thaliana
tacgggagaaatacggt

SEQ ID NO: 132528 - DNA, 17 bp, Arabidopsis thaliana
tacgggagaagtgcggt

SEQ ID NO: 132529 - DNA, 17 bp, Arabidopsis thaliana
tacgggatcagactgtg

SEQ ID NO: 132530 - DNA, 17 bp, Arabidopsis thaliana
tacgggccaaggacagt

SEQ ID NO: 132531 - DNA, 17 bp, Arabidopsis thaliana
tacgggccaagggacag

SEQ ID NO: 132532 - DNA, 17 bp, Arabidopsis thaliana
tacgggcgagagaccga

SEQ ID NO: 132533 - DNA, 17 bp, Arabidopsis thaliana
tacgggcttacgttttt

SEQ ID NO: 132534 - DNA, 17 bp, Arabidopsis thaliana
tacgggcttcagcgcag

SEQ ID NO: 132535 - DNA, 17 bp, Arabidopsis thaliana
tacgggcttcgccccag

SEQ ID NO: 132536 - DNA, 17 bp, Arabidopsis thaliana
tacgggcttcggccaga

SEQ ID NO: 132537 - DNA, 17 bp, Arabidopsis thaliana
tacgggcttcggcccag

SEQ ID NO: 132538 - DNA, 17 bp, Arabidopsis thaliana
tacgggctttggagatt

SEQ ID NO: 132539 - DNA, 17 bp, Arabidopsis thaliana
tacgggctttgtcccag

SEQ ID NO: 132540 - DNA, 17 bp, Arabidopsis thaliana
tacgggcttttgcctag

SEQ ID NO: 132541 - DNA, 17 bp, Arabidopsis thaliana
tacggggccgttttcca

SEQ ID NO: 132542 - DNA, 17 bp, Arabidopsis thaliana
tacggggggcaacagta

SEQ ID NO: 132543 - DNA, 17 bp, Arabidopsis thaliana
tacggggtctcatcttt

SEQ ID NO: 132544 - DNA, 17 bp, Arabidopsis thaliana
tacggggttcgatcccc

SEQ ID NO: 132545 - DNA, 17 bp, Arabidopsis thaliana
tacgggtcctgaacttc

SEQ ID NO: 132546 - DNA, 17 bp, Arabidopsis thaliana
tacgggtgccatacgtg

SEQ ID NO: 132547 - DNA, 17 bp, Arabidopsis thaliana
tacgggtgtcatacgtg

SEQ ID NO: 132548 - DNA, 17 bp, Arabidopsis thaliana
tacgggttcgattcccg

SEQ ID NO: 132549 - DNA, 17 bp, Arabidopsis thaliana
tacgggtttacgttttt

SEQ ID NO: 132550 - DNA, 17 bp, Arabidopsis thaliana
tacgggtttcagcgcag

SEQ ID NO: 132551 - DNA, 17 bp, Arabidopsis thaliana
tacgggtttcgacccaa

SEQ ID NO: 132552 - DNA, 17 bp, Arabidopsis thaliana
tacgggtttcgatccag

SEQ ID NO: 132553 - DNA, 17 bp, Arabidopsis thaliana
tacgggtttcggcccag

SEQ ID NO: 132554 - DNA, 17 bp, Arabidopsis thaliana
tacgggtttcggttcag

SEQ ID NO: 132555 - DNA, 17 bp, Arabidopsis thaliana
tacgggttttgcgagga

SEQ ID NO: 132556 - DNA, 17 bp, Arabidopsis thaliana
tacggtagagatcgcgt

SEQ ID NO: 132557 - DNA, 17 bp, Arabidopsis thaliana
tacggtcaagcccacat

SEQ ID NO: 132558 - DNA, 17 bp, Arabidopsis thaliana
tacggtcaagcccatat

SEQ ID NO: 132559 - DNA, 17 bp, Arabidopsis thaliana
tacggtcaggttacggt

SEQ ID NO: 132560 - DNA, 17 bp, Arabidopsis thaliana
tacggtcgggtccattc

SEQ ID NO: 132561 - DNA, 17 bp, Arabidopsis thaliana
tacggtcgttgactagt

SEQ ID NO: 132562 - DNA, 17 bp, Arabidopsis thaliana
tacggtgacatccgagt

SEQ ID NO: 132563 - DNA, 17 bp, Arabidopsis thaliana
tacggtgaccggaagaa

SEQ ID NO: 132564 - DNA, 17 bp, Arabidopsis thaliana
tacggtgactcgatctg

SEQ ID NO: 132565 - DNA, 17 bp, Arabidopsis thaliana
tacggtgcccaactccc

SEQ ID NO: 132566 - DNA, 17 bp, Arabidopsis thaliana
tacggtgcccaactgcg

SEQ ID NO: 132567 - DNA, 17 bp, Arabidopsis thaliana
tacggtgcccaactgtg

SEQ ID NO: 132568 - DNA, 17 bp, Arabidopsis thaliana
tacggtgcgtggaccga

SEQ ID NO: 132569 - DNA, 17 bp, Arabidopsis thaliana
tacggtggatacctagg

SEQ ID NO: 132570 - DNA, 17 bp, Arabidopsis thaliana
tacggtggcggcataag

SEQ ID NO: 132571 - DNA, 17 bp, Arabidopsis thaliana
tacggtggcggccctcc

SEQ ID NO: 132572 - DNA, 17 bp, Arabidopsis thaliana
tacggtggcggcctaac

SEQ ID NO: 132573 - DNA, 17 bp, Arabidopsis thaliana
tacggtggcggcctaag

SEQ ID NO: 132574 - DNA, 17 bp, Arabidopsis thaliana
tacggtggcggcctgag

SEQ ID NO: 132575 - DNA, 17 bp, Arabidopsis thaliana
tacggtggcggtctaag

SEQ ID NO: 132576 - DNA, 17 bp, Arabidopsis thaliana
tacggtggcgtctagtc

SEQ ID NO: 132577 - DNA, 17 bp, Arabidopsis thaliana
tacggtggttgcttcgg

SEQ ID NO: 132578 - DNA, 17 bp, Arabidopsis thaliana
tacggtgtcttcggcca

SEQ ID NO: 132579 - DNA, 17 bp, Arabidopsis thaliana
tacggttatagcagtga

SEQ ID NO: 132580 - DNA, 17 bp, Arabidopsis thaliana
tacggttatcccgcatg

SEQ ID NO: 132581 - DNA, 17 bp, Arabidopsis thaliana
tacggttcaactacggt

SEQ ID NO: 132582 - DNA, 17 bp, Arabidopsis thaliana
tacggttcaactgcagt

SEQ ID NO: 132583 - DNA, 17 bp, Arabidopsis thaliana
tacggttcaactgcggt

SEQ ID NO: 132584 - DNA, 17 bp, Arabidopsis thaliana
tacggttcgagtccggt

SEQ ID NO: 132585 - DNA, 17 bp, Arabidopsis thaliana
tacggttggatcccacg

SEQ ID NO: 132586 - DNA, 17 bp, Arabidopsis thaliana
tacggttgtacaatgtc

SEQ ID NO: 132587 - DNA, 17 bp, Arabidopsis thaliana
tacggtttacgtttttg

SEQ ID NO: 132588 - DNA, 17 bp, Arabidopsis thaliana
tacggtttagttagtca

SEQ ID NO: 132589 - DNA, 17 bp, Arabidopsis thaliana
tacggtttcctcctaag

SEQ ID NO: 132590 - DNA, 17 bp, Arabidopsis thaliana
tacggtttgctaattct

SEQ ID NO: 132591 - DNA, 17 bp, Arabidopsis thaliana
tacggtttgctatttct

SEQ ID NO: 132592 - DNA, 17 bp, Arabidopsis thaliana
tacggttttggcgggaa

SEQ ID NO: 132593 - DNA, 17 bp, Arabidopsis thaliana
tacgtaagcgtacctcg

SEQ ID NO: 132594 - DNA, 17 bp, Arabidopsis thaliana
tacgtaatacccagtgg

SEQ ID NO: 132595 - DNA, 17 bp, Arabidopsis thaliana
tacgtaccaaaacagcg

SEQ ID NO: 132596 - DNA, 17 bp, Arabidopsis thaliana
tacgtaggacgtgtcgg

SEQ ID NO: 132597 - DNA, 17 bp, Arabidopsis thaliana
tacgtcaagtgcggctt

SEQ ID NO: 132598 - DNA, 17 bp, Arabidopsis thaliana
tacgtcactaatattct

SEQ ID NO: 132599 - DNA, 17 bp, Arabidopsis thaliana
tacgtcactgcgaattc

SEQ ID NO: 132600 - DNA, 17 bp, Arabidopsis thaliana
tacgtcagctacctgcg

SEQ ID NO: 132601 - DNA, 17 bp, Arabidopsis thaliana
tacgtccaaacccggtc

SEQ ID NO: 132602 - DNA, 17 bp, Arabidopsis thaliana
tacgtccctgccctttg

SEQ ID NO: 132603 - DNA, 17 bp, Arabidopsis thaliana
tacgtcctgctaaactc

SEQ ID NO: 132604 - DNA, 17 bp, Arabidopsis thaliana
tacgtcgcggaaatgtg

SEQ ID NO: 132605 - DNA, 17 bp, Arabidopsis thaliana
tacgtcgctagaatcaa

SEQ ID NO: 132606 - DNA, 17 bp, Arabidopsis thaliana
tacgtcgtcaatgatgt

SEQ ID NO: 132607 - DNA, 17 bp, Arabidopsis thaliana
tacgtcgtccttcgcta

SEQ ID NO: 132608 - DNA, 17 bp, Arabidopsis thaliana
tacgtcgtcttcgtggt

SEQ ID NO: 132609 - DNA, 17 bp, Arabidopsis thaliana
tacgtctacagttctgt

SEQ ID NO: 132610 - DNA, 17 bp, Arabidopsis thaliana
tacgtctccagggtttg

SEQ ID NO: 132611 - DNA, 17 bp, Arabidopsis thaliana
tacgtctctaaggctca

SEQ ID NO: 132612 - DNA, 17 bp, Arabidopsis thaliana
tacgtctgcctgggtgt

SEQ ID NO: 132613 - DNA, 17 bp, Arabidopsis thaliana
tacgtctggaccgagat

SEQ ID NO: 132614 - DNA, 17 bp, Arabidopsis thaliana
tacgtctggactctgac

SEQ ID NO: 132615 - DNA, 17 bp, Arabidopsis thaliana
tacgtcttgaacgggct

SEQ ID NO: 132616 - DNA, 17 bp, Arabidopsis thaliana
tacgtcttgcgtctgat

SEQ ID NO: 132617 - DNA, 17 bp, Arabidopsis thaliana
tacgtgaatttttgtgt

SEQ ID NO: 132618 - DNA, 17 bp, Arabidopsis thaliana
tacgtgactattggtgc

SEQ ID NO: 132619 - DNA, 17 bp, Arabidopsis thaliana
tacgtgagtatgaccgg

SEQ ID NO: 132620 - DNA, 17 bp, Arabidopsis thaliana
tacgtgcaggagaaaag

SEQ ID NO: 132621 - DNA, 17 bp, Arabidopsis thaliana
tacgtgcattggtcggc

SEQ ID NO: 132622 - DNA, 17 bp, Arabidopsis thaliana
tacgtgccggtcagaat

SEQ ID NO: 132623 - DNA, 17 bp, Arabidopsis thaliana
tacgtgcgaaattaggt

SEQ ID NO: 132624 - DNA, 17 bp, Arabidopsis thaliana
tacgtgcgggtcagaat

SEQ ID NO: 132625 - DNA, 17 bp, Arabidopsis thaliana
tacgtggacggaagtaa

SEQ ID NO: 132626 - DNA, 17 bp, Arabidopsis thaliana
tacgtggacggaagtta

SEQ ID NO: 132627 - DNA, 17 bp, Arabidopsis thaliana
tacgtgggaccatacaa

SEQ ID NO: 132628 - DNA, 17 bp, Arabidopsis thaliana
tacgtggttcagtagtc

SEQ ID NO: 132629 - DNA, 17 bp, Arabidopsis thaliana
tacgtgtccttcaaaat

SEQ ID NO: 132630 - DNA, 17 bp, Arabidopsis thaliana
tacgtgtctcggcccaa

SEQ ID NO: 132631 - DNA, 17 bp, Arabidopsis thaliana
tacgttatactcttggc

SEQ ID NO: 132632 - DNA, 17 bp, Arabidopsis thaliana
tacgttctggaccattg

SEQ ID NO: 132633 - DNA, 17 bp, Arabidopsis thaliana
tacgttgaggagcgcag

SEQ ID NO: 132634 - DNA, 17 bp, Arabidopsis thaliana
tacgttggctcaagatc

SEQ ID NO: 132635 - DNA, 17 bp, Arabidopsis thaliana
tacgttgggcaactgcg

SEQ ID NO: 132636 - DNA, 17 bp, Arabidopsis thaliana
tacgtttaaggcacttt

SEQ ID NO: 132637 - DNA, 17 bp, Arabidopsis thaliana
tacgtttcagggagaaa

SEQ ID NO: 132638 - DNA, 17 bp, Arabidopsis thaliana
tacgtttccgcgacaag

SEQ ID NO: 132639 - DNA, 17 bp, Arabidopsis thaliana
tacgtttcggacctgtg

SEQ ID NO: 132640 - DNA, 17 bp, Arabidopsis thaliana
tacgtttgaggcacttt

SEQ ID NO: 132641 - DNA, 17 bp, Arabidopsis thaliana
tacgtttgtgacaatct

SEQ ID NO: 132642 - DNA, 17 bp, Arabidopsis thaliana
tacgttttgagatttgg

SEQ ID NO: 132643 - DNA, 17 bp, Arabidopsis thaliana
tacgtttttggcaggaa

SEQ ID NO: 132644 - DNA, 17 bp, Arabidopsis thaliana
tacgtttttggcgggaa

SEQ ID NO: 132645 - DNA, 17 bp, Arabidopsis thaliana
tacgttttttgggacgc

SEQ ID NO: 132646 - DNA, 17 bp, Arabidopsis thaliana
tactaaaactgaccgga

SEQ ID NO: 132647 - DNA, 17 bp, Arabidopsis thaliana
tactaaactcggaaatt

SEQ ID NO: 132648 - DNA, 17 bp, Arabidopsis thaliana
tactaaagcctccctgc

SEQ ID NO: 132649 - DNA, 17 bp, Arabidopsis thaliana
tactaaccaaccgtatg

SEQ ID NO: 132650 - DNA, 17 bp, Arabidopsis thaliana
tactaagcaacccccta

SEQ ID NO: 132651 - DNA, 17 bp, Arabidopsis thaliana
tactaagctgatgtgtc

SEQ ID NO: 132652 - DNA, 17 bp, Arabidopsis thaliana
tactaaggctccgaatg

SEQ ID NO: 132653 - DNA, 17 bp, Arabidopsis thaliana
tactaagggtagtcaag

SEQ ID NO: 132654 - DNA, 17 bp, Arabidopsis thaliana
tactaagtaacgtcctg

SEQ ID NO: 132655 - DNA, 17 bp, Arabidopsis thaliana
tactaatcggtcgaggg

SEQ ID NO: 132656 - DNA, 17 bp, Arabidopsis thaliana
tactaatctgatgggct

SEQ ID NO: 132657 - DNA, 17 bp, Arabidopsis thaliana
tactaatgcgcctttta

SEQ ID NO: 132658 - DNA, 17 bp, Arabidopsis thaliana
tactaatgtttgggagt

SEQ ID NO: 132659 - DNA, 17 bp, Arabidopsis thaliana
tactaattaattaatta

SEQ ID NO: 132660 - DNA, 17 bp, Arabidopsis thaliana
tactacaaacatggctc

SEQ ID NO: 132661 - DNA, 17 bp, Arabidopsis thaliana
tactacaagttgtggcc

SEQ ID NO: 132662 - DNA, 17 bp, Arabidopsis thaliana
tactacacagtctcgct

SEQ ID NO: 132663 - DNA, 17 bp, Arabidopsis thaliana
tactacatcttcccggt

SEQ ID NO: 132664 - DNA, 17 bp, Arabidopsis thaliana
tactaccatttgcctga

SEQ ID NO: 132665 - DNA, 17 bp, Arabidopsis thaliana
tactacccggccgtcgg

SEQ ID NO: 132666 - DNA, 17 bp, Arabidopsis thaliana
tactaccgagcggcggg

SEQ ID NO: 132667 - DNA, 17 bp, Arabidopsis thaliana
tactaccttggttgtgc

SEQ ID NO: 132668 - DNA, 17 bp, Arabidopsis thaliana
tactacgatgggtgacc

SEQ ID NO: 132669 - DNA, 17 bp, Arabidopsis thaliana
tactacggccagcacta

SEQ ID NO: 132670 - DNA, 17 bp, Arabidopsis thaliana
tactacgggcatactgc

SEQ ID NO: 132671 - DNA, 17 bp, Arabidopsis thaliana
tactacgtctacagttc

SEQ ID NO: 132672 - DNA, 17 bp, Arabidopsis thaliana
tactacgtcttgaacgg

SEQ ID NO: 132673 - DNA, 17 bp, Arabidopsis thaliana
tactactgggccaacag

SEQ ID NO: 132674 - DNA, 17 bp, Arabidopsis thaliana
tactacttcttggttgt

SEQ ID NO: 132675 - DNA, 17 bp, Arabidopsis thaliana
tactacttttcacggcg

SEQ ID NO: 132676 - DNA, 17 bp, Arabidopsis thaliana
tactagatttgtaccgc

SEQ ID NO: 132677 - DNA, 17 bp, Arabidopsis thaliana
tactagattttgacccg

SEQ ID NO: 132678 - DNA, 17 bp, Arabidopsis thaliana
tactagccattgtaatt

SEQ ID NO: 132679 - DNA, 17 bp, Arabidopsis thaliana
tactagccttggagtgc

SEQ ID NO: 132680 - DNA, 17 bp, Arabidopsis thaliana
tactaggatggatgact

SEQ ID NO: 132681 - DNA, 17 bp, Arabidopsis thaliana
tactaggatgggtgacc

SEQ ID NO: 132682 - DNA, 17 bp, Arabidopsis thaliana
tactaggatgggtgact

SEQ ID NO: 132683 - DNA, 17 bp, Arabidopsis thaliana
tactaggattggtgacc

SEQ ID NO: 132684 - DNA, 17 bp, Arabidopsis thaliana
tactaggcgctgtgcgt

SEQ ID NO: 132685 - DNA, 17 bp, Arabidopsis thaliana
tactaggtcctcacccg

SEQ ID NO: 132686 - DNA, 17 bp, Arabidopsis thaliana
tactagtcctcagccag

SEQ ID NO: 132687 - DNA, 17 bp, Arabidopsis thaliana
tactatcacatccgctg

SEQ ID NO: 132688 - DNA, 17 bp, Arabidopsis thaliana
tactatcacgatgtctg

SEQ ID NO: 132689 - DNA, 17 bp, Arabidopsis thaliana
tactatcgcacccgccg

SEQ ID NO: 132690 - DNA, 17 bp, Arabidopsis thaliana
tactatcgcacccgctg

SEQ ID NO: 132691 - DNA, 17 bp, Arabidopsis thaliana
tactatcggttaactgg

SEQ ID NO: 132692 - DNA, 17 bp, Arabidopsis thaliana
tactatctcaccgcccc

SEQ ID NO: 132693 - DNA, 17 bp, Arabidopsis thaliana
tactatctgcggcggat

SEQ ID NO: 132694 - DNA, 17 bp, Arabidopsis thaliana
tactatgactgcatttt

SEQ ID NO: 132695 - DNA, 17 bp, Arabidopsis thaliana
tactatgctgccatctt

SEQ ID NO: 132696 - DNA, 17 bp, Arabidopsis thaliana
tactatggacgggatgt

SEQ ID NO: 132697 - DNA, 17 bp, Arabidopsis thaliana
tactatggtttcaggcc

SEQ ID NO: 132698 - DNA, 17 bp, Arabidopsis thaliana
tactattcgattggcgg

SEQ ID NO: 132699 - DNA, 17 bp, Arabidopsis thaliana
tactattcggattgccc

SEQ ID NO: 132700 - DNA, 17 bp, Arabidopsis thaliana
tactatttacagtggct

SEQ ID NO: 132701 - DNA, 17 bp, Arabidopsis thaliana
tactatttgatcaaggg

SEQ ID NO: 132702 - DNA, 17 bp, Arabidopsis thaliana
tactcaaaactgcaaat

SEQ ID NO: 132703 - DNA, 17 bp, Arabidopsis thaliana
tactcaaaagttgtgtg

SEQ ID NO: 132704 - DNA, 17 bp, Arabidopsis thaliana
tactcaaactgtgcgtt

SEQ ID NO: 132705 - DNA, 17 bp, Arabidopsis thaliana
tactcaaatcgcagcta

SEQ ID NO: 132706 - DNA, 17 bp, Arabidopsis thaliana
tactcaacctcccacgt

SEQ ID NO: 132707 - DNA, 17 bp, Arabidopsis thaliana
tactcaacttccgatct

SEQ ID NO: 132708 - DNA, 17 bp, Arabidopsis thaliana
tactcaacttccgatgt

SEQ ID NO: 132709 - DNA, 17 bp, Arabidopsis thaliana
tactcaactttcgatgt

SEQ ID NO: 132710 - DNA, 17 bp, Arabidopsis thaliana
tactcaatcctctattc

SEQ ID NO: 132711 - DNA, 17 bp, Arabidopsis thaliana
tactcacagtttcatgc

SEQ ID NO: 132712 - DNA, 17 bp, Arabidopsis thaliana
tactcactggtgtgatg

SEQ ID NO: 132713 - DNA, 17 bp, Arabidopsis thaliana
tactcagacgcccctcg

SEQ ID NO: 132714 - DNA, 17 bp, Arabidopsis thaliana
tactcagcgctgctata

SEQ ID NO: 132715 - DNA, 17 bp, Arabidopsis thaliana
tactcaggtcgagtgac

SEQ ID NO: 132716 - DNA, 17 bp, Arabidopsis thaliana
tactcagttgctgccgt

SEQ ID NO: 132717 - DNA, 17 bp, Arabidopsis thaliana
tactcatacttcgccgt

SEQ ID NO: 132718 - DNA, 17 bp, Arabidopsis thaliana
tactcataggattgttt

SEQ ID NO: 132719 - DNA, 17 bp, Arabidopsis thaliana
tactcatcagtgtgact

SEQ ID NO: 132720 - DNA, 17 bp, Arabidopsis thaliana
tactcatcttcagcatg

SEQ ID NO: 132721 - DNA, 17 bp, Arabidopsis thaliana
tactccaagtaaacaga

SEQ ID NO: 132722 - DNA, 17 bp, Arabidopsis thaliana
tactccagaatgctcca

SEQ ID NO: 132723 - DNA, 17 bp, Arabidopsis thaliana
tactccatatcgatgta

SEQ ID NO: 132724 - DNA, 17 bp, Arabidopsis thaliana
tactcccccctcctact

SEQ ID NO: 132725 - DNA, 17 bp, Arabidopsis thaliana
tactccccctgcagctg

SEQ ID NO: 132726 - DNA, 17 bp, Arabidopsis thaliana
tactccgaatggtttaa

SEQ ID NO: 132727 - DNA, 17 bp, Arabidopsis thaliana
tactccggactggtttt

SEQ ID NO: 132728 - DNA, 17 bp, Arabidopsis thaliana
tactccggattttgacc

SEQ ID NO: 132729 - DNA, 17 bp, Arabidopsis thaliana
tactccgtctctacatc

SEQ ID NO: 132730 - DNA, 17 bp, Arabidopsis thaliana
tactccgtgaatcggag

SEQ ID NO: 132731 - DNA, 17 bp, Arabidopsis thaliana
tactcctaagtgtgcgt

SEQ ID NO: 132732 - DNA, 17 bp, Arabidopsis thaliana
tactcctgggtgaccga

SEQ ID NO: 132733 - DNA, 17 bp, Arabidopsis thaliana
tactcgaaatctttgct

SEQ ID NO: 132734 - DNA, 17 bp, Arabidopsis thaliana
tactcgaagctgttttg

SEQ ID NO: 132735 - DNA, 17 bp, Arabidopsis thaliana
tactcgacacaggtact

SEQ ID NO: 132736 - DNA, 17 bp, Arabidopsis thaliana
tactcgacagttccgtc

SEQ ID NO: 132737 - DNA, 17 bp, Arabidopsis thaliana
tactcgaccaacttact

SEQ ID NO: 132738 - DNA, 17 bp, Arabidopsis thaliana
tactcgaccaaggcact

SEQ ID NO: 132739 - DNA, 17 bp, Arabidopsis thaliana
tactcgaccaagggtga

SEQ ID NO: 132740 - DNA, 17 bp, Arabidopsis thaliana
tactcgaccacccactt

SEQ ID NO: 132741 - DNA, 17 bp, Arabidopsis thaliana
tactcgaccacccagtt

SEQ ID NO: 132742 - DNA, 17 bp, Arabidopsis thaliana
tactcgacccgggtact

SEQ ID NO: 132743 - DNA, 17 bp, Arabidopsis thaliana
tactcgaccgcatagtc

SEQ ID NO: 132744 - DNA, 17 bp, Arabidopsis thaliana
tactcgaccgttcacca

SEQ ID NO: 132745 - DNA, 17 bp, Arabidopsis thaliana
tactcgacctctttttg

SEQ ID NO: 132746 - DNA, 17 bp, Arabidopsis thaliana
tactcgacctgctgtag

SEQ ID NO: 132747 - DNA, 17 bp, Arabidopsis thaliana
tactcgacctgtcactc

SEQ ID NO: 132748 - DNA, 17 bp, Arabidopsis thaliana
tactcgacctgtgtact

SEQ ID NO: 132749 - DNA, 17 bp, Arabidopsis thaliana
tactcgaccttgttgca

SEQ ID NO: 132750 - DNA, 17 bp, Arabidopsis thaliana
tactcgacgagaaaggt

SEQ ID NO: 132751 - DNA, 17 bp, Arabidopsis thaliana
tactcgactaaggcgag

SEQ ID NO: 132752 - DNA, 17 bp, Arabidopsis thaliana
tactcgactgcacagtc

SEQ ID NO: 132753 - DNA, 17 bp, Arabidopsis thaliana
tactcgactgtagagtt

SEQ ID NO: 132754 - DNA, 17 bp, Arabidopsis thaliana
tactcgacttcgggccg

SEQ ID NO: 132755 - DNA, 17 bp, Arabidopsis thaliana
tactcgagggagtcgac

SEQ ID NO: 132756 - DNA, 17 bp, Arabidopsis thaliana
tactcgatcacctagtt

SEQ ID NO: 132757 - DNA, 17 bp, Arabidopsis thaliana
tactcgatccattcact

SEQ ID NO: 132758 - DNA, 17 bp, Arabidopsis thaliana
tactcgatcgtagcgtc

SEQ ID NO: 132759 - DNA, 17 bp, Arabidopsis thaliana
tactcgatttgcggatt

SEQ ID NO: 132760 - DNA, 17 bp, Arabidopsis thaliana
tactcgccaatgattgt

SEQ ID NO: 132761 - DNA, 17 bp, Arabidopsis thaliana
tactcgcccaccaaatt

SEQ ID NO: 132762 - DNA, 17 bp, Arabidopsis thaliana
tactcgccttgtgccca

SEQ ID NO: 132763 - DNA, 17 bp, Arabidopsis thaliana
tactcgcgtgaagttgc

SEQ ID NO: 132764 - DNA, 17 bp, Arabidopsis thaliana
tactcggaaaagcgccg

SEQ ID NO: 132765 - DNA, 17 bp, Arabidopsis thaliana
tactcggacacaggtac

SEQ ID NO: 132766 - DNA, 17 bp, Arabidopsis thaliana
tactcggattacggatt

SEQ ID NO: 132767 - DNA, 17 bp, Arabidopsis thaliana
tactcggattaggcaat

SEQ ID NO: 132768 - DNA, 17 bp, Arabidopsis thaliana
tactcggccgagctatt

SEQ ID NO: 132769 - DNA, 17 bp, Arabidopsis thaliana
tactcggccgagtataa

SEQ ID NO: 132770 - DNA, 17 bp, Arabidopsis thaliana
tactcggcttcaactct

SEQ ID NO: 132771 - DNA, 17 bp, Arabidopsis thaliana
tactcgggctgtctgtt

SEQ ID NO: 132772 - DNA, 17 bp, Arabidopsis thaliana
tactcgggtgcagtagc

SEQ ID NO: 132773 - DNA, 17 bp, Arabidopsis thaliana
tactcggtacacttttt

SEQ ID NO: 132774 - DNA, 17 bp, Arabidopsis thaliana
tactcgtatgcttctcg

SEQ ID NO: 132775 - DNA, 17 bp, Arabidopsis thaliana
tactcgtccctcctact

SEQ ID NO: 132776 - DNA, 17 bp, Arabidopsis thaliana
tactcgtcgtccctaca

SEQ ID NO: 132777 - DNA, 17 bp, Arabidopsis thaliana
tactcgtgacaaaactg

SEQ ID NO: 132778 - DNA, 17 bp, Arabidopsis thaliana
tactctactgctgttta

SEQ ID NO: 132779 - DNA, 17 bp, Arabidopsis thaliana
tactctagggataacag

SEQ ID NO: 132780 - DNA, 17 bp, Arabidopsis thaliana
tactctatcactgcgcc

SEQ ID NO: 132781 - DNA, 17 bp, Arabidopsis thaliana
tactctatcggctgatc

SEQ ID NO: 132782 - DNA, 17 bp, Arabidopsis thaliana
tactctatctgtgaagc

SEQ ID NO: 132783 - DNA, 17 bp, Arabidopsis thaliana
tactctatgtcccagaa

SEQ ID NO: 132784 - DNA, 17 bp, Arabidopsis thaliana
tactctattccatgcgc

SEQ ID NO: 132785 - DNA, 17 bp, Arabidopsis thaliana
tactctcgaagtcaaag

SEQ ID NO: 132786 - DNA, 17 bp, Arabidopsis thaliana
tactctcgcccaagcac

SEQ ID NO: 132787 - DNA, 17 bp, Arabidopsis thaliana
tactctctgaattcggc

SEQ ID NO: 132788 - DNA, 17 bp, Arabidopsis thaliana
tactctcttcacgttgc

SEQ ID NO: 132789 - DNA, 17 bp, Arabidopsis thaliana
tactctgaccttgagct

SEQ ID NO: 132790 - DNA, 17 bp, Arabidopsis thaliana
tactctgacgagggagc

SEQ ID NO: 132791 - DNA, 17 bp, Arabidopsis thaliana
tactctgctacgccccc

SEQ ID NO: 132792 - DNA, 17 bp, Arabidopsis thaliana
tactctgctacgccgct

SEQ ID NO: 132793 - DNA, 17 bp, Arabidopsis thaliana
tactctggaaatctctg

SEQ ID NO: 132794 - DNA, 17 bp, Arabidopsis thaliana
tactcttaagatggtca

SEQ ID NO: 132795 - DNA, 17 bp, Arabidopsis thaliana
tactcttcagcgactta

SEQ ID NO: 132796 - DNA, 17 bp, Arabidopsis thaliana
tactcttcgatagttgg

SEQ ID NO: 132797 - DNA, 17 bp, Arabidopsis thaliana
tactcttcttgccacat

SEQ ID NO: 132798 - DNA, 17 bp, Arabidopsis thaliana
tactctttctgcttgat

SEQ ID NO: 132799 - DNA, 17 bp, Arabidopsis thaliana
tactctttcttcgctag

SEQ ID NO: 132800 - DNA, 17 bp, Arabidopsis thaliana
tactcttttggaagtgc

SEQ ID NO: 132801 - DNA, 17 bp, Arabidopsis thaliana
tactgaaggtgtaaatg

SEQ ID NO: 132802 - DNA, 17 bp, Arabidopsis thaliana
tactgaattgtcaacgt

SEQ ID NO: 132803 - DNA, 17 bp, Arabidopsis thaliana
tactgacacttcgcctt

SEQ ID NO: 132804 - DNA, 17 bp, Arabidopsis thaliana
tactgaccaaccgtatg

SEQ ID NO: 132805 - DNA, 17 bp, Arabidopsis thaliana
tactgaccagggttcgt

SEQ ID NO: 132806 - DNA, 17 bp, Arabidopsis thaliana
tactgacgcaggagacc

SEQ ID NO: 132807 - DNA, 17 bp, Arabidopsis thaliana
tactgacgtgcaaatcg

SEQ ID NO: 132808 - DNA, 17 bp, Arabidopsis thaliana
tactgactggcaacggc

SEQ ID NO: 132809 - DNA, 17 bp, Arabidopsis thaliana
tactgacttcttctgtg

SEQ ID NO: 132810 - DNA, 17 bp, Arabidopsis thaliana
tactgagcgttgggtct

SEQ ID NO: 132811 - DNA, 17 bp, Arabidopsis thaliana
tactgaggctgaccgga

SEQ ID NO: 132812 - DNA, 17 bp, Arabidopsis thaliana
tactgagggtcggcaat

SEQ ID NO: 132813 - DNA, 17 bp, Arabidopsis thaliana
tactgcaacctggtccg

SEQ ID NO: 132814 - DNA, 17 bp, Arabidopsis thaliana
tactgcaacggcagcga

SEQ ID NO: 132815 - DNA, 17 bp, Arabidopsis thaliana
tactgcaacttgtccgc

SEQ ID NO: 132816 - DNA, 17 bp, Arabidopsis thaliana
tactgcaagggctggcc

SEQ ID NO: 132817 - DNA, 17 bp, Arabidopsis thaliana
tactgcaagggctggct

SEQ ID NO: 132818 - DNA, 17 bp, Arabidopsis thaliana
tactgcacacgggttga

SEQ ID NO: 132819 - DNA, 17 bp, Arabidopsis thaliana
tactgcacgggccggct

SEQ ID NO: 132820 - DNA, 17 bp, Arabidopsis thaliana
tactgcacgggcctggc

SEQ ID NO: 132821 - DNA, 17 bp, Arabidopsis thaliana
tactgcacgggcttggc

SEQ ID NO: 132822 - DNA, 17 bp, Arabidopsis thaliana
tactgcacggtcttggc

SEQ ID NO: 132823 - DNA, 17 bp, Arabidopsis thaliana
tactgcaggaggtttgt

SEQ ID NO: 132824 - DNA, 17 bp, Arabidopsis thaliana
tactgccaaacccgtcc

SEQ ID NO: 132825 - DNA, 17 bp, Arabidopsis thaliana
tactgcctttctgttcg

SEQ ID NO: 132826 - DNA, 17 bp, Arabidopsis thaliana
tactgcgccgcttttgc

SEQ ID NO: 132827 - DNA, 17 bp, Arabidopsis thaliana
tactgcggcgaggtggc

SEQ ID NO: 132828 - DNA, 17 bp, Arabidopsis thaliana
tactgcgggccggttga

SEQ ID NO: 132829 - DNA, 17 bp, Arabidopsis thaliana
tactgcggggcggagtt

SEQ ID NO: 132830 - DNA, 17 bp, Arabidopsis thaliana
tactgcggtgacgatac

SEQ ID NO: 132831 - DNA, 17 bp, Arabidopsis thaliana
tactgcgtgaccaagaa

SEQ ID NO: 132832 - DNA, 17 bp, Arabidopsis thaliana
tactgctgctgcgttct

SEQ ID NO: 132833 - DNA, 17 bp, Arabidopsis thaliana
tactgctgggcgttacg

SEQ ID NO: 132834 - DNA, 17 bp, Arabidopsis thaliana
tactgctggtgctgaga

SEQ ID NO: 132835 - DNA, 17 bp, Arabidopsis thaliana
tactggaacgtgcggct

SEQ ID NO: 132836 - DNA, 17 bp, Arabidopsis thaliana
tactggaaggtgcggct

SEQ ID NO: 132837 - DNA, 17 bp, Arabidopsis thaliana
tactggaaggtgcgggt

SEQ ID NO: 132838 - DNA, 17 bp, Arabidopsis thaliana
tactggaattggccaat

SEQ ID NO: 132839 - DNA, 17 bp, Arabidopsis thaliana
tactggaatttgccaac

SEQ ID NO: 132840 - DNA, 17 bp, Arabidopsis thaliana
tactggaatttgccaat

SEQ ID NO: 132841 - DNA, 17 bp, Arabidopsis thaliana
tactggacaatgtggaa

SEQ ID NO: 132842 - DNA, 17 bp, Arabidopsis thaliana
tactggaggacgtgcag

SEQ ID NO: 132843 - DNA, 17 bp, Arabidopsis thaliana
tactggatcaaccaggt

SEQ ID NO: 132844 - DNA, 17 bp, Arabidopsis thaliana
tactggcacgcagcctg

SEQ ID NO: 132845 - DNA, 17 bp, Arabidopsis thaliana
tactggcaggatcaacc

SEQ ID NO: 132846 - DNA, 17 bp, Arabidopsis thaliana
tactggcgcttcaaaag

SEQ ID NO: 132847 - DNA, 17 bp, Arabidopsis thaliana
tactggctaagttgtcc

SEQ ID NO: 132848 - DNA, 17 bp, Arabidopsis thaliana
tactgggaagcaaggtc

SEQ ID NO: 132849 - DNA, 17 bp, Arabidopsis thaliana
tactgggacttgctggc

SEQ ID NO: 132850 - DNA, 17 bp, Arabidopsis thaliana
tactgggaggtgcggct

SEQ ID NO: 132851 - DNA, 17 bp, Arabidopsis thaliana
tactgggctttagagac

SEQ ID NO: 132852 - DNA, 17 bp, Arabidopsis thaliana
tactgggtcatcgggtc

SEQ ID NO: 132853 - DNA, 17 bp, Arabidopsis thaliana
tactgggtgcttcacgc

SEQ ID NO: 132854 - DNA, 17 bp, Arabidopsis thaliana
tactggtaggtcaagcg

SEQ ID NO: 132855 - DNA, 17 bp, Arabidopsis thaliana
tactggtcaggctggct

SEQ ID NO: 132856 - DNA, 17 bp, Arabidopsis thaliana
tactggtcggcttgtcc

SEQ ID NO: 132857 - DNA, 17 bp, Arabidopsis thaliana
tactggtgactccagct

SEQ ID NO: 132858 - DNA, 17 bp, Arabidopsis thaliana
tactggtgactcctgct

SEQ ID NO: 132859 - DNA, 17 bp, Arabidopsis thaliana
tactggtggtgcgttgt

SEQ ID NO: 132860 - DNA, 17 bp, Arabidopsis thaliana
tactggttccgttggct

SEQ ID NO: 132861 - DNA, 17 bp, Arabidopsis thaliana
tactggtttcagcgatt

SEQ ID NO: 132862 - DNA, 17 bp, Arabidopsis thaliana
tactgtaacgccccgac

SEQ ID NO: 132863 - DNA, 17 bp, Arabidopsis thaliana
tactgtaactaaccgtt

SEQ ID NO: 132864 - DNA, 17 bp, Arabidopsis thaliana
tactgtagtgccatggg

SEQ ID NO: 132865 - DNA, 17 bp, Arabidopsis thaliana
tactgtcagttgcgcct

SEQ ID NO: 132866 - DNA, 17 bp, Arabidopsis thaliana
tactgtcccgtcttgag

SEQ ID NO: 132867 - DNA, 17 bp, Arabidopsis thaliana
tactgtcgctggtcgct

SEQ ID NO: 132868 - DNA, 17 bp, Arabidopsis thaliana
tactgtctggaccaccg

SEQ ID NO: 132869 - DNA, 17 bp, Arabidopsis thaliana
tactgtctgtaccaccg

SEQ ID NO: 132870 - DNA, 17 bp, Arabidopsis thaliana
tactgtctttgccacgc

SEQ ID NO: 132871 - DNA, 17 bp, Arabidopsis thaliana
tactgtgaaactgcgaa

SEQ ID NO: 132872 - DNA, 17 bp, Arabidopsis thaliana
tactgtgactcaacgtt

SEQ ID NO: 132873 - DNA, 17 bp, Arabidopsis thaliana
tactgtgactcaaggtt

SEQ ID NO: 132874 - DNA, 17 bp, Arabidopsis thaliana
tactgtgcgccacatca

SEQ ID NO: 132875 - DNA, 17 bp, Arabidopsis thaliana
tactgtggactgtgcag

SEQ ID NO: 132876 - DNA, 17 bp, Arabidopsis thaliana
tactgtggtacggtaaa

SEQ ID NO: 132877 - DNA, 17 bp, Arabidopsis thaliana
tactgttctttccgcgc

SEQ ID NO: 132878 - DNA, 17 bp, Arabidopsis thaliana
tactgttgcggtgcggt

SEQ ID NO: 132879 - DNA, 17 bp, Arabidopsis thaliana
tactgttgcttaaccat

SEQ ID NO: 132880 - DNA, 17 bp, Arabidopsis thaliana
tactgttggtcccaaaa

SEQ ID NO: 132881 - DNA, 17 bp, Arabidopsis thaliana
tactgtttctgtttggc

SEQ ID NO: 132882 - DNA, 17 bp, Arabidopsis thaliana
tactgtttcttgggtcc

SEQ ID NO: 132883 - DNA, 17 bp, Arabidopsis thaliana
tactgttttgattgcgc

SEQ ID NO: 132884 - DNA, 17 bp, Arabidopsis thaliana
tacttaaccgccgtcaa

SEQ ID NO: 132885 - DNA, 17 bp, Arabidopsis thaliana
tacttaagtctctgctt

SEQ ID NO: 132886 - DNA, 17 bp, Arabidopsis thaliana
tacttaatccgcttgtt

SEQ ID NO: 132887 - DNA, 17 bp, Arabidopsis thaliana
tacttacaatggctgtc

SEQ ID NO: 132888 - DNA, 17 bp, Arabidopsis thaliana
tacttacagtggctgcc

SEQ ID NO: 132889 - DNA, 17 bp, Arabidopsis thaliana
tacttacgatggcgaag

SEQ ID NO: 132890 - DNA, 17 bp, Arabidopsis thaliana
tacttaggataagtttg

SEQ ID NO: 132891 - DNA, 17 bp, Arabidopsis thaliana
tacttaggctccgagtg

SEQ ID NO: 132892 - DNA, 17 bp, Arabidopsis thaliana
tacttaggcttacaaga

SEQ ID NO: 132893 - DNA, 17 bp, Arabidopsis thaliana
tacttaggctttcaaga

SEQ ID NO: 132894 - DNA, 17 bp, Arabidopsis thaliana
tacttaggcttttgaga

SEQ ID NO: 132895 - DNA, 17 bp, Arabidopsis thaliana
tacttagtcagagcgat

SEQ ID NO: 132896 - DNA, 17 bp, Arabidopsis thaliana
tacttagtcctggatgt

SEQ ID NO: 132897 - DNA, 17 bp, Arabidopsis thaliana
tacttagtgagccgatc

SEQ ID NO: 132898 - DNA, 17 bp, Arabidopsis thaliana
tacttagtgaggcgatc

SEQ ID NO: 132899 - DNA, 17 bp, Arabidopsis thaliana
tacttatacggagagag

SEQ ID NO: 132900 - DNA, 17 bp, Arabidopsis thaliana
tacttatgcgcagagcc

SEQ ID NO: 132901 - DNA, 17 bp, Arabidopsis thaliana
tacttattggcttgcgt

SEQ ID NO: 132902 - DNA, 17 bp, Arabidopsis thaliana
tacttcaactagtttcg

SEQ ID NO: 132903 - DNA, 17 bp, Arabidopsis thaliana
tacttcaataggctgtg

SEQ ID NO: 132904 - DNA, 17 bp, Arabidopsis thaliana
tacttcacaagcttttg

SEQ ID NO: 132905 - DNA, 17 bp, Arabidopsis thaliana
tacttcacggttaattt

SEQ ID NO: 132906 - DNA, 17 bp, Arabidopsis thaliana
tacttcagagtggactt

SEQ ID NO: 132907 - DNA, 17 bp, Arabidopsis thaliana
tacttcaggttcaccca

SEQ ID NO: 132908 - DNA, 17 bp, Arabidopsis thaliana
tacttcagttgattttt

SEQ ID NO: 132909 - DNA, 17 bp, Arabidopsis thaliana
tacttcatccttaccca

SEQ ID NO: 132910 - DNA, 17 bp, Arabidopsis thaliana
tacttcatcggctctgg

SEQ ID NO: 132911 - DNA, 17 bp, Arabidopsis thaliana
tacttcatttaccatcg

SEQ ID NO: 132912 - DNA, 17 bp, Arabidopsis thaliana
tacttccaacagtttca

SEQ ID NO: 132913 - DNA, 17 bp, Arabidopsis thaliana
tacttccaagtccccga

SEQ ID NO: 132914 - DNA, 17 bp, Arabidopsis thaliana
tacttccaatggaaatg

SEQ ID NO: 132915 - DNA, 17 bp, Arabidopsis thaliana
tacttccacttggccac

SEQ ID NO: 132916 - DNA, 17 bp, Arabidopsis thaliana
tacttccagcgttctgt

SEQ ID NO: 132917 - DNA, 17 bp, Arabidopsis thaliana
tacttccattcttcatg

SEQ ID NO: 132918 - DNA, 17 bp, Arabidopsis thaliana
tacttcccggattcata

SEQ ID NO: 132919 - DNA, 17 bp, Arabidopsis thaliana
tacttccgaccgcatgc

SEQ ID NO: 132920 - DNA, 17 bp, Arabidopsis thaliana
tacttccgatgtgggac

SEQ ID NO: 132921 - DNA, 17 bp, Arabidopsis thaliana
tacttcgtcaccaacac

SEQ ID NO: 132922 - DNA, 17 bp, Arabidopsis thaliana
tacttcgtctgtagctc

SEQ ID NO: 132923 - DNA, 17 bp, Arabidopsis thaliana
tacttcgtgctggttgg

SEQ ID NO: 132924 - DNA, 17 bp, Arabidopsis thaliana
tacttctaagttcggtg

SEQ ID NO: 132925 - DNA, 17 bp, Arabidopsis thaliana
tacttctccgatgaggg

SEQ ID NO: 132926 - DNA, 17 bp, Arabidopsis thaliana
tacttctcgtggagaaa

SEQ ID NO: 132927 - DNA, 17 bp, Arabidopsis thaliana
tacttctcgtggggaaa

SEQ ID NO: 132928 - DNA, 17 bp, Arabidopsis thaliana
tacttctgcgggtgcca

SEQ ID NO: 132929 - DNA, 17 bp, Arabidopsis thaliana
tacttcttggttgtcgg

SEQ ID NO: 132930 - DNA, 17 bp, Arabidopsis thaliana
tacttcttggttgtctg

SEQ ID NO: 132931 - DNA, 17 bp, Arabidopsis thaliana
tacttctttggaaatgc

SEQ ID NO: 132932 - DNA, 17 bp, Arabidopsis thaliana
tacttgactgcacagtc

SEQ ID NO: 132933 - DNA, 17 bp, Arabidopsis thaliana
tacttgagtgtgcgaat

SEQ ID NO: 132934 - DNA, 17 bp, Arabidopsis thaliana
tacttgatccgcctaat

SEQ ID NO: 132935 - DNA, 17 bp, Arabidopsis thaliana
tacttgatccgcttttg

SEQ ID NO: 132936 - DNA, 17 bp, Arabidopsis thaliana
tacttgatgaattaaga

SEQ ID NO: 132937 - DNA, 17 bp, Arabidopsis thaliana
tacttgcacatcctcta

SEQ ID NO: 132938 - DNA, 17 bp, Arabidopsis thaliana
tacttgcctcattttga

SEQ ID NO: 132939 - DNA, 17 bp, Arabidopsis thaliana
tacttgcctcgtgtcct

SEQ ID NO: 132940 - DNA, 17 bp, Arabidopsis thaliana
tacttgccttgtgccca

SEQ ID NO: 132941 - DNA, 17 bp, Arabidopsis thaliana
tacttgcggaccgtctt

SEQ ID NO: 132942 - DNA, 17 bp, Arabidopsis thaliana
tacttgctgacttcacg

SEQ ID NO: 132943 - DNA, 17 bp, Arabidopsis thaliana
tacttgcttcaactaga

SEQ ID NO: 132944 - DNA, 17 bp, Arabidopsis thaliana
tacttggacccggtcga

SEQ ID NO: 132945 - DNA, 17 bp, Arabidopsis thaliana
tacttggcataatggcg

SEQ ID NO: 132946 - DNA, 17 bp, Arabidopsis thaliana
tacttggcattctattc

SEQ ID NO: 132947 - DNA, 17 bp, Arabidopsis thaliana
tacttggcttaggctcg

SEQ ID NO: 132948 - DNA, 17 bp, Arabidopsis thaliana
tacttggcttttggatc

SEQ ID NO: 132949 - DNA, 17 bp, Arabidopsis thaliana
tacttggtactcgtggt

SEQ ID NO: 132950 - DNA, 17 bp, Arabidopsis thaliana
tacttggtctggtaact

SEQ ID NO: 132951 - DNA, 17 bp, Arabidopsis thaliana
tacttggttgcacattt

SEQ ID NO: 132952 - DNA, 17 bp, Arabidopsis thaliana
tacttgtatgactcgtc

SEQ ID NO: 132953 - DNA, 17 bp, Arabidopsis thaliana
tacttgtccatgacatt

SEQ ID NO: 132954 - DNA, 17 bp, Arabidopsis thaliana
tacttgtcttaggtcag

SEQ ID NO: 132955 - DNA, 17 bp, Arabidopsis thaliana
tacttgtcttagttcag

SEQ ID NO: 132956 - DNA, 17 bp, Arabidopsis thaliana
tacttgtgtccgagtat

SEQ ID NO: 132957 - DNA, 17 bp, Arabidopsis thaliana
tacttgttaaccgccgg

SEQ ID NO: 132958 - DNA, 17 bp, Arabidopsis thaliana
tactttaaactcttatg

SEQ ID NO: 132959 - DNA, 17 bp, Arabidopsis thaliana
tactttcacgatgtctg

SEQ ID NO: 132960 - DNA, 17 bp, Arabidopsis thaliana
tactttcattcaactca

SEQ ID NO: 132961 - DNA, 17 bp, Arabidopsis thaliana
tactttcatttgtcgca

SEQ ID NO: 132962 - DNA, 17 bp, Arabidopsis thaliana
tactttccctctcggtt

SEQ ID NO: 132963 - DNA, 17 bp, Arabidopsis thaliana
tactttccgcaggaggc

SEQ ID NO: 132964 - DNA, 17 bp, Arabidopsis thaliana
tactttcgcaacttgga

SEQ ID NO: 132965 - DNA, 17 bp, Arabidopsis thaliana
tactttcggttctaagt

SEQ ID NO: 132966 - DNA, 17 bp, Arabidopsis thaliana
tactttcggttctccgt

SEQ ID NO: 132967 - DNA, 17 bp, Arabidopsis thaliana
tactttcggttgggatg

SEQ ID NO: 132968 - DNA, 17 bp, Arabidopsis thaliana
tactttctcaggagaat

SEQ ID NO: 132969 - DNA, 17 bp, Arabidopsis thaliana
tactttgacccatacgt

SEQ ID NO: 132970 - DNA, 17 bp, Arabidopsis thaliana
tactttgaccgtatctg

SEQ ID NO: 132971 - DNA, 17 bp, Arabidopsis thaliana
tactttgaggcaggtct

SEQ ID NO: 132972 - DNA, 17 bp, Arabidopsis thaliana
tactttgcaagattgga

SEQ ID NO: 132973 - DNA, 17 bp, Arabidopsis thaliana
tactttgcaggtccaaa

SEQ ID NO: 132974 - DNA, 17 bp, Arabidopsis thaliana
tactttgccgcggttct

SEQ ID NO: 132975 - DNA, 17 bp, Arabidopsis thaliana
tactttgcctaagagcc

SEQ ID NO: 132976 - DNA, 17 bp, Arabidopsis thaliana
tactttgcttctcagat

SEQ ID NO: 132977 - DNA, 17 bp, Arabidopsis thaliana
tactttggagcggagat

SEQ ID NO: 132978 - DNA, 17 bp, Arabidopsis thaliana
tactttgtccgcttggg

SEQ ID NO: 132979 - DNA, 17 bp, Arabidopsis thaliana
tacttttactctgctgc

SEQ ID NO: 132980 - DNA, 17 bp, Arabidopsis thaliana
tacttttcagcggtgta

SEQ ID NO: 132981 - DNA, 17 bp, Arabidopsis thaliana
tacttttccctacactt

SEQ ID NO: 132982 - DNA, 17 bp, Arabidopsis thaliana
tacttttccgcttgggc

SEQ ID NO: 132983 - DNA, 17 bp, Arabidopsis thaliana
tacttttccggtggcgt

SEQ ID NO: 132984 - DNA, 17 bp, Arabidopsis thaliana
tacttttccttctttga

SEQ ID NO: 132985 - DNA, 17 bp, Arabidopsis thaliana
tacttttcgtggcggat

SEQ ID NO: 132986 - DNA, 17 bp, Arabidopsis thaliana
tacttttggcctgcaca

SEQ ID NO: 132987 - DNA, 17 bp, Arabidopsis thaliana
tactttttccgctttgt

SEQ ID NO: 132988 - DNA, 17 bp, Arabidopsis thaliana
tactttttcgggcattt

SEQ ID NO: 132989 - DNA, 17 bp, Arabidopsis thaliana
tactttttctactatcc

SEQ ID NO: 132990 - DNA, 17 bp, Arabidopsis thaliana
tactttttctgcagttg

SEQ ID NO: 132991 - DNA, 17 bp, Arabidopsis thaliana
tactttttttcacacca

SEQ ID NO: 132992 - DNA, 17 bp, Arabidopsis thaliana
tagaaaaccctgtctgc

SEQ ID NO: 132993 - DNA, 17 bp, Arabidopsis thaliana
tagaaaagcggtcgatg

SEQ ID NO: 132994 - DNA, 17 bp, Arabidopsis thaliana
tagaaacccaaaacggc

SEQ ID NO: 132995 - DNA, 17 bp, Arabidopsis thaliana
tagaaacgtgatggtgg

SEQ ID NO: 132996 - DNA, 17 bp, Arabidopsis thaliana
tagaaactcagacgtgt

SEQ ID NO: 132997 - DNA, 17 bp, Arabidopsis thaliana
tagaaactcgtgagctt

SEQ ID NO: 132998 - DNA, 17 bp, Arabidopsis thaliana
tagaaagacgtgttgct

SEQ ID NO: 132999 - DNA, 17 bp, Arabidopsis thaliana
tagaaagctagggtttg

SEQ ID NO: 133000 - DNA, 17 bp, Arabidopsis thaliana
tagaaaggcatgtgcca

SEQ ID NO: 133001 - DNA, 17 bp, Arabidopsis thaliana
tagaaagtctgtcagtt

SEQ ID NO: 133002 - DNA, 17 bp, Arabidopsis thaliana
tagaaatgtggcctaac

SEQ ID NO: 133003 - DNA, 17 bp, Arabidopsis thaliana
tagaaattcaacagcga

SEQ ID NO: 133004 - DNA, 17 bp, Arabidopsis thaliana
tagaaattcatcatgga

SEQ ID NO: 133005 - DNA, 17 bp, Arabidopsis thaliana
tagaaccgacgtatcga

SEQ ID NO: 133006 - DNA, 17 bp, Arabidopsis thaliana
tagaaccgcttgatccg

SEQ ID NO: 133007 - DNA, 17 bp, Arabidopsis thaliana
tagaacctcgtgctctt

SEQ ID NO: 133008 - DNA, 17 bp, Arabidopsis thaliana
tagaacgactaatgctg

SEQ ID NO: 133009 - DNA, 17 bp, Arabidopsis thaliana
tagaactggtcgatggt

SEQ ID NO: 133010 - DNA, 17 bp, Arabidopsis thaliana
tagaacttatttacaat

SEQ ID NO: 133011 - DNA, 17 bp, Arabidopsis thaliana
tagaacttcctagactt

SEQ ID NO: 133012 - DNA, 17 bp, Arabidopsis thaliana
tagaagaaaaccgcccg

SEQ ID NO: 133013 - DNA, 17 bp, Arabidopsis thaliana
tagaagataggccgttc

SEQ ID NO: 133014 - DNA, 17 bp, Arabidopsis thaliana
tagaagatcatgcggtt

SEQ ID NO: 133015 - DNA, 17 bp, Arabidopsis thaliana
tagaagcttggttgccc

SEQ ID NO: 133016 - DNA, 17 bp, Arabidopsis thaliana
tagaaggcctacgggtc

SEQ ID NO: 133017 - DNA, 17 bp, Arabidopsis thaliana
tagaaggcgaaggaagc

SEQ ID NO: 133018 - DNA, 17 bp, Arabidopsis thaliana
tagaagggaatacatgg

SEQ ID NO: 133019 - DNA, 17 bp, Arabidopsis thaliana
tagaataatcaggtcgt

SEQ ID NO: 133020 - DNA, 17 bp, Arabidopsis thaliana
tagaatagtaccctgcc

SEQ ID NO: 133021 - DNA, 17 bp, Arabidopsis thaliana
tagaatcattggtgaca

SEQ ID NO: 133022 - DNA, 17 bp, Arabidopsis thaliana
tagaatccagttgaagt

SEQ ID NO: 133023 - DNA, 17 bp, Arabidopsis thaliana
tagaatccgtcgtttcc

SEQ ID NO: 133024 - DNA, 17 bp, Arabidopsis thaliana
tagaatccgtcgttttc

SEQ ID NO: 133025 - DNA, 17 bp, Arabidopsis thaliana
tagaatcctttgcagac

SEQ ID NO: 133026 - DNA, 17 bp, Arabidopsis thaliana
tagaatctaagctgaac

SEQ ID NO: 133027 - DNA, 17 bp, Arabidopsis thaliana
tagaatctcaggttaac

SEQ ID NO: 133028 - DNA, 17 bp, Arabidopsis thaliana
tagaatctgacactgtt

SEQ ID NO: 133029 - DNA, 17 bp, Arabidopsis thaliana
tagaatcttgtgctctt

SEQ ID NO: 133030 - DNA, 17 bp, Arabidopsis thaliana
tagaatggaccattctc

SEQ ID NO: 133031 - DNA, 17 bp, Arabidopsis thaliana
tagaatggttatggtgt

SEQ ID NO: 133032 - DNA, 17 bp, Arabidopsis thaliana
tagaatgtcttggctgc

SEQ ID NO: 133033 - DNA, 17 bp, Arabidopsis thaliana
tagaattctaaccttgt

SEQ ID NO: 133034 - DNA, 17 bp, Arabidopsis thaliana
tagacaaccaagacgta

SEQ ID NO: 133035 - DNA, 17 bp, Arabidopsis thaliana
tagacaatgtgaacctg

SEQ ID NO: 133036 - DNA, 17 bp, Arabidopsis thaliana
tagacacagtgcctgta

SEQ ID NO: 133037 - DNA, 17 bp, Arabidopsis thaliana
tagacacggtgcctgta

SEQ ID NO: 133038 - DNA, 17 bp, Arabidopsis thaliana
tagacagcttgtttgca

SEQ ID NO: 133039 - DNA, 17 bp, Arabidopsis thaliana
tagacagtttctatggg

SEQ ID NO: 133040 - DNA, 17 bp, Arabidopsis thaliana
tagaccaattgtgagaa

SEQ ID NO: 133041 - DNA, 17 bp, Arabidopsis thaliana
tagaccaccgcgaacaa

SEQ ID NO: 133042 - DNA, 17 bp, Arabidopsis thaliana
tagaccagatcttcgca

SEQ ID NO: 133043 - DNA, 17 bp, Arabidopsis thaliana
tagaccaggtcactgca

SEQ ID NO: 133044 - DNA, 17 bp, Arabidopsis thaliana
tagaccatctccatcgg

SEQ ID NO: 133045 - DNA, 17 bp, Arabidopsis thaliana
tagaccatttatgagaa

SEQ ID NO: 133046 - DNA, 17 bp, Arabidopsis thaliana
tagaccatttgtgaaaa

SEQ ID NO: 133047 - DNA, 17 bp, Arabidopsis thaliana
tagaccatttgtgagaa

SEQ ID NO: 133048 - DNA, 17 bp, Arabidopsis thaliana
tagaccatttgtgagta

SEQ ID NO: 133049 - DNA, 17 bp, Arabidopsis thaliana
tagaccatttgttagaa

SEQ ID NO: 133050 - DNA, 17 bp, Arabidopsis thaliana
tagaccctcattctttc

SEQ ID NO: 133051 - DNA, 17 bp, Arabidopsis thaliana
tagaccctgtgcctcag

SEQ ID NO: 133052 - DNA, 17 bp, Arabidopsis thaliana
tagaccgaggctccggc

SEQ ID NO: 133053 - DNA, 17 bp, Arabidopsis thaliana
tagaccggtgtctcctc

SEQ ID NO: 133054 - DNA, 17 bp, Arabidopsis thaliana
tagaccgtcgtgagaca

SEQ ID NO: 133055 - DNA, 17 bp, Arabidopsis thaliana
tagaccgttctcccgcc

SEQ ID NO: 133056 - DNA, 17 bp, Arabidopsis thaliana
tagacctgtccgacgag

SEQ ID NO: 133057 - DNA, 17 bp, Arabidopsis thaliana
tagacgagtttggcagg

SEQ ID NO: 133058 - DNA, 17 bp, Arabidopsis thaliana
tagacggaaagaccccg

SEQ ID NO: 133059 - DNA, 17 bp, Arabidopsis thaliana
tagactattgggcgtgt

SEQ ID NO: 133060 - DNA, 17 bp, Arabidopsis thaliana
tagactcacaagttgac

SEQ ID NO: 133061 - DNA, 17 bp, Arabidopsis thaliana
tagactcgtcacaggaa

SEQ ID NO: 133062 - DNA, 17 bp, Arabidopsis thaliana
tagactgagactgaagt

SEQ ID NO: 133063 - DNA, 17 bp, Arabidopsis thaliana
tagactgattgggtttc

SEQ ID NO: 133064 - DNA, 17 bp, Arabidopsis thaliana
tagactgctaaatccac

SEQ ID NO: 133065 - DNA, 17 bp, Arabidopsis thaliana
tagactggtggtttgga

SEQ ID NO: 133066 - DNA, 17 bp, Arabidopsis thaliana
tagacttggtttcctgt

SEQ ID NO: 133067 - DNA, 17 bp, Arabidopsis thaliana
tagacttgtacatccac

SEQ ID NO: 133068 - DNA, 17 bp, Arabidopsis thaliana
tagacttgtcatgtgtc

SEQ ID NO: 133069 - DNA, 17 bp, Arabidopsis thaliana
tagacttgtggttccag

SEQ ID NO: 133070 - DNA, 17 bp, Arabidopsis thaliana
tagactttcccgattca

SEQ ID NO: 133071 - DNA, 17 bp, Arabidopsis thaliana
tagactttccgtgatgt

SEQ ID NO: 133072 - DNA, 17 bp, Arabidopsis thaliana
tagactttgccattcgt

SEQ ID NO: 133073 - DNA, 17 bp, Arabidopsis thaliana
tagactttttgtaatcc

SEQ ID NO: 133074 - DNA, 17 bp, Arabidopsis thaliana
tagagaatctgtgcagg

SEQ ID NO: 133075 - DNA, 17 bp, Arabidopsis thaliana
tagagagctgtgtaaat

SEQ ID NO: 133076 - DNA, 17 bp, Arabidopsis thaliana
tagagatctgtcgatca

SEQ ID NO: 133077 - DNA, 17 bp, Arabidopsis thaliana
tagagccactgtgagtt

SEQ ID NO: 133078 - DNA, 17 bp, Arabidopsis thaliana
tagaggctctcgaccga

SEQ ID NO: 133079 - DNA, 17 bp, Arabidopsis thaliana
tagagggattacaggct

SEQ ID NO: 133080 - DNA, 17 bp, Arabidopsis thaliana
tagaggtcaaaatttgg

SEQ ID NO: 133081 - DNA, 17 bp, Arabidopsis thaliana
tagaggtcaaaattttg

SEQ ID NO: 133082 - DNA, 17 bp, Arabidopsis thaliana
tagagtgctcaaagcaa

SEQ ID NO: 133083 - DNA, 17 bp, Arabidopsis thaliana
tagagtttctgggcttt

SEQ ID NO: 133084 - DNA, 17 bp, Arabidopsis thaliana
tagagttttccgtagat

SEQ ID NO: 133085 - DNA, 17 bp, Arabidopsis thaliana
tagagttttttcgcata

SEQ ID NO: 133086 - DNA, 17 bp, Arabidopsis thaliana
tagataaaaagtcgacg

SEQ ID NO: 133087 - DNA, 17 bp, Arabidopsis thaliana
tagataaaaggtcgacc

SEQ ID NO: 133088 - DNA, 17 bp, Arabidopsis thaliana
tagataaaaggtcgacg

SEQ ID NO: 133089 - DNA, 17 bp, Arabidopsis thaliana
tagataacccgtcaatg

SEQ ID NO: 133090 - DNA, 17 bp, Arabidopsis thaliana
tagataagtactttgcc

SEQ ID NO: 133091 - DNA, 17 bp, Arabidopsis thaliana
tagataccctggtagtc

SEQ ID NO: 133092 - DNA, 17 bp, Arabidopsis thaliana
tagatatgtctgagccc

SEQ ID NO: 133093 - DNA, 17 bp, Arabidopsis thaliana
tagatattgcggcttcg

SEQ ID NO: 133094 - DNA, 17 bp, Arabidopsis thaliana
tagatcagccgataggg

SEQ ID NO: 133095 - DNA, 17 bp, Arabidopsis thaliana
tagatgaggcccagcag

SEQ ID NO: 133096 - DNA, 17 bp, Arabidopsis thaliana
tagatgccgccgtcgtt

SEQ ID NO: 133097 - DNA, 17 bp, Arabidopsis thaliana
tagatggatcgggcacg

SEQ ID NO: 133098 - DNA, 17 bp, Arabidopsis thaliana
tagatggtttgtccgct

SEQ ID NO: 133099 - DNA, 17 bp, Arabidopsis thaliana
tagatgtcccaagggaa

SEQ ID NO: 133100 - DNA, 17 bp, Arabidopsis thaliana
tagatgtgtgctttgtc

SEQ ID NO: 133101 - DNA, 17 bp, Arabidopsis thaliana
tagatgttctgggccgc

SEQ ID NO: 133102 - DNA, 17 bp, Arabidopsis thaliana
tagattacagggcttat

SEQ ID NO: 133103 - DNA, 17 bp, Arabidopsis thaliana
tagattaggaagtttag

SEQ ID NO: 133104 - DNA, 17 bp, Arabidopsis thaliana
tagattaggcgtctgga

SEQ ID NO: 133105 - DNA, 17 bp, Arabidopsis thaliana
tagattccgcacttaca

SEQ ID NO: 133106 - DNA, 17 bp, Arabidopsis thaliana
tagattcggtcctcgta

SEQ ID NO: 133107 - DNA, 17 bp, Arabidopsis thaliana
tagattcggttcgggtt

SEQ ID NO: 133108 - DNA, 17 bp, Arabidopsis thaliana
tagattcggtttgggtt

SEQ ID NO: 133109 - DNA, 17 bp, Arabidopsis thaliana
tagattgagcctttcag

SEQ ID NO: 133110 - DNA, 17 bp, Arabidopsis thaliana
tagattgcagccgagga

SEQ ID NO: 133111 - DNA, 17 bp, Arabidopsis thaliana
tagattgctgttctttt

SEQ ID NO: 133112 - DNA, 17 bp, Arabidopsis thaliana
tagattgtaggacgggt

SEQ ID NO: 133113 - DNA, 17 bp, Arabidopsis thaliana
tagattgtaggcttcca

SEQ ID NO: 133114 - DNA, 17 bp, Arabidopsis thaliana
tagattgttgtacccgt

SEQ ID NO: 133115 - DNA, 17 bp, Arabidopsis thaliana
tagatttacactctgct

SEQ ID NO: 133116 - DNA, 17 bp, Arabidopsis thaliana
tagatttcatcgtgatg

SEQ ID NO: 133117 - DNA, 17 bp, Arabidopsis thaliana
tagatttccagtctcct

SEQ ID NO: 133118 - DNA, 17 bp, Arabidopsis thaliana
tagatttgtagtaaccg

SEQ ID NO: 133119 - DNA, 17 bp, Arabidopsis thaliana
tagattttcacccgcgg

SEQ ID NO: 133120 - DNA, 17 bp, Arabidopsis thaliana
tagattttgccattttt

SEQ ID NO: 133121 - DNA, 17 bp, Arabidopsis thaliana
tagcaacagactgtgca

SEQ ID NO: 133122 - DNA, 17 bp, Arabidopsis thaliana
tagcaactgttctttaa

SEQ ID NO: 133123 - DNA, 17 bp, Arabidopsis thaliana
tagcaactgttctttag

SEQ ID NO: 133124 - DNA, 17 bp, Arabidopsis thaliana
tagcaagctctcatgta

SEQ ID NO: 133125 - DNA, 17 bp, Arabidopsis thaliana
tagcaaggatgacttgc

SEQ ID NO: 133126 - DNA, 17 bp, Arabidopsis thaliana
tagcaattgactccagg

SEQ ID NO: 133127 - DNA, 17 bp, Arabidopsis thaliana
tagcaccgctctgagga

SEQ ID NO: 133128 - DNA, 17 bp, Arabidopsis thaliana
tagcacggataccgcgt

SEQ ID NO: 133129 - DNA, 17 bp, Arabidopsis thaliana
tagcacgggttatgatc

SEQ ID NO: 133130 - DNA, 17 bp, Arabidopsis thaliana
tagcacgtctgcctggg

SEQ ID NO: 133131 - DNA, 17 bp, Arabidopsis thaliana
tagcagacccgggttcg

SEQ ID NO: 133132 - DNA, 17 bp, Arabidopsis thaliana
tagcagatctgcaggtt

SEQ ID NO: 133133 - DNA, 17 bp, Arabidopsis thaliana
tagcagtgttgtggcat

SEQ ID NO: 133134 - DNA, 17 bp, Arabidopsis thaliana
tagcatatcatgatgtg

SEQ ID NO: 133135 - DNA, 17 bp, Arabidopsis thaliana
tagcattttcgtgattt

SEQ ID NO: 133136 - DNA, 17 bp, Arabidopsis thaliana
tagccaacgaacaaccc

SEQ ID NO: 133137 - DNA, 17 bp, Arabidopsis thaliana
tagccaacgaacacccc

SEQ ID NO: 133138 - DNA, 17 bp, Arabidopsis thaliana
tagccaacgaagaatga

SEQ ID NO: 133139 - DNA, 17 bp, Arabidopsis thaliana
tagccaacgaaggatgg

SEQ ID NO: 133140 - DNA, 17 bp, Arabidopsis thaliana
tagccaacgatccccca

SEQ ID NO: 133141 - DNA, 17 bp, Arabidopsis thaliana
tagccaacgatcccccc

SEQ ID NO: 133142 - DNA, 17 bp, Arabidopsis thaliana
tagccaacgatgacgtg

SEQ ID NO: 133143 - DNA, 17 bp, Arabidopsis thaliana
tagccaacgatgacttg

SEQ ID NO: 133144 - DNA, 17 bp, Arabidopsis thaliana
tagccaacgatgatttg

SEQ ID NO: 133145 - DNA, 17 bp, Arabidopsis thaliana
tagccaagaatgaatca

SEQ ID NO: 133146 - DNA, 17 bp, Arabidopsis thaliana
tagccaagctggagtca

SEQ ID NO: 133147 - DNA, 17 bp, Arabidopsis thaliana
tagccaaggaagaaccc

SEQ ID NO: 133148 - DNA, 17 bp, Arabidopsis thaliana
tagccaaggaagaataa

SEQ ID NO: 133149 - DNA, 17 bp, Arabidopsis thaliana
tagccaaggaagaatca

SEQ ID NO: 133150 - DNA, 17 bp, Arabidopsis thaliana
tagccaaggaagaatga

SEQ ID NO: 133151 - DNA, 17 bp, Arabidopsis thaliana
tagccaaggaagaatgg

SEQ ID NO: 133152 - DNA, 17 bp, Arabidopsis thaliana
tagccaaggaagacctg

SEQ ID NO: 133153 - DNA, 17 bp, Arabidopsis thaliana
tagccaaggaaggatga

SEQ ID NO: 133154 - DNA, 17 bp, Arabidopsis thaliana
tagccaaggaggacttg

SEQ ID NO: 133155 - DNA, 17 bp, Arabidopsis thaliana
tagccaaggataggtgg

SEQ ID NO: 133156 - DNA, 17 bp, Arabidopsis thaliana
tagccaaggatcaaagg

SEQ ID NO: 133157 - DNA, 17 bp, Arabidopsis thaliana
tagccaaggatcaagca

SEQ ID NO: 133158 - DNA, 17 bp, Arabidopsis thaliana
tagccaaggatcaatcc

SEQ ID NO: 133159 - DNA, 17 bp, Arabidopsis thaliana
tagccaaggatcaatgg

SEQ ID NO: 133160 - DNA, 17 bp, Arabidopsis thaliana
tagccaaggatcattcg

SEQ ID NO: 133161 - DNA, 17 bp, Arabidopsis thaliana
tagccaaggatcttgcc

SEQ ID NO: 133162 - DNA, 17 bp, Arabidopsis thaliana
tagccaaggatgaaacg

SEQ ID NO: 133163 - DNA, 17 bp, Arabidopsis thaliana
tagccaaggatgaagcg

SEQ ID NO: 133164 - DNA, 17 bp, Arabidopsis thaliana
tagccaaggatgaagga

SEQ ID NO: 133165 - DNA, 17 bp, Arabidopsis thaliana
tagccaaggatgaatca

SEQ ID NO: 133166 - DNA, 17 bp, Arabidopsis thaliana
tagccaaggatgaatcc

SEQ ID NO: 133167 - DNA, 17 bp, Arabidopsis thaliana
tagccaaggatgaatcg

SEQ ID NO: 133168 - DNA, 17 bp, Arabidopsis thaliana
tagccaaggatgaatga

SEQ ID NO: 133169 - DNA, 17 bp, Arabidopsis thaliana
tagccaaggatgaatgg

SEQ ID NO: 133170 - DNA, 17 bp, Arabidopsis thaliana
tagccaaggatgaatta

SEQ ID NO: 133171 - DNA, 17 bp, Arabidopsis thaliana
tagccaaggatgaattg

SEQ ID NO: 133172 - DNA, 17 bp, Arabidopsis thaliana
tagccaaggatgacatg

SEQ ID NO: 133173 - DNA, 17 bp, Arabidopsis thaliana
tagccaaggatgacgag

SEQ ID NO: 133174 - DNA, 17 bp, Arabidopsis thaliana
tagccaaggatgacgat

SEQ ID NO: 133175 - DNA, 17 bp, Arabidopsis thaliana
tagccaaggatgacgtg

SEQ ID NO: 133176 - DNA, 17 bp, Arabidopsis thaliana
tagccaaggatgactca

SEQ ID NO: 133177 - DNA, 17 bp, Arabidopsis thaliana
tagccaaggatgactcc

SEQ ID NO: 133178 - DNA, 17 bp, Arabidopsis thaliana
tagccaaggatgactga

SEQ ID NO: 133179 - DNA, 17 bp, Arabidopsis thaliana
tagccaaggatgactgg

SEQ ID NO: 133180 - DNA, 17 bp, Arabidopsis thaliana
tagccaaggatgactta

SEQ ID NO: 133181 - DNA, 17 bp, Arabidopsis thaliana
tagccaaggatgacttc

SEQ ID NO: 133182 - DNA, 17 bp, Arabidopsis thaliana
tagccaaggatgacttg

SEQ ID NO: 133183 - DNA, 17 bp, Arabidopsis thaliana
tagccaaggatgacttt

SEQ ID NO: 133184 - DNA, 17 bp, Arabidopsis thaliana
tagccaaggatgatgga

SEQ ID NO: 133185 - DNA, 17 bp, Arabidopsis thaliana
tagccaaggatgatttg

SEQ ID NO: 133186 - DNA, 17 bp, Arabidopsis thaliana
tagccaaggtgacttgc

SEQ ID NO: 133187 - DNA, 17 bp, Arabidopsis thaliana
tagccatggtgtcagac

SEQ ID NO: 133188 - DNA, 17 bp, Arabidopsis thaliana
tagcccaaatcacgaaa

SEQ ID NO: 133189 - DNA, 17 bp, Arabidopsis thaliana
tagccccgaaaatggaa

SEQ ID NO: 133190 - DNA, 17 bp, Arabidopsis thaliana
tagcccggattctgact

SEQ ID NO: 133191 - DNA, 17 bp, Arabidopsis thaliana
tagcccgttacccgatc

SEQ ID NO: 133192 - DNA, 17 bp, Arabidopsis thaliana
tagccctttgtcgctaa

SEQ ID NO: 133193 - DNA, 17 bp, Arabidopsis thaliana
tagcccttttccctctt

SEQ ID NO: 133194 - DNA, 17 bp, Arabidopsis thaliana
tagccgactatatgagc

SEQ ID NO: 133195 - DNA, 17 bp, Arabidopsis thaliana
tagccggataaatactc

SEQ ID NO: 133196 - DNA, 17 bp, Arabidopsis thaliana
tagcctagtcgtgttgt

SEQ ID NO: 133197 - DNA, 17 bp, Arabidopsis thaliana
tagcctattcaccatgt

SEQ ID NO: 133198 - DNA, 17 bp, Arabidopsis thaliana
tagcctcacatggttgg

SEQ ID NO: 133199 - DNA, 17 bp, Arabidopsis thaliana
tagccttttgccaaagc

SEQ ID NO: 133200 - DNA, 17 bp, Arabidopsis thaliana
tagcgaaatgcgatact

SEQ ID NO: 133201 - DNA, 17 bp, Arabidopsis thaliana
tagcgaacccgggcgaa

SEQ ID NO: 133202 - DNA, 17 bp, Arabidopsis thaliana
tagcgaactatgcattt

SEQ ID NO: 133203 - DNA, 17 bp, Arabidopsis thaliana
tagcgaagcgggtcttc

SEQ ID NO: 133204 - DNA, 17 bp, Arabidopsis thaliana
tagcgacaaagggctga

SEQ ID NO: 133205 - DNA, 17 bp, Arabidopsis thaliana
tagcgacagtcgccagc

SEQ ID NO: 133206 - DNA, 17 bp, Arabidopsis thaliana
tagcgacagttgccagc

SEQ ID NO: 133207 - DNA, 17 bp, Arabidopsis thaliana
tagcgacctgcacgaat

SEQ ID NO: 133208 - DNA, 17 bp, Arabidopsis thaliana
tagcgacgcggattacg

SEQ ID NO: 133209 - DNA, 17 bp, Arabidopsis thaliana
tagcgacgtagggaaag

SEQ ID NO: 133210 - DNA, 17 bp, Arabidopsis thaliana
tagcgacgttgcttttt

SEQ ID NO: 133211 - DNA, 17 bp, Arabidopsis thaliana
tagcgatcagtcgctgg

SEQ ID NO: 133212 - DNA, 17 bp, Arabidopsis thaliana
tagcgatcagtcgttgg

SEQ ID NO: 133213 - DNA, 17 bp, Arabidopsis thaliana
tagcgatttattgttcg

SEQ ID NO: 133214 - DNA, 17 bp, Arabidopsis thaliana
tagcgatttcgttacca

SEQ ID NO: 133215 - DNA, 17 bp, Arabidopsis thaliana
tagcgcactgccgcaac

SEQ ID NO: 133216 - DNA, 17 bp, Arabidopsis thaliana
tagcggaaaatgcgggt

SEQ ID NO: 133217 - DNA, 17 bp, Arabidopsis thaliana
tagcggcatttctgaag

SEQ ID NO: 133218 - DNA, 17 bp, Arabidopsis thaliana
tagcggcttggccggta

SEQ ID NO: 133219 - DNA, 17 bp, Arabidopsis thaliana
tagcggctttggacgtt

SEQ ID NO: 133220 - DNA, 17 bp, Arabidopsis thaliana
tagcgggtgggacccac

SEQ ID NO: 133221 - DNA, 17 bp, Arabidopsis thaliana
tagcgggttaagcagtc

SEQ ID NO: 133222 - DNA, 17 bp, Arabidopsis thaliana
tagcgggtttggctttc

SEQ ID NO: 133223 - DNA, 17 bp, Arabidopsis thaliana
tagcggtgtacagatag

SEQ ID NO: 133224 - DNA, 17 bp, Arabidopsis thaliana
tagcggtttctatgatt

SEQ ID NO: 133225 - DNA, 17 bp, Arabidopsis thaliana
tagcgtagaccaactcc

SEQ ID NO: 133226 - DNA, 17 bp, Arabidopsis thaliana
tagcgtcactcgaaccg

SEQ ID NO: 133227 - DNA, 17 bp, Arabidopsis thaliana
tagcgtgctccgggcgt

SEQ ID NO: 133228 - DNA, 17 bp, Arabidopsis thaliana
tagcgtgtctagccgcc

SEQ ID NO: 133229 - DNA, 17 bp, Arabidopsis thaliana
tagcgtttctatggtca

SEQ ID NO: 133230 - DNA, 17 bp, Arabidopsis thaliana
tagcgttttctcggtta

SEQ ID NO: 133231 - DNA, 17 bp, Arabidopsis thaliana
tagctaactgtacaccg

SEQ ID NO: 133232 - DNA, 17 bp, Arabidopsis thaliana
tagctaactttgtcaaa

SEQ ID NO: 133233 - DNA, 17 bp, Arabidopsis thaliana
tagctacgtggaggcat

SEQ ID NO: 133234 - DNA, 17 bp, Arabidopsis thaliana
tagctactttcgcaact

SEQ ID NO: 133235 - DNA, 17 bp, Arabidopsis thaliana
tagctagttagcaggct

SEQ ID NO: 133236 - DNA, 17 bp, Arabidopsis thaliana
tagctatcttttgatta

SEQ ID NO: 133237 - DNA, 17 bp, Arabidopsis thaliana
tagctatggctcgtcgg

SEQ ID NO: 133238 - DNA, 17 bp, Arabidopsis thaliana
tagctattagctcagtg

SEQ ID NO: 133239 - DNA, 17 bp, Arabidopsis thaliana
tagctattttcgcaact

SEQ ID NO: 133240 - DNA, 17 bp, Arabidopsis thaliana
tagctcaacggtgactt

SEQ ID NO: 133241 - DNA, 17 bp, Arabidopsis thaliana
tagctcagcgacggacc

SEQ ID NO: 133242 - DNA, 17 bp, Arabidopsis thaliana
tagctcagctggctaga

SEQ ID NO: 133243 - DNA, 17 bp, Arabidopsis thaliana
tagctcagggcctttca

SEQ ID NO: 133244 - DNA, 17 bp, Arabidopsis thaliana
tagctcagggttaggtt

SEQ ID NO: 133245 - DNA, 17 bp, Arabidopsis thaliana
tagctcatacggacttt

SEQ ID NO: 133246 - DNA, 17 bp, Arabidopsis thaliana
tagctcatctacaacgt

SEQ ID NO: 133247 - DNA, 17 bp, Arabidopsis thaliana
tagctcattttccgtaa

SEQ ID NO: 133248 - DNA, 17 bp, Arabidopsis thaliana
tagctccgactttgaag

SEQ ID NO: 133249 - DNA, 17 bp, Arabidopsis thaliana
tagctccgctaagatac

SEQ ID NO: 133250 - DNA, 17 bp, Arabidopsis thaliana
tagctccgtgggttggc

SEQ ID NO: 133251 - DNA, 17 bp, Arabidopsis thaliana
tagctccttcggtatga

SEQ ID NO: 133252 - DNA, 17 bp, Arabidopsis thaliana
tagctcgacgccaggac

SEQ ID NO: 133253 - DNA, 17 bp, Arabidopsis thaliana
tagctcgacgccaggat

SEQ ID NO: 133254 - DNA, 17 bp, Arabidopsis thaliana
tagctcgattctcccca

SEQ ID NO: 133255 - DNA, 17 bp, Arabidopsis thaliana
tagctcggtccaatgct

SEQ ID NO: 133256 - DNA, 17 bp, Arabidopsis thaliana
tagctcgtcaaccagtt

SEQ ID NO: 133257 - DNA, 17 bp, Arabidopsis thaliana
tagctcttctactcagt

SEQ ID NO: 133258 - DNA, 17 bp, Arabidopsis thaliana
tagctcttctactcatt

SEQ ID NO: 133259 - DNA, 17 bp, Arabidopsis thaliana
tagctgaactcaggcgg

SEQ ID NO: 133260 - DNA, 17 bp, Arabidopsis thaliana
tagctgaatgccttcct

SEQ ID NO: 133261 - DNA, 17 bp, Arabidopsis thaliana
tagctgacttagcgatc

SEQ ID NO: 133262 - DNA, 17 bp, Arabidopsis thaliana
tagctgagactgtgggt

SEQ ID NO: 133263 - DNA, 17 bp, Arabidopsis thaliana
tagctgagactgttggt

SEQ ID NO: 133264 - DNA, 17 bp, Arabidopsis thaliana
tagctgcccctcataag

SEQ ID NO: 133265 - DNA, 17 bp, Arabidopsis thaliana
tagctgcggttttgtgt

SEQ ID NO: 133266 - DNA, 17 bp, Arabidopsis thaliana
tagctgctcacggttat

SEQ ID NO: 133267 - DNA, 17 bp, Arabidopsis thaliana
tagctgttcgccaggat

SEQ ID NO: 133268 - DNA, 17 bp, Arabidopsis thaliana
tagcttaatagcccccc

SEQ ID NO: 133269 - DNA, 17 bp, Arabidopsis thaliana
tagcttaatagcccttt

SEQ ID NO: 133270 - DNA, 17 bp, Arabidopsis thaliana
tagcttagccggcattc

SEQ ID NO: 133271 - DNA, 17 bp, Arabidopsis thaliana
tagcttcagttgctttc

SEQ ID NO: 133272 - DNA, 17 bp, Arabidopsis thaliana
tagcttccgactcatcc

SEQ ID NO: 133273 - DNA, 17 bp, Arabidopsis thaliana
tagcttccgactcattc

SEQ ID NO: 133274 - DNA, 17 bp, Arabidopsis thaliana
tagcttccgactcattt

SEQ ID NO: 133275 - DNA, 17 bp, Arabidopsis thaliana
tagcttccgatccattc

SEQ ID NO: 133276 - DNA, 17 bp, Arabidopsis thaliana
tagcttcgcagtgacaa

SEQ ID NO: 133277 - DNA, 17 bp, Arabidopsis thaliana
tagcttcgggtcaaatt

SEQ ID NO: 133278 - DNA, 17 bp, Arabidopsis thaliana
tagcttctcggaatcgg

SEQ ID NO: 133279 - DNA, 17 bp, Arabidopsis thaliana
tagcttctgactcattc

SEQ ID NO: 133280 - DNA, 17 bp, Arabidopsis thaliana
tagctttcagaatccag

SEQ ID NO: 133281 - DNA, 17 bp, Arabidopsis thaliana
tagcttttcagttgcgg

SEQ ID NO: 133282 - DNA, 17 bp, Arabidopsis thaliana
tagcttttccgacttgt

SEQ ID NO: 133283 - DNA, 17 bp, Arabidopsis thaliana
tagcttttcggaatcgg

SEQ ID NO: 133284 - DNA, 17 bp, Arabidopsis thaliana
tagcttttgggttaagt

SEQ ID NO: 133285 - DNA, 17 bp, Arabidopsis thaliana
taggaaattacaggctt

SEQ ID NO: 133286 - DNA, 17 bp, Arabidopsis thaliana
taggaacttatttacaa

SEQ ID NO: 133287 - DNA, 17 bp, Arabidopsis thaliana
taggacgattcgtcttc

SEQ ID NO: 133288 - DNA, 17 bp, Arabidopsis thaliana
taggactccgctggcac

SEQ ID NO: 133289 - DNA, 17 bp, Arabidopsis thaliana
taggagcttaggctccc

SEQ ID NO: 133290 - DNA, 17 bp, Arabidopsis thaliana
taggataagtgggagca

SEQ ID NO: 133291 - DNA, 17 bp, Arabidopsis thaliana
taggataagtgggagct

SEQ ID NO: 133292 - DNA, 17 bp, Arabidopsis thaliana
taggataatggcacgga

SEQ ID NO: 133293 - DNA, 17 bp, Arabidopsis thaliana
taggatacagtctttat

SEQ ID NO: 133294 - DNA, 17 bp, Arabidopsis thaliana
taggatagtggcctacc

SEQ ID NO: 133295 - DNA, 17 bp, Arabidopsis thaliana
taggatcaattatggga

SEQ ID NO: 133296 - DNA, 17 bp, Arabidopsis thaliana
taggatcagtggcttta

SEQ ID NO: 133297 - DNA, 17 bp, Arabidopsis thaliana
taggatcgaaagttgaa

SEQ ID NO: 133298 - DNA, 17 bp, Arabidopsis thaliana
taggatcgagcgctaca

SEQ ID NO: 133299 - DNA, 17 bp, Arabidopsis thaliana
taggatcgcttgttttc

SEQ ID NO: 133300 - DNA, 17 bp, Arabidopsis thaliana
taggatcgtgccacata

SEQ ID NO: 133301 - DNA, 17 bp, Arabidopsis thaliana
taggatcgtgccacgtg

SEQ ID NO: 133302 - DNA, 17 bp, Arabidopsis thaliana
taggatctcggacccat

SEQ ID NO: 133303 - DNA, 17 bp, Arabidopsis thaliana
taggatggggtgacctc

SEQ ID NO: 133304 - DNA, 17 bp, Arabidopsis thaliana
taggatgggtgaccccc

SEQ ID NO: 133305 - DNA, 17 bp, Arabidopsis thaliana
taggatgggtgacctcc

SEQ ID NO: 133306 - DNA, 17 bp, Arabidopsis thaliana
taggatgggtgacttcc

SEQ ID NO: 133307 - DNA, 17 bp, Arabidopsis thaliana
taggatgtgcaaggtga

SEQ ID NO: 133308 - DNA, 17 bp, Arabidopsis thaliana
taggatgtgccttctca

SEQ ID NO: 133309 - DNA, 17 bp, Arabidopsis thaliana
taggattcataccaaag

SEQ ID NO: 133310 - DNA, 17 bp, Arabidopsis thaliana
taggattcggtggccgg

SEQ ID NO: 133311 - DNA, 17 bp, Arabidopsis thaliana
taggattgtgccacgtg

SEQ ID NO: 133312 - DNA, 17 bp, Arabidopsis thaliana
taggatttcacccgtgg

SEQ ID NO: 133313 - DNA, 17 bp, Arabidopsis thaliana
taggcaaggatgacttg

SEQ ID NO: 133314 - DNA, 17 bp, Arabidopsis thaliana
taggcgtgccggagtgg

SEQ ID NO: 133315 - DNA, 17 bp, Arabidopsis thaliana
taggctgagtgagggtt

SEQ ID NO: 133316 - DNA, 17 bp, Arabidopsis thaliana
taggcttacagatttcc

SEQ ID NO: 133317 - DNA, 17 bp, Arabidopsis thaliana
tagggaaatcgaaaacc

SEQ ID NO: 133318 - DNA, 17 bp, Arabidopsis thaliana
tagggaagcggatgggg

SEQ ID NO: 133319 - DNA, 17 bp, Arabidopsis thaliana
tagggatccattttgcc

SEQ ID NO: 133320 - DNA, 17 bp, Arabidopsis thaliana
tagggccggacacggag

SEQ ID NO: 133321 - DNA, 17 bp, Arabidopsis thaliana
taggggacagacttagc

SEQ ID NO: 133322 - DNA, 17 bp, Arabidopsis thaliana
tagggtctctcaagcca

SEQ ID NO: 133323 - DNA, 17 bp, Arabidopsis thaliana
tagggttcatgggttga

SEQ ID NO: 133324 - DNA, 17 bp, Arabidopsis thaliana
tagggttttccccaaat

SEQ ID NO: 133325 - DNA, 17 bp, Arabidopsis thaliana
taggtaggacgtgtcgg

SEQ ID NO: 133326 - DNA, 17 bp, Arabidopsis thaliana
taggtgaacctgcggaa

SEQ ID NO: 133327 - DNA, 17 bp, Arabidopsis thaliana
taggtgaacctgcggat

SEQ ID NO: 133328 - DNA, 17 bp, Arabidopsis thaliana
taggttattggcccgtc

SEQ ID NO: 133329 - DNA, 17 bp, Arabidopsis thaliana
taggttcaaatcctaca

SEQ ID NO: 133330 - DNA, 17 bp, Arabidopsis thaliana
taggttccccctacctg

SEQ ID NO: 133331 - DNA, 17 bp, Arabidopsis thaliana
taggttcgaatcctact

SEQ ID NO: 133332 - DNA, 17 bp, Arabidopsis thaliana
taggttcgccccctccc

SEQ ID NO: 133333 - DNA, 17 bp, Arabidopsis thaliana
taggttgatggcgtcta

SEQ ID NO: 133334 - DNA, 17 bp, Arabidopsis thaliana
taggttgccggttcgag

SEQ ID NO: 133335 - DNA, 17 bp, Arabidopsis thaliana
taggtttaggcattcag

SEQ ID NO: 133336 - DNA, 17 bp, Arabidopsis thaliana
taggtttgcttcattgg

SEQ ID NO: 133337 - DNA, 17 bp, Arabidopsis thaliana
taggttttctcgggaga

SEQ ID NO: 133338 - DNA, 17 bp, Arabidopsis thaliana
tagtaaaccctggatat

SEQ ID NO: 133339 - DNA, 17 bp, Arabidopsis thaliana
tagtaaccacttgtcac

SEQ ID NO: 133340 - DNA, 17 bp, Arabidopsis thaliana
tagtaactcatacgatt

SEQ ID NO: 133341 - DNA, 17 bp, Arabidopsis thaliana
tagtaagaccgtggggt

SEQ ID NO: 133342 - DNA, 17 bp, Arabidopsis thaliana
tagtaagaccttggtcc

SEQ ID NO: 133343 - DNA, 17 bp, Arabidopsis thaliana
tagtaagcggtgttcgt

SEQ ID NO: 133344 - DNA, 17 bp, Arabidopsis thaliana
tagtaaggcttgaactt

SEQ ID NO: 133345 - DNA, 17 bp, Arabidopsis thaliana
tagtaatatccgagcag

SEQ ID NO: 133346 - DNA, 17 bp, Arabidopsis thaliana
tagtaatccagccgcgt

SEQ ID NO: 133347 - DNA, 17 bp, Arabidopsis thaliana
tagtaatcgccggtcag

SEQ ID NO: 133348 - DNA, 17 bp, Arabidopsis thaliana
tagtaccgtgcgctgga

SEQ ID NO: 133349 - DNA, 17 bp, Arabidopsis thaliana
tagtagaaacacctcgg

SEQ ID NO: 133350 - DNA, 17 bp, Arabidopsis thaliana
tagtagctggttcccta

SEQ ID NO: 133351 - DNA, 17 bp, Arabidopsis thaliana
tagtaggcccaggatag

SEQ ID NO: 133352 - DNA, 17 bp, Arabidopsis thaliana
tagtatagggctgaaaa

SEQ ID NO: 133353 - DNA, 17 bp, Arabidopsis thaliana
tagtcaacgcgagatga

SEQ ID NO: 133354 - DNA, 17 bp, Arabidopsis thaliana
tagtcaacgcggagtta

SEQ ID NO: 133355 - DNA, 17 bp, Arabidopsis thaliana
tagtcaagccgtctgca

SEQ ID NO: 133356 - DNA, 17 bp, Arabidopsis thaliana
tagtcacatccgtagat

SEQ ID NO: 133357 - DNA, 17 bp, Arabidopsis thaliana
tagtcacatcctgtaga

SEQ ID NO: 133358 - DNA, 17 bp, Arabidopsis thaliana
tagtcacggctctgggt

SEQ ID NO: 133359 - DNA, 17 bp, Arabidopsis thaliana
tagtcacttccttgctt

SEQ ID NO: 133360 - DNA, 17 bp, Arabidopsis thaliana
tagtcagacgaggccaa

SEQ ID NO: 133361 - DNA, 17 bp, Arabidopsis thaliana
tagtcagctcgcctcac

SEQ ID NO: 133362 - DNA, 17 bp, Arabidopsis thaliana
tagtcagtgccaaaagg

SEQ ID NO: 133363 - DNA, 17 bp, Arabidopsis thaliana
tagtcatactaggtgac

SEQ ID NO: 133364 - DNA, 17 bp, Arabidopsis thaliana
tagtcatcagtggtttt

SEQ ID NO: 133365 - DNA, 17 bp, Arabidopsis thaliana
tagtcatgccgttgacc

SEQ ID NO: 133366 - DNA, 17 bp, Arabidopsis thaliana
tagtcatttgcggaaag

SEQ ID NO: 133367 - DNA, 17 bp, Arabidopsis thaliana
tagtccaccgtctgatt

SEQ ID NO: 133368 - DNA, 17 bp, Arabidopsis thaliana
tagtccacggataaact

SEQ ID NO: 133369 - DNA, 17 bp, Arabidopsis thaliana
tagtccacggataaatt

SEQ ID NO: 133370 - DNA, 17 bp, Arabidopsis thaliana
tagtccatccgtagatg

SEQ ID NO: 133371 - DNA, 17 bp, Arabidopsis thaliana
tagtccatcctgtagat

SEQ ID NO: 133372 - DNA, 17 bp, Arabidopsis thaliana
tagtcccatcctgtaga

SEQ ID NO: 133373 - DNA, 17 bp, Arabidopsis thaliana
tagtccctgttcatttg

SEQ ID NO: 133374 - DNA, 17 bp, Arabidopsis thaliana
tagtccgactttgtgaa

SEQ ID NO: 133375 - DNA, 17 bp, Arabidopsis thaliana
tagtccgcaacgctttg

SEQ ID NO: 133376 - DNA, 17 bp, Arabidopsis thaliana
tagtccggatcggggcc

SEQ ID NO: 133377 - DNA, 17 bp, Arabidopsis thaliana
tagtccgtggcggtttt

SEQ ID NO: 133378 - DNA, 17 bp, Arabidopsis thaliana
tagtcgatcctgttgat

SEQ ID NO: 133379 - DNA, 17 bp, Arabidopsis thaliana
tagtcgcaacctgtaga

SEQ ID NO: 133380 - DNA, 17 bp, Arabidopsis thaliana
tagtcgcaccctgtaga

SEQ ID NO: 133381 - DNA, 17 bp, Arabidopsis thaliana
tagtcgcacctggatgg

SEQ ID NO: 133382 - DNA, 17 bp, Arabidopsis thaliana
tagtcgcacctgtagat

SEQ ID NO: 133383 - DNA, 17 bp, Arabidopsis thaliana
tagtcgcactctgtaga

SEQ ID NO: 133384 - DNA, 17 bp, Arabidopsis thaliana
tagtcgcactgagatgg

SEQ ID NO: 133385 - DNA, 17 bp, Arabidopsis thaliana
tagtcgcactgtagatg

SEQ ID NO: 133386 - DNA, 17 bp, Arabidopsis thaliana
tagtcgcagcctgtaga

SEQ ID NO: 133387 - DNA, 17 bp, Arabidopsis thaliana
tagtcgcatcctggaga

SEQ ID NO: 133388 - DNA, 17 bp, Arabidopsis thaliana
tagtcgcatcctgtaga

SEQ ID NO: 133389 - DNA, 17 bp, Arabidopsis thaliana
tagtcgcatcctgtagg

SEQ ID NO: 133390 - DNA, 17 bp, Arabidopsis thaliana
tagtcgcatcctgtagt

SEQ ID NO: 133391 - DNA, 17 bp, Arabidopsis thaliana
tagtcgcatcctgtata

SEQ ID NO: 133392 - DNA, 17 bp, Arabidopsis thaliana
tagtcgcatcctgtcat

SEQ ID NO: 133393 - DNA, 17 bp, Arabidopsis thaliana
tagtcgcatcctgtcca

SEQ ID NO: 133394 - DNA, 17 bp, Arabidopsis thaliana
tagtcgcatcctgtcga

SEQ ID NO: 133395 - DNA, 17 bp, Arabidopsis thaliana
tagtcgcatcctgtgat

SEQ ID NO: 133396 - DNA, 17 bp, Arabidopsis thaliana
tagtcgcatcctgtgga

SEQ ID NO: 133397 - DNA, 17 bp, Arabidopsis thaliana
tagtcgcatctgtagga

SEQ ID NO: 133398 - DNA, 17 bp, Arabidopsis thaliana
tagtcgcatcttgtaga

SEQ ID NO: 133399 - DNA, 17 bp, Arabidopsis thaliana
tagtcgcattctgtaga

SEQ ID NO: 133400 - DNA, 17 bp, Arabidopsis thaliana
tagtcgccaatcacaag

SEQ ID NO: 133401 - DNA, 17 bp, Arabidopsis thaliana
tagtcgccctgagatgg

SEQ ID NO: 133402 - DNA, 17 bp, Arabidopsis thaliana
tagtcgcctcctgtaga

SEQ ID NO: 133403 - DNA, 17 bp, Arabidopsis thaliana
tagtcgcctgtagatgg

SEQ ID NO: 133404 - DNA, 17 bp, Arabidopsis thaliana
tagtcgcgcctgtagat

SEQ ID NO: 133405 - DNA, 17 bp, Arabidopsis thaliana
tagtcgcgtcctgtaga

SEQ ID NO: 133406 - DNA, 17 bp, Arabidopsis thaliana
tagtcgcgtcctgtagg

SEQ ID NO: 133407 - DNA, 17 bp, Arabidopsis thaliana
tagtcgcttttgatcgc

SEQ ID NO: 133408 - DNA, 17 bp, Arabidopsis thaliana
tagtcgtgtcctgtaga

SEQ ID NO: 133409 - DNA, 17 bp, Arabidopsis thaliana
tagtctaagttatggaa

SEQ ID NO: 133410 - DNA, 17 bp, Arabidopsis thaliana
tagtctattgcgtgatc

SEQ ID NO: 133411 - DNA, 17 bp, Arabidopsis thaliana
tagtctcagaacgcctt

SEQ ID NO: 133412 - DNA, 17 bp, Arabidopsis thaliana
tagtctcatcctgtaga

SEQ ID NO: 133413 - DNA, 17 bp, Arabidopsis thaliana
tagtctcgtccacggct

SEQ ID NO: 133414 - DNA, 17 bp, Arabidopsis thaliana
tagtctctcggacgtag

SEQ ID NO: 133415 - DNA, 17 bp, Arabidopsis thaliana
tagtctctcttgcgatt

SEQ ID NO: 133416 - DNA, 17 bp, Arabidopsis thaliana
tagtctgaccaggagta

SEQ ID NO: 133417 - DNA, 17 bp, Arabidopsis thaliana
tagtctgcggatcgatc

SEQ ID NO: 133418 - DNA, 17 bp, Arabidopsis thaliana
tagtctggagaagcgtc

SEQ ID NO: 133419 - DNA, 17 bp, Arabidopsis thaliana
tagtctggtatctcggc

SEQ ID NO: 133420 - DNA, 17 bp, Arabidopsis thaliana
tagtctggtgtcctagg

SEQ ID NO: 133421 - DNA, 17 bp, Arabidopsis thaliana
tagtctgtagtccaacg

SEQ ID NO: 133422 - DNA, 17 bp, Arabidopsis thaliana
tagtcttctgaaacagc

SEQ ID NO: 133423 - DNA, 17 bp, Arabidopsis thaliana
tagtctttcttggaacg

SEQ ID NO: 133424 - DNA, 17 bp, Arabidopsis thaliana
tagtctttggaccgact

SEQ ID NO: 133425 - DNA, 17 bp, Arabidopsis thaliana
tagtgagaccggttttg

SEQ ID NO: 133426 - DNA, 17 bp, Arabidopsis thaliana
tagtgcagtctggccga

SEQ ID NO: 133427 - DNA, 17 bp, Arabidopsis thaliana
tagtgccacgtcagcga

SEQ ID NO: 133428 - DNA, 17 bp, Arabidopsis thaliana
tagtgccgtgactccaa

SEQ ID NO: 133429 - DNA, 17 bp, Arabidopsis thaliana
tagtgctctcagaattg

SEQ ID NO: 133430 - DNA, 17 bp, Arabidopsis thaliana
tagtgctggaatgaccg

SEQ ID NO: 133431 - DNA, 17 bp, Arabidopsis thaliana
tagtgcttacataattt

SEQ ID NO: 133432 - DNA, 17 bp, Arabidopsis thaliana
tagtggcctaccatggt

SEQ ID NO: 133433 - DNA, 17 bp, Arabidopsis thaliana
tagtgtcgcagaggacg

SEQ ID NO: 133434 - DNA, 17 bp, Arabidopsis thaliana
tagtgtgagctgacgtg

SEQ ID NO: 133435 - DNA, 17 bp, Arabidopsis thaliana
tagtgtgcactgcgttt

SEQ ID NO: 133436 - DNA, 17 bp, Arabidopsis thaliana
tagtgtgcattggtcgg

SEQ ID NO: 133437 - DNA, 17 bp, Arabidopsis thaliana
tagtgttaattgagttg

SEQ ID NO: 133438 - DNA, 17 bp, Arabidopsis thaliana
tagtgttgaccggggtt

SEQ ID NO: 133439 - DNA, 17 bp, Arabidopsis thaliana
tagtgttgactggcggg

SEQ ID NO: 133440 - DNA, 17 bp, Arabidopsis thaliana
tagtgtttatgcggatt

SEQ ID NO: 133441 - DNA, 17 bp, Arabidopsis thaliana
tagttaaaatcgggatc

SEQ ID NO: 133442 - DNA, 17 bp, Arabidopsis thaliana
tagttaagccacaatcc

SEQ ID NO: 133443 - DNA, 17 bp, Arabidopsis thaliana
tagttaaggtccatggt

SEQ ID NO: 133444 - DNA, 17 bp, Arabidopsis thaliana
tagttactcgaccgcgg

SEQ ID NO: 133445 - DNA, 17 bp, Arabidopsis thaliana
tagttagaccgcctgca

SEQ ID NO: 133446 - DNA, 17 bp, Arabidopsis thaliana
tagttagcaagctgagg

SEQ ID NO: 133447 - DNA, 17 bp, Arabidopsis thaliana
tagttagcaggctgagg

SEQ ID NO: 133448 - DNA, 17 bp, Arabidopsis thaliana
tagttagctaacccatc

SEQ ID NO: 133449 - DNA, 17 bp, Arabidopsis thaliana
tagttagtttcatcgat

SEQ ID NO: 133450 - DNA, 17 bp, Arabidopsis thaliana
tagttatggctgatggg

SEQ ID NO: 133451 - DNA, 17 bp, Arabidopsis thaliana
tagttcaactagtttcg

SEQ ID NO: 133452 - DNA, 17 bp, Arabidopsis thaliana
tagttcaccagatggga

SEQ ID NO: 133453 - DNA, 17 bp, Arabidopsis thaliana
tagttcacggccggctt

SEQ ID NO: 133454 - DNA, 17 bp, Arabidopsis thaliana
tagttcatcgaatgcgc

SEQ ID NO: 133455 - DNA, 17 bp, Arabidopsis thaliana
tagttccggagagcgaa

SEQ ID NO: 133456 - DNA, 17 bp, Arabidopsis thaliana
tagttcctgagctagat

SEQ ID NO: 133457 - DNA, 17 bp, Arabidopsis thaliana
tagttcggtcctgcgtg

SEQ ID NO: 133458 - DNA, 17 bp, Arabidopsis thaliana
tagttcgttcctgcgtg

SEQ ID NO: 133459 - DNA, 17 bp, Arabidopsis thaliana
tagttctcgtgatgcat

SEQ ID NO: 133460 - DNA, 17 bp, Arabidopsis thaliana
tagttctcgtggatgca

SEQ ID NO: 133461 - DNA, 17 bp, Arabidopsis thaliana
tagttctcgtgggaaaa

SEQ ID NO: 133462 - DNA, 17 bp, Arabidopsis thaliana
tagttgaaccacttggc

SEQ ID NO: 133463 - DNA, 17 bp, Arabidopsis thaliana
tagttgaaccttgggat

SEQ ID NO: 133464 - DNA, 17 bp, Arabidopsis thaliana
tagttgaccaagattca

SEQ ID NO: 133465 - DNA, 17 bp, Arabidopsis thaliana
tagttgaccggatggtt

SEQ ID NO: 133466 - DNA, 17 bp, Arabidopsis thaliana
tagttgacttaacgaca

SEQ ID NO: 133467 - DNA, 17 bp, Arabidopsis thaliana
tagttgattcaggctat

SEQ ID NO: 133468 - DNA, 17 bp, Arabidopsis thaliana
tagttgcagctgcggta

SEQ ID NO: 133469 - DNA, 17 bp, Arabidopsis thaliana
tagttgcatctacattt

SEQ ID NO: 133470 - DNA, 17 bp, Arabidopsis thaliana
tagttgcgaggatttgc

SEQ ID NO: 133471 - DNA, 17 bp, Arabidopsis thaliana
tagttgcggttgcggca

SEQ ID NO: 133472 - DNA, 17 bp, Arabidopsis thaliana
tagttggctaacccgtc

SEQ ID NO: 133473 - DNA, 17 bp, Arabidopsis thaliana
tagttggtggagcgatt

SEQ ID NO: 133474 - DNA, 17 bp, Arabidopsis thaliana
tagttggtggagcggtt

SEQ ID NO: 133475 - DNA, 17 bp, Arabidopsis thaliana
tagttgtccattgatga

SEQ ID NO: 133476 - DNA, 17 bp, Arabidopsis thaliana
tagttgtggagcgattt

SEQ ID NO: 133477 - DNA, 17 bp, Arabidopsis thaliana
tagttgtgtttgccgct

SEQ ID NO: 133478 - DNA, 17 bp, Arabidopsis thaliana
tagttgttgtggtccta

SEQ ID NO: 133479 - DNA, 17 bp, Arabidopsis thaliana
tagtttaaagacgattt

SEQ ID NO: 133480 - DNA, 17 bp, Arabidopsis thaliana
tagtttacatgcaaaag

SEQ ID NO: 133481 - DNA, 17 bp, Arabidopsis thaliana
tagtttacgcgaccgcg

SEQ ID NO: 133482 - DNA, 17 bp, Arabidopsis thaliana
tagtttatacttggtcc

SEQ ID NO: 133483 - DNA, 17 bp, Arabidopsis thaliana
tagtttcacagggaaaa

SEQ ID NO: 133484 - DNA, 17 bp, Arabidopsis thaliana
tagtttccaaccggttt

SEQ ID NO: 133485 - DNA, 17 bp, Arabidopsis thaliana
tagtttccgcctgggta

SEQ ID NO: 133486 - DNA, 17 bp, Arabidopsis thaliana
tagtttccgtctgggta

SEQ ID NO: 133487 - DNA, 17 bp, Arabidopsis thaliana
tagtttccttcttttgg

SEQ ID NO: 133488 - DNA, 17 bp, Arabidopsis thaliana
tagtttcgcaactttgc

SEQ ID NO: 133489 - DNA, 17 bp, Arabidopsis thaliana
tagtttcgtcccaagca

SEQ ID NO: 133490 - DNA, 17 bp, Arabidopsis thaliana
tagtttcgttccaagcg

SEQ ID NO: 133491 - DNA, 17 bp, Arabidopsis thaliana
tagtttctccgtcccgt

SEQ ID NO: 133492 - DNA, 17 bp, Arabidopsis thaliana
tagtttctctgccttgt

SEQ ID NO: 133493 - DNA, 17 bp, Arabidopsis thaliana
tagtttctcttgcgatt

SEQ ID NO: 133494 - DNA, 17 bp, Arabidopsis thaliana
tagtttcttaagcgaga

SEQ ID NO: 133495 - DNA, 17 bp, Arabidopsis thaliana
tagtttgacgggatcta

SEQ ID NO: 133496 - DNA, 17 bp, Arabidopsis thaliana
tagtttgactgaattgg

SEQ ID NO: 133497 - DNA, 17 bp, Arabidopsis thaliana
tagtttgaggctcttgg

SEQ ID NO: 133498 - DNA, 17 bp, Arabidopsis thaliana
tagtttgcagttagtcc

SEQ ID NO: 133499 - DNA, 17 bp, Arabidopsis thaliana
tagtttgcggagaagct

SEQ ID NO: 133500 - DNA, 17 bp, Arabidopsis thaliana
tagtttgcggataagct

SEQ ID NO: 133501 - DNA, 17 bp, Arabidopsis thaliana
tagtttgctaactcatc

SEQ ID NO: 133502 - DNA, 17 bp, Arabidopsis thaliana
tagtttgggaattgtga

SEQ ID NO: 133503 - DNA, 17 bp, Arabidopsis thaliana
tagtttgggtgcatgaa

SEQ ID NO: 133504 - DNA, 17 bp, Arabidopsis thaliana
tagtttgtccgcttggg

SEQ ID NO: 133505 - DNA, 17 bp, Arabidopsis thaliana
tagtttgttcgtcgctc

SEQ ID NO: 133506 - DNA, 17 bp, Arabidopsis thaliana
tagttttaccctactga

SEQ ID NO: 133507 - DNA, 17 bp, Arabidopsis thaliana
tagttttacgttgggca

SEQ ID NO: 133508 - DNA, 17 bp, Arabidopsis thaliana
tagttttaggatccgca

SEQ ID NO: 133509 - DNA, 17 bp, Arabidopsis thaliana
tagttttctcctgctgc

SEQ ID NO: 133510 - DNA, 17 bp, Arabidopsis thaliana
tagttttctcgcaagac

SEQ ID NO: 133511 - DNA, 17 bp, Arabidopsis thaliana
tagttttctggactggg

SEQ ID NO: 133512 - DNA, 17 bp, Arabidopsis thaliana
tagttttctttttttcc

SEQ ID NO: 133513 - DNA, 17 bp, Arabidopsis thaliana
tagttttgaagttatta

SEQ ID NO: 133514 - DNA, 17 bp, Arabidopsis thaliana
tagttttgtaggtatag

SEQ ID NO: 133515 - DNA, 17 bp, Arabidopsis thaliana
tagtttttgcttctgtt

SEQ ID NO: 133516 - DNA, 17 bp, Arabidopsis thaliana
tagttttttttttgttg

SEQ ID NO: 133517 - DNA, 17 bp, Arabidopsis thaliana
tataaaacaacccacgg

SEQ ID NO: 133518 - DNA, 17 bp, Arabidopsis thaliana
tataaaatttcgtctcg

SEQ ID NO: 133519 - DNA, 17 bp, Arabidopsis thaliana
tataaactgttgcagat

SEQ ID NO: 133520 - DNA, 17 bp, Arabidopsis thaliana
tataaagtcatgcattt

SEQ ID NO: 133521 - DNA, 17 bp, Arabidopsis thaliana
tataaagtctcggtcca

SEQ ID NO: 133522 - DNA, 17 bp, Arabidopsis thaliana
tataaatgctaagcgaa

SEQ ID NO: 133523 - DNA, 17 bp, Arabidopsis thaliana
tataaattcacggccgg

SEQ ID NO: 133524 - DNA, 17 bp, Arabidopsis thaliana
tataacactttttccga

SEQ ID NO: 133525 - DNA, 17 bp, Arabidopsis thaliana
tataaccggatcttaaa

SEQ ID NO: 133526 - DNA, 17 bp, Arabidopsis thaliana
tataaccggattttgga

SEQ ID NO: 133527 - DNA, 17 bp, Arabidopsis thaliana
tataaccgttcgccagg

SEQ ID NO: 133528 - DNA, 17 bp, Arabidopsis thaliana
tataaccgttcgtcagg

SEQ ID NO: 133529 - DNA, 17 bp, Arabidopsis thaliana
tataacctggcagaaaa

SEQ ID NO: 133530 - DNA, 17 bp, Arabidopsis thaliana
tataactcactagcaga

SEQ ID NO: 133531 - DNA, 17 bp, Arabidopsis thaliana
tataactcgacggatcg

SEQ ID NO: 133532 - DNA, 17 bp, Arabidopsis thaliana
tataactgaacgcctct

SEQ ID NO: 133533 - DNA, 17 bp, Arabidopsis thaliana
tataactgcagttcgct

SEQ ID NO: 133534 - DNA, 17 bp, Arabidopsis thaliana
tataactggttaacgag

SEQ ID NO: 133535 - DNA, 17 bp, Arabidopsis thaliana
tataactgtagttcgct

SEQ ID NO: 133536 - DNA, 17 bp, Arabidopsis thaliana
tataagaagtctagcgc

SEQ ID NO: 133537 - DNA, 17 bp, Arabidopsis thaliana
tataagacgatggtatc

SEQ ID NO: 133538 - DNA, 17 bp, Arabidopsis thaliana
tataagatccggttgcg

SEQ ID NO: 133539 - DNA, 17 bp, Arabidopsis thaliana
tataagatcgggttgcg

SEQ ID NO: 133540 - DNA, 17 bp, Arabidopsis thaliana
tataagcctttcactag

SEQ ID NO: 133541 - DNA, 17 bp, Arabidopsis thaliana
tataaggcccaataagt

SEQ ID NO: 133542 - DNA, 17 bp, Arabidopsis thaliana
tataaggcccatcatct

SEQ ID NO: 133543 - DNA, 17 bp, Arabidopsis thaliana
tataaggcccgatctat

SEQ ID NO: 133544 - DNA, 17 bp, Arabidopsis thaliana
tataaggctcatcatct

SEQ ID NO: 133545 - DNA, 17 bp, Arabidopsis thaliana
tataagtgactacatcg

SEQ ID NO: 133546 - DNA, 17 bp, Arabidopsis thaliana
tataagtgccacgtgtc

SEQ ID NO: 133547 - DNA, 17 bp, Arabidopsis thaliana
tataagttatcgttgaa

SEQ ID NO: 133548 - DNA, 17 bp, Arabidopsis thaliana
tataagttatcgttgac

SEQ ID NO: 133549 - DNA, 17 bp, Arabidopsis thaliana
tataagttcggacgtgt

SEQ ID NO: 133550 - DNA, 17 bp, Arabidopsis thaliana
tataagttggttaggcc

SEQ ID NO: 133551 - DNA, 17 bp, Arabidopsis thaliana
tataatatttgctaatg

SEQ ID NO: 133552 - DNA, 17 bp, Arabidopsis thaliana
tataatcagtttggctc

SEQ ID NO: 133553 - DNA, 17 bp, Arabidopsis thaliana
tataatcagtttggctg

SEQ ID NO: 133554 - DNA, 17 bp, Arabidopsis thaliana
tataatccattgacgtg

SEQ ID NO: 133555 - DNA, 17 bp, Arabidopsis thaliana
tataatccgagctagcg

SEQ ID NO: 133556 - DNA, 17 bp, Arabidopsis thaliana
tataatccgtcccgtga

SEQ ID NO: 133557 - DNA, 17 bp, Arabidopsis thaliana
tataatcctggcgaacg

SEQ ID NO: 133558 - DNA, 17 bp, Arabidopsis thaliana
tataatctttgcaggtc

SEQ ID NO: 133559 - DNA, 17 bp, Arabidopsis thaliana
tataatgtcctaagccg

SEQ ID NO: 133560 - DNA, 17 bp, Arabidopsis thaliana
tataattaccaccgagc

SEQ ID NO: 133561 - DNA, 17 bp, Arabidopsis thaliana
tataattaccaccgagt

SEQ ID NO: 133562 - DNA, 17 bp, Arabidopsis thaliana
tatacaaaagtggacgg

SEQ ID NO: 133563 - DNA, 17 bp, Arabidopsis thaliana
tatacaaagccacgtct

SEQ ID NO: 133564 - DNA, 17 bp, Arabidopsis thaliana
tatacaccgccccgcgc

SEQ ID NO: 133565 - DNA, 17 bp, Arabidopsis thaliana
tatacacgtttgggcca

SEQ ID NO: 133566 - DNA, 17 bp, Arabidopsis thaliana
tatacagacgttaatcg

SEQ ID NO: 133567 - DNA, 17 bp, Arabidopsis thaliana
tatacagactgctctga

SEQ ID NO: 133568 - DNA, 17 bp, Arabidopsis thaliana
tatacagaggttaatcg

SEQ ID NO: 133569 - DNA, 17 bp, Arabidopsis thaliana
tatacagcacgggttat

SEQ ID NO: 133570 - DNA, 17 bp, Arabidopsis thaliana
tatacaggctcacatgc

SEQ ID NO: 133571 - DNA, 17 bp, Arabidopsis thaliana
tatacagggccggtcct

SEQ ID NO: 133572 - DNA, 17 bp, Arabidopsis thaliana
tatacatcaacttcgca

SEQ ID NO: 133573 - DNA, 17 bp, Arabidopsis thaliana
tatacatcaacttcgta

SEQ ID NO: 133574 - DNA, 17 bp, Arabidopsis thaliana
tatacatgacaggagct

SEQ ID NO: 133575 - DNA, 17 bp, Arabidopsis thaliana
tatacatgcggttagct

SEQ ID NO: 133576 - DNA, 17 bp, Arabidopsis thaliana
tatacatgtcgcagatc

SEQ ID NO: 133577 - DNA, 17 bp, Arabidopsis thaliana
tatacatttttgcagcc

SEQ ID NO: 133578 - DNA, 17 bp, Arabidopsis thaliana
tataccaaaccgctttt

SEQ ID NO: 133579 - DNA, 17 bp, Arabidopsis thaliana
tataccacgaatccatg

SEQ ID NO: 133580 - DNA, 17 bp, Arabidopsis thaliana
tataccatcttggaaat

SEQ ID NO: 133581 - DNA, 17 bp, Arabidopsis thaliana
tataccatgtggcttgg

SEQ ID NO: 133582 - DNA, 17 bp, Arabidopsis thaliana
tatacccggccgtcggg

SEQ ID NO: 133583 - DNA, 17 bp, Arabidopsis thaliana
tataccgcggggctaag

SEQ ID NO: 133584 - DNA, 17 bp, Arabidopsis thaliana
tataccgcggggctagg

SEQ ID NO: 133585 - DNA, 17 bp, Arabidopsis thaliana
tataccgctttgtccgc

SEQ ID NO: 133586 - DNA, 17 bp, Arabidopsis thaliana
tataccgctttgttcac

SEQ ID NO: 133587 - DNA, 17 bp, Arabidopsis thaliana
tataccggctgcaaatg

SEQ ID NO: 133588 - DNA, 17 bp, Arabidopsis thaliana
tataccgtgagcccaaa

SEQ ID NO: 133589 - DNA, 17 bp, Arabidopsis thaliana
tataccgtgaggccaaa

SEQ ID NO: 133590 - DNA, 17 bp, Arabidopsis thaliana
tatacctgcttggtgtc

SEQ ID NO: 133591 - DNA, 17 bp, Arabidopsis thaliana
tatacctggtgggcagc

SEQ ID NO: 133592 - DNA, 17 bp, Arabidopsis thaliana
tataccttagctcagtt

SEQ ID NO: 133593 - DNA, 17 bp, Arabidopsis thaliana
tatacgacctccaagtt

SEQ ID NO: 133594 - DNA, 17 bp, Arabidopsis thaliana
tatacgactcgcagttt

SEQ ID NO: 133595 - DNA, 17 bp, Arabidopsis thaliana
tatacgagtttggcagg

SEQ ID NO: 133596 - DNA, 17 bp, Arabidopsis thaliana
tatacgatctccaagtt

SEQ ID NO: 133597 - DNA, 17 bp, Arabidopsis thaliana
tatacgccggaaagtcg

SEQ ID NO: 133598 - DNA, 17 bp, Arabidopsis thaliana
tatacgcggattacggt

SEQ ID NO: 133599 - DNA, 17 bp, Arabidopsis thaliana
tatacggacttcgtcta

SEQ ID NO: 133600 - DNA, 17 bp, Arabidopsis thaliana
tatacgggagagtttgt

SEQ ID NO: 133601 - DNA, 17 bp, Arabidopsis thaliana
tatacgggcaaatggct

SEQ ID NO: 133602 - DNA, 17 bp, Arabidopsis thaliana
tatacggtatgccagct

SEQ ID NO: 133603 - DNA, 17 bp, Arabidopsis thaliana
tatacgtccataacttc

SEQ ID NO: 133604 - DNA, 17 bp, Arabidopsis thaliana
tatactagataaggtcc

SEQ ID NO: 133605 - DNA, 17 bp, Arabidopsis thaliana
tatactaggaggtcagt

SEQ ID NO: 133606 - DNA, 17 bp, Arabidopsis thaliana
tatactaggattagacc

SEQ ID NO: 133607 - DNA, 17 bp, Arabidopsis thaliana
tatactatctgaaccgc

SEQ ID NO: 133608 - DNA, 17 bp, Arabidopsis thaliana
tatactatctgcggcgg

SEQ ID NO: 133609 - DNA, 17 bp, Arabidopsis thaliana
tatactctgtcatccgc

SEQ ID NO: 133610 - DNA, 17 bp, Arabidopsis thaliana
tatactgagtatgagcc

SEQ ID NO: 133611 - DNA, 17 bp, Arabidopsis thaliana
tatacttgtcggattgt

SEQ ID NO: 133612 - DNA, 17 bp, Arabidopsis thaliana
tatactttagaccgtga

SEQ ID NO: 133613 - DNA, 17 bp, Arabidopsis thaliana
tatactttgggctctat

SEQ ID NO: 133614 - DNA, 17 bp, Arabidopsis thaliana
tatagaaaaaactgttg

SEQ ID NO: 133615 - DNA, 17 bp, Arabidopsis thaliana
tatagaacttttcgtgc

SEQ ID NO: 133616 - DNA, 17 bp, Arabidopsis thaliana
tatagaagatgtgtcag

SEQ ID NO: 133617 - DNA, 17 bp, Arabidopsis thaliana
tatagaagctagtgcga

SEQ ID NO: 133618 - DNA, 17 bp, Arabidopsis thaliana
tatagaagtgcggtgcg

SEQ ID NO: 133619 - DNA, 17 bp, Arabidopsis thaliana
tatagacaagtcgcgta

SEQ ID NO: 133620 - DNA, 17 bp, Arabidopsis thaliana
tatagacacgagtttac

SEQ ID NO: 133621 - DNA, 17 bp, Arabidopsis thaliana
tatagacagatcggaga

SEQ ID NO: 133622 - DNA, 17 bp, Arabidopsis thaliana
tatagacccgggttcgt

SEQ ID NO: 133623 - DNA, 17 bp, Arabidopsis thaliana
tatagaccctatcggct

SEQ ID NO: 133624 - DNA, 17 bp, Arabidopsis thaliana
tatagacctgtccaagc

SEQ ID NO: 133625 - DNA, 17 bp, Arabidopsis thaliana
tatagacgagatcgtgc

SEQ ID NO: 133626 - DNA, 17 bp, Arabidopsis thaliana
tatagacgagatttcca

SEQ ID NO: 133627 - DNA, 17 bp, Arabidopsis thaliana
tatagagaaccaccatg

SEQ ID NO: 133628 - DNA, 17 bp, Arabidopsis thaliana
tatagagagagttggcc

SEQ ID NO: 133629 - DNA, 17 bp, Arabidopsis thaliana
tatagagataatcgcag

SEQ ID NO: 133630 - DNA, 17 bp, Arabidopsis thaliana
tatagagctgtcaattg

SEQ ID NO: 133631 - DNA, 17 bp, Arabidopsis thaliana
tatagaggttgtatcct

SEQ ID NO: 133632 - DNA, 17 bp, Arabidopsis thaliana
tatagatcaccaatcgg

SEQ ID NO: 133633 - DNA, 17 bp, Arabidopsis thaliana
tatagatcgaggtcata

SEQ ID NO: 133634 - DNA, 17 bp, Arabidopsis thaliana
tatagatgaggcggagt

SEQ ID NO: 133635 - DNA, 17 bp, Arabidopsis thaliana
tatagattccctgtcgt

SEQ ID NO: 133636 - DNA, 17 bp, Arabidopsis thaliana
tatagattggaccgttg

SEQ ID NO: 133637 - DNA, 17 bp, Arabidopsis thaliana
tatagcaatttgcgagg

SEQ ID NO: 133638 - DNA, 17 bp, Arabidopsis thaliana
tatagccaacacaggta

SEQ ID NO: 133639 - DNA, 17 bp, Arabidopsis thaliana
tatagccattcgccagg

SEQ ID NO: 133640 - DNA, 17 bp, Arabidopsis thaliana
tatagccgcttgccagg

SEQ ID NO: 133641 - DNA, 17 bp, Arabidopsis thaliana
tatagccgttcacctag

SEQ ID NO: 133642 - DNA, 17 bp, Arabidopsis thaliana
tatagccgttcctcagg

SEQ ID NO: 133643 - DNA, 17 bp, Arabidopsis thaliana
tatagccgttcgccaag

SEQ ID NO: 133644 - DNA, 17 bp, Arabidopsis thaliana
tatagccgttcgccagg

SEQ ID NO: 133645 - DNA, 17 bp, Arabidopsis thaliana
tatagccgttcgccagt

SEQ ID NO: 133646 - DNA, 17 bp, Arabidopsis thaliana
tatagccgttcgtcaag

SEQ ID NO: 133647 - DNA, 17 bp, Arabidopsis thaliana
tatagccgtttgttagg

SEQ ID NO: 133648 - DNA, 17 bp, Arabidopsis thaliana
tatagcgaccccaggtc

SEQ ID NO: 133649 - DNA, 17 bp, Arabidopsis thaliana
tatagcgatggctatag

SEQ ID NO: 133650 - DNA, 17 bp, Arabidopsis thaliana
tatagcgcgggtgatca

SEQ ID NO: 133651 - DNA, 17 bp, Arabidopsis thaliana
tatagcggctggacatg

SEQ ID NO: 133652 - DNA, 17 bp, Arabidopsis thaliana
tatagcgggacggattt

SEQ ID NO: 133653 - DNA, 17 bp, Arabidopsis thaliana
tatagcggtccaagcag

SEQ ID NO: 133654 - DNA, 17 bp, Arabidopsis thaliana
tataggactccgctggc

SEQ ID NO: 133655 - DNA, 17 bp, Arabidopsis thaliana
tataggaggttcgtcaa

SEQ ID NO: 133656 - DNA, 17 bp, Arabidopsis thaliana
tataggccaagacggca

SEQ ID NO: 133657 - DNA, 17 bp, Arabidopsis thaliana
tataggctttcatcgtt

SEQ ID NO: 133658 - DNA, 17 bp, Arabidopsis thaliana
tataggtcagggagtga

SEQ ID NO: 133659 - DNA, 17 bp, Arabidopsis thaliana
tataggtgaaaccctag

SEQ ID NO: 133660 - DNA, 17 bp, Arabidopsis thaliana
tataggttcaaatccta

SEQ ID NO: 133661 - DNA, 17 bp, Arabidopsis thaliana
tataggttttgagatcc

SEQ ID NO: 133662 - DNA, 17 bp, Arabidopsis thaliana
tatagtactcacgtttc

SEQ ID NO: 133663 - DNA, 17 bp, Arabidopsis thaliana
tatagtaggctgctcgc

SEQ ID NO: 133664 - DNA, 17 bp, Arabidopsis thaliana
tatagtccacagtggtc

SEQ ID NO: 133665 - DNA, 17 bp, Arabidopsis thaliana
tatagtccgcagtggtc

SEQ ID NO: 133666 - DNA, 17 bp, Arabidopsis thaliana
tatagtcgcttgccagg

SEQ ID NO: 133667 - DNA, 17 bp, Arabidopsis thaliana
tatagtcgttcgccaag

SEQ ID NO: 133668 - DNA, 17 bp, Arabidopsis thaliana
tatagtcgttcgccagg

SEQ ID NO: 133669 - DNA, 17 bp, Arabidopsis thaliana
tatagtgcggtacagtt

SEQ ID NO: 133670 - DNA, 17 bp, Arabidopsis thaliana
tatagtggaacgggcat

SEQ ID NO: 133671 - DNA, 17 bp, Arabidopsis thaliana
tatagtgtttcctcttg

SEQ ID NO: 133672 - DNA, 17 bp, Arabidopsis thaliana
tatagtgttttctctta

SEQ ID NO: 133673 - DNA, 17 bp, Arabidopsis thaliana
tatagttaccaccgagc

SEQ ID NO: 133674 - DNA, 17 bp, Arabidopsis thaliana
tatagttagtttgccgc

SEQ ID NO: 133675 - DNA, 17 bp, Arabidopsis thaliana
tatagttgaccttggct

SEQ ID NO: 133676 - DNA, 17 bp, Arabidopsis thaliana
tatagttggcatgtgtg

SEQ ID NO: 133677 - DNA, 17 bp, Arabidopsis thaliana
tatagttggtgatcgca

SEQ ID NO: 133678 - DNA, 17 bp, Arabidopsis thaliana
tatagttgttcgccaag

SEQ ID NO: 133679 - DNA, 17 bp, Arabidopsis thaliana
tatagtttgcagtggtc

SEQ ID NO: 133680 - DNA, 17 bp, Arabidopsis thaliana
tatagtttgcatgtgtg

SEQ ID NO: 133681 - DNA, 17 bp, Arabidopsis thaliana
tatagttttgcaggagt

SEQ ID NO: 133682 - DNA, 17 bp, Arabidopsis thaliana
tatataggcctgaacct

SEQ ID NO: 133683 - DNA, 17 bp, Arabidopsis thaliana
tatatcaacttcacatg

SEQ ID NO: 133684 - DNA, 17 bp, Arabidopsis thaliana
tatatcactgttgcggt

SEQ ID NO: 133685 - DNA, 17 bp, Arabidopsis thaliana
tatatcagtgaacggaa

SEQ ID NO: 133686 - DNA, 17 bp, Arabidopsis thaliana
tatatcagtgtaggcgc

SEQ ID NO: 133687 - DNA, 17 bp, Arabidopsis thaliana
tatatcatctcgtccga

SEQ ID NO: 133688 - DNA, 17 bp, Arabidopsis thaliana
tatatccagcgacttcc

SEQ ID NO: 133689 - DNA, 17 bp, Arabidopsis thaliana
tatatccgacttcgtcg

SEQ ID NO: 133690 - DNA, 17 bp, Arabidopsis thaliana
tatatccgcatttgcgc

SEQ ID NO: 133691 - DNA, 17 bp, Arabidopsis thaliana
tatatccgtctatgcta

SEQ ID NO: 133692 - DNA, 17 bp, Arabidopsis thaliana
tatatccgttcgccagg

SEQ ID NO: 133693 - DNA, 17 bp, Arabidopsis thaliana
tatatcctatcggctga

SEQ ID NO: 133694 - DNA, 17 bp, Arabidopsis thaliana
tatatcgacccgactct

SEQ ID NO: 133695 - DNA, 17 bp, Arabidopsis thaliana
tatatcgattgatggtg

SEQ ID NO: 133696 - DNA, 17 bp, Arabidopsis thaliana
tatatcgcgggtgactt

SEQ ID NO: 133697 - DNA, 17 bp, Arabidopsis thaliana
tatatctactgctttca

SEQ ID NO: 133698 - DNA, 17 bp, Arabidopsis thaliana
tatatctgccagaatgg

SEQ ID NO: 133699 - DNA, 17 bp, Arabidopsis thaliana
tatatctgccatctttg

SEQ ID NO: 133700 - DNA, 17 bp, Arabidopsis thaliana
tatatctgctctgtgcc

SEQ ID NO: 133701 - DNA, 17 bp, Arabidopsis thaliana
tatatctgctctttgcc

SEQ ID NO: 133702 - DNA, 17 bp, Arabidopsis thaliana
tatatgaaacttccgaa

SEQ ID NO: 133703 - DNA, 17 bp, Arabidopsis thaliana
tatatgacccgaatgca

SEQ ID NO: 133704 - DNA, 17 bp, Arabidopsis thaliana
tatatgaccggaatgca

SEQ ID NO: 133705 - DNA, 17 bp, Arabidopsis thaliana
tatatgagcaggttcac

SEQ ID NO: 133706 - DNA, 17 bp, Arabidopsis thaliana
tatatgcagatcggaca

SEQ ID NO: 133707 - DNA, 17 bp, Arabidopsis thaliana
tatatgccaaatccagt

SEQ ID NO: 133708 - DNA, 17 bp, Arabidopsis thaliana
tatatgccgttaaattt

SEQ ID NO: 133709 - DNA, 17 bp, Arabidopsis thaliana
tatatgcggccaaatag

SEQ ID NO: 133710 - DNA, 17 bp, Arabidopsis thaliana
tatatgcgggtcaggct

SEQ ID NO: 133711 - DNA, 17 bp, Arabidopsis thaliana
tatatgcgggtcaggtt

SEQ ID NO: 133712 - DNA, 17 bp, Arabidopsis thaliana
tatatgcgtgttcaatt

SEQ ID NO: 133713 - DNA, 17 bp, Arabidopsis thaliana
tatatgctgtggtttca

SEQ ID NO: 133714 - DNA, 17 bp, Arabidopsis thaliana
tatatgctttcggggtg

SEQ ID NO: 133715 - DNA, 17 bp, Arabidopsis thaliana
tatatggtgtgacgggt

SEQ ID NO: 133716 - DNA, 17 bp, Arabidopsis thaliana
tatatggttctgagacc

SEQ ID NO: 133717 - DNA, 17 bp, Arabidopsis thaliana
tatatggttgattgcgc

SEQ ID NO: 133718 - DNA, 17 bp, Arabidopsis thaliana
tatatgtacagttggcc

SEQ ID NO: 133719 - DNA, 17 bp, Arabidopsis thaliana
tatatgtgtggccagag

SEQ ID NO: 133720 - DNA, 17 bp, Arabidopsis thaliana
tatattcaccaggtctg

SEQ ID NO: 133721 - DNA, 17 bp, Arabidopsis thaliana
tatattctctggcgttg

SEQ ID NO: 133722 - DNA, 17 bp, Arabidopsis thaliana
tatattgaggcttcgaa

SEQ ID NO: 133723 - DNA, 17 bp, Arabidopsis thaliana
tatattggaccgtgatt

SEQ ID NO: 133724 - DNA, 17 bp, Arabidopsis thaliana
tatattggcgtctctgg

SEQ ID NO: 133725 - DNA, 17 bp, Arabidopsis thaliana
tatattggctgagtgat

SEQ ID NO: 133726 - DNA, 17 bp, Arabidopsis thaliana
tatattgtcgttggttg

SEQ ID NO: 133727 - DNA, 17 bp, Arabidopsis thaliana
tatatttagaccagggt

SEQ ID NO: 133728 - DNA, 17 bp, Arabidopsis thaliana
tatatttcctggtgttt

SEQ ID NO: 133729 - DNA, 17 bp, Arabidopsis thaliana
tatatttgacacgtggc

SEQ ID NO: 133730 - DNA, 17 bp, Arabidopsis thaliana
tatatttggggctactt

SEQ ID NO: 133731 - DNA, 17 bp, Arabidopsis thaliana
tatattttcgttggatg

SEQ ID NO: 133732 - DNA, 17 bp, Arabidopsis thaliana
tatattttctagagacg

SEQ ID NO: 133733 - DNA, 17 bp, Arabidopsis thaliana
tatatttttcccaattt

SEQ ID NO: 133734 - DNA, 17 bp, Arabidopsis thaliana
tatcaaaaagtgcctaa

SEQ ID NO: 133735 - DNA, 17 bp, Arabidopsis thaliana
tatcaaaactgaccgga

SEQ ID NO: 133736 - DNA, 17 bp, Arabidopsis thaliana
tatcaaacgttttgaac

SEQ ID NO: 133737 - DNA, 17 bp, Arabidopsis thaliana
tatcaaagttctgttga

SEQ ID NO: 133738 - DNA, 17 bp, Arabidopsis thaliana
tatcaaatctttggctg

SEQ ID NO: 133739 - DNA, 17 bp, Arabidopsis thaliana
tatcaaatgaggccact

SEQ ID NO: 133740 - DNA, 17 bp, Arabidopsis thaliana
tatcaaattcatcaagg

SEQ ID NO: 133741 - DNA, 17 bp, Arabidopsis thaliana
tatcaaattcttgatat

SEQ ID NO: 133742 - DNA, 17 bp, Arabidopsis thaliana
tatcaacgatttaggcc

SEQ ID NO: 133743 - DNA, 17 bp, Arabidopsis thaliana
tatcaacggtggtgatt

SEQ ID NO: 133744 - DNA, 17 bp, Arabidopsis thaliana
tatcaactccgtttgct

SEQ ID NO: 133745 - DNA, 17 bp, Arabidopsis thaliana
tatcaactttcgatggt

SEQ ID NO: 133746 - DNA, 17 bp, Arabidopsis thaliana
tatcaagcagaattggt

SEQ ID NO: 133747 - DNA, 17 bp, Arabidopsis thaliana
tatcaagctgctcatgt

SEQ ID NO: 133748 - DNA, 17 bp, Arabidopsis thaliana
tatcaaggaaattttgc

SEQ ID NO: 133749 - DNA, 17 bp, Arabidopsis thaliana
tatcaagtctcgtgacc

SEQ ID NO: 133750 - DNA, 17 bp, Arabidopsis thaliana
tatcaagtctgtggcgc

SEQ ID NO: 133751 - DNA, 17 bp, Arabidopsis thaliana
tatcaagtgtgcaggag

SEQ ID NO: 133752 - DNA, 17 bp, Arabidopsis thaliana
tatcaatagggttttgg

SEQ ID NO: 133753 - DNA, 17 bp, Arabidopsis thaliana
tatcaatctcaatggag

SEQ ID NO: 133754 - DNA, 17 bp, Arabidopsis thaliana
tatcaatctcagtgtac

SEQ ID NO: 133755 - DNA, 17 bp, Arabidopsis thaliana
tatcaattgttttcgct

SEQ ID NO: 133756 - DNA, 17 bp, Arabidopsis thaliana
tatcaattttttgcctc

SEQ ID NO: 133757 - DNA, 17 bp, Arabidopsis thaliana
tatcacaagacgcgtca

SEQ ID NO: 133758 - DNA, 17 bp, Arabidopsis thaliana
tatcacaatccaatgca

SEQ ID NO: 133759 - DNA, 17 bp, Arabidopsis thaliana
tatcacaattggactgg

SEQ ID NO: 133760 - DNA, 17 bp, Arabidopsis thaliana
tatcacacaaaggtccc

SEQ ID NO: 133761 - DNA, 17 bp, Arabidopsis thaliana
tatcacacccgctggtt

SEQ ID NO: 133762 - DNA, 17 bp, Arabidopsis thaliana
tatcacactatgcggtt

SEQ ID NO: 133763 - DNA, 17 bp, Arabidopsis thaliana
tatcacagcagtgactg

SEQ ID NO: 133764 - DNA, 17 bp, Arabidopsis thaliana
tatcacatcacgccaaa

SEQ ID NO: 133765 - DNA, 17 bp, Arabidopsis thaliana
tatcacatgccaagttt

SEQ ID NO: 133766 - DNA, 17 bp, Arabidopsis thaliana
tatcaccaaatctgact

SEQ ID NO: 133767 - DNA, 17 bp, Arabidopsis thaliana
tatcacccctcgaaggt

SEQ ID NO: 133768 - DNA, 17 bp, Arabidopsis thaliana
tatcacccgccatcttc

SEQ ID NO: 133769 - DNA, 17 bp, Arabidopsis thaliana
tatcaccctctgggaga

SEQ ID NO: 133770 - DNA, 17 bp, Arabidopsis thaliana
tatcaccggtgagtctt

SEQ ID NO: 133771 - DNA, 17 bp, Arabidopsis thaliana
tatcacgactcagatga

SEQ ID NO: 133772 - DNA, 17 bp, Arabidopsis thaliana
tatcacgattaattaac

SEQ ID NO: 133773 - DNA, 17 bp, Arabidopsis thaliana
tatcacgcgatctatgt

SEQ ID NO: 133774 - DNA, 17 bp, Arabidopsis thaliana
tatcacgcggtggatag

SEQ ID NO: 133775 - DNA, 17 bp, Arabidopsis thaliana
tatcacggaatcacgtt

SEQ ID NO: 133776 - DNA, 17 bp, Arabidopsis thaliana
tatcacggccatgcgga

SEQ ID NO: 133777 - DNA, 17 bp, Arabidopsis thaliana
tatcacggcctttgtgg

SEQ ID NO: 133778 - DNA, 17 bp, Arabidopsis thaliana
tatcacgtacatcgtcg

SEQ ID NO: 133779 - DNA, 17 bp, Arabidopsis thaliana
tatcacgtctgcctggg

SEQ ID NO: 133780 - DNA, 17 bp, Arabidopsis thaliana
tatcactgagtagtcga

SEQ ID NO: 133781 - DNA, 17 bp, Arabidopsis thaliana
tatcactgcgtattcag

SEQ ID NO: 133782 - DNA, 17 bp, Arabidopsis thaliana
tatcactggctttgagg

SEQ ID NO: 133783 - DNA, 17 bp, Arabidopsis thaliana
tatcactgggccaacca

SEQ ID NO: 133784 - DNA, 17 bp, Arabidopsis thaliana
tatcactttgcaactcc

SEQ ID NO: 133785 - DNA, 17 bp, Arabidopsis thaliana
tatcacttttgggggtg

SEQ ID NO: 133786 - DNA, 17 bp, Arabidopsis thaliana
tatcagaagacctgcaa

SEQ ID NO: 133787 - DNA, 17 bp, Arabidopsis thaliana
tatcagaaggttctggg

SEQ ID NO: 133788 - DNA, 17 bp, Arabidopsis thaliana
tatcagaatcgccgagg

SEQ ID NO: 133789 - DNA, 17 bp, Arabidopsis thaliana
tatcagacagtttcttc

SEQ ID NO: 133790 - DNA, 17 bp, Arabidopsis thaliana
tatcagaccactctcgc

SEQ ID NO: 133791 - DNA, 17 bp, Arabidopsis thaliana
tatcagactttagccca

SEQ ID NO: 133792 - DNA, 17 bp, Arabidopsis thaliana
tatcagagcccgatccg

SEQ ID NO: 133793 - DNA, 17 bp, Arabidopsis thaliana
tatcagagctcatggtt

SEQ ID NO: 133794 - DNA, 17 bp, Arabidopsis thaliana
tatcagagcttatggtt

SEQ ID NO: 133795 - DNA, 17 bp, Arabidopsis thaliana
tatcagagttagtgaca

SEQ ID NO: 133796 - DNA, 17 bp, Arabidopsis thaliana
tatcagatcacgctaga

SEQ ID NO: 133797 - DNA, 17 bp, Arabidopsis thaliana
tatcagatttcagagtc

SEQ ID NO: 133798 - DNA, 17 bp, Arabidopsis thaliana
tatcagcaacacttgat

SEQ ID NO: 133799 - DNA, 17 bp, Arabidopsis thaliana
tatcagcacgagtccta

SEQ ID NO: 133800 - DNA, 17 bp, Arabidopsis thaliana
tatcagcagattggtag

SEQ ID NO: 133801 - DNA, 17 bp, Arabidopsis thaliana
tatcagcagtgtttggt

SEQ ID NO: 133802 - DNA, 17 bp, Arabidopsis thaliana
tatcagcagttgctcaa

SEQ ID NO: 133803 - DNA, 17 bp, Arabidopsis thaliana
tatcagccagcgaggga

SEQ ID NO: 133804 - DNA, 17 bp, Arabidopsis thaliana
tatcagcctatcaccaa

SEQ ID NO: 133805 - DNA, 17 bp, Arabidopsis thaliana
tatcagctcagaagtgt

SEQ ID NO: 133806 - DNA, 17 bp, Arabidopsis thaliana
tatcagctccagcaggt

SEQ ID NO: 133807 - DNA, 17 bp, Arabidopsis thaliana
tatcagctcggaagtgc

SEQ ID NO: 133808 - DNA, 17 bp, Arabidopsis thaliana
tatcagcttcagttgac

SEQ ID NO: 133809 - DNA, 17 bp, Arabidopsis thaliana
tatcagctttgcgacca

SEQ ID NO: 133810 - DNA, 17 bp, Arabidopsis thaliana
tatcagcttttgtgcct

SEQ ID NO: 133811 - DNA, 17 bp, Arabidopsis thaliana
tatcaggaaaagactct

SEQ ID NO: 133812 - DNA, 17 bp, Arabidopsis thaliana
tatcaggatcgcatccc

SEQ ID NO: 133813 - DNA, 17 bp, Arabidopsis thaliana
tatcaggcggatcaagc

SEQ ID NO: 133814 - DNA, 17 bp, Arabidopsis thaliana
tatcaggtcaaccaggt

SEQ ID NO: 133815 - DNA, 17 bp, Arabidopsis thaliana
tatcaggtccgtttttt

SEQ ID NO: 133816 - DNA, 17 bp, Arabidopsis thaliana
tatcaggtgcagagctt

SEQ ID NO: 133817 - DNA, 17 bp, Arabidopsis thaliana
tatcaggtgcgagagtt

SEQ ID NO: 133818 - DNA, 17 bp, Arabidopsis thaliana
tatcaggttcgggatac

SEQ ID NO: 133819 - DNA, 17 bp, Arabidopsis thaliana
tatcagtccaagaagtt

SEQ ID NO: 133820 - DNA, 17 bp, Arabidopsis thaliana
tatcagttaccctgtgg

SEQ ID NO: 133821 - DNA, 17 bp, Arabidopsis thaliana
tatcagttggtgtatct

SEQ ID NO: 133822 - DNA, 17 bp, Arabidopsis thaliana
tatcagtttcaccagac

SEQ ID NO: 133823 - DNA, 17 bp, Arabidopsis thaliana
tatcagtttcgttttga

SEQ ID NO: 133824 - DNA, 17 bp, Arabidopsis thaliana
tatcagtttggttctgg

SEQ ID NO: 133825 - DNA, 17 bp, Arabidopsis thaliana
tatcataacagttgcag

SEQ ID NO: 133826 - DNA, 17 bp, Arabidopsis thaliana
tatcatatccgccacag

SEQ ID NO: 133827 - DNA, 17 bp, Arabidopsis thaliana
tatcatcaacctcgacc

SEQ ID NO: 133828 - DNA, 17 bp, Arabidopsis thaliana
tatcatcacatcggtgc

SEQ ID NO: 133829 - DNA, 17 bp, Arabidopsis thaliana
tatcatcagagcggtgc

SEQ ID NO: 133830 - DNA, 17 bp, Arabidopsis thaliana
tatcatcattcgcttgg

SEQ ID NO: 133831 - DNA, 17 bp, Arabidopsis thaliana
tatcatcccattcggtc

SEQ ID NO: 133832 - DNA, 17 bp, Arabidopsis thaliana
tatcatccttctggttt

SEQ ID NO: 133833 - DNA, 17 bp, Arabidopsis thaliana
tatcatcgctcccactg

SEQ ID NO: 133834 - DNA, 17 bp, Arabidopsis thaliana
tatcatctacgtggcat

SEQ ID NO: 133835 - DNA, 17 bp, Arabidopsis thaliana
tatcatctccatgtccg

SEQ ID NO: 133836 - DNA, 17 bp, Arabidopsis thaliana
tatcatctcgatgttca

SEQ ID NO: 133837 - DNA, 17 bp, Arabidopsis thaliana
tatcatctgacgtgact

SEQ ID NO: 133838 - DNA, 17 bp, Arabidopsis thaliana
tatcatctgacgtggct

SEQ ID NO: 133839 - DNA, 17 bp, Arabidopsis thaliana
tatcatctgcagggggt

SEQ ID NO: 133840 - DNA, 17 bp, Arabidopsis thaliana
tatcatctggacggcag

SEQ ID NO: 133841 - DNA, 17 bp, Arabidopsis thaliana
tatcatctttggatccg

SEQ ID NO: 133842 - DNA, 17 bp, Arabidopsis thaliana
tatcatgattgcgggtt

SEQ ID NO: 133843 - DNA, 17 bp, Arabidopsis thaliana
tatcatggttgctctgc

SEQ ID NO: 133844 - DNA, 17 bp, Arabidopsis thaliana
tatcattcaatgtgcct

SEQ ID NO: 133845 - DNA, 17 bp, Arabidopsis thaliana
tatcattccggacatct

SEQ ID NO: 133846 - DNA, 17 bp, Arabidopsis thaliana
tatcattcggagcctaa

SEQ ID NO: 133847 - DNA, 17 bp, Arabidopsis thaliana
tatcattggttcaacac

SEQ ID NO: 133848 - DNA, 17 bp, Arabidopsis thaliana
tatcattgtggagcaga

SEQ ID NO: 133849 - DNA, 17 bp, Arabidopsis thaliana
tatcatttgaaccgcac

SEQ ID NO: 133850 - DNA, 17 bp, Arabidopsis thaliana
tatcattttggccactt

SEQ ID NO: 133851 - DNA, 17 bp, Arabidopsis thaliana
tatccaaaaagcagtta

SEQ ID NO: 133852 - DNA, 17 bp, Arabidopsis thaliana
tatccaaaattctgcgg

SEQ ID NO: 133853 - DNA, 17 bp, Arabidopsis thaliana
tatccaaaattggaccc

SEQ ID NO: 133854 - DNA, 17 bp, Arabidopsis thaliana
tatccaaatctggaact

SEQ ID NO: 133855 - DNA, 17 bp, Arabidopsis thaliana
tatccaacgcacactta

SEQ ID NO: 133856 - DNA, 17 bp, Arabidopsis thaliana
tatccaacgtttactat

SEQ ID NO: 133857 - DNA, 17 bp, Arabidopsis thaliana
tatccaagcttgcttgc

SEQ ID NO: 133858 - DNA, 17 bp, Arabidopsis thaliana
tatccaaggatgacttg

SEQ ID NO: 133859 - DNA, 17 bp, Arabidopsis thaliana
tatccaatgctttttct

SEQ ID NO: 133860 - DNA, 17 bp, Arabidopsis thaliana
tatccacagtttttcga

SEQ ID NO: 133861 - DNA, 17 bp, Arabidopsis thaliana
tatccacccgaccggag

SEQ ID NO: 133862 - DNA, 17 bp, Arabidopsis thaliana
tatccacgctgactgat

SEQ ID NO: 133863 - DNA, 17 bp, Arabidopsis thaliana
tatccacggaaaaacgg

SEQ ID NO: 133864 - DNA, 17 bp, Arabidopsis thaliana
tatccagcacgggttat

SEQ ID NO: 133865 - DNA, 17 bp, Arabidopsis thaliana
tatccaggacgatctcc

SEQ ID NO: 133866 - DNA, 17 bp, Arabidopsis thaliana
tatccagtcctttgcga

SEQ ID NO: 133867 - DNA, 17 bp, Arabidopsis thaliana
tatccagttgaatgcaa

SEQ ID NO: 133868 - DNA, 17 bp, Arabidopsis thaliana
tatccatcacagatttg

SEQ ID NO: 133869 - DNA, 17 bp, Arabidopsis thaliana
tatccatcggttactgc

SEQ ID NO: 133870 - DNA, 17 bp, Arabidopsis thaliana
tatccatgggccatgac

SEQ ID NO: 133871 - DNA, 17 bp, Arabidopsis thaliana
tatcccaagctcattca

SEQ ID NO: 133872 - DNA, 17 bp, Arabidopsis thaliana
tatcccacaagattcat

SEQ ID NO: 133873 - DNA, 17 bp, Arabidopsis thaliana
tatcccagccgctgaaa

SEQ ID NO: 133874 - DNA, 17 bp, Arabidopsis thaliana
tatcccattcctcgtgt

SEQ ID NO: 133875 - DNA, 17 bp, Arabidopsis thaliana
tatccccccaggaccga

SEQ ID NO: 133876 - DNA, 17 bp, Arabidopsis thaliana
tatcccgaagcatgcat

SEQ ID NO: 133877 - DNA, 17 bp, Arabidopsis thaliana
tatcccgaagcatgctt

SEQ ID NO: 133878 - DNA, 17 bp, Arabidopsis thaliana
tatcccgatggagccac

SEQ ID NO: 133879 - DNA, 17 bp, Arabidopsis thaliana
tatcccggtagaccaca

SEQ ID NO: 133880 - DNA, 17 bp, Arabidopsis thaliana
tatccctaaatgggcca

SEQ ID NO: 133881 - DNA, 17 bp, Arabidopsis thaliana
tatccctacatagcggg

SEQ ID NO: 133882 - DNA, 17 bp, Arabidopsis thaliana
tatccctacatggcggg

SEQ ID NO: 133883 - DNA, 17 bp, Arabidopsis thaliana
tatccctagattcttgc

SEQ ID NO: 133884 - DNA, 17 bp, Arabidopsis thaliana
tatccctaggtttgcat

SEQ ID NO: 133885 - DNA, 17 bp, Arabidopsis thaliana
tatccctccaggcccga

SEQ ID NO: 133886 - DNA, 17 bp, Arabidopsis thaliana
tatccctcgggattagc

SEQ ID NO: 133887 - DNA, 17 bp, Arabidopsis thaliana
tatccctcgggattggc

SEQ ID NO: 133888 - DNA, 17 bp, Arabidopsis thaliana
tatccctctgatcccat

SEQ ID NO: 133889 - DNA, 17 bp, Arabidopsis thaliana
tatccctttgggtaccg

SEQ ID NO: 133890 - DNA, 17 bp, Arabidopsis thaliana
tatccgaatcgaaccga

SEQ ID NO: 133891 - DNA, 17 bp, Arabidopsis thaliana
tatccgacttcgtcgcc

SEQ ID NO: 133892 - DNA, 17 bp, Arabidopsis thaliana
tatccgagcagattatc

SEQ ID NO: 133893 - DNA, 17 bp, Arabidopsis thaliana
tatccgatttactaacc

SEQ ID NO: 133894 - DNA, 17 bp, Arabidopsis thaliana
tatccgcagttgaaccg

SEQ ID NO: 133895 - DNA, 17 bp, Arabidopsis thaliana
tatccgccactatgcac

SEQ ID NO: 133896 - DNA, 17 bp, Arabidopsis thaliana
tatccgcggacaaaacc

SEQ ID NO: 133897 - DNA, 17 bp, Arabidopsis thaliana
tatccgcggacaaaact

SEQ ID NO: 133898 - DNA, 17 bp, Arabidopsis thaliana
tatccgcggaccaaact

SEQ ID NO: 133899 - DNA, 17 bp, Arabidopsis thaliana
tatccgcggtttctttg

SEQ ID NO: 133900 - DNA, 17 bp, Arabidopsis thaliana
tatccgctgatccagtc

SEQ ID NO: 133901 - DNA, 17 bp, Arabidopsis thaliana
tatccgcttcgatccgt

SEQ ID NO: 133902 - DNA, 17 bp, Arabidopsis thaliana
tatccgcttcgtaccca

SEQ ID NO: 133903 - DNA, 17 bp, Arabidopsis thaliana
tatccgcttcgtgccca

SEQ ID NO: 133904 - DNA, 17 bp, Arabidopsis thaliana
tatccgcttcgtgtcca

SEQ ID NO: 133905 - DNA, 17 bp, Arabidopsis thaliana
tatccgcttgattgcat

SEQ ID NO: 133906 - DNA, 17 bp, Arabidopsis thaliana
tatccgctttgacattt

SEQ ID NO: 133907 - DNA, 17 bp, Arabidopsis thaliana
tatccgctttgacgttt

SEQ ID NO: 133908 - DNA, 17 bp, Arabidopsis thaliana
tatccgcttttacatct

SEQ ID NO: 133909 - DNA, 17 bp, Arabidopsis thaliana
tatccgcttttacattt

SEQ ID NO: 133910 - DNA, 17 bp, Arabidopsis thaliana
tatccggacgagtttcc

SEQ ID NO: 133911 - DNA, 17 bp, Arabidopsis thaliana
tatccggacgagtttgc

SEQ ID NO: 133912 - DNA, 17 bp, Arabidopsis thaliana
tatccgtagaccagatg

SEQ ID NO: 133913 - DNA, 17 bp, Arabidopsis thaliana
tatccgtatgctcagat

SEQ ID NO: 133914 - DNA, 17 bp, Arabidopsis thaliana
tatccgtcgacttggct

SEQ ID NO: 133915 - DNA, 17 bp, Arabidopsis thaliana
tatccgtgttggctaca

SEQ ID NO: 133916 - DNA, 17 bp, Arabidopsis thaliana
tatccgttccgtgtcca

SEQ ID NO: 133917 - DNA, 17 bp, Arabidopsis thaliana
tatccgttccgtgttta

SEQ ID NO: 133918 - DNA, 17 bp, Arabidopsis thaliana
tatccgttgccgagagt

SEQ ID NO: 133919 - DNA, 17 bp, Arabidopsis thaliana
tatcctaactttgctgc

SEQ ID NO: 133920 - DNA, 17 bp, Arabidopsis thaliana
tatcctaatttgtctgc

SEQ ID NO: 133921 - DNA, 17 bp, Arabidopsis thaliana
tatcctacatggcgggt

SEQ ID NO: 133922 - DNA, 17 bp, Arabidopsis thaliana
tatcctacttttgagag

SEQ ID NO: 133923 - DNA, 17 bp, Arabidopsis thaliana
tatcctatcggctgatt

SEQ ID NO: 133924 - DNA, 17 bp, Arabidopsis thaliana
tatcctattgtgttggc

SEQ ID NO: 133925 - DNA, 17 bp, Arabidopsis thaliana
tatcctcctgagcttgg

SEQ ID NO: 133926 - DNA, 17 bp, Arabidopsis thaliana
tatcctcggcggtgtac

SEQ ID NO: 133927 - DNA, 17 bp, Arabidopsis thaliana
tatcctcggcggtgtcc

SEQ ID NO: 133928 - DNA, 17 bp, Arabidopsis thaliana
tatcctctgattggtcg

SEQ ID NO: 133929 - DNA, 17 bp, Arabidopsis thaliana
tatcctctgcagcaacc

SEQ ID NO: 133930 - DNA, 17 bp, Arabidopsis thaliana
tatcctgcagatgacaa

SEQ ID NO: 133931 - DNA, 17 bp, Arabidopsis thaliana
tatcctgcatacgtgcc

SEQ ID NO: 133932 - DNA, 17 bp, Arabidopsis thaliana
tatcctgcttgtagatt

SEQ ID NO: 133933 - DNA, 17 bp, Arabidopsis thaliana
tatcctggtcaggatgg

SEQ ID NO: 133934 - DNA, 17 bp, Arabidopsis thaliana
tatcctggtgcactgat

SEQ ID NO: 133935 - DNA, 17 bp, Arabidopsis thaliana
tatcctgtctgttactc

SEQ ID NO: 133936 - DNA, 17 bp, Arabidopsis thaliana
tatccttagctagttag

SEQ ID NO: 133937 - DNA, 17 bp, Arabidopsis thaliana
tatccttcacccattca

SEQ ID NO: 133938 - DNA, 17 bp, Arabidopsis thaliana
tatccttcttgcgtgct

SEQ ID NO: 133939 - DNA, 17 bp, Arabidopsis thaliana
tatccttgacagtccga

SEQ ID NO: 133940 - DNA, 17 bp, Arabidopsis thaliana
tatccttgtgcatgggc

SEQ ID NO: 133941 - DNA, 17 bp, Arabidopsis thaliana
tatcctttctacaggta

SEQ ID NO: 133942 - DNA, 17 bp, Arabidopsis thaliana
tatcgaacagccggact

SEQ ID NO: 133943 - DNA, 17 bp, Arabidopsis thaliana
tatcgaaccatccatgt

SEQ ID NO: 133944 - DNA, 17 bp, Arabidopsis thaliana
tatcgaacctttcgtct

SEQ ID NO: 133945 - DNA, 17 bp, Arabidopsis thaliana
tatcgaatgagttctct

SEQ ID NO: 133946 - DNA, 17 bp, Arabidopsis thaliana
tatcgaatggagtttgc

SEQ ID NO: 133947 - DNA, 17 bp, Arabidopsis thaliana
tatcgacaatgatcctt

SEQ ID NO: 133948 - DNA, 17 bp, Arabidopsis thaliana
tatcgacactgtttgac

SEQ ID NO: 133949 - DNA, 17 bp, Arabidopsis thaliana
tatcgacccaaacccgt

SEQ ID NO: 133950 - DNA, 17 bp, Arabidopsis thaliana
tatcgacccaaacttgt

SEQ ID NO: 133951 - DNA, 17 bp, Arabidopsis thaliana
tatcgacccgtccagtg

SEQ ID NO: 133952 - DNA, 17 bp, Arabidopsis thaliana
tatcgacccgtgcagtg

SEQ ID NO: 133953 - DNA, 17 bp, Arabidopsis thaliana
tatcgacctgaaagatt

SEQ ID NO: 133954 - DNA, 17 bp, Arabidopsis thaliana
tatcgacgcacatctct

SEQ ID NO: 133955 - DNA, 17 bp, Arabidopsis thaliana
tatcgacgcggattacg

SEQ ID NO: 133956 - DNA, 17 bp, Arabidopsis thaliana
tatcgactgctaacgtc

SEQ ID NO: 133957 - DNA, 17 bp, Arabidopsis thaliana
tatcgagccgcgagcaa

SEQ ID NO: 133958 - DNA, 17 bp, Arabidopsis thaliana
tatcgagctgctgcctg

SEQ ID NO: 133959 - DNA, 17 bp, Arabidopsis thaliana
tatcgaggaattttgcc

SEQ ID NO: 133960 - DNA, 17 bp, Arabidopsis thaliana
tatcgaggttcctcttt

SEQ ID NO: 133961 - DNA, 17 bp, Arabidopsis thaliana
tatcgagtacctacgtc

SEQ ID NO: 133962 - DNA, 17 bp, Arabidopsis thaliana
tatcgagtgccacatca

SEQ ID NO: 133963 - DNA, 17 bp, Arabidopsis thaliana
tatcgatcaagccaaat

SEQ ID NO: 133964 - DNA, 17 bp, Arabidopsis thaliana
tatcgatcagatgttga

SEQ ID NO: 133965 - DNA, 17 bp, Arabidopsis thaliana
tatcgatcagatgttgc

SEQ ID NO: 133966 - DNA, 17 bp, Arabidopsis thaliana
tatcgatcagatgttgg

SEQ ID NO: 133967 - DNA, 17 bp, Arabidopsis thaliana
tatcgatccaaagccgt

SEQ ID NO: 133968 - DNA, 17 bp, Arabidopsis thaliana
tatcgatccatcaagtg

SEQ ID NO: 133969 - DNA, 17 bp, Arabidopsis thaliana
tatcgatccttcatacc

SEQ ID NO: 133970 - DNA, 17 bp, Arabidopsis thaliana
tatcgatcctttagacc

SEQ ID NO: 133971 - DNA, 17 bp, Arabidopsis thaliana
tatcgatcggatgttga

SEQ ID NO: 133972 - DNA, 17 bp, Arabidopsis thaliana
tatcgatcttagatttt

SEQ ID NO: 133973 - DNA, 17 bp, Arabidopsis thaliana
tatcgatggtgtggagg

SEQ ID NO: 133974 - DNA, 17 bp, Arabidopsis thaliana
tatcgattagaccgctg

SEQ ID NO: 133975 - DNA, 17 bp, Arabidopsis thaliana
tatcgattatggcagcg

SEQ ID NO: 133976 - DNA, 17 bp, Arabidopsis thaliana
tatcgattatggcggcg

SEQ ID NO: 133977 - DNA, 17 bp, Arabidopsis thaliana
tatcgatttgggtatcg

SEQ ID NO: 133978 - DNA, 17 bp, Arabidopsis thaliana
tatcgcaagctgttctg

SEQ ID NO: 133979 - DNA, 17 bp, Arabidopsis thaliana
tatcgcaatagttgctt

SEQ ID NO: 133980 - DNA, 17 bp, Arabidopsis thaliana
tatcgcaattgattcat

SEQ ID NO: 133981 - DNA, 17 bp, Arabidopsis thaliana
tatcgcaattgattctt

SEQ ID NO: 133982 - DNA, 17 bp, Arabidopsis thaliana
tatcgcacccgctggct

SEQ ID NO: 133983 - DNA, 17 bp, Arabidopsis thaliana
tatcgcacccgctggtt

SEQ ID NO: 133984 - DNA, 17 bp, Arabidopsis thaliana
tatcgcaccggctggtt

SEQ ID NO: 133985 - DNA, 17 bp, Arabidopsis thaliana
tatcgcacctgctggtt

SEQ ID NO: 133986 - DNA, 17 bp, Arabidopsis thaliana
tatcgcagcctcagacc

SEQ ID NO: 133987 - DNA, 17 bp, Arabidopsis thaliana
tatcgcagcgattttaa

SEQ ID NO: 133988 - DNA, 17 bp, Arabidopsis thaliana
tatcgcagtgactaatt

SEQ ID NO: 133989 - DNA, 17 bp, Arabidopsis thaliana
tatcgcatcctgtagat

SEQ ID NO: 133990 - DNA, 17 bp, Arabidopsis thaliana
tatcgccgaccgaaggg

SEQ ID NO: 133991 - DNA, 17 bp, Arabidopsis thaliana
tatcgccgccctcaaca

SEQ ID NO: 133992 - DNA, 17 bp, Arabidopsis thaliana
tatcgcgatacaggttg

SEQ ID NO: 133993 - DNA, 17 bp, Arabidopsis thaliana
tatcgcgtgactttttt

SEQ ID NO: 133994 - DNA, 17 bp, Arabidopsis thaliana
tatcgcgttggagatcc

SEQ ID NO: 133995 - DNA, 17 bp, Arabidopsis thaliana
tatcgctacaaatttga

SEQ ID NO: 133996 - DNA, 17 bp, Arabidopsis thaliana
tatcgctctcgacatgt

SEQ ID NO: 133997 - DNA, 17 bp, Arabidopsis thaliana
tatcgctgaatccagcg

SEQ ID NO: 133998 - DNA, 17 bp, Arabidopsis thaliana
tatcgctgcgacaagca

SEQ ID NO: 133999 - DNA, 17 bp, Arabidopsis thaliana
tatcgcttctgtcaact

SEQ ID NO: 134000 - DNA, 17 bp, Arabidopsis thaliana
tatcgctttcgctggtt

SEQ ID NO: 134001 - DNA, 17 bp, Arabidopsis thaliana
tatcgctttttacactg

SEQ ID NO: 134002 - DNA, 17 bp, Arabidopsis thaliana
tatcggagtgaaaatcg

SEQ ID NO: 134003 - DNA, 17 bp, Arabidopsis thaliana
tatcggatttcttcctc

SEQ ID NO: 134004 - DNA, 17 bp, Arabidopsis thaliana
tatcggcatgatcggga

SEQ ID NO: 134005 - DNA, 17 bp, Arabidopsis thaliana
tatcggctgatctggtt

SEQ ID NO: 134006 - DNA, 17 bp, Arabidopsis thaliana
tatcggctgattcggtt

SEQ ID NO: 134007 - DNA, 17 bp, Arabidopsis thaliana
tatcggctgtagcaggt

SEQ ID NO: 134008 - DNA, 17 bp, Arabidopsis thaliana
tatcgggactaggagat

SEQ ID NO: 134009 - DNA, 17 bp, Arabidopsis thaliana
tatcgggcgcttgaaga

SEQ ID NO: 134010 - DNA, 17 bp, Arabidopsis thaliana
tatcgggcggagcggat

SEQ ID NO: 134011 - DNA, 17 bp, Arabidopsis thaliana
tatcggggataggggga

SEQ ID NO: 134012 - DNA, 17 bp, Arabidopsis thaliana
tatcggggcttttatag

SEQ ID NO: 134013 - DNA, 17 bp, Arabidopsis thaliana
tatcgggtccgaggaat

SEQ ID NO: 134014 - DNA, 17 bp, Arabidopsis thaliana
tatcgggtccgttcttt

SEQ ID NO: 134015 - DNA, 17 bp, Arabidopsis thaliana
tatcgggtccgtttttt

SEQ ID NO: 134016 - DNA, 17 bp, Arabidopsis thaliana
tatcgggtttgggtcgg

SEQ ID NO: 134017 - DNA, 17 bp, Arabidopsis thaliana
tatcggtccgcctttgg

SEQ ID NO: 134018 - DNA, 17 bp, Arabidopsis thaliana
tatcggtgtgctgatgt

SEQ ID NO: 134019 - DNA, 17 bp, Arabidopsis thaliana
tatcggttaactggtcg

SEQ ID NO: 134020 - DNA, 17 bp, Arabidopsis thaliana
tatcggttaatccgaca

SEQ ID NO: 134021 - DNA, 17 bp, Arabidopsis thaliana
tatcggttcaaggacgc

SEQ ID NO: 134022 - DNA, 17 bp, Arabidopsis thaliana
tatcggttggtgtttcc

SEQ ID NO: 134023 - DNA, 17 bp, Arabidopsis thaliana
tatcggtttgtcaattg

SEQ ID NO: 134024 - DNA, 17 bp, Arabidopsis thaliana
tatcgtaacggctgatt

SEQ ID NO: 134025 - DNA, 17 bp, Arabidopsis thaliana
tatcgtatctatgtggc

SEQ ID NO: 134026 - DNA, 17 bp, Arabidopsis thaliana
tatcgtattgtcgtcct

SEQ ID NO: 134027 - DNA, 17 bp, Arabidopsis thaliana
tatcgtcaatcgaccta

SEQ ID NO: 134028 - DNA, 17 bp, Arabidopsis thaliana
tatcgtcatttccggcc

SEQ ID NO: 134029 - DNA, 17 bp, Arabidopsis thaliana
tatcgtccagagtagag

SEQ ID NO: 134030 - DNA, 17 bp, Arabidopsis thaliana
tatcgtcgatgatggtt

SEQ ID NO: 134031 - DNA, 17 bp, Arabidopsis thaliana
tatcgtcgtttggtttc

SEQ ID NO: 134032 - DNA, 17 bp, Arabidopsis thaliana
tatcgtctctttggcct

SEQ ID NO: 134033 - DNA, 17 bp, Arabidopsis thaliana
tatcgtctgcctgggtg

SEQ ID NO: 134034 - DNA, 17 bp, Arabidopsis thaliana
tatcgtctgtcgtggat

SEQ ID NO: 134035 - DNA, 17 bp, Arabidopsis thaliana
tatcgtgttacgtctct

SEQ ID NO: 134036 - DNA, 17 bp, Arabidopsis thaliana
tatcgttacagggctaa

SEQ ID NO: 134037 - DNA, 17 bp, Arabidopsis thaliana
tatcgttatcgctttat

SEQ ID NO: 134038 - DNA, 17 bp, Arabidopsis thaliana
tatcgttatttccggcc

SEQ ID NO: 134039 - DNA, 17 bp, Arabidopsis thaliana
tatcgttcgatttgatc

SEQ ID NO: 134040 - DNA, 17 bp, Arabidopsis thaliana
tatcgttgccgaatgta

SEQ ID NO: 134041 - DNA, 17 bp, Arabidopsis thaliana
tatcgttggctaagtcc

SEQ ID NO: 134042 - DNA, 17 bp, Arabidopsis thaliana
tatcgttttcgctgatt

SEQ ID NO: 134043 - DNA, 17 bp, Arabidopsis thaliana
tatctaaaagtgcctaa

SEQ ID NO: 134044 - DNA, 17 bp, Arabidopsis thaliana
tatctaaatggggttcc

SEQ ID NO: 134045 - DNA, 17 bp, Arabidopsis thaliana
tatctaagatttcacca

SEQ ID NO: 134046 - DNA, 17 bp, Arabidopsis thaliana
tatctaagccgtcttga

SEQ ID NO: 134047 - DNA, 17 bp, Arabidopsis thaliana
tatctaaggtcctagcg

SEQ ID NO: 134048 - DNA, 17 bp, Arabidopsis thaliana
tatctaatgttgcgaat

SEQ ID NO: 134049 - DNA, 17 bp, Arabidopsis thaliana
tatctacagaagttggt

SEQ ID NO: 134050 - DNA, 17 bp, Arabidopsis thaliana
tatctacatcttaggtg

SEQ ID NO: 134051 - DNA, 17 bp, Arabidopsis thaliana
tatctaccacgattggt

SEQ ID NO: 134052 - DNA, 17 bp, Arabidopsis thaliana
tatctaccagagtttcg

SEQ ID NO: 134053 - DNA, 17 bp, Arabidopsis thaliana
tatctacgatggttacc

SEQ ID NO: 134054 - DNA, 17 bp, Arabidopsis thaliana
tatctactaaccgccag

SEQ ID NO: 134055 - DNA, 17 bp, Arabidopsis thaliana
tatctactctccatttc

SEQ ID NO: 134056 - DNA, 17 bp, Arabidopsis thaliana
tatctacttgacatcgc

SEQ ID NO: 134057 - DNA, 17 bp, Arabidopsis thaliana
tatctacttgagctttc

SEQ ID NO: 134058 - DNA, 17 bp, Arabidopsis thaliana
tatctacttgatccgct

SEQ ID NO: 134059 - DNA, 17 bp, Arabidopsis thaliana
tatctataaggcccatc

SEQ ID NO: 134060 - DNA, 17 bp, Arabidopsis thaliana
tatctataagtgccacg

SEQ ID NO: 134061 - DNA, 17 bp, Arabidopsis thaliana
tatctataagttggtta

SEQ ID NO: 134062 - DNA, 17 bp, Arabidopsis thaliana
tatctatagattgaccc

SEQ ID NO: 134063 - DNA, 17 bp, Arabidopsis thaliana
tatctataggactccgc

SEQ ID NO: 134064 - DNA, 17 bp, Arabidopsis thaliana
tatctataggtcaggga

SEQ ID NO: 134065 - DNA, 17 bp, Arabidopsis thaliana
tatctatagttggtgat

SEQ ID NO: 134066 - DNA, 17 bp, Arabidopsis thaliana
tatctatccaacgcaca

SEQ ID NO: 134067 - DNA, 17 bp, Arabidopsis thaliana
tatctatccacagtttt

SEQ ID NO: 134068 - DNA, 17 bp, Arabidopsis thaliana
tatctatccctacatgg

SEQ ID NO: 134069 - DNA, 17 bp, Arabidopsis thaliana
tatctatccctccaggc

SEQ ID NO: 134070 - DNA, 17 bp, Arabidopsis thaliana
tatctatcctatcggct

SEQ ID NO: 134071 - DNA, 17 bp, Arabidopsis thaliana
tatctatcgcacccgct

SEQ ID NO: 134072 - DNA, 17 bp, Arabidopsis thaliana
tatctatcgctgcgaca

SEQ ID NO: 134073 - DNA, 17 bp, Arabidopsis thaliana
tatctatctgcggttta

SEQ ID NO: 134074 - DNA, 17 bp, Arabidopsis thaliana
tatctatctgtaccgga

SEQ ID NO: 134075 - DNA, 17 bp, Arabidopsis thaliana
tatctatctgtcaccgg

SEQ ID NO: 134076 - DNA, 17 bp, Arabidopsis thaliana
tatctatgaatggtaaa

SEQ ID NO: 134077 - DNA, 17 bp, Arabidopsis thaliana
tatctatgaccaggatg

SEQ ID NO: 134078 - DNA, 17 bp, Arabidopsis thaliana
tatctatgactggtaaa

SEQ ID NO: 134079 - DNA, 17 bp, Arabidopsis thaliana
tatctatgccgctatgg

SEQ ID NO: 134080 - DNA, 17 bp, Arabidopsis thaliana
tatctatgcgattcgca

SEQ ID NO: 134081 - DNA, 17 bp, Arabidopsis thaliana
tatctatgggtggtggt

SEQ ID NO: 134082 - DNA, 17 bp, Arabidopsis thaliana
tatctatgtctgttatt

SEQ ID NO: 134083 - DNA, 17 bp, Arabidopsis thaliana
tatctatgtgattggtc

SEQ ID NO: 134084 - DNA, 17 bp, Arabidopsis thaliana
tatctattagaccatcc

SEQ ID NO: 134085 - DNA, 17 bp, Arabidopsis thaliana
tatctattagctcagtg

SEQ ID NO: 134086 - DNA, 17 bp, Arabidopsis thaliana
tatctattaggtgcgct

SEQ ID NO: 134087 - DNA, 17 bp, Arabidopsis thaliana
tatctattagttccgtt

SEQ ID NO: 134088 - DNA, 17 bp, Arabidopsis thaliana
tatctattatttccggt

SEQ ID NO: 134089 - DNA, 17 bp, Arabidopsis thaliana
tatctattcaccgcttg

SEQ ID NO: 134090 - DNA, 17 bp, Arabidopsis thaliana
tatctattccacgccaa

SEQ ID NO: 134091 - DNA, 17 bp, Arabidopsis thaliana
tatctattccaggttgc

SEQ ID NO: 134092 - DNA, 17 bp, Arabidopsis thaliana
tatctattcccttcatt

SEQ ID NO: 134093 - DNA, 17 bp, Arabidopsis thaliana
tatctattccgtttgca

SEQ ID NO: 134094 - DNA, 17 bp, Arabidopsis thaliana
tatctattctggtgtcc

SEQ ID NO: 134095 - DNA, 17 bp, Arabidopsis thaliana
tatctattggcctggtt

SEQ ID NO: 134096 - DNA, 17 bp, Arabidopsis thaliana
tatctattgggccaacc

SEQ ID NO: 134097 - DNA, 17 bp, Arabidopsis thaliana
tatctattgggcttcgc

SEQ ID NO: 134098 - DNA, 17 bp, Arabidopsis thaliana
tatctatttacagtggc

SEQ ID NO: 134099 - DNA, 17 bp, Arabidopsis thaliana
tatctatttcaagcagt

SEQ ID NO: 134100 - DNA, 17 bp, Arabidopsis thaliana
tatctatttcttccgac

SEQ ID NO: 134101 - DNA, 17 bp, Arabidopsis thaliana
tatctatttgacacatg

SEQ ID NO: 134102 - DNA, 17 bp, Arabidopsis thaliana
tatctcaaatgcgagac

SEQ ID NO: 134103 - DNA, 17 bp, Arabidopsis thaliana
tatctcaacggtggcac

SEQ ID NO: 134104 - DNA, 17 bp, Arabidopsis thaliana
tatctcaacgtggcaca

SEQ ID NO: 134105 - DNA, 17 bp, Arabidopsis thaliana
tatctcaactttacatg

SEQ ID NO: 134106 - DNA, 17 bp, Arabidopsis thaliana
tatctcacagaacggtg

SEQ ID NO: 134107 - DNA, 17 bp, Arabidopsis thaliana
tatctcaccaggacagt

SEQ ID NO: 134108 - DNA, 17 bp, Arabidopsis thaliana
tatctcactgatggaaa

SEQ ID NO: 134109 - DNA, 17 bp, Arabidopsis thaliana
tatctcactgttcatcc

SEQ ID NO: 134110 - DNA, 17 bp, Arabidopsis thaliana
tatctcagagacttgac

SEQ ID NO: 134111 - DNA, 17 bp, Arabidopsis thaliana
tatctcagcagctgtct

SEQ ID NO: 134112 - DNA, 17 bp, Arabidopsis thaliana
tatctcaggcacttctt

SEQ ID NO: 134113 - DNA, 17 bp, Arabidopsis thaliana
tatctcagggtcagtta

SEQ ID NO: 134114 - DNA, 17 bp, Arabidopsis thaliana
tatctcattagcgaaac

SEQ ID NO: 134115 - DNA, 17 bp, Arabidopsis thaliana
tatctccaaaatgtgca

SEQ ID NO: 134116 - DNA, 17 bp, Arabidopsis thaliana
tatctccaatttccact

SEQ ID NO: 134117 - DNA, 17 bp, Arabidopsis thaliana
tatctccactctgctgc

SEQ ID NO: 134118 - DNA, 17 bp, Arabidopsis thaliana
tatctccagttcactgc

SEQ ID NO: 134119 - DNA, 17 bp, Arabidopsis thaliana
tatctccagttcattgc

SEQ ID NO: 134120 - DNA, 17 bp, Arabidopsis thaliana
tatctccggtttagccc

SEQ ID NO: 134121 - DNA, 17 bp, Arabidopsis thaliana
tatctcctatgaggcaa

SEQ ID NO: 134122 - DNA, 17 bp, Arabidopsis thaliana
tatctcctgttgcagct

SEQ ID NO: 134123 - DNA, 17 bp, Arabidopsis thaliana
tatctcgataacagtag

SEQ ID NO: 134124 - DNA, 17 bp, Arabidopsis thaliana
tatctcgataacagttg

SEQ ID NO: 134125 - DNA, 17 bp, Arabidopsis thaliana
tatctcgatgattagag

SEQ ID NO: 134126 - DNA, 17 bp, Arabidopsis thaliana
tatctcgatttaagcgt

SEQ ID NO: 134127 - DNA, 17 bp, Arabidopsis thaliana
tatctcgccttgggtcc

SEQ ID NO: 134128 - DNA, 17 bp, Arabidopsis thaliana
tatctcgctgtggtggt

SEQ ID NO: 134129 - DNA, 17 bp, Arabidopsis thaliana
tatctcggaacagattg

SEQ ID NO: 134130 - DNA, 17 bp, Arabidopsis thaliana
tatctcggaagagagcc

SEQ ID NO: 134131 - DNA, 17 bp, Arabidopsis thaliana
tatctcggacgcgagtt

SEQ ID NO: 134132 - DNA, 17 bp, Arabidopsis thaliana
tatctcgtctacacttg

SEQ ID NO: 134133 - DNA, 17 bp, Arabidopsis thaliana
tatctcgtggtgtacca

SEQ ID NO: 134134 - DNA, 17 bp, Arabidopsis thaliana
tatctctaaaagatttg

SEQ ID NO: 134135 - DNA, 17 bp, Arabidopsis thaliana
tatctctattcgggcta

SEQ ID NO: 134136 - DNA, 17 bp, Arabidopsis thaliana
tatctctcaaatcagcg

SEQ ID NO: 134137 - DNA, 17 bp, Arabidopsis thaliana
tatctctccgacatggt

SEQ ID NO: 134138 - DNA, 17 bp, Arabidopsis thaliana
tatctctctacaagatt

SEQ ID NO: 134139 - DNA, 17 bp, Arabidopsis thaliana
tatctctctggctcttc

SEQ ID NO: 134140 - DNA, 17 bp, Arabidopsis thaliana
tatctctgagacagtac

SEQ ID NO: 134141 - DNA, 17 bp, Arabidopsis thaliana
tatctctgcggtttgat

SEQ ID NO: 134142 - DNA, 17 bp, Arabidopsis thaliana
tatctctgtagttgcct

SEQ ID NO: 134143 - DNA, 17 bp, Arabidopsis thaliana
tatctctgtggtatatg

SEQ ID NO: 134144 - DNA, 17 bp, Arabidopsis thaliana
tatctctttccatcact

SEQ ID NO: 134145 - DNA, 17 bp, Arabidopsis thaliana
tatctgaaccgtccact

SEQ ID NO: 134146 - DNA, 17 bp, Arabidopsis thaliana
tatctgaatgacagtcg

SEQ ID NO: 134147 - DNA, 17 bp, Arabidopsis thaliana
tatctgacagaagactc

SEQ ID NO: 134148 - DNA, 17 bp, Arabidopsis thaliana
tatctgaccaagtcact

SEQ ID NO: 134149 - DNA, 17 bp, Arabidopsis thaliana
tatctgagcgattgggt

SEQ ID NO: 134150 - DNA, 17 bp, Arabidopsis thaliana
tatctgaggtgttgtgg

SEQ ID NO: 134151 - DNA, 17 bp, Arabidopsis thaliana
tatctgattgcttgggt

SEQ ID NO: 134152 - DNA, 17 bp, Arabidopsis thaliana
tatctgcaggaccggtc

SEQ ID NO: 134153 - DNA, 17 bp, Arabidopsis thaliana
tatctgcagtataccgc

SEQ ID NO: 134154 - DNA, 17 bp, Arabidopsis thaliana
tatctgcagtataccgt

SEQ ID NO: 134155 - DNA, 17 bp, Arabidopsis thaliana
tatctgcagttgaaccg

SEQ ID NO: 134156 - DNA, 17 bp, Arabidopsis thaliana
tatctgcagttgaatcg

SEQ ID NO: 134157 - DNA, 17 bp, Arabidopsis thaliana
tatctgccatctttgtg

SEQ ID NO: 134158 - DNA, 17 bp, Arabidopsis thaliana
tatctgcgattttgagg

SEQ ID NO: 134159 - DNA, 17 bp, Arabidopsis thaliana
tatctgcggtagtgaaa

SEQ ID NO: 134160 - DNA, 17 bp, Arabidopsis thaliana
tatctgcggtgcccatt

SEQ ID NO: 134161 - DNA, 17 bp, Arabidopsis thaliana
tatctgcggtttagtcc

SEQ ID NO: 134162 - DNA, 17 bp, Arabidopsis thaliana
tatctgcgtttcgtcaa

SEQ ID NO: 134163 - DNA, 17 bp, Arabidopsis thaliana
tatctgctagatccaca

SEQ ID NO: 134164 - DNA, 17 bp, Arabidopsis thaliana
tatctgctctgtgccca

SEQ ID NO: 134165 - DNA, 17 bp, Arabidopsis thaliana
tatctgctcttcactac

SEQ ID NO: 134166 - DNA, 17 bp, Arabidopsis thaliana
tatctgctgtgcccata

SEQ ID NO: 134167 - DNA, 17 bp, Arabidopsis thaliana
tatctgcttgataggct

SEQ ID NO: 134168 - DNA, 17 bp, Arabidopsis thaliana
tatctgctttgtccgct

SEQ ID NO: 134169 - DNA, 17 bp, Arabidopsis thaliana
tatctggaccgagagac

SEQ ID NO: 134170 - DNA, 17 bp, Arabidopsis thaliana
tatctggacgagtcttg

SEQ ID NO: 134171 - DNA, 17 bp, Arabidopsis thaliana
tatctggatctggatcc

SEQ ID NO: 134172 - DNA, 17 bp, Arabidopsis thaliana
tatctggccaaagttga

SEQ ID NO: 134173 - DNA, 17 bp, Arabidopsis thaliana
tatctggccgacacacg

SEQ ID NO: 134174 - DNA, 17 bp, Arabidopsis thaliana
tatctggcttcacccag

SEQ ID NO: 134175 - DNA, 17 bp, Arabidopsis thaliana
tatctgggaaagtcatt

SEQ ID NO: 134176 - DNA, 17 bp, Arabidopsis thaliana
tatctggttaggattct

SEQ ID NO: 134177 - DNA, 17 bp, Arabidopsis thaliana
tatctggttgatcctgc

SEQ ID NO: 134178 - DNA, 17 bp, Arabidopsis thaliana
tatctggtttgataggg

SEQ ID NO: 134179 - DNA, 17 bp, Arabidopsis thaliana
tatctgtaccggactgt

SEQ ID NO: 134180 - DNA, 17 bp, Arabidopsis thaliana
tatctgtcaccggaccg

SEQ ID NO: 134181 - DNA, 17 bp, Arabidopsis thaliana
tatctgtccagcaagga

SEQ ID NO: 134182 - DNA, 17 bp, Arabidopsis thaliana
tatctgtgaagcgtaac

SEQ ID NO: 134183 - DNA, 17 bp, Arabidopsis thaliana
tatctgttgcgtctacg

SEQ ID NO: 134184 - DNA, 17 bp, Arabidopsis thaliana
tatctgtttcgtaccca

SEQ ID NO: 134185 - DNA, 17 bp, Arabidopsis thaliana
tatcttaatgatccgac

SEQ ID NO: 134186 - DNA, 17 bp, Arabidopsis thaliana
tatcttacgcccgccta

SEQ ID NO: 134187 - DNA, 17 bp, Arabidopsis thaliana
tatcttatctcgccaac

SEQ ID NO: 134188 - DNA, 17 bp, Arabidopsis thaliana
tatcttatggctgagca

SEQ ID NO: 134189 - DNA, 17 bp, Arabidopsis thaliana
tatcttcattgccagca

SEQ ID NO: 134190 - DNA, 17 bp, Arabidopsis thaliana
tatcttccacgtaagtt

SEQ ID NO: 134191 - DNA, 17 bp, Arabidopsis thaliana
tatcttccgatgtgtgc

SEQ ID NO: 134192 - DNA, 17 bp, Arabidopsis thaliana
tatcttccgggtcatct

SEQ ID NO: 134193 - DNA, 17 bp, Arabidopsis thaliana
tatcttcctgacgagat

SEQ ID NO: 134194 - DNA, 17 bp, Arabidopsis thaliana
tatcttcgacaagtggc

SEQ ID NO: 134195 - DNA, 17 bp, Arabidopsis thaliana
tatcttcgatgtgcgcg

SEQ ID NO: 134196 - DNA, 17 bp, Arabidopsis thaliana
tatcttcgccccaaaac

SEQ ID NO: 134197 - DNA, 17 bp, Arabidopsis thaliana
tatcttcgccgcttaac

SEQ ID NO: 134198 - DNA, 17 bp, Arabidopsis thaliana
tatcttctaggtttgcc

SEQ ID NO: 134199 - DNA, 17 bp, Arabidopsis thaliana
tatcttctatcaaacac

SEQ ID NO: 134200 - DNA, 17 bp, Arabidopsis thaliana
tatcttgaatccgaccc

SEQ ID NO: 134201 - DNA, 17 bp, Arabidopsis thaliana
tatcttgaatcgggatc

SEQ ID NO: 134202 - DNA, 17 bp, Arabidopsis thaliana
tatcttgatgggtgaat

SEQ ID NO: 134203 - DNA, 17 bp, Arabidopsis thaliana
tatcttgcgtactcagt

SEQ ID NO: 134204 - DNA, 17 bp, Arabidopsis thaliana
tatcttgctctcgggag

SEQ ID NO: 134205 - DNA, 17 bp, Arabidopsis thaliana
tatcttggcagattctc

SEQ ID NO: 134206 - DNA, 17 bp, Arabidopsis thaliana
tatcttggcagcattcc

SEQ ID NO: 134207 - DNA, 17 bp, Arabidopsis thaliana
tatcttggtgcaggtcg

SEQ ID NO: 134208 - DNA, 17 bp, Arabidopsis thaliana
tatcttgtcgatgtcgt

SEQ ID NO: 134209 - DNA, 17 bp, Arabidopsis thaliana
tatcttgtgaatgtctg

SEQ ID NO: 134210 - DNA, 17 bp, Arabidopsis thaliana
tatcttgtgctcatcca

SEQ ID NO: 134211 - DNA, 17 bp, Arabidopsis thaliana
tatcttgttccggatag

SEQ ID NO: 134212 - DNA, 17 bp, Arabidopsis thaliana
tatcttgttgcagggtg

SEQ ID NO: 134213 - DNA, 17 bp, Arabidopsis thaliana
tatctttaacgggttta

SEQ ID NO: 134214 - DNA, 17 bp, Arabidopsis thaliana
tatctttacagttgcca

SEQ ID NO: 134215 - DNA, 17 bp, Arabidopsis thaliana
tatctttacatgcggcc

SEQ ID NO: 134216 - DNA, 17 bp, Arabidopsis thaliana
tatctttgcgaaccctg

SEQ ID NO: 134217 - DNA, 17 bp, Arabidopsis thaliana
tatctttggattactgt

SEQ ID NO: 134218 - DNA, 17 bp, Arabidopsis thaliana
tatctttggattgcccc

SEQ ID NO: 134219 - DNA, 17 bp, Arabidopsis thaliana
tatctttggattgccgc

SEQ ID NO: 134220 - DNA, 17 bp, Arabidopsis thaliana
tatctttggctccaagg

SEQ ID NO: 134221 - DNA, 17 bp, Arabidopsis thaliana
tatctttgggctttccg

SEQ ID NO: 134222 - DNA, 17 bp, Arabidopsis thaliana
tatctttgtcagcggct

SEQ ID NO: 134223 - DNA, 17 bp, Arabidopsis thaliana
tatctttgtgcggtgtt

SEQ ID NO: 134224 - DNA, 17 bp, Arabidopsis thaliana
tatcttttaggtttgcc

SEQ ID NO: 134225 - DNA, 17 bp, Arabidopsis thaliana
tatcttttttggtccag

SEQ ID NO: 134226 - DNA, 17 bp, Arabidopsis thaliana
tatgaaaaagcctagca

SEQ ID NO: 134227 - DNA, 17 bp, Arabidopsis thaliana
tatgaaaggttgtgaat

SEQ ID NO: 134228 - DNA, 17 bp, Arabidopsis thaliana
tatgaaagttgaccaac

SEQ ID NO: 134229 - DNA, 17 bp, Arabidopsis thaliana
tatgaaagttggccaac

SEQ ID NO: 134230 - DNA, 17 bp, Arabidopsis thaliana
tatgaaagttggtcaac

SEQ ID NO: 134231 - DNA, 17 bp, Arabidopsis thaliana
tatgaaatctacttcaa

SEQ ID NO: 134232 - DNA, 17 bp, Arabidopsis thaliana
tatgaacaaagcttggg

SEQ ID NO: 134233 - DNA, 17 bp, Arabidopsis thaliana
tatgaaccaaaacccat

SEQ ID NO: 134234 - DNA, 17 bp, Arabidopsis thaliana
tatgaaccaaaccccct

SEQ ID NO: 134235 - DNA, 17 bp, Arabidopsis thaliana
tatgaaccaagtgtcgt

SEQ ID NO: 134236 - DNA, 17 bp, Arabidopsis thaliana
tatgaaccggcgctctt

SEQ ID NO: 134237 - DNA, 17 bp, Arabidopsis thaliana
tatgaaccgttcgcctg

SEQ ID NO: 134238 - DNA, 17 bp, Arabidopsis thaliana
tatgaacgaattcagac

SEQ ID NO: 134239 - DNA, 17 bp, Arabidopsis thaliana
tatgaacgggatgttgt

SEQ ID NO: 134240 - DNA, 17 bp, Arabidopsis thaliana
tatgaactacgtgtggc

SEQ ID NO: 134241 - DNA, 17 bp, Arabidopsis thaliana
tatgaactggcagacat

SEQ ID NO: 134242 - DNA, 17 bp, Arabidopsis thaliana
tatgaacttcgccaaca

SEQ ID NO: 134243 - DNA, 17 bp, Arabidopsis thaliana
tatgaagactaggtgag

SEQ ID NO: 134244 - DNA, 17 bp, Arabidopsis thaliana
tatgaagtcgacttgtg

SEQ ID NO: 134245 - DNA, 17 bp, Arabidopsis thaliana
tatgaagtctacgtggc

SEQ ID NO: 134246 - DNA, 17 bp, Arabidopsis thaliana
tatgaagtctaggtggc

SEQ ID NO: 134247 - DNA, 17 bp, Arabidopsis thaliana
tatgaagtctaggttgc

SEQ ID NO: 134248 - DNA, 17 bp, Arabidopsis thaliana
tatgaagtctttggatc

SEQ ID NO: 134249 - DNA, 17 bp, Arabidopsis thaliana
tatgaagtttaggtggc

SEQ ID NO: 134250 - DNA, 17 bp, Arabidopsis thaliana
tatgaagtttgtgacgc

SEQ ID NO: 134251 - DNA, 17 bp, Arabidopsis thaliana
tatgaatccttcaggct

SEQ ID NO: 134252 - DNA, 17 bp, Arabidopsis thaliana
tatgaatcggactttgt

SEQ ID NO: 134253 - DNA, 17 bp, Arabidopsis thaliana
tatgaatggtaaaccag

SEQ ID NO: 134254 - DNA, 17 bp, Arabidopsis thaliana
tatgaatgtccgtgctg

SEQ ID NO: 134255 - DNA, 17 bp, Arabidopsis thaliana
tatgaattatcgaccga

SEQ ID NO: 134256 - DNA, 17 bp, Arabidopsis thaliana
tatgaattccacctctg

SEQ ID NO: 134257 - DNA, 17 bp, Arabidopsis thaliana
tatgacaagcagcgtgt

SEQ ID NO: 134258 - DNA, 17 bp, Arabidopsis thaliana
tatgacacgtgacagtt

SEQ ID NO: 134259 - DNA, 17 bp, Arabidopsis thaliana
tatgacactactctcga

SEQ ID NO: 134260 - DNA, 17 bp, Arabidopsis thaliana
tatgacactctataggt

SEQ ID NO: 134261 - DNA, 17 bp, Arabidopsis thaliana
tatgacattctcgtgct

SEQ ID NO: 134262 - DNA, 17 bp, Arabidopsis thaliana
tatgaccagttttgtcc

SEQ ID NO: 134263 - DNA, 17 bp, Arabidopsis thaliana
tatgaccattttgcgct

SEQ ID NO: 134264 - DNA, 17 bp, Arabidopsis thaliana
tatgaccctactggtta

SEQ ID NO: 134265 - DNA, 17 bp, Arabidopsis thaliana
tatgaccggcacgcaac

SEQ ID NO: 134266 - DNA, 17 bp, Arabidopsis thaliana
tatgaccttagtcagct

SEQ ID NO: 134267 - DNA, 17 bp, Arabidopsis thaliana
tatgacgattggataga

SEQ ID NO: 134268 - DNA, 17 bp, Arabidopsis thaliana
tatgacgtgccggagtg

SEQ ID NO: 134269 - DNA, 17 bp, Arabidopsis thaliana
tatgactacaatccagt

SEQ ID NO: 134270 - DNA, 17 bp, Arabidopsis thaliana
tatgactagttgccctg

SEQ ID NO: 134271 - DNA, 17 bp, Arabidopsis thaliana
tatgactcacacaaaag

SEQ ID NO: 134272 - DNA, 17 bp, Arabidopsis thaliana
tatgactccataactat

SEQ ID NO: 134273 - DNA, 17 bp, Arabidopsis thaliana
tatgactccataacttt

SEQ ID NO: 134274 - DNA, 17 bp, Arabidopsis thaliana
tatgactctttgtcgcg

SEQ ID NO: 134275 - DNA, 17 bp, Arabidopsis thaliana
tatgactgaacgcctaa

SEQ ID NO: 134276 - DNA, 17 bp, Arabidopsis thaliana
tatgactgaacgcctct

SEQ ID NO: 134277 - DNA, 17 bp, Arabidopsis thaliana
tatgactgaacgcctgt

SEQ ID NO: 134278 - DNA, 17 bp, Arabidopsis thaliana
tatgactgataaaccag

SEQ ID NO: 134279 - DNA, 17 bp, Arabidopsis thaliana
tatgactggtaaacatg

SEQ ID NO: 134280 - DNA, 17 bp, Arabidopsis thaliana
tatgactggtaaaccag

SEQ ID NO: 134281 - DNA, 17 bp, Arabidopsis thaliana
tatgactggtaaaccgg

SEQ ID NO: 134282 - DNA, 17 bp, Arabidopsis thaliana
tatgactggttaaccag

SEQ ID NO: 134283 - DNA, 17 bp, Arabidopsis thaliana
tatgactgtgctgtaga

SEQ ID NO: 134284 - DNA, 17 bp, Arabidopsis thaliana
tatgacttccacctctg

SEQ ID NO: 134285 - DNA, 17 bp, Arabidopsis thaliana
tatgacttcttcgtgaa

SEQ ID NO: 134286 - DNA, 17 bp, Arabidopsis thaliana
tatgacttgatcacaga

SEQ ID NO: 134287 - DNA, 17 bp, Arabidopsis thaliana
tatgactttagtcagct

SEQ ID NO: 134288 - DNA, 17 bp, Arabidopsis thaliana
tatgactttagttagct

SEQ ID NO: 134289 - DNA, 17 bp, Arabidopsis thaliana
tatgactttgaaccatt

SEQ ID NO: 134290 - DNA, 17 bp, Arabidopsis thaliana
tatgagaccatctacat

SEQ ID NO: 134291 - DNA, 17 bp, Arabidopsis thaliana
tatgagactatcgacgg

SEQ ID NO: 134292 - DNA, 17 bp, Arabidopsis thaliana
tatgagacttagcgtct

SEQ ID NO: 134293 - DNA, 17 bp, Arabidopsis thaliana
tatgagatagggaagac

SEQ ID NO: 134294 - DNA, 17 bp, Arabidopsis thaliana
tatgagattcagccctt

SEQ ID NO: 134295 - DNA, 17 bp, Arabidopsis thaliana
tatgagcagggaagtcg

SEQ ID NO: 134296 - DNA, 17 bp, Arabidopsis thaliana
tatgagcagttagcgcg

SEQ ID NO: 134297 - DNA, 17 bp, Arabidopsis thaliana
tatgagcgtgccaaaac

SEQ ID NO: 134298 - DNA, 17 bp, Arabidopsis thaliana
tatgaggacctaggatt

SEQ ID NO: 134299 - DNA, 17 bp, Arabidopsis thaliana
tatgaggagttgcttgc

SEQ ID NO: 134300 - DNA, 17 bp, Arabidopsis thaliana
tatgaggtcctctacag

SEQ ID NO: 134301 - DNA, 17 bp, Arabidopsis thaliana
tatgaggtccttcagcg

SEQ ID NO: 134302 - DNA, 17 bp, Arabidopsis thaliana
tatgagtaccctaagga

SEQ ID NO: 134303 - DNA, 17 bp, Arabidopsis thaliana
tatgagtcagatcagga

SEQ ID NO: 134304 - DNA, 17 bp, Arabidopsis thaliana
tatgagtccgagtctca

SEQ ID NO: 134305 - DNA, 17 bp, Arabidopsis thaliana
tatgagtcggactcctc

SEQ ID NO: 134306 - DNA, 17 bp, Arabidopsis thaliana
tatgagtcggtctcctc

SEQ ID NO: 134307 - DNA, 17 bp, Arabidopsis thaliana
tatgagtctctagatac

SEQ ID NO: 134308 - DNA, 17 bp, Arabidopsis thaliana
tatgagtgaaacggctt

SEQ ID NO: 134309 - DNA, 17 bp, Arabidopsis thaliana
tatgagtgactacatca

SEQ ID NO: 134310 - DNA, 17 bp, Arabidopsis thaliana
tatgagtggtgatcgga

SEQ ID NO: 134311 - DNA, 17 bp, Arabidopsis thaliana
tatgagtttgcctgtcg

SEQ ID NO: 134312 - DNA, 17 bp, Arabidopsis thaliana
tatgatatgtccgagtg

SEQ ID NO: 134313 - DNA, 17 bp, Arabidopsis thaliana
tatgatcacggactgcg

SEQ ID NO: 134314 - DNA, 17 bp, Arabidopsis thaliana
tatgatccgtaacattt

SEQ ID NO: 134315 - DNA, 17 bp, Arabidopsis thaliana
tatgatcctgttcgttt

SEQ ID NO: 134316 - DNA, 17 bp, Arabidopsis thaliana
tatgatctggttgcggt

SEQ ID NO: 134317 - DNA, 17 bp, Arabidopsis thaliana
tatgatcttttaccatg

SEQ ID NO: 134318 - DNA, 17 bp, Arabidopsis thaliana
tatgatgaatttgccac

SEQ ID NO: 134319 - DNA, 17 bp, Arabidopsis thaliana
tatgatggacattggcg

SEQ ID NO: 134320 - DNA, 17 bp, Arabidopsis thaliana
tatgatggactttttca

SEQ ID NO: 134321 - DNA, 17 bp, Arabidopsis thaliana
tatgatggactttttct

SEQ ID NO: 134322 - DNA, 17 bp, Arabidopsis thaliana
tatgatgtatgcggtgc

SEQ ID NO: 134323 - DNA, 17 bp, Arabidopsis thaliana
tatgatgtccttggatt

SEQ ID NO: 134324 - DNA, 17 bp, Arabidopsis thaliana
tatgatgtcgatggccc

SEQ ID NO: 134325 - DNA, 17 bp, Arabidopsis thaliana
tatgattatcacagcag

SEQ ID NO: 134326 - DNA, 17 bp, Arabidopsis thaliana
tatgattcatcaatgaa

SEQ ID NO: 134327 - DNA, 17 bp, Arabidopsis thaliana
tatgattccacgatcac

SEQ ID NO: 134328 - DNA, 17 bp, Arabidopsis thaliana
tatgattctcgcttcgg

SEQ ID NO: 134329 - DNA, 17 bp, Arabidopsis thaliana
tatgattctcgcttggg

SEQ ID NO: 134330 - DNA, 17 bp, Arabidopsis thaliana
tatgattgctccagctg

SEQ ID NO: 134331 - DNA, 17 bp, Arabidopsis thaliana
tatgattggtaaaccag

SEQ ID NO: 134332 - DNA, 17 bp, Arabidopsis thaliana
tatgatttaggctgaaa

SEQ ID NO: 134333 - DNA, 17 bp, Arabidopsis thaliana
tatgatttccgtatgcg

SEQ ID NO: 134334 - DNA, 17 bp, Arabidopsis thaliana
tatgattttacgagttc

SEQ ID NO: 134335 - DNA, 17 bp, Arabidopsis thaliana
tatgattttcttggttt

SEQ ID NO: 134336 - DNA, 17 bp, Arabidopsis thaliana
tatgcaaacttggatcg

SEQ ID NO: 134337 - DNA, 17 bp, Arabidopsis thaliana
tatgcaaggcgatacac

SEQ ID NO: 134338 - DNA, 17 bp, Arabidopsis thaliana
tatgcaagtggcgatgg

SEQ ID NO: 134339 - DNA, 17 bp, Arabidopsis thaliana
tatgcaagtgttgtctt

SEQ ID NO: 134340 - DNA, 17 bp, Arabidopsis thaliana
tatgcacgtctgcctgg

SEQ ID NO: 134341 - DNA, 17 bp, Arabidopsis thaliana
tatgcacgtgcattcgt

SEQ ID NO: 134342 - DNA, 17 bp, Arabidopsis thaliana
tatgcacttgcaactcg

SEQ ID NO: 134343 - DNA, 17 bp, Arabidopsis thaliana
tatgcacttgtcaggga

SEQ ID NO: 134344 - DNA, 17 bp, Arabidopsis thaliana
tatgcagaacatgtgcg

SEQ ID NO: 134345 - DNA, 17 bp, Arabidopsis thaliana
tatgcagcctaagtatt

SEQ ID NO: 134346 - DNA, 17 bp, Arabidopsis thaliana
tatgcagcctgtcattg

SEQ ID NO: 134347 - DNA, 17 bp, Arabidopsis thaliana
tatgcagcgttagggtc

SEQ ID NO: 134348 - DNA, 17 bp, Arabidopsis thaliana
tatgcagtgccgtgtcg

SEQ ID NO: 134349 - DNA, 17 bp, Arabidopsis thaliana
tatgcagtgtcgtgtct

SEQ ID NO: 134350 - DNA, 17 bp, Arabidopsis thaliana
tatgcagtgtgtgactg

SEQ ID NO: 134351 - DNA, 17 bp, Arabidopsis thaliana
tatgcagtgtgtgtctg

SEQ ID NO: 134352 - DNA, 17 bp, Arabidopsis thaliana
tatgcatgcaggagcgg

SEQ ID NO: 134353 - DNA, 17 bp, Arabidopsis thaliana
tatgcattggaaagcgt

SEQ ID NO: 134354 - DNA, 17 bp, Arabidopsis thaliana
tatgcatttggactggg

SEQ ID NO: 134355 - DNA, 17 bp, Arabidopsis thaliana
tatgcattttcgtgatt

SEQ ID NO: 134356 - DNA, 17 bp, Arabidopsis thaliana
tatgccacactttttac

SEQ ID NO: 134357 - DNA, 17 bp, Arabidopsis thaliana
tatgccagacgcctaat

SEQ ID NO: 134358 - DNA, 17 bp, Arabidopsis thaliana
tatgccagcataatcct

SEQ ID NO: 134359 - DNA, 17 bp, Arabidopsis thaliana
tatgccatatgacccga

SEQ ID NO: 134360 - DNA, 17 bp, Arabidopsis thaliana
tatgccatgtgtcaagt

SEQ ID NO: 134361 - DNA, 17 bp, Arabidopsis thaliana
tatgccccttcgcaggc

SEQ ID NO: 134362 - DNA, 17 bp, Arabidopsis thaliana
tatgccctgggcgacac

SEQ ID NO: 134363 - DNA, 17 bp, Arabidopsis thaliana
tatgccctgggggacac

SEQ ID NO: 134364 - DNA, 17 bp, Arabidopsis thaliana
tatgccctgttcgtttt

SEQ ID NO: 134365 - DNA, 17 bp, Arabidopsis thaliana
tatgccgataacaggac

SEQ ID NO: 134366 - DNA, 17 bp, Arabidopsis thaliana
tatgccggccggtccgt

SEQ ID NO: 134367 - DNA, 17 bp, Arabidopsis thaliana
tatgccggcggataagt

SEQ ID NO: 134368 - DNA, 17 bp, Arabidopsis thaliana
tatgccggttcggcttg

SEQ ID NO: 134369 - DNA, 17 bp, Arabidopsis thaliana
tatgcctaaagaaaagt

SEQ ID NO: 134370 - DNA, 17 bp, Arabidopsis thaliana
tatgcctcaccgtcggc

SEQ ID NO: 134371 - DNA, 17 bp, Arabidopsis thaliana
tatgcctgagacagtta

SEQ ID NO: 134372 - DNA, 17 bp, Arabidopsis thaliana
tatgcctgagcggggaa

SEQ ID NO: 134373 - DNA, 17 bp, Arabidopsis thaliana
tatgcctgagcgggtta

SEQ ID NO: 134374 - DNA, 17 bp, Arabidopsis thaliana
tatgcctgctttgaccg

SEQ ID NO: 134375 - DNA, 17 bp, Arabidopsis thaliana
tatgccttgaggcacgg

SEQ ID NO: 134376 - DNA, 17 bp, Arabidopsis thaliana
tatgcgaatcctgctag

SEQ ID NO: 134377 - DNA, 17 bp, Arabidopsis thaliana
tatgcgacatagtttcg

SEQ ID NO: 134378 - DNA, 17 bp, Arabidopsis thaliana
tatgcgacatagtttgt

SEQ ID NO: 134379 - DNA, 17 bp, Arabidopsis thaliana
tatgcgaccaagcgggc

SEQ ID NO: 134380 - DNA, 17 bp, Arabidopsis thaliana
tatgcgacggggtattg

SEQ ID NO: 134381 - DNA, 17 bp, Arabidopsis thaliana
tatgcgactaactcagg

SEQ ID NO: 134382 - DNA, 17 bp, Arabidopsis thaliana
tatgcgagagatattca

SEQ ID NO: 134383 - DNA, 17 bp, Arabidopsis thaliana
tatgcgatctcggagcg

SEQ ID NO: 134384 - DNA, 17 bp, Arabidopsis thaliana
tatgcgatggtgttaaa

SEQ ID NO: 134385 - DNA, 17 bp, Arabidopsis thaliana
tatgcgattcgcagatt

SEQ ID NO: 134386 - DNA, 17 bp, Arabidopsis thaliana
tatgcgcgcttggcagg

SEQ ID NO: 134387 - DNA, 17 bp, Arabidopsis thaliana
tatgcggaatctcagtt

SEQ ID NO: 134388 - DNA, 17 bp, Arabidopsis thaliana
tatgcggaccgtcatgc

SEQ ID NO: 134389 - DNA, 17 bp, Arabidopsis thaliana
tatgcggactacctgca

SEQ ID NO: 134390 - DNA, 17 bp, Arabidopsis thaliana
tatgcggcgtgatggat

SEQ ID NO: 134391 - DNA, 17 bp, Arabidopsis thaliana
tatgcgggcagtgctaa

SEQ ID NO: 134392 - DNA, 17 bp, Arabidopsis thaliana
tatgcggtttggtcacc

SEQ ID NO: 134393 - DNA, 17 bp, Arabidopsis thaliana
tatgcggtttttgctgg

SEQ ID NO: 134394 - DNA, 17 bp, Arabidopsis thaliana
tatgcgtatggccagtt

SEQ ID NO: 134395 - DNA, 17 bp, Arabidopsis thaliana
tatgcgtcctatcttcc

SEQ ID NO: 134396 - DNA, 17 bp, Arabidopsis thaliana
tatgcgtcggactcgct

SEQ ID NO: 134397 - DNA, 17 bp, Arabidopsis thaliana
tatgcgttcacactgtg

SEQ ID NO: 134398 - DNA, 17 bp, Arabidopsis thaliana
tatgcgttgtcaggagg

SEQ ID NO: 134399 - DNA, 17 bp, Arabidopsis thaliana
tatgcgttgtcaggtgg

SEQ ID NO: 134400 - DNA, 17 bp, Arabidopsis thaliana
tatgcgtttgatggaca

SEQ ID NO: 134401 - DNA, 17 bp, Arabidopsis thaliana
tatgcgtttgcgaattg

SEQ ID NO: 134402 - DNA, 17 bp, Arabidopsis thaliana
tatgcgtttgcgaattt

SEQ ID NO: 134403 - DNA, 17 bp, Arabidopsis thaliana
tatgcgtttttgggtca

SEQ ID NO: 134404 - DNA, 17 bp, Arabidopsis thaliana
tatgctacatacggata

SEQ ID NO: 134405 - DNA, 17 bp, Arabidopsis thaliana
tatgctactaagctgcc

SEQ ID NO: 134406 - DNA, 17 bp, Arabidopsis thaliana
tatgctactccttgccg

SEQ ID NO: 134407 - DNA, 17 bp, Arabidopsis thaliana
tatgctacttcttgccg

SEQ ID NO: 134408 - DNA, 17 bp, Arabidopsis thaliana
tatgctagaagagtcag

SEQ ID NO: 134409 - DNA, 17 bp, Arabidopsis thaliana
tatgctaggtggttgag

SEQ ID NO: 134410 - DNA, 17 bp, Arabidopsis thaliana
tatgctcatcgacaaag

SEQ ID NO: 134411 - DNA, 17 bp, Arabidopsis thaliana
tatgctcgaagattgcg

SEQ ID NO: 134412 - DNA, 17 bp, Arabidopsis thaliana
tatgctcggctctgctt

SEQ ID NO: 134413 - DNA, 17 bp, Arabidopsis thaliana
tatgctctcgtggctaa

SEQ ID NO: 134414 - DNA, 17 bp, Arabidopsis thaliana
tatgctctgacccgagt

SEQ ID NO: 134415 - DNA, 17 bp, Arabidopsis thaliana
tatgctctggtgcgatt

SEQ ID NO: 134416 - DNA, 17 bp, Arabidopsis thaliana
tatgctcttgacggttg

SEQ ID NO: 134417 - DNA, 17 bp, Arabidopsis thaliana
tatgctctttttgtctg

SEQ ID NO: 134418 - DNA, 17 bp, Arabidopsis thaliana
tatgctgccaccatcca

SEQ ID NO: 134419 - DNA, 17 bp, Arabidopsis thaliana
tatgctgccatcttgag

SEQ ID NO: 134420 - DNA, 17 bp, Arabidopsis thaliana
tatgctgctcccatgga

SEQ ID NO: 134421 - DNA, 17 bp, Arabidopsis thaliana
tatgctggaatatggtc

SEQ ID NO: 134422 - DNA, 17 bp, Arabidopsis thaliana
tatgctggccctgaagt

SEQ ID NO: 134423 - DNA, 17 bp, Arabidopsis thaliana
tatgcttcaaagctgcc

SEQ ID NO: 134424 - DNA, 17 bp, Arabidopsis thaliana
tatgcttcaatacgaac

SEQ ID NO: 134425 - DNA, 17 bp, Arabidopsis thaliana
tatgcttcagagtggac

SEQ ID NO: 134426 - DNA, 17 bp, Arabidopsis thaliana
tatgcttcatccactta

SEQ ID NO: 134427 - DNA, 17 bp, Arabidopsis thaliana
tatgcttcgaagattcg

SEQ ID NO: 134428 - DNA, 17 bp, Arabidopsis thaliana
tatgcttctctttgtcc

SEQ ID NO: 134429 - DNA, 17 bp, Arabidopsis thaliana
tatgcttgtctcaaaga

SEQ ID NO: 134430 - DNA, 17 bp, Arabidopsis thaliana
tatgctttggccgagtg

SEQ ID NO: 134431 - DNA, 17 bp, Arabidopsis thaliana
tatgctttggctgatca

SEQ ID NO: 134432 - DNA, 17 bp, Arabidopsis thaliana
tatggaaacaagaactt

SEQ ID NO: 134433 - DNA, 17 bp, Arabidopsis thaliana
tatggaaactcaacacc

SEQ ID NO: 134434 - DNA, 17 bp, Arabidopsis thaliana
tatggaaactctgtgcg

SEQ ID NO: 134435 - DNA, 17 bp, Arabidopsis thaliana
tatggaaagatgtaggc

SEQ ID NO: 134436 - DNA, 17 bp, Arabidopsis thaliana
tatggaacggagacttt

SEQ ID NO: 134437 - DNA, 17 bp, Arabidopsis thaliana
tatggaactacgacaat

SEQ ID NO: 134438 - DNA, 17 bp, Arabidopsis thaliana
tatggaacttgacttgc

SEQ ID NO: 134439 - DNA, 17 bp, Arabidopsis thaliana
tatggaacttttccggg

SEQ ID NO: 134440 - DNA, 17 bp, Arabidopsis thaliana
tatggaagcataacaac

SEQ ID NO: 134441 - DNA, 17 bp, Arabidopsis thaliana
tatggacaacgggctgc

SEQ ID NO: 134442 - DNA, 17 bp, Arabidopsis thaliana
tatggacaatgccgaga

SEQ ID NO: 134443 - DNA, 17 bp, Arabidopsis thaliana
tatggacaatgggctgc

SEQ ID NO: 134444 - DNA, 17 bp, Arabidopsis thaliana
tatggaccaagcacggt

SEQ ID NO: 134445 - DNA, 17 bp, Arabidopsis thaliana
tatggacccgaaattgg

SEQ ID NO: 134446 - DNA, 17 bp, Arabidopsis thaliana
tatggaccctgattaca

SEQ ID NO: 134447 - DNA, 17 bp, Arabidopsis thaliana
tatggaccgtccaactt

SEQ ID NO: 134448 - DNA, 17 bp, Arabidopsis thaliana
tatggaccgtggtataa

SEQ ID NO: 134449 - DNA, 17 bp, Arabidopsis thaliana
tatggacgcccaatcta

SEQ ID NO: 134450 - DNA, 17 bp, Arabidopsis thaliana
tatggacgccggcgacg

SEQ ID NO: 134451 - DNA, 17 bp, Arabidopsis thaliana
tatggactaatcggccc

SEQ ID NO: 134452 - DNA, 17 bp, Arabidopsis thaliana
tatggactggacattgt

SEQ ID NO: 134453 - DNA, 17 bp, Arabidopsis thaliana
tatggactggactgctt

SEQ ID NO: 134454 - DNA, 17 bp, Arabidopsis thaliana
tatggactggtgtacga

SEQ ID NO: 134455 - DNA, 17 bp, Arabidopsis thaliana
tatggactggtgttgga

SEQ ID NO: 134456 - DNA, 17 bp, Arabidopsis thaliana
tatggactttggctaca

SEQ ID NO: 134457 - DNA, 17 bp, Arabidopsis thaliana
tatggagagagttggcc

SEQ ID NO: 134458 - DNA, 17 bp, Arabidopsis thaliana
tatggagagtcttctgt

SEQ ID NO: 134459 - DNA, 17 bp, Arabidopsis thaliana
tatggagggggtggtgg

SEQ ID NO: 134460 - DNA, 17 bp, Arabidopsis thaliana
tatggaggtgttgggtt

SEQ ID NO: 134461 - DNA, 17 bp, Arabidopsis thaliana
tatggagtgctgattgc

SEQ ID NO: 134462 - DNA, 17 bp, Arabidopsis thaliana
tatggataatgggctgc

SEQ ID NO: 134463 - DNA, 17 bp, Arabidopsis thaliana
tatggatactaggcgct

SEQ ID NO: 134464 - DNA, 17 bp, Arabidopsis thaliana
tatggatccagacgcgg

SEQ ID NO: 134465 - DNA, 17 bp, Arabidopsis thaliana
tatggatcccgcctttg

SEQ ID NO: 134466 - DNA, 17 bp, Arabidopsis thaliana
tatggatgtgattatcg

SEQ ID NO: 134467 - DNA, 17 bp, Arabidopsis thaliana
tatggattcctgagggt

SEQ ID NO: 134468 - DNA, 17 bp, Arabidopsis thaliana
tatggattcggcaaaga

SEQ ID NO: 134469 - DNA, 17 bp, Arabidopsis thaliana
tatggattcgtggcata

SEQ ID NO: 134470 - DNA, 17 bp, Arabidopsis thaliana
tatggattgtcacagtt

SEQ ID NO: 134471 - DNA, 17 bp, Arabidopsis thaliana
tatggatttcagagcgg

SEQ ID NO: 134472 - DNA, 17 bp, Arabidopsis thaliana
tatggcagagacagcgt

SEQ ID NO: 134473 - DNA, 17 bp, Arabidopsis thaliana
tatggcagttgaggctg

SEQ ID NO: 134474 - DNA, 17 bp, Arabidopsis thaliana
tatggcattcggcccaa

SEQ ID NO: 134475 - DNA, 17 bp, Arabidopsis thaliana
tatggccaaaatccgta

SEQ ID NO: 134476 - DNA, 17 bp, Arabidopsis thaliana
tatggccctgttcgttt

SEQ ID NO: 134477 - DNA, 17 bp, Arabidopsis thaliana
tatggccgacaccgtta

SEQ ID NO: 134478 - DNA, 17 bp, Arabidopsis thaliana
tatggccgagttgttga

SEQ ID NO: 134479 - DNA, 17 bp, Arabidopsis thaliana
tatggccgatcagcaaa

SEQ ID NO: 134480 - DNA, 17 bp, Arabidopsis thaliana
tatggccgttcgccagg

SEQ ID NO: 134481 - DNA, 17 bp, Arabidopsis thaliana
tatggcgacattgaatg

SEQ ID NO: 134482 - DNA, 17 bp, Arabidopsis thaliana
tatggcgagtcaatgac

SEQ ID NO: 134483 - DNA, 17 bp, Arabidopsis thaliana
tatggcggaccgatcct

SEQ ID NO: 134484 - DNA, 17 bp, Arabidopsis thaliana
tatggcggtgaagacgg

SEQ ID NO: 134485 - DNA, 17 bp, Arabidopsis thaliana
tatggcggttctcagtg

SEQ ID NO: 134486 - DNA, 17 bp, Arabidopsis thaliana
tatggctaatgcgcagt

SEQ ID NO: 134487 - DNA, 17 bp, Arabidopsis thaliana
tatggctatgcagtgtc

SEQ ID NO: 134488 - DNA, 17 bp, Arabidopsis thaliana
tatggctcatcccgtat

SEQ ID NO: 134489 - DNA, 17 bp, Arabidopsis thaliana
tatggctccactcgtga

SEQ ID NO: 134490 - DNA, 17 bp, Arabidopsis thaliana
tatggctcgttctacgg

SEQ ID NO: 134491 - DNA, 17 bp, Arabidopsis thaliana
tatggctctgaaaactg

SEQ ID NO: 134492 - DNA, 17 bp, Arabidopsis thaliana
tatggctctgaacgatt

SEQ ID NO: 134493 - DNA, 17 bp, Arabidopsis thaliana
tatggctctgttcgttt

SEQ ID NO: 134494 - DNA, 17 bp, Arabidopsis thaliana
tatggctcttgaccatt

SEQ ID NO: 134495 - DNA, 17 bp, Arabidopsis thaliana
tatggctgagttatcgt

SEQ ID NO: 134496 - DNA, 17 bp, Arabidopsis thaliana
tatggctgggcataaaa

SEQ ID NO: 134497 - DNA, 17 bp, Arabidopsis thaliana
tatggcttacctgaagt

SEQ ID NO: 134498 - DNA, 17 bp, Arabidopsis thaliana
tatggcttggaacaggc

SEQ ID NO: 134499 - DNA, 17 bp, Arabidopsis thaliana
tatggctttctcgcaaa

SEQ ID NO: 134500 - DNA, 17 bp, Arabidopsis thaliana
tatgggaaaccaatctt

SEQ ID NO: 134501 - DNA, 17 bp, Arabidopsis thaliana
tatgggaaagctccaca

SEQ ID NO: 134502 - DNA, 17 bp, Arabidopsis thaliana
tatgggacgggtttggc

SEQ ID NO: 134503 - DNA, 17 bp, Arabidopsis thaliana
tatgggagctggccatg

SEQ ID NO: 134504 - DNA, 17 bp, Arabidopsis thaliana
tatgggattcaagtcgt

SEQ ID NO: 134505 - DNA, 17 bp, Arabidopsis thaliana
tatgggattcagtccac

SEQ ID NO: 134506 - DNA, 17 bp, Arabidopsis thaliana
tatgggattcagttggc

SEQ ID NO: 134507 - DNA, 17 bp, Arabidopsis thaliana
tatgggattctgagcac

SEQ ID NO: 134508 - DNA, 17 bp, Arabidopsis thaliana
tatgggattgattgcag

SEQ ID NO: 134509 - DNA, 17 bp, Arabidopsis thaliana
tatgggcaagtccatgg

SEQ ID NO: 134510 - DNA, 17 bp, Arabidopsis thaliana
tatgggccgccattaat

SEQ ID NO: 134511 - DNA, 17 bp, Arabidopsis thaliana
tatgggctatccaatca

SEQ ID NO: 134512 - DNA, 17 bp, Arabidopsis thaliana
tatgggctcgttacaat

SEQ ID NO: 134513 - DNA, 17 bp, Arabidopsis thaliana
tatgggcttcacaagtt

SEQ ID NO: 134514 - DNA, 17 bp, Arabidopsis thaliana
tatgggcttccatactt

SEQ ID NO: 134515 - DNA, 17 bp, Arabidopsis thaliana
tatgggcttgaccatat

SEQ ID NO: 134516 - DNA, 17 bp, Arabidopsis thaliana
tatgggcttgacgatat

SEQ ID NO: 134517 - DNA, 17 bp, Arabidopsis thaliana
tatgggcttgattggtt

SEQ ID NO: 134518 - DNA, 17 bp, Arabidopsis thaliana
tatgggctttgtccacc

SEQ ID NO: 134519 - DNA, 17 bp, Arabidopsis thaliana
tatgggcttttggattt

SEQ ID NO: 134520 - DNA, 17 bp, Arabidopsis thaliana
tatggggccgactacaa

SEQ ID NO: 134521 - DNA, 17 bp, Arabidopsis thaliana
tatggggtcgcttctgt

SEQ ID NO: 134522 - DNA, 17 bp, Arabidopsis thaliana
tatggggttctgctcgc

SEQ ID NO: 134523 - DNA, 17 bp, Arabidopsis thaliana
tatgggtccacctttgt

SEQ ID NO: 134524 - DNA, 17 bp, Arabidopsis thaliana
tatgggtgcgtttgcgg

SEQ ID NO: 134525 - DNA, 17 bp, Arabidopsis thaliana
tatgggtggtggggcat

SEQ ID NO: 134526 - DNA, 17 bp, Arabidopsis thaliana
tatgggtggtggtgcat

SEQ ID NO: 134527 - DNA, 17 bp, Arabidopsis thaliana
tatgggtggtgtgcatg

SEQ ID NO: 134528 - DNA, 17 bp, Arabidopsis thaliana
tatgggttcgtgtcccg

SEQ ID NO: 134529 - DNA, 17 bp, Arabidopsis thaliana
tatggtaaggatttgga

SEQ ID NO: 134530 - DNA, 17 bp, Arabidopsis thaliana
tatggtactacgacaat

SEQ ID NO: 134531 - DNA, 17 bp, Arabidopsis thaliana
tatggtagagcgctcgc

SEQ ID NO: 134532 - DNA, 17 bp, Arabidopsis thaliana
tatggtaggacgagttt

SEQ ID NO: 134533 - DNA, 17 bp, Arabidopsis thaliana
tatggtcaagcccatat

SEQ ID NO: 134534 - DNA, 17 bp, Arabidopsis thaliana
tatggtcactatctcag

SEQ ID NO: 134535 - DNA, 17 bp, Arabidopsis thaliana
tatggtcagacgggttt

SEQ ID NO: 134536 - DNA, 17 bp, Arabidopsis thaliana
tatggtccccgaacccg

SEQ ID NO: 134537 - DNA, 17 bp, Arabidopsis thaliana
tatggtcctttccagtt

SEQ ID NO: 134538 - DNA, 17 bp, Arabidopsis thaliana
tatggtcgcaaggctga

SEQ ID NO: 134539 - DNA, 17 bp, Arabidopsis thaliana
tatggtcgcaagggtga

SEQ ID NO: 134540 - DNA, 17 bp, Arabidopsis thaliana
tatggtcgtgcggctaa

SEQ ID NO: 134541 - DNA, 17 bp, Arabidopsis thaliana
tatggtctaaaccaagc

SEQ ID NO: 134542 - DNA, 17 bp, Arabidopsis thaliana
tatggtctgctagagga

SEQ ID NO: 134543 - DNA, 17 bp, Arabidopsis thaliana
tatggtgaaacaggttt

SEQ ID NO: 134544 - DNA, 17 bp, Arabidopsis thaliana
tatggtgcactccgatg

SEQ ID NO: 134545 - DNA, 17 bp, Arabidopsis thaliana
tatggtgccatcaacca

SEQ ID NO: 134546 - DNA, 17 bp, Arabidopsis thaliana
tatggtgcctatttcca

SEQ ID NO: 134547 - DNA, 17 bp, Arabidopsis thaliana
tatggtggcctcagcaa

SEQ ID NO: 134548 - DNA, 17 bp, Arabidopsis thaliana
tatggtgggacgggttt

SEQ ID NO: 134549 - DNA, 17 bp, Arabidopsis thaliana
tatggtggtagttccgg

SEQ ID NO: 134550 - DNA, 17 bp, Arabidopsis thaliana
tatggtgtgacgggttt

SEQ ID NO: 134551 - DNA, 17 bp, Arabidopsis thaliana
tatggtgtttcaacttg

SEQ ID NO: 134552 - DNA, 17 bp, Arabidopsis thaliana
tatggttacgcagagtg

SEQ ID NO: 134553 - DNA, 17 bp, Arabidopsis thaliana
tatggttatgccggcga

SEQ ID NO: 134554 - DNA, 17 bp, Arabidopsis thaliana
tatggttcgagtcccgg

SEQ ID NO: 134555 - DNA, 17 bp, Arabidopsis thaliana
tatggttcggttcgtta

SEQ ID NO: 134556 - DNA, 17 bp, Arabidopsis thaliana
tatggttgattctagcg

SEQ ID NO: 134557 - DNA, 17 bp, Arabidopsis thaliana
tatggttgccacatcat

SEQ ID NO: 134558 - DNA, 17 bp, Arabidopsis thaliana
tatggttgtgccatggc

SEQ ID NO: 134559 - DNA, 17 bp, Arabidopsis thaliana
tatggtttcgctatagg

SEQ ID NO: 134560 - DNA, 17 bp, Arabidopsis thaliana
tatggtttcggacctga

SEQ ID NO: 134561 - DNA, 17 bp, Arabidopsis thaliana
tatggtttctcgtggcg

SEQ ID NO: 134562 - DNA, 17 bp, Arabidopsis thaliana
tatggtttggtttcgga

SEQ ID NO: 134563 - DNA, 17 bp, Arabidopsis thaliana
tatggtttgtgcaaact

SEQ ID NO: 134564 - DNA, 17 bp, Arabidopsis thaliana
tatggtttgtgcaaagt

SEQ ID NO: 134565 - DNA, 17 bp, Arabidopsis thaliana
tatggttttcttggccc

SEQ ID NO: 134566 - DNA, 17 bp, Arabidopsis thaliana
tatgtaaccaagacctc

SEQ ID NO: 134567 - DNA, 17 bp, Arabidopsis thaliana
tatgtaacccccttgtc

SEQ ID NO: 134568 - DNA, 17 bp, Arabidopsis thaliana
tatgtaatgtccgggct

SEQ ID NO: 134569 - DNA, 17 bp, Arabidopsis thaliana
tatgtacagttggccgg

SEQ ID NO: 134570 - DNA, 17 bp, Arabidopsis thaliana
tatgtactgtgaccggt

SEQ ID NO: 134571 - DNA, 17 bp, Arabidopsis thaliana
tatgtagccctagatgt

SEQ ID NO: 134572 - DNA, 17 bp, Arabidopsis thaliana
tatgtagtcgagtggtc

SEQ ID NO: 134573 - DNA, 17 bp, Arabidopsis thaliana
tatgtagtcgagtggtg

SEQ ID NO: 134574 - DNA, 17 bp, Arabidopsis thaliana
tatgtagtcgctggttg

SEQ ID NO: 134575 - DNA, 17 bp, Arabidopsis thaliana
tatgtatccttaacacg

SEQ ID NO: 134576 - DNA, 17 bp, Arabidopsis thaliana
tatgtatctaccgctgc

SEQ ID NO: 134577 - DNA, 17 bp, Arabidopsis thaliana
tatgtattttccacttt

SEQ ID NO: 134578 - DNA, 17 bp, Arabidopsis thaliana
tatgtcaaaaggaccaa

SEQ ID NO: 134579 - DNA, 17 bp, Arabidopsis thaliana
tatgtcaagcccatatt

SEQ ID NO: 134580 - DNA, 17 bp, Arabidopsis thaliana
tatgtcacgttcaggcc

SEQ ID NO: 134581 - DNA, 17 bp, Arabidopsis thaliana
tatgtcacgtttcaggc

SEQ ID NO: 134582 - DNA, 17 bp, Arabidopsis thaliana
tatgtcactaagttctg

SEQ ID NO: 134583 - DNA, 17 bp, Arabidopsis thaliana
tatgtcaggaccaggac

SEQ ID NO: 134584 - DNA, 17 bp, Arabidopsis thaliana
tatgtccacgaaatagc

SEQ ID NO: 134585 - DNA, 17 bp, Arabidopsis thaliana
tatgtccactaaggtcc

SEQ ID NO: 134586 - DNA, 17 bp, Arabidopsis thaliana
tatgtccatcgccgacg

SEQ ID NO: 134587 - DNA, 17 bp, Arabidopsis thaliana
tatgtccattctgcccg

SEQ ID NO: 134588 - DNA, 17 bp, Arabidopsis thaliana
tatgtcccagaaggtgt

SEQ ID NO: 134589 - DNA, 17 bp, Arabidopsis thaliana
tatgtccgagactaatg

SEQ ID NO: 134590 - DNA, 17 bp, Arabidopsis thaliana
tatgtccgccggcgaga

SEQ ID NO: 134591 - DNA, 17 bp, Arabidopsis thaliana
tatgtccgggttctggt

SEQ ID NO: 134592 - DNA, 17 bp, Arabidopsis thaliana
tatgtcgaggctatttg

SEQ ID NO: 134593 - DNA, 17 bp, Arabidopsis thaliana
tatgtcgaggctatttt

SEQ ID NO: 134594 - DNA, 17 bp, Arabidopsis thaliana
tatgtcgggcttgtgca

SEQ ID NO: 134595 - DNA, 17 bp, Arabidopsis thaliana
tatgtcgttttcggttt

SEQ ID NO: 134596 - DNA, 17 bp, Arabidopsis thaliana
tatgtctcagactttgg

SEQ ID NO: 134597 - DNA, 17 bp, Arabidopsis thaliana
tatgtctgctagcccat

SEQ ID NO: 134598 - DNA, 17 bp, Arabidopsis thaliana
tatgtctgttattgctc

SEQ ID NO: 134599 - DNA, 17 bp, Arabidopsis thaliana
tatgtcttagattccgg

SEQ ID NO: 134600 - DNA, 17 bp, Arabidopsis thaliana
tatgtcttcacagttgc

SEQ ID NO: 134601 - DNA, 17 bp, Arabidopsis thaliana
tatgtcttctggttctg

SEQ ID NO: 134602 - DNA, 17 bp, Arabidopsis thaliana
tatgtctttggagccac

SEQ ID NO: 134603 - DNA, 17 bp, Arabidopsis thaliana
tatgtctttgtagatgg

SEQ ID NO: 134604 - DNA, 17 bp, Arabidopsis thaliana
tatgtgaaatggccggt

SEQ ID NO: 134605 - DNA, 17 bp, Arabidopsis thaliana
tatgtgaacttcgcatg

SEQ ID NO: 134606 - DNA, 17 bp, Arabidopsis thaliana
tatgtgaactttgaggt

SEQ ID NO: 134607 - DNA, 17 bp, Arabidopsis thaliana
tatgtgaagaaaatttt

SEQ ID NO: 134608 - DNA, 17 bp, Arabidopsis thaliana
tatgtgactggtgtttg

SEQ ID NO: 134609 - DNA, 17 bp, Arabidopsis thaliana
tatgtgagttattggcc

SEQ ID NO: 134610 - DNA, 17 bp, Arabidopsis thaliana
tatgtgatctaggagct

SEQ ID NO: 134611 - DNA, 17 bp, Arabidopsis thaliana
tatgtgatcttggagct

SEQ ID NO: 134612 - DNA, 17 bp, Arabidopsis thaliana
tatgtgattggtcgcaa

SEQ ID NO: 134613 - DNA, 17 bp, Arabidopsis thaliana
tatgtgcattggtcggc

SEQ ID NO: 134614 - DNA, 17 bp, Arabidopsis thaliana
tatgtgccatatccacg

SEQ ID NO: 134615 - DNA, 17 bp, Arabidopsis thaliana
tatgtgccttggagcaa

SEQ ID NO: 134616 - DNA, 17 bp, Arabidopsis thaliana
tatgtgcgattcgtcca

SEQ ID NO: 134617 - DNA, 17 bp, Arabidopsis thaliana
tatgtgcggaaaaaaag

SEQ ID NO: 134618 - DNA, 17 bp, Arabidopsis thaliana
tatgtgcggaccgggct

SEQ ID NO: 134619 - DNA, 17 bp, Arabidopsis thaliana
tatgtgcggatcgagct

SEQ ID NO: 134620 - DNA, 17 bp, Arabidopsis thaliana
tatgtgcggatcgggct

SEQ ID NO: 134621 - DNA, 17 bp, Arabidopsis thaliana
tatgtgcgggtcagaat

SEQ ID NO: 134622 - DNA, 17 bp, Arabidopsis thaliana
tatgtgcttctggctct

SEQ ID NO: 134623 - DNA, 17 bp, Arabidopsis thaliana
tatgtggatcgcttcat

SEQ ID NO: 134624 - DNA, 17 bp, Arabidopsis thaliana
tatgtggcttatgtgtt

SEQ ID NO: 134625 - DNA, 17 bp, Arabidopsis thaliana
tatgtggctttcccaga

SEQ ID NO: 134626 - DNA, 17 bp, Arabidopsis thaliana
tatgtgggttttgagta

SEQ ID NO: 134627 - DNA, 17 bp, Arabidopsis thaliana
tatgtggtgagcctgta

SEQ ID NO: 134628 - DNA, 17 bp, Arabidopsis thaliana
tatgtggttgactggta

SEQ ID NO: 134629 - DNA, 17 bp, Arabidopsis thaliana
tatgtgtacaatgtccc

SEQ ID NO: 134630 - DNA, 17 bp, Arabidopsis thaliana
tatgtgtacgcgccttc

SEQ ID NO: 134631 - DNA, 17 bp, Arabidopsis thaliana
tatgtgtactttgagac

SEQ ID NO: 134632 - DNA, 17 bp, Arabidopsis thaliana
tatgtgtagatcgggct

SEQ ID NO: 134633 - DNA, 17 bp, Arabidopsis thaliana
tatgtgtattgaccggc

SEQ ID NO: 134634 - DNA, 17 bp, Arabidopsis thaliana
tatgtgtcaggacctac

SEQ ID NO: 134635 - DNA, 17 bp, Arabidopsis thaliana
tatgtgttctggaacca

SEQ ID NO: 134636 - DNA, 17 bp, Arabidopsis thaliana
tatgtgttcttgtaatg

SEQ ID NO: 134637 - DNA, 17 bp, Arabidopsis thaliana
tatgtgtttgctgtcga

SEQ ID NO: 134638 - DNA, 17 bp, Arabidopsis thaliana
tatgtgtttttctcgac

SEQ ID NO: 134639 - DNA, 17 bp, Arabidopsis thaliana
tatgttatctggttgct

SEQ ID NO: 134640 - DNA, 17 bp, Arabidopsis thaliana
tatgttatcttcgatgt

SEQ ID NO: 134641 - DNA, 17 bp, Arabidopsis thaliana
tatgttatgctcattgg

SEQ ID NO: 134642 - DNA, 17 bp, Arabidopsis thaliana
tatgttatgtgacggct

SEQ ID NO: 134643 - DNA, 17 bp, Arabidopsis thaliana
tatgttcactcgagact

SEQ ID NO: 134644 - DNA, 17 bp, Arabidopsis thaliana
tatgttcagaccgcgag

SEQ ID NO: 134645 - DNA, 17 bp, Arabidopsis thaliana
tatgttcagaggtttat

SEQ ID NO: 134646 - DNA, 17 bp, Arabidopsis thaliana
tatgttcattgacggct

SEQ ID NO: 134647 - DNA, 17 bp, Arabidopsis thaliana
tatgttccaagggttgg

SEQ ID NO: 134648 - DNA, 17 bp, Arabidopsis thaliana
tatgttctccggtgtct

SEQ ID NO: 134649 - DNA, 17 bp, Arabidopsis thaliana
tatgttctcgtctactc

SEQ ID NO: 134650 - DNA, 17 bp, Arabidopsis thaliana
tatgttcttggggacct

SEQ ID NO: 134651 - DNA, 17 bp, Arabidopsis thaliana
tatgttgactaaccttc

SEQ ID NO: 134652 - DNA, 17 bp, Arabidopsis thaliana
tatgttgcaccagctcc

SEQ ID NO: 134653 - DNA, 17 bp, Arabidopsis thaliana
tatgttgcagctggtca

SEQ ID NO: 134654 - DNA, 17 bp, Arabidopsis thaliana
tatgttggccgagttca

SEQ ID NO: 134655 - DNA, 17 bp, Arabidopsis thaliana
tatgttggctctgttcg

SEQ ID NO: 134656 - DNA, 17 bp, Arabidopsis thaliana
tatgttgggctgtgata

SEQ ID NO: 134657 - DNA, 17 bp, Arabidopsis thaliana
tatgttgttatctgtcg

SEQ ID NO: 134658 - DNA, 17 bp, Arabidopsis thaliana
tatgtttacgcagagtg

SEQ ID NO: 134659 - DNA, 17 bp, Arabidopsis thaliana
tatgtttgacttcttct

SEQ ID NO: 134660 - DNA, 17 bp, Arabidopsis thaliana
tatgtttgatccgtagg

SEQ ID NO: 134661 - DNA, 17 bp, Arabidopsis thaliana
tatgtttgctgccaccg

SEQ ID NO: 134662 - DNA, 17 bp, Arabidopsis thaliana
tatgttttcatccaacg

SEQ ID NO: 134663 - DNA, 17 bp, Arabidopsis thaliana
tatgttttttggttccg

SEQ ID NO: 134664 - DNA, 17 bp, Arabidopsis thaliana
tattacaagatctcctg

SEQ ID NO: 134665 - DNA, 17 bp, Arabidopsis thaliana
tattacaatgcggtacg

SEQ ID NO: 134666 - DNA, 17 bp, Arabidopsis thaliana
tattacacgatgtggtt

SEQ ID NO: 134667 - DNA, 17 bp, Arabidopsis thaliana
tattacacgtttaggca

SEQ ID NO: 134668 - DNA, 17 bp, Arabidopsis thaliana
tattacagtgcggtacg

SEQ ID NO: 134669 - DNA, 17 bp, Arabidopsis thaliana
tattacagtgggtggac

SEQ ID NO: 134670 - DNA, 17 bp, Arabidopsis thaliana
tattacatgatgtagtt

SEQ ID NO: 134671 - DNA, 17 bp, Arabidopsis thaliana
tattacatgatgtggtt

SEQ ID NO: 134672 - DNA, 17 bp, Arabidopsis thaliana
tattacatgctgtagtt

SEQ ID NO: 134673 - DNA, 17 bp, Arabidopsis thaliana
tattacatgctgtggtt

SEQ ID NO: 134674 - DNA, 17 bp, Arabidopsis thaliana
tattacatgttgtggtt

SEQ ID NO: 134675 - DNA, 17 bp, Arabidopsis thaliana
tattaccaggtaggttg

SEQ ID NO: 134676 - DNA, 17 bp, Arabidopsis thaliana
tattacgcaaatgtcat

SEQ ID NO: 134677 - DNA, 17 bp, Arabidopsis thaliana
tattacggtggcggcct

SEQ ID NO: 134678 - DNA, 17 bp, Arabidopsis thaliana
tattacgttggcggcct

SEQ ID NO: 134679 - DNA, 17 bp, Arabidopsis thaliana
tattactaggtgagtgt

SEQ ID NO: 134680 - DNA, 17 bp, Arabidopsis thaliana
tattactatcgctcaaa

SEQ ID NO: 134681 - DNA, 17 bp, Arabidopsis thaliana
tattactgcacgggcct

SEQ ID NO: 134682 - DNA, 17 bp, Arabidopsis thaliana
tattagaccatcctcat

SEQ ID NO: 134683 - DNA, 17 bp, Arabidopsis thaliana
tattagactgtgagctt

SEQ ID NO: 134684 - DNA, 17 bp, Arabidopsis thaliana
tattagatcaccgtcag

SEQ ID NO: 134685 - DNA, 17 bp, Arabidopsis thaliana
tattagcggttggcacc

SEQ ID NO: 134686 - DNA, 17 bp, Arabidopsis thaliana
tattagctacaggtgtt

SEQ ID NO: 134687 - DNA, 17 bp, Arabidopsis thaliana
tattagcttaggcagct

SEQ ID NO: 134688 - DNA, 17 bp, Arabidopsis thaliana
tattagcttcaagttgc

SEQ ID NO: 134689 - DNA, 17 bp, Arabidopsis thaliana
tattaggagatctccaa

SEQ ID NO: 134690 - DNA, 17 bp, Arabidopsis thaliana
tattaggccatctccat

SEQ ID NO: 134691 - DNA, 17 bp, Arabidopsis thaliana
tattagggcgaacgacc

SEQ ID NO: 134692 - DNA, 17 bp, Arabidopsis thaliana
tattaggtgcgctgacg

SEQ ID NO: 134693 - DNA, 17 bp, Arabidopsis thaliana
tattaggtgcttcgtag

SEQ ID NO: 134694 - DNA, 17 bp, Arabidopsis thaliana
tattagtccaaccgcct

SEQ ID NO: 134695 - DNA, 17 bp, Arabidopsis thaliana
tattagtcgcatcctgt

SEQ ID NO: 134696 - DNA, 17 bp, Arabidopsis thaliana
tattagttcaaccgctt

SEQ ID NO: 134697 - DNA, 17 bp, Arabidopsis thaliana
tattagttccgttccaa

SEQ ID NO: 134698 - DNA, 17 bp, Arabidopsis thaliana
tattagttgcactgttc

SEQ ID NO: 134699 - DNA, 17 bp, Arabidopsis thaliana
tattagtttagtcccaa

SEQ ID NO: 134700 - DNA, 17 bp, Arabidopsis thaliana
tattatcgactgggcag

SEQ ID NO: 134701 - DNA, 17 bp, Arabidopsis thaliana
tattatcgttatttccg

SEQ ID NO: 134702 - DNA, 17 bp, Arabidopsis thaliana
tattatgaaattgctcc

SEQ ID NO: 134703 - DNA, 17 bp, Arabidopsis thaliana
tattatgacagacgatg

SEQ ID NO: 134704 - DNA, 17 bp, Arabidopsis thaliana
tattatgtgatccttgt

SEQ ID NO: 134705 - DNA, 17 bp, Arabidopsis thaliana
tattattcggacctggt

SEQ ID NO: 134706 - DNA, 17 bp, Arabidopsis thaliana
tattattcgtttggacc

SEQ ID NO: 134707 - DNA, 17 bp, Arabidopsis thaliana
tattatttccggtgcca

SEQ ID NO: 134708 - DNA, 17 bp, Arabidopsis thaliana
tattatttgtggggcgg

SEQ ID NO: 134709 - DNA, 17 bp, Arabidopsis thaliana
tattcaaccgtgatatc

SEQ ID NO: 134710 - DNA, 17 bp, Arabidopsis thaliana
tattcaacgcggcgact

SEQ ID NO: 134711 - DNA, 17 bp, Arabidopsis thaliana
tattcaactacctaccg

SEQ ID NO: 134712 - DNA, 17 bp, Arabidopsis thaliana
tattcaacttccgatgt

SEQ ID NO: 134713 - DNA, 17 bp, Arabidopsis thaliana
tattcaacttctgatgt

SEQ ID NO: 134714 - DNA, 17 bp, Arabidopsis thaliana
tattcaaggagtttgcg

SEQ ID NO: 134715 - DNA, 17 bp, Arabidopsis thaliana
tattcaaggttcgcaat

SEQ ID NO: 134716 - DNA, 17 bp, Arabidopsis thaliana
tattcaagtccgtttga

SEQ ID NO: 134717 - DNA, 17 bp, Arabidopsis thaliana
tattcaatctgccaaac

SEQ ID NO: 134718 - DNA, 17 bp, Arabidopsis thaliana
tattcaatcttgggcct

SEQ ID NO: 134719 - DNA, 17 bp, Arabidopsis thaliana
tattcaattcttggatc

SEQ ID NO: 134720 - DNA, 17 bp, Arabidopsis thaliana
tattcacaacgttgcca

SEQ ID NO: 134721 - DNA, 17 bp, Arabidopsis thaliana
tattcaccaggagccat

SEQ ID NO: 134722 - DNA, 17 bp, Arabidopsis thaliana
tattcaccgcttgctgt

SEQ ID NO: 134723 - DNA, 17 bp, Arabidopsis thaliana
tattcactccaaattgc

SEQ ID NO: 134724 - DNA, 17 bp, Arabidopsis thaliana
tattcactccaaatttc

SEQ ID NO: 134725 - DNA, 17 bp, Arabidopsis thaliana
tattcagagccgtgcct

SEQ ID NO: 134726 - DNA, 17 bp, Arabidopsis thaliana
tattcagattgcagggg

SEQ ID NO: 134727 - DNA, 17 bp, Arabidopsis thaliana
tattcagatttgcctcg

SEQ ID NO: 134728 - DNA, 17 bp, Arabidopsis thaliana
tattcagcaggacgttc

SEQ ID NO: 134729 - DNA, 17 bp, Arabidopsis thaliana
tattcagccctttgtcg

SEQ ID NO: 134730 - DNA, 17 bp, Arabidopsis thaliana
tattcagccctttttcg

SEQ ID NO: 134731 - DNA, 17 bp, Arabidopsis thaliana
tattcagcgccggagtg

SEQ ID NO: 134732 - DNA, 17 bp, Arabidopsis thaliana
tattcagctcctgttgc

SEQ ID NO: 134733 - DNA, 17 bp, Arabidopsis thaliana
tattcagctgactttga

SEQ ID NO: 134734 - DNA, 17 bp, Arabidopsis thaliana
tattcaggctgcactgc

SEQ ID NO: 134735 - DNA, 17 bp, Arabidopsis thaliana
tattcaggcttcactgc

SEQ ID NO: 134736 - DNA, 17 bp, Arabidopsis thaliana
tattcataggaccgtgc

SEQ ID NO: 134737 - DNA, 17 bp, Arabidopsis thaliana
tattcatcaacaagcaa

SEQ ID NO: 134738 - DNA, 17 bp, Arabidopsis thaliana
tattcatcacggtatcc

SEQ ID NO: 134739 - DNA, 17 bp, Arabidopsis thaliana
tattcatccaccgtgtc

SEQ ID NO: 134740 - DNA, 17 bp, Arabidopsis thaliana
tattcatccatcccatg

SEQ ID NO: 134741 - DNA, 17 bp, Arabidopsis thaliana
tattcatctatttgcaa

SEQ ID NO: 134742 - DNA, 17 bp, Arabidopsis thaliana
tattcatctcaaagtag

SEQ ID NO: 134743 - DNA, 17 bp, Arabidopsis thaliana
tattcatgccggatcaa

SEQ ID NO: 134744 - DNA, 17 bp, Arabidopsis thaliana
tattcatgctcatgatc

SEQ ID NO: 134745 - DNA, 17 bp, Arabidopsis thaliana
tattcattcgacatgtg

SEQ ID NO: 134746 - DNA, 17 bp, Arabidopsis thaliana
tattcattgcgggctgg

SEQ ID NO: 134747 - DNA, 17 bp, Arabidopsis thaliana
tattcatttgagtcacg

SEQ ID NO: 134748 - DNA, 17 bp, Arabidopsis thaliana
tattcatttgggctttt

SEQ ID NO: 134749 - DNA, 17 bp, Arabidopsis thaliana
tattccaaaggccttgg

SEQ ID NO: 134750 - DNA, 17 bp, Arabidopsis thaliana
tattccaatcggttcta

SEQ ID NO: 134751 - DNA, 17 bp, Arabidopsis thaliana
tattccacagggagagc

SEQ ID NO: 134752 - DNA, 17 bp, Arabidopsis thaliana
tattccacctgcctgtg

SEQ ID NO: 134753 - DNA, 17 bp, Arabidopsis thaliana
tattccacgccaaaatt

SEQ ID NO: 134754 - DNA, 17 bp, Arabidopsis thaliana
tattccaggatatgcaa

SEQ ID NO: 134755 - DNA, 17 bp, Arabidopsis thaliana
tattccaggatatgcca

SEQ ID NO: 134756 - DNA, 17 bp, Arabidopsis thaliana
tattccaggttgcgatt

SEQ ID NO: 134757 - DNA, 17 bp, Arabidopsis thaliana
tattccatggaacccaa

SEQ ID NO: 134758 - DNA, 17 bp, Arabidopsis thaliana
tattccatttccaacgg

SEQ ID NO: 134759 - DNA, 17 bp, Arabidopsis thaliana
tattccatttgaggcac

SEQ ID NO: 134760 - DNA, 17 bp, Arabidopsis thaliana
tattcccacgacgaggt

SEQ ID NO: 134761 - DNA, 17 bp, Arabidopsis thaliana
tattccccaaactcaga

SEQ ID NO: 134762 - DNA, 17 bp, Arabidopsis thaliana
tattcccgcctgctatg

SEQ ID NO: 134763 - DNA, 17 bp, Arabidopsis thaliana
tattcccgcctgtcacg

SEQ ID NO: 134764 - DNA, 17 bp, Arabidopsis thaliana
tattccgaaaaacctaa

SEQ ID NO: 134765 - DNA, 17 bp, Arabidopsis thaliana
tattccgagactacccg

SEQ ID NO: 134766 - DNA, 17 bp, Arabidopsis thaliana
tattccggcgccatcag

SEQ ID NO: 134767 - DNA, 17 bp, Arabidopsis thaliana
tattccggtcaaggagt

SEQ ID NO: 134768 - DNA, 17 bp, Arabidopsis thaliana
tattccggtgtcctagg

SEQ ID NO: 134769 - DNA, 17 bp, Arabidopsis thaliana
tattccgttcgcactag

SEQ ID NO: 134770 - DNA, 17 bp, Arabidopsis thaliana
tattccgtttgaggcac

SEQ ID NO: 134771 - DNA, 17 bp, Arabidopsis thaliana
tattccgtttgcactag

SEQ ID NO: 134772 - DNA, 17 bp, Arabidopsis thaliana
tattcctctggcccgga

SEQ ID NO: 134773 - DNA, 17 bp, Arabidopsis thaliana
tattccttcaggtccca

SEQ ID NO: 134774 - DNA, 17 bp, Arabidopsis thaliana
tattcctttgtcgcatg

SEQ ID NO: 134775 - DNA, 17 bp, Arabidopsis thaliana
tattcgaaaggtatcca

SEQ ID NO: 134776 - DNA, 17 bp, Arabidopsis thaliana
tattcgactccagggct

SEQ ID NO: 134777 - DNA, 17 bp, Arabidopsis thaliana
tattcgacttgcccttg

SEQ ID NO: 134778 - DNA, 17 bp, Arabidopsis thaliana
tattcgcagtttcgtca

SEQ ID NO: 134779 - DNA, 17 bp, Arabidopsis thaliana
tattcgcagtttcgtga

SEQ ID NO: 134780 - DNA, 17 bp, Arabidopsis thaliana
tattcgcattctgtaga

SEQ ID NO: 134781 - DNA, 17 bp, Arabidopsis thaliana
tattcgccatcctgtag

SEQ ID NO: 134782 - DNA, 17 bp, Arabidopsis thaliana
tattcgcctcaacgacc

SEQ ID NO: 134783 - DNA, 17 bp, Arabidopsis thaliana
tattcgcggagcggacc

SEQ ID NO: 134784 - DNA, 17 bp, Arabidopsis thaliana
tattcgcggtagaacaa

SEQ ID NO: 134785 - DNA, 17 bp, Arabidopsis thaliana
tattcgcttcatgccca

SEQ ID NO: 134786 - DNA, 17 bp, Arabidopsis thaliana
tattcgcttcgtgccca

SEQ ID NO: 134787 - DNA, 17 bp, Arabidopsis thaliana
tattcgcttcgtgctca

SEQ ID NO: 134788 - DNA, 17 bp, Arabidopsis thaliana
tattcgctttgtgccca

SEQ ID NO: 134789 - DNA, 17 bp, Arabidopsis thaliana
tattcggacctgtagtt

SEQ ID NO: 134790 - DNA, 17 bp, Arabidopsis thaliana
tattcggcaggtcagtt

SEQ ID NO: 134791 - DNA, 17 bp, Arabidopsis thaliana
tattcggccaggtggtc

SEQ ID NO: 134792 - DNA, 17 bp, Arabidopsis thaliana
tattcggcggctccctt

SEQ ID NO: 134793 - DNA, 17 bp, Arabidopsis thaliana
tattcgggttcaatcgg

SEQ ID NO: 134794 - DNA, 17 bp, Arabidopsis thaliana
tattcggttcagattcg

SEQ ID NO: 134795 - DNA, 17 bp, Arabidopsis thaliana
tattcgtaactggactc

SEQ ID NO: 134796 - DNA, 17 bp, Arabidopsis thaliana
tattcgtcaacttcgta

SEQ ID NO: 134797 - DNA, 17 bp, Arabidopsis thaliana
tattcgtctgctggatc

SEQ ID NO: 134798 - DNA, 17 bp, Arabidopsis thaliana
tattcgtgtcctaggcg

SEQ ID NO: 134799 - DNA, 17 bp, Arabidopsis thaliana
tattcgtgtttaggcac

SEQ ID NO: 134800 - DNA, 17 bp, Arabidopsis thaliana
tattcgttcaatccaaa

SEQ ID NO: 134801 - DNA, 17 bp, Arabidopsis thaliana
tattcgttcaatccgct

SEQ ID NO: 134802 - DNA, 17 bp, Arabidopsis thaliana
tattcgttcgatccgct

SEQ ID NO: 134803 - DNA, 17 bp, Arabidopsis thaliana
tattcgttgcgggacgt

SEQ ID NO: 134804 - DNA, 17 bp, Arabidopsis thaliana
tattcgttgtgaaattc

SEQ ID NO: 134805 - DNA, 17 bp, Arabidopsis thaliana
tattcgtttgcatgtcg

SEQ ID NO: 134806 - DNA, 17 bp, Arabidopsis thaliana
tattcgtttggaccgct

SEQ ID NO: 134807 - DNA, 17 bp, Arabidopsis thaliana
tattctaaacccgtccc

SEQ ID NO: 134808 - DNA, 17 bp, Arabidopsis thaliana
tattctacttgattcac

SEQ ID NO: 134809 - DNA, 17 bp, Arabidopsis thaliana
tattctagaggcattgt

SEQ ID NO: 134810 - DNA, 17 bp, Arabidopsis thaliana
tattctagagtgctcaa

SEQ ID NO: 134811 - DNA, 17 bp, Arabidopsis thaliana
tattctagcttccatgc

SEQ ID NO: 134812 - DNA, 17 bp, Arabidopsis thaliana
tattctaggaaaacttt

SEQ ID NO: 134813 - DNA, 17 bp, Arabidopsis thaliana
tattctagttgtggcgt

SEQ ID NO: 134814 - DNA, 17 bp, Arabidopsis thaliana
tattctataacagttta

SEQ ID NO: 134815 - DNA, 17 bp, Arabidopsis thaliana
tattctcactcgcatgg

SEQ ID NO: 134816 - DNA, 17 bp, Arabidopsis thaliana
tattctcagcaatcgcg

SEQ ID NO: 134817 - DNA, 17 bp, Arabidopsis thaliana
tattctcagctgttgga

SEQ ID NO: 134818 - DNA, 17 bp, Arabidopsis thaliana
tattctcaggtgcttgg

SEQ ID NO: 134819 - DNA, 17 bp, Arabidopsis thaliana
tattctcatcggaaaac

SEQ ID NO: 134820 - DNA, 17 bp, Arabidopsis thaliana
tattctccatcccaaag

SEQ ID NO: 134821 - DNA, 17 bp, Arabidopsis thaliana
tattctccgtcgaaacc

SEQ ID NO: 134822 - DNA, 17 bp, Arabidopsis thaliana
tattctcgctttgggtg

SEQ ID NO: 134823 - DNA, 17 bp, Arabidopsis thaliana
tattctctccctcgccg

SEQ ID NO: 134824 - DNA, 17 bp, Arabidopsis thaliana
tattctctctgagttga

SEQ ID NO: 134825 - DNA, 17 bp, Arabidopsis thaliana
tattctctgcagcaacc

SEQ ID NO: 134826 - DNA, 17 bp, Arabidopsis thaliana
tattctgaagcggttgc

SEQ ID NO: 134827 - DNA, 17 bp, Arabidopsis thaliana
tattctgacgctgtttc

SEQ ID NO: 134828 - DNA, 17 bp, Arabidopsis thaliana
tattctgaggaatcaac

SEQ ID NO: 134829 - DNA, 17 bp, Arabidopsis thaliana
tattctgagtttctgac

SEQ ID NO: 134830 - DNA, 17 bp, Arabidopsis thaliana
tattctgagtttggtct

SEQ ID NO: 134831 - DNA, 17 bp, Arabidopsis thaliana
tattctgatccacggag

SEQ ID NO: 134832 - DNA, 17 bp, Arabidopsis thaliana
tattctgcaccctcggt

SEQ ID NO: 134833 - DNA, 17 bp, Arabidopsis thaliana
tattctgcgattcttct

SEQ ID NO: 134834 - DNA, 17 bp, Arabidopsis thaliana
tattctggcccactaca

SEQ ID NO: 134835 - DNA, 17 bp, Arabidopsis thaliana
tattctggcgtcctagc

SEQ ID NO: 134836 - DNA, 17 bp, Arabidopsis thaliana
tattctggcgtcctagg

SEQ ID NO: 134837 - DNA, 17 bp, Arabidopsis thaliana
tattctgggcttaacct

SEQ ID NO: 134838 - DNA, 17 bp, Arabidopsis thaliana
tattctgggtgggacca

SEQ ID NO: 134839 - DNA, 17 bp, Arabidopsis thaliana
tattctggtcctaggcg

SEQ ID NO: 134840 - DNA, 17 bp, Arabidopsis thaliana
tattctggtctcctagg

SEQ ID NO: 134841 - DNA, 17 bp, Arabidopsis thaliana
tattctggtgccctagg

SEQ ID NO: 134842 - DNA, 17 bp, Arabidopsis thaliana
tattctggtggtcacag

SEQ ID NO: 134843 - DNA, 17 bp, Arabidopsis thaliana
tattctggtgtcctaga

SEQ ID NO: 134844 - DNA, 17 bp, Arabidopsis thaliana
tattctggtgtcctagc

SEQ ID NO: 134845 - DNA, 17 bp, Arabidopsis thaliana
tattctggtgtcctagg

SEQ ID NO: 134846 - DNA, 17 bp, Arabidopsis thaliana
tattctggtgtcctagt

SEQ ID NO: 134847 - DNA, 17 bp, Arabidopsis thaliana
tattctggtgtcctatg

SEQ ID NO: 134848 - DNA, 17 bp, Arabidopsis thaliana
tattctggtgtcctcat

SEQ ID NO: 134849 - DNA, 17 bp, Arabidopsis thaliana
tattctggtgtcctccc

SEQ ID NO: 134850 - DNA, 17 bp, Arabidopsis thaliana
tattctggtgtcctcgc

SEQ ID NO: 134851 - DNA, 17 bp, Arabidopsis thaliana
tattctggtgtcctgcg

SEQ ID NO: 134852 - DNA, 17 bp, Arabidopsis thaliana
tattctggtgtcctggg

SEQ ID NO: 134853 - DNA, 17 bp, Arabidopsis thaliana
tattctggtgtccttgg

SEQ ID NO: 134854 - DNA, 17 bp, Arabidopsis thaliana
tattctggtgtttgctt

SEQ ID NO: 134855 - DNA, 17 bp, Arabidopsis thaliana
tattctgtagtccggtc

SEQ ID NO: 134856 - DNA, 17 bp, Arabidopsis thaliana
tattcttcctcggacat

SEQ ID NO: 134857 - DNA, 17 bp, Arabidopsis thaliana
tattcttcttcgaccga

SEQ ID NO: 134858 - DNA, 17 bp, Arabidopsis thaliana
tattcttgctaaagctc

SEQ ID NO: 134859 - DNA, 17 bp, Arabidopsis thaliana
tattcttgtgaagagcg

SEQ ID NO: 134860 - DNA, 17 bp, Arabidopsis thaliana
tattctttacgaagaca

SEQ ID NO: 134861 - DNA, 17 bp, Arabidopsis thaliana
tattgaactgcagagac

SEQ ID NO: 134862 - DNA, 17 bp, Arabidopsis thaliana
tattgaatctcgatgtg

SEQ ID NO: 134863 - DNA, 17 bp, Arabidopsis thaliana
tattgacaggttagcta

SEQ ID NO: 134864 - DNA, 17 bp, Arabidopsis thaliana
tattgaccgactgtggg

SEQ ID NO: 134865 - DNA, 17 bp, Arabidopsis thaliana
tattgaccgcaacttct

SEQ ID NO: 134866 - DNA, 17 bp, Arabidopsis thaliana
tattgacgctgaatgcg

SEQ ID NO: 134867 - DNA, 17 bp, Arabidopsis thaliana
tattgactcaattcatg

SEQ ID NO: 134868 - DNA, 17 bp, Arabidopsis thaliana
tattgacttcttagacc

SEQ ID NO: 134869 - DNA, 17 bp, Arabidopsis thaliana
tattgagacatcgatgg

SEQ ID NO: 134870 - DNA, 17 bp, Arabidopsis thaliana
tattgagccgcgccaac

SEQ ID NO: 134871 - DNA, 17 bp, Arabidopsis thaliana
tattgagccgcgccaat

SEQ ID NO: 134872 - DNA, 17 bp, Arabidopsis thaliana
tattgagcgactgtttt

SEQ ID NO: 134873 - DNA, 17 bp, Arabidopsis thaliana
tattgagttcacgagag

SEQ ID NO: 134874 - DNA, 17 bp, Arabidopsis thaliana
tattgatatcgatcaaa

SEQ ID NO: 134875 - DNA, 17 bp, Arabidopsis thaliana
tattgatgtgcggccaa

SEQ ID NO: 134876 - DNA, 17 bp, Arabidopsis thaliana
tattgattcgtctttca

SEQ ID NO: 134877 - DNA, 17 bp, Arabidopsis thaliana
tattgattgaatgcgat

SEQ ID NO: 134878 - DNA, 17 bp, Arabidopsis thaliana
tattgattttcacatgt

SEQ ID NO: 134879 - DNA, 17 bp, Arabidopsis thaliana
tattgcaaaatctcgga

SEQ ID NO: 134880 - DNA, 17 bp, Arabidopsis thaliana
tattgcaatgggtacgg

SEQ ID NO: 134881 - DNA, 17 bp, Arabidopsis thaliana
tattgcactcgctggtt

SEQ ID NO: 134882 - DNA, 17 bp, Arabidopsis thaliana
tattgcagacgcaacaa

SEQ ID NO: 134883 - DNA, 17 bp, Arabidopsis thaliana
tattgcagcggcaatca

SEQ ID NO: 134884 - DNA, 17 bp, Arabidopsis thaliana
tattgcagtttgttaac

SEQ ID NO: 134885 - DNA, 17 bp, Arabidopsis thaliana
tattgccacgaagatgg

SEQ ID NO: 134886 - DNA, 17 bp, Arabidopsis thaliana
tattgccattcgcgagg

SEQ ID NO: 134887 - DNA, 17 bp, Arabidopsis thaliana
tattgccgaccctcagt

SEQ ID NO: 134888 - DNA, 17 bp, Arabidopsis thaliana
tattgcctcaaacttcc

SEQ ID NO: 134889 - DNA, 17 bp, Arabidopsis thaliana
tattgcgaagaatttta

SEQ ID NO: 134890 - DNA, 17 bp, Arabidopsis thaliana
tattgcgagggatttgc

SEQ ID NO: 134891 - DNA, 17 bp, Arabidopsis thaliana
tattgcgatacggaggg

SEQ ID NO: 134892 - DNA, 17 bp, Arabidopsis thaliana
tattgcgatgaactgat

SEQ ID NO: 134893 - DNA, 17 bp, Arabidopsis thaliana
tattgcgattatgttgt

SEQ ID NO: 134894 - DNA, 17 bp, Arabidopsis thaliana
tattgcgcattcatcag

SEQ ID NO: 134895 - DNA, 17 bp, Arabidopsis thaliana
tattgcggtgcagtttt

SEQ ID NO: 134896 - DNA, 17 bp, Arabidopsis thaliana
tattgcggttgcgggcg

SEQ ID NO: 134897 - DNA, 17 bp, Arabidopsis thaliana
tattgcgtcttatttcc

SEQ ID NO: 134898 - DNA, 17 bp, Arabidopsis thaliana
tattgctcatatgcgaa

SEQ ID NO: 134899 - DNA, 17 bp, Arabidopsis thaliana
tattgctctgcggccac

SEQ ID NO: 134900 - DNA, 17 bp, Arabidopsis thaliana
tattgctgttgcggccc

SEQ ID NO: 134901 - DNA, 17 bp, Arabidopsis thaliana
tattggaacccggttag

SEQ ID NO: 134902 - DNA, 17 bp, Arabidopsis thaliana
tattggaatcgcaatga

SEQ ID NO: 134903 - DNA, 17 bp, Arabidopsis thaliana
tattggaccctgtgcta

SEQ ID NO: 134904 - DNA, 17 bp, Arabidopsis thaliana
tattggacctgttcgtt

SEQ ID NO: 134905 - DNA, 17 bp, Arabidopsis thaliana
tattggaccttgtgcta

SEQ ID NO: 134906 - DNA, 17 bp, Arabidopsis thaliana
tattggacctttgagac

SEQ ID NO: 134907 - DNA, 17 bp, Arabidopsis thaliana
tattggacgtcattggc

SEQ ID NO: 134908 - DNA, 17 bp, Arabidopsis thaliana
tattggactccttccaa

SEQ ID NO: 134909 - DNA, 17 bp, Arabidopsis thaliana
tattggagaaggcgata

SEQ ID NO: 134910 - DNA, 17 bp, Arabidopsis thaliana
tattggagcggcgattg

SEQ ID NO: 134911 - DNA, 17 bp, Arabidopsis thaliana
tattggatctaaagacg

SEQ ID NO: 134912 - DNA, 17 bp, Arabidopsis thaliana
tattggatctacagacg

SEQ ID NO: 134913 - DNA, 17 bp, Arabidopsis thaliana
tattggattgtgacaca

SEQ ID NO: 134914 - DNA, 17 bp, Arabidopsis thaliana
tattggccacagttcac

SEQ ID NO: 134915 - DNA, 17 bp, Arabidopsis thaliana
tattggcccagagatca

SEQ ID NO: 134916 - DNA, 17 bp, Arabidopsis thaliana
tattggcccggttcact

SEQ ID NO: 134917 - DNA, 17 bp, Arabidopsis thaliana
tattggcccgtctacta

SEQ ID NO: 134918 - DNA, 17 bp, Arabidopsis thaliana
tattggcctggttaccc

SEQ ID NO: 134919 - DNA, 17 bp, Arabidopsis thaliana
tattggcctggttcact

SEQ ID NO: 134920 - DNA, 17 bp, Arabidopsis thaliana
tattggcctggttcatt

SEQ ID NO: 134921 - DNA, 17 bp, Arabidopsis thaliana
tattggcgcggctcaat

SEQ ID NO: 134922 - DNA, 17 bp, Arabidopsis thaliana
tattggcgggatccctc

SEQ ID NO: 134923 - DNA, 17 bp, Arabidopsis thaliana
tattggctcacatatct

SEQ ID NO: 134924 - DNA, 17 bp, Arabidopsis thaliana
tattggctgagtgatag

SEQ ID NO: 134925 - DNA, 17 bp, Arabidopsis thaliana
tattggcttctaccgca

SEQ ID NO: 134926 - DNA, 17 bp, Arabidopsis thaliana
tattgggaactgggtcc

SEQ ID NO: 134927 - DNA, 17 bp, Arabidopsis thaliana
tattgggagaaccccat

SEQ ID NO: 134928 - DNA, 17 bp, Arabidopsis thaliana
tattgggccaagggggc

SEQ ID NO: 134929 - DNA, 17 bp, Arabidopsis thaliana
tattgggctaatactga

SEQ ID NO: 134930 - DNA, 17 bp, Arabidopsis thaliana
tattgggctgcgcgaga

SEQ ID NO: 134931 - DNA, 17 bp, Arabidopsis thaliana
tattgggcttgtctaat

SEQ ID NO: 134932 - DNA, 17 bp, Arabidopsis thaliana
tattgggtccggccgat

SEQ ID NO: 134933 - DNA, 17 bp, Arabidopsis thaliana
tattgggttggttatcg

SEQ ID NO: 134934 - DNA, 17 bp, Arabidopsis thaliana
tattggtcataagaccg

SEQ ID NO: 134935 - DNA, 17 bp, Arabidopsis thaliana
tattggtccgtgacaag

SEQ ID NO: 134936 - DNA, 17 bp, Arabidopsis thaliana
tattggtgtttccggcg

SEQ ID NO: 134937 - DNA, 17 bp, Arabidopsis thaliana
tattggttcatgatttc

SEQ ID NO: 134938 - DNA, 17 bp, Arabidopsis thaliana
tattggttcatttggtt

SEQ ID NO: 134939 - DNA, 17 bp, Arabidopsis thaliana
tattgtaagtggcagag

SEQ ID NO: 134940 - DNA, 17 bp, Arabidopsis thaliana
tattgtacctgatagta

SEQ ID NO: 134941 - DNA, 17 bp, Arabidopsis thaliana
tattgtagtgcggtacg

SEQ ID NO: 134942 - DNA, 17 bp, Arabidopsis thaliana
tattgtatgtccaatgt

SEQ ID NO: 134943 - DNA, 17 bp, Arabidopsis thaliana
tattgtcaagaaccgtt

SEQ ID NO: 134944 - DNA, 17 bp, Arabidopsis thaliana
tattgtccacagatgtt

SEQ ID NO: 134945 - DNA, 17 bp, Arabidopsis thaliana
tattgtcctcagtattg

SEQ ID NO: 134946 - DNA, 17 bp, Arabidopsis thaliana
tattgtcgacccaaacc

SEQ ID NO: 134947 - DNA, 17 bp, Arabidopsis thaliana
tattgtcggccttgtcc

SEQ ID NO: 134948 - DNA, 17 bp, Arabidopsis thaliana
tattgtctgcggtttag

SEQ ID NO: 134949 - DNA, 17 bp, Arabidopsis thaliana
tattgtgctccaatggt

SEQ ID NO: 134950 - DNA, 17 bp, Arabidopsis thaliana
tattgtgctttaaactc

SEQ ID NO: 134951 - DNA, 17 bp, Arabidopsis thaliana
tattgtggcaaccacgc

SEQ ID NO: 134952 - DNA, 17 bp, Arabidopsis thaliana
tattgtggtttcgacaa

SEQ ID NO: 134953 - DNA, 17 bp, Arabidopsis thaliana
tattgtgtcagacagga

SEQ ID NO: 134954 - DNA, 17 bp, Arabidopsis thaliana
tattgtgtgatctgaga

SEQ ID NO: 134955 - DNA, 17 bp, Arabidopsis thaliana
tattgtgttggccttcg

SEQ ID NO: 134956 - DNA, 17 bp, Arabidopsis thaliana
tattgttacactaacta

SEQ ID NO: 134957 - DNA, 17 bp, Arabidopsis thaliana
tattgttacactaccta

SEQ ID NO: 134958 - DNA, 17 bp, Arabidopsis thaliana
tattgttcgacttcttg

SEQ ID NO: 134959 - DNA, 17 bp, Arabidopsis thaliana
tattgttgatgagaact

SEQ ID NO: 134960 - DNA, 17 bp, Arabidopsis thaliana
tattgttgcgtgccata

SEQ ID NO: 134961 - DNA, 17 bp, Arabidopsis thaliana
tattgttgcgtgggatt

SEQ ID NO: 134962 - DNA, 17 bp, Arabidopsis thaliana
tattgttggatcggtcc

SEQ ID NO: 134963 - DNA, 17 bp, Arabidopsis thaliana
tattgttgtgcctgcgg

SEQ ID NO: 134964 - DNA, 17 bp, Arabidopsis thaliana
tattgtttcaactgggt

SEQ ID NO: 134965 - DNA, 17 bp, Arabidopsis thaliana
tattgtttcgtcggacc

SEQ ID NO: 134966 - DNA, 17 bp, Arabidopsis thaliana
tattgttttggccttcg

SEQ ID NO: 134967 - DNA, 17 bp, Arabidopsis thaliana
tatttacaatgcttgcc

SEQ ID NO: 134968 - DNA, 17 bp, Arabidopsis thaliana
tatttacaatggctgcc

SEQ ID NO: 134969 - DNA, 17 bp, Arabidopsis thaliana
tatttacagtagctgtc

SEQ ID NO: 134970 - DNA, 17 bp, Arabidopsis thaliana
tatttacagtcgctacc

SEQ ID NO: 134971 - DNA, 17 bp, Arabidopsis thaliana
tatttacagtggctgcc

SEQ ID NO: 134972 - DNA, 17 bp, Arabidopsis thaliana
tatttacagttgctacc

SEQ ID NO: 134973 - DNA, 17 bp, Arabidopsis thaliana
tatttacattggcccga

SEQ ID NO: 134974 - DNA, 17 bp, Arabidopsis thaliana
tatttagacttgcagca

SEQ ID NO: 134975 - DNA, 17 bp, Arabidopsis thaliana
tatttagcaaggtccgg

SEQ ID NO: 134976 - DNA, 17 bp, Arabidopsis thaliana
tatttagcgttttgacc

SEQ ID NO: 134977 - DNA, 17 bp, Arabidopsis thaliana
tatttagtgatgtttat

SEQ ID NO: 134978 - DNA, 17 bp, Arabidopsis thaliana
tatttcaagcagttccg

SEQ ID NO: 134979 - DNA, 17 bp, Arabidopsis thaliana
tatttcactgtccatct

SEQ ID NO: 134980 - DNA, 17 bp, Arabidopsis thaliana
tatttcattcctgacca

SEQ ID NO: 134981 - DNA, 17 bp, Arabidopsis thaliana
tatttcattgctcagat

SEQ ID NO: 134982 - DNA, 17 bp, Arabidopsis thaliana
tatttcattgtgcggtt

SEQ ID NO: 134983 - DNA, 17 bp, Arabidopsis thaliana
tatttccaaaacagcct

SEQ ID NO: 134984 - DNA, 17 bp, Arabidopsis thaliana
tatttccaggtctgttg

SEQ ID NO: 134985 - DNA, 17 bp, Arabidopsis thaliana
tatttccatcttgcagg

SEQ ID NO: 134986 - DNA, 17 bp, Arabidopsis thaliana
tatttcccgatcagagt

SEQ ID NO: 134987 - DNA, 17 bp, Arabidopsis thaliana
tatttcccgatgagttt

SEQ ID NO: 134988 - DNA, 17 bp, Arabidopsis thaliana
tatttccctcaggtttg

SEQ ID NO: 134989 - DNA, 17 bp, Arabidopsis thaliana
tatttcccttcaaagac

SEQ ID NO: 134990 - DNA, 17 bp, Arabidopsis thaliana
tatttccgacaaatatt

SEQ ID NO: 134991 - DNA, 17 bp, Arabidopsis thaliana
tatttccgacggcatgg

SEQ ID NO: 134992 - DNA, 17 bp, Arabidopsis thaliana
tatttccgcagaccttg

SEQ ID NO: 134993 - DNA, 17 bp, Arabidopsis thaliana
tatttccggttccgatg

SEQ ID NO: 134994 - DNA, 17 bp, Arabidopsis thaliana
tatttccgttctatttc

SEQ ID NO: 134995 - DNA, 17 bp, Arabidopsis thaliana
tatttcctctcgctctt

SEQ ID NO: 134996 - DNA, 17 bp, Arabidopsis thaliana
tatttcgacaaaatgtt

SEQ ID NO: 134997 - DNA, 17 bp, Arabidopsis thaliana
tatttcgactatcttgg

SEQ ID NO: 134998 - DNA, 17 bp, Arabidopsis thaliana
tatttcgactgcaggtg

SEQ ID NO: 134999 - DNA, 17 bp, Arabidopsis thaliana
tatttcgagcctgagcg

SEQ ID NO: 135000 - DNA, 17 bp, Arabidopsis thaliana
tatttcgcctcaggctt

SEQ ID NO: 135001 - DNA, 17 bp, Arabidopsis thaliana
tatttcgtcggagggct

SEQ ID NO: 135002 - DNA, 17 bp, Arabidopsis thaliana
tatttctagttctggga

SEQ ID NO: 135003 - DNA, 17 bp, Arabidopsis thaliana
tatttctatggccgtgt

SEQ ID NO: 135004 - DNA, 17 bp, Arabidopsis thaliana
tatttctatgtccgtgt

SEQ ID NO: 135005 - DNA, 17 bp, Arabidopsis thaliana
tatttctccaagtccag

SEQ ID NO: 135006 - DNA, 17 bp, Arabidopsis thaliana
tatttctcggaatcggt

SEQ ID NO: 135007 - DNA, 17 bp, Arabidopsis thaliana
tatttctctcagatctg

SEQ ID NO: 135008 - DNA, 17 bp, Arabidopsis thaliana
tatttctgacttgcggt

SEQ ID NO: 135009 - DNA, 17 bp, Arabidopsis thaliana
tatttctgagaacccgc

SEQ ID NO: 135010 - DNA, 17 bp, Arabidopsis thaliana
tatttctgcagttttct

SEQ ID NO: 135011 - DNA, 17 bp, Arabidopsis thaliana
tatttctgcgagtttgt

SEQ ID NO: 135012 - DNA, 17 bp, Arabidopsis thaliana
tatttctgctgagtccg

SEQ ID NO: 135013 - DNA, 17 bp, Arabidopsis thaliana
tatttcttcacggaagc

SEQ ID NO: 135014 - DNA, 17 bp, Arabidopsis thaliana
tatttcttccgacaact

SEQ ID NO: 135015 - DNA, 17 bp, Arabidopsis thaliana
tatttcttcttattggc

SEQ ID NO: 135016 - DNA, 17 bp, Arabidopsis thaliana
tatttcttgtggctggt

SEQ ID NO: 135017 - DNA, 17 bp, Arabidopsis thaliana
tatttgaaccgcaccgt

SEQ ID NO: 135018 - DNA, 17 bp, Arabidopsis thaliana
tatttgaaccgcactgt

SEQ ID NO: 135019 - DNA, 17 bp, Arabidopsis thaliana
tatttgaaccggatcgc

SEQ ID NO: 135020 - DNA, 17 bp, Arabidopsis thaliana
tatttgaaccttggatg

SEQ ID NO: 135021 - DNA, 17 bp, Arabidopsis thaliana
tatttgaactccacccc

SEQ ID NO: 135022 - DNA, 17 bp, Arabidopsis thaliana
tatttgaactgcaccac

SEQ ID NO: 135023 - DNA, 17 bp, Arabidopsis thaliana
tatttgaactgcaccga

SEQ ID NO: 135024 - DNA, 17 bp, Arabidopsis thaliana
tatttgaactgcaccgc

SEQ ID NO: 135025 - DNA, 17 bp, Arabidopsis thaliana
tatttgaactggcgggt

SEQ ID NO: 135026 - DNA, 17 bp, Arabidopsis thaliana
tatttgacgtcgggctt

SEQ ID NO: 135027 - DNA, 17 bp, Arabidopsis thaliana
tatttgatcacacaaaa

SEQ ID NO: 135028 - DNA, 17 bp, Arabidopsis thaliana
tatttgatgaaccattg

SEQ ID NO: 135029 - DNA, 17 bp, Arabidopsis thaliana
tatttgattcgtatgcc

SEQ ID NO: 135030 - DNA, 17 bp, Arabidopsis thaliana
tatttgcagaatcggta

SEQ ID NO: 135031 - DNA, 17 bp, Arabidopsis thaliana
tatttgcaggctgttat

SEQ ID NO: 135032 - DNA, 17 bp, Arabidopsis thaliana
tatttgccgtgactaca

SEQ ID NO: 135033 - DNA, 17 bp, Arabidopsis thaliana
tatttgctacatggcta

SEQ ID NO: 135034 - DNA, 17 bp, Arabidopsis thaliana
tatttgctggtcagtat

SEQ ID NO: 135035 - DNA, 17 bp, Arabidopsis thaliana
tatttgcttctctttgg

SEQ ID NO: 135036 - DNA, 17 bp, Arabidopsis thaliana
tatttgcttgtggaacg

SEQ ID NO: 135037 - DNA, 17 bp, Arabidopsis thaliana
tatttggaaccgcttga

SEQ ID NO: 135038 - DNA, 17 bp, Arabidopsis thaliana
tatttggactaagcccg

SEQ ID NO: 135039 - DNA, 17 bp, Arabidopsis thaliana
tatttggatttatcgac

SEQ ID NO: 135040 - DNA, 17 bp, Arabidopsis thaliana
tatttggccgatcgcaa

SEQ ID NO: 135041 - DNA, 17 bp, Arabidopsis thaliana
tatttggctgttgcgat

SEQ ID NO: 135042 - DNA, 17 bp, Arabidopsis thaliana
tatttggcttaaccgga

SEQ ID NO: 135043 - DNA, 17 bp, Arabidopsis thaliana
tatttgggtcggtaaat

SEQ ID NO: 135044 - DNA, 17 bp, Arabidopsis thaliana
tatttgtaaagacttcg

SEQ ID NO: 135045 - DNA, 17 bp, Arabidopsis thaliana
tatttgtacatcacgct

SEQ ID NO: 135046 - DNA, 17 bp, Arabidopsis thaliana
tatttgtccgcttgggc

SEQ ID NO: 135047 - DNA, 17 bp, Arabidopsis thaliana
tatttgtcgtttatgcc

SEQ ID NO: 135048 - DNA, 17 bp, Arabidopsis thaliana
tatttgtgacccctttg

SEQ ID NO: 135049 - DNA, 17 bp, Arabidopsis thaliana
tatttgtgattgcttgg

SEQ ID NO: 135050 - DNA, 17 bp, Arabidopsis thaliana
tatttgtgcgaaatccc

SEQ ID NO: 135051 - DNA, 17 bp, Arabidopsis thaliana
tatttgtgtaggaattg

SEQ ID NO: 135052 - DNA, 17 bp, Arabidopsis thaliana
tatttgtgtttgggccg

SEQ ID NO: 135053 - DNA, 17 bp, Arabidopsis thaliana
tatttgttggaccaccc

SEQ ID NO: 135054 - DNA, 17 bp, Arabidopsis thaliana
tatttgtttttatgtgc

SEQ ID NO: 135055 - DNA, 17 bp, Arabidopsis thaliana
tattttagaggctgccc

SEQ ID NO: 135056 - DNA, 17 bp, Arabidopsis thaliana
tattttagaggctgctc

SEQ ID NO: 135057 - DNA, 17 bp, Arabidopsis thaliana
tattttcagggatggaa

SEQ ID NO: 135058 - DNA, 17 bp, Arabidopsis thaliana
tattttcagggattggc

SEQ ID NO: 135059 - DNA, 17 bp, Arabidopsis thaliana
tattttcatgtgtgttt

SEQ ID NO: 135060 - DNA, 17 bp, Arabidopsis thaliana
tattttccaagatcgtc

SEQ ID NO: 135061 - DNA, 17 bp, Arabidopsis thaliana
tattttccgctgtcagg

SEQ ID NO: 135062 - DNA, 17 bp, Arabidopsis thaliana
tattttccggtgcacta

SEQ ID NO: 135063 - DNA, 17 bp, Arabidopsis thaliana
tattttccgtcgcttag

SEQ ID NO: 135064 - DNA, 17 bp, Arabidopsis thaliana
tattttccgtctgggta

SEQ ID NO: 135065 - DNA, 17 bp, Arabidopsis thaliana
tattttcgaagaccgga

SEQ ID NO: 135066 - DNA, 17 bp, Arabidopsis thaliana
tattttcgcgttgggaa

SEQ ID NO: 135067 - DNA, 17 bp, Arabidopsis thaliana
tattttcgctagcggtg

SEQ ID NO: 135068 - DNA, 17 bp, Arabidopsis thaliana
tattttcggttgccaag

SEQ ID NO: 135069 - DNA, 17 bp, Arabidopsis thaliana
tattttctgccggctat

SEQ ID NO: 135070 - DNA, 17 bp, Arabidopsis thaliana
tattttctggctacatt

SEQ ID NO: 135071 - DNA, 17 bp, Arabidopsis thaliana
tattttcttttgacacg

SEQ ID NO: 135072 - DNA, 17 bp, Arabidopsis thaliana
tattttgacaacctcag

SEQ ID NO: 135073 - DNA, 17 bp, Arabidopsis thaliana
tattttgacagctctac

SEQ ID NO: 135074 - DNA, 17 bp, Arabidopsis thaliana
tattttgacggagtttt

SEQ ID NO: 135075 - DNA, 17 bp, Arabidopsis thaliana
tattttgactaaatgca

SEQ ID NO: 135076 - DNA, 17 bp, Arabidopsis thaliana
tattttgacttgaaggt

SEQ ID NO: 135077 - DNA, 17 bp, Arabidopsis thaliana
tattttgagccgaccat

SEQ ID NO: 135078 - DNA, 17 bp, Arabidopsis thaliana
tattttgagttcaggtc

SEQ ID NO: 135079 - DNA, 17 bp, Arabidopsis thaliana
tattttgatgtgggtcc

SEQ ID NO: 135080 - DNA, 17 bp, Arabidopsis thaliana
tattttggattcaggtc

SEQ ID NO: 135081 - DNA, 17 bp, Arabidopsis thaliana
tattttggcctggtcaa

SEQ ID NO: 135082 - DNA, 17 bp, Arabidopsis thaliana
tattttgggttcaggtc

SEQ ID NO: 135083 - DNA, 17 bp, Arabidopsis thaliana
tattttgggtttaggta

SEQ ID NO: 135084 - DNA, 17 bp, Arabidopsis thaliana
tattttggtccacagat

SEQ ID NO: 135085 - DNA, 17 bp, Arabidopsis thaliana
tattttgtactagataa

SEQ ID NO: 135086 - DNA, 17 bp, Arabidopsis thaliana
tattttgtctgggcccg

SEQ ID NO: 135087 - DNA, 17 bp, Arabidopsis thaliana
tatttttcctcggatgt

SEQ ID NO: 135088 - DNA, 17 bp, Arabidopsis thaliana
tatttttcgttgactcg

SEQ ID NO: 135089 - DNA, 17 bp, Arabidopsis thaliana
tatttttgactggatca

SEQ ID NO: 135090 - DNA, 17 bp, Arabidopsis thaliana
tatttttgcaacagtag

SEQ ID NO: 135091 - DNA, 17 bp, Arabidopsis thaliana
tatttttgggctttccg

SEQ ID NO: 135092 - DNA, 17 bp, Arabidopsis thaliana
tatttttgggtgaacga

SEQ ID NO: 135093 - DNA, 17 bp, Arabidopsis thaliana
tatttttgggttcgggt

SEQ ID NO: 135094 - DNA, 17 bp, Arabidopsis thaliana
tatttttggtgagccgc

SEQ ID NO: 135095 - DNA, 17 bp, Arabidopsis thaliana
tatttttgtgcgacttt

SEQ ID NO: 135096 - DNA, 17 bp, Arabidopsis thaliana
tattttttctaaaaccg

SEQ ID NO: 135097 - DNA, 17 bp, Arabidopsis thaliana
tattttttttggtccgg

SEQ ID NO: 135098 - DNA, 17 bp, Arabidopsis thaliana
tcaaaaaatctgaaggt

SEQ ID NO: 135099 - DNA, 17 bp, Arabidopsis thaliana
tcaaaaacccatctttg

SEQ ID NO: 135100 - DNA, 17 bp, Arabidopsis thaliana
tcaaaaaccgtgttttc

SEQ ID NO: 135101 - DNA, 17 bp, Arabidopsis thaliana
tcaaaaacggtttgcag

SEQ ID NO: 135102 - DNA, 17 bp, Arabidopsis thaliana
tcaaaaactcttggtgt

SEQ ID NO: 135103 - DNA, 17 bp, Arabidopsis thaliana
tcaaaaatatcggtttg

SEQ ID NO: 135104 - DNA, 17 bp, Arabidopsis thaliana
tcaaaaatcgcagggta

SEQ ID NO: 135105 - DNA, 17 bp, Arabidopsis thaliana
tcaaaaatcgctaggcg

SEQ ID NO: 135106 - DNA, 17 bp, Arabidopsis thaliana
tcaaaaatcggcggggg

SEQ ID NO: 135107 - DNA, 17 bp, Arabidopsis thaliana
tcaaaaattctgttgcg

SEQ ID NO: 135108 - DNA, 17 bp, Arabidopsis thaliana
tcaaaaattggacaatg

SEQ ID NO: 135109 - DNA, 17 bp, Arabidopsis thaliana
tcaaaacaactttctca

SEQ ID NO: 135110 - DNA, 17 bp, Arabidopsis thaliana
tcaaaacagagctttaa

SEQ ID NO: 135111 - DNA, 17 bp, Arabidopsis thaliana
tcaaaacagttgcgttt

SEQ ID NO: 135112 - DNA, 17 bp, Arabidopsis thaliana
tcaaaacagttgctctg

SEQ ID NO: 135113 - DNA, 17 bp, Arabidopsis thaliana
tcaaaacatggtcaacg

SEQ ID NO: 135114 - DNA, 17 bp, Arabidopsis thaliana
tcaaaaccaacattttg

SEQ ID NO: 135115 - DNA, 17 bp, Arabidopsis thaliana
tcaaaacccacttgttt

SEQ ID NO: 135116 - DNA, 17 bp, Arabidopsis thaliana
tcaaaacccatcaatat

SEQ ID NO: 135117 - DNA, 17 bp, Arabidopsis thaliana
tcaaaaccgactatcgt

SEQ ID NO: 135118 - DNA, 17 bp, Arabidopsis thaliana
tcaaaaccgactgatct

SEQ ID NO: 135119 - DNA, 17 bp, Arabidopsis thaliana
tcaaaaccgcaccgcaa

SEQ ID NO: 135120 - DNA, 17 bp, Arabidopsis thaliana
tcaaaaccgcagggaaa

SEQ ID NO: 135121 - DNA, 17 bp, Arabidopsis thaliana
tcaaaaccggctatcgt

SEQ ID NO: 135122 - DNA, 17 bp, Arabidopsis thaliana
tcaaaaccggtggctta

SEQ ID NO: 135123 - DNA, 17 bp, Arabidopsis thaliana
tcaaaacctataatctt

SEQ ID NO: 135124 - DNA, 17 bp, Arabidopsis thaliana
tcaaaacgactctcggc

SEQ ID NO: 135125 - DNA, 17 bp, Arabidopsis thaliana
tcaaaacgtctccagct

SEQ ID NO: 135126 - DNA, 17 bp, Arabidopsis thaliana
tcaaaactcgtgttgct

SEQ ID NO: 135127 - DNA, 17 bp, Arabidopsis thaliana
tcaaaactggtggtggc

SEQ ID NO: 135128 - DNA, 17 bp, Arabidopsis thaliana
tcaaaagagccattcct

SEQ ID NO: 135129 - DNA, 17 bp, Arabidopsis thaliana
tcaaaagcatccatcgt

SEQ ID NO: 135130 - DNA, 17 bp, Arabidopsis thaliana
tcaaaagccattcagga

SEQ ID NO: 135131 - DNA, 17 bp, Arabidopsis thaliana
tcaaaagcccgaagcaa

SEQ ID NO: 135132 - DNA, 17 bp, Arabidopsis thaliana
tcaaaagcccgggctta

SEQ ID NO: 135133 - DNA, 17 bp, Arabidopsis thaliana
tcaaaaggatctacgcg

SEQ ID NO: 135134 - DNA, 17 bp, Arabidopsis thaliana
tcaaaaggatctgcgcg

SEQ ID NO: 135135 - DNA, 17 bp, Arabidopsis thaliana
tcaaaaggcaattgcct

SEQ ID NO: 135136 - DNA, 17 bp, Arabidopsis thaliana
tcaaaagtccgaacact

SEQ ID NO: 135137 - DNA, 17 bp, Arabidopsis thaliana
tcaaaagtttgtcttgt

SEQ ID NO: 135138 - DNA, 17 bp, Arabidopsis thaliana
tcaaaatagccgatctc

SEQ ID NO: 135139 - DNA, 17 bp, Arabidopsis thaliana
tcaaaatattgagcaac

SEQ ID NO: 135140 - DNA, 17 bp, Arabidopsis thaliana
tcaaaatcacagaccca

SEQ ID NO: 135141 - DNA, 17 bp, Arabidopsis thaliana
tcaaaatcagccaggtt

SEQ ID NO: 135142 - DNA, 17 bp, Arabidopsis thaliana
tcaaaatccacagtggg

SEQ ID NO: 135143 - DNA, 17 bp, Arabidopsis thaliana
tcaaaatcgtaaggtcg

SEQ ID NO: 135144 - DNA, 17 bp, Arabidopsis thaliana
tcaaaatctaatcggag

SEQ ID NO: 135145 - DNA, 17 bp, Arabidopsis thaliana
tcaaaatctagtggcag

SEQ ID NO: 135146 - DNA, 17 bp, Arabidopsis thaliana
tcaaaatctctgcaata

SEQ ID NO: 135147 - DNA, 17 bp, Arabidopsis thaliana
tcaaaatctgccaggta

SEQ ID NO: 135148 - DNA, 17 bp, Arabidopsis thaliana
tcaaaatctgcgggcaa

SEQ ID NO: 135149 - DNA, 17 bp, Arabidopsis thaliana
tcaaaatctgttgggtt

SEQ ID NO: 135150 - DNA, 17 bp, Arabidopsis thaliana
tcaaaatgacatttttg

SEQ ID NO: 135151 - DNA, 17 bp, Arabidopsis thaliana
tcaaaatgatcaatcga

SEQ ID NO: 135152 - DNA, 17 bp, Arabidopsis thaliana
tcaaaatgttgtggcat

SEQ ID NO: 135153 - DNA, 17 bp, Arabidopsis thaliana
tcaaaatgtttgagacg

SEQ ID NO: 135154 - DNA, 17 bp, Arabidopsis thaliana
tcaaaatgttttgggtg

SEQ ID NO: 135155 - DNA, 17 bp, Arabidopsis thaliana
tcaaaattgtaaccgat

SEQ ID NO: 135156 - DNA, 17 bp, Arabidopsis thaliana
tcaaaattgtcacatcg

SEQ ID NO: 135157 - DNA, 17 bp, Arabidopsis thaliana
tcaaaatttggggtcga

SEQ ID NO: 135158 - DNA, 17 bp, Arabidopsis thaliana
tcaaaatttgtggaccg

SEQ ID NO: 135159 - DNA, 17 bp, Arabidopsis thaliana
tcaaaattttccattga

SEQ ID NO: 135160 - DNA, 17 bp, Arabidopsis thaliana
tcaaaattttgttgact

SEQ ID NO: 135161 - DNA, 17 bp, Arabidopsis thaliana
tcaaacaaagcattgcg

SEQ ID NO: 135162 - DNA, 17 bp, Arabidopsis thaliana
tcaaacaaaggggtgtc

SEQ ID NO: 135163 - DNA, 17 bp, Arabidopsis thaliana
tcaaacaacttcctcac

SEQ ID NO: 135164 - DNA, 17 bp, Arabidopsis thaliana
tcaaacaactttctcac

SEQ ID NO: 135165 - DNA, 17 bp, Arabidopsis thaliana
tcaaacaaggggttagt

SEQ ID NO: 135166 - DNA, 17 bp, Arabidopsis thaliana
tcaaacaattcgccgtc

SEQ ID NO: 135167 - DNA, 17 bp, Arabidopsis thaliana
tcaaacaccatggtctc

SEQ ID NO: 135168 - DNA, 17 bp, Arabidopsis thaliana
tcaaacactcttgttcc

SEQ ID NO: 135169 - DNA, 17 bp, Arabidopsis thaliana
tcaaacacttgattgtg

SEQ ID NO: 135170 - DNA, 17 bp, Arabidopsis thaliana
tcaaacactttgtcctg

SEQ ID NO: 135171 - DNA, 17 bp, Arabidopsis thaliana
tcaaacagcctcgagtg

SEQ ID NO: 135172 - DNA, 17 bp, Arabidopsis thaliana
tcaaacagctctttgct

SEQ ID NO: 135173 - DNA, 17 bp, Arabidopsis thaliana
tcaaacaggttcaccgg

SEQ ID NO: 135174 - DNA, 17 bp, Arabidopsis thaliana
tcaaacagtttgggcat

SEQ ID NO: 135175 - DNA, 17 bp, Arabidopsis thaliana
tcaaacataggccgtgt

SEQ ID NO: 135176 - DNA, 17 bp, Arabidopsis thaliana
tcaaacatatttggtgg

SEQ ID NO: 135177 - DNA, 17 bp, Arabidopsis thaliana
tcaaacatcatttgcgt

SEQ ID NO: 135178 - DNA, 17 bp, Arabidopsis thaliana
tcaaacatctgatcgac

SEQ ID NO: 135179 - DNA, 17 bp, Arabidopsis thaliana
tcaaacatggatgatcg

SEQ ID NO: 135180 - DNA, 17 bp, Arabidopsis thaliana
tcaaacatgtgcttggc

SEQ ID NO: 135181 - DNA, 17 bp, Arabidopsis thaliana
tcaaacattgttgttgc

SEQ ID NO: 135182 - DNA, 17 bp, Arabidopsis thaliana
tcaaaccaaaactttga

SEQ ID NO: 135183 - DNA, 17 bp, Arabidopsis thaliana
tcaaaccaggagggaag

SEQ ID NO: 135184 - DNA, 17 bp, Arabidopsis thaliana
tcaaaccagtctcttaa

SEQ ID NO: 135185 - DNA, 17 bp, Arabidopsis thaliana
tcaaaccagtggtcgag

SEQ ID NO: 135186 - DNA, 17 bp, Arabidopsis thaliana
tcaaaccatcggctggc

SEQ ID NO: 135187 - DNA, 17 bp, Arabidopsis thaliana
tcaaaccatcttggcaa

SEQ ID NO: 135188 - DNA, 17 bp, Arabidopsis thaliana
tcaaaccattacagcat

SEQ ID NO: 135189 - DNA, 17 bp, Arabidopsis thaliana
tcaaacccaactggacc

SEQ ID NO: 135190 - DNA, 17 bp, Arabidopsis thaliana
tcaaacccggttgagcc

SEQ ID NO: 135191 - DNA, 17 bp, Arabidopsis thaliana
tcaaaccctaccggcta

SEQ ID NO: 135192 - DNA, 17 bp, Arabidopsis thaliana
tcaaaccctatcggctg

SEQ ID NO: 135193 - DNA, 17 bp, Arabidopsis thaliana
tcaaaccgcagagatat

SEQ ID NO: 135194 - DNA, 17 bp, Arabidopsis thaliana
tcaaaccggattcgttg

SEQ ID NO: 135195 - DNA, 17 bp, Arabidopsis thaliana
tcaaaccggcggaattg

SEQ ID NO: 135196 - DNA, 17 bp, Arabidopsis thaliana
tcaaaccggtgcgcata

SEQ ID NO: 135197 - DNA, 17 bp, Arabidopsis thaliana
tcaaaccttcaagtttg

SEQ ID NO: 135198 - DNA, 17 bp, Arabidopsis thaliana
tcaaacgaacggctggc

SEQ ID NO: 135199 - DNA, 17 bp, Arabidopsis thaliana
tcaaacgaccacgtacg

SEQ ID NO: 135200 - DNA, 17 bp, Arabidopsis thaliana
tcaaacgactctcggca

SEQ ID NO: 135201 - DNA, 17 bp, Arabidopsis thaliana
tcaaacgagccaatcct

SEQ ID NO: 135202 - DNA, 17 bp, Arabidopsis thaliana
tcaaacgagccaatctc

SEQ ID NO: 135203 - DNA, 17 bp, Arabidopsis thaliana
tcaaacgagccactaat

SEQ ID NO: 135204 - DNA, 17 bp, Arabidopsis thaliana
tcaaacgagcttttacc

SEQ ID NO: 135205 - DNA, 17 bp, Arabidopsis thaliana
tcaaacgaggaaaagct

SEQ ID NO: 135206 - DNA, 17 bp, Arabidopsis thaliana
tcaaacgaggaaaggaa

SEQ ID NO: 135207 - DNA, 17 bp, Arabidopsis thaliana
tcaaacgaggaaaggat

SEQ ID NO: 135208 - DNA, 17 bp, Arabidopsis thaliana
tcaaacgaggaaaggct

SEQ ID NO: 135209 - DNA, 17 bp, Arabidopsis thaliana
tcaaacgaggaggctta

SEQ ID NO: 135210 - DNA, 17 bp, Arabidopsis thaliana
tcaaacgagtaaaggct

SEQ ID NO: 135211 - DNA, 17 bp, Arabidopsis thaliana
tcaaacgatcaaaggct

SEQ ID NO: 135212 - DNA, 17 bp, Arabidopsis thaliana
tcaaacgatccatttgg

SEQ ID NO: 135213 - DNA, 17 bp, Arabidopsis thaliana
tcaaacgatgccgacca

SEQ ID NO: 135214 - DNA, 17 bp, Arabidopsis thaliana
tcaaacgattaggaaag

SEQ ID NO: 135215 - DNA, 17 bp, Arabidopsis thaliana
tcaaacgattccgacca

SEQ ID NO: 135216 - DNA, 17 bp, Arabidopsis thaliana
tcaaacgcagaatgtct

SEQ ID NO: 135217 - DNA, 17 bp, Arabidopsis thaliana
tcaaacgcagatttgtg

SEQ ID NO: 135218 - DNA, 17 bp, Arabidopsis thaliana
tcaaacgcagtcaccat

SEQ ID NO: 135219 - DNA, 17 bp, Arabidopsis thaliana
tcaaacgcctgacccga

SEQ ID NO: 135220 - DNA, 17 bp, Arabidopsis thaliana
tcaaacgcggatttgtg

SEQ ID NO: 135221 - DNA, 17 bp, Arabidopsis thaliana
tcaaacgctacgtctcg

SEQ ID NO: 135222 - DNA, 17 bp, Arabidopsis thaliana
tcaaacgctatgttaga

SEQ ID NO: 135223 - DNA, 17 bp, Arabidopsis thaliana
tcaaacggagttatcga

SEQ ID NO: 135224 - DNA, 17 bp, Arabidopsis thaliana
tcaaacggccacatacg

SEQ ID NO: 135225 - DNA, 17 bp, Arabidopsis thaliana
tcaaacggtaacctctc

SEQ ID NO: 135226 - DNA, 17 bp, Arabidopsis thaliana
tcaaacggttcatgcag

SEQ ID NO: 135227 - DNA, 17 bp, Arabidopsis thaliana
tcaaacggttcgattcg

SEQ ID NO: 135228 - DNA, 17 bp, Arabidopsis thaliana
tcaaacgtctcaaaatg

SEQ ID NO: 135229 - DNA, 17 bp, Arabidopsis thaliana
tcaaacgtgtcacattc

SEQ ID NO: 135230 - DNA, 17 bp, Arabidopsis thaliana
tcaaacgttgcaacgtg

SEQ ID NO: 135231 - DNA, 17 bp, Arabidopsis thaliana
tcaaacgtttggaaccg

SEQ ID NO: 135232 - DNA, 17 bp, Arabidopsis thaliana
tcaaactacagctacct

SEQ ID NO: 135233 - DNA, 17 bp, Arabidopsis thaliana
tcaaactacttgtggct

SEQ ID NO: 135234 - DNA, 17 bp, Arabidopsis thaliana
tcaaactatggctgtga

SEQ ID NO: 135235 - DNA, 17 bp, Arabidopsis thaliana
tcaaactattcgatgtc

SEQ ID NO: 135236 - DNA, 17 bp, Arabidopsis thaliana
tcaaactattggccaca

SEQ ID NO: 135237 - DNA, 17 bp, Arabidopsis thaliana
tcaaactcagaataatg

SEQ ID NO: 135238 - DNA, 17 bp, Arabidopsis thaliana
tcaaactcagagtgcct

SEQ ID NO: 135239 - DNA, 17 bp, Arabidopsis thaliana
tcaaactcaggtttcga

SEQ ID NO: 135240 - DNA, 17 bp, Arabidopsis thaliana
tcaaactcgacggatcg

SEQ ID NO: 135241 - DNA, 17 bp, Arabidopsis thaliana
tcaaactcgtgacagac

SEQ ID NO: 135242 - DNA, 17 bp, Arabidopsis thaliana
tcaaactctgaccacgt

SEQ ID NO: 135243 - DNA, 17 bp, Arabidopsis thaliana
tcaaactctgaccactt

SEQ ID NO: 135244 - DNA, 17 bp, Arabidopsis thaliana
tcaaactgagctgggat

SEQ ID NO: 135245 - DNA, 17 bp, Arabidopsis thaliana
tcaaactgcctgcattt

SEQ ID NO: 135246 - DNA, 17 bp, Arabidopsis thaliana
tcaaactgcttatatgc

SEQ ID NO: 135247 - DNA, 17 bp, Arabidopsis thaliana
tcaaactgctttcaacc

SEQ ID NO: 135248 - DNA, 17 bp, Arabidopsis thaliana
tcaaactgtcattggct

SEQ ID NO: 135249 - DNA, 17 bp, Arabidopsis thaliana
tcaaactgtcgattgaa

SEQ ID NO: 135250 - DNA, 17 bp, Arabidopsis thaliana
tcaaacttaggcattgg

SEQ ID NO: 135251 - DNA, 17 bp, Arabidopsis thaliana
tcaaacttcaaccccgg

SEQ ID NO: 135252 - DNA, 17 bp, Arabidopsis thaliana
tcaaacttccaatgtgg

SEQ ID NO: 135253 - DNA, 17 bp, Arabidopsis thaliana
tcaaacttccttggcct

SEQ ID NO: 135254 - DNA, 17 bp, Arabidopsis thaliana
tcaaacttcgcatgtga

SEQ ID NO: 135255 - DNA, 17 bp, Arabidopsis thaliana
tcaaacttcggcgacgt

SEQ ID NO: 135256 - DNA, 17 bp, Arabidopsis thaliana
tcaaacttgaggttggt

SEQ ID NO: 135257 - DNA, 17 bp, Arabidopsis thaliana
tcaaacttggcaagcaa

SEQ ID NO: 135258 - DNA, 17 bp, Arabidopsis thaliana
tcaaacttggcatgtga

SEQ ID NO: 135259 - DNA, 17 bp, Arabidopsis thaliana
tcaaacttggccctgtt

SEQ ID NO: 135260 - DNA, 17 bp, Arabidopsis thaliana
tcaaacttggtgtcgat

SEQ ID NO: 135261 - DNA, 17 bp, Arabidopsis thaliana
tcaaacttggtgtcgtc

SEQ ID NO: 135262 - DNA, 17 bp, Arabidopsis thaliana
tcaaacttgtagtcctt

SEQ ID NO: 135263 - DNA, 17 bp, Arabidopsis thaliana
tcaaactttcgatgtgg

SEQ ID NO: 135264 - DNA, 17 bp, Arabidopsis thaliana
tcaaactttgccatact

SEQ ID NO: 135265 - DNA, 17 bp, Arabidopsis thaliana
tcaaactttgctttgtc

SEQ ID NO: 135266 - DNA, 17 bp, Arabidopsis thaliana
tcaaacttttttccgtt

SEQ ID NO: 135267 - DNA, 17 bp, Arabidopsis thaliana
tcaaagaaaacattcta

SEQ ID NO: 135268 - DNA, 17 bp, Arabidopsis thaliana
tcaaagaaatgcgttcg

SEQ ID NO: 135269 - DNA, 17 bp, Arabidopsis thaliana
tcaaagaattcaaggtt

SEQ ID NO: 135270 - DNA, 17 bp, Arabidopsis thaliana
tcaaagaattcctgagg

SEQ ID NO: 135271 - DNA, 17 bp, Arabidopsis thaliana
tcaaagaatttaggtca

SEQ ID NO: 135272 - DNA, 17 bp, Arabidopsis thaliana
tcaaagaccgctagttc

SEQ ID NO: 135273 - DNA, 17 bp, Arabidopsis thaliana
tcaaagactcgatggtt

SEQ ID NO: 135274 - DNA, 17 bp, Arabidopsis thaliana
tcaaagactgcctcttc

SEQ ID NO: 135275 - DNA, 17 bp, Arabidopsis thaliana
tcaaagacttatacggc

SEQ ID NO: 135276 - DNA, 17 bp, Arabidopsis thaliana
tcaaagagccttgcaga

SEQ ID NO: 135277 - DNA, 17 bp, Arabidopsis thaliana
tcaaagatcaccattgg

SEQ ID NO: 135278 - DNA, 17 bp, Arabidopsis thaliana
tcaaagatcacgttgcg

SEQ ID NO: 135279 - DNA, 17 bp, Arabidopsis thaliana
tcaaagatcatttgtgg

SEQ ID NO: 135280 - DNA, 17 bp, Arabidopsis thaliana
tcaaagatctaggttgg

SEQ ID NO: 135281 - DNA, 17 bp, Arabidopsis thaliana
tcaaagatgacgttgcg

SEQ ID NO: 135282 - DNA, 17 bp, Arabidopsis thaliana
tcaaagatgtcgagcaa

SEQ ID NO: 135283 - DNA, 17 bp, Arabidopsis thaliana
tcaaagattaagccatg

SEQ ID NO: 135284 - DNA, 17 bp, Arabidopsis thaliana
tcaaagattcctacggt

SEQ ID NO: 135285 - DNA, 17 bp, Arabidopsis thaliana
tcaaagattcctattag

SEQ ID NO: 135286 - DNA, 17 bp, Arabidopsis thaliana
tcaaagatttcctaaac

SEQ ID NO: 135287 - DNA, 17 bp, Arabidopsis thaliana
tcaaagatttgacggtg

SEQ ID NO: 135288 - DNA, 17 bp, Arabidopsis thaliana
tcaaagatttgggccag

SEQ ID NO: 135289 - DNA, 17 bp, Arabidopsis thaliana
tcaaagcaaagactatg

SEQ ID NO: 135290 - DNA, 17 bp, Arabidopsis thaliana
tcaaagcacctcaagga

SEQ ID NO: 135291 - DNA, 17 bp, Arabidopsis thaliana
tcaaagcaggttatgag

SEQ ID NO: 135292 - DNA, 17 bp, Arabidopsis thaliana
tcaaagccacgtctgtc

SEQ ID NO: 135293 - DNA, 17 bp, Arabidopsis thaliana
tcaaagccagtggcgct

SEQ ID NO: 135294 - DNA, 17 bp, Arabidopsis thaliana
tcaaagccatcgcgttg

SEQ ID NO: 135295 - DNA, 17 bp, Arabidopsis thaliana
tcaaagcccgtaatccc

SEQ ID NO: 135296 - DNA, 17 bp, Arabidopsis thaliana
tcaaagccctattttct

SEQ ID NO: 135297 - DNA, 17 bp, Arabidopsis thaliana
tcaaagccctcgcgatg

SEQ ID NO: 135298 - DNA, 17 bp, Arabidopsis thaliana
tcaaagccgaatccact

SEQ ID NO: 135299 - DNA, 17 bp, Arabidopsis thaliana
tcaaagccgccaaaaaa

SEQ ID NO: 135300 - DNA, 17 bp, Arabidopsis thaliana
tcaaagccttcatcgga

SEQ ID NO: 135301 - DNA, 17 bp, Arabidopsis thaliana
tcaaagcgaccttagag

SEQ ID NO: 135302 - DNA, 17 bp, Arabidopsis thaliana
tcaaagcgtcgtgctgc

SEQ ID NO: 135303 - DNA, 17 bp, Arabidopsis thaliana
tcaaagctcaggaggga

SEQ ID NO: 135304 - DNA, 17 bp, Arabidopsis thaliana
tcaaagctcgatttgca

SEQ ID NO: 135305 - DNA, 17 bp, Arabidopsis thaliana
tcaaagctgacaagagt

SEQ ID NO: 135306 - DNA, 17 bp, Arabidopsis thaliana
tcaaagctgagaggatg

SEQ ID NO: 135307 - DNA, 17 bp, Arabidopsis thaliana
tcaaagcttctagataa

SEQ ID NO: 135308 - DNA, 17 bp, Arabidopsis thaliana
tcaaagctttcagggtg

SEQ ID NO: 135309 - DNA, 17 bp, Arabidopsis thaliana
tcaaagctttgatggtg

SEQ ID NO: 135310 - DNA, 17 bp, Arabidopsis thaliana
tcaaaggacgatgtgac

SEQ ID NO: 135311 - DNA, 17 bp, Arabidopsis thaliana
tcaaaggactcttgaat

SEQ ID NO: 135312 - DNA, 17 bp, Arabidopsis thaliana
tcaaaggactggctctg

SEQ ID NO: 135313 - DNA, 17 bp, Arabidopsis thaliana
tcaaaggaggaaaggct

SEQ ID NO: 135314 - DNA, 17 bp, Arabidopsis thaliana
tcaaaggatcatggtcg

SEQ ID NO: 135315 - DNA, 17 bp, Arabidopsis thaliana
tcaaaggattggctctg

SEQ ID NO: 135316 - DNA, 17 bp, Arabidopsis thaliana
tcaaaggattgtgccac

SEQ ID NO: 135317 - DNA, 17 bp, Arabidopsis thaliana
tcaaaggccatcattct

SEQ ID NO: 135318 - DNA, 17 bp, Arabidopsis thaliana
tcaaaggctaattttgc

SEQ ID NO: 135319 - DNA, 17 bp, Arabidopsis thaliana
tcaaaggctgtgaactg

SEQ ID NO: 135320 - DNA, 17 bp, Arabidopsis thaliana
tcaaaggggactacggg

SEQ ID NO: 135321 - DNA, 17 bp, Arabidopsis thaliana
tcaaagggtaaacgact

SEQ ID NO: 135322 - DNA, 17 bp, Arabidopsis thaliana
tcaaagggttgccttcc

SEQ ID NO: 135323 - DNA, 17 bp, Arabidopsis thaliana
tcaaaggtccgtcttct

SEQ ID NO: 135324 - DNA, 17 bp, Arabidopsis thaliana
tcaaaggttgtaaacca

SEQ ID NO: 135325 - DNA, 17 bp, Arabidopsis thaliana
tcaaaggttgtcaacca

SEQ ID NO: 135326 - DNA, 17 bp, Arabidopsis thaliana
tcaaaggtttgcttcgc

SEQ ID NO: 135327 - DNA, 17 bp, Arabidopsis thaliana
tcaaagtatttctttga

SEQ ID NO: 135328 - DNA, 17 bp, Arabidopsis thaliana
tcaaagtcacatacaac

SEQ ID NO: 135329 - DNA, 17 bp, Arabidopsis thaliana
tcaaagtcgtccatttt

SEQ ID NO: 135330 - DNA, 17 bp, Arabidopsis thaliana
tcaaagtctaggatccc

SEQ ID NO: 135331 - DNA, 17 bp, Arabidopsis thaliana
tcaaagtcttatgggcg

SEQ ID NO: 135332 - DNA, 17 bp, Arabidopsis thaliana
tcaaagtcttttggttg

SEQ ID NO: 135333 - DNA, 17 bp, Arabidopsis thaliana
tcaaagtgaagaaattc

SEQ ID NO: 135334 - DNA, 17 bp, Arabidopsis thaliana
tcaaagtgactacatcg

SEQ ID NO: 135335 - DNA, 17 bp, Arabidopsis thaliana
tcaaagtgccacgtgtc

SEQ ID NO: 135336 - DNA, 17 bp, Arabidopsis thaliana
tcaaagtgccttattac

SEQ ID NO: 135337 - DNA, 17 bp, Arabidopsis thaliana
tcaaagtgctaatgtcc

SEQ ID NO: 135338 - DNA, 17 bp, Arabidopsis thaliana
tcaaagtgctgatgtcc

SEQ ID NO: 135339 - DNA, 17 bp, Arabidopsis thaliana
tcaaagtggctaggaac

SEQ ID NO: 135340 - DNA, 17 bp, Arabidopsis thaliana
tcaaagtgtcacaggtg

SEQ ID NO: 135341 - DNA, 17 bp, Arabidopsis thaliana
tcaaagttaatgcttga

SEQ ID NO: 135342 - DNA, 17 bp, Arabidopsis thaliana
tcaaagttcagagagca

SEQ ID NO: 135343 - DNA, 17 bp, Arabidopsis thaliana
tcaaagttccaaagctt

SEQ ID NO: 135344 - DNA, 17 bp, Arabidopsis thaliana
tcaaagttccagagatg

SEQ ID NO: 135345 - DNA, 17 bp, Arabidopsis thaliana
tcaaagttcctacagcg

SEQ ID NO: 135346 - DNA, 17 bp, Arabidopsis thaliana
tcaaagttctacagtat

SEQ ID NO: 135347 - DNA, 17 bp, Arabidopsis thaliana
tcaaagttgctaactca

SEQ ID NO: 135348 - DNA, 17 bp, Arabidopsis thaliana
tcaaagttgtccttggc

SEQ ID NO: 135349 - DNA, 17 bp, Arabidopsis thaliana
tcaaagttgttgttcgg

SEQ ID NO: 135350 - DNA, 17 bp, Arabidopsis thaliana
tcaaagtttttgggttc

SEQ ID NO: 135351 - DNA, 17 bp, Arabidopsis thaliana
tcaaataaatcgtctat

SEQ ID NO: 135352 - DNA, 17 bp, Arabidopsis thaliana
tcaaataattcgggtca

SEQ ID NO: 135353 - DNA, 17 bp, Arabidopsis thaliana
tcaaataccgttttggc

SEQ ID NO: 135354 - DNA, 17 bp, Arabidopsis thaliana
tcaaatagagtggaatt

SEQ ID NO: 135355 - DNA, 17 bp, Arabidopsis thaliana
tcaaatagctcgacgcc

SEQ ID NO: 135356 - DNA, 17 bp, Arabidopsis thaliana
tcaaataggcacggttt

SEQ ID NO: 135357 - DNA, 17 bp, Arabidopsis thaliana
tcaaatatccagggtgc

SEQ ID NO: 135358 - DNA, 17 bp, Arabidopsis thaliana
tcaaatatctctgcggg

SEQ ID NO: 135359 - DNA, 17 bp, Arabidopsis thaliana
tcaaatatctctgcggt

SEQ ID NO: 135360 - DNA, 17 bp, Arabidopsis thaliana
tcaaatatgcccacgga

SEQ ID NO: 135361 - DNA, 17 bp, Arabidopsis thaliana
tcaaatattggcaagac

SEQ ID NO: 135362 - DNA, 17 bp, Arabidopsis thaliana
tcaaatatttttgcgga

SEQ ID NO: 135363 - DNA, 17 bp, Arabidopsis thaliana
tcaaatcaactgataag

SEQ ID NO: 135364 - DNA, 17 bp, Arabidopsis thaliana
tcaaatcatggcaatgc

SEQ ID NO: 135365 - DNA, 17 bp, Arabidopsis thaliana
tcaaatccaactcggcc

SEQ ID NO: 135366 - DNA, 17 bp, Arabidopsis thaliana
tcaaatccaagccgaat

SEQ ID NO: 135367 - DNA, 17 bp, Arabidopsis thaliana
tcaaatccagctcggcc

SEQ ID NO: 135368 - DNA, 17 bp, Arabidopsis thaliana
tcaaatccagctcggct

SEQ ID NO: 135369 - DNA, 17 bp, Arabidopsis thaliana
tcaaatccaggaagttt

SEQ ID NO: 135370 - DNA, 17 bp, Arabidopsis thaliana
tcaaatccaggaggttc

SEQ ID NO: 135371 - DNA, 17 bp, Arabidopsis thaliana
tcaaatccaggatggcc

SEQ ID NO: 135372 - DNA, 17 bp, Arabidopsis thaliana
tcaaatccagtccggcc

SEQ ID NO: 135373 - DNA, 17 bp, Arabidopsis thaliana
tcaaatcccatggttgt

SEQ ID NO: 135374 - DNA, 17 bp, Arabidopsis thaliana
tcaaatccgataagggg

SEQ ID NO: 135375 - DNA, 17 bp, Arabidopsis thaliana
tcaaatccggaggaccg

SEQ ID NO: 135376 - DNA, 17 bp, Arabidopsis thaliana
tcaaatccgggtgccgc

SEQ ID NO: 135377 - DNA, 17 bp, Arabidopsis thaliana
tcaaatcctacagagcg

SEQ ID NO: 135378 - DNA, 17 bp, Arabidopsis thaliana
tcaaatcctacgcgaag

SEQ ID NO: 135379 - DNA, 17 bp, Arabidopsis thaliana
tcaaatcctaggagcct

SEQ ID NO: 135380 - DNA, 17 bp, Arabidopsis thaliana
tcaaatcctatcctgag

SEQ ID NO: 135381 - DNA, 17 bp, Arabidopsis thaliana
tcaaatcctattggacg

SEQ ID NO: 135382 - DNA, 17 bp, Arabidopsis thaliana
tcaaatcctggaggagt

SEQ ID NO: 135383 - DNA, 17 bp, Arabidopsis thaliana
tcaaatcctgtctccgc

SEQ ID NO: 135384 - DNA, 17 bp, Arabidopsis thaliana
tcaaatccttctaggat

SEQ ID NO: 135385 - DNA, 17 bp, Arabidopsis thaliana
tcaaatcgctctgttga

SEQ ID NO: 135386 - DNA, 17 bp, Arabidopsis thaliana
tcaaatcgctgtataca

SEQ ID NO: 135387 - DNA, 17 bp, Arabidopsis thaliana
tcaaatcggatgtctgc

SEQ ID NO: 135388 - DNA, 17 bp, Arabidopsis thaliana
tcaaatcgggatgtcca

SEQ ID NO: 135389 - DNA, 17 bp, Arabidopsis thaliana
tcaaatcgtatcttcgg

SEQ ID NO: 135390 - DNA, 17 bp, Arabidopsis thaliana
tcaaatcgtatgcggga

SEQ ID NO: 135391 - DNA, 17 bp, Arabidopsis thaliana
tcaaatctattagattg

SEQ ID NO: 135392 - DNA, 17 bp, Arabidopsis thaliana
tcaaatcttcataacct

SEQ ID NO: 135393 - DNA, 17 bp, Arabidopsis thaliana
tcaaatctttatttgga

SEQ ID NO: 135394 - DNA, 17 bp, Arabidopsis thaliana
tcaaatgacgcttgaga

SEQ ID NO: 135395 - DNA, 17 bp, Arabidopsis thaliana
tcaaatgacggtccttg

SEQ ID NO: 135396 - DNA, 17 bp, Arabidopsis thaliana
tcaaatgactaggtcaa

SEQ ID NO: 135397 - DNA, 17 bp, Arabidopsis thaliana
tcaaatgagaacttcaa

SEQ ID NO: 135398 - DNA, 17 bp, Arabidopsis thaliana
tcaaatgagaactttga

SEQ ID NO: 135399 - DNA, 17 bp, Arabidopsis thaliana
tcaaatgaggccactgc

SEQ ID NO: 135400 - DNA, 17 bp, Arabidopsis thaliana
tcaaatgaggtgattga

SEQ ID NO: 135401 - DNA, 17 bp, Arabidopsis thaliana
tcaaatgcagtttagct

SEQ ID NO: 135402 - DNA, 17 bp, Arabidopsis thaliana
tcaaatgcattggattg

SEQ ID NO: 135403 - DNA, 17 bp, Arabidopsis thaliana
tcaaatgcttcaagcca

SEQ ID NO: 135404 - DNA, 17 bp, Arabidopsis thaliana
tcaaatgctttgatccg

SEQ ID NO: 135405 - DNA, 17 bp, Arabidopsis thaliana
tcaaatggaccgggccg

SEQ ID NO: 135406 - DNA, 17 bp, Arabidopsis thaliana
tcaaatggacttaacca

SEQ ID NO: 135407 - DNA, 17 bp, Arabidopsis thaliana
tcaaatggctactttcg

SEQ ID NO: 135408 - DNA, 17 bp, Arabidopsis thaliana
tcaaatggctgcagatg

SEQ ID NO: 135409 - DNA, 17 bp, Arabidopsis thaliana
tcaaatggtgcggtgag

SEQ ID NO: 135410 - DNA, 17 bp, Arabidopsis thaliana
tcaaatggttaggtgtg

SEQ ID NO: 135411 - DNA, 17 bp, Arabidopsis thaliana
tcaaatggttcaatttg

SEQ ID NO: 135412 - DNA, 17 bp, Arabidopsis thaliana
tcaaatgtatcacggcc

SEQ ID NO: 135413 - DNA, 17 bp, Arabidopsis thaliana
tcaaatgtctttgggga

SEQ ID NO: 135414 - DNA, 17 bp, Arabidopsis thaliana
tcaaatgtctttgggta

SEQ ID NO: 135415 - DNA, 17 bp, Arabidopsis thaliana
tcaaatgtttgctctac

SEQ ID NO: 135416 - DNA, 17 bp, Arabidopsis thaliana
tcaaattaccggtcgaa

SEQ ID NO: 135417 - DNA, 17 bp, Arabidopsis thaliana
tcaaattcaggatggcc

SEQ ID NO: 135418 - DNA, 17 bp, Arabidopsis thaliana
tcaaattcatcaaggtg

SEQ ID NO: 135419 - DNA, 17 bp, Arabidopsis thaliana
tcaaattcatgccaaaa

SEQ ID NO: 135420 - DNA, 17 bp, Arabidopsis thaliana
tcaaattccgggaggct

SEQ ID NO: 135421 - DNA, 17 bp, Arabidopsis thaliana
tcaaattccgtcgcact

SEQ ID NO: 135422 - DNA, 17 bp, Arabidopsis thaliana
tcaaattccgtcttacc

SEQ ID NO: 135423 - DNA, 17 bp, Arabidopsis thaliana
tcaaattgagtcaaata

SEQ ID NO: 135424 - DNA, 17 bp, Arabidopsis thaliana
tcaaattgagtcaagta

SEQ ID NO: 135425 - DNA, 17 bp, Arabidopsis thaliana
tcaaattgatctcctct

SEQ ID NO: 135426 - DNA, 17 bp, Arabidopsis thaliana
tcaaattggctgctggc

SEQ ID NO: 135427 - DNA, 17 bp, Arabidopsis thaliana
tcaaatttgctggcatt

SEQ ID NO: 135428 - DNA, 17 bp, Arabidopsis thaliana
tcaaatttggggtgccc

SEQ ID NO: 135429 - DNA, 17 bp, Arabidopsis thaliana
tcaaatttggtttgcaa

SEQ ID NO: 135430 - DNA, 17 bp, Arabidopsis thaliana
tcaacaaaagtcaggca

SEQ ID NO: 135431 - DNA, 17 bp, Arabidopsis thaliana
tcaacaaacatgggttt

SEQ ID NO: 135432 - DNA, 17 bp, Arabidopsis thaliana
tcaacaaaggggtgtct

SEQ ID NO: 135433 - DNA, 17 bp, Arabidopsis thaliana
tcaacaaaggtccggac

SEQ ID NO: 135434 - DNA, 17 bp, Arabidopsis thaliana
tcaacaacaagagcacc

SEQ ID NO: 135435 - DNA, 17 bp, Arabidopsis thaliana
tcaacaacagaattcgt

SEQ ID NO: 135436 - DNA, 17 bp, Arabidopsis thaliana
tcaacaacagcggcttg

SEQ ID NO: 135437 - DNA, 17 bp, Arabidopsis thaliana
tcaacaacatcagattt

SEQ ID NO: 135438 - DNA, 17 bp, Arabidopsis thaliana
tcaacaaccgtgatttc

SEQ ID NO: 135439 - DNA, 17 bp, Arabidopsis thaliana
tcaacaacctaccttct

SEQ ID NO: 135440 - DNA, 17 bp, Arabidopsis thaliana
tcaacaactgacattgg

SEQ ID NO: 135441 - DNA, 17 bp, Arabidopsis thaliana
tcaacaactttctcaca

SEQ ID NO: 135442 - DNA, 17 bp, Arabidopsis thaliana
tcaacaagattacaggt

SEQ ID NO: 135443 - DNA, 17 bp, Arabidopsis thaliana
tcaacaagcggagagga

SEQ ID NO: 135444 - DNA, 17 bp, Arabidopsis thaliana
tcaacaagcgtatcgaa

SEQ ID NO: 135445 - DNA, 17 bp, Arabidopsis thaliana
tcaacaaggctactgtg

SEQ ID NO: 135446 - DNA, 17 bp, Arabidopsis thaliana
tcaacaagggatttttg

SEQ ID NO: 135447 - DNA, 17 bp, Arabidopsis thaliana
tcaacaagtgcagtttt

SEQ ID NO: 135448 - DNA, 17 bp, Arabidopsis thaliana
tcaacaagtttacaagc

SEQ ID NO: 135449 - DNA, 17 bp, Arabidopsis thaliana
tcaacaagtttatggct

SEQ ID NO: 135450 - DNA, 17 bp, Arabidopsis thaliana
tcaacaatcctaggatc

SEQ ID NO: 135451 - DNA, 17 bp, Arabidopsis thaliana
tcaacaatggatcatca

SEQ ID NO: 135452 - DNA, 17 bp, Arabidopsis thaliana
tcaacaattgtctcatg

SEQ ID NO: 135453 - DNA, 17 bp, Arabidopsis thaliana
tcaacacaatctactca

SEQ ID NO: 135454 - DNA, 17 bp, Arabidopsis thaliana
tcaacacaggaatcgcc

SEQ ID NO: 135455 - DNA, 17 bp, Arabidopsis thaliana
tcaacacatgagagttt

SEQ ID NO: 135456 - DNA, 17 bp, Arabidopsis thaliana
tcaacaccatcgggagc

SEQ ID NO: 135457 - DNA, 17 bp, Arabidopsis thaliana
tcaacaccctcattgta

SEQ ID NO: 135458 - DNA, 17 bp, Arabidopsis thaliana
tcaacaccgctcgtatg

SEQ ID NO: 135459 - DNA, 17 bp, Arabidopsis thaliana
tcaacaccggtggtcgg

SEQ ID NO: 135460 - DNA, 17 bp, Arabidopsis thaliana
tcaacacctccattgca

SEQ ID NO: 135461 - DNA, 17 bp, Arabidopsis thaliana
tcaacacgcttctgagt

SEQ ID NO: 135462 - DNA, 17 bp, Arabidopsis thaliana
tcaacacgggcattgtg

SEQ ID NO: 135463 - DNA, 17 bp, Arabidopsis thaliana
tcaacactcaaagtctc

SEQ ID NO: 135464 - DNA, 17 bp, Arabidopsis thaliana
tcaacactctgccctgg

SEQ ID NO: 135465 - DNA, 17 bp, Arabidopsis thaliana
tcaacacttgctttttg

SEQ ID NO: 135466 - DNA, 17 bp, Arabidopsis thaliana
tcaacactttagatctc

SEQ ID NO: 135467 - DNA, 17 bp, Arabidopsis thaliana
tcaacacttttaggttt

SEQ ID NO: 135468 - DNA, 17 bp, Arabidopsis thaliana
tcaacacttttggatct

SEQ ID NO: 135469 - DNA, 17 bp, Arabidopsis thaliana
tcaacagaagcagatcg

SEQ ID NO: 135470 - DNA, 17 bp, Arabidopsis thaliana
tcaacagacgactgaat

SEQ ID NO: 135471 - DNA, 17 bp, Arabidopsis thaliana
tcaacagagagaacgcg

SEQ ID NO: 135472 - DNA, 17 bp, Arabidopsis thaliana
tcaacagatccggagat

SEQ ID NO: 135473 - DNA, 17 bp, Arabidopsis thaliana
tcaacagattgggcttt

SEQ ID NO: 135474 - DNA, 17 bp, Arabidopsis thaliana
tcaacagatttgtcgac

SEQ ID NO: 135475 - DNA, 17 bp, Arabidopsis thaliana
tcaacagcaggctcacc

SEQ ID NO: 135476 - DNA, 17 bp, Arabidopsis thaliana
tcaacagcaggttcacc

SEQ ID NO: 135477 - DNA, 17 bp, Arabidopsis thaliana
tcaacagcctttgtgat

SEQ ID NO: 135478 - DNA, 17 bp, Arabidopsis thaliana
tcaacagctgatctttg

SEQ ID NO: 135479 - DNA, 17 bp, Arabidopsis thaliana
tcaacagctggtctcac

SEQ ID NO: 135480 - DNA, 17 bp, Arabidopsis thaliana
tcaacaggctaaccggg

SEQ ID NO: 135481 - DNA, 17 bp, Arabidopsis thaliana
tcaacagggacagtcgg

SEQ ID NO: 135482 - DNA, 17 bp, Arabidopsis thaliana
tcaacagtaaaccatcg

SEQ ID NO: 135483 - DNA, 17 bp, Arabidopsis thaliana
tcaacagtcccaggtgg

SEQ ID NO: 135484 - DNA, 17 bp, Arabidopsis thaliana
tcaacagtgaaaagtga

SEQ ID NO: 135485 - DNA, 17 bp, Arabidopsis thaliana
tcaacagtgctgcaact

SEQ ID NO: 135486 - DNA, 17 bp, Arabidopsis thaliana
tcaacagtggtttgcgg

SEQ ID NO: 135487 - DNA, 17 bp, Arabidopsis thaliana
tcaacagtgtgggctag

SEQ ID NO: 135488 - DNA, 17 bp, Arabidopsis thaliana
tcaacataccactgcag

SEQ ID NO: 135489 - DNA, 17 bp, Arabidopsis thaliana
tcaacatcaacgagatg

SEQ ID NO: 135490 - DNA, 17 bp, Arabidopsis thaliana
tcaacatcaagttcata

SEQ ID NO: 135491 - DNA, 17 bp, Arabidopsis thaliana
tcaacatccgatgtggg

SEQ ID NO: 135492 - DNA, 17 bp, Arabidopsis thaliana
tcaacatcctgcacgac

SEQ ID NO: 135493 - DNA, 17 bp, Arabidopsis thaliana
tcaacatctatgtgttg

SEQ ID NO: 135494 - DNA, 17 bp, Arabidopsis thaliana
tcaacatctctggaact

SEQ ID NO: 135495 - DNA, 17 bp, Arabidopsis thaliana
tcaacatctgaacgata

SEQ ID NO: 135496 - DNA, 17 bp, Arabidopsis thaliana
tcaacatctgatcgata

SEQ ID NO: 135497 - DNA, 17 bp, Arabidopsis thaliana
tcaacatctgatcgttt

SEQ ID NO: 135498 - DNA, 17 bp, Arabidopsis thaliana
tcaacatcttcgctagg

SEQ ID NO: 135499 - DNA, 17 bp, Arabidopsis thaliana
tcaacatcttcgttagg

SEQ ID NO: 135500 - DNA, 17 bp, Arabidopsis thaliana
tcaacatcttgagtagg

SEQ ID NO: 135501 - DNA, 17 bp, Arabidopsis thaliana
tcaacatgctgtggttt

SEQ ID NO: 135502 - DNA, 17 bp, Arabidopsis thaliana
tcaacatgtccatctag

SEQ ID NO: 135503 - DNA, 17 bp, Arabidopsis thaliana
tcaacatgtctatctgg

SEQ ID NO: 135504 - DNA, 17 bp, Arabidopsis thaliana
tcaacattccacccgaa

SEQ ID NO: 135505 - DNA, 17 bp, Arabidopsis thaliana
tcaacattcctcaggat

SEQ ID NO: 135506 - DNA, 17 bp, Arabidopsis thaliana
tcaacattggccggatc

SEQ ID NO: 135507 - DNA, 17 bp, Arabidopsis thaliana
tcaacattgttatagtg

SEQ ID NO: 135508 - DNA, 17 bp, Arabidopsis thaliana
tcaacatttgctggaga

SEQ ID NO: 135509 - DNA, 17 bp, Arabidopsis thaliana
tcaacatttgggccgac

SEQ ID NO: 135510 - DNA, 17 bp, Arabidopsis thaliana
tcaacatttgtaacctc

SEQ ID NO: 135511 - DNA, 17 bp, Arabidopsis thaliana
tcaacatttgtgtggaa

SEQ ID NO: 135512 - DNA, 17 bp, Arabidopsis thaliana
tcaaccaaacaatcacg

SEQ ID NO: 135513 - DNA, 17 bp, Arabidopsis thaliana
tcaaccaaacctcacac

SEQ ID NO: 135514 - DNA, 17 bp, Arabidopsis thaliana
tcaaccaaatgagccac

SEQ ID NO: 135515 - DNA, 17 bp, Arabidopsis thaliana
tcaaccaaccttcttct

SEQ ID NO: 135516 - DNA, 17 bp, Arabidopsis thaliana
tcaaccaatcagagcgc

SEQ ID NO: 135517 - DNA, 17 bp, Arabidopsis thaliana
tcaaccaatggaccaaa

SEQ ID NO: 135518 - DNA, 17 bp, Arabidopsis thaliana
tcaaccaatgtgcccac

SEQ ID NO: 135519 - DNA, 17 bp, Arabidopsis thaliana
tcaaccacaacgcggaa

SEQ ID NO: 135520 - DNA, 17 bp, Arabidopsis thaliana
tcaaccacagttgctta

SEQ ID NO: 135521 - DNA, 17 bp, Arabidopsis thaliana
tcaaccacatcagccgc

SEQ ID NO: 135522 - DNA, 17 bp, Arabidopsis thaliana
tcaaccaggttggacca

SEQ ID NO: 135523 - DNA, 17 bp, Arabidopsis thaliana
tcaaccaggttggacta

SEQ ID NO: 135524 - DNA, 17 bp, Arabidopsis thaliana
tcaaccatccggagctt

SEQ ID NO: 135525 - DNA, 17 bp, Arabidopsis thaliana
tcaaccattggaccaag

SEQ ID NO: 135526 - DNA, 17 bp, Arabidopsis thaliana
tcaacccacacatccca

SEQ ID NO: 135527 - DNA, 17 bp, Arabidopsis thaliana
tcaacccatgacctggt

SEQ ID NO: 135528 - DNA, 17 bp, Arabidopsis thaliana
tcaaccccctagtcact

SEQ ID NO: 135529 - DNA, 17 bp, Arabidopsis thaliana
tcaaccctttgacgcca

SEQ ID NO: 135530 - DNA, 17 bp, Arabidopsis thaliana
tcaaccgaaagcattca

SEQ ID NO: 135531 - DNA, 17 bp, Arabidopsis thaliana
tcaaccgaatggcggac

SEQ ID NO: 135532 - DNA, 17 bp, Arabidopsis thaliana
tcaaccgatccacggcg

SEQ ID NO: 135533 - DNA, 17 bp, Arabidopsis thaliana
tcaaccgatcggaccgg

SEQ ID NO: 135534 - DNA, 17 bp, Arabidopsis thaliana
tcaaccgcagcggacca

SEQ ID NO: 135535 - DNA, 17 bp, Arabidopsis thaliana
tcaaccgccgtctgcgt

SEQ ID NO: 135536 - DNA, 17 bp, Arabidopsis thaliana
tcaaccgccgtgatgac

SEQ ID NO: 135537 - DNA, 17 bp, Arabidopsis thaliana
tcaaccgcctgaataga

SEQ ID NO: 135538 - DNA, 17 bp, Arabidopsis thaliana
tcaaccgctacagagca

SEQ ID NO: 135539 - DNA, 17 bp, Arabidopsis thaliana
tcaaccgctcgcaatag

SEQ ID NO: 135540 - DNA, 17 bp, Arabidopsis thaliana
tcaaccggaatcgttac

SEQ ID NO: 135541 - DNA, 17 bp, Arabidopsis thaliana
tcaaccggactatcttc

SEQ ID NO: 135542 - DNA, 17 bp, Arabidopsis thaliana
tcaaccgggttctcact

SEQ ID NO: 135543 - DNA, 17 bp, Arabidopsis thaliana
tcaaccgggttggacca

SEQ ID NO: 135544 - DNA, 17 bp, Arabidopsis thaliana
tcaaccggttagcagat

SEQ ID NO: 135545 - DNA, 17 bp, Arabidopsis thaliana
tcaaccggttcactgga

SEQ ID NO: 135546 - DNA, 17 bp, Arabidopsis thaliana
tcaaccggttgagtgtc

SEQ ID NO: 135547 - DNA, 17 bp, Arabidopsis thaliana
tcaaccggttggacctg

SEQ ID NO: 135548 - DNA, 17 bp, Arabidopsis thaliana
tcaaccgtcgtctgcgt

SEQ ID NO: 135549 - DNA, 17 bp, Arabidopsis thaliana
tcaaccgtggtcattgc

SEQ ID NO: 135550 - DNA, 17 bp, Arabidopsis thaliana
tcaacctaaatgggtga

SEQ ID NO: 135551 - DNA, 17 bp, Arabidopsis thaliana
tcaacctaaccgcagcc

SEQ ID NO: 135552 - DNA, 17 bp, Arabidopsis thaliana
tcaacctagtacgagag

SEQ ID NO: 135553 - DNA, 17 bp, Arabidopsis thaliana
tcaacctcagacctctt

SEQ ID NO: 135554 - DNA, 17 bp, Arabidopsis thaliana
tcaacctcctgcagtac

SEQ ID NO: 135555 - DNA, 17 bp, Arabidopsis thaliana
tcaacctctttgcatgc

SEQ ID NO: 135556 - DNA, 17 bp, Arabidopsis thaliana
tcaacctgatactcgac

SEQ ID NO: 135557 - DNA, 17 bp, Arabidopsis thaliana
tcaacctgattgtctgt

SEQ ID NO: 135558 - DNA, 17 bp, Arabidopsis thaliana
tcaacctggaattccag

SEQ ID NO: 135559 - DNA, 17 bp, Arabidopsis thaliana
tcaacctggagttccac

SEQ ID NO: 135560 - DNA, 17 bp, Arabidopsis thaliana
tcaacctgttgccattg

SEQ ID NO: 135561 - DNA, 17 bp, Arabidopsis thaliana
tcaaccttcaatgctga

SEQ ID NO: 135562 - DNA, 17 bp, Arabidopsis thaliana
tcaaccttgcgatgggt

SEQ ID NO: 135563 - DNA, 17 bp, Arabidopsis thaliana
tcaaccttgtgacagag

SEQ ID NO: 135564 - DNA, 17 bp, Arabidopsis thaliana
tcaacctttggtttctc

SEQ ID NO: 135565 - DNA, 17 bp, Arabidopsis thaliana
tcaacgaaacttgatca

SEQ ID NO: 135566 - DNA, 17 bp, Arabidopsis thaliana
tcaacgaaagtccaaga

SEQ ID NO: 135567 - DNA, 17 bp, Arabidopsis thaliana
tcaacgaactgcagaca

SEQ ID NO: 135568 - DNA, 17 bp, Arabidopsis thaliana
tcaacgaatcaagactt

SEQ ID NO: 135569 - DNA, 17 bp, Arabidopsis thaliana
tcaacgaattacttgtc

SEQ ID NO: 135570 - DNA, 17 bp, Arabidopsis thaliana
tcaacgacatcggcttc

SEQ ID NO: 135571 - DNA, 17 bp, Arabidopsis thaliana
tcaacgacattggagcc

SEQ ID NO: 135572 - DNA, 17 bp, Arabidopsis thaliana
tcaacgacattgtgata

SEQ ID NO: 135573 - DNA, 17 bp, Arabidopsis thaliana
tcaacgaccctcggcaa

SEQ ID NO: 135574 - DNA, 17 bp, Arabidopsis thaliana
tcaacgacctctaaatt

SEQ ID NO: 135575 - DNA, 17 bp, Arabidopsis thaliana
tcaacgacgaccgggtt

SEQ ID NO: 135576 - DNA, 17 bp, Arabidopsis thaliana
tcaacgacgcctagacc

SEQ ID NO: 135577 - DNA, 17 bp, Arabidopsis thaliana
tcaacgactctcggcaa

SEQ ID NO: 135578 - DNA, 17 bp, Arabidopsis thaliana
tcaacgatcatatcagg

SEQ ID NO: 135579 - DNA, 17 bp, Arabidopsis thaliana
tcaacgatctgattaac

SEQ ID NO: 135580 - DNA, 17 bp, Arabidopsis thaliana
tcaacgatggattcatc

SEQ ID NO: 135581 - DNA, 17 bp, Arabidopsis thaliana
tcaacgatgtcgacaca

SEQ ID NO: 135582 - DNA, 17 bp, Arabidopsis thaliana
tcaacgattgtcgagac

SEQ ID NO: 135583 - DNA, 17 bp, Arabidopsis thaliana
tcaacgcaatgtgattt

SEQ ID NO: 135584 - DNA, 17 bp, Arabidopsis thaliana
tcaacgccaccgggatc

SEQ ID NO: 135585 - DNA, 17 bp, Arabidopsis thaliana
tcaacgccatagcgatg

SEQ ID NO: 135586 - DNA, 17 bp, Arabidopsis thaliana
tcaacgccgttgagtcg

SEQ ID NO: 135587 - DNA, 17 bp, Arabidopsis thaliana
tcaacgcctgcagatga

SEQ ID NO: 135588 - DNA, 17 bp, Arabidopsis thaliana
tcaacgcgctcttcgag

SEQ ID NO: 135589 - DNA, 17 bp, Arabidopsis thaliana
tcaacgcggaagtagat

SEQ ID NO: 135590 - DNA, 17 bp, Arabidopsis thaliana
tcaacgcggattacggt

SEQ ID NO: 135591 - DNA, 17 bp, Arabidopsis thaliana
tcaacgctcttgctcat

SEQ ID NO: 135592 - DNA, 17 bp, Arabidopsis thaliana
tcaacgctgcatgatcc

SEQ ID NO: 135593 - DNA, 17 bp, Arabidopsis thaliana
tcaacggaaagatcatg

SEQ ID NO: 135594 - DNA, 17 bp, Arabidopsis thaliana
tcaacggaatattgttg

SEQ ID NO: 135595 - DNA, 17 bp, Arabidopsis thaliana
tcaacggacaattcctt

SEQ ID NO: 135596 - DNA, 17 bp, Arabidopsis thaliana
tcaacggattctgcttc

SEQ ID NO: 135597 - DNA, 17 bp, Arabidopsis thaliana
tcaacggctactgtgca

SEQ ID NO: 135598 - DNA, 17 bp, Arabidopsis thaliana
tcaacggctactgtgcg

SEQ ID NO: 135599 - DNA, 17 bp, Arabidopsis thaliana
tcaacggctactgtgct

SEQ ID NO: 135600 - DNA, 17 bp, Arabidopsis thaliana
tcaacgggagtttgttg

SEQ ID NO: 135601 - DNA, 17 bp, Arabidopsis thaliana
tcaacgggtttggcagg

SEQ ID NO: 135602 - DNA, 17 bp, Arabidopsis thaliana
tcaacggtaaaacatgc

SEQ ID NO: 135603 - DNA, 17 bp, Arabidopsis thaliana
tcaacggtcggatgtat

SEQ ID NO: 135604 - DNA, 17 bp, Arabidopsis thaliana
tcaacggtgaaagatac

SEQ ID NO: 135605 - DNA, 17 bp, Arabidopsis thaliana
tcaacggtgttctacaa

SEQ ID NO: 135606 - DNA, 17 bp, Arabidopsis thaliana
tcaacggttcatcggat

SEQ ID NO: 135607 - DNA, 17 bp, Arabidopsis thaliana
tcaacggtttggtttcg

SEQ ID NO: 135608 - DNA, 17 bp, Arabidopsis thaliana
tcaacgtatcctacgat

SEQ ID NO: 135609 - DNA, 17 bp, Arabidopsis thaliana
tcaacgtcctcactagt

SEQ ID NO: 135610 - DNA, 17 bp, Arabidopsis thaliana
tcaacgtctacaaaaaa

SEQ ID NO: 135611 - DNA, 17 bp, Arabidopsis thaliana
tcaacgtctcttcgcga

SEQ ID NO: 135612 - DNA, 17 bp, Arabidopsis thaliana
tcaacgtcttcataccg

SEQ ID NO: 135613 - DNA, 17 bp, Arabidopsis thaliana
tcaacgtgattgtcgct

SEQ ID NO: 135614 - DNA, 17 bp, Arabidopsis thaliana
tcaacgtttcgaagcag

SEQ ID NO: 135615 - DNA, 17 bp, Arabidopsis thaliana
tcaactaaagccacagc

SEQ ID NO: 135616 - DNA, 17 bp, Arabidopsis thaliana
tcaactaatcacaagcc

SEQ ID NO: 135617 - DNA, 17 bp, Arabidopsis thaliana
tcaactaatcattgacc

SEQ ID NO: 135618 - DNA, 17 bp, Arabidopsis thaliana
tcaactacaattgacac

SEQ ID NO: 135619 - DNA, 17 bp, Arabidopsis thaliana
tcaactacaggccgact

SEQ ID NO: 135620 - DNA, 17 bp, Arabidopsis thaliana
tcaactacccttcgttt

SEQ ID NO: 135621 - DNA, 17 bp, Arabidopsis thaliana
tcaactagccccgaaaa

SEQ ID NO: 135622 - DNA, 17 bp, Arabidopsis thaliana
tcaactagcccctaaaa

SEQ ID NO: 135623 - DNA, 17 bp, Arabidopsis thaliana
tcaactaggggaccaga

SEQ ID NO: 135624 - DNA, 17 bp, Arabidopsis thaliana
tcaactagtgactcatg

SEQ ID NO: 135625 - DNA, 17 bp, Arabidopsis thaliana
tcaactagtttcggacc

SEQ ID NO: 135626 - DNA, 17 bp, Arabidopsis thaliana
tcaactagtttcggatt

SEQ ID NO: 135627 - DNA, 17 bp, Arabidopsis thaliana
tcaactatcatcttccg

SEQ ID NO: 135628 - DNA, 17 bp, Arabidopsis thaliana
tcaactatgattcgctt

SEQ ID NO: 135629 - DNA, 17 bp, Arabidopsis thaliana
tcaactatggaccaagc

SEQ ID NO: 135630 - DNA, 17 bp, Arabidopsis thaliana
tcaactatggattaagt

SEQ ID NO: 135631 - DNA, 17 bp, Arabidopsis thaliana
tcaactatggctggtgt

SEQ ID NO: 135632 - DNA, 17 bp, Arabidopsis thaliana
tcaactatttttgcggt

SEQ ID NO: 135633 - DNA, 17 bp, Arabidopsis thaliana
tcaactcaaatttggac

SEQ ID NO: 135634 - DNA, 17 bp, Arabidopsis thaliana
tcaactcactttctgct

SEQ ID NO: 135635 - DNA, 17 bp, Arabidopsis thaliana
tcaactcactttgattt

SEQ ID NO: 135636 - DNA, 17 bp, Arabidopsis thaliana
tcaactcagggatgtgt

SEQ ID NO: 135637 - DNA, 17 bp, Arabidopsis thaliana
tcaactcaggttctgca

SEQ ID NO: 135638 - DNA, 17 bp, Arabidopsis thaliana
tcaactcatctgcatgg

SEQ ID NO: 135639 - DNA, 17 bp, Arabidopsis thaliana
tcaactcatttgaccca

SEQ ID NO: 135640 - DNA, 17 bp, Arabidopsis thaliana
tcaactcatttggctca

SEQ ID NO: 135641 - DNA, 17 bp, Arabidopsis thaliana
tcaactccaagatttat

SEQ ID NO: 135642 - DNA, 17 bp, Arabidopsis thaliana
tcaactccaggattgga

SEQ ID NO: 135643 - DNA, 17 bp, Arabidopsis thaliana
tcaactccaggatttat

SEQ ID NO: 135644 - DNA, 17 bp, Arabidopsis thaliana
tcaactccgatggcgat

SEQ ID NO: 135645 - DNA, 17 bp, Arabidopsis thaliana
tcaactccgtttgcttg

SEQ ID NO: 135646 - DNA, 17 bp, Arabidopsis thaliana
tcaactcggattactga

SEQ ID NO: 135647 - DNA, 17 bp, Arabidopsis thaliana
tcaactcggccgagtgg

SEQ ID NO: 135648 - DNA, 17 bp, Arabidopsis thaliana
tcaactcgggactttaa

SEQ ID NO: 135649 - DNA, 17 bp, Arabidopsis thaliana
tcaactcggtctcaggc

SEQ ID NO: 135650 - DNA, 17 bp, Arabidopsis thaliana
tcaactcgtgcagtttg

SEQ ID NO: 135651 - DNA, 17 bp, Arabidopsis thaliana
tcaactcgttgggcact

SEQ ID NO: 135652 - DNA, 17 bp, Arabidopsis thaliana
tcaactcgtttttcagg

SEQ ID NO: 135653 - DNA, 17 bp, Arabidopsis thaliana
tcaactctcatctacct

SEQ ID NO: 135654 - DNA, 17 bp, Arabidopsis thaliana
tcaactctcctttcatt

SEQ ID NO: 135655 - DNA, 17 bp, Arabidopsis thaliana
tcaactctgagttttac

SEQ ID NO: 135656 - DNA, 17 bp, Arabidopsis thaliana
tcaactctgctgggccg

SEQ ID NO: 135657 - DNA, 17 bp, Arabidopsis thaliana
tcaactctgggtgtctc

SEQ ID NO: 135658 - DNA, 17 bp, Arabidopsis thaliana
tcaactctgtgcggttg

SEQ ID NO: 135659 - DNA, 17 bp, Arabidopsis thaliana
tcaactctgtgtggtgt

SEQ ID NO: 135660 - DNA, 17 bp, Arabidopsis thaliana
tcaactgaacaagatct

SEQ ID NO: 135661 - DNA, 17 bp, Arabidopsis thaliana
tcaactgaattcgtcga

SEQ ID NO: 135662 - DNA, 17 bp, Arabidopsis thaliana
tcaactgaattgagact

SEQ ID NO: 135663 - DNA, 17 bp, Arabidopsis thaliana
tcaactgacgaggagcg

SEQ ID NO: 135664 - DNA, 17 bp, Arabidopsis thaliana
tcaactgacgtcagcgt

SEQ ID NO: 135665 - DNA, 17 bp, Arabidopsis thaliana
tcaactgagtcgactcc

SEQ ID NO: 135666 - DNA, 17 bp, Arabidopsis thaliana
tcaactgcagtgtactt

SEQ ID NO: 135667 - DNA, 17 bp, Arabidopsis thaliana
tcaactgcgagatgtgt

SEQ ID NO: 135668 - DNA, 17 bp, Arabidopsis thaliana
tcaactgcggataaagt

SEQ ID NO: 135669 - DNA, 17 bp, Arabidopsis thaliana
tcaactgctgaggatac

SEQ ID NO: 135670 - DNA, 17 bp, Arabidopsis thaliana
tcaactgctggagtgct

SEQ ID NO: 135671 - DNA, 17 bp, Arabidopsis thaliana
tcaactgctggattgct

SEQ ID NO: 135672 - DNA, 17 bp, Arabidopsis thaliana
tcaactggacggccatg

SEQ ID NO: 135673 - DNA, 17 bp, Arabidopsis thaliana
tcaactggctcacgatc

SEQ ID NO: 135674 - DNA, 17 bp, Arabidopsis thaliana
tcaactggtcgatggtt

SEQ ID NO: 135675 - DNA, 17 bp, Arabidopsis thaliana
tcaactggttcaccggg

SEQ ID NO: 135676 - DNA, 17 bp, Arabidopsis thaliana
tcaactgtctcttgcta

SEQ ID NO: 135677 - DNA, 17 bp, Arabidopsis thaliana
tcaactgtcttatgcac

SEQ ID NO: 135678 - DNA, 17 bp, Arabidopsis thaliana
tcaactgtcttgcttct

SEQ ID NO: 135679 - DNA, 17 bp, Arabidopsis thaliana
tcaactgtggatcaagc

SEQ ID NO: 135680 - DNA, 17 bp, Arabidopsis thaliana
tcaactgtggtcggact

SEQ ID NO: 135681 - DNA, 17 bp, Arabidopsis thaliana
tcaactgttctatcttg

SEQ ID NO: 135682 - DNA, 17 bp, Arabidopsis thaliana
tcaactgtttggctcgg

SEQ ID NO: 135683 - DNA, 17 bp, Arabidopsis thaliana
tcaactgtttgtgaatc

SEQ ID NO: 135684 - DNA, 17 bp, Arabidopsis thaliana
tcaacttaacatccgct

SEQ ID NO: 135685 - DNA, 17 bp, Arabidopsis thaliana
tcaacttaccgtcttgg

SEQ ID NO: 135686 - DNA, 17 bp, Arabidopsis thaliana
tcaacttaggaagattt

SEQ ID NO: 135687 - DNA, 17 bp, Arabidopsis thaliana
tcaacttagggcctgac

SEQ ID NO: 135688 - DNA, 17 bp, Arabidopsis thaliana
tcaacttagtttccgtc

SEQ ID NO: 135689 - DNA, 17 bp, Arabidopsis thaliana
tcaacttatttacaatg

SEQ ID NO: 135690 - DNA, 17 bp, Arabidopsis thaliana
tcaacttcaactacagc

SEQ ID NO: 135691 - DNA, 17 bp, Arabidopsis thaliana
tcaacttcacatgtggc

SEQ ID NO: 135692 - DNA, 17 bp, Arabidopsis thaliana
tcaacttcagttgacca

SEQ ID NO: 135693 - DNA, 17 bp, Arabidopsis thaliana
tcaacttcatatgcgcc

SEQ ID NO: 135694 - DNA, 17 bp, Arabidopsis thaliana
tcaacttcatatgcggc

SEQ ID NO: 135695 - DNA, 17 bp, Arabidopsis thaliana
tcaacttccagacctgg

SEQ ID NO: 135696 - DNA, 17 bp, Arabidopsis thaliana
tcaacttcccctggggg

SEQ ID NO: 135697 - DNA, 17 bp, Arabidopsis thaliana
tcaacttccgacgtcta

SEQ ID NO: 135698 - DNA, 17 bp, Arabidopsis thaliana
tcaacttccgatgtggc

SEQ ID NO: 135699 - DNA, 17 bp, Arabidopsis thaliana
tcaacttccgatgtggg

SEQ ID NO: 135700 - DNA, 17 bp, Arabidopsis thaliana
tcaacttcctagcgcct

SEQ ID NO: 135701 - DNA, 17 bp, Arabidopsis thaliana
tcaacttcctattcgtc

SEQ ID NO: 135702 - DNA, 17 bp, Arabidopsis thaliana
tcaacttcctggcttgg

SEQ ID NO: 135703 - DNA, 17 bp, Arabidopsis thaliana
tcaacttcggctccaag

SEQ ID NO: 135704 - DNA, 17 bp, Arabidopsis thaliana
tcaacttcgggacaagg

SEQ ID NO: 135705 - DNA, 17 bp, Arabidopsis thaliana
tcaacttcgtatgcggc

SEQ ID NO: 135706 - DNA, 17 bp, Arabidopsis thaliana
tcaacttcgtatgcggt

SEQ ID NO: 135707 - DNA, 17 bp, Arabidopsis thaliana
tcaacttcgtatgctgc

SEQ ID NO: 135708 - DNA, 17 bp, Arabidopsis thaliana
tcaacttcgtatgtgac

SEQ ID NO: 135709 - DNA, 17 bp, Arabidopsis thaliana
tcaacttcgtatgtgcc

SEQ ID NO: 135710 - DNA, 17 bp, Arabidopsis thaliana
tcaacttcgtatgtggc

SEQ ID NO: 135711 - DNA, 17 bp, Arabidopsis thaliana
tcaacttctgatgtggc

SEQ ID NO: 135712 - DNA, 17 bp, Arabidopsis thaliana
tcaacttctgatgtggg

SEQ ID NO: 135713 - DNA, 17 bp, Arabidopsis thaliana
tcaacttcttatgtggc

SEQ ID NO: 135714 - DNA, 17 bp, Arabidopsis thaliana
tcaacttcttcgatggc

SEQ ID NO: 135715 - DNA, 17 bp, Arabidopsis thaliana
tcaacttgacagttttg

SEQ ID NO: 135716 - DNA, 17 bp, Arabidopsis thaliana
tcaacttgattcgtcac

SEQ ID NO: 135717 - DNA, 17 bp, Arabidopsis thaliana
tcaacttgccgcaggtt

SEQ ID NO: 135718 - DNA, 17 bp, Arabidopsis thaliana
tcaacttgctcgatgta

SEQ ID NO: 135719 - DNA, 17 bp, Arabidopsis thaliana
tcaacttgctgcttctg

SEQ ID NO: 135720 - DNA, 17 bp, Arabidopsis thaliana
tcaacttggagaaggaa

SEQ ID NO: 135721 - DNA, 17 bp, Arabidopsis thaliana
tcaacttggtatgcgaa

SEQ ID NO: 135722 - DNA, 17 bp, Arabidopsis thaliana
tcaacttggtgtggatc

SEQ ID NO: 135723 - DNA, 17 bp, Arabidopsis thaliana
tcaacttgtcttgaggt

SEQ ID NO: 135724 - DNA, 17 bp, Arabidopsis thaliana
tcaacttgtggtcattt

SEQ ID NO: 135725 - DNA, 17 bp, Arabidopsis thaliana
tcaacttgttcaacgtc

SEQ ID NO: 135726 - DNA, 17 bp, Arabidopsis thaliana
tcaacttgttgcagagc

SEQ ID NO: 135727 - DNA, 17 bp, Arabidopsis thaliana
tcaactttcaaattgtg

SEQ ID NO: 135728 - DNA, 17 bp, Arabidopsis thaliana
tcaactttcaatgcgtc

SEQ ID NO: 135729 - DNA, 17 bp, Arabidopsis thaliana
tcaactttcgatgtggg

SEQ ID NO: 135730 - DNA, 17 bp, Arabidopsis thaliana
tcaactttcgggtgcct

SEQ ID NO: 135731 - DNA, 17 bp, Arabidopsis thaliana
tcaactttgaccagacc

SEQ ID NO: 135732 - DNA, 17 bp, Arabidopsis thaliana
tcaactttgaccagatc

SEQ ID NO: 135733 - DNA, 17 bp, Arabidopsis thaliana
tcaactttgcaaaactg

SEQ ID NO: 135734 - DNA, 17 bp, Arabidopsis thaliana
tcaactttggacagttc

SEQ ID NO: 135735 - DNA, 17 bp, Arabidopsis thaliana
tcaactttggactctta

SEQ ID NO: 135736 - DNA, 17 bp, Arabidopsis thaliana
tcaactttggccagagc

SEQ ID NO: 135737 - DNA, 17 bp, Arabidopsis thaliana
tcaactttggccagatc

SEQ ID NO: 135738 - DNA, 17 bp, Arabidopsis thaliana
tcaactttggccggatc

SEQ ID NO: 135739 - DNA, 17 bp, Arabidopsis thaliana
tcaactttggtccaaat

SEQ ID NO: 135740 - DNA, 17 bp, Arabidopsis thaliana
tcaactttgtatgcgac

SEQ ID NO: 135741 - DNA, 17 bp, Arabidopsis thaliana
tcaactttgtatgcggc

SEQ ID NO: 135742 - DNA, 17 bp, Arabidopsis thaliana
tcaacttttcgcgctaa

SEQ ID NO: 135743 - DNA, 17 bp, Arabidopsis thaliana
tcaacttttcgttctga

SEQ ID NO: 135744 - DNA, 17 bp, Arabidopsis thaliana
tcaagaaaaagatcgtc

SEQ ID NO: 135745 - DNA, 17 bp, Arabidopsis thaliana
tcaagaaaaggccttac

SEQ ID NO: 135746 - DNA, 17 bp, Arabidopsis thaliana
tcaagaaacttctgcac

SEQ ID NO: 135747 - DNA, 17 bp, Arabidopsis thaliana
tcaagaaccgatgtgtt

SEQ ID NO: 135748 - DNA, 17 bp, Arabidopsis thaliana
tcaagaacctttaacca

SEQ ID NO: 135749 - DNA, 17 bp, Arabidopsis thaliana
tcaagaacgaaagttgg

SEQ ID NO: 135750 - DNA, 17 bp, Arabidopsis thaliana
tcaagaacgcctcttgg

SEQ ID NO: 135751 - DNA, 17 bp, Arabidopsis thaliana
tcaagaacttctctgac

SEQ ID NO: 135752 - DNA, 17 bp, Arabidopsis thaliana
tcaagaagactgggaat

SEQ ID NO: 135753 - DNA, 17 bp, Arabidopsis thaliana
tcaagaaggtccgttga

SEQ ID NO: 135754 - DNA, 17 bp, Arabidopsis thaliana
tcaagaaggtctccagc

SEQ ID NO: 135755 - DNA, 17 bp, Arabidopsis thaliana
tcaagaattggtctgcg

SEQ ID NO: 135756 - DNA, 17 bp, Arabidopsis thaliana
tcaagacaaccatttcc

SEQ ID NO: 135757 - DNA, 17 bp, Arabidopsis thaliana
tcaagacaccatcgctg

SEQ ID NO: 135758 - DNA, 17 bp, Arabidopsis thaliana
tcaagacaccctttgtt

SEQ ID NO: 135759 - DNA, 17 bp, Arabidopsis thaliana
tcaagacaccgcaggct

SEQ ID NO: 135760 - DNA, 17 bp, Arabidopsis thaliana
tcaagacacgggttgat

SEQ ID NO: 135761 - DNA, 17 bp, Arabidopsis thaliana
tcaagaccaactctgtg

SEQ ID NO: 135762 - DNA, 17 bp, Arabidopsis thaliana
tcaagacccaactgaca

SEQ ID NO: 135763 - DNA, 17 bp, Arabidopsis thaliana
tcaagacccaagaccag

SEQ ID NO: 135764 - DNA, 17 bp, Arabidopsis thaliana
tcaagaccgaagctagc

SEQ ID NO: 135765 - DNA, 17 bp, Arabidopsis thaliana
tcaagacctctttcttt

SEQ ID NO: 135766 - DNA, 17 bp, Arabidopsis thaliana
tcaagacgatggtatcc

SEQ ID NO: 135767 - DNA, 17 bp, Arabidopsis thaliana
tcaagacgctggaatcc

SEQ ID NO: 135768 - DNA, 17 bp, Arabidopsis thaliana
tcaagacgggtcatcaa

SEQ ID NO: 135769 - DNA, 17 bp, Arabidopsis thaliana
tcaagactctatcgcaa

SEQ ID NO: 135770 - DNA, 17 bp, Arabidopsis thaliana
tcaagactctcctacct

SEQ ID NO: 135771 - DNA, 17 bp, Arabidopsis thaliana
tcaagactcttttgctc

SEQ ID NO: 135772 - DNA, 17 bp, Arabidopsis thaliana
tcaagactttggctcca

SEQ ID NO: 135773 - DNA, 17 bp, Arabidopsis thaliana
tcaagagacacgggatg

SEQ ID NO: 135774 - DNA, 17 bp, Arabidopsis thaliana
tcaagagaccaagtggc

SEQ ID NO: 135775 - DNA, 17 bp, Arabidopsis thaliana
tcaagagcagagtcaga

SEQ ID NO: 135776 - DNA, 17 bp, Arabidopsis thaliana
tcaagagccgagttctg

SEQ ID NO: 135777 - DNA, 17 bp, Arabidopsis thaliana
tcaagagctttctggac

SEQ ID NO: 135778 - DNA, 17 bp, Arabidopsis thaliana
tcaagaggcgttcttga

SEQ ID NO: 135779 - DNA, 17 bp, Arabidopsis thaliana
tcaagaggtgtaggctt

SEQ ID NO: 135780 - DNA, 17 bp, Arabidopsis thaliana
tcaagaggttctgcgct

SEQ ID NO: 135781 - DNA, 17 bp, Arabidopsis thaliana
tcaagaggttctggggc

SEQ ID NO: 135782 - DNA, 17 bp, Arabidopsis thaliana
tcaagagttctctcagg

SEQ ID NO: 135783 - DNA, 17 bp, Arabidopsis thaliana
tcaagagtttttgagcc

SEQ ID NO: 135784 - DNA, 17 bp, Arabidopsis thaliana
tcaagatacagtgcgtt

SEQ ID NO: 135785 - DNA, 17 bp, Arabidopsis thaliana
tcaagatagatcctaaa

SEQ ID NO: 135786 - DNA, 17 bp, Arabidopsis thaliana
tcaagatagggtctcac

SEQ ID NO: 135787 - DNA, 17 bp, Arabidopsis thaliana
tcaagatatcgaggcat

SEQ ID NO: 135788 - DNA, 17 bp, Arabidopsis thaliana
tcaagatatcgaggctt

SEQ ID NO: 135789 - DNA, 17 bp, Arabidopsis thaliana
tcaagatatgggtgaaa

SEQ ID NO: 135790 - DNA, 17 bp, Arabidopsis thaliana
tcaagatcatcacagac

SEQ ID NO: 135791 - DNA, 17 bp, Arabidopsis thaliana
tcaagatccagttgcgg

SEQ ID NO: 135792 - DNA, 17 bp, Arabidopsis thaliana
tcaagatcccgttgcgg

SEQ ID NO: 135793 - DNA, 17 bp, Arabidopsis thaliana
tcaagatcgggactgat

SEQ ID NO: 135794 - DNA, 17 bp, Arabidopsis thaliana
tcaagatcgggttgcgg

SEQ ID NO: 135795 - DNA, 17 bp, Arabidopsis thaliana
tcaagatcggtttgcag

SEQ ID NO: 135796 - DNA, 17 bp, Arabidopsis thaliana
tcaagatcgtgttgcgg

SEQ ID NO: 135797 - DNA, 17 bp, Arabidopsis thaliana
tcaagatctaaccgtta

SEQ ID NO: 135798 - DNA, 17 bp, Arabidopsis thaliana
tcaagatctggttgcgg

SEQ ID NO: 135799 - DNA, 17 bp, Arabidopsis thaliana
tcaagatgagatgtcac

SEQ ID NO: 135800 - DNA, 17 bp, Arabidopsis thaliana
tcaagatgcagttgcgg

SEQ ID NO: 135801 - DNA, 17 bp, Arabidopsis thaliana
tcaagatgccaaaacag

SEQ ID NO: 135802 - DNA, 17 bp, Arabidopsis thaliana
tcaagatgcccaacaag

SEQ ID NO: 135803 - DNA, 17 bp, Arabidopsis thaliana
tcaagatgcggaatgca

SEQ ID NO: 135804 - DNA, 17 bp, Arabidopsis thaliana
tcaagatgcggttcggt

SEQ ID NO: 135805 - DNA, 17 bp, Arabidopsis thaliana
tcaagatgggaggaaga

SEQ ID NO: 135806 - DNA, 17 bp, Arabidopsis thaliana
tcaagatggtgcctttg

SEQ ID NO: 135807 - DNA, 17 bp, Arabidopsis thaliana
tcaagattgccctcatg

SEQ ID NO: 135808 - DNA, 17 bp, Arabidopsis thaliana
tcaagattgggtctcac

SEQ ID NO: 135809 - DNA, 17 bp, Arabidopsis thaliana
tcaagatttccggttta

SEQ ID NO: 135810 - DNA, 17 bp, Arabidopsis thaliana
tcaagatttgctgattg

SEQ ID NO: 135811 - DNA, 17 bp, Arabidopsis thaliana
tcaagatttttcaacgg

SEQ ID NO: 135812 - DNA, 17 bp, Arabidopsis thaliana
tcaagcaacatccgact

SEQ ID NO: 135813 - DNA, 17 bp, Arabidopsis thaliana
tcaagcaactggtgtgc

SEQ ID NO: 135814 - DNA, 17 bp, Arabidopsis thaliana
tcaagcaaggtgcaact

SEQ ID NO: 135815 - DNA, 17 bp, Arabidopsis thaliana
tcaagcaatctgcatgt

SEQ ID NO: 135816 - DNA, 17 bp, Arabidopsis thaliana
tcaagcaatgcgtatga

SEQ ID NO: 135817 - DNA, 17 bp, Arabidopsis thaliana
tcaagcaccagctcgaa

SEQ ID NO: 135818 - DNA, 17 bp, Arabidopsis thaliana
tcaagcactctttgact

SEQ ID NO: 135819 - DNA, 17 bp, Arabidopsis thaliana
tcaagcactgtttcggt

SEQ ID NO: 135820 - DNA, 17 bp, Arabidopsis thaliana
tcaagcagctccggcgc

SEQ ID NO: 135821 - DNA, 17 bp, Arabidopsis thaliana
tcaagcagctgtgtacc

SEQ ID NO: 135822 - DNA, 17 bp, Arabidopsis thaliana
tcaagcaggacaatgga

SEQ ID NO: 135823 - DNA, 17 bp, Arabidopsis thaliana
tcaagcaggggctgcgg

SEQ ID NO: 135824 - DNA, 17 bp, Arabidopsis thaliana
tcaagcatacatggtgt

SEQ ID NO: 135825 - DNA, 17 bp, Arabidopsis thaliana
tcaagccataccgtgaa

SEQ ID NO: 135826 - DNA, 17 bp, Arabidopsis thaliana
tcaagcccatattatct

SEQ ID NO: 135827 - DNA, 17 bp, Arabidopsis thaliana
tcaagcccgttcaagac

SEQ ID NO: 135828 - DNA, 17 bp, Arabidopsis thaliana
tcaagccgaattgtcct

SEQ ID NO: 135829 - DNA, 17 bp, Arabidopsis thaliana
tcaagccgctactcatt

SEQ ID NO: 135830 - DNA, 17 bp, Arabidopsis thaliana
tcaagccggattgtttt

SEQ ID NO: 135831 - DNA, 17 bp, Arabidopsis thaliana
tcaagccgttgcagtcg

SEQ ID NO: 135832 - DNA, 17 bp, Arabidopsis thaliana
tcaagcctgcgtttgaa

SEQ ID NO: 135833 - DNA, 17 bp, Arabidopsis thaliana
tcaagccttgcgattgt

SEQ ID NO: 135834 - DNA, 17 bp, Arabidopsis thaliana
tcaagcgaatgcgaaag

SEQ ID NO: 135835 - DNA, 17 bp, Arabidopsis thaliana
tcaagcgacagctgcgg

SEQ ID NO: 135836 - DNA, 17 bp, Arabidopsis thaliana
tcaagcgacgcatccac

SEQ ID NO: 135837 - DNA, 17 bp, Arabidopsis thaliana
tcaagcgacgcatgcgc

SEQ ID NO: 135838 - DNA, 17 bp, Arabidopsis thaliana
tcaagcgactaatggga

SEQ ID NO: 135839 - DNA, 17 bp, Arabidopsis thaliana
tcaagcgattgtgggtt

SEQ ID NO: 135840 - DNA, 17 bp, Arabidopsis thaliana
tcaagcgattgttaaca

SEQ ID NO: 135841 - DNA, 17 bp, Arabidopsis thaliana
tcaagcggacggttgcg

SEQ ID NO: 135842 - DNA, 17 bp, Arabidopsis thaliana
tcaagcggattaagcgg

SEQ ID NO: 135843 - DNA, 17 bp, Arabidopsis thaliana
tcaagcgggttttggtc

SEQ ID NO: 135844 - DNA, 17 bp, Arabidopsis thaliana
tcaagcggtgtctctaa

SEQ ID NO: 135845 - DNA, 17 bp, Arabidopsis thaliana
tcaagcggtgttgaacg

SEQ ID NO: 135846 - DNA, 17 bp, Arabidopsis thaliana
tcaagcggttaagtcca

SEQ ID NO: 135847 - DNA, 17 bp, Arabidopsis thaliana
tcaagcggttcatgcag

SEQ ID NO: 135848 - DNA, 17 bp, Arabidopsis thaliana
tcaagcgtagcgtgggt

SEQ ID NO: 135849 - DNA, 17 bp, Arabidopsis thaliana
tcaagcgtattaggcgg

SEQ ID NO: 135850 - DNA, 17 bp, Arabidopsis thaliana
tcaagcgtcactcgaat

SEQ ID NO: 135851 - DNA, 17 bp, Arabidopsis thaliana
tcaagcgtgcctgggga

SEQ ID NO: 135852 - DNA, 17 bp, Arabidopsis thaliana
tcaagcgtttgcggttg

SEQ ID NO: 135853 - DNA, 17 bp, Arabidopsis thaliana
tcaagcgtttgcgtttg

SEQ ID NO: 135854 - DNA, 17 bp, Arabidopsis thaliana
tcaagctgccagcatga

SEQ ID NO: 135855 - DNA, 17 bp, Arabidopsis thaliana
tcaaggaaaagtgtctg

SEQ ID NO: 135856 - DNA, 17 bp, Arabidopsis thaliana
tcaaggaataccgtgtg

SEQ ID NO: 135857 - DNA, 17 bp, Arabidopsis thaliana
tcaaggaatcctgccag

SEQ ID NO: 135858 - DNA, 17 bp, Arabidopsis thaliana
tcaaggaatgggagggg

SEQ ID NO: 135859 - DNA, 17 bp, Arabidopsis thaliana
tcaaggaattgacggaa

SEQ ID NO: 135860 - DNA, 17 bp, Arabidopsis thaliana
tcaaggacgcaaggtgt

SEQ ID NO: 135861 - DNA, 17 bp, Arabidopsis thaliana
tcaaggactttttgtcg

SEQ ID NO: 135862 - DNA, 17 bp, Arabidopsis thaliana
tcaaggagcatggccat

SEQ ID NO: 135863 - DNA, 17 bp, Arabidopsis thaliana
tcaaggagctctatcat

SEQ ID NO: 135864 - DNA, 17 bp, Arabidopsis thaliana
tcaaggagctgcttcca

SEQ ID NO: 135865 - DNA, 17 bp, Arabidopsis thaliana
tcaaggaggtgtcgctc

SEQ ID NO: 135866 - DNA, 17 bp, Arabidopsis thaliana
tcaaggagtgctcctca

SEQ ID NO: 135867 - DNA, 17 bp, Arabidopsis thaliana
tcaaggatcggcaaaat

SEQ ID NO: 135868 - DNA, 17 bp, Arabidopsis thaliana
tcaaggatctctgaagt

SEQ ID NO: 135869 - DNA, 17 bp, Arabidopsis thaliana
tcaaggatttccagagc

SEQ ID NO: 135870 - DNA, 17 bp, Arabidopsis thaliana
tcaaggcccaagaccag

SEQ ID NO: 135871 - DNA, 17 bp, Arabidopsis thaliana
tcaaggcccatcatcca

SEQ ID NO: 135872 - DNA, 17 bp, Arabidopsis thaliana
tcaaggccggtgttgtc

SEQ ID NO: 135873 - DNA, 17 bp, Arabidopsis thaliana
tcaaggcggacacaact

SEQ ID NO: 135874 - DNA, 17 bp, Arabidopsis thaliana
tcaaggcgtcgtttcgg

SEQ ID NO: 135875 - DNA, 17 bp, Arabidopsis thaliana
tcaaggcgtggccgcta

SEQ ID NO: 135876 - DNA, 17 bp, Arabidopsis thaliana
tcaaggctcttgtcgtc

SEQ ID NO: 135877 - DNA, 17 bp, Arabidopsis thaliana
tcaaggctgccactcgg

SEQ ID NO: 135878 - DNA, 17 bp, Arabidopsis thaliana
tcaagggaaccgcatgg

SEQ ID NO: 135879 - DNA, 17 bp, Arabidopsis thaliana
tcaagggacctgctgct

SEQ ID NO: 135880 - DNA, 17 bp, Arabidopsis thaliana
tcaagggactcgtcaat

SEQ ID NO: 135881 - DNA, 17 bp, Arabidopsis thaliana
tcaagggagtcgatgct

SEQ ID NO: 135882 - DNA, 17 bp, Arabidopsis thaliana
tcaagggatctcctatg

SEQ ID NO: 135883 - DNA, 17 bp, Arabidopsis thaliana
tcaagggattgggtttc

SEQ ID NO: 135884 - DNA, 17 bp, Arabidopsis thaliana
tcaagggcaatttcgtt

SEQ ID NO: 135885 - DNA, 17 bp, Arabidopsis thaliana
tcaagggcacgtctgcc

SEQ ID NO: 135886 - DNA, 17 bp, Arabidopsis thaliana
tcaaggggccattgttg

SEQ ID NO: 135887 - DNA, 17 bp, Arabidopsis thaliana
tcaaggggtgaacgacc

SEQ ID NO: 135888 - DNA, 17 bp, Arabidopsis thaliana
tcaaggggttgattcca

SEQ ID NO: 135889 - DNA, 17 bp, Arabidopsis thaliana
tcaagggtgaacgacct

SEQ ID NO: 135890 - DNA, 17 bp, Arabidopsis thaliana
tcaagggtggtccgtga

SEQ ID NO: 135891 - DNA, 17 bp, Arabidopsis thaliana
tcaagggttctttcttt

SEQ ID NO: 135892 - DNA, 17 bp, Arabidopsis thaliana
tcaaggtagagtggtga

SEQ ID NO: 135893 - DNA, 17 bp, Arabidopsis thaliana
tcaaggtatcgagtaga

SEQ ID NO: 135894 - DNA, 17 bp, Arabidopsis thaliana
tcaaggtatctcccaag

SEQ ID NO: 135895 - DNA, 17 bp, Arabidopsis thaliana
tcaaggtcacgtctgcc

SEQ ID NO: 135896 - DNA, 17 bp, Arabidopsis thaliana
tcaaggtcccttttttg

SEQ ID NO: 135897 - DNA, 17 bp, Arabidopsis thaliana
tcaaggtcgaatccgcc

SEQ ID NO: 135898 - DNA, 17 bp, Arabidopsis thaliana
tcaaggtcgacgcgggc

SEQ ID NO: 135899 - DNA, 17 bp, Arabidopsis thaliana
tcaaggtctaatccgcc

SEQ ID NO: 135900 - DNA, 17 bp, Arabidopsis thaliana
tcaaggtgccaaaatta

SEQ ID NO: 135901 - DNA, 17 bp, Arabidopsis thaliana
tcaaggtggctatagtt

SEQ ID NO: 135902 - DNA, 17 bp, Arabidopsis thaliana
tcaaggtgggtcagcgc

SEQ ID NO: 135903 - DNA, 17 bp, Arabidopsis thaliana
tcaaggttcctgctcat

SEQ ID NO: 135904 - DNA, 17 bp, Arabidopsis thaliana
tcaaggttcgcaatggc

SEQ ID NO: 135905 - DNA, 17 bp, Arabidopsis thaliana
tcaaggttcttacggtg

SEQ ID NO: 135906 - DNA, 17 bp, Arabidopsis thaliana
tcaaggttcttcttaga

SEQ ID NO: 135907 - DNA, 17 bp, Arabidopsis thaliana
tcaaggttgatttatca

SEQ ID NO: 135908 - DNA, 17 bp, Arabidopsis thaliana
tcaaggttgttgaccaa

SEQ ID NO: 135909 - DNA, 17 bp, Arabidopsis thaliana
tcaaggtttgccagcgt

SEQ ID NO: 135910 - DNA, 17 bp, Arabidopsis thaliana
tcaaggttttggttatg

SEQ ID NO: 135911 - DNA, 17 bp, Arabidopsis thaliana
tcaagtaagatgatcgt

SEQ ID NO: 135912 - DNA, 17 bp, Arabidopsis thaliana
tcaagtaagtcatcggc

SEQ ID NO: 135913 - DNA, 17 bp, Arabidopsis thaliana
tcaagtaatggtcatcc

SEQ ID NO: 135914 - DNA, 17 bp, Arabidopsis thaliana
tcaagtacacgggacga

SEQ ID NO: 135915 - DNA, 17 bp, Arabidopsis thaliana
tcaagtactgacccagc

SEQ ID NO: 135916 - DNA, 17 bp, Arabidopsis thaliana
tcaagtatcagcctgtg

SEQ ID NO: 135917 - DNA, 17 bp, Arabidopsis thaliana
tcaagtattctatgcag

SEQ ID NO: 135918 - DNA, 17 bp, Arabidopsis thaliana
tcaagtattgtgtttca

SEQ ID NO: 135919 - DNA, 17 bp, Arabidopsis thaliana
tcaagtcaccaaagttt

SEQ ID NO: 135920 - DNA, 17 bp, Arabidopsis thaliana
tcaagtcagaatccggg

SEQ ID NO: 135921 - DNA, 17 bp, Arabidopsis thaliana
tcaagtcaggctgtctc

SEQ ID NO: 135922 - DNA, 17 bp, Arabidopsis thaliana
tcaagtcatcatgcccc

SEQ ID NO: 135923 - DNA, 17 bp, Arabidopsis thaliana
tcaagtcatctctaccg

SEQ ID NO: 135924 - DNA, 17 bp, Arabidopsis thaliana
tcaagtccaaggcttat

SEQ ID NO: 135925 - DNA, 17 bp, Arabidopsis thaliana
tcaagtcccacaggtac

SEQ ID NO: 135926 - DNA, 17 bp, Arabidopsis thaliana
tcaagtccctctacgcg

SEQ ID NO: 135927 - DNA, 17 bp, Arabidopsis thaliana
tcaagtccctctatccc

SEQ ID NO: 135928 - DNA, 17 bp, Arabidopsis thaliana
tcaagtccctgactcga

SEQ ID NO: 135929 - DNA, 17 bp, Arabidopsis thaliana
tcaagtccgcatggccc

SEQ ID NO: 135930 - DNA, 17 bp, Arabidopsis thaliana
tcaagtccggtcttgtt

SEQ ID NO: 135931 - DNA, 17 bp, Arabidopsis thaliana
tcaagtcctcgtgttgc

SEQ ID NO: 135932 - DNA, 17 bp, Arabidopsis thaliana
tcaagtcgaagctgtac

SEQ ID NO: 135933 - DNA, 17 bp, Arabidopsis thaliana
tcaagtcgagtcacaag

SEQ ID NO: 135934 - DNA, 17 bp, Arabidopsis thaliana
tcaagtcgcaggggaga

SEQ ID NO: 135935 - DNA, 17 bp, Arabidopsis thaliana
tcaagtcgggccatagg

SEQ ID NO: 135936 - DNA, 17 bp, Arabidopsis thaliana
tcaagtcgtctaaagaa

SEQ ID NO: 135937 - DNA, 17 bp, Arabidopsis thaliana
tcaagtcgtgtctcgtg

SEQ ID NO: 135938 - DNA, 17 bp, Arabidopsis thaliana
tcaagtctatcgatcag

SEQ ID NO: 135939 - DNA, 17 bp, Arabidopsis thaliana
tcaagtctatcggtttg

SEQ ID NO: 135940 - DNA, 17 bp, Arabidopsis thaliana
tcaagtctatcgttcag

SEQ ID NO: 135941 - DNA, 17 bp, Arabidopsis thaliana
tcaagtctatgccgagt

SEQ ID NO: 135942 - DNA, 17 bp, Arabidopsis thaliana
tcaagtctatttggttc

SEQ ID NO: 135943 - DNA, 17 bp, Arabidopsis thaliana
tcaagtctccaaggtga

SEQ ID NO: 135944 - DNA, 17 bp, Arabidopsis thaliana
tcaagtctccacagtgt

SEQ ID NO: 135945 - DNA, 17 bp, Arabidopsis thaliana
tcaagtctgtcagttgg

SEQ ID NO: 135946 - DNA, 17 bp, Arabidopsis thaliana
tcaagtgagagatttgg

SEQ ID NO: 135947 - DNA, 17 bp, Arabidopsis thaliana
tcaagtgagtccctgtc

SEQ ID NO: 135948 - DNA, 17 bp, Arabidopsis thaliana
tcaagtgatgtgattcg

SEQ ID NO: 135949 - DNA, 17 bp, Arabidopsis thaliana
tcaagtgattaaagcgt

SEQ ID NO: 135950 - DNA, 17 bp, Arabidopsis thaliana
tcaagtgcagcttgtgt

SEQ ID NO: 135951 - DNA, 17 bp, Arabidopsis thaliana
tcaagtgcagcttttgt

SEQ ID NO: 135952 - DNA, 17 bp, Arabidopsis thaliana
tcaagtgcagttttgcg

SEQ ID NO: 135953 - DNA, 17 bp, Arabidopsis thaliana
tcaagtgcggcttgtgt

SEQ ID NO: 135954 - DNA, 17 bp, Arabidopsis thaliana
tcaagtgctctgagttt

SEQ ID NO: 135955 - DNA, 17 bp, Arabidopsis thaliana
tcaagtgtcctaagcgt

SEQ ID NO: 135956 - DNA, 17 bp, Arabidopsis thaliana
tcaagtgtcgtctttcg

SEQ ID NO: 135957 - DNA, 17 bp, Arabidopsis thaliana
tcaagtgtgactgacat

SEQ ID NO: 135958 - DNA, 17 bp, Arabidopsis thaliana
tcaagtgtggacgcgtg

SEQ ID NO: 135959 - DNA, 17 bp, Arabidopsis thaliana
tcaagtgttgctgatag

SEQ ID NO: 135960 - DNA, 17 bp, Arabidopsis thaliana
tcaagtgttgtgctttt

SEQ ID NO: 135961 - DNA, 17 bp, Arabidopsis thaliana
tcaagtgtttcgtcacg

SEQ ID NO: 135962 - DNA, 17 bp, Arabidopsis thaliana
tcaagtgttttgaacga

SEQ ID NO: 135963 - DNA, 17 bp, Arabidopsis thaliana
tcaagttacacgatcga

SEQ ID NO: 135964 - DNA, 17 bp, Arabidopsis thaliana
tcaagttaccacaggga

SEQ ID NO: 135965 - DNA, 17 bp, Arabidopsis thaliana
tcaagttatccaaggtg

SEQ ID NO: 135966 - DNA, 17 bp, Arabidopsis thaliana
tcaagttatggtccggc

SEQ ID NO: 135967 - DNA, 17 bp, Arabidopsis thaliana
tcaagttcactcgaccg

SEQ ID NO: 135968 - DNA, 17 bp, Arabidopsis thaliana
tcaagttccatacggca

SEQ ID NO: 135969 - DNA, 17 bp, Arabidopsis thaliana
tcaagttccgttgactt

SEQ ID NO: 135970 - DNA, 17 bp, Arabidopsis thaliana
tcaagttcctaatcggg

SEQ ID NO: 135971 - DNA, 17 bp, Arabidopsis thaliana
tcaagttcgtctttgtt

SEQ ID NO: 135972 - DNA, 17 bp, Arabidopsis thaliana
tcaagttctctcttgca

SEQ ID NO: 135973 - DNA, 17 bp, Arabidopsis thaliana
tcaagttcttcaccgcg

SEQ ID NO: 135974 - DNA, 17 bp, Arabidopsis thaliana
tcaagttgaccgagctg

SEQ ID NO: 135975 - DNA, 17 bp, Arabidopsis thaliana
tcaagttgaggcctgaa

SEQ ID NO: 135976 - DNA, 17 bp, Arabidopsis thaliana
tcaagttgagtgctatg

SEQ ID NO: 135977 - DNA, 17 bp, Arabidopsis thaliana
tcaagttgcgttcgccc

SEQ ID NO: 135978 - DNA, 17 bp, Arabidopsis thaliana
tcaagttggcaggaagg

SEQ ID NO: 135979 - DNA, 17 bp, Arabidopsis thaliana
tcaagttggggccagtc

SEQ ID NO: 135980 - DNA, 17 bp, Arabidopsis thaliana
tcaagttgtctctcgct

SEQ ID NO: 135981 - DNA, 17 bp, Arabidopsis thaliana
tcaagtttaaccttctt

SEQ ID NO: 135982 - DNA, 17 bp, Arabidopsis thaliana
tcaagtttagacccgtt

SEQ ID NO: 135983 - DNA, 17 bp, Arabidopsis thaliana
tcaagtttattcagttc

SEQ ID NO: 135984 - DNA, 17 bp, Arabidopsis thaliana
tcaagtttcgttgactt

SEQ ID NO: 135985 - DNA, 17 bp, Arabidopsis thaliana
tcaagtttgatgacgat

SEQ ID NO: 135986 - DNA, 17 bp, Arabidopsis thaliana
tcaagtttgcgttgact

SEQ ID NO: 135987 - DNA, 17 bp, Arabidopsis thaliana
tcaagtttggcttcagg

SEQ ID NO: 135988 - DNA, 17 bp, Arabidopsis thaliana
tcaagtttgtgtgaaat

SEQ ID NO: 135989 - DNA, 17 bp, Arabidopsis thaliana
tcaagttttctcagttt

SEQ ID NO: 135990 - DNA, 17 bp, Arabidopsis thaliana
tcaagttttctcggttg

SEQ ID NO: 135991 - DNA, 17 bp, Arabidopsis thaliana
tcaagttttctgcttat

SEQ ID NO: 135992 - DNA, 17 bp, Arabidopsis thaliana
tcaagttttgtaccgaa

SEQ ID NO: 135993 - DNA, 17 bp, Arabidopsis thaliana
tcaagttttgtgccgaa

SEQ ID NO: 135994 - DNA, 17 bp, Arabidopsis thaliana
tcaagttttgttgactt

SEQ ID NO: 135995 - DNA, 17 bp, Arabidopsis thaliana
tcaataaccctttcaac

SEQ ID NO: 135996 - DNA, 17 bp, Arabidopsis thaliana
tcaataagcctacctgc

SEQ ID NO: 135997 - DNA, 17 bp, Arabidopsis thaliana
tcaataatgttgggact

SEQ ID NO: 135998 - DNA, 17 bp, Arabidopsis thaliana
tcaatacacgcgttggc

SEQ ID NO: 135999 - DNA, 17 bp, Arabidopsis thaliana
tcaatacagttgaaggt

SEQ ID NO: 136000 - DNA, 17 bp, Arabidopsis thaliana
tcaataccaggaggttc

SEQ ID NO: 136001 - DNA, 17 bp, Arabidopsis thaliana
tcaatacccgtgggtac

SEQ ID NO: 136002 - DNA, 17 bp, Arabidopsis thaliana
tcaatactgctgggcgt

SEQ ID NO: 136003 - DNA, 17 bp, Arabidopsis thaliana
tcaatagactgtcgcga

SEQ ID NO: 136004 - DNA, 17 bp, Arabidopsis thaliana
tcaatagccagatgttg

SEQ ID NO: 136005 - DNA, 17 bp, Arabidopsis thaliana
tcaatagcccttttccc

SEQ ID NO: 136006 - DNA, 17 bp, Arabidopsis thaliana
tcaatagcgctcgtgag

SEQ ID NO: 136007 - DNA, 17 bp, Arabidopsis thaliana
tcaatagctcgacgcca

SEQ ID NO: 136008 - DNA, 17 bp, Arabidopsis thaliana
tcaatagcttgactttg

SEQ ID NO: 136009 - DNA, 17 bp, Arabidopsis thaliana
tcaatagctttggagtg

SEQ ID NO: 136010 - DNA, 17 bp, Arabidopsis thaliana
tcaataggcggacctta

SEQ ID NO: 136011 - DNA, 17 bp, Arabidopsis thaliana
tcaataggtgctggaaa

SEQ ID NO: 136012 - DNA, 17 bp, Arabidopsis thaliana
tcaatagtttgcttcca

SEQ ID NO: 136013 - DNA, 17 bp, Arabidopsis thaliana
tcaatatgtcacgacgt

SEQ ID NO: 136014 - DNA, 17 bp, Arabidopsis thaliana
tcaatattctgtagtcc

SEQ ID NO: 136015 - DNA, 17 bp, Arabidopsis thaliana
tcaatattttccgtcgc

SEQ ID NO: 136016 - DNA, 17 bp, Arabidopsis thaliana
tcaatcaaaccagtggg

SEQ ID NO: 136017 - DNA, 17 bp, Arabidopsis thaliana
tcaatcaaagaacaggg

SEQ ID NO: 136018 - DNA, 17 bp, Arabidopsis thaliana
tcaatcaaagaattcct

SEQ ID NO: 136019 - DNA, 17 bp, Arabidopsis thaliana
tcaatcaaagatggtga

SEQ ID NO: 136020 - DNA, 17 bp, Arabidopsis thaliana
tcaatcaaatctgcttt

SEQ ID NO: 136021 - DNA, 17 bp, Arabidopsis thaliana
tcaatcaaccgctacag

SEQ ID NO: 136022 - DNA, 17 bp, Arabidopsis thaliana
tcaatcaaccggttcac

SEQ ID NO: 136023 - DNA, 17 bp, Arabidopsis thaliana
tcaatcaacgactctcg

SEQ ID NO: 136024 - DNA, 17 bp, Arabidopsis thaliana
tcaatcaacgcagtggg

SEQ ID NO: 136025 - DNA, 17 bp, Arabidopsis thaliana
tcaatcaactcgttggg

SEQ ID NO: 136026 - DNA, 17 bp, Arabidopsis thaliana
tcaatcaacttggagaa

SEQ ID NO: 136027 - DNA, 17 bp, Arabidopsis thaliana
tcaatcaagcccgttca

SEQ ID NO: 136028 - DNA, 17 bp, Arabidopsis thaliana
tcaatcaagcgtttgcg

SEQ ID NO: 136029 - DNA, 17 bp, Arabidopsis thaliana
tcaatcaatcagccgct

SEQ ID NO: 136030 - DNA, 17 bp, Arabidopsis thaliana
tcaatcacacggggaaa

SEQ ID NO: 136031 - DNA, 17 bp, Arabidopsis thaliana
tcaatcacacgtctgcc

SEQ ID NO: 136032 - DNA, 17 bp, Arabidopsis thaliana
tcaatcacagttttcag

SEQ ID NO: 136033 - DNA, 17 bp, Arabidopsis thaliana
tcaatcacattcttggc

SEQ ID NO: 136034 - DNA, 17 bp, Arabidopsis thaliana
tcaatcaccaactttcg

SEQ ID NO: 136035 - DNA, 17 bp, Arabidopsis thaliana
tcaatcaccaagttcgg

SEQ ID NO: 136036 - DNA, 17 bp, Arabidopsis thaliana
tcaatcacccatggggt

SEQ ID NO: 136037 - DNA, 17 bp, Arabidopsis thaliana
tcaatcacgggacagga

SEQ ID NO: 136038 - DNA, 17 bp, Arabidopsis thaliana
tcaatcacgggacgggt

SEQ ID NO: 136039 - DNA, 17 bp, Arabidopsis thaliana
tcaatcacgggttttcg

SEQ ID NO: 136040 - DNA, 17 bp, Arabidopsis thaliana
tcaatcagaccgcctgc

SEQ ID NO: 136041 - DNA, 17 bp, Arabidopsis thaliana
tcaatcagagcgcaccg

SEQ ID NO: 136042 - DNA, 17 bp, Arabidopsis thaliana
tcaatcagatactgtga

SEQ ID NO: 136043 - DNA, 17 bp, Arabidopsis thaliana
tcaatcagatgttggca

SEQ ID NO: 136044 - DNA, 17 bp, Arabidopsis thaliana
tcaatcagattggttca

SEQ ID NO: 136045 - DNA, 17 bp, Arabidopsis thaliana
tcaatcagcagtgttgt

SEQ ID NO: 136046 - DNA, 17 bp, Arabidopsis thaliana
tcaatcagctgatggcg

SEQ ID NO: 136047 - DNA, 17 bp, Arabidopsis thaliana
tcaatcagcttttgtgc

SEQ ID NO: 136048 - DNA, 17 bp, Arabidopsis thaliana
tcaatcaggtcgcctgc

SEQ ID NO: 136049 - DNA, 17 bp, Arabidopsis thaliana
tcaatcagtggatcccg

SEQ ID NO: 136050 - DNA, 17 bp, Arabidopsis thaliana
tcaatcataccagtggg

SEQ ID NO: 136051 - DNA, 17 bp, Arabidopsis thaliana
tcaatcatagtcgttcg

SEQ ID NO: 136052 - DNA, 17 bp, Arabidopsis thaliana
tcaatcatatggagaga

SEQ ID NO: 136053 - DNA, 17 bp, Arabidopsis thaliana
tcaatcatgacaaagtc

SEQ ID NO: 136054 - DNA, 17 bp, Arabidopsis thaliana
tcaatccactctcgtga

SEQ ID NO: 136055 - DNA, 17 bp, Arabidopsis thaliana
tcaatccagcgatttcg

SEQ ID NO: 136056 - DNA, 17 bp, Arabidopsis thaliana
tcaatccagtggtgtgg

SEQ ID NO: 136057 - DNA, 17 bp, Arabidopsis thaliana
tcaatccatgcactagc

SEQ ID NO: 136058 - DNA, 17 bp, Arabidopsis thaliana
tcaatcccgtcgctgtc

SEQ ID NO: 136059 - DNA, 17 bp, Arabidopsis thaliana
tcaatccgctgagattt

SEQ ID NO: 136060 - DNA, 17 bp, Arabidopsis thaliana
tcaatccggtgcgattt

SEQ ID NO: 136061 - DNA, 17 bp, Arabidopsis thaliana
tcaatccgttgacctag

SEQ ID NO: 136062 - DNA, 17 bp, Arabidopsis thaliana
tcaatcgacggttgcaa

SEQ ID NO: 136063 - DNA, 17 bp, Arabidopsis thaliana
tcaatcgacggttgcag

SEQ ID NO: 136064 - DNA, 17 bp, Arabidopsis thaliana
tcaatcgatacgggcca

SEQ ID NO: 136065 - DNA, 17 bp, Arabidopsis thaliana
tcaatcgcagcgactca

SEQ ID NO: 136066 - DNA, 17 bp, Arabidopsis thaliana
tcaatcgccatcggagt

SEQ ID NO: 136067 - DNA, 17 bp, Arabidopsis thaliana
tcaatcgcctcgggcaa

SEQ ID NO: 136068 - DNA, 17 bp, Arabidopsis thaliana
tcaatcgctaacaaccg

SEQ ID NO: 136069 - DNA, 17 bp, Arabidopsis thaliana
tcaatcgctcttgagac

SEQ ID NO: 136070 - DNA, 17 bp, Arabidopsis thaliana
tcaatcgctttcttctg

SEQ ID NO: 136071 - DNA, 17 bp, Arabidopsis thaliana
tcaatcggctggaaatc

SEQ ID NO: 136072 - DNA, 17 bp, Arabidopsis thaliana
tcaatcgggagtcttgg

SEQ ID NO: 136073 - DNA, 17 bp, Arabidopsis thaliana
tcaatcggtttacggag

SEQ ID NO: 136074 - DNA, 17 bp, Arabidopsis thaliana
tcaatcgtcagtaggtg

SEQ ID NO: 136075 - DNA, 17 bp, Arabidopsis thaliana
tcaatctaaggctctcg

SEQ ID NO: 136076 - DNA, 17 bp, Arabidopsis thaliana
tcaatctagccgttctt

SEQ ID NO: 136077 - DNA, 17 bp, Arabidopsis thaliana
tcaatctcaacgattcg

SEQ ID NO: 136078 - DNA, 17 bp, Arabidopsis thaliana
tcaatctcaagtgtcaa

SEQ ID NO: 136079 - DNA, 17 bp, Arabidopsis thaliana
tcaatctcagattttga

SEQ ID NO: 136080 - DNA, 17 bp, Arabidopsis thaliana
tcaatctcagctattct

SEQ ID NO: 136081 - DNA, 17 bp, Arabidopsis thaliana
tcaatctcatcatctct

SEQ ID NO: 136082 - DNA, 17 bp, Arabidopsis thaliana
tcaatctccaggatgga

SEQ ID NO: 136083 - DNA, 17 bp, Arabidopsis thaliana
tcaatctccatgctttt

SEQ ID NO: 136084 - DNA, 17 bp, Arabidopsis thaliana
tcaatctcccggttcgg

SEQ ID NO: 136085 - DNA, 17 bp, Arabidopsis thaliana
tcaatctcgacttcact

SEQ ID NO: 136086 - DNA, 17 bp, Arabidopsis thaliana
tcaatctcgtccagttg

SEQ ID NO: 136087 - DNA, 17 bp, Arabidopsis thaliana
tcaatctctaaccgtgt

SEQ ID NO: 136088 - DNA, 17 bp, Arabidopsis thaliana
tcaatctctacaactgc

SEQ ID NO: 136089 - DNA, 17 bp, Arabidopsis thaliana
tcaatctctcgtcgcac

SEQ ID NO: 136090 - DNA, 17 bp, Arabidopsis thaliana
tcaatctctttcgacat

SEQ ID NO: 136091 - DNA, 17 bp, Arabidopsis thaliana
tcaatctgacatagttt

SEQ ID NO: 136092 - DNA, 17 bp, Arabidopsis thaliana
tcaatctgcacgagtga

SEQ ID NO: 136093 - DNA, 17 bp, Arabidopsis thaliana
tcaatctgcggtacaca

SEQ ID NO: 136094 - DNA, 17 bp, Arabidopsis thaliana
tcaatctggttgggcga

SEQ ID NO: 136095 - DNA, 17 bp, Arabidopsis thaliana
tcaatcttactagcagg

SEQ ID NO: 136096 - DNA, 17 bp, Arabidopsis thaliana
tcaatcttccttgggag

SEQ ID NO: 136097 - DNA, 17 bp, Arabidopsis thaliana
tcaatcttggtgtccaa

SEQ ID NO: 136098 - DNA, 17 bp, Arabidopsis thaliana
tcaatcttttctctgag

SEQ ID NO: 136099 - DNA, 17 bp, Arabidopsis thaliana
tcaatgaacatatccac

SEQ ID NO: 136100 - DNA, 17 bp, Arabidopsis thaliana
tcaatgaagatagagag

SEQ ID NO: 136101 - DNA, 17 bp, Arabidopsis thaliana
tcaatgaccttgtgttg

SEQ ID NO: 136102 - DNA, 17 bp, Arabidopsis thaliana
tcaatgactctttccgc

SEQ ID NO: 136103 - DNA, 17 bp, Arabidopsis thaliana
tcaatgactgacgaatg

SEQ ID NO: 136104 - DNA, 17 bp, Arabidopsis thaliana
tcaatgagatggtctcg

SEQ ID NO: 136105 - DNA, 17 bp, Arabidopsis thaliana
tcaatgagtacgtcttg

SEQ ID NO: 136106 - DNA, 17 bp, Arabidopsis thaliana
tcaatgataaacgcttg

SEQ ID NO: 136107 - DNA, 17 bp, Arabidopsis thaliana
tcaatgatgttgccact

SEQ ID NO: 136108 - DNA, 17 bp, Arabidopsis thaliana
tcaatgatgttgcggtt

SEQ ID NO: 136109 - DNA, 17 bp, Arabidopsis thaliana
tcaatgattatggaccg

SEQ ID NO: 136110 - DNA, 17 bp, Arabidopsis thaliana
tcaatgatttgtctacc

SEQ ID NO: 136111 - DNA, 17 bp, Arabidopsis thaliana
tcaatgcaagatggtcc

SEQ ID NO: 136112 - DNA, 17 bp, Arabidopsis thaliana
tcaatgcatgtggctgt

SEQ ID NO: 136113 - DNA, 17 bp, Arabidopsis thaliana
tcaatgcattaaaagcg

SEQ ID NO: 136114 - DNA, 17 bp, Arabidopsis thaliana
tcaatgcattaaaagtg

SEQ ID NO: 136115 - DNA, 17 bp, Arabidopsis thaliana
tcaatgcattgaaagcg

SEQ ID NO: 136116 - DNA, 17 bp, Arabidopsis thaliana
tcaatgcattgaaagta

SEQ ID NO: 136117 - DNA, 17 bp, Arabidopsis thaliana
tcaatgcattgaaagtc

SEQ ID NO: 136118 - DNA, 17 bp, Arabidopsis thaliana
tcaatgcattgaaagtg

SEQ ID NO: 136119 - DNA, 17 bp, Arabidopsis thaliana
tcaatgcattgaaagtt

SEQ ID NO: 136120 - DNA, 17 bp, Arabidopsis thaliana
tcaatgccagggggtag

SEQ ID NO: 136121 - DNA, 17 bp, Arabidopsis thaliana
tcaatgcgacgactcaa

SEQ ID NO: 136122 - DNA, 17 bp, Arabidopsis thaliana
tcaatgcgcagtctttt

SEQ ID NO: 136123 - DNA, 17 bp, Arabidopsis thaliana
tcaatgcgcttgatgga

SEQ ID NO: 136124 - DNA, 17 bp, Arabidopsis thaliana
tcaatgcttacgtcgat

SEQ ID NO: 136125 - DNA, 17 bp, Arabidopsis thaliana
tcaatgcttgacccttg

SEQ ID NO: 136126 - DNA, 17 bp, Arabidopsis thaliana
tcaatggacgcattgac

SEQ ID NO: 136127 - DNA, 17 bp, Arabidopsis thaliana
tcaatggacttttcttg

SEQ ID NO: 136128 - DNA, 17 bp, Arabidopsis thaliana
tcaatggatcatcacca

SEQ ID NO: 136129 - DNA, 17 bp, Arabidopsis thaliana
tcaatggatctaatagc

SEQ ID NO: 136130 - DNA, 17 bp, Arabidopsis thaliana
tcaatggatctgcaatc

SEQ ID NO: 136131 - DNA, 17 bp, Arabidopsis thaliana
tcaatggattgaaagcg

SEQ ID NO: 136132 - DNA, 17 bp, Arabidopsis thaliana
tcaatggattgggcttt

SEQ ID NO: 136133 - DNA, 17 bp, Arabidopsis thaliana
tcaatggcacacaggtc

SEQ ID NO: 136134 - DNA, 17 bp, Arabidopsis thaliana
tcaatggccaggattag

SEQ ID NO: 136135 - DNA, 17 bp, Arabidopsis thaliana
tcaatggccatgccaac

SEQ ID NO: 136136 - DNA, 17 bp, Arabidopsis thaliana
tcaatggccgttcttag

SEQ ID NO: 136137 - DNA, 17 bp, Arabidopsis thaliana
tcaatggctgcctgcga

SEQ ID NO: 136138 - DNA, 17 bp, Arabidopsis thaliana
tcaatggctgcctgtga

SEQ ID NO: 136139 - DNA, 17 bp, Arabidopsis thaliana
tcaatgggctcgacttt

SEQ ID NO: 136140 - DNA, 17 bp, Arabidopsis thaliana
tcaatgggttcatcctg

SEQ ID NO: 136141 - DNA, 17 bp, Arabidopsis thaliana
tcaatggtcatccgagg

SEQ ID NO: 136142 - DNA, 17 bp, Arabidopsis thaliana
tcaatggtgggctcttt

SEQ ID NO: 136143 - DNA, 17 bp, Arabidopsis thaliana
tcaatgtaagagcctat

SEQ ID NO: 136144 - DNA, 17 bp, Arabidopsis thaliana
tcaatgtaccatatgac

SEQ ID NO: 136145 - DNA, 17 bp, Arabidopsis thaliana
tcaatgtcaggaatcat

SEQ ID NO: 136146 - DNA, 17 bp, Arabidopsis thaliana
tcaatgtcaggggcttc

SEQ ID NO: 136147 - DNA, 17 bp, Arabidopsis thaliana
tcaatgtccctaaacct

SEQ ID NO: 136148 - DNA, 17 bp, Arabidopsis thaliana
tcaatgtcgcaaaatct

SEQ ID NO: 136149 - DNA, 17 bp, Arabidopsis thaliana
tcaatgtctcaactgag

SEQ ID NO: 136150 - DNA, 17 bp, Arabidopsis thaliana
tcaatgtctgttggtgc

SEQ ID NO: 136151 - DNA, 17 bp, Arabidopsis thaliana
tcaatgtctttgggtag

SEQ ID NO: 136152 - DNA, 17 bp, Arabidopsis thaliana
tcaatgtgtttcgctag

SEQ ID NO: 136153 - DNA, 17 bp, Arabidopsis thaliana
tcaatgttcaaaatatc

SEQ ID NO: 136154 - DNA, 17 bp, Arabidopsis thaliana
tcaatgttttgcgagac

SEQ ID NO: 136155 - DNA, 17 bp, Arabidopsis thaliana
tcaatgtttttaaaacc

SEQ ID NO: 136156 - DNA, 17 bp, Arabidopsis thaliana
tcaattaatcaagcctt

SEQ ID NO: 136157 - DNA, 17 bp, Arabidopsis thaliana
tcaattaatggcggccc

SEQ ID NO: 136158 - DNA, 17 bp, Arabidopsis thaliana
tcaattaccgtgtaggg

SEQ ID NO: 136159 - DNA, 17 bp, Arabidopsis thaliana
tcaattaccgttttgca

SEQ ID NO: 136160 - DNA, 17 bp, Arabidopsis thaliana
tcaattacggatacagt

SEQ ID NO: 136161 - DNA, 17 bp, Arabidopsis thaliana
tcaattatattgaccac

SEQ ID NO: 136162 - DNA, 17 bp, Arabidopsis thaliana
tcaattatgggattgac

SEQ ID NO: 136163 - DNA, 17 bp, Arabidopsis thaliana
tcaattatgggattggc

SEQ ID NO: 136164 - DNA, 17 bp, Arabidopsis thaliana
tcaattcaaattccgtc

SEQ ID NO: 136165 - DNA, 17 bp, Arabidopsis thaliana
tcaattcacacttatcc

SEQ ID NO: 136166 - DNA, 17 bp, Arabidopsis thaliana
tcaattcatcagggttc

SEQ ID NO: 136167 - DNA, 17 bp, Arabidopsis thaliana
tcaattcatctctgttt

SEQ ID NO: 136168 - DNA, 17 bp, Arabidopsis thaliana
tcaattccaaccgatgt

SEQ ID NO: 136169 - DNA, 17 bp, Arabidopsis thaliana
tcaattccagagattcg

SEQ ID NO: 136170 - DNA, 17 bp, Arabidopsis thaliana
tcaattccatctacttt

SEQ ID NO: 136171 - DNA, 17 bp, Arabidopsis thaliana
tcaattcccatcggtcg

SEQ ID NO: 136172 - DNA, 17 bp, Arabidopsis thaliana
tcaattcccgaggatgg

SEQ ID NO: 136173 - DNA, 17 bp, Arabidopsis thaliana
tcaattccttcgtttat

SEQ ID NO: 136174 - DNA, 17 bp, Arabidopsis thaliana
tcaattcgacccttgga

SEQ ID NO: 136175 - DNA, 17 bp, Arabidopsis thaliana
tcaattcgacccttggg

SEQ ID NO: 136176 - DNA, 17 bp, Arabidopsis thaliana
tcaattcgatggacgag

SEQ ID NO: 136177 - DNA, 17 bp, Arabidopsis thaliana
tcaattcgcaaagtttt

SEQ ID NO: 136178 - DNA, 17 bp, Arabidopsis thaliana
tcaattcggtcaacgac

SEQ ID NO: 136179 - DNA, 17 bp, Arabidopsis thaliana
tcaattctactcagttg

SEQ ID NO: 136180 - DNA, 17 bp, Arabidopsis thaliana
tcaattctatggctgtg

SEQ ID NO: 136181 - DNA, 17 bp, Arabidopsis thaliana
tcaattctccgaatgcc

SEQ ID NO: 136182 - DNA, 17 bp, Arabidopsis thaliana
tcaattctcggaatgcc

SEQ ID NO: 136183 - DNA, 17 bp, Arabidopsis thaliana
tcaattctgccgctttt

SEQ ID NO: 136184 - DNA, 17 bp, Arabidopsis thaliana
tcaattcttctgatgat

SEQ ID NO: 136185 - DNA, 17 bp, Arabidopsis thaliana
tcaattgacccgtagtc

SEQ ID NO: 136186 - DNA, 17 bp, Arabidopsis thaliana
tcaattgactgacgagt

SEQ ID NO: 136187 - DNA, 17 bp, Arabidopsis thaliana
tcaattgagacattgtt

SEQ ID NO: 136188 - DNA, 17 bp, Arabidopsis thaliana
tcaattgatttgcggtt

SEQ ID NO: 136189 - DNA, 17 bp, Arabidopsis thaliana
tcaattgcagagagtct

SEQ ID NO: 136190 - DNA, 17 bp, Arabidopsis thaliana
tcaattgccagacgcat

SEQ ID NO: 136191 - DNA, 17 bp, Arabidopsis thaliana
tcaattgcctacgttac

SEQ ID NO: 136192 - DNA, 17 bp, Arabidopsis thaliana
tcaattggaggcgtagt

SEQ ID NO: 136193 - DNA, 17 bp, Arabidopsis thaliana
tcaattggcaataggtg

SEQ ID NO: 136194 - DNA, 17 bp, Arabidopsis thaliana
tcaattggctctgtcga

SEQ ID NO: 136195 - DNA, 17 bp, Arabidopsis thaliana
tcaattggggtgattgg

SEQ ID NO: 136196 - DNA, 17 bp, Arabidopsis thaliana
tcaattggtcatcgcgc

SEQ ID NO: 136197 - DNA, 17 bp, Arabidopsis thaliana
tcaattgtctcatggat

SEQ ID NO: 136198 - DNA, 17 bp, Arabidopsis thaliana
tcaattgttccgagtac

SEQ ID NO: 136199 - DNA, 17 bp, Arabidopsis thaliana
tcaatttaacttggtgt

SEQ ID NO: 136200 - DNA, 17 bp, Arabidopsis thaliana
tcaatttatgagcgttt

SEQ ID NO: 136201 - DNA, 17 bp, Arabidopsis thaliana
tcaatttcagggaaatt

SEQ ID NO: 136202 - DNA, 17 bp, Arabidopsis thaliana
tcaatttccgccatcat

SEQ ID NO: 136203 - DNA, 17 bp, Arabidopsis thaliana
tcaatttcctacaaacg

SEQ ID NO: 136204 - DNA, 17 bp, Arabidopsis thaliana
tcaatttccttacagtt

SEQ ID NO: 136205 - DNA, 17 bp, Arabidopsis thaliana
tcaatttcgggttgggt

SEQ ID NO: 136206 - DNA, 17 bp, Arabidopsis thaliana
tcaatttcgtaggaggc

SEQ ID NO: 136207 - DNA, 17 bp, Arabidopsis thaliana
tcaatttcgtatatggc

SEQ ID NO: 136208 - DNA, 17 bp, Arabidopsis thaliana
tcaatttcgtatgcggc

SEQ ID NO: 136209 - DNA, 17 bp, Arabidopsis thaliana
tcaatttcgtatgcggt

SEQ ID NO: 136210 - DNA, 17 bp, Arabidopsis thaliana
tcaatttcgtatgtggc

SEQ ID NO: 136211 - DNA, 17 bp, Arabidopsis thaliana
tcaatttctctacgctt

SEQ ID NO: 136212 - DNA, 17 bp, Arabidopsis thaliana
tcaatttctcttctact

SEQ ID NO: 136213 - DNA, 17 bp, Arabidopsis thaliana
tcaatttctgatcatgg

SEQ ID NO: 136214 - DNA, 17 bp, Arabidopsis thaliana
tcaatttctgtttcatc

SEQ ID NO: 136215 - DNA, 17 bp, Arabidopsis thaliana
tcaatttctttcatctt

SEQ ID NO: 136216 - DNA, 17 bp, Arabidopsis thaliana
tcaatttgaaggtgtac

SEQ ID NO: 136217 - DNA, 17 bp, Arabidopsis thaliana
tcaatttgaccggagag

SEQ ID NO: 136218 - DNA, 17 bp, Arabidopsis thaliana
tcaatttgcctcactag

SEQ ID NO: 136219 - DNA, 17 bp, Arabidopsis thaliana
tcaatttgctgtttcat

SEQ ID NO: 136220 - DNA, 17 bp, Arabidopsis thaliana
tcaatttgtctcgattg

SEQ ID NO: 136221 - DNA, 17 bp, Arabidopsis thaliana
tcaatttgttccttgcg

SEQ ID NO: 136222 - DNA, 17 bp, Arabidopsis thaliana
tcaatttgttgctcctt

SEQ ID NO: 136223 - DNA, 17 bp, Arabidopsis thaliana
tcaattttagggtgttg

SEQ ID NO: 136224 - DNA, 17 bp, Arabidopsis thaliana
tcaattttcatgtgatg

SEQ ID NO: 136225 - DNA, 17 bp, Arabidopsis thaliana
tcaattttcggcggcgt

SEQ ID NO: 136226 - DNA, 17 bp, Arabidopsis thaliana
tcaattttgagagagag

SEQ ID NO: 136227 - DNA, 17 bp, Arabidopsis thaliana
tcaattttgcggtcgtc

SEQ ID NO: 136228 - DNA, 17 bp, Arabidopsis thaliana
tcaattttggccggatt

SEQ ID NO: 136229 - DNA, 17 bp, Arabidopsis thaliana
tcaattttggcctcatt

SEQ ID NO: 136230 - DNA, 17 bp, Arabidopsis thaliana
tcaattttgttgcctcg

SEQ ID NO: 136231 - DNA, 17 bp, Arabidopsis thaliana
tcaattttgttggttta

SEQ ID NO: 136232 - DNA, 17 bp, Arabidopsis thaliana
tcaatttttggcggatt

SEQ ID NO: 136233 - DNA, 17 bp, Arabidopsis thaliana
tcacaaaagtgacatga

SEQ ID NO: 136234 - DNA, 17 bp, Arabidopsis thaliana
tcacaaactgtctctaa

SEQ ID NO: 136235 - DNA, 17 bp, Arabidopsis thaliana
tcacaaactttcatcga

SEQ ID NO: 136236 - DNA, 17 bp, Arabidopsis thaliana
tcacaaagccactacat

SEQ ID NO: 136237 - DNA, 17 bp, Arabidopsis thaliana
tcacaaatttctggcca

SEQ ID NO: 136238 - DNA, 17 bp, Arabidopsis thaliana
tcacaaccggttcactg

SEQ ID NO: 136239 - DNA, 17 bp, Arabidopsis thaliana
tcacaacctcaccaccc

SEQ ID NO: 136240 - DNA, 17 bp, Arabidopsis thaliana
tcacaactggatcttaa

SEQ ID NO: 136241 - DNA, 17 bp, Arabidopsis thaliana
tcacaactgtccagtat

SEQ ID NO: 136242 - DNA, 17 bp, Arabidopsis thaliana
tcacaagaaagggttca

SEQ ID NO: 136243 - DNA, 17 bp, Arabidopsis thaliana
tcacaagacacgaaggt

SEQ ID NO: 136244 - DNA, 17 bp, Arabidopsis thaliana
tcacaagactagatttc

SEQ ID NO: 136245 - DNA, 17 bp, Arabidopsis thaliana
tcacaagagactttttt

SEQ ID NO: 136246 - DNA, 17 bp, Arabidopsis thaliana
tcacaagatctccaaga

SEQ ID NO: 136247 - DNA, 17 bp, Arabidopsis thaliana
tcacaagcgtccacgcc

SEQ ID NO: 136248 - DNA, 17 bp, Arabidopsis thaliana
tcacaagcttgctatgg

SEQ ID NO: 136249 - DNA, 17 bp, Arabidopsis thaliana
tcacaaggaaacgcaca

SEQ ID NO: 136250 - DNA, 17 bp, Arabidopsis thaliana
tcacaaggtgcagtacg

SEQ ID NO: 136251 - DNA, 17 bp, Arabidopsis thaliana
tcacaagtgtgactgac

SEQ ID NO: 136252 - DNA, 17 bp, Arabidopsis thaliana
tcacaagttcaaggcag

SEQ ID NO: 136253 - DNA, 17 bp, Arabidopsis thaliana
tcacaataacgtgacca

SEQ ID NO: 136254 - DNA, 17 bp, Arabidopsis thaliana
tcacaatccatctcttg

SEQ ID NO: 136255 - DNA, 17 bp, Arabidopsis thaliana
tcacaatcccggtaatt

SEQ ID NO: 136256 - DNA, 17 bp, Arabidopsis thaliana
tcacaatccgatgtggg

SEQ ID NO: 136257 - DNA, 17 bp, Arabidopsis thaliana
tcacaatgttgatgatg

SEQ ID NO: 136258 - DNA, 17 bp, Arabidopsis thaliana
tcacaattcggtctgag

SEQ ID NO: 136259 - DNA, 17 bp, Arabidopsis thaliana
tcacaattggagcagca

SEQ ID NO: 136260 - DNA, 17 bp, Arabidopsis thaliana
tcacaattggaggagca

SEQ ID NO: 136261 - DNA, 17 bp, Arabidopsis thaliana
tcacaattgggatgttc

SEQ ID NO: 136262 - DNA, 17 bp, Arabidopsis thaliana
tcacaattggtcatcac

SEQ ID NO: 136263 - DNA, 17 bp, Arabidopsis thaliana
tcacacaaaggtcccgc

SEQ ID NO: 136264 - DNA, 17 bp, Arabidopsis thaliana
tcacacaaatggacctt

SEQ ID NO: 136265 - DNA, 17 bp, Arabidopsis thaliana
tcacacaaatgttatcg

SEQ ID NO: 136266 - DNA, 17 bp, Arabidopsis thaliana
tcacacaataatggatc

SEQ ID NO: 136267 - DNA, 17 bp, Arabidopsis thaliana
tcacacaccgcccgtcg

SEQ ID NO: 136268 - DNA, 17 bp, Arabidopsis thaliana
tcacacagatgggatct

SEQ ID NO: 136269 - DNA, 17 bp, Arabidopsis thaliana
tcacacaggtggtgcat

SEQ ID NO: 136270 - DNA, 17 bp, Arabidopsis thaliana
tcacacagtctgtaggt

SEQ ID NO: 136271 - DNA, 17 bp, Arabidopsis thaliana
tcacacagttagtgctt

SEQ ID NO: 136272 - DNA, 17 bp, Arabidopsis thaliana
tcacacagttggagatg

SEQ ID NO: 136273 - DNA, 17 bp, Arabidopsis thaliana
tcacacatctctcagac

SEQ ID NO: 136274 - DNA, 17 bp, Arabidopsis thaliana
tcacacattctaatacg

SEQ ID NO: 136275 - DNA, 17 bp, Arabidopsis thaliana
tcacaccaagttaaatt

SEQ ID NO: 136276 - DNA, 17 bp, Arabidopsis thaliana
tcacaccactgaatcct

SEQ ID NO: 136277 - DNA, 17 bp, Arabidopsis thaliana
tcacaccactggattct

SEQ ID NO: 136278 - DNA, 17 bp, Arabidopsis thaliana
tcacaccaggagtggag

SEQ ID NO: 136279 - DNA, 17 bp, Arabidopsis thaliana
tcacaccagttggctat

SEQ ID NO: 136280 - DNA, 17 bp, Arabidopsis thaliana
tcacaccatcacggtct

SEQ ID NO: 136281 - DNA, 17 bp, Arabidopsis thaliana
tcacacccctcgaaggt

SEQ ID NO: 136282 - DNA, 17 bp, Arabidopsis thaliana
tcacacccggttggagc

SEQ ID NO: 136283 - DNA, 17 bp, Arabidopsis thaliana
tcacaccgtgacgtccg

SEQ ID NO: 136284 - DNA, 17 bp, Arabidopsis thaliana
tcacacctcttgggtgt

SEQ ID NO: 136285 - DNA, 17 bp, Arabidopsis thaliana
tcacaccttggccgaca

SEQ ID NO: 136286 - DNA, 17 bp, Arabidopsis thaliana
tcacaccttggtttatt

SEQ ID NO: 136287 - DNA, 17 bp, Arabidopsis thaliana
tcacacgaaaaaaccaa

SEQ ID NO: 136288 - DNA, 17 bp, Arabidopsis thaliana
tcacacgaacaaggtta

SEQ ID NO: 136289 - DNA, 17 bp, Arabidopsis thaliana
tcacacgaccttcttga

SEQ ID NO: 136290 - DNA, 17 bp, Arabidopsis thaliana
tcacacgattgtgccac

SEQ ID NO: 136291 - DNA, 17 bp, Arabidopsis thaliana
tcacacgcgatgatgaa

SEQ ID NO: 136292 - DNA, 17 bp, Arabidopsis thaliana
tcacacgcgctatgccg

SEQ ID NO: 136293 - DNA, 17 bp, Arabidopsis thaliana
tcacacgcttccaaggg

SEQ ID NO: 136294 - DNA, 17 bp, Arabidopsis thaliana
tcacacgggagggctgt

SEQ ID NO: 136295 - DNA, 17 bp, Arabidopsis thaliana
tcacacggggaaactta

SEQ ID NO: 136296 - DNA, 17 bp, Arabidopsis thaliana
tcacacggttttgacga

SEQ ID NO: 136297 - DNA, 17 bp, Arabidopsis thaliana
tcacacgtctgcctggg

SEQ ID NO: 136298 - DNA, 17 bp, Arabidopsis thaliana
tcacacgttgtgatgat

SEQ ID NO: 136299 - DNA, 17 bp, Arabidopsis thaliana
tcacacgtttgcgggct

SEQ ID NO: 136300 - DNA, 17 bp, Arabidopsis thaliana
tcacactaagttttcct

SEQ ID NO: 136301 - DNA, 17 bp, Arabidopsis thaliana
tcacactacgattaatg

SEQ ID NO: 136302 - DNA, 17 bp, Arabidopsis thaliana
tcacactacgattattg

SEQ ID NO: 136303 - DNA, 17 bp, Arabidopsis thaliana
tcacactatgcgttcac

SEQ ID NO: 136304 - DNA, 17 bp, Arabidopsis thaliana
tcacactatgggagctg

SEQ ID NO: 136305 - DNA, 17 bp, Arabidopsis thaliana
tcacactatttgctgat

SEQ ID NO: 136306 - DNA, 17 bp, Arabidopsis thaliana
tcacactcccgccttag

SEQ ID NO: 136307 - DNA, 17 bp, Arabidopsis thaliana
tcacactccgtctccgg

SEQ ID NO: 136308 - DNA, 17 bp, Arabidopsis thaliana
tcacactcgtcttgggc

SEQ ID NO: 136309 - DNA, 17 bp, Arabidopsis thaliana
tcacactcttcggacga

SEQ ID NO: 136310 - DNA, 17 bp, Arabidopsis thaliana
tcacactgctctacctg

SEQ ID NO: 136311 - DNA, 17 bp, Arabidopsis thaliana
tcacactgctctatctg

SEQ ID NO: 136312 - DNA, 17 bp, Arabidopsis thaliana
tcacactgggtgccctt

SEQ ID NO: 136313 - DNA, 17 bp, Arabidopsis thaliana
tcacactgtatacctgc

SEQ ID NO: 136314 - DNA, 17 bp, Arabidopsis thaliana
tcacactgtctgtcccg

SEQ ID NO: 136315 - DNA, 17 bp, Arabidopsis thaliana
tcacactgtgaagttag

SEQ ID NO: 136316 - DNA, 17 bp, Arabidopsis thaliana
tcacactgttacgatgc

SEQ ID NO: 136317 - DNA, 17 bp, Arabidopsis thaliana
tcacacttatctaggtt

SEQ ID NO: 136318 - DNA, 17 bp, Arabidopsis thaliana
tcacagaactcgacagt

SEQ ID NO: 136319 - DNA, 17 bp, Arabidopsis thaliana
tcacagaactgtcagac

SEQ ID NO: 136320 - DNA, 17 bp, Arabidopsis thaliana
tcacagacccgatggaa

SEQ ID NO: 136321 - DNA, 17 bp, Arabidopsis thaliana
tcacagacccgggtttc

SEQ ID NO: 136322 - DNA, 17 bp, Arabidopsis thaliana
tcacagacgagcgggca

SEQ ID NO: 136323 - DNA, 17 bp, Arabidopsis thaliana
tcacagactatgtgact

SEQ ID NO: 136324 - DNA, 17 bp, Arabidopsis thaliana
tcacagactcttcagat

SEQ ID NO: 136325 - DNA, 17 bp, Arabidopsis thaliana
tcacagactgtttagat

SEQ ID NO: 136326 - DNA, 17 bp, Arabidopsis thaliana
tcacagagacagagcca

SEQ ID NO: 136327 - DNA, 17 bp, Arabidopsis thaliana
tcacagagacgggctag

SEQ ID NO: 136328 - DNA, 17 bp, Arabidopsis thaliana
tcacagaggctcagtta

SEQ ID NO: 136329 - DNA, 17 bp, Arabidopsis thaliana
tcacagaggtgtcctcc

SEQ ID NO: 136330 - DNA, 17 bp, Arabidopsis thaliana
tcacagagtgtccgaat

SEQ ID NO: 136331 - DNA, 17 bp, Arabidopsis thaliana
tcacagagtgttgatgt

SEQ ID NO: 136332 - DNA, 17 bp, Arabidopsis thaliana
tcacagatcggttcaat

SEQ ID NO: 136333 - DNA, 17 bp, Arabidopsis thaliana
tcacagatcgtcttcat

SEQ ID NO: 136334 - DNA, 17 bp, Arabidopsis thaliana
tcacagatctgtccatc

SEQ ID NO: 136335 - DNA, 17 bp, Arabidopsis thaliana
tcacagatctgtctatc

SEQ ID NO: 136336 - DNA, 17 bp, Arabidopsis thaliana
tcacagatctttgttgc

SEQ ID NO: 136337 - DNA, 17 bp, Arabidopsis thaliana
tcacagatgtggctttg

SEQ ID NO: 136338 - DNA, 17 bp, Arabidopsis thaliana
tcacagatttgttggtc

SEQ ID NO: 136339 - DNA, 17 bp, Arabidopsis thaliana
tcacagcaaatgatttc

SEQ ID NO: 136340 - DNA, 17 bp, Arabidopsis thaliana
tcacagccctttgtcgc

SEQ ID NO: 136341 - DNA, 17 bp, Arabidopsis thaliana
tcacagcgatttgtgtc

SEQ ID NO: 136342 - DNA, 17 bp, Arabidopsis thaliana
tcacagcgatttgttga

SEQ ID NO: 136343 - DNA, 17 bp, Arabidopsis thaliana
tcacagcgatttgttgc

SEQ ID NO: 136344 - DNA, 17 bp, Arabidopsis thaliana
tcacagcttcctcttcg

SEQ ID NO: 136345 - DNA, 17 bp, Arabidopsis thaliana
tcacagcttggactggg

SEQ ID NO: 136346 - DNA, 17 bp, Arabidopsis thaliana
tcacaggaaagcgtgag

SEQ ID NO: 136347 - DNA, 17 bp, Arabidopsis thaliana
tcacaggacttcggatt

SEQ ID NO: 136348 - DNA, 17 bp, Arabidopsis thaliana
tcacaggagaagtgcgg

SEQ ID NO: 136349 - DNA, 17 bp, Arabidopsis thaliana
tcacaggatgaacgctg

SEQ ID NO: 136350 - DNA, 17 bp, Arabidopsis thaliana
tcacaggattaccatgc

SEQ ID NO: 136351 - DNA, 17 bp, Arabidopsis thaliana
tcacaggcgaaataccg

SEQ ID NO: 136352 - DNA, 17 bp, Arabidopsis thaliana
tcacagggattagtgtc

SEQ ID NO: 136353 - DNA, 17 bp, Arabidopsis thaliana
tcacagggattagtgtt

SEQ ID NO: 136354 - DNA, 17 bp, Arabidopsis thaliana
tcacagggattggctgc

SEQ ID NO: 136355 - DNA, 17 bp, Arabidopsis thaliana
tcacagggcttcgaatc

SEQ ID NO: 136356 - DNA, 17 bp, Arabidopsis thaliana
tcacagggtcgtgccac

SEQ ID NO: 136357 - DNA, 17 bp, Arabidopsis thaliana
tcacaggtactccatgc

SEQ ID NO: 136358 - DNA, 17 bp, Arabidopsis thaliana
tcacaggtcatgttgaa

SEQ ID NO: 136359 - DNA, 17 bp, Arabidopsis thaliana
tcacaggtctgtgatgc

SEQ ID NO: 136360 - DNA, 17 bp, Arabidopsis thaliana
tcacaggttaatcagtt

SEQ ID NO: 136361 - DNA, 17 bp, Arabidopsis thaliana
tcacaggttgcctttgc

SEQ ID NO: 136362 - DNA, 17 bp, Arabidopsis thaliana
tcacaggtttacgtttt

SEQ ID NO: 136363 - DNA, 17 bp, Arabidopsis thaliana
tcacaggttttacttca

SEQ ID NO: 136364 - DNA, 17 bp, Arabidopsis thaliana
tcacaggttttggtttt

SEQ ID NO: 136365 - DNA, 17 bp, Arabidopsis thaliana
tcacagtacatgaactt

SEQ ID NO: 136366 - DNA, 17 bp, Arabidopsis thaliana
tcacagtcgcatcctgt

SEQ ID NO: 136367 - DNA, 17 bp, Arabidopsis thaliana
tcacagtctgcattcat

SEQ ID NO: 136368 - DNA, 17 bp, Arabidopsis thaliana
tcacagtctgtaggttg

SEQ ID NO: 136369 - DNA, 17 bp, Arabidopsis thaliana
tcacagtgacccggttc

SEQ ID NO: 136370 - DNA, 17 bp, Arabidopsis thaliana
tcacagtgagtgccggt

SEQ ID NO: 136371 - DNA, 17 bp, Arabidopsis thaliana
tcacagtgcctccgcgt

SEQ ID NO: 136372 - DNA, 17 bp, Arabidopsis thaliana
tcacagtgcggtgcgtt

SEQ ID NO: 136373 - DNA, 17 bp, Arabidopsis thaliana
tcacagtggacaccttt

SEQ ID NO: 136374 - DNA, 17 bp, Arabidopsis thaliana
tcacagtggtatccaca

SEQ ID NO: 136375 - DNA, 17 bp, Arabidopsis thaliana
tcacagtgtgggatgtc

SEQ ID NO: 136376 - DNA, 17 bp, Arabidopsis thaliana
tcacagttcagtgattt

SEQ ID NO: 136377 - DNA, 17 bp, Arabidopsis thaliana
tcacagttgcttaggct

SEQ ID NO: 136378 - DNA, 17 bp, Arabidopsis thaliana
tcacagttgtactcggt

SEQ ID NO: 136379 - DNA, 17 bp, Arabidopsis thaliana
tcacagttgtgtgatgg

SEQ ID NO: 136380 - DNA, 17 bp, Arabidopsis thaliana
tcacagtttcatgcgaa

SEQ ID NO: 136381 - DNA, 17 bp, Arabidopsis thaliana
tcacagtttggcgtcgc

SEQ ID NO: 136382 - DNA, 17 bp, Arabidopsis thaliana
tcacagttttcagagcg

SEQ ID NO: 136383 - DNA, 17 bp, Arabidopsis thaliana
tcacagttttggaatgc

SEQ ID NO: 136384 - DNA, 17 bp, Arabidopsis thaliana
tcacagtttttgccact

SEQ ID NO: 136385 - DNA, 17 bp, Arabidopsis thaliana
tcacataactaaggtcc

SEQ ID NO: 136386 - DNA, 17 bp, Arabidopsis thaliana
tcacatacaccgtcggc

SEQ ID NO: 136387 - DNA, 17 bp, Arabidopsis thaliana
tcacatagatgtctctc

SEQ ID NO: 136388 - DNA, 17 bp, Arabidopsis thaliana
tcacatatccgatttgc

SEQ ID NO: 136389 - DNA, 17 bp, Arabidopsis thaliana
tcacatatctgcgttaa

SEQ ID NO: 136390 - DNA, 17 bp, Arabidopsis thaliana
tcacatcactcgacccc

SEQ ID NO: 136391 - DNA, 17 bp, Arabidopsis thaliana
tcacatcagatggttca

SEQ ID NO: 136392 - DNA, 17 bp, Arabidopsis thaliana
tcacatccacatacggt

SEQ ID NO: 136393 - DNA, 17 bp, Arabidopsis thaliana
tcacatccacggtcttt

SEQ ID NO: 136394 - DNA, 17 bp, Arabidopsis thaliana
tcacatcctgtagatgg

SEQ ID NO: 136395 - DNA, 17 bp, Arabidopsis thaliana
tcacatcgacgggaagg

SEQ ID NO: 136396 - DNA, 17 bp, Arabidopsis thaliana
tcacatcgttccacttc

SEQ ID NO: 136397 - DNA, 17 bp, Arabidopsis thaliana
tcacatcgtttctttga

SEQ ID NO: 136398 - DNA, 17 bp, Arabidopsis thaliana
tcacatctctggaactt

SEQ ID NO: 136399 - DNA, 17 bp, Arabidopsis thaliana
tcacatctgcgcaaatg

SEQ ID NO: 136400 - DNA, 17 bp, Arabidopsis thaliana
tcacatgaatacgagga

SEQ ID NO: 136401 - DNA, 17 bp, Arabidopsis thaliana
tcacatgcattcaggcg

SEQ ID NO: 136402 - DNA, 17 bp, Arabidopsis thaliana
tcacatgtttacagctt

SEQ ID NO: 136403 - DNA, 17 bp, Arabidopsis thaliana
tcacattatggcagggt

SEQ ID NO: 136404 - DNA, 17 bp, Arabidopsis thaliana
tcacattattcttgatt

SEQ ID NO: 136405 - DNA, 17 bp, Arabidopsis thaliana
tcacattgacattttgg

SEQ ID NO: 136406 - DNA, 17 bp, Arabidopsis thaliana
tcacattgcgttagcat

SEQ ID NO: 136407 - DNA, 17 bp, Arabidopsis thaliana
tcacattgcttgaccga

SEQ ID NO: 136408 - DNA, 17 bp, Arabidopsis thaliana
tcacattgttttcgtga

SEQ ID NO: 136409 - DNA, 17 bp, Arabidopsis thaliana
tcacatttcagtcgttg

SEQ ID NO: 136410 - DNA, 17 bp, Arabidopsis thaliana
tcacatttgtcaggggt

SEQ ID NO: 136411 - DNA, 17 bp, Arabidopsis thaliana
tcacatttgtttgggaa

SEQ ID NO: 136412 - DNA, 17 bp, Arabidopsis thaliana
tcacattttcggtagca

SEQ ID NO: 136413 - DNA, 17 bp, Arabidopsis thaliana
tcacattttcggtggca

SEQ ID NO: 136414 - DNA, 17 bp, Arabidopsis thaliana
tcacattttcgtgattt

SEQ ID NO: 136415 - DNA, 17 bp, Arabidopsis thaliana
tcacattttctacacct

SEQ ID NO: 136416 - DNA, 17 bp, Arabidopsis thaliana
tcacattttgatgtggt

SEQ ID NO: 136417 - DNA, 17 bp, Arabidopsis thaliana
tcacatttttggctttg

SEQ ID NO: 136418 - DNA, 17 bp, Arabidopsis thaliana
tcaccaaaacctgttat

SEQ ID NO: 136419 - DNA, 17 bp, Arabidopsis thaliana
tcaccaaacatgcggca

SEQ ID NO: 136420 - DNA, 17 bp, Arabidopsis thaliana
tcaccaaaccaattaac

SEQ ID NO: 136421 - DNA, 17 bp, Arabidopsis thaliana
tcaccaaatgggcctac

SEQ ID NO: 136422 - DNA, 17 bp, Arabidopsis thaliana
tcaccaacgctccttca

SEQ ID NO: 136423 - DNA, 17 bp, Arabidopsis thaliana
tcaccaactttagccca

SEQ ID NO: 136424 - DNA, 17 bp, Arabidopsis thaliana
tcaccaactttcggctc

SEQ ID NO: 136425 - DNA, 17 bp, Arabidopsis thaliana
tcaccaacttttgttga

SEQ ID NO: 136426 - DNA, 17 bp, Arabidopsis thaliana
tcaccaagaacatctaa

SEQ ID NO: 136427 - DNA, 17 bp, Arabidopsis thaliana
tcaccaagagcaagttt

SEQ ID NO: 136428 - DNA, 17 bp, Arabidopsis thaliana
tcaccaagaggtctggg

SEQ ID NO: 136429 - DNA, 17 bp, Arabidopsis thaliana
tcaccaagatccaagct

SEQ ID NO: 136430 - DNA, 17 bp, Arabidopsis thaliana
tcaccaagcgtggctgt

SEQ ID NO: 136431 - DNA, 17 bp, Arabidopsis thaliana
tcaccaaggatgacttg

SEQ ID NO: 136432 - DNA, 17 bp, Arabidopsis thaliana
tcaccaaggttcagaac

SEQ ID NO: 136433 - DNA, 17 bp, Arabidopsis thaliana
tcaccaaggttcagatc

SEQ ID NO: 136434 - DNA, 17 bp, Arabidopsis thaliana
tcaccaagtaatttttt

SEQ ID NO: 136435 - DNA, 17 bp, Arabidopsis thaliana
tcaccaagtctgaacag

SEQ ID NO: 136436 - DNA, 17 bp, Arabidopsis thaliana
tcaccaagttcgggtgc

SEQ ID NO: 136437 - DNA, 17 bp, Arabidopsis thaliana
tcaccaatggatgattg

SEQ ID NO: 136438 - DNA, 17 bp, Arabidopsis thaliana
tcaccaattctctgcct

SEQ ID NO: 136439 - DNA, 17 bp, Arabidopsis thaliana
tcaccacacgatctttc

SEQ ID NO: 136440 - DNA, 17 bp, Arabidopsis thaliana
tcaccaccacttatttt

SEQ ID NO: 136441 - DNA, 17 bp, Arabidopsis thaliana
tcaccaccaggagtgga

SEQ ID NO: 136442 - DNA, 17 bp, Arabidopsis thaliana
tcaccacgttgtttgtg

SEQ ID NO: 136443 - DNA, 17 bp, Arabidopsis thaliana
tcaccactccgatgatc

SEQ ID NO: 136444 - DNA, 17 bp, Arabidopsis thaliana
tcaccactctcggtggg

SEQ ID NO: 136445 - DNA, 17 bp, Arabidopsis thaliana
tcaccagaagaggcagc

SEQ ID NO: 136446 - DNA, 17 bp, Arabidopsis thaliana
tcaccagaattcggtat

SEQ ID NO: 136447 - DNA, 17 bp, Arabidopsis thaliana
tcaccagcctcgctatt

SEQ ID NO: 136448 - DNA, 17 bp, Arabidopsis thaliana
tcaccagcgtctacgga

SEQ ID NO: 136449 - DNA, 17 bp, Arabidopsis thaliana
tcaccagctctgaacag

SEQ ID NO: 136450 - DNA, 17 bp, Arabidopsis thaliana
tcaccaggaccgcttga

SEQ ID NO: 136451 - DNA, 17 bp, Arabidopsis thaliana
tcaccaggaggtttttg

SEQ ID NO: 136452 - DNA, 17 bp, Arabidopsis thaliana
tcaccaggcccgtaacc

SEQ ID NO: 136453 - DNA, 17 bp, Arabidopsis thaliana
tcaccaggtccaaaacc

SEQ ID NO: 136454 - DNA, 17 bp, Arabidopsis thaliana
tcaccaggtctgaacag

SEQ ID NO: 136455 - DNA, 17 bp, Arabidopsis thaliana
tcaccaggtctgaagag

SEQ ID NO: 136456 - DNA, 17 bp, Arabidopsis thaliana
tcaccaggtctgagcag

SEQ ID NO: 136457 - DNA, 17 bp, Arabidopsis thaliana
tcaccaggtttgaactg

SEQ ID NO: 136458 - DNA, 17 bp, Arabidopsis thaliana
tcaccagtacctgtgtc

SEQ ID NO: 136459 - DNA, 17 bp, Arabidopsis thaliana
tcaccataaatctgtgg

SEQ ID NO: 136460 - DNA, 17 bp, Arabidopsis thaliana
tcaccatatctcttcct

SEQ ID NO: 136461 - DNA, 17 bp, Arabidopsis thaliana
tcaccatcaacaacacc

SEQ ID NO: 136462 - DNA, 17 bp, Arabidopsis thaliana
tcaccatcaaccactac

SEQ ID NO: 136463 - DNA, 17 bp, Arabidopsis thaliana
tcaccatcaagagcaat

SEQ ID NO: 136464 - DNA, 17 bp, Arabidopsis thaliana
tcaccatcgcggcttca

SEQ ID NO: 136465 - DNA, 17 bp, Arabidopsis thaliana
tcaccatcgcgggttca

SEQ ID NO: 136466 - DNA, 17 bp, Arabidopsis thaliana
tcaccatctggtccagg

SEQ ID NO: 136467 - DNA, 17 bp, Arabidopsis thaliana
tcaccatgccacctatc

SEQ ID NO: 136468 - DNA, 17 bp, Arabidopsis thaliana
tcaccatgtgctctggc

SEQ ID NO: 136469 - DNA, 17 bp, Arabidopsis thaliana
tcaccatgtgggtcatc

SEQ ID NO: 136470 - DNA, 17 bp, Arabidopsis thaliana
tcaccattaggtgtgtg

SEQ ID NO: 136471 - DNA, 17 bp, Arabidopsis thaliana
tcaccattcagttcgag

SEQ ID NO: 136472 - DNA, 17 bp, Arabidopsis thaliana
tcaccattcatggtttg

SEQ ID NO: 136473 - DNA, 17 bp, Arabidopsis thaliana
tcaccattcccacagga

SEQ ID NO: 136474 - DNA, 17 bp, Arabidopsis thaliana
tcaccattcggagcctg

SEQ ID NO: 136475 - DNA, 17 bp, Arabidopsis thaliana
tcaccattctcaccgga

SEQ ID NO: 136476 - DNA, 17 bp, Arabidopsis thaliana
tcaccattgatcaagag

SEQ ID NO: 136477 - DNA, 17 bp, Arabidopsis thaliana
tcaccattggcagctct

SEQ ID NO: 136478 - DNA, 17 bp, Arabidopsis thaliana
tcaccattgttaatcgg

SEQ ID NO: 136479 - DNA, 17 bp, Arabidopsis thaliana
tcaccatttttttccac

SEQ ID NO: 136480 - DNA, 17 bp, Arabidopsis thaliana
tcacccaaaatttaccg

SEQ ID NO: 136481 - DNA, 17 bp, Arabidopsis thaliana
tcacccaactgcgcgct

SEQ ID NO: 136482 - DNA, 17 bp, Arabidopsis thaliana
tcacccaaggaaatgct

SEQ ID NO: 136483 - DNA, 17 bp, Arabidopsis thaliana
tcacccacccacccacc

SEQ ID NO: 136484 - DNA, 17 bp, Arabidopsis thaliana
tcacccagccggagttg

SEQ ID NO: 136485 - DNA, 17 bp, Arabidopsis thaliana
tcacccaggagacccgg

SEQ ID NO: 136486 - DNA, 17 bp, Arabidopsis thaliana
tcacccatagctcagtg

SEQ ID NO: 136487 - DNA, 17 bp, Arabidopsis thaliana
tcacccatcatacattc

SEQ ID NO: 136488 - DNA, 17 bp, Arabidopsis thaliana
tcacccatctacaagag

SEQ ID NO: 136489 - DNA, 17 bp, Arabidopsis thaliana
tcacccatctacgaaag

SEQ ID NO: 136490 - DNA, 17 bp, Arabidopsis thaliana
tcacccccggacttttg

SEQ ID NO: 136491 - DNA, 17 bp, Arabidopsis thaliana
tcacccctttgcccaat

SEQ ID NO: 136492 - DNA, 17 bp, Arabidopsis thaliana
tcacccgaaagatggtg

SEQ ID NO: 136493 - DNA, 17 bp, Arabidopsis thaliana
tcacccgaagcggttgt

SEQ ID NO: 136494 - DNA, 17 bp, Arabidopsis thaliana
tcacccgacttcatact

SEQ ID NO: 136495 - DNA, 17 bp, Arabidopsis thaliana
tcacccgcaaagggtgt

SEQ ID NO: 136496 - DNA, 17 bp, Arabidopsis thaliana
tcacccgccatgtagag

SEQ ID NO: 136497 - DNA, 17 bp, Arabidopsis thaliana
tcacccgccatgtaggg

SEQ ID NO: 136498 - DNA, 17 bp, Arabidopsis thaliana
tcacccggcctggtcga

SEQ ID NO: 136499 - DNA, 17 bp, Arabidopsis thaliana
tcacccgggctcagaca

SEQ ID NO: 136500 - DNA, 17 bp, Arabidopsis thaliana
tcacccgggtgagaaat

SEQ ID NO: 136501 - DNA, 17 bp, Arabidopsis thaliana
tcacccgtcatatcatc

SEQ ID NO: 136502 - DNA, 17 bp, Arabidopsis thaliana
tcacccgtctcaagcag

SEQ ID NO: 136503 - DNA, 17 bp, Arabidopsis thaliana
tcacccgtgctaaaagc

SEQ ID NO: 136504 - DNA, 17 bp, Arabidopsis thaliana
tcacccgtggtataccg

SEQ ID NO: 136505 - DNA, 17 bp, Arabidopsis thaliana
tcaccctcaactttggc

SEQ ID NO: 136506 - DNA, 17 bp, Arabidopsis thaliana
tcaccctccaaagtgcg

SEQ ID NO: 136507 - DNA, 17 bp, Arabidopsis thaliana
tcaccctgacgaagtcc

SEQ ID NO: 136508 - DNA, 17 bp, Arabidopsis thaliana
tcacccttaggattctt

SEQ ID NO: 136509 - DNA, 17 bp, Arabidopsis thaliana
tcaccgaaaggcctacg

SEQ ID NO: 136510 - DNA, 17 bp, Arabidopsis thaliana
tcaccgaacccggttga

SEQ ID NO: 136511 - DNA, 17 bp, Arabidopsis thaliana
tcaccgaagagaaccac

SEQ ID NO: 136512 - DNA, 17 bp, Arabidopsis thaliana
tcaccgaagagtctgcc

SEQ ID NO: 136513 - DNA, 17 bp, Arabidopsis thaliana
tcaccgaattagggtca

SEQ ID NO: 136514 - DNA, 17 bp, Arabidopsis thaliana
tcaccgacgcctcgtga

SEQ ID NO: 136515 - DNA, 17 bp, Arabidopsis thaliana
tcaccgacgcggattac

SEQ ID NO: 136516 - DNA, 17 bp, Arabidopsis thaliana
tcaccgacgggacccag

SEQ ID NO: 136517 - DNA, 17 bp, Arabidopsis thaliana
tcaccgacggtcccaca

SEQ ID NO: 136518 - DNA, 17 bp, Arabidopsis thaliana
tcaccgactaatgccag

SEQ ID NO: 136519 - DNA, 17 bp, Arabidopsis thaliana
tcaccgagagacggaag

SEQ ID NO: 136520 - DNA, 17 bp, Arabidopsis thaliana
tcaccgagggtgcagaa

SEQ ID NO: 136521 - DNA, 17 bp, Arabidopsis thaliana
tcaccgagggtgtagaa

SEQ ID NO: 136522 - DNA, 17 bp, Arabidopsis thaliana
tcaccgagtagtctcac

SEQ ID NO: 136523 - DNA, 17 bp, Arabidopsis thaliana
tcaccgatcgtcttcat

SEQ ID NO: 136524 - DNA, 17 bp, Arabidopsis thaliana
tcaccgatcgtttgctc

SEQ ID NO: 136525 - DNA, 17 bp, Arabidopsis thaliana
tcaccgattattgtgta

SEQ ID NO: 136526 - DNA, 17 bp, Arabidopsis thaliana
tcaccgattctaccttt

SEQ ID NO: 136527 - DNA, 17 bp, Arabidopsis thaliana
tcaccgattttatgacc

SEQ ID NO: 136528 - DNA, 17 bp, Arabidopsis thaliana
tcaccgcaacatccttt

SEQ ID NO: 136529 - DNA, 17 bp, Arabidopsis thaliana
tcaccgcaccgcatttc

SEQ ID NO: 136530 - DNA, 17 bp, Arabidopsis thaliana
tcaccgcaggagttact

SEQ ID NO: 136531 - DNA, 17 bp, Arabidopsis thaliana
tcaccgcagtttgcgag

SEQ ID NO: 136532 - DNA, 17 bp, Arabidopsis thaliana
tcaccgccagacggact

SEQ ID NO: 136533 - DNA, 17 bp, Arabidopsis thaliana
tcaccgcgagacgaaat

SEQ ID NO: 136534 - DNA, 17 bp, Arabidopsis thaliana
tcaccgcggggctatat

SEQ ID NO: 136535 - DNA, 17 bp, Arabidopsis thaliana
tcaccgctatcgtaccc

SEQ ID NO: 136536 - DNA, 17 bp, Arabidopsis thaliana
tcaccgcttgattcgct

SEQ ID NO: 136537 - DNA, 17 bp, Arabidopsis thaliana
tcaccggagcctttcct

SEQ ID NO: 136538 - DNA, 17 bp, Arabidopsis thaliana
tcaccggcgatcagttc

SEQ ID NO: 136539 - DNA, 17 bp, Arabidopsis thaliana
tcaccggctaccgtgcc

SEQ ID NO: 136540 - DNA, 17 bp, Arabidopsis thaliana
tcaccggtctaaactgc

SEQ ID NO: 136541 - DNA, 17 bp, Arabidopsis thaliana
tcaccggtgagtcttac

SEQ ID NO: 136542 - DNA, 17 bp, Arabidopsis thaliana
tcaccggtttgacgttt

SEQ ID NO: 136543 - DNA, 17 bp, Arabidopsis thaliana
tcaccgtatggacaatg

SEQ ID NO: 136544 - DNA, 17 bp, Arabidopsis thaliana
tcaccgtcagagcaaag

SEQ ID NO: 136545 - DNA, 17 bp, Arabidopsis thaliana
tcaccgtgagactcgtt

SEQ ID NO: 136546 - DNA, 17 bp, Arabidopsis thaliana
tcaccgtgaggccaaac

SEQ ID NO: 136547 - DNA, 17 bp, Arabidopsis thaliana
tcaccgtgattggtgat

SEQ ID NO: 136548 - DNA, 17 bp, Arabidopsis thaliana
tcaccgtgtgattccaa

SEQ ID NO: 136549 - DNA, 17 bp, Arabidopsis thaliana
tcaccgttcaatccgct

SEQ ID NO: 136550 - DNA, 17 bp, Arabidopsis thaliana
tcaccgttcgcttagca

SEQ ID NO: 136551 - DNA, 17 bp, Arabidopsis thaliana
tcaccgttgagaggttg

SEQ ID NO: 136552 - DNA, 17 bp, Arabidopsis thaliana
tcaccgttggtggtgct

SEQ ID NO: 136553 - DNA, 17 bp, Arabidopsis thaliana
tcaccgtttctttgggg

SEQ ID NO: 136554 - DNA, 17 bp, Arabidopsis thaliana
tcaccgtttgagatctc

SEQ ID NO: 136555 - DNA, 17 bp, Arabidopsis thaliana
tcaccgtttgtcttttc

SEQ ID NO: 136556 - DNA, 17 bp, Arabidopsis thaliana
tcaccgtttgtgtccag

SEQ ID NO: 136557 - DNA, 17 bp, Arabidopsis thaliana
tcacctaccatgtgcgc

SEQ ID NO: 136558 - DNA, 17 bp, Arabidopsis thaliana
tcacctagcttagaggt

SEQ ID NO: 136559 - DNA, 17 bp, Arabidopsis thaliana
tcacctagggagccgat

SEQ ID NO: 136560 - DNA, 17 bp, Arabidopsis thaliana
tcacctaggtggattcg

SEQ ID NO: 136561 - DNA, 17 bp, Arabidopsis thaliana
tcacctatcttggatat

SEQ ID NO: 136562 - DNA, 17 bp, Arabidopsis thaliana
tcacctcagcgacggac

SEQ ID NO: 136563 - DNA, 17 bp, Arabidopsis thaliana
tcacctccatccgggag

SEQ ID NO: 136564 - DNA, 17 bp, Arabidopsis thaliana
tcacctcctctagcatt

SEQ ID NO: 136565 - DNA, 17 bp, Arabidopsis thaliana
tcacctcggaagatgtt

SEQ ID NO: 136566 - DNA, 17 bp, Arabidopsis thaliana
tcacctcgtcatcggcc

SEQ ID NO: 136567 - DNA, 17 bp, Arabidopsis thaliana
tcacctcgtttcccaca

SEQ ID NO: 136568 - DNA, 17 bp, Arabidopsis thaliana
tcacctctccagagaaa

SEQ ID NO: 136569 - DNA, 17 bp, Arabidopsis thaliana
tcacctctggagcttaa

SEQ ID NO: 136570 - DNA, 17 bp, Arabidopsis thaliana
tcacctcttgatgatct

SEQ ID NO: 136571 - DNA, 17 bp, Arabidopsis thaliana
tcacctgagactgttgc

SEQ ID NO: 136572 - DNA, 17 bp, Arabidopsis thaliana
tcacctgcaaggcttgc

SEQ ID NO: 136573 - DNA, 17 bp, Arabidopsis thaliana
tcacctgccaagtctca

SEQ ID NO: 136574 - DNA, 17 bp, Arabidopsis thaliana
tcacctgctgctgagtc

SEQ ID NO: 136575 - DNA, 17 bp, Arabidopsis thaliana
tcacctgcttggtgtct

SEQ ID NO: 136576 - DNA, 17 bp, Arabidopsis thaliana
tcacctggtgtggatcc

SEQ ID NO: 136577 - DNA, 17 bp, Arabidopsis thaliana
tcacctgtgcaaatatt

SEQ ID NO: 136578 - DNA, 17 bp, Arabidopsis thaliana
tcacctgtgtaaaccat

SEQ ID NO: 136579 - DNA, 17 bp, Arabidopsis thaliana
tcacctgttcgtttgcc

SEQ ID NO: 136580 - DNA, 17 bp, Arabidopsis thaliana
tcaccttactcgaccaa

SEQ ID NO: 136581 - DNA, 17 bp, Arabidopsis thaliana
tcaccttatcccatctc

SEQ ID NO: 136582 - DNA, 17 bp, Arabidopsis thaliana
tcaccttcggctgagat

SEQ ID NO: 136583 - DNA, 17 bp, Arabidopsis thaliana
tcaccttcggtgcggtg

SEQ ID NO: 136584 - DNA, 17 bp, Arabidopsis thaliana
tcaccttctcagcctcg

SEQ ID NO: 136585 - DNA, 17 bp, Arabidopsis thaliana
tcaccttctgggtgcgg

SEQ ID NO: 136586 - DNA, 17 bp, Arabidopsis thaliana
tcaccttgactgctagt

SEQ ID NO: 136587 - DNA, 17 bp, Arabidopsis thaliana
tcaccttgctgttctag

SEQ ID NO: 136588 - DNA, 17 bp, Arabidopsis thaliana
tcaccttggagagacat

SEQ ID NO: 136589 - DNA, 17 bp, Arabidopsis thaliana
tcaccttgggcaaagag

SEQ ID NO: 136590 - DNA, 17 bp, Arabidopsis thaliana
tcaccttgggtgacgct

SEQ ID NO: 136591 - DNA, 17 bp, Arabidopsis thaliana
tcaccttggtgttgcgg

SEQ ID NO: 136592 - DNA, 17 bp, Arabidopsis thaliana
tcaccttgtacgggcca

SEQ ID NO: 136593 - DNA, 17 bp, Arabidopsis thaliana
tcaccttgtatgctcct

SEQ ID NO: 136594 - DNA, 17 bp, Arabidopsis thaliana
tcacctttggacttttg

SEQ ID NO: 136595 - DNA, 17 bp, Arabidopsis thaliana
tcacctttggccagatc

SEQ ID NO: 136596 - DNA, 17 bp, Arabidopsis thaliana
tcaccttttcatttgca

SEQ ID NO: 136597 - DNA, 17 bp, Arabidopsis thaliana
tcaccttttcggaaagc

SEQ ID NO: 136598 - DNA, 17 bp, Arabidopsis thaliana
tcacgaaaaagcccaga

SEQ ID NO: 136599 - DNA, 17 bp, Arabidopsis thaliana
tcacgaaaatccccgaa

SEQ ID NO: 136600 - DNA, 17 bp, Arabidopsis thaliana
tcacgaaacagagcaac

SEQ ID NO: 136601 - DNA, 17 bp, Arabidopsis thaliana
tcacgaaatcgatttct

SEQ ID NO: 136602 - DNA, 17 bp, Arabidopsis thaliana
tcacgaacaaggttctc

SEQ ID NO: 136603 - DNA, 17 bp, Arabidopsis thaliana
tcacgaacagacaacac

SEQ ID NO: 136604 - DNA, 17 bp, Arabidopsis thaliana
tcacgaacgttgttgcg

SEQ ID NO: 136605 - DNA, 17 bp, Arabidopsis thaliana
tcacgaactcgggctcg

SEQ ID NO: 136606 - DNA, 17 bp, Arabidopsis thaliana
tcacgaactcgggctct

SEQ ID NO: 136607 - DNA, 17 bp, Arabidopsis thaliana
tcacgaagcccatcgcg

SEQ ID NO: 136608 - DNA, 17 bp, Arabidopsis thaliana
tcacgaagcttagaggt

SEQ ID NO: 136609 - DNA, 17 bp, Arabidopsis thaliana
tcacgaagtttcggtgt

SEQ ID NO: 136610 - DNA, 17 bp, Arabidopsis thaliana
tcacgaatcctacttgg

SEQ ID NO: 136611 - DNA, 17 bp, Arabidopsis thaliana
tcacgaatgaccagctt

SEQ ID NO: 136612 - DNA, 17 bp, Arabidopsis thaliana
tcacgaattggtggtca

SEQ ID NO: 136613 - DNA, 17 bp, Arabidopsis thaliana
tcacgacagggattgcg

SEQ ID NO: 136614 - DNA, 17 bp, Arabidopsis thaliana
tcacgacattaactttt

SEQ ID NO: 136615 - DNA, 17 bp, Arabidopsis thaliana
tcacgaccgtttggtta

SEQ ID NO: 136616 - DNA, 17 bp, Arabidopsis thaliana
tcacgaccttcgccacc

SEQ ID NO: 136617 - DNA, 17 bp, Arabidopsis thaliana
tcacgacgcggattacg

SEQ ID NO: 136618 - DNA, 17 bp, Arabidopsis thaliana
tcacgactctcggcaac

SEQ ID NO: 136619 - DNA, 17 bp, Arabidopsis thaliana
tcacgacttcgcaattt

SEQ ID NO: 136620 - DNA, 17 bp, Arabidopsis thaliana
tcacgacttgggttaag

SEQ ID NO: 136621 - DNA, 17 bp, Arabidopsis thaliana
tcacgagactgccacaa

SEQ ID NO: 136622 - DNA, 17 bp, Arabidopsis thaliana
tcacgagagcgcttatc

SEQ ID NO: 136623 - DNA, 17 bp, Arabidopsis thaliana
tcacgagatcgtgctgc

SEQ ID NO: 136624 - DNA, 17 bp, Arabidopsis thaliana
tcacgagggcacgtctg

SEQ ID NO: 136625 - DNA, 17 bp, Arabidopsis thaliana
tcacgagttcacggtta

SEQ ID NO: 136626 - DNA, 17 bp, Arabidopsis thaliana
tcacgataactcgacgg

SEQ ID NO: 136627 - DNA, 17 bp, Arabidopsis thaliana
tcacgataagggttagg

SEQ ID NO: 136628 - DNA, 17 bp, Arabidopsis thaliana
tcacgatagaactcgag

SEQ ID NO: 136629 - DNA, 17 bp, Arabidopsis thaliana
tcacgatatcttccatt

SEQ ID NO: 136630 - DNA, 17 bp, Arabidopsis thaliana
tcacgatcacaaatgca

SEQ ID NO: 136631 - DNA, 17 bp, Arabidopsis thaliana
tcacgatgattatgact

SEQ ID NO: 136632 - DNA, 17 bp, Arabidopsis thaliana
tcacgatgccgaccagg

SEQ ID NO: 136633 - DNA, 17 bp, Arabidopsis thaliana
tcacgattcccgctatc

SEQ ID NO: 136634 - DNA, 17 bp, Arabidopsis thaliana
tcacgattctgattcca

SEQ ID NO: 136635 - DNA, 17 bp, Arabidopsis thaliana
tcacgattctttcagat

SEQ ID NO: 136636 - DNA, 17 bp, Arabidopsis thaliana
tcacgattgagttcctt

SEQ ID NO: 136637 - DNA, 17 bp, Arabidopsis thaliana
tcacgattgagttggaa

SEQ ID NO: 136638 - DNA, 17 bp, Arabidopsis thaliana
tcacgatttgatgatca

SEQ ID NO: 136639 - DNA, 17 bp, Arabidopsis thaliana
tcacgattttgtagtta

SEQ ID NO: 136640 - DNA, 17 bp, Arabidopsis thaliana
tcacgcaagccagagag

SEQ ID NO: 136641 - DNA, 17 bp, Arabidopsis thaliana
tcacgcaaggtgtccct

SEQ ID NO: 136642 - DNA, 17 bp, Arabidopsis thaliana
tcacgcaagttaagctt

SEQ ID NO: 136643 - DNA, 17 bp, Arabidopsis thaliana
tcacgcaatcaccattc

SEQ ID NO: 136644 - DNA, 17 bp, Arabidopsis thaliana
tcacgcaccaccagtaa

SEQ ID NO: 136645 - DNA, 17 bp, Arabidopsis thaliana
tcacgcaccctgtagat

SEQ ID NO: 136646 - DNA, 17 bp, Arabidopsis thaliana
tcacgcagacgattttc

SEQ ID NO: 136647 - DNA, 17 bp, Arabidopsis thaliana
tcacgcagctttctgat

SEQ ID NO: 136648 - DNA, 17 bp, Arabidopsis thaliana
tcacgcaggatttttat

SEQ ID NO: 136649 - DNA, 17 bp, Arabidopsis thaliana
tcacgcatatgccattt

SEQ ID NO: 136650 - DNA, 17 bp, Arabidopsis thaliana
tcacgcatcctgtagat

SEQ ID NO: 136651 - DNA, 17 bp, Arabidopsis thaliana
tcacgcatgcgcccgcc

SEQ ID NO: 136652 - DNA, 17 bp, Arabidopsis thaliana
tcacgccacggttgact

SEQ ID NO: 136653 - DNA, 17 bp, Arabidopsis thaliana
tcacgccttctgggcgc

SEQ ID NO: 136654 - DNA, 17 bp, Arabidopsis thaliana
tcacgcctttccctttg

SEQ ID NO: 136655 - DNA, 17 bp, Arabidopsis thaliana
tcacgcgatagtgttga

SEQ ID NO: 136656 - DNA, 17 bp, Arabidopsis thaliana
tcacgcgtgtgccactt

SEQ ID NO: 136657 - DNA, 17 bp, Arabidopsis thaliana
tcacgctacacgttggt

SEQ ID NO: 136658 - DNA, 17 bp, Arabidopsis thaliana
tcacgctacattcagtg

SEQ ID NO: 136659 - DNA, 17 bp, Arabidopsis thaliana
tcacgctccatgtagac

SEQ ID NO: 136660 - DNA, 17 bp, Arabidopsis thaliana
tcacgctgcggatctcg

SEQ ID NO: 136661 - DNA, 17 bp, Arabidopsis thaliana
tcacgctggactcattc

SEQ ID NO: 136662 - DNA, 17 bp, Arabidopsis thaliana
tcacgcttagtttggta

SEQ ID NO: 136663 - DNA, 17 bp, Arabidopsis thaliana
tcacgcttgtgccatga

SEQ ID NO: 136664 - DNA, 17 bp, Arabidopsis thaliana
tcacgcttgtggagacg

SEQ ID NO: 136665 - DNA, 17 bp, Arabidopsis thaliana
tcacgctttcagaggcg

SEQ ID NO: 136666 - DNA, 17 bp, Arabidopsis thaliana
tcacggaaatcataggc

SEQ ID NO: 136667 - DNA, 17 bp, Arabidopsis thaliana
tcacggaatcataagcg

SEQ ID NO: 136668 - DNA, 17 bp, Arabidopsis thaliana
tcacggacagtacggcg

SEQ ID NO: 136669 - DNA, 17 bp, Arabidopsis thaliana
tcacggaccgcgtcgtt

SEQ ID NO: 136670 - DNA, 17 bp, Arabidopsis thaliana
tcacggacgggcttatg

SEQ ID NO: 136671 - DNA, 17 bp, Arabidopsis thaliana
tcacggactgcgttaag

SEQ ID NO: 136672 - DNA, 17 bp, Arabidopsis thaliana
tcacggacttggtctgc

SEQ ID NO: 136673 - DNA, 17 bp, Arabidopsis thaliana
tcacggagacttcgacg

SEQ ID NO: 136674 - DNA, 17 bp, Arabidopsis thaliana
tcacggagtcatggaat

SEQ ID NO: 136675 - DNA, 17 bp, Arabidopsis thaliana
tcacggatcattatgcg

SEQ ID NO: 136676 - DNA, 17 bp, Arabidopsis thaliana
tcacggatggtctacaa

SEQ ID NO: 136677 - DNA, 17 bp, Arabidopsis thaliana
tcacggatgttgcttat

SEQ ID NO: 136678 - DNA, 17 bp, Arabidopsis thaliana
tcacggatttacgtttt

SEQ ID NO: 136679 - DNA, 17 bp, Arabidopsis thaliana
tcacggatttggcgaga

SEQ ID NO: 136680 - DNA, 17 bp, Arabidopsis thaliana
tcacggcactatcgcgg

SEQ ID NO: 136681 - DNA, 17 bp, Arabidopsis thaliana
tcacggcatgtccgaaa

SEQ ID NO: 136682 - DNA, 17 bp, Arabidopsis thaliana
tcacggcatgtccgaat

SEQ ID NO: 136683 - DNA, 17 bp, Arabidopsis thaliana
tcacggccaacaagtgc

SEQ ID NO: 136684 - DNA, 17 bp, Arabidopsis thaliana
tcacggccaacaagtgt

SEQ ID NO: 136685 - DNA, 17 bp, Arabidopsis thaliana
tcacggccggcttcttt

SEQ ID NO: 136686 - DNA, 17 bp, Arabidopsis thaliana
tcacggcctttttttca

SEQ ID NO: 136687 - DNA, 17 bp, Arabidopsis thaliana
tcacggcctttttttct

SEQ ID NO: 136688 - DNA, 17 bp, Arabidopsis thaliana
tcacggcggcgcggcgg

SEQ ID NO: 136689 - DNA, 17 bp, Arabidopsis thaliana
tcacggctctgggtgaa

SEQ ID NO: 136690 - DNA, 17 bp, Arabidopsis thaliana
tcacggcttgtcccttc

SEQ ID NO: 136691 - DNA, 17 bp, Arabidopsis thaliana
tcacgggacaggattgg

SEQ ID NO: 136692 - DNA, 17 bp, Arabidopsis thaliana
tcacgggacattgatgt

SEQ ID NO: 136693 - DNA, 17 bp, Arabidopsis thaliana
tcacgggacggattggc

SEQ ID NO: 136694 - DNA, 17 bp, Arabidopsis thaliana
tcacgggacgggattat

SEQ ID NO: 136695 - DNA, 17 bp, Arabidopsis thaliana
tcacgggacgggttggc

SEQ ID NO: 136696 - DNA, 17 bp, Arabidopsis thaliana
tcacgggacgggtttgg

SEQ ID NO: 136697 - DNA, 17 bp, Arabidopsis thaliana
tcacgggcaagcctctg

SEQ ID NO: 136698 - DNA, 17 bp, Arabidopsis thaliana
tcacgggcctccggtgg

SEQ ID NO: 136699 - DNA, 17 bp, Arabidopsis thaliana
tcacgggcttcagcgca

SEQ ID NO: 136700 - DNA, 17 bp, Arabidopsis thaliana
tcacggggaaccaccac

SEQ ID NO: 136701 - DNA, 17 bp, Arabidopsis thaliana
tcacgggttattgttat

SEQ ID NO: 136702 - DNA, 17 bp, Arabidopsis thaliana
tcacgggttctgccatg

SEQ ID NO: 136703 - DNA, 17 bp, Arabidopsis thaliana
tcacgggttggcaggac

SEQ ID NO: 136704 - DNA, 17 bp, Arabidopsis thaliana
tcacgggttggcggaat

SEQ ID NO: 136705 - DNA, 17 bp, Arabidopsis thaliana
tcacgggttggcgggac

SEQ ID NO: 136706 - DNA, 17 bp, Arabidopsis thaliana
tcacgggtttacggttt

SEQ ID NO: 136707 - DNA, 17 bp, Arabidopsis thaliana
tcacgggtttacgtttt

SEQ ID NO: 136708 - DNA, 17 bp, Arabidopsis thaliana
tcacgggtttggcagga

SEQ ID NO: 136709 - DNA, 17 bp, Arabidopsis thaliana
tcacgggtttggcggga

SEQ ID NO: 136710 - DNA, 17 bp, Arabidopsis thaliana
tcacgggttttcgtttt

SEQ ID NO: 136711 - DNA, 17 bp, Arabidopsis thaliana
tcacggtacggactgag

SEQ ID NO: 136712 - DNA, 17 bp, Arabidopsis thaliana
tcacggtataaaagtta

SEQ ID NO: 136713 - DNA, 17 bp, Arabidopsis thaliana
tcacggtccgcctttgg

SEQ ID NO: 136714 - DNA, 17 bp, Arabidopsis thaliana
tcacggtctaaaagtta

SEQ ID NO: 136715 - DNA, 17 bp, Arabidopsis thaliana
tcacggtctaaaggtta

SEQ ID NO: 136716 - DNA, 17 bp, Arabidopsis thaliana
tcacggtctgatccttt

SEQ ID NO: 136717 - DNA, 17 bp, Arabidopsis thaliana
tcacggtgcggtgtcga

SEQ ID NO: 136718 - DNA, 17 bp, Arabidopsis thaliana
tcacggtgtgaccactt

SEQ ID NO: 136719 - DNA, 17 bp, Arabidopsis thaliana
tcacggttaatttggcc

SEQ ID NO: 136720 - DNA, 17 bp, Arabidopsis thaliana
tcacggttgcgactcca

SEQ ID NO: 136721 - DNA, 17 bp, Arabidopsis thaliana
tcacggtttggcgtcgc

SEQ ID NO: 136722 - DNA, 17 bp, Arabidopsis thaliana
tcacgtactttatgcag

SEQ ID NO: 136723 - DNA, 17 bp, Arabidopsis thaliana
tcacgtagcacgcagca

SEQ ID NO: 136724 - DNA, 17 bp, Arabidopsis thaliana
tcacgtatccggttgtt

SEQ ID NO: 136725 - DNA, 17 bp, Arabidopsis thaliana
tcacgtatttgccatta

SEQ ID NO: 136726 - DNA, 17 bp, Arabidopsis thaliana
tcacgtcaagtgcgaat

SEQ ID NO: 136727 - DNA, 17 bp, Arabidopsis thaliana
tcacgtcattcaccggc

SEQ ID NO: 136728 - DNA, 17 bp, Arabidopsis thaliana
tcacgtccgtcggagtt

SEQ ID NO: 136729 - DNA, 17 bp, Arabidopsis thaliana
tcacgtcctcagcgacg

SEQ ID NO: 136730 - DNA, 17 bp, Arabidopsis thaliana
tcacgtcctttagcgcg

SEQ ID NO: 136731 - DNA, 17 bp, Arabidopsis thaliana
tcacgtcgtcgattcct

SEQ ID NO: 136732 - DNA, 17 bp, Arabidopsis thaliana
tcacgtctatctatcga

SEQ ID NO: 136733 - DNA, 17 bp, Arabidopsis thaliana
tcacgtctgcctgggtc

SEQ ID NO: 136734 - DNA, 17 bp, Arabidopsis thaliana
tcacgtctgcctgggtg

SEQ ID NO: 136735 - DNA, 17 bp, Arabidopsis thaliana
tcacgtctgcctggtgt

SEQ ID NO: 136736 - DNA, 17 bp, Arabidopsis thaliana
tcacgtctgctgggtgt

SEQ ID NO: 136737 - DNA, 17 bp, Arabidopsis thaliana
tcacgtctggaaggatt

SEQ ID NO: 136738 - DNA, 17 bp, Arabidopsis thaliana
tcacgtggttaagttca

SEQ ID NO: 136739 - DNA, 17 bp, Arabidopsis thaliana
tcacgttaccattcgga

SEQ ID NO: 136740 - DNA, 17 bp, Arabidopsis thaliana
tcacgttactcgacccc

SEQ ID NO: 136741 - DNA, 17 bp, Arabidopsis thaliana
tcacgttaggaccctac

SEQ ID NO: 136742 - DNA, 17 bp, Arabidopsis thaliana
tcacgttgacgcgattc

SEQ ID NO: 136743 - DNA, 17 bp, Arabidopsis thaliana
tcacgtttctgaatgct

SEQ ID NO: 136744 - DNA, 17 bp, Arabidopsis thaliana
tcacgtttctggactgt

SEQ ID NO: 136745 - DNA, 17 bp, Arabidopsis thaliana
tcacgtttctgggctgt

SEQ ID NO: 136746 - DNA, 17 bp, Arabidopsis thaliana
tcacgtttgtgccaagg

SEQ ID NO: 136747 - DNA, 17 bp, Arabidopsis thaliana
tcacgtttgtgccatga

SEQ ID NO: 136748 - DNA, 17 bp, Arabidopsis thaliana
tcacgtttgtgccatgg

SEQ ID NO: 136749 - DNA, 17 bp, Arabidopsis thaliana
tcacgtttgttgtgtcc

SEQ ID NO: 136750 - DNA, 17 bp, Arabidopsis thaliana
tcactaaacctgatttt

SEQ ID NO: 136751 - DNA, 17 bp, Arabidopsis thaliana
tcactaaacggtcaatc

SEQ ID NO: 136752 - DNA, 17 bp, Arabidopsis thaliana
tcactaaactcctccta

SEQ ID NO: 136753 - DNA, 17 bp, Arabidopsis thaliana
tcactaacaagactggc

SEQ ID NO: 136754 - DNA, 17 bp, Arabidopsis thaliana
tcactaacgaccgaagc

SEQ ID NO: 136755 - DNA, 17 bp, Arabidopsis thaliana
tcactaacgactaatgc

SEQ ID NO: 136756 - DNA, 17 bp, Arabidopsis thaliana
tcactaagctcgttgat

SEQ ID NO: 136757 - DNA, 17 bp, Arabidopsis thaliana
tcactaagtttcggtgt

SEQ ID NO: 136758 - DNA, 17 bp, Arabidopsis thaliana
tcactaagttttggtgt

SEQ ID NO: 136759 - DNA, 17 bp, Arabidopsis thaliana
tcactaatattctcgga

SEQ ID NO: 136760 - DNA, 17 bp, Arabidopsis thaliana
tcactacaacagatttg

SEQ ID NO: 136761 - DNA, 17 bp, Arabidopsis thaliana
tcactacaatcgtattg

SEQ ID NO: 136762 - DNA, 17 bp, Arabidopsis thaliana
tcactacacttggacca

SEQ ID NO: 136763 - DNA, 17 bp, Arabidopsis thaliana
tcactacagtttctcga

SEQ ID NO: 136764 - DNA, 17 bp, Arabidopsis thaliana
tcactacatgccgaagt

SEQ ID NO: 136765 - DNA, 17 bp, Arabidopsis thaliana
tcactaccacgtggaaa

SEQ ID NO: 136766 - DNA, 17 bp, Arabidopsis thaliana
tcactaccaggtaaacc

SEQ ID NO: 136767 - DNA, 17 bp, Arabidopsis thaliana
tcactaccaggtgttct

SEQ ID NO: 136768 - DNA, 17 bp, Arabidopsis thaliana
tcactaccgtgcgctgg

SEQ ID NO: 136769 - DNA, 17 bp, Arabidopsis thaliana
tcactacctctggcggc

SEQ ID NO: 136770 - DNA, 17 bp, Arabidopsis thaliana
tcactacgatttcatga

SEQ ID NO: 136771 - DNA, 17 bp, Arabidopsis thaliana
tcactacgtctacagtt

SEQ ID NO: 136772 - DNA, 17 bp, Arabidopsis thaliana
tcactactacgtcttga

SEQ ID NO: 136773 - DNA, 17 bp, Arabidopsis thaliana
tcactactcaagcaaca

SEQ ID NO: 136774 - DNA, 17 bp, Arabidopsis thaliana
tcactagacggtcgtca

SEQ ID NO: 136775 - DNA, 17 bp, Arabidopsis thaliana
tcactagacggtcgtcg

SEQ ID NO: 136776 - DNA, 17 bp, Arabidopsis thaliana
tcactagattttgaccc

SEQ ID NO: 136777 - DNA, 17 bp, Arabidopsis thaliana
tcactagccactccgga

SEQ ID NO: 136778 - DNA, 17 bp, Arabidopsis thaliana
tcactagcttatgctct

SEQ ID NO: 136779 - DNA, 17 bp, Arabidopsis thaliana
tcactaggctcccaagt

SEQ ID NO: 136780 - DNA, 17 bp, Arabidopsis thaliana
tcactaggtctgaacag

SEQ ID NO: 136781 - DNA, 17 bp, Arabidopsis thaliana
tcactaggtggaggcga

SEQ ID NO: 136782 - DNA, 17 bp, Arabidopsis thaliana
tcactaggtggaggcgg

SEQ ID NO: 136783 - DNA, 17 bp, Arabidopsis thaliana
tcactatccatgctaac

SEQ ID NO: 136784 - DNA, 17 bp, Arabidopsis thaliana
tcactatcctcaagctt

SEQ ID NO: 136785 - DNA, 17 bp, Arabidopsis thaliana
tcactatcgtcgactct

SEQ ID NO: 136786 - DNA, 17 bp, Arabidopsis thaliana
tcactatcttcgcggat

SEQ ID NO: 136787 - DNA, 17 bp, Arabidopsis thaliana
tcactatgaagtttctg

SEQ ID NO: 136788 - DNA, 17 bp, Arabidopsis thaliana
tcactatgcaccttcgt

SEQ ID NO: 136789 - DNA, 17 bp, Arabidopsis thaliana
tcactatgcacctttgc

SEQ ID NO: 136790 - DNA, 17 bp, Arabidopsis thaliana
tcactatgtatgtagtc

SEQ ID NO: 136791 - DNA, 17 bp, Arabidopsis thaliana
tcactattagctcagtg

SEQ ID NO: 136792 - DNA, 17 bp, Arabidopsis thaliana
tcactattcaaactgat

SEQ ID NO: 136793 - DNA, 17 bp, Arabidopsis thaliana
tcactatttccgacggc

SEQ ID NO: 136794 - DNA, 17 bp, Arabidopsis thaliana
tcactcaaaaactcttg

SEQ ID NO: 136795 - DNA, 17 bp, Arabidopsis thaliana
tcactcaaaatttgtgg

SEQ ID NO: 136796 - DNA, 17 bp, Arabidopsis thaliana
tcactcaaacatgtgct

SEQ ID NO: 136797 - DNA, 17 bp, Arabidopsis thaliana
tcactcaaaccaaaact

SEQ ID NO: 136798 - DNA, 17 bp, Arabidopsis thaliana
tcactcaaacgaggaaa

SEQ ID NO: 136799 - DNA, 17 bp, Arabidopsis thaliana
tcactcaaacgtctcaa

SEQ ID NO: 136800 - DNA, 17 bp, Arabidopsis thaliana
tcactcaaactttgctt

SEQ ID NO: 136801 - DNA, 17 bp, Arabidopsis thaliana
tcactcaaagactgcct

SEQ ID NO: 136802 - DNA, 17 bp, Arabidopsis thaliana
tcactcaaaggattgtg

SEQ ID NO: 136803 - DNA, 17 bp, Arabidopsis thaliana
tcactcaaatccaggat

SEQ ID NO: 136804 - DNA, 17 bp, Arabidopsis thaliana
tcactcaaatggttagg

SEQ ID NO: 136805 - DNA, 17 bp, Arabidopsis thaliana
tcactcaacaacctccg

SEQ ID NO: 136806 - DNA, 17 bp, Arabidopsis thaliana
tcactcaacaccggtgg

SEQ ID NO: 136807 - DNA, 17 bp, Arabidopsis thaliana
tcactcaacagtcccag

SEQ ID NO: 136808 - DNA, 17 bp, Arabidopsis thaliana
tcactcaacatccgatg

SEQ ID NO: 136809 - DNA, 17 bp, Arabidopsis thaliana
tcactcaacatcttcac

SEQ ID NO: 136810 - DNA, 17 bp, Arabidopsis thaliana
tcactcaacattggccg

SEQ ID NO: 136811 - DNA, 17 bp, Arabidopsis thaliana
tcactcaaccgggttct

SEQ ID NO: 136812 - DNA, 17 bp, Arabidopsis thaliana
tcactcaaccggttcac

SEQ ID NO: 136813 - DNA, 17 bp, Arabidopsis thaliana
tcactcaactcatttgg

SEQ ID NO: 136814 - DNA, 17 bp, Arabidopsis thaliana
tcactcaactctagttc

SEQ ID NO: 136815 - DNA, 17 bp, Arabidopsis thaliana
tcactcaacttccgatg

SEQ ID NO: 136816 - DNA, 17 bp, Arabidopsis thaliana
tcactcaacttcgtatg

SEQ ID NO: 136817 - DNA, 17 bp, Arabidopsis thaliana
tcactcaacttgttcaa

SEQ ID NO: 136818 - DNA, 17 bp, Arabidopsis thaliana
tcactcaagacccaact

SEQ ID NO: 136819 - DNA, 17 bp, Arabidopsis thaliana
tcactcaagagacacgg

SEQ ID NO: 136820 - DNA, 17 bp, Arabidopsis thaliana
tcactcaaggtcccttt

SEQ ID NO: 136821 - DNA, 17 bp, Arabidopsis thaliana
tcactcaagtactgtca

SEQ ID NO: 136822 - DNA, 17 bp, Arabidopsis thaliana
tcactcaagtttgatga

SEQ ID NO: 136823 - DNA, 17 bp, Arabidopsis thaliana
tcactcaatcatatgga

SEQ ID NO: 136824 - DNA, 17 bp, Arabidopsis thaliana
tcactcaatttcgtagg

SEQ ID NO: 136825 - DNA, 17 bp, Arabidopsis thaliana
tcactcacacattctaa

SEQ ID NO: 136826 - DNA, 17 bp, Arabidopsis thaliana
tcactcacacgattgtg

SEQ ID NO: 136827 - DNA, 17 bp, Arabidopsis thaliana
tcactcacattgcttga

SEQ ID NO: 136828 - DNA, 17 bp, Arabidopsis thaliana
tcactcacgataactcg

SEQ ID NO: 136829 - DNA, 17 bp, Arabidopsis thaliana
tcactcacgattctttc

SEQ ID NO: 136830 - DNA, 17 bp, Arabidopsis thaliana
tcactcacggatttacg

SEQ ID NO: 136831 - DNA, 17 bp, Arabidopsis thaliana
tcactcacgttgacgcg

SEQ ID NO: 136832 - DNA, 17 bp, Arabidopsis thaliana
tcactcactactatttg

SEQ ID NO: 136833 - DNA, 17 bp, Arabidopsis thaliana
tcactcactcccggact

SEQ ID NO: 136834 - DNA, 17 bp, Arabidopsis thaliana
tcactcactcgacgaca

SEQ ID NO: 136835 - DNA, 17 bp, Arabidopsis thaliana
tcactcactggcgtcgg

SEQ ID NO: 136836 - DNA, 17 bp, Arabidopsis thaliana
tcactcactgtgtggtc

SEQ ID NO: 136837 - DNA, 17 bp, Arabidopsis thaliana
tcactcactgttgcccg

SEQ ID NO: 136838 - DNA, 17 bp, Arabidopsis thaliana
tcactcactttgatttc

SEQ ID NO: 136839 - DNA, 17 bp, Arabidopsis thaliana
tcactcagaaagcccaa

SEQ ID NO: 136840 - DNA, 17 bp, Arabidopsis thaliana
tcactcagaaatttgcg

SEQ ID NO: 136841 - DNA, 17 bp, Arabidopsis thaliana
tcactcagacctggtga

SEQ ID NO: 136842 - DNA, 17 bp, Arabidopsis thaliana
tcactcagagacatatg

SEQ ID NO: 136843 - DNA, 17 bp, Arabidopsis thaliana
tcactcagagactcttt

SEQ ID NO: 136844 - DNA, 17 bp, Arabidopsis thaliana
tcactcagcagagacgc

SEQ ID NO: 136845 - DNA, 17 bp, Arabidopsis thaliana
tcactcagcccctgtcg

SEQ ID NO: 136846 - DNA, 17 bp, Arabidopsis thaliana
tcactcagccctttgcc

SEQ ID NO: 136847 - DNA, 17 bp, Arabidopsis thaliana
tcactcagccctttgtc

SEQ ID NO: 136848 - DNA, 17 bp, Arabidopsis thaliana
tcactcagcctttgtcg

SEQ ID NO: 136849 - DNA, 17 bp, Arabidopsis thaliana
tcactcagcggactgct

SEQ ID NO: 136850 - DNA, 17 bp, Arabidopsis thaliana
tcactcagcggatgttg

SEQ ID NO: 136851 - DNA, 17 bp, Arabidopsis thaliana
tcactcagcgtgctccg

SEQ ID NO: 136852 - DNA, 17 bp, Arabidopsis thaliana
tcactcagcttatggca

SEQ ID NO: 136853 - DNA, 17 bp, Arabidopsis thaliana
tcactcagcttttgtcg

SEQ ID NO: 136854 - DNA, 17 bp, Arabidopsis thaliana
tcactcaggaatttgga

SEQ ID NO: 136855 - DNA, 17 bp, Arabidopsis thaliana
tcactcaggtctccaag

SEQ ID NO: 136856 - DNA, 17 bp, Arabidopsis thaliana
tcactcagtaaccccct

SEQ ID NO: 136857 - DNA, 17 bp, Arabidopsis thaliana
tcactcagtcaattgcc

SEQ ID NO: 136858 - DNA, 17 bp, Arabidopsis thaliana
tcactcagtccaaaacc

SEQ ID NO: 136859 - DNA, 17 bp, Arabidopsis thaliana
tcactcagtctaccagg

SEQ ID NO: 136860 - DNA, 17 bp, Arabidopsis thaliana
tcactcagttgctgccg

SEQ ID NO: 136861 - DNA, 17 bp, Arabidopsis thaliana
tcactcagtttgttctc

SEQ ID NO: 136862 - DNA, 17 bp, Arabidopsis thaliana
tcactcagttttatgcc

SEQ ID NO: 136863 - DNA, 17 bp, Arabidopsis thaliana
tcactcataggattgtg

SEQ ID NO: 136864 - DNA, 17 bp, Arabidopsis thaliana
tcactcatcaaagtaga

SEQ ID NO: 136865 - DNA, 17 bp, Arabidopsis thaliana
tcactcatccaccatct

SEQ ID NO: 136866 - DNA, 17 bp, Arabidopsis thaliana
tcactcatctcgagtgg

SEQ ID NO: 136867 - DNA, 17 bp, Arabidopsis thaliana
tcactcatcttcggacg

SEQ ID NO: 136868 - DNA, 17 bp, Arabidopsis thaliana
tcactcatgataactcg

SEQ ID NO: 136869 - DNA, 17 bp, Arabidopsis thaliana
tcactcatgccagatag

SEQ ID NO: 136870 - DNA, 17 bp, Arabidopsis thaliana
tcactcatggattcgtg

SEQ ID NO: 136871 - DNA, 17 bp, Arabidopsis thaliana
tcactcattagctcgcg

SEQ ID NO: 136872 - DNA, 17 bp, Arabidopsis thaliana
tcactcattcaacttag

SEQ ID NO: 136873 - DNA, 17 bp, Arabidopsis thaliana
tcactcattcgcacagt

SEQ ID NO: 136874 - DNA, 17 bp, Arabidopsis thaliana
tcactcattgacttttt

SEQ ID NO: 136875 - DNA, 17 bp, Arabidopsis thaliana
tcactcatttcagcgaa

SEQ ID NO: 136876 - DNA, 17 bp, Arabidopsis thaliana
tcactcattttgattat

SEQ ID NO: 136877 - DNA, 17 bp, Arabidopsis thaliana
tcactcattttggtttc

SEQ ID NO: 136878 - DNA, 17 bp, Arabidopsis thaliana
tcactccaaaatgctaa

SEQ ID NO: 136879 - DNA, 17 bp, Arabidopsis thaliana
tcactccaggtcgccat

SEQ ID NO: 136880 - DNA, 17 bp, Arabidopsis thaliana
tcactcccggacttttg

SEQ ID NO: 136881 - DNA, 17 bp, Arabidopsis thaliana
tcactccctgaaaaacc

SEQ ID NO: 136882 - DNA, 17 bp, Arabidopsis thaliana
tcactccgtggagcacg

SEQ ID NO: 136883 - DNA, 17 bp, Arabidopsis thaliana
tcactccgttaattttt

SEQ ID NO: 136884 - DNA, 17 bp, Arabidopsis thaliana
tcactcctccaaataca

SEQ ID NO: 136885 - DNA, 17 bp, Arabidopsis thaliana
tcactcctgtctatttt

SEQ ID NO: 136886 - DNA, 17 bp, Arabidopsis thaliana
tcactcctgttgcagct

SEQ ID NO: 136887 - DNA, 17 bp, Arabidopsis thaliana
tcactccttttccacga

SEQ ID NO: 136888 - DNA, 17 bp, Arabidopsis thaliana
tcactcgaacaggcgat

SEQ ID NO: 136889 - DNA, 17 bp, Arabidopsis thaliana
tcactcgaacccgactt

SEQ ID NO: 136890 - DNA, 17 bp, Arabidopsis thaliana
tcactcgaaccggcgac

SEQ ID NO: 136891 - DNA, 17 bp, Arabidopsis thaliana
tcactcgaatgatacgg

SEQ ID NO: 136892 - DNA, 17 bp, Arabidopsis thaliana
tcactcgaccactacac

SEQ ID NO: 136893 - DNA, 17 bp, Arabidopsis thaliana
tcactcgaccataacag

SEQ ID NO: 136894 - DNA, 17 bp, Arabidopsis thaliana
tcactcgaccctctact

SEQ ID NO: 136895 - DNA, 17 bp, Arabidopsis thaliana
tcactcgaccgcggctc

SEQ ID NO: 136896 - DNA, 17 bp, Arabidopsis thaliana
tcactcgaccgcggtgc

SEQ ID NO: 136897 - DNA, 17 bp, Arabidopsis thaliana
tcactcgaccggacact

SEQ ID NO: 136898 - DNA, 17 bp, Arabidopsis thaliana
tcactcgacctcatcca

SEQ ID NO: 136899 - DNA, 17 bp, Arabidopsis thaliana
tcactcgacctcctact

SEQ ID NO: 136900 - DNA, 17 bp, Arabidopsis thaliana
tcactcgacctctggtg

SEQ ID NO: 136901 - DNA, 17 bp, Arabidopsis thaliana
tcactcgacgacaggac

SEQ ID NO: 136902 - DNA, 17 bp, Arabidopsis thaliana
tcactcgatcgcaaggc

SEQ ID NO: 136903 - DNA, 17 bp, Arabidopsis thaliana
tcactcgatcgctacct

SEQ ID NO: 136904 - DNA, 17 bp, Arabidopsis thaliana
tcactcgatctccaggt

SEQ ID NO: 136905 - DNA, 17 bp, Arabidopsis thaliana
tcactcgcatggttccg

SEQ ID NO: 136906 - DNA, 17 bp, Arabidopsis thaliana
tcactcgccgatgatgg

SEQ ID NO: 136907 - DNA, 17 bp, Arabidopsis thaliana
tcactcgccgattttgg

SEQ ID NO: 136908 - DNA, 17 bp, Arabidopsis thaliana
tcactcgcctgtagccc

SEQ ID NO: 136909 - DNA, 17 bp, Arabidopsis thaliana
tcactcgcggtgccttg

SEQ ID NO: 136910 - DNA, 17 bp, Arabidopsis thaliana
tcactcgctaagtgttc

SEQ ID NO: 136911 - DNA, 17 bp, Arabidopsis thaliana
tcactcggacatttgct

SEQ ID NO: 136912 - DNA, 17 bp, Arabidopsis thaliana
tcactcggacggttgtc

SEQ ID NO: 136913 - DNA, 17 bp, Arabidopsis thaliana
tcactcggcacgggtgt

SEQ ID NO: 136914 - DNA, 17 bp, Arabidopsis thaliana
tcactcgggaccattgc

SEQ ID NO: 136915 - DNA, 17 bp, Arabidopsis thaliana
tcactcgggagttgggg

SEQ ID NO: 136916 - DNA, 17 bp, Arabidopsis thaliana
tcactcgggtgaccgta

SEQ ID NO: 136917 - DNA, 17 bp, Arabidopsis thaliana
tcactcgtaacgggcct

SEQ ID NO: 136918 - DNA, 17 bp, Arabidopsis thaliana
tcactcgtcgcagactg

SEQ ID NO: 136919 - DNA, 17 bp, Arabidopsis thaliana
tcactcgtgccattctt

SEQ ID NO: 136920 - DNA, 17 bp, Arabidopsis thaliana
tcactcgttgtcgaaaa

SEQ ID NO: 136921 - DNA, 17 bp, Arabidopsis thaliana
tcactcgttgtgatgtg

SEQ ID NO: 136922 - DNA, 17 bp, Arabidopsis thaliana
tcactcgttgtgtgttg

SEQ ID NO: 136923 - DNA, 17 bp, Arabidopsis thaliana
tcactctaccgtgctct

SEQ ID NO: 136924 - DNA, 17 bp, Arabidopsis thaliana
tcactctagccttctgt

SEQ ID NO: 136925 - DNA, 17 bp, Arabidopsis thaliana
tcactctcacgtaatct

SEQ ID NO: 136926 - DNA, 17 bp, Arabidopsis thaliana
tcactctcctttgccga

SEQ ID NO: 136927 - DNA, 17 bp, Arabidopsis thaliana
tcactctcgttgtcagc

SEQ ID NO: 136928 - DNA, 17 bp, Arabidopsis thaliana
tcactctcttaaggtag

SEQ ID NO: 136929 - DNA, 17 bp, Arabidopsis thaliana
tcactctggttgttggt

SEQ ID NO: 136930 - DNA, 17 bp, Arabidopsis thaliana
tcactgaacatcatcaa

SEQ ID NO: 136931 - DNA, 17 bp, Arabidopsis thaliana
tcactgaaccaatggtg

SEQ ID NO: 136932 - DNA, 17 bp, Arabidopsis thaliana
tcactgaacgagattag

SEQ ID NO: 136933 - DNA, 17 bp, Arabidopsis thaliana
tcactgaacggggttag

SEQ ID NO: 136934 - DNA, 17 bp, Arabidopsis thaliana
tcactgaatgagccgtg

SEQ ID NO: 136935 - DNA, 17 bp, Arabidopsis thaliana
tcactgaccaagcattt

SEQ ID NO: 136936 - DNA, 17 bp, Arabidopsis thaliana
tcactgacctcttcggg

SEQ ID NO: 136937 - DNA, 17 bp, Arabidopsis thaliana
tcactgaccttacctca

SEQ ID NO: 136938 - DNA, 17 bp, Arabidopsis thaliana
tcactgagaagcatttc

SEQ ID NO: 136939 - DNA, 17 bp, Arabidopsis thaliana
tcactgagaatgtcggc

SEQ ID NO: 136940 - DNA, 17 bp, Arabidopsis thaliana
tcactgagattcagccc

SEQ ID NO: 136941 - DNA, 17 bp, Arabidopsis thaliana
tcactgagatttgatcg

SEQ ID NO: 136942 - DNA, 17 bp, Arabidopsis thaliana
tcactgagcaggctcat

SEQ ID NO: 136943 - DNA, 17 bp, Arabidopsis thaliana
tcactgagtcaaccaga

SEQ ID NO: 136944 - DNA, 17 bp, Arabidopsis thaliana
tcactgatcaatgggtt

SEQ ID NO: 136945 - DNA, 17 bp, Arabidopsis thaliana
tcactgatcgagcgctc

SEQ ID NO: 136946 - DNA, 17 bp, Arabidopsis thaliana
tcactgatctcgaaagc

SEQ ID NO: 136947 - DNA, 17 bp, Arabidopsis thaliana
tcactgatggaaatgcc

SEQ ID NO: 136948 - DNA, 17 bp, Arabidopsis thaliana
tcactgattatagttgc

SEQ ID NO: 136949 - DNA, 17 bp, Arabidopsis thaliana
tcactgattccgcttta

SEQ ID NO: 136950 - DNA, 17 bp, Arabidopsis thaliana
tcactgcaacgcctttt

SEQ ID NO: 136951 - DNA, 17 bp, Arabidopsis thaliana
tcactgcaacttgatgt

SEQ ID NO: 136952 - DNA, 17 bp, Arabidopsis thaliana
tcactgcaagtactgac

SEQ ID NO: 136953 - DNA, 17 bp, Arabidopsis thaliana
tcactgcaatcggatct

SEQ ID NO: 136954 - DNA, 17 bp, Arabidopsis thaliana
tcactgcacgccaagaa

SEQ ID NO: 136955 - DNA, 17 bp, Arabidopsis thaliana
tcactgcagagatttga

SEQ ID NO: 136956 - DNA, 17 bp, Arabidopsis thaliana
tcactgcagatttcgaa

SEQ ID NO: 136957 - DNA, 17 bp, Arabidopsis thaliana
tcactgcagtgctacgg

SEQ ID NO: 136958 - DNA, 17 bp, Arabidopsis thaliana
tcactgcagttgaaccg

SEQ ID NO: 136959 - DNA, 17 bp, Arabidopsis thaliana
tcactgctaagcggtca

SEQ ID NO: 136960 - DNA, 17 bp, Arabidopsis thaliana
tcactgctctatctgcc

SEQ ID NO: 136961 - DNA, 17 bp, Arabidopsis thaliana
tcactgctctatctgtc

SEQ ID NO: 136962 - DNA, 17 bp, Arabidopsis thaliana
tcactgctgcgccaagg

SEQ ID NO: 136963 - DNA, 17 bp, Arabidopsis thaliana
tcactgcttatggaccc

SEQ ID NO: 136964 - DNA, 17 bp, Arabidopsis thaliana
tcactgcttctttgagg

SEQ ID NO: 136965 - DNA, 17 bp, Arabidopsis thaliana
tcactgcttctttgatg

SEQ ID NO: 136966 - DNA, 17 bp, Arabidopsis thaliana
tcactgcttggcatggt

SEQ ID NO: 136967 - DNA, 17 bp, Arabidopsis thaliana
tcactggaagggattaa

SEQ ID NO: 136968 - DNA, 17 bp, Arabidopsis thaliana
tcactggaagggattag

SEQ ID NO: 136969 - DNA, 17 bp, Arabidopsis thaliana
tcactggaagggattgg

SEQ ID NO: 136970 - DNA, 17 bp, Arabidopsis thaliana
tcactggaccgctgaca

SEQ ID NO: 136971 - DNA, 17 bp, Arabidopsis thaliana
tcactggaccgggtggg

SEQ ID NO: 136972 - DNA, 17 bp, Arabidopsis thaliana
tcactggatcatgggtt

SEQ ID NO: 136973 - DNA, 17 bp, Arabidopsis thaliana
tcactggattcatggac

SEQ ID NO: 136974 - DNA, 17 bp, Arabidopsis thaliana
tcactggattcatgggc

SEQ ID NO: 136975 - DNA, 17 bp, Arabidopsis thaliana
tcactggcgtcggaatc

SEQ ID NO: 136976 - DNA, 17 bp, Arabidopsis thaliana
tcactgggccaacagct

SEQ ID NO: 136977 - DNA, 17 bp, Arabidopsis thaliana
tcactgggtgtgagatg

SEQ ID NO: 136978 - DNA, 17 bp, Arabidopsis thaliana
tcactggtataatgatg

SEQ ID NO: 136979 - DNA, 17 bp, Arabidopsis thaliana
tcactggtatgatgatg

SEQ ID NO: 136980 - DNA, 17 bp, Arabidopsis thaliana
tcactggtcaactgaag

SEQ ID NO: 136981 - DNA, 17 bp, Arabidopsis thaliana
tcactggtcgacggatc

SEQ ID NO: 136982 - DNA, 17 bp, Arabidopsis thaliana
tcactggtctggtgtta

SEQ ID NO: 136983 - DNA, 17 bp, Arabidopsis thaliana
tcactggtgtgatgatg

SEQ ID NO: 136984 - DNA, 17 bp, Arabidopsis thaliana
tcactgtacaatgcggt

SEQ ID NO: 136985 - DNA, 17 bp, Arabidopsis thaliana
tcactgtatctttgtac

SEQ ID NO: 136986 - DNA, 17 bp, Arabidopsis thaliana
tcactgtccatggcgtt

SEQ ID NO: 136987 - DNA, 17 bp, Arabidopsis thaliana
tcactgtccgtgaatgc

SEQ ID NO: 136988 - DNA, 17 bp, Arabidopsis thaliana
tcactgtcctgatgtta

SEQ ID NO: 136989 - DNA, 17 bp, Arabidopsis thaliana
tcactgtgaaactgcga

SEQ ID NO: 136990 - DNA, 17 bp, Arabidopsis thaliana
tcactgtgacgagagct

SEQ ID NO: 136991 - DNA, 17 bp, Arabidopsis thaliana
tcactgtggacagtgtg

SEQ ID NO: 136992 - DNA, 17 bp, Arabidopsis thaliana
tcactgtgtggtctgga

SEQ ID NO: 136993 - DNA, 17 bp, Arabidopsis thaliana
tcactgttacgcaggaa

SEQ ID NO: 136994 - DNA, 17 bp, Arabidopsis thaliana
tcactgttatggattaa

SEQ ID NO: 136995 - DNA, 17 bp, Arabidopsis thaliana
tcactgttcaggaagaa

SEQ ID NO: 136996 - DNA, 17 bp, Arabidopsis thaliana
tcactgttcatcttgtg

SEQ ID NO: 136997 - DNA, 17 bp, Arabidopsis thaliana
tcactgttccctgggat

SEQ ID NO: 136998 - DNA, 17 bp, Arabidopsis thaliana
tcactgttgcgctgcga

SEQ ID NO: 136999 - DNA, 17 bp, Arabidopsis thaliana
tcactgttgcggtgcgg

SEQ ID NO: 137000 - DNA, 17 bp, Arabidopsis thaliana
tcactgttggtcaacgt

SEQ ID NO: 137001 - DNA, 17 bp, Arabidopsis thaliana
tcactgtttcttccggc

SEQ ID NO: 137002 - DNA, 17 bp, Arabidopsis thaliana
tcactgtttgggattgg

SEQ ID NO: 137003 - DNA, 17 bp, Arabidopsis thaliana
tcactgttttgtcatcg

SEQ ID NO: 137004 - DNA, 17 bp, Arabidopsis thaliana
tcacttaacttccgatg

SEQ ID NO: 137005 - DNA, 17 bp, Arabidopsis thaliana
tcacttagggagaaagc

SEQ ID NO: 137006 - DNA, 17 bp, Arabidopsis thaliana
tcacttatcattgggtg

SEQ ID NO: 137007 - DNA, 17 bp, Arabidopsis thaliana
tcacttatcgatagaca

SEQ ID NO: 137008 - DNA, 17 bp, Arabidopsis thaliana
tcacttatgcggctttc

SEQ ID NO: 137009 - DNA, 17 bp, Arabidopsis thaliana
tcacttatttacattgg

SEQ ID NO: 137010 - DNA, 17 bp, Arabidopsis thaliana
tcacttcaggggcaaat

SEQ ID NO: 137011 - DNA, 17 bp, Arabidopsis thaliana
tcacttccgttatcgac

SEQ ID NO: 137012 - DNA, 17 bp, Arabidopsis thaliana
tcacttcctcctctttg

SEQ ID NO: 137013 - DNA, 17 bp, Arabidopsis thaliana
tcacttcgcaagcttcc

SEQ ID NO: 137014 - DNA, 17 bp, Arabidopsis thaliana
tcacttcggattgttag

SEQ ID NO: 137015 - DNA, 17 bp, Arabidopsis thaliana
tcacttcggctgctatt

SEQ ID NO: 137016 - DNA, 17 bp, Arabidopsis thaliana
tcacttcggtgcgttcc

SEQ ID NO: 137017 - DNA, 17 bp, Arabidopsis thaliana
tcacttctaagttcggt

SEQ ID NO: 137018 - DNA, 17 bp, Arabidopsis thaliana
tcacttctcatcaagcg

SEQ ID NO: 137019 - DNA, 17 bp, Arabidopsis thaliana
tcacttctccccgaagg

SEQ ID NO: 137020 - DNA, 17 bp, Arabidopsis thaliana
tcacttctccgatgaag

SEQ ID NO: 137021 - DNA, 17 bp, Arabidopsis thaliana
tcacttctccggtcttc

SEQ ID NO: 137022 - DNA, 17 bp, Arabidopsis thaliana
tcacttctcgtggacca

SEQ ID NO: 137023 - DNA, 17 bp, Arabidopsis thaliana
tcacttctgcaaggctc

SEQ ID NO: 137024 - DNA, 17 bp, Arabidopsis thaliana
tcacttctgcaatgttt

SEQ ID NO: 137025 - DNA, 17 bp, Arabidopsis thaliana
tcacttctgtccagaat

SEQ ID NO: 137026 - DNA, 17 bp, Arabidopsis thaliana
tcacttctttgctcgac

SEQ ID NO: 137027 - DNA, 17 bp, Arabidopsis thaliana
tcacttgaatcctccag

SEQ ID NO: 137028 - DNA, 17 bp, Arabidopsis thaliana
tcacttgacatgtgttg

SEQ ID NO: 137029 - DNA, 17 bp, Arabidopsis thaliana
tcacttgacgaatacct

SEQ ID NO: 137030 - DNA, 17 bp, Arabidopsis thaliana
tcacttgactctagtcc

SEQ ID NO: 137031 - DNA, 17 bp, Arabidopsis thaliana
tcacttgatcgtgacac

SEQ ID NO: 137032 - DNA, 17 bp, Arabidopsis thaliana
tcacttgatgatgttct

SEQ ID NO: 137033 - DNA, 17 bp, Arabidopsis thaliana
tcacttgattcattttt

SEQ ID NO: 137034 - DNA, 17 bp, Arabidopsis thaliana
tcacttgattggtctac

SEQ ID NO: 137035 - DNA, 17 bp, Arabidopsis thaliana
tcacttgcaatgtttct

SEQ ID NO: 137036 - DNA, 17 bp, Arabidopsis thaliana
tcacttgcctgctattg

SEQ ID NO: 137037 - DNA, 17 bp, Arabidopsis thaliana
tcacttgcgattgaact

SEQ ID NO: 137038 - DNA, 17 bp, Arabidopsis thaliana
tcacttgctcctaaatg

SEQ ID NO: 137039 - DNA, 17 bp, Arabidopsis thaliana
tcacttggcacgagata

SEQ ID NO: 137040 - DNA, 17 bp, Arabidopsis thaliana
tcacttggccgacaggc

SEQ ID NO: 137041 - DNA, 17 bp, Arabidopsis thaliana
tcacttggggttgggtc

SEQ ID NO: 137042 - DNA, 17 bp, Arabidopsis thaliana
tcacttggtgcagggcg

SEQ ID NO: 137043 - DNA, 17 bp, Arabidopsis thaliana
tcacttggtgcaggtcg

SEQ ID NO: 137044 - DNA, 17 bp, Arabidopsis thaliana
tcacttgtagattattg

SEQ ID NO: 137045 - DNA, 17 bp, Arabidopsis thaliana
tcacttgtctaatgcgt

SEQ ID NO: 137046 - DNA, 17 bp, Arabidopsis thaliana
tcacttgttatccttga

SEQ ID NO: 137047 - DNA, 17 bp, Arabidopsis thaliana
tcacttgtttccctcgc

SEQ ID NO: 137048 - DNA, 17 bp, Arabidopsis thaliana
tcactttaatgcgctgt

SEQ ID NO: 137049 - DNA, 17 bp, Arabidopsis thaliana
tcactttagccacttac

SEQ ID NO: 137050 - DNA, 17 bp, Arabidopsis thaliana
tcactttagtggttcga

SEQ ID NO: 137051 - DNA, 17 bp, Arabidopsis thaliana
tcactttatctggcatg

SEQ ID NO: 137052 - DNA, 17 bp, Arabidopsis thaliana
tcactttcatacaggtg

SEQ ID NO: 137053 - DNA, 17 bp, Arabidopsis thaliana
tcactttcgatcggagt

SEQ ID NO: 137054 - DNA, 17 bp, Arabidopsis thaliana
tcactttctcgcttcag

SEQ ID NO: 137055 - DNA, 17 bp, Arabidopsis thaliana
tcactttctgagtccgg

SEQ ID NO: 137056 - DNA, 17 bp, Arabidopsis thaliana
tcactttgaggagtgcg

SEQ ID NO: 137057 - DNA, 17 bp, Arabidopsis thaliana
tcactttgcgaattcac

SEQ ID NO: 137058 - DNA, 17 bp, Arabidopsis thaliana
tcactttgcggatggtt

SEQ ID NO: 137059 - DNA, 17 bp, Arabidopsis thaliana
tcactttgggcttggtc

SEQ ID NO: 137060 - DNA, 17 bp, Arabidopsis thaliana
tcactttggggtttgtc

SEQ ID NO: 137061 - DNA, 17 bp, Arabidopsis thaliana
tcactttggtaaactac

SEQ ID NO: 137062 - DNA, 17 bp, Arabidopsis thaliana
tcactttgtcgagtcac

SEQ ID NO: 137063 - DNA, 17 bp, Arabidopsis thaliana
tcactttgtgtcccttc

SEQ ID NO: 137064 - DNA, 17 bp, Arabidopsis thaliana
tcactttgtgttgcttc

SEQ ID NO: 137065 - DNA, 17 bp, Arabidopsis thaliana
tcactttgttagttttg

SEQ ID NO: 137066 - DNA, 17 bp, Arabidopsis thaliana
tcactttgttgtgctca

SEQ ID NO: 137067 - DNA, 17 bp, Arabidopsis thaliana
tcacttttaagctagct

SEQ ID NO: 137068 - DNA, 17 bp, Arabidopsis thaliana
tcacttttccatgagga

SEQ ID NO: 137069 - DNA, 17 bp, Arabidopsis thaliana
tcacttttgtttcttgg

SEQ ID NO: 137070 - DNA, 17 bp, Arabidopsis thaliana
tcactttttgtgctcag

SEQ ID NO: 137071 - DNA, 17 bp, Arabidopsis thaliana
tcacttttttggttgct

SEQ ID NO: 137072 - DNA, 17 bp, Arabidopsis thaliana
tcagaaaaccacagttg

SEQ ID NO: 137073 - DNA, 17 bp, Arabidopsis thaliana
tcagaaaaccgcagcgg

SEQ ID NO: 137074 - DNA, 17 bp, Arabidopsis thaliana
tcagaaaaggcacttac

SEQ ID NO: 137075 - DNA, 17 bp, Arabidopsis thaliana
tcagaaaaggttgcttg

SEQ ID NO: 137076 - DNA, 17 bp, Arabidopsis thaliana
tcagaaaatgaattgtc

SEQ ID NO: 137077 - DNA, 17 bp, Arabidopsis thaliana
tcagaaaccatcaaagg

SEQ ID NO: 137078 - DNA, 17 bp, Arabidopsis thaliana
tcagaaaccatccaagg

SEQ ID NO: 137079 - DNA, 17 bp, Arabidopsis thaliana
tcagaaaccgtctttgc

SEQ ID NO: 137080 - DNA, 17 bp, Arabidopsis thaliana
tcagaaactgcagggac

SEQ ID NO: 137081 - DNA, 17 bp, Arabidopsis thaliana
tcagaaactgtgtgtgc

SEQ ID NO: 137082 - DNA, 17 bp, Arabidopsis thaliana
tcagaaagcaggaggat

SEQ ID NO: 137083 - DNA, 17 bp, Arabidopsis thaliana
tcagaaagcccaaagaa

SEQ ID NO: 137084 - DNA, 17 bp, Arabidopsis thaliana
tcagaaagcccaaagac

SEQ ID NO: 137085 - DNA, 17 bp, Arabidopsis thaliana
tcagaaagcccaaagcc

SEQ ID NO: 137086 - DNA, 17 bp, Arabidopsis thaliana
tcagaaatcaagttgcg

SEQ ID NO: 137087 - DNA, 17 bp, Arabidopsis thaliana
tcagaaatgactgagtt

SEQ ID NO: 137088 - DNA, 17 bp, Arabidopsis thaliana
tcagaaatgcaggcggc

SEQ ID NO: 137089 - DNA, 17 bp, Arabidopsis thaliana
tcagaaatgccactttg

SEQ ID NO: 137090 - DNA, 17 bp, Arabidopsis thaliana
tcagaaatttgcgtgat

SEQ ID NO: 137091 - DNA, 17 bp, Arabidopsis thaliana
tcagaaatttgcgtggt

SEQ ID NO: 137092 - DNA, 17 bp, Arabidopsis thaliana
tcagaacaacagcccac

SEQ ID NO: 137093 - DNA, 17 bp, Arabidopsis thaliana
tcagaacagcttgcgat

SEQ ID NO: 137094 - DNA, 17 bp, Arabidopsis thaliana
tcagaaccactatggcc

SEQ ID NO: 137095 - DNA, 17 bp, Arabidopsis thaliana
tcagaacgggtcctaaa

SEQ ID NO: 137096 - DNA, 17 bp, Arabidopsis thaliana
tcagaactcagacttct

SEQ ID NO: 137097 - DNA, 17 bp, Arabidopsis thaliana
tcagaactccgcagcta

SEQ ID NO: 137098 - DNA, 17 bp, Arabidopsis thaliana
tcagaactccgcagtta

SEQ ID NO: 137099 - DNA, 17 bp, Arabidopsis thaliana
tcagaactggtacggaa

SEQ ID NO: 137100 - DNA, 17 bp, Arabidopsis thaliana
tcagaactggtacggac

SEQ ID NO: 137101 - DNA, 17 bp, Arabidopsis thaliana
tcagaactgtacggaca

SEQ ID NO: 137102 - DNA, 17 bp, Arabidopsis thaliana
tcagaacttatttacaa

SEQ ID NO: 137103 - DNA, 17 bp, Arabidopsis thaliana
tcagaagacaagtgacg

SEQ ID NO: 137104 - DNA, 17 bp, Arabidopsis thaliana
tcagaagaccaaactga

SEQ ID NO: 137105 - DNA, 17 bp, Arabidopsis thaliana
tcagaagatggtacgtc

SEQ ID NO: 137106 - DNA, 17 bp, Arabidopsis thaliana
tcagaagcgggtgagga

SEQ ID NO: 137107 - DNA, 17 bp, Arabidopsis thaliana
tcagaagctgcacgact

SEQ ID NO: 137108 - DNA, 17 bp, Arabidopsis thaliana
tcagaaggaagtgtcgt

SEQ ID NO: 137109 - DNA, 17 bp, Arabidopsis thaliana
tcagaaggatagttagg

SEQ ID NO: 137110 - DNA, 17 bp, Arabidopsis thaliana
tcagaaggcaacataat

SEQ ID NO: 137111 - DNA, 17 bp, Arabidopsis thaliana
tcagaaggcaatgactt

SEQ ID NO: 137112 - DNA, 17 bp, Arabidopsis thaliana
tcagaaggtagtccggt

SEQ ID NO: 137113 - DNA, 17 bp, Arabidopsis thaliana
tcagaaggtcgtgggtt

SEQ ID NO: 137114 - DNA, 17 bp, Arabidopsis thaliana
tcagaaggttgcgtgtt

SEQ ID NO: 137115 - DNA, 17 bp, Arabidopsis thaliana
tcagaagtcttcaagtc

SEQ ID NO: 137116 - DNA, 17 bp, Arabidopsis thaliana
tcagaagtgcgtcagaa

SEQ ID NO: 137117 - DNA, 17 bp, Arabidopsis thaliana
tcagaatcattgcaacc

SEQ ID NO: 137118 - DNA, 17 bp, Arabidopsis thaliana
tcagaatcgggctacta

SEQ ID NO: 137119 - DNA, 17 bp, Arabidopsis thaliana
tcagaatcggtgtcaca

SEQ ID NO: 137120 - DNA, 17 bp, Arabidopsis thaliana
tcagaatcgtccttctt

SEQ ID NO: 137121 - DNA, 17 bp, Arabidopsis thaliana
tcagaatctaacgttct

SEQ ID NO: 137122 - DNA, 17 bp, Arabidopsis thaliana
tcagaatctaagcccta

SEQ ID NO: 137123 - DNA, 17 bp, Arabidopsis thaliana
tcagaatcttcgaaaca

SEQ ID NO: 137124 - DNA, 17 bp, Arabidopsis thaliana
tcagaatcttcgaaacg

SEQ ID NO: 137125 - DNA, 17 bp, Arabidopsis thaliana
tcagaatcttcgctagg

SEQ ID NO: 137126 - DNA, 17 bp, Arabidopsis thaliana
tcagaatcttgagatgg

SEQ ID NO: 137127 - DNA, 17 bp, Arabidopsis thaliana
tcagaatcttgatgatg

SEQ ID NO: 137128 - DNA, 17 bp, Arabidopsis thaliana
tcagaatcttgtagacc

SEQ ID NO: 137129 - DNA, 17 bp, Arabidopsis thaliana
tcagaatgatcatcccc

SEQ ID NO: 137130 - DNA, 17 bp, Arabidopsis thaliana
tcagaatgatggtcgtc

SEQ ID NO: 137131 - DNA, 17 bp, Arabidopsis thaliana
tcagaatgttgatgatg

SEQ ID NO: 137132 - DNA, 17 bp, Arabidopsis thaliana
tcagacaccatcgctgg

SEQ ID NO: 137133 - DNA, 17 bp, Arabidopsis thaliana
tcagacacctgagcagg

SEQ ID NO: 137134 - DNA, 17 bp, Arabidopsis thaliana
tcagacacggtggatga

SEQ ID NO: 137135 - DNA, 17 bp, Arabidopsis thaliana
tcagacacggttaagtg

SEQ ID NO: 137136 - DNA, 17 bp, Arabidopsis thaliana
tcagacagcgtgtgtga

SEQ ID NO: 137137 - DNA, 17 bp, Arabidopsis thaliana
tcagacaggttgcctga

SEQ ID NO: 137138 - DNA, 17 bp, Arabidopsis thaliana
tcagacagttgcggttt

SEQ ID NO: 137139 - DNA, 17 bp, Arabidopsis thaliana
tcagacatcaaatttgg

SEQ ID NO: 137140 - DNA, 17 bp, Arabidopsis thaliana
tcagacatcatcttcac

SEQ ID NO: 137141 - DNA, 17 bp, Arabidopsis thaliana
tcagacatggtgcaaat

SEQ ID NO: 137142 - DNA, 17 bp, Arabidopsis thaliana
tcagaccaacatgggtg

SEQ ID NO: 137143 - DNA, 17 bp, Arabidopsis thaliana
tcagaccaccattcatg

SEQ ID NO: 137144 - DNA, 17 bp, Arabidopsis thaliana
tcagaccaggcttcatt

SEQ ID NO: 137145 - DNA, 17 bp, Arabidopsis thaliana
tcagaccaggtttcatt

SEQ ID NO: 137146 - DNA, 17 bp, Arabidopsis thaliana
tcagacccaaacgtttg

SEQ ID NO: 137147 - DNA, 17 bp, Arabidopsis thaliana
tcagaccccacttctga

SEQ ID NO: 137148 - DNA, 17 bp, Arabidopsis thaliana
tcagaccctgttgagct

SEQ ID NO: 137149 - DNA, 17 bp, Arabidopsis thaliana
tcagaccgcctgcattt

SEQ ID NO: 137150 - DNA, 17 bp, Arabidopsis thaliana
tcagaccggctgcattt

SEQ ID NO: 137151 - DNA, 17 bp, Arabidopsis thaliana
tcagaccgtgatggtgg

SEQ ID NO: 137152 - DNA, 17 bp, Arabidopsis thaliana
tcagaccgttcaatcac

SEQ ID NO: 137153 - DNA, 17 bp, Arabidopsis thaliana
tcagacctcagcctgct

SEQ ID NO: 137154 - DNA, 17 bp, Arabidopsis thaliana
tcagacctgatgaagat

SEQ ID NO: 137155 - DNA, 17 bp, Arabidopsis thaliana
tcagacctggtgaagaa

SEQ ID NO: 137156 - DNA, 17 bp, Arabidopsis thaliana
tcagacctggtgaagat

SEQ ID NO: 137157 - DNA, 17 bp, Arabidopsis thaliana
tcagacctttgtcagtt

SEQ ID NO: 137158 - DNA, 17 bp, Arabidopsis thaliana
tcagacgagccaatctt

SEQ ID NO: 137159 - DNA, 17 bp, Arabidopsis thaliana
tcagacgatcaacgcag

SEQ ID NO: 137160 - DNA, 17 bp, Arabidopsis thaliana
tcagacgatcatcatgt

SEQ ID NO: 137161 - DNA, 17 bp, Arabidopsis thaliana
tcagacgatcggcctgt

SEQ ID NO: 137162 - DNA, 17 bp, Arabidopsis thaliana
tcagacgatctctctct

SEQ ID NO: 137163 - DNA, 17 bp, Arabidopsis thaliana
tcagacgcaaggagagt

SEQ ID NO: 137164 - DNA, 17 bp, Arabidopsis thaliana
tcagacgcttgcgaaca

SEQ ID NO: 137165 - DNA, 17 bp, Arabidopsis thaliana
tcagacggtgattgcga

SEQ ID NO: 137166 - DNA, 17 bp, Arabidopsis thaliana
tcagacggttttgttcg

SEQ ID NO: 137167 - DNA, 17 bp, Arabidopsis thaliana
tcagactacaagcgttg

SEQ ID NO: 137168 - DNA, 17 bp, Arabidopsis thaliana
tcagactaccagttcca

SEQ ID NO: 137169 - DNA, 17 bp, Arabidopsis thaliana
tcagactaggacgatct

SEQ ID NO: 137170 - DNA, 17 bp, Arabidopsis thaliana
tcagactaggacgattt

SEQ ID NO: 137171 - DNA, 17 bp, Arabidopsis thaliana
tcagactagtggacaag

SEQ ID NO: 137172 - DNA, 17 bp, Arabidopsis thaliana
tcagactcacttcctat

SEQ ID NO: 137173 - DNA, 17 bp, Arabidopsis thaliana
tcagactcattggacta

SEQ ID NO: 137174 - DNA, 17 bp, Arabidopsis thaliana
tcagactcctgtcagtt

SEQ ID NO: 137175 - DNA, 17 bp, Arabidopsis thaliana
tcagactctcggcaacg

SEQ ID NO: 137176 - DNA, 17 bp, Arabidopsis thaliana
tcagactgactaactcc

SEQ ID NO: 137177 - DNA, 17 bp, Arabidopsis thaliana
tcagactggtgatggct

SEQ ID NO: 137178 - DNA, 17 bp, Arabidopsis thaliana
tcagactgtgaaactgc

SEQ ID NO: 137179 - DNA, 17 bp, Arabidopsis thaliana
tcagacttatttacaat

SEQ ID NO: 137180 - DNA, 17 bp, Arabidopsis thaliana
tcagacttatttacgat

SEQ ID NO: 137181 - DNA, 17 bp, Arabidopsis thaliana
tcagacttcagtgcttg

SEQ ID NO: 137182 - DNA, 17 bp, Arabidopsis thaliana
tcagacttcatttgcgg

SEQ ID NO: 137183 - DNA, 17 bp, Arabidopsis thaliana
tcagacttgaacttcga

SEQ ID NO: 137184 - DNA, 17 bp, Arabidopsis thaliana
tcagacttgcgcgtgat

SEQ ID NO: 137185 - DNA, 17 bp, Arabidopsis thaliana
tcagacttgctcattgc

SEQ ID NO: 137186 - DNA, 17 bp, Arabidopsis thaliana
tcagacttggctagttg

SEQ ID NO: 137187 - DNA, 17 bp, Arabidopsis thaliana
tcagacttgggtttgat

SEQ ID NO: 137188 - DNA, 17 bp, Arabidopsis thaliana
tcagacttggtgaagat

SEQ ID NO: 137189 - DNA, 17 bp, Arabidopsis thaliana
tcagactttgtcctctt

SEQ ID NO: 137190 - DNA, 17 bp, Arabidopsis thaliana
tcagagaacttctctag

SEQ ID NO: 137191 - DNA, 17 bp, Arabidopsis thaliana
tcagagaactttacgtg

SEQ ID NO: 137192 - DNA, 17 bp, Arabidopsis thaliana
tcagagaagcattaaac

SEQ ID NO: 137193 - DNA, 17 bp, Arabidopsis thaliana
tcagagaatcgacttcc

SEQ ID NO: 137194 - DNA, 17 bp, Arabidopsis thaliana
tcagagaatctgtgcag

SEQ ID NO: 137195 - DNA, 17 bp, Arabidopsis thaliana
tcagagacaacgtgtca

SEQ ID NO: 137196 - DNA, 17 bp, Arabidopsis thaliana
tcagagacatatggacc

SEQ ID NO: 137197 - DNA, 17 bp, Arabidopsis thaliana
tcagagaccaacgccct

SEQ ID NO: 137198 - DNA, 17 bp, Arabidopsis thaliana
tcagagacgtaggctta

SEQ ID NO: 137199 - DNA, 17 bp, Arabidopsis thaliana
tcagagacgtttctagt

SEQ ID NO: 137200 - DNA, 17 bp, Arabidopsis thaliana
tcagagactaaaaattg

SEQ ID NO: 137201 - DNA, 17 bp, Arabidopsis thaliana
tcagagactaacctcga

SEQ ID NO: 137202 - DNA, 17 bp, Arabidopsis thaliana
tcagagactctctttca

SEQ ID NO: 137203 - DNA, 17 bp, Arabidopsis thaliana
tcagagactcttcaatg

SEQ ID NO: 137204 - DNA, 17 bp, Arabidopsis thaliana
tcagagactctttcatc

SEQ ID NO: 137205 - DNA, 17 bp, Arabidopsis thaliana
tcagagactggtatcag

SEQ ID NO: 137206 - DNA, 17 bp, Arabidopsis thaliana
tcagagacttgtgttag

SEQ ID NO: 137207 - DNA, 17 bp, Arabidopsis thaliana
tcagagagccttccccc

SEQ ID NO: 137208 - DNA, 17 bp, Arabidopsis thaliana
tcagagagggacgcaac

SEQ ID NO: 137209 - DNA, 17 bp, Arabidopsis thaliana
tcagagagtgtgagaga

SEQ ID NO: 137210 - DNA, 17 bp, Arabidopsis thaliana
tcagagagtttactcgt

SEQ ID NO: 137211 - DNA, 17 bp, Arabidopsis thaliana
tcagagatacaagtgcc

SEQ ID NO: 137212 - DNA, 17 bp, Arabidopsis thaliana
tcagagatcgtcgtcga

SEQ ID NO: 137213 - DNA, 17 bp, Arabidopsis thaliana
tcagagatctattcgtc

SEQ ID NO: 137214 - DNA, 17 bp, Arabidopsis thaliana
tcagagatctcttctct

SEQ ID NO: 137215 - DNA, 17 bp, Arabidopsis thaliana
tcagagatgtcaccgga

SEQ ID NO: 137216 - DNA, 17 bp, Arabidopsis thaliana
tcagagattctgggtca

SEQ ID NO: 137217 - DNA, 17 bp, Arabidopsis thaliana
tcagagatttgcagttg

SEQ ID NO: 137218 - DNA, 17 bp, Arabidopsis thaliana
tcagagcatggcctgct

SEQ ID NO: 137219 - DNA, 17 bp, Arabidopsis thaliana
tcagagcccaggcttaa

SEQ ID NO: 137220 - DNA, 17 bp, Arabidopsis thaliana
tcagagccccgtcgtgc

SEQ ID NO: 137221 - DNA, 17 bp, Arabidopsis thaliana
tcagagcctcacgtacg

SEQ ID NO: 137222 - DNA, 17 bp, Arabidopsis thaliana
tcagagcgatgtgccag

SEQ ID NO: 137223 - DNA, 17 bp, Arabidopsis thaliana
tcagagcgatttggatg

SEQ ID NO: 137224 - DNA, 17 bp, Arabidopsis thaliana
tcagagcgctgacccat

SEQ ID NO: 137225 - DNA, 17 bp, Arabidopsis thaliana
tcagagcgtctctccgg

SEQ ID NO: 137226 - DNA, 17 bp, Arabidopsis thaliana
tcagagctacggaagtt

SEQ ID NO: 137227 - DNA, 17 bp, Arabidopsis thaliana
tcagagctctcaggaca

SEQ ID NO: 137228 - DNA, 17 bp, Arabidopsis thaliana
tcagagctctcgggact

SEQ ID NO: 137229 - DNA, 17 bp, Arabidopsis thaliana
tcagaggacctacgcaa

SEQ ID NO: 137230 - DNA, 17 bp, Arabidopsis thaliana
tcagaggacgggttagc

SEQ ID NO: 137231 - DNA, 17 bp, Arabidopsis thaliana
tcagaggacgggttggc

SEQ ID NO: 137232 - DNA, 17 bp, Arabidopsis thaliana
tcagaggatagttgtta

SEQ ID NO: 137233 - DNA, 17 bp, Arabidopsis thaliana
tcagaggatcaccttct

SEQ ID NO: 137234 - DNA, 17 bp, Arabidopsis thaliana
tcagaggatctccgaat

SEQ ID NO: 137235 - DNA, 17 bp, Arabidopsis thaliana
tcagaggatgacggaat

SEQ ID NO: 137236 - DNA, 17 bp, Arabidopsis thaliana
tcagaggatgagggaat

SEQ ID NO: 137237 - DNA, 17 bp, Arabidopsis thaliana
tcagaggatgatgtagg

SEQ ID NO: 137238 - DNA, 17 bp, Arabidopsis thaliana
tcagaggatttgatggt

SEQ ID NO: 137239 - DNA, 17 bp, Arabidopsis thaliana
tcagaggctcgggaaca

SEQ ID NO: 137240 - DNA, 17 bp, Arabidopsis thaliana
tcagaggctgtcaacca

SEQ ID NO: 137241 - DNA, 17 bp, Arabidopsis thaliana
tcagaggcttctctatt

SEQ ID NO: 137242 - DNA, 17 bp, Arabidopsis thaliana
tcagagggacgaatgca

SEQ ID NO: 137243 - DNA, 17 bp, Arabidopsis thaliana
tcagagggaggcaagca

SEQ ID NO: 137244 - DNA, 17 bp, Arabidopsis thaliana
tcagagggatccagtgg

SEQ ID NO: 137245 - DNA, 17 bp, Arabidopsis thaliana
tcagaggggatctccga

SEQ ID NO: 137246 - DNA, 17 bp, Arabidopsis thaliana
tcagaggtatgtgccga

SEQ ID NO: 137247 - DNA, 17 bp, Arabidopsis thaliana
tcagaggtcagcccttt

SEQ ID NO: 137248 - DNA, 17 bp, Arabidopsis thaliana
tcagaggtcgaacattc

SEQ ID NO: 137249 - DNA, 17 bp, Arabidopsis thaliana
tcagagtaccaaagcag

SEQ ID NO: 137250 - DNA, 17 bp, Arabidopsis thaliana
tcagagtagaggtgcgt

SEQ ID NO: 137251 - DNA, 17 bp, Arabidopsis thaliana
tcagagtatctcagagt

SEQ ID NO: 137252 - DNA, 17 bp, Arabidopsis thaliana
tcagagtcaccaaattt

SEQ ID NO: 137253 - DNA, 17 bp, Arabidopsis thaliana
tcagagtcagattgcgt

SEQ ID NO: 137254 - DNA, 17 bp, Arabidopsis thaliana
tcagagtcagggccttt

SEQ ID NO: 137255 - DNA, 17 bp, Arabidopsis thaliana
tcagagtccgaatcgtt

SEQ ID NO: 137256 - DNA, 17 bp, Arabidopsis thaliana
tcagagtccgctgccgt

SEQ ID NO: 137257 - DNA, 17 bp, Arabidopsis thaliana
tcagagtcctcatttac

SEQ ID NO: 137258 - DNA, 17 bp, Arabidopsis thaliana
tcagagtgtgaaactgc

SEQ ID NO: 137259 - DNA, 17 bp, Arabidopsis thaliana
tcagagtgttctccatt

SEQ ID NO: 137260 - DNA, 17 bp, Arabidopsis thaliana
tcagagttggacaatga

SEQ ID NO: 137261 - DNA, 17 bp, Arabidopsis thaliana
tcagagttgtgttcttt

SEQ ID NO: 137262 - DNA, 17 bp, Arabidopsis thaliana
tcagagtttcgagagcg

SEQ ID NO: 137263 - DNA, 17 bp, Arabidopsis thaliana
tcagataaaaggtcgac

SEQ ID NO: 137264 - DNA, 17 bp, Arabidopsis thaliana
tcagataaccaagatgt

SEQ ID NO: 137265 - DNA, 17 bp, Arabidopsis thaliana
tcagataagcgccttag

SEQ ID NO: 137266 - DNA, 17 bp, Arabidopsis thaliana
tcagataatcctggcat

SEQ ID NO: 137267 - DNA, 17 bp, Arabidopsis thaliana
tcagataattggttgca

SEQ ID NO: 137268 - DNA, 17 bp, Arabidopsis thaliana
tcagatacacccggttt

SEQ ID NO: 137269 - DNA, 17 bp, Arabidopsis thaliana
tcagatacacgaatctg

SEQ ID NO: 137270 - DNA, 17 bp, Arabidopsis thaliana
tcagataccgtcctagt

SEQ ID NO: 137271 - DNA, 17 bp, Arabidopsis thaliana
tcagatacgatgtagcc

SEQ ID NO: 137272 - DNA, 17 bp, Arabidopsis thaliana
tcagatactgtaacgct

SEQ ID NO: 137273 - DNA, 17 bp, Arabidopsis thaliana
tcagatactgtgactca

SEQ ID NO: 137274 - DNA, 17 bp, Arabidopsis thaliana
tcagatagaccgatcgt

SEQ ID NO: 137275 - DNA, 17 bp, Arabidopsis thaliana
tcagatagctccgtggg

SEQ ID NO: 137276 - DNA, 17 bp, Arabidopsis thaliana
tcagatagctggaatga

SEQ ID NO: 137277 - DNA, 17 bp, Arabidopsis thaliana
tcagataggaactgctg

SEQ ID NO: 137278 - DNA, 17 bp, Arabidopsis thaliana
tcagatatctcatctgc

SEQ ID NO: 137279 - DNA, 17 bp, Arabidopsis thaliana
tcagatattgctgttgc

SEQ ID NO: 137280 - DNA, 17 bp, Arabidopsis thaliana
tcagatattggtgcggt

SEQ ID NO: 137281 - DNA, 17 bp, Arabidopsis thaliana
tcagatcgtgtatttcc

SEQ ID NO: 137282 - DNA, 17 bp, Arabidopsis thaliana
tcagatctatcttggct

SEQ ID NO: 137283 - DNA, 17 bp, Arabidopsis thaliana
tcagatctgtgtccgtc

SEQ ID NO: 137284 - DNA, 17 bp, Arabidopsis thaliana
tcagatgaagattttac

SEQ ID NO: 137285 - DNA, 17 bp, Arabidopsis thaliana
tcagatgacactctttc

SEQ ID NO: 137286 - DNA, 17 bp, Arabidopsis thaliana
tcagatgagatgacccg

SEQ ID NO: 137287 - DNA, 17 bp, Arabidopsis thaliana
tcagatgaggtgatttg

SEQ ID NO: 137288 - DNA, 17 bp, Arabidopsis thaliana
tcagatgatgggtgatt

SEQ ID NO: 137289 - DNA, 17 bp, Arabidopsis thaliana
tcagatgattaagacgt

SEQ ID NO: 137290 - DNA, 17 bp, Arabidopsis thaliana
tcagatgatttcgccta

SEQ ID NO: 137291 - DNA, 17 bp, Arabidopsis thaliana
tcagatgcctagcaaga

SEQ ID NO: 137292 - DNA, 17 bp, Arabidopsis thaliana
tcagatgcttcgtggcg

SEQ ID NO: 137293 - DNA, 17 bp, Arabidopsis thaliana
tcagatggaccatccaa

SEQ ID NO: 137294 - DNA, 17 bp, Arabidopsis thaliana
tcagatggagatgaccc

SEQ ID NO: 137295 - DNA, 17 bp, Arabidopsis thaliana
tcagatggtgttctccg

SEQ ID NO: 137296 - DNA, 17 bp, Arabidopsis thaliana
tcagatggtttgccaat

SEQ ID NO: 137297 - DNA, 17 bp, Arabidopsis thaliana
tcagatgtccagtcctg

SEQ ID NO: 137298 - DNA, 17 bp, Arabidopsis thaliana
tcagatgtgcaatgtgg

SEQ ID NO: 137299 - DNA, 17 bp, Arabidopsis thaliana
tcagatgtgtgctttgt

SEQ ID NO: 137300 - DNA, 17 bp, Arabidopsis thaliana
tcagatgtttcaaatgt

SEQ ID NO: 137301 - DNA, 17 bp, Arabidopsis thaliana
tcagattaactgatgga

SEQ ID NO: 137302 - DNA, 17 bp, Arabidopsis thaliana
tcagattaactgatggc

SEQ ID NO: 137303 - DNA, 17 bp, Arabidopsis thaliana
tcagattatgagcgtgg

SEQ ID NO: 137304 - DNA, 17 bp, Arabidopsis thaliana
tcagattatggccctgt

SEQ ID NO: 137305 - DNA, 17 bp, Arabidopsis thaliana
tcagattattgctcgac

SEQ ID NO: 137306 - DNA, 17 bp, Arabidopsis thaliana
tcagattattggttgtg

SEQ ID NO: 137307 - DNA, 17 bp, Arabidopsis thaliana
tcagattcaccatggcc

SEQ ID NO: 137308 - DNA, 17 bp, Arabidopsis thaliana
tcagattcactatggct

SEQ ID NO: 137309 - DNA, 17 bp, Arabidopsis thaliana
tcagattcagccttttg

SEQ ID NO: 137310 - DNA, 17 bp, Arabidopsis thaliana
tcagattccacgtgtct

SEQ ID NO: 137311 - DNA, 17 bp, Arabidopsis thaliana
tcagattccactgtcta

SEQ ID NO: 137312 - DNA, 17 bp, Arabidopsis thaliana
tcagattccatcgattt

SEQ ID NO: 137313 - DNA, 17 bp, Arabidopsis thaliana
tcagattcggattctgc

SEQ ID NO: 137314 - DNA, 17 bp, Arabidopsis thaliana
tcagattcgttggagct

SEQ ID NO: 137315 - DNA, 17 bp, Arabidopsis thaliana
tcagattctttaaagac

SEQ ID NO: 137316 - DNA, 17 bp, Arabidopsis thaliana
tcagattgccggatagt

SEQ ID NO: 137317 - DNA, 17 bp, Arabidopsis thaliana
tcagattggcttatcga

SEQ ID NO: 137318 - DNA, 17 bp, Arabidopsis thaliana
tcagatttatttcacaa

SEQ ID NO: 137319 - DNA, 17 bp, Arabidopsis thaliana
tcagatttcgtcatgct

SEQ ID NO: 137320 - DNA, 17 bp, Arabidopsis thaliana
tcagatttcgtcatgga

SEQ ID NO: 137321 - DNA, 17 bp, Arabidopsis thaliana
tcagatttctcgttgtg

SEQ ID NO: 137322 - DNA, 17 bp, Arabidopsis thaliana
tcagatttgcctcgcta

SEQ ID NO: 137323 - DNA, 17 bp, Arabidopsis thaliana
tcagatttgctctctgt

SEQ ID NO: 137324 - DNA, 17 bp, Arabidopsis thaliana
tcagattttagttttcg

SEQ ID NO: 137325 - DNA, 17 bp, Arabidopsis thaliana
tcagattttcagagaca

SEQ ID NO: 137326 - DNA, 17 bp, Arabidopsis thaliana
tcagattttctgccatg

SEQ ID NO: 137327 - DNA, 17 bp, Arabidopsis thaliana
tcagattttgacaaagt

SEQ ID NO: 137328 - DNA, 17 bp, Arabidopsis thaliana
tcagattttgacactgt

SEQ ID NO: 137329 - DNA, 17 bp, Arabidopsis thaliana
tcagattttgacattga

SEQ ID NO: 137330 - DNA, 17 bp, Arabidopsis thaliana
tcagattttgacattgt

SEQ ID NO: 137331 - DNA, 17 bp, Arabidopsis thaliana
tcagattttgtctttcc

SEQ ID NO: 137332 - DNA, 17 bp, Arabidopsis thaliana
tcagatttttgactctg

SEQ ID NO: 137333 - DNA, 17 bp, Arabidopsis thaliana
tcagatttttgcttggg

SEQ ID NO: 137334 - DNA, 17 bp, Arabidopsis thaliana
tcagcaaaacggttagc

SEQ ID NO: 137335 - DNA, 17 bp, Arabidopsis thaliana
tcagcaaagaaatggtt

SEQ ID NO: 137336 - DNA, 17 bp, Arabidopsis thaliana
tcagcaaaggtgtctga

SEQ ID NO: 137337 - DNA, 17 bp, Arabidopsis thaliana
tcagcaaaggtgtgtgc

SEQ ID NO: 137338 - DNA, 17 bp, Arabidopsis thaliana
tcagcaaatcggatgtc

SEQ ID NO: 137339 - DNA, 17 bp, Arabidopsis thaliana
tcagcaaattacaggtt

SEQ ID NO: 137340 - DNA, 17 bp, Arabidopsis thaliana
tcagcaaattaccgcac

SEQ ID NO: 137341 - DNA, 17 bp, Arabidopsis thaliana
tcagcaaattttgcgtc

SEQ ID NO: 137342 - DNA, 17 bp, Arabidopsis thaliana
tcagcaaccgcagcccg

SEQ ID NO: 137343 - DNA, 17 bp, Arabidopsis thaliana
tcagcaacctgagcgcc

SEQ ID NO: 137344 - DNA, 17 bp, Arabidopsis thaliana
tcagcaactattgcgat

SEQ ID NO: 137345 - DNA, 17 bp, Arabidopsis thaliana
tcagcaactcttctata

SEQ ID NO: 137346 - DNA, 17 bp, Arabidopsis thaliana
tcagcaagaattctgac

SEQ ID NO: 137347 - DNA, 17 bp, Arabidopsis thaliana
tcagcaaggcgaggagt

SEQ ID NO: 137348 - DNA, 17 bp, Arabidopsis thaliana
tcagcaaggcttaaact

SEQ ID NO: 137349 - DNA, 17 bp, Arabidopsis thaliana
tcagcaatctggtgttg

SEQ ID NO: 137350 - DNA, 17 bp, Arabidopsis thaliana
tcagcaatctgtcaccg

SEQ ID NO: 137351 - DNA, 17 bp, Arabidopsis thaliana
tcagcaatgcttgaact

SEQ ID NO: 137352 - DNA, 17 bp, Arabidopsis thaliana
tcagcacagaatttgca

SEQ ID NO: 137353 - DNA, 17 bp, Arabidopsis thaliana
tcagcaccgctctgatg

SEQ ID NO: 137354 - DNA, 17 bp, Arabidopsis thaliana
tcagcacgccgagtacc

SEQ ID NO: 137355 - DNA, 17 bp, Arabidopsis thaliana
tcagcacgtctgcctgg

SEQ ID NO: 137356 - DNA, 17 bp, Arabidopsis thaliana
tcagcacgtctgtcggg

SEQ ID NO: 137357 - DNA, 17 bp, Arabidopsis thaliana
tcagcagaactttggac

SEQ ID NO: 137358 - DNA, 17 bp, Arabidopsis thaliana
tcagcagagacacggcg

SEQ ID NO: 137359 - DNA, 17 bp, Arabidopsis thaliana
tcagcagagacgcggcg

SEQ ID NO: 137360 - DNA, 17 bp, Arabidopsis thaliana
tcagcagagtcagatat

SEQ ID NO: 137361 - DNA, 17 bp, Arabidopsis thaliana
tcagcagcgtcagaggc

SEQ ID NO: 137362 - DNA, 17 bp, Arabidopsis thaliana
tcagcagctgaggcaca

SEQ ID NO: 137363 - DNA, 17 bp, Arabidopsis thaliana
tcagcaggaatcaaccc

SEQ ID NO: 137364 - DNA, 17 bp, Arabidopsis thaliana
tcagcaggcatgaccgg

SEQ ID NO: 137365 - DNA, 17 bp, Arabidopsis thaliana
tcagcaggccgagtatt

SEQ ID NO: 137366 - DNA, 17 bp, Arabidopsis thaliana
tcagcaggttaatgccg

SEQ ID NO: 137367 - DNA, 17 bp, Arabidopsis thaliana
tcagcagtattgtggca

SEQ ID NO: 137368 - DNA, 17 bp, Arabidopsis thaliana
tcagcagtatttcgcgg

SEQ ID NO: 137369 - DNA, 17 bp, Arabidopsis thaliana
tcagcagtcgttaacag

SEQ ID NO: 137370 - DNA, 17 bp, Arabidopsis thaliana
tcagcagtcttgatgtc

SEQ ID NO: 137371 - DNA, 17 bp, Arabidopsis thaliana
tcagcagtggacggatc

SEQ ID NO: 137372 - DNA, 17 bp, Arabidopsis thaliana
tcagcagtgttgtggca

SEQ ID NO: 137373 - DNA, 17 bp, Arabidopsis thaliana
tcagcataggaagtcgg

SEQ ID NO: 137374 - DNA, 17 bp, Arabidopsis thaliana
tcagcatatgagagctt

SEQ ID NO: 137375 - DNA, 17 bp, Arabidopsis thaliana
tcagcatgatgtgggag

SEQ ID NO: 137376 - DNA, 17 bp, Arabidopsis thaliana
tcagcatggtttgtggg

SEQ ID NO: 137377 - DNA, 17 bp, Arabidopsis thaliana
tcagcatgtccatgtgt

SEQ ID NO: 137378 - DNA, 17 bp, Arabidopsis thaliana
tcagcatgtcttgttgt

SEQ ID NO: 137379 - DNA, 17 bp, Arabidopsis thaliana
tcagcatgttgtggttt

SEQ ID NO: 137380 - DNA, 17 bp, Arabidopsis thaliana
tcagcattgatccatct

SEQ ID NO: 137381 - DNA, 17 bp, Arabidopsis thaliana
tcagccaaaactttgcg

SEQ ID NO: 137382 - DNA, 17 bp, Arabidopsis thaliana
tcagccaaaatttgcgc

SEQ ID NO: 137383 - DNA, 17 bp, Arabidopsis thaliana
tcagccaactcaatgac

SEQ ID NO: 137384 - DNA, 17 bp, Arabidopsis thaliana
tcagccaagaccaagat

SEQ ID NO: 137385 - DNA, 17 bp, Arabidopsis thaliana
tcagccacactgggact

SEQ ID NO: 137386 - DNA, 17 bp, Arabidopsis thaliana
tcagccactgccaatat

SEQ ID NO: 137387 - DNA, 17 bp, Arabidopsis thaliana
tcagccagcctaagcgc

SEQ ID NO: 137388 - DNA, 17 bp, Arabidopsis thaliana
tcagccagcttcttagc

SEQ ID NO: 137389 - DNA, 17 bp, Arabidopsis thaliana
tcagccaggttgttcca

SEQ ID NO: 137390 - DNA, 17 bp, Arabidopsis thaliana
tcagccatattagacaa

SEQ ID NO: 137391 - DNA, 17 bp, Arabidopsis thaliana
tcagccatcttctggtc

SEQ ID NO: 137392 - DNA, 17 bp, Arabidopsis thaliana
tcagccatggtgaaact

SEQ ID NO: 137393 - DNA, 17 bp, Arabidopsis thaliana
tcagccatggttcattc

SEQ ID NO: 137394 - DNA, 17 bp, Arabidopsis thaliana
tcagccatttggttcca

SEQ ID NO: 137395 - DNA, 17 bp, Arabidopsis thaliana
tcagccccgtcgctaag

SEQ ID NO: 137396 - DNA, 17 bp, Arabidopsis thaliana
tcagcccctcgctaaga

SEQ ID NO: 137397 - DNA, 17 bp, Arabidopsis thaliana
tcagcccctgtcgctaa

SEQ ID NO: 137398 - DNA, 17 bp, Arabidopsis thaliana
tcagccccttgtcgcta

SEQ ID NO: 137399 - DNA, 17 bp, Arabidopsis thaliana
tcagccctatttggtta

SEQ ID NO: 137400 - DNA, 17 bp, Arabidopsis thaliana
tcagccctcgtcgctaa

SEQ ID NO: 137401 - DNA, 17 bp, Arabidopsis thaliana
tcagccctctgcccccc

SEQ ID NO: 137402 - DNA, 17 bp, Arabidopsis thaliana
tcagccctctgtcgcta

SEQ ID NO: 137403 - DNA, 17 bp, Arabidopsis thaliana
tcagccctgtcgctaag

SEQ ID NO: 137404 - DNA, 17 bp, Arabidopsis thaliana
tcagccctgtgtcgcta

SEQ ID NO: 137405 - DNA, 17 bp, Arabidopsis thaliana
tcagcccttgtcgctaa

SEQ ID NO: 137406 - DNA, 17 bp, Arabidopsis thaliana
tcagccctttactaacg

SEQ ID NO: 137407 - DNA, 17 bp, Arabidopsis thaliana
tcagccctttgcagcta

SEQ ID NO: 137408 - DNA, 17 bp, Arabidopsis thaliana
tcagccctttgccgcaa

SEQ ID NO: 137409 - DNA, 17 bp, Arabidopsis thaliana
tcagccctttgccgcca

SEQ ID NO: 137410 - DNA, 17 bp, Arabidopsis thaliana
tcagccctttgccgcta

SEQ ID NO: 137411 - DNA, 17 bp, Arabidopsis thaliana
tcagccctttgccgctc

SEQ ID NO: 137412 - DNA, 17 bp, Arabidopsis thaliana
tcagccctttgccgctt

SEQ ID NO: 137413 - DNA, 17 bp, Arabidopsis thaliana
tcagccctttgcgctaa

SEQ ID NO: 137414 - DNA, 17 bp, Arabidopsis thaliana
tcagccctttgtcccta

SEQ ID NO: 137415 - DNA, 17 bp, Arabidopsis thaliana
tcagccctttgtcctaa

SEQ ID NO: 137416 - DNA, 17 bp, Arabidopsis thaliana
tcagccctttgtcgcaa

SEQ ID NO: 137417 - DNA, 17 bp, Arabidopsis thaliana
tcagccctttgtcgcga

SEQ ID NO: 137418 - DNA, 17 bp, Arabidopsis thaliana
tcagccctttgtcgcta

SEQ ID NO: 137419 - DNA, 17 bp, Arabidopsis thaliana
tcagccctttgtcgctc

SEQ ID NO: 137420 - DNA, 17 bp, Arabidopsis thaliana
tcagccctttgtcgctg

SEQ ID NO: 137421 - DNA, 17 bp, Arabidopsis thaliana
tcagccctttgtcgctt

SEQ ID NO: 137422 - DNA, 17 bp, Arabidopsis thaliana
tcagccctttgtctaag

SEQ ID NO: 137423 - DNA, 17 bp, Arabidopsis thaliana
tcagcccttttccctct

SEQ ID NO: 137424 - DNA, 17 bp, Arabidopsis thaliana
tcagcccttttcgctaa

SEQ ID NO: 137425 - DNA, 17 bp, Arabidopsis thaliana
tcagccgagatttacga

SEQ ID NO: 137426 - DNA, 17 bp, Arabidopsis thaliana
tcagccgagggcacgtc

SEQ ID NO: 137427 - DNA, 17 bp, Arabidopsis thaliana
tcagccgatccctaccc

SEQ ID NO: 137428 - DNA, 17 bp, Arabidopsis thaliana
tcagccgatggtgatca

SEQ ID NO: 137429 - DNA, 17 bp, Arabidopsis thaliana
tcagccgcacgaccata

SEQ ID NO: 137430 - DNA, 17 bp, Arabidopsis thaliana
tcagccgcagaacgacc

SEQ ID NO: 137431 - DNA, 17 bp, Arabidopsis thaliana
tcagccgcagcgatcag

SEQ ID NO: 137432 - DNA, 17 bp, Arabidopsis thaliana
tcagccgccagattcac

SEQ ID NO: 137433 - DNA, 17 bp, Arabidopsis thaliana
tcagccgccatagaagt

SEQ ID NO: 137434 - DNA, 17 bp, Arabidopsis thaliana
tcagccgccatgttcag

SEQ ID NO: 137435 - DNA, 17 bp, Arabidopsis thaliana
tcagccggactagatct

SEQ ID NO: 137436 - DNA, 17 bp, Arabidopsis thaliana
tcagccggaggtagggt

SEQ ID NO: 137437 - DNA, 17 bp, Arabidopsis thaliana
tcagccggttcatcagc

SEQ ID NO: 137438 - DNA, 17 bp, Arabidopsis thaliana
tcagccgtccacatcag

SEQ ID NO: 137439 - DNA, 17 bp, Arabidopsis thaliana
tcagccgtgactgccgc

SEQ ID NO: 137440 - DNA, 17 bp, Arabidopsis thaliana
tcagccgtggcatgtaa

SEQ ID NO: 137441 - DNA, 17 bp, Arabidopsis thaliana
tcagcctaatccgccac

SEQ ID NO: 137442 - DNA, 17 bp, Arabidopsis thaliana
tcagcctagcgcctaga

SEQ ID NO: 137443 - DNA, 17 bp, Arabidopsis thaliana
tcagcctatcaccaacc

SEQ ID NO: 137444 - DNA, 17 bp, Arabidopsis thaliana
tcagcctatttaggcgg

SEQ ID NO: 137445 - DNA, 17 bp, Arabidopsis thaliana
tcagcctctatttccgc

SEQ ID NO: 137446 - DNA, 17 bp, Arabidopsis thaliana
tcagcctgaaggttttg

SEQ ID NO: 137447 - DNA, 17 bp, Arabidopsis thaliana
tcagcctgagagtttct

SEQ ID NO: 137448 - DNA, 17 bp, Arabidopsis thaliana
tcagcctgctaactagc

SEQ ID NO: 137449 - DNA, 17 bp, Arabidopsis thaliana
tcagccttagccctgtt

SEQ ID NO: 137450 - DNA, 17 bp, Arabidopsis thaliana
tcagccttgtcatctcg

SEQ ID NO: 137451 - DNA, 17 bp, Arabidopsis thaliana
tcagccttgtcgctaag

SEQ ID NO: 137452 - DNA, 17 bp, Arabidopsis thaliana
tcagcctttcgttgcga

SEQ ID NO: 137453 - DNA, 17 bp, Arabidopsis thaliana
tcagcctttgccgattg

SEQ ID NO: 137454 - DNA, 17 bp, Arabidopsis thaliana
tcagcctttgcgcagca

SEQ ID NO: 137455 - DNA, 17 bp, Arabidopsis thaliana
tcagcctttgtcgctaa

SEQ ID NO: 137456 - DNA, 17 bp, Arabidopsis thaliana
tcagcctttgtcgctat

SEQ ID NO: 137457 - DNA, 17 bp, Arabidopsis thaliana
tcagccttttgccgcta

SEQ ID NO: 137458 - DNA, 17 bp, Arabidopsis thaliana
tcagccttttgccgctg

SEQ ID NO: 137459 - DNA, 17 bp, Arabidopsis thaliana
tcagccttttgtcgcta

SEQ ID NO: 137460 - DNA, 17 bp, Arabidopsis thaliana
tcagcgaattgtgcgat

SEQ ID NO: 137461 - DNA, 17 bp, Arabidopsis thaliana
tcagcgacatctccgat

SEQ ID NO: 137462 - DNA, 17 bp, Arabidopsis thaliana
tcagcgaccaaaaattg

SEQ ID NO: 137463 - DNA, 17 bp, Arabidopsis thaliana
tcagcgaccaaaagaag

SEQ ID NO: 137464 - DNA, 17 bp, Arabidopsis thaliana
tcagcgaccaaaagcag

SEQ ID NO: 137465 - DNA, 17 bp, Arabidopsis thaliana
tcagcgaccaaaagtag

SEQ ID NO: 137466 - DNA, 17 bp, Arabidopsis thaliana
tcagcgaccgtgaccaa

SEQ ID NO: 137467 - DNA, 17 bp, Arabidopsis thaliana
tcagcgacgaggtagct

SEQ ID NO: 137468 - DNA, 17 bp, Arabidopsis thaliana
tcagcgacgtagggaaa

SEQ ID NO: 137469 - DNA, 17 bp, Arabidopsis thaliana
tcagcgactatcgccgg

SEQ ID NO: 137470 - DNA, 17 bp, Arabidopsis thaliana
tcagcgactctcggcaa

SEQ ID NO: 137471 - DNA, 17 bp, Arabidopsis thaliana
tcagcgagcggtgaaga

SEQ ID NO: 137472 - DNA, 17 bp, Arabidopsis thaliana
tcagcgagtgtcgattg

SEQ ID NO: 137473 - DNA, 17 bp, Arabidopsis thaliana
tcagcgagtgttctcca

SEQ ID NO: 137474 - DNA, 17 bp, Arabidopsis thaliana
tcagcgatgtagtgacc

SEQ ID NO: 137475 - DNA, 17 bp, Arabidopsis thaliana
tcagcgattcagtccat

SEQ ID NO: 137476 - DNA, 17 bp, Arabidopsis thaliana
tcagcgattgtctgtgc

SEQ ID NO: 137477 - DNA, 17 bp, Arabidopsis thaliana
tcagcgatttttttgag

SEQ ID NO: 137478 - DNA, 17 bp, Arabidopsis thaliana
tcagcgctctgacgaag

SEQ ID NO: 137479 - DNA, 17 bp, Arabidopsis thaliana
tcagcgctttgtcgcta

SEQ ID NO: 137480 - DNA, 17 bp, Arabidopsis thaliana
tcagcggaaaacggtct

SEQ ID NO: 137481 - DNA, 17 bp, Arabidopsis thaliana
tcagcggaatatgcgga

SEQ ID NO: 137482 - DNA, 17 bp, Arabidopsis thaliana
tcagcggaccatttgcg

SEQ ID NO: 137483 - DNA, 17 bp, Arabidopsis thaliana
tcagcggactgctcgag

SEQ ID NO: 137484 - DNA, 17 bp, Arabidopsis thaliana
tcagcggaggagaggga

SEQ ID NO: 137485 - DNA, 17 bp, Arabidopsis thaliana
tcagcggagtttaatga

SEQ ID NO: 137486 - DNA, 17 bp, Arabidopsis thaliana
tcagcggatccacaggt

SEQ ID NO: 137487 - DNA, 17 bp, Arabidopsis thaliana
tcagcggatcggacgga

SEQ ID NO: 137488 - DNA, 17 bp, Arabidopsis thaliana
tcagcggatgtgagagg

SEQ ID NO: 137489 - DNA, 17 bp, Arabidopsis thaliana
tcagcggatgttgctac

SEQ ID NO: 137490 - DNA, 17 bp, Arabidopsis thaliana
tcagcggatgttgctta

SEQ ID NO: 137491 - DNA, 17 bp, Arabidopsis thaliana
tcagcggatgttgcttg

SEQ ID NO: 137492 - DNA, 17 bp, Arabidopsis thaliana
tcagcggatttccaaaa

SEQ ID NO: 137493 - DNA, 17 bp, Arabidopsis thaliana
tcagcggcaattagcag

SEQ ID NO: 137494 - DNA, 17 bp, Arabidopsis thaliana
tcagcggccgtcggtgc

SEQ ID NO: 137495 - DNA, 17 bp, Arabidopsis thaliana
tcagcggcgggtcccag

SEQ ID NO: 137496 - DNA, 17 bp, Arabidopsis thaliana
tcagcggctccgcggct

SEQ ID NO: 137497 - DNA, 17 bp, Arabidopsis thaliana
tcagcgggaaaatcacg

SEQ ID NO: 137498 - DNA, 17 bp, Arabidopsis thaliana
tcagcgggcgtaggaaa

SEQ ID NO: 137499 - DNA, 17 bp, Arabidopsis thaliana
tcagcggtagagcgcgt

SEQ ID NO: 137500 - DNA, 17 bp, Arabidopsis thaliana
tcagcggtcttgattgg

SEQ ID NO: 137501 - DNA, 17 bp, Arabidopsis thaliana
tcagcggttgttatcga

SEQ ID NO: 137502 - DNA, 17 bp, Arabidopsis thaliana
tcagcggtttgacacaa

SEQ ID NO: 137503 - DNA, 17 bp, Arabidopsis thaliana
tcagcggtttgacacac

SEQ ID NO: 137504 - DNA, 17 bp, Arabidopsis thaliana
tcagcgtcaattgagag

SEQ ID NO: 137505 - DNA, 17 bp, Arabidopsis thaliana
tcagcgtcagcgtttgc

SEQ ID NO: 137506 - DNA, 17 bp, Arabidopsis thaliana
tcagcgtcctcaggtga

SEQ ID NO: 137507 - DNA, 17 bp, Arabidopsis thaliana
tcagcgtcgactagtcg

SEQ ID NO: 137508 - DNA, 17 bp, Arabidopsis thaliana
tcagcgtctatggaatg

SEQ ID NO: 137509 - DNA, 17 bp, Arabidopsis thaliana
tcagcgtctccagatgg

SEQ ID NO: 137510 - DNA, 17 bp, Arabidopsis thaliana
tcagcgtctttcctttt

SEQ ID NO: 137511 - DNA, 17 bp, Arabidopsis thaliana
tcagcgtgctccgggcg

SEQ ID NO: 137512 - DNA, 17 bp, Arabidopsis thaliana
tcagcgtgctccgggct

SEQ ID NO: 137513 - DNA, 17 bp, Arabidopsis thaliana
tcagcgtgctgataacg

SEQ ID NO: 137514 - DNA, 17 bp, Arabidopsis thaliana
tcagcgtgctttgggcg

SEQ ID NO: 137515 - DNA, 17 bp, Arabidopsis thaliana
tcagcgttaggtcatct

SEQ ID NO: 137516 - DNA, 17 bp, Arabidopsis thaliana
tcagcgttcagcgttca

SEQ ID NO: 137517 - DNA, 17 bp, Arabidopsis thaliana
tcagcgttccacgcttc

SEQ ID NO: 137518 - DNA, 17 bp, Arabidopsis thaliana
tcagcgttgagtttggc

SEQ ID NO: 137519 - DNA, 17 bp, Arabidopsis thaliana
tcagcgttggaggatgg

SEQ ID NO: 137520 - DNA, 17 bp, Arabidopsis thaliana
tcagcgtttgcggttgc

SEQ ID NO: 137521 - DNA, 17 bp, Arabidopsis thaliana
tcagctaaatcaccgtt

SEQ ID NO: 137522 - DNA, 17 bp, Arabidopsis thaliana
tcagctaacaaatgcgc

SEQ ID NO: 137523 - DNA, 17 bp, Arabidopsis thaliana
tcagctaaccaagttgt

SEQ ID NO: 137524 - DNA, 17 bp, Arabidopsis thaliana
tcagctaagattgcctt

SEQ ID NO: 137525 - DNA, 17 bp, Arabidopsis thaliana
tcagctaattgcggagg

SEQ ID NO: 137526 - DNA, 17 bp, Arabidopsis thaliana
tcagctaccgatttatc

SEQ ID NO: 137527 - DNA, 17 bp, Arabidopsis thaliana
tcagctacggttccacg

SEQ ID NO: 137528 - DNA, 17 bp, Arabidopsis thaliana
tcagctactggatccca

SEQ ID NO: 137529 - DNA, 17 bp, Arabidopsis thaliana
tcagctactttcgcaac

SEQ ID NO: 137530 - DNA, 17 bp, Arabidopsis thaliana
tcagctatccaggtgat

SEQ ID NO: 137531 - DNA, 17 bp, Arabidopsis thaliana
tcagctattcgactttc

SEQ ID NO: 137532 - DNA, 17 bp, Arabidopsis thaliana
tcagctcagaactggta

SEQ ID NO: 137533 - DNA, 17 bp, Arabidopsis thaliana
tcagctcaggccactcg

SEQ ID NO: 137534 - DNA, 17 bp, Arabidopsis thaliana
tcagctcatcatgaact

SEQ ID NO: 137535 - DNA, 17 bp, Arabidopsis thaliana
tcagctcatcatgaagt

SEQ ID NO: 137536 - DNA, 17 bp, Arabidopsis thaliana
tcagctccaagtgggcc

SEQ ID NO: 137537 - DNA, 17 bp, Arabidopsis thaliana
tcagctccagcagatgg

SEQ ID NO: 137538 - DNA, 17 bp, Arabidopsis thaliana
tcagctccagcaggtgg

SEQ ID NO: 137539 - DNA, 17 bp, Arabidopsis thaliana
tcagctccctgatgtgc

SEQ ID NO: 137540 - DNA, 17 bp, Arabidopsis thaliana
tcagctccgaatggaca

SEQ ID NO: 137541 - DNA, 17 bp, Arabidopsis thaliana
tcagctcctactgaggg

SEQ ID NO: 137542 - DNA, 17 bp, Arabidopsis thaliana
tcagctcctccagcacc

SEQ ID NO: 137543 - DNA, 17 bp, Arabidopsis thaliana
tcagctcgatagtctta

SEQ ID NO: 137544 - DNA, 17 bp, Arabidopsis thaliana
tcagctcgcccgaagct

SEQ ID NO: 137545 - DNA, 17 bp, Arabidopsis thaliana
tcagctcgcgttgacta

SEQ ID NO: 137546 - DNA, 17 bp, Arabidopsis thaliana
tcagctcgctgcgtgca

SEQ ID NO: 137547 - DNA, 17 bp, Arabidopsis thaliana
tcagctcggaagtgtga

SEQ ID NO: 137548 - DNA, 17 bp, Arabidopsis thaliana
tcagctcgtagatggga

SEQ ID NO: 137549 - DNA, 17 bp, Arabidopsis thaliana
tcagctcgtgccgtaag

SEQ ID NO: 137550 - DNA, 17 bp, Arabidopsis thaliana
tcagctctactcggttg

SEQ ID NO: 137551 - DNA, 17 bp, Arabidopsis thaliana
tcagctctgatgactct

SEQ ID NO: 137552 - DNA, 17 bp, Arabidopsis thaliana
tcagctctgtggcggcc

SEQ ID NO: 137553 - DNA, 17 bp, Arabidopsis thaliana
tcagctcttctactccg

SEQ ID NO: 137554 - DNA, 17 bp, Arabidopsis thaliana
tcagctcttctccgctc

SEQ ID NO: 137555 - DNA, 17 bp, Arabidopsis thaliana
tcagctgaaatttgact

SEQ ID NO: 137556 - DNA, 17 bp, Arabidopsis thaliana
tcagctgaatctagttt

SEQ ID NO: 137557 - DNA, 17 bp, Arabidopsis thaliana
tcagctgaatgatccat

SEQ ID NO: 137558 - DNA, 17 bp, Arabidopsis thaliana
tcagctgacttcgagga

SEQ ID NO: 137559 - DNA, 17 bp, Arabidopsis thaliana
tcagctgactttgatcg

SEQ ID NO: 137560 - DNA, 17 bp, Arabidopsis thaliana
tcagctgaggttactcg

SEQ ID NO: 137561 - DNA, 17 bp, Arabidopsis thaliana
tcagctgagtttctcgt

SEQ ID NO: 137562 - DNA, 17 bp, Arabidopsis thaliana
tcagctgagtttgatcg

SEQ ID NO: 137563 - DNA, 17 bp, Arabidopsis thaliana
tcagctgcacgactcat

SEQ ID NO: 137564 - DNA, 17 bp, Arabidopsis thaliana
tcagctgcacgactcgt

SEQ ID NO: 137565 - DNA, 17 bp, Arabidopsis thaliana
tcagctgcccttcttgc

SEQ ID NO: 137566 - DNA, 17 bp, Arabidopsis thaliana
tcagctgcggaattgcc

SEQ ID NO: 137567 - DNA, 17 bp, Arabidopsis thaliana
tcagctgctctcagtat

SEQ ID NO: 137568 - DNA, 17 bp, Arabidopsis thaliana
tcagctgctttgccttg

SEQ ID NO: 137569 - DNA, 17 bp, Arabidopsis thaliana
tcagctggagcagtcat

SEQ ID NO: 137570 - DNA, 17 bp, Arabidopsis thaliana
tcagctggctgagtgac

SEQ ID NO: 137571 - DNA, 17 bp, Arabidopsis thaliana
tcagctgtacgtatcga

SEQ ID NO: 137572 - DNA, 17 bp, Arabidopsis thaliana
tcagctgtcaacatcgc

SEQ ID NO: 137573 - DNA, 17 bp, Arabidopsis thaliana
tcagctgtgatttgcgg

SEQ ID NO: 137574 - DNA, 17 bp, Arabidopsis thaliana
tcagctgttgcgctaac

SEQ ID NO: 137575 - DNA, 17 bp, Arabidopsis thaliana
tcagcttaacattcgta

SEQ ID NO: 137576 - DNA, 17 bp, Arabidopsis thaliana
tcagcttcagttgacca

SEQ ID NO: 137577 - DNA, 17 bp, Arabidopsis thaliana
tcagcttcagtttggtc

SEQ ID NO: 137578 - DNA, 17 bp, Arabidopsis thaliana
tcagcttcggagcaacg

SEQ ID NO: 137579 - DNA, 17 bp, Arabidopsis thaliana
tcagcttcggggttttg

SEQ ID NO: 137580 - DNA, 17 bp, Arabidopsis thaliana
tcagcttctggagaatc

SEQ ID NO: 137581 - DNA, 17 bp, Arabidopsis thaliana
tcagcttcttagaccat

SEQ ID NO: 137582 - DNA, 17 bp, Arabidopsis thaliana
tcagcttcttcgactga

SEQ ID NO: 137583 - DNA, 17 bp, Arabidopsis thaliana
tcagcttcttctcttgt

SEQ ID NO: 137584 - DNA, 17 bp, Arabidopsis thaliana
tcagcttgaaaatttgc

SEQ ID NO: 137585 - DNA, 17 bp, Arabidopsis thaliana
tcagcttgtcattcagc

SEQ ID NO: 137586 - DNA, 17 bp, Arabidopsis thaliana
tcagctttaattccaac

SEQ ID NO: 137587 - DNA, 17 bp, Arabidopsis thaliana
tcagctttcacagtgat

SEQ ID NO: 137588 - DNA, 17 bp, Arabidopsis thaliana
tcagctttggccagatc

SEQ ID NO: 137589 - DNA, 17 bp, Arabidopsis thaliana
tcagctttgtggccgcc

SEQ ID NO: 137590 - DNA, 17 bp, Arabidopsis thaliana
tcagctttgttcctttc

SEQ ID NO: 137591 - DNA, 17 bp, Arabidopsis thaliana
tcagcttttacactcgt

SEQ ID NO: 137592 - DNA, 17 bp, Arabidopsis thaliana
tcagcttttctcgctaa

SEQ ID NO: 137593 - DNA, 17 bp, Arabidopsis thaliana
tcagcttttggacacac

SEQ ID NO: 137594 - DNA, 17 bp, Arabidopsis thaliana
tcagcttttggacatac

SEQ ID NO: 137595 - DNA, 17 bp, Arabidopsis thaliana
tcagcttttggacatat

SEQ ID NO: 137596 - DNA, 17 bp, Arabidopsis thaliana
tcagcttttgtagttag

SEQ ID NO: 137597 - DNA, 17 bp, Arabidopsis thaliana
tcagcttttgtcgctaa

SEQ ID NO: 137598 - DNA, 17 bp, Arabidopsis thaliana
tcaggaaaacaatctct

SEQ ID NO: 137599 - DNA, 17 bp, Arabidopsis thaliana
tcaggaaacccgattgc

SEQ ID NO: 137600 - DNA, 17 bp, Arabidopsis thaliana
tcaggaacaggcttctg

SEQ ID NO: 137601 - DNA, 17 bp, Arabidopsis thaliana
tcaggaaccgatgtgct

SEQ ID NO: 137602 - DNA, 17 bp, Arabidopsis thaliana
tcaggaagattattggc

SEQ ID NO: 137603 - DNA, 17 bp, Arabidopsis thaliana
tcaggaagcctatctgc

SEQ ID NO: 137604 - DNA, 17 bp, Arabidopsis thaliana
tcaggaagctgtgagtc

SEQ ID NO: 137605 - DNA, 17 bp, Arabidopsis thaliana
tcaggaaggctaacttg

SEQ ID NO: 137606 - DNA, 17 bp, Arabidopsis thaliana
tcaggaaggtgatgatg

SEQ ID NO: 137607 - DNA, 17 bp, Arabidopsis thaliana
tcaggaatagctcagtt

SEQ ID NO: 137608 - DNA, 17 bp, Arabidopsis thaliana
tcaggaattacggattt

SEQ ID NO: 137609 - DNA, 17 bp, Arabidopsis thaliana
tcaggaattcgtggtat

SEQ ID NO: 137610 - DNA, 17 bp, Arabidopsis thaliana
tcaggaattgtgtgtat

SEQ ID NO: 137611 - DNA, 17 bp, Arabidopsis thaliana
tcaggaatttgacattg

SEQ ID NO: 137612 - DNA, 17 bp, Arabidopsis thaliana
tcaggacaaaccagaag

SEQ ID NO: 137613 - DNA, 17 bp, Arabidopsis thaliana
tcaggacaaagtgtttt

SEQ ID NO: 137614 - DNA, 17 bp, Arabidopsis thaliana
tcaggaccgattcgtaa

SEQ ID NO: 137615 - DNA, 17 bp, Arabidopsis thaliana
tcaggacctacgggcca

SEQ ID NO: 137616 - DNA, 17 bp, Arabidopsis thaliana
tcaggacctacgggccg

SEQ ID NO: 137617 - DNA, 17 bp, Arabidopsis thaliana
tcaggaccttcggtgta

SEQ ID NO: 137618 - DNA, 17 bp, Arabidopsis thaliana
tcaggactccgtggctc

SEQ ID NO: 137619 - DNA, 17 bp, Arabidopsis thaliana
tcaggactctggtcagc

SEQ ID NO: 137620 - DNA, 17 bp, Arabidopsis thaliana
tcaggacttcttggact

SEQ ID NO: 137621 - DNA, 17 bp, Arabidopsis thaliana
tcaggagaacatgatcg

SEQ ID NO: 137622 - DNA, 17 bp, Arabidopsis thaliana
tcaggagacccacggtt

SEQ ID NO: 137623 - DNA, 17 bp, Arabidopsis thaliana
tcaggagattctgggcc

SEQ ID NO: 137624 - DNA, 17 bp, Arabidopsis thaliana
tcaggagattctgggtc

SEQ ID NO: 137625 - DNA, 17 bp, Arabidopsis thaliana
tcaggagatttacgact

SEQ ID NO: 137626 - DNA, 17 bp, Arabidopsis thaliana
tcaggagatttcaccgt

SEQ ID NO: 137627 - DNA, 17 bp, Arabidopsis thaliana
tcaggagcagcaggacc

SEQ ID NO: 137628 - DNA, 17 bp, Arabidopsis thaliana
tcaggagctgaggcaca

SEQ ID NO: 137629 - DNA, 17 bp, Arabidopsis thaliana
tcaggaggagtcggagg

SEQ ID NO: 137630 - DNA, 17 bp, Arabidopsis thaliana
tcaggaggcgctcgacc

SEQ ID NO: 137631 - DNA, 17 bp, Arabidopsis thaliana
tcaggagggattacggg

SEQ ID NO: 137632 - DNA, 17 bp, Arabidopsis thaliana
tcaggaggtgcgatctt

SEQ ID NO: 137633 - DNA, 17 bp, Arabidopsis thaliana
tcaggaggttctgggcc

SEQ ID NO: 137634 - DNA, 17 bp, Arabidopsis thaliana
tcaggaggttctgggct

SEQ ID NO: 137635 - DNA, 17 bp, Arabidopsis thaliana
tcaggagtcctgttgtg

SEQ ID NO: 137636 - DNA, 17 bp, Arabidopsis thaliana
tcaggagtggagcctgc

SEQ ID NO: 137637 - DNA, 17 bp, Arabidopsis thaliana
tcaggagttggcgattt

SEQ ID NO: 137638 - DNA, 17 bp, Arabidopsis thaliana
tcaggatagctggagct

SEQ ID NO: 137639 - DNA, 17 bp, Arabidopsis thaliana
tcaggatcaccgtcgat

SEQ ID NO: 137640 - DNA, 17 bp, Arabidopsis thaliana
tcaggatcggaacctgg

SEQ ID NO: 137641 - DNA, 17 bp, Arabidopsis thaliana
tcaggatcggtgaagtg

SEQ ID NO: 137642 - DNA, 17 bp, Arabidopsis thaliana
tcaggatcgtgccacgt

SEQ ID NO: 137643 - DNA, 17 bp, Arabidopsis thaliana
tcaggatctacattcaa

SEQ ID NO: 137644 - DNA, 17 bp, Arabidopsis thaliana
tcaggatgaacgctggc

SEQ ID NO: 137645 - DNA, 17 bp, Arabidopsis thaliana
tcaggatgagtgacttt

SEQ ID NO: 137646 - DNA, 17 bp, Arabidopsis thaliana
tcaggatggccgagtgg

SEQ ID NO: 137647 - DNA, 17 bp, Arabidopsis thaliana
tcaggatgggtgacttt

SEQ ID NO: 137648 - DNA, 17 bp, Arabidopsis thaliana
tcaggatgggttttggg

SEQ ID NO: 137649 - DNA, 17 bp, Arabidopsis thaliana
tcaggattcagctgtgg

SEQ ID NO: 137650 - DNA, 17 bp, Arabidopsis thaliana
tcaggcaaagggtagca

SEQ ID NO: 137651 - DNA, 17 bp, Arabidopsis thaliana
tcaggcaaatggtagca

SEQ ID NO: 137652 - DNA, 17 bp, Arabidopsis thaliana
tcaggcaattgcctcaa

SEQ ID NO: 137653 - DNA, 17 bp, Arabidopsis thaliana
tcaggcacctccacatt

SEQ ID NO: 137654 - DNA, 17 bp, Arabidopsis thaliana
tcaggcacctcctcagg

SEQ ID NO: 137655 - DNA, 17 bp, Arabidopsis thaliana
tcaggcacggctctgcg

SEQ ID NO: 137656 - DNA, 17 bp, Arabidopsis thaliana
tcaggcacttgtcacgg

SEQ ID NO: 137657 - DNA, 17 bp, Arabidopsis thaliana
tcaggcacttgtcaggg

SEQ ID NO: 137658 - DNA, 17 bp, Arabidopsis thaliana
tcaggcacttttcaggg

SEQ ID NO: 137659 - DNA, 17 bp, Arabidopsis thaliana
tcaggcaggagcaggag

SEQ ID NO: 137660 - DNA, 17 bp, Arabidopsis thaliana
tcaggcaggggttcgat

SEQ ID NO: 137661 - DNA, 17 bp, Arabidopsis thaliana
tcaggcagtctctttgg

SEQ ID NO: 137662 - DNA, 17 bp, Arabidopsis thaliana
tcaggcattttcgtgat

SEQ ID NO: 137663 - DNA, 17 bp, Arabidopsis thaliana
tcaggccgcctgtatgt

SEQ ID NO: 137664 - DNA, 17 bp, Arabidopsis thaliana
tcaggcgagtattttcg

SEQ ID NO: 137665 - DNA, 17 bp, Arabidopsis thaliana
tcaggcgattacatacc

SEQ ID NO: 137666 - DNA, 17 bp, Arabidopsis thaliana
tcaggcgcagcgggcat

SEQ ID NO: 137667 - DNA, 17 bp, Arabidopsis thaliana
tcaggcgcccaggctcg

SEQ ID NO: 137668 - DNA, 17 bp, Arabidopsis thaliana
tcaggcgctgacatcgt

SEQ ID NO: 137669 - DNA, 17 bp, Arabidopsis thaliana
tcaggcgctgtctacga

SEQ ID NO: 137670 - DNA, 17 bp, Arabidopsis thaliana
tcaggcgcttaatgact

SEQ ID NO: 137671 - DNA, 17 bp, Arabidopsis thaliana
tcaggcggaagaacttt

SEQ ID NO: 137672 - DNA, 17 bp, Arabidopsis thaliana
tcaggcggaggagacag

SEQ ID NO: 137673 - DNA, 17 bp, Arabidopsis thaliana
tcaggcggatcaagcaa

SEQ ID NO: 137674 - DNA, 17 bp, Arabidopsis thaliana
tcaggcggcctgactac

SEQ ID NO: 137675 - DNA, 17 bp, Arabidopsis thaliana
tcaggcggcctgagtac

SEQ ID NO: 137676 - DNA, 17 bp, Arabidopsis thaliana
tcaggcggctttcggtt

SEQ ID NO: 137677 - DNA, 17 bp, Arabidopsis thaliana
tcaggcgtagccaagcg

SEQ ID NO: 137678 - DNA, 17 bp, Arabidopsis thaliana
tcaggcgtcgtctgtcg

SEQ ID NO: 137679 - DNA, 17 bp, Arabidopsis thaliana
tcaggcgtggccgctac

SEQ ID NO: 137680 - DNA, 17 bp, Arabidopsis thaliana
tcaggcgttcgaaaccg

SEQ ID NO: 137681 - DNA, 17 bp, Arabidopsis thaliana
tcaggctaatactgcgt

SEQ ID NO: 137682 - DNA, 17 bp, Arabidopsis thaliana
tcaggctccgatgagga

SEQ ID NO: 137683 - DNA, 17 bp, Arabidopsis thaliana
tcaggctcggagtatga

SEQ ID NO: 137684 - DNA, 17 bp, Arabidopsis thaliana
tcaggctctcgcggcac

SEQ ID NO: 137685 - DNA, 17 bp, Arabidopsis thaliana
tcaggctctcgcggccc

SEQ ID NO: 137686 - DNA, 17 bp, Arabidopsis thaliana
tcaggctcttgggaggt

SEQ ID NO: 137687 - DNA, 17 bp, Arabidopsis thaliana
tcaggctgatagctagg

SEQ ID NO: 137688 - DNA, 17 bp, Arabidopsis thaliana
tcaggctgggctatgtc

SEQ ID NO: 137689 - DNA, 17 bp, Arabidopsis thaliana
tcaggctgtgttgcttt

SEQ ID NO: 137690 - DNA, 17 bp, Arabidopsis thaliana
tcaggcttgccgccctt

SEQ ID NO: 137691 - DNA, 17 bp, Arabidopsis thaliana
tcaggcttttaagttct

SEQ ID NO: 137692 - DNA, 17 bp, Arabidopsis thaliana
tcaggcttttacgataa

SEQ ID NO: 137693 - DNA, 17 bp, Arabidopsis thaliana
tcaggctttttacagtc

SEQ ID NO: 137694 - DNA, 17 bp, Arabidopsis thaliana
tcagggaaaattacggg

SEQ ID NO: 137695 - DNA, 17 bp, Arabidopsis thaliana
tcagggaacctcaaagc

SEQ ID NO: 137696 - DNA, 17 bp, Arabidopsis thaliana
tcagggaagcatttgca

SEQ ID NO: 137697 - DNA, 17 bp, Arabidopsis thaliana
tcagggaatgccactgc

SEQ ID NO: 137698 - DNA, 17 bp, Arabidopsis thaliana
tcagggaattacaggct

SEQ ID NO: 137699 - DNA, 17 bp, Arabidopsis thaliana
tcagggaattggacatg

SEQ ID NO: 137700 - DNA, 17 bp, Arabidopsis thaliana
tcagggaccgctgttca

SEQ ID NO: 137701 - DNA, 17 bp, Arabidopsis thaliana
tcagggacggcaacctt

SEQ ID NO: 137702 - DNA, 17 bp, Arabidopsis thaliana
tcagggactcgtcaatg

SEQ ID NO: 137703 - DNA, 17 bp, Arabidopsis thaliana
tcagggacttactgcag

SEQ ID NO: 137704 - DNA, 17 bp, Arabidopsis thaliana
tcagggagaatcgaact

SEQ ID NO: 137705 - DNA, 17 bp, Arabidopsis thaliana
tcagggagagaactgat

SEQ ID NO: 137706 - DNA, 17 bp, Arabidopsis thaliana
tcagggagggaactgat

SEQ ID NO: 137707 - DNA, 17 bp, Arabidopsis thaliana
tcagggagtctacaggc

SEQ ID NO: 137708 - DNA, 17 bp, Arabidopsis thaliana
tcagggagtgcaccaga

SEQ ID NO: 137709 - DNA, 17 bp, Arabidopsis thaliana
tcagggatactgggact

SEQ ID NO: 137710 - DNA, 17 bp, Arabidopsis thaliana
tcagggatatcaatgag

SEQ ID NO: 137711 - DNA, 17 bp, Arabidopsis thaliana
tcagggatgaagcactt

SEQ ID NO: 137712 - DNA, 17 bp, Arabidopsis thaliana
tcagggatgaagcattt

SEQ ID NO: 137713 - DNA, 17 bp, Arabidopsis thaliana
tcagggatgagacattt

SEQ ID NO: 137714 - DNA, 17 bp, Arabidopsis thaliana
tcagggatgaggcactt

SEQ ID NO: 137715 - DNA, 17 bp, Arabidopsis thaliana
tcagggatgggctgggg

SEQ ID NO: 137716 - DNA, 17 bp, Arabidopsis thaliana
tcagggatgtaaggcag

SEQ ID NO: 137717 - DNA, 17 bp, Arabidopsis thaliana
tcagggattccacttct

SEQ ID NO: 137718 - DNA, 17 bp, Arabidopsis thaliana
tcagggatttgaccagt

SEQ ID NO: 137719 - DNA, 17 bp, Arabidopsis thaliana
tcagggcacatctgaga

SEQ ID NO: 137720 - DNA, 17 bp, Arabidopsis thaliana
tcagggccataggttcg

SEQ ID NO: 137721 - DNA, 17 bp, Arabidopsis thaliana
tcagggccatcaaactt

SEQ ID NO: 137722 - DNA, 17 bp, Arabidopsis thaliana
tcagggcccaaaaatac

SEQ ID NO: 137723 - DNA, 17 bp, Arabidopsis thaliana
tcagggccgacccaccc

SEQ ID NO: 137724 - DNA, 17 bp, Arabidopsis thaliana
tcagggcgactggatca

SEQ ID NO: 137725 - DNA, 17 bp, Arabidopsis thaliana
tcagggcgagcactgac

SEQ ID NO: 137726 - DNA, 17 bp, Arabidopsis thaliana
tcagggctcaagtgatt

SEQ ID NO: 137727 - DNA, 17 bp, Arabidopsis thaliana
tcagggctcagctgaat

SEQ ID NO: 137728 - DNA, 17 bp, Arabidopsis thaliana
tcagggctggagtgagt

SEQ ID NO: 137729 - DNA, 17 bp, Arabidopsis thaliana
tcagggctggagtgatt

SEQ ID NO: 137730 - DNA, 17 bp, Arabidopsis thaliana
tcagggctgggctcggg

SEQ ID NO: 137731 - DNA, 17 bp, Arabidopsis thaliana
tcagggctggtccgacg

SEQ ID NO: 137732 - DNA, 17 bp, Arabidopsis thaliana
tcagggcttattctcgc

SEQ ID NO: 137733 - DNA, 17 bp, Arabidopsis thaliana
tcaggggataatcaggc

SEQ ID NO: 137734 - DNA, 17 bp, Arabidopsis thaliana
tcagggggtcccagttc

SEQ ID NO: 137735 - DNA, 17 bp, Arabidopsis thaliana
tcaggggtcagtattct

SEQ ID NO: 137736 - DNA, 17 bp, Arabidopsis thaliana
tcaggggtgtgtcgatc

SEQ ID NO: 137737 - DNA, 17 bp, Arabidopsis thaliana
tcaggggttccgaattc

SEQ ID NO: 137738 - DNA, 17 bp, Arabidopsis thaliana
tcaggggttctaccgga

SEQ ID NO: 137739 - DNA, 17 bp, Arabidopsis thaliana
tcagggtaaaatggtaa

SEQ ID NO: 137740 - DNA, 17 bp, Arabidopsis thaliana
tcagggtccaagtgtgt

SEQ ID NO: 137741 - DNA, 17 bp, Arabidopsis thaliana
tcagggtcctaagaatg

SEQ ID NO: 137742 - DNA, 17 bp, Arabidopsis thaliana
tcagggtctgaggttgg

SEQ ID NO: 137743 - DNA, 17 bp, Arabidopsis thaliana
tcagggtggacaaatcc

SEQ ID NO: 137744 - DNA, 17 bp, Arabidopsis thaliana
tcagggtggtggtgcat

SEQ ID NO: 137745 - DNA, 17 bp, Arabidopsis thaliana
tcagggtgtcgtaggtt

SEQ ID NO: 137746 - DNA, 17 bp, Arabidopsis thaliana
tcagggttcatgggttg

SEQ ID NO: 137747 - DNA, 17 bp, Arabidopsis thaliana
tcagggttcgttccccc

SEQ ID NO: 137748 - DNA, 17 bp, Arabidopsis thaliana
tcagggtttcattgatt

SEQ ID NO: 137749 - DNA, 17 bp, Arabidopsis thaliana
tcagggtttgactttga

SEQ ID NO: 137750 - DNA, 17 bp, Arabidopsis thaliana
tcagggtttgttgaatg

SEQ ID NO: 137751 - DNA, 17 bp, Arabidopsis thaliana
tcagggttttcgacaga

SEQ ID NO: 137752 - DNA, 17 bp, Arabidopsis thaliana
tcagggttttcttcttc

SEQ ID NO: 137753 - DNA, 17 bp, Arabidopsis thaliana
tcaggtaccgatgaaga

SEQ ID NO: 137754 - DNA, 17 bp, Arabidopsis thaliana
tcaggtagacagtttct

SEQ ID NO: 137755 - DNA, 17 bp, Arabidopsis thaliana
tcaggtatgtcaagtcc

SEQ ID NO: 137756 - DNA, 17 bp, Arabidopsis thaliana
tcaggtattggtgtcgc

SEQ ID NO: 137757 - DNA, 17 bp, Arabidopsis thaliana
tcaggtcaaccgggttg

SEQ ID NO: 137758 - DNA, 17 bp, Arabidopsis thaliana
tcaggtcaatgtcgatg

SEQ ID NO: 137759 - DNA, 17 bp, Arabidopsis thaliana
tcaggtcatatggtgca

SEQ ID NO: 137760 - DNA, 17 bp, Arabidopsis thaliana
tcaggtcatatggtgcg

SEQ ID NO: 137761 - DNA, 17 bp, Arabidopsis thaliana
tcaggtcatcgacatat

SEQ ID NO: 137762 - DNA, 17 bp, Arabidopsis thaliana
tcaggtcattgtagcag

SEQ ID NO: 137763 - DNA, 17 bp, Arabidopsis thaliana
tcaggtccgcttcttcc

SEQ ID NO: 137764 - DNA, 17 bp, Arabidopsis thaliana
tcaggtccggccgagtc

SEQ ID NO: 137765 - DNA, 17 bp, Arabidopsis thaliana
tcaggtcgccgcttgtc

SEQ ID NO: 137766 - DNA, 17 bp, Arabidopsis thaliana
tcaggtcgccggttcga

SEQ ID NO: 137767 - DNA, 17 bp, Arabidopsis thaliana
tcaggtcgcctgcattt

SEQ ID NO: 137768 - DNA, 17 bp, Arabidopsis thaliana
tcaggtcgctgatgacg

SEQ ID NO: 137769 - DNA, 17 bp, Arabidopsis thaliana
tcaggtcgggctgcgct

SEQ ID NO: 137770 - DNA, 17 bp, Arabidopsis thaliana
tcaggtcgtctgcattt

SEQ ID NO: 137771 - DNA, 17 bp, Arabidopsis thaliana
tcaggtcgttgtatttt

SEQ ID NO: 137772 - DNA, 17 bp, Arabidopsis thaliana
tcaggtctccaaagtga

SEQ ID NO: 137773 - DNA, 17 bp, Arabidopsis thaliana
tcaggtctccaagaatc

SEQ ID NO: 137774 - DNA, 17 bp, Arabidopsis thaliana
tcaggtctccaaggaac

SEQ ID NO: 137775 - DNA, 17 bp, Arabidopsis thaliana
tcaggtctccaaggtaa

SEQ ID NO: 137776 - DNA, 17 bp, Arabidopsis thaliana
tcaggtctccaaggtga

SEQ ID NO: 137777 - DNA, 17 bp, Arabidopsis thaliana
tcaggtctcggtgggac

SEQ ID NO: 137778 - DNA, 17 bp, Arabidopsis thaliana
tcaggtctcggtggggc

SEQ ID NO: 137779 - DNA, 17 bp, Arabidopsis thaliana
tcaggtctgctcacact

SEQ ID NO: 137780 - DNA, 17 bp, Arabidopsis thaliana
tcaggtctgttcacact

SEQ ID NO: 137781 - DNA, 17 bp, Arabidopsis thaliana
tcaggtcttaacatgtt

SEQ ID NO: 137782 - DNA, 17 bp, Arabidopsis thaliana
tcaggtcttgaacggat

SEQ ID NO: 137783 - DNA, 17 bp, Arabidopsis thaliana
tcaggtgaacgacctgt

SEQ ID NO: 137784 - DNA, 17 bp, Arabidopsis thaliana
tcaggtgaatcagatca

SEQ ID NO: 137785 - DNA, 17 bp, Arabidopsis thaliana
tcaggtgactgtaccat

SEQ ID NO: 137786 - DNA, 17 bp, Arabidopsis thaliana
tcaggtgatcaggctta

SEQ ID NO: 137787 - DNA, 17 bp, Arabidopsis thaliana
tcaggtgatgtggaggc

SEQ ID NO: 137788 - DNA, 17 bp, Arabidopsis thaliana
tcaggtgattgcgacac

SEQ ID NO: 137789 - DNA, 17 bp, Arabidopsis thaliana
tcaggtgatttagcggt

SEQ ID NO: 137790 - DNA, 17 bp, Arabidopsis thaliana
tcaggtgcagagctttg

SEQ ID NO: 137791 - DNA, 17 bp, Arabidopsis thaliana
tcaggtggattctgaga

SEQ ID NO: 137792 - DNA, 17 bp, Arabidopsis thaliana
tcaggtggggagtttgg

SEQ ID NO: 137793 - DNA, 17 bp, Arabidopsis thaliana
tcaggtggtgtggcaaa

SEQ ID NO: 137794 - DNA, 17 bp, Arabidopsis thaliana
tcaggtgtcgtctgtcg

SEQ ID NO: 137795 - DNA, 17 bp, Arabidopsis thaliana
tcaggttaccacacatg

SEQ ID NO: 137796 - DNA, 17 bp, Arabidopsis thaliana
tcaggttcaaatcctac

SEQ ID NO: 137797 - DNA, 17 bp, Arabidopsis thaliana
tcaggttcataaaaaag

SEQ ID NO: 137798 - DNA, 17 bp, Arabidopsis thaliana
tcaggttcgattccact

SEQ ID NO: 137799 - DNA, 17 bp, Arabidopsis thaliana
tcaggttcgggttcggt

SEQ ID NO: 137800 - DNA, 17 bp, Arabidopsis thaliana
tcaggttctcggccgaa

SEQ ID NO: 137801 - DNA, 17 bp, Arabidopsis thaliana
tcaggttctggttgcct

SEQ ID NO: 137802 - DNA, 17 bp, Arabidopsis thaliana
tcaggttctgtttcgag

SEQ ID NO: 137803 - DNA, 17 bp, Arabidopsis thaliana
tcaggttgagtatgtgc

SEQ ID NO: 137804 - DNA, 17 bp, Arabidopsis thaliana
tcaggttggaccatctt

SEQ ID NO: 137805 - DNA, 17 bp, Arabidopsis thaliana
tcaggttggatcatctt

SEQ ID NO: 137806 - DNA, 17 bp, Arabidopsis thaliana
tcaggttggccgagtgg

SEQ ID NO: 137807 - DNA, 17 bp, Arabidopsis thaliana
tcaggttgttgaggttc

SEQ ID NO: 137808 - DNA, 17 bp, Arabidopsis thaliana
tcaggtttacctgcttc

SEQ ID NO: 137809 - DNA, 17 bp, Arabidopsis thaliana
tcaggtttaggtcggtt

SEQ ID NO: 137810 - DNA, 17 bp, Arabidopsis thaliana
tcaggtttagttagtca

SEQ ID NO: 137811 - DNA, 17 bp, Arabidopsis thaliana
tcaggtttcagcgatta

SEQ ID NO: 137812 - DNA, 17 bp, Arabidopsis thaliana
tcaggtttgctttcgaa

SEQ ID NO: 137813 - DNA, 17 bp, Arabidopsis thaliana
tcagtaaagtcagtggt

SEQ ID NO: 137814 - DNA, 17 bp, Arabidopsis thaliana
tcagtaaagtgggttag

SEQ ID NO: 137815 - DNA, 17 bp, Arabidopsis thaliana
tcagtaaatgtcggcca

SEQ ID NO: 137816 - DNA, 17 bp, Arabidopsis thaliana
tcagtaacggaggtgtg

SEQ ID NO: 137817 - DNA, 17 bp, Arabidopsis thaliana
tcagtaatctgaactat

SEQ ID NO: 137818 - DNA, 17 bp, Arabidopsis thaliana
tcagtacaacatgtgcg

SEQ ID NO: 137819 - DNA, 17 bp, Arabidopsis thaliana
tcagtaccttgtgaagt

SEQ ID NO: 137820 - DNA, 17 bp, Arabidopsis thaliana
tcagtagcattgtctga

SEQ ID NO: 137821 - DNA, 17 bp, Arabidopsis thaliana
tcagtagctaagaggtt

SEQ ID NO: 137822 - DNA, 17 bp, Arabidopsis thaliana
tcagtagctggttccct

SEQ ID NO: 137823 - DNA, 17 bp, Arabidopsis thaliana
tcagtagctttctgcac

SEQ ID NO: 137824 - DNA, 17 bp, Arabidopsis thaliana
tcagtaggacaatgcgg

SEQ ID NO: 137825 - DNA, 17 bp, Arabidopsis thaliana
tcagtaggcaagttgta

SEQ ID NO: 137826 - DNA, 17 bp, Arabidopsis thaliana
tcagtagtctcggaaca

SEQ ID NO: 137827 - DNA, 17 bp, Arabidopsis thaliana
tcagtatcaggtgacgt

SEQ ID NO: 137828 - DNA, 17 bp, Arabidopsis thaliana
tcagtatgctaggtggt

SEQ ID NO: 137829 - DNA, 17 bp, Arabidopsis thaliana
tcagtatggtggtggag

SEQ ID NO: 137830 - DNA, 17 bp, Arabidopsis thaliana
tcagtattccgttcgca

SEQ ID NO: 137831 - DNA, 17 bp, Arabidopsis thaliana
tcagtattccgtttgca

SEQ ID NO: 137832 - DNA, 17 bp, Arabidopsis thaliana
tcagtcaaacgcagaat

SEQ ID NO: 137833 - DNA, 17 bp, Arabidopsis thaliana
tcagtcaaacttaggca

SEQ ID NO: 137834 - DNA, 17 bp, Arabidopsis thaliana
tcagtcaaagttgctaa

SEQ ID NO: 137835 - DNA, 17 bp, Arabidopsis thaliana
tcagtcaacttgttgca

SEQ ID NO: 137836 - DNA, 17 bp, Arabidopsis thaliana
tcagtcaagcagtattt

SEQ ID NO: 137837 - DNA, 17 bp, Arabidopsis thaliana
tcagtcaaggtcgtatt

SEQ ID NO: 137838 - DNA, 17 bp, Arabidopsis thaliana
tcagtcaagttaccaca

SEQ ID NO: 137839 - DNA, 17 bp, Arabidopsis thaliana
tcagtcaatcaatcggc

SEQ ID NO: 137840 - DNA, 17 bp, Arabidopsis thaliana
tcagtcaatgtcccgcc

SEQ ID NO: 137841 - DNA, 17 bp, Arabidopsis thaliana
tcagtcaattgccgccg

SEQ ID NO: 137842 - DNA, 17 bp, Arabidopsis thaliana
tcagtcactatcttcaa

SEQ ID NO: 137843 - DNA, 17 bp, Arabidopsis thaliana
tcagtcactcagaaatt

SEQ ID NO: 137844 - DNA, 17 bp, Arabidopsis thaliana
tcagtcactcgttgtga

SEQ ID NO: 137845 - DNA, 17 bp, Arabidopsis thaliana
tcagtcagattcacctc

SEQ ID NO: 137846 - DNA, 17 bp, Arabidopsis thaliana
tcagtcagctcgtagat

SEQ ID NO: 137847 - DNA, 17 bp, Arabidopsis thaliana
tcagtcaggcggtcgcc

SEQ ID NO: 137848 - DNA, 17 bp, Arabidopsis thaliana
tcagtcagtcgcgctgt

SEQ ID NO: 137849 - DNA, 17 bp, Arabidopsis thaliana
tcagtcagtttcggatc

SEQ ID NO: 137850 - DNA, 17 bp, Arabidopsis thaliana
tcagtcagttttcaggt

SEQ ID NO: 137851 - DNA, 17 bp, Arabidopsis thaliana
tcagtcatccagtggca

SEQ ID NO: 137852 - DNA, 17 bp, Arabidopsis thaliana
tcagtcatcggctgatc

SEQ ID NO: 137853 - DNA, 17 bp, Arabidopsis thaliana
tcagtcatcttgcggac

SEQ ID NO: 137854 - DNA, 17 bp, Arabidopsis thaliana
tcagtcattcagcccct

SEQ ID NO: 137855 - DNA, 17 bp, Arabidopsis thaliana
tcagtcattgcaaaacg

SEQ ID NO: 137856 - DNA, 17 bp, Arabidopsis thaliana
tcagtccaaaacctctt

SEQ ID NO: 137857 - DNA, 17 bp, Arabidopsis thaliana
tcagtccaggcggcgat

SEQ ID NO: 137858 - DNA, 17 bp, Arabidopsis thaliana
tcagtcccgctctgctt

SEQ ID NO: 137859 - DNA, 17 bp, Arabidopsis thaliana
tcagtccgactttgtga

SEQ ID NO: 137860 - DNA, 17 bp, Arabidopsis thaliana
tcagtccgattttttgc

SEQ ID NO: 137861 - DNA, 17 bp, Arabidopsis thaliana
tcagtcctttgtcgcta

SEQ ID NO: 137862 - DNA, 17 bp, Arabidopsis thaliana
tcagtcgaaggagtagt

SEQ ID NO: 137863 - DNA, 17 bp, Arabidopsis thaliana
tcagtcgattttctttc

SEQ ID NO: 137864 - DNA, 17 bp, Arabidopsis thaliana
tcagtcgcaccctgtag

SEQ ID NO: 137865 - DNA, 17 bp, Arabidopsis thaliana
tcagtcgcacctgtaga

SEQ ID NO: 137866 - DNA, 17 bp, Arabidopsis thaliana
tcagtcgcatcctgtag

SEQ ID NO: 137867 - DNA, 17 bp, Arabidopsis thaliana
tcagtcgcgctgtagat

SEQ ID NO: 137868 - DNA, 17 bp, Arabidopsis thaliana
tcagtcgctggttgctg

SEQ ID NO: 137869 - DNA, 17 bp, Arabidopsis thaliana
tcagtcgctgtgtccat

SEQ ID NO: 137870 - DNA, 17 bp, Arabidopsis thaliana
tcagtcgcttgccagga

SEQ ID NO: 137871 - DNA, 17 bp, Arabidopsis thaliana
tcagtcggaccggacgg

SEQ ID NO: 137872 - DNA, 17 bp, Arabidopsis thaliana
tcagtcggatattcgct

SEQ ID NO: 137873 - DNA, 17 bp, Arabidopsis thaliana
tcagtcgtcatcttcac

SEQ ID NO: 137874 - DNA, 17 bp, Arabidopsis thaliana
tcagtcgtctattggca

SEQ ID NO: 137875 - DNA, 17 bp, Arabidopsis thaliana
tcagtctaccaggattg

SEQ ID NO: 137876 - DNA, 17 bp, Arabidopsis thaliana
tcagtctagaactcgca

SEQ ID NO: 137877 - DNA, 17 bp, Arabidopsis thaliana
tcagtctagattctgtg

SEQ ID NO: 137878 - DNA, 17 bp, Arabidopsis thaliana
tcagtctagcagagcag

SEQ ID NO: 137879 - DNA, 17 bp, Arabidopsis thaliana
tcagtctagtttgcttc

SEQ ID NO: 137880 - DNA, 17 bp, Arabidopsis thaliana
tcagtctatccagtttc

SEQ ID NO: 137881 - DNA, 17 bp, Arabidopsis thaliana
tcagtctcactcttctt

SEQ ID NO: 137882 - DNA, 17 bp, Arabidopsis thaliana
tcagtctcagaatttgt

SEQ ID NO: 137883 - DNA, 17 bp, Arabidopsis thaliana
tcagtctcggaagcgtg

SEQ ID NO: 137884 - DNA, 17 bp, Arabidopsis thaliana
tcagtctcggaggacag

SEQ ID NO: 137885 - DNA, 17 bp, Arabidopsis thaliana
tcagtctctggtgctgg

SEQ ID NO: 137886 - DNA, 17 bp, Arabidopsis thaliana
tcagtctgaccatcact

SEQ ID NO: 137887 - DNA, 17 bp, Arabidopsis thaliana
tcagtctgcctgggtgt

SEQ ID NO: 137888 - DNA, 17 bp, Arabidopsis thaliana
tcagtctgggcatggat

SEQ ID NO: 137889 - DNA, 17 bp, Arabidopsis thaliana
tcagtctggtaaaagct

SEQ ID NO: 137890 - DNA, 17 bp, Arabidopsis thaliana
tcagtctgtcaccatca

SEQ ID NO: 137891 - DNA, 17 bp, Arabidopsis thaliana
tcagtcttgagcgtctg

SEQ ID NO: 137892 - DNA, 17 bp, Arabidopsis thaliana
tcagtcttgtctactgt

SEQ ID NO: 137893 - DNA, 17 bp, Arabidopsis thaliana
tcagtctttgtcgctaa

SEQ ID NO: 137894 - DNA, 17 bp, Arabidopsis thaliana
tcagtgaaagtggaacg

SEQ ID NO: 137895 - DNA, 17 bp, Arabidopsis thaliana
tcagtgacagagtttct

SEQ ID NO: 137896 - DNA, 17 bp, Arabidopsis thaliana
tcagtgaccacgttggt

SEQ ID NO: 137897 - DNA, 17 bp, Arabidopsis thaliana
tcagtgaccgtctttgg

SEQ ID NO: 137898 - DNA, 17 bp, Arabidopsis thaliana
tcagtgaccgtgttggg

SEQ ID NO: 137899 - DNA, 17 bp, Arabidopsis thaliana
tcagtgaccgtgtttat

SEQ ID NO: 137900 - DNA, 17 bp, Arabidopsis thaliana
tcagtgacctggtctac

SEQ ID NO: 137901 - DNA, 17 bp, Arabidopsis thaliana
tcagtgacgggaatcac

SEQ ID NO: 137902 - DNA, 17 bp, Arabidopsis thaliana
tcagtgactactttgcc

SEQ ID NO: 137903 - DNA, 17 bp, Arabidopsis thaliana
tcagtgactctgaatct

SEQ ID NO: 137904 - DNA, 17 bp, Arabidopsis thaliana
tcagtgactgattcaat

SEQ ID NO: 137905 - DNA, 17 bp, Arabidopsis thaliana
tcagtgagccgagtcac

SEQ ID NO: 137906 - DNA, 17 bp, Arabidopsis thaliana
tcagtgatgaaggatcc

SEQ ID NO: 137907 - DNA, 17 bp, Arabidopsis thaliana
tcagtgattcagttgcc

SEQ ID NO: 137908 - DNA, 17 bp, Arabidopsis thaliana
tcagtgatttggtcaag

SEQ ID NO: 137909 - DNA, 17 bp, Arabidopsis thaliana
tcagtgcattaattctt

SEQ ID NO: 137910 - DNA, 17 bp, Arabidopsis thaliana
tcagtgcatttctaccg

SEQ ID NO: 137911 - DNA, 17 bp, Arabidopsis thaliana
tcagtgccaaaactgct

SEQ ID NO: 137912 - DNA, 17 bp, Arabidopsis thaliana
tcagtgccagctgtcgc

SEQ ID NO: 137913 - DNA, 17 bp, Arabidopsis thaliana
tcagtgccgccttcgtg

SEQ ID NO: 137914 - DNA, 17 bp, Arabidopsis thaliana
tcagtgccggttgggtc

SEQ ID NO: 137915 - DNA, 17 bp, Arabidopsis thaliana
tcagtgcctctgtggcg

SEQ ID NO: 137916 - DNA, 17 bp, Arabidopsis thaliana
tcagtgcggttttgtgt

SEQ ID NO: 137917 - DNA, 17 bp, Arabidopsis thaliana
tcagtgcgtggacaaga

SEQ ID NO: 137918 - DNA, 17 bp, Arabidopsis thaliana
tcagtgctctagtattt

SEQ ID NO: 137919 - DNA, 17 bp, Arabidopsis thaliana
tcagtggacgaaagtac

SEQ ID NO: 137920 - DNA, 17 bp, Arabidopsis thaliana
tcagtggactgatacag

SEQ ID NO: 137921 - DNA, 17 bp, Arabidopsis thaliana
tcagtggactgatatct

SEQ ID NO: 137922 - DNA, 17 bp, Arabidopsis thaliana
tcagtggactgatgata

SEQ ID NO: 137923 - DNA, 17 bp, Arabidopsis thaliana
tcagtggatcgaaacag

SEQ ID NO: 137924 - DNA, 17 bp, Arabidopsis thaliana
tcagtggatgttgtgga

SEQ ID NO: 137925 - DNA, 17 bp, Arabidopsis thaliana
tcagtggattcattgta

SEQ ID NO: 137926 - DNA, 17 bp, Arabidopsis thaliana
tcagtggattcattgtg

SEQ ID NO: 137927 - DNA, 17 bp, Arabidopsis thaliana
tcagtggccctagacgg

SEQ ID NO: 137928 - DNA, 17 bp, Arabidopsis thaliana
tcagtggcgctctattc

SEQ ID NO: 137929 - DNA, 17 bp, Arabidopsis thaliana
tcagtggctcactgcct

SEQ ID NO: 137930 - DNA, 17 bp, Arabidopsis thaliana
tcagtggctcactgcta

SEQ ID NO: 137931 - DNA, 17 bp, Arabidopsis thaliana
tcagtggctccattacc

SEQ ID NO: 137932 - DNA, 17 bp, Arabidopsis thaliana
tcagtggcttcatgatc

SEQ ID NO: 137933 - DNA, 17 bp, Arabidopsis thaliana
tcagtgggaggagccct

SEQ ID NO: 137934 - DNA, 17 bp, Arabidopsis thaliana
tcagtggtagagccgcc

SEQ ID NO: 137935 - DNA, 17 bp, Arabidopsis thaliana
tcagtggtagagcgcgt

SEQ ID NO: 137936 - DNA, 17 bp, Arabidopsis thaliana
tcagtggtggtttaccg

SEQ ID NO: 137937 - DNA, 17 bp, Arabidopsis thaliana
tcagtgtacctctcgaa

SEQ ID NO: 137938 - DNA, 17 bp, Arabidopsis thaliana
tcagtgtaggcgctgac

SEQ ID NO: 137939 - DNA, 17 bp, Arabidopsis thaliana
tcagtgtcatctggcaa

SEQ ID NO: 137940 - DNA, 17 bp, Arabidopsis thaliana
tcagtgtccagaccata

SEQ ID NO: 137941 - DNA, 17 bp, Arabidopsis thaliana
tcagtgtctcgagtgtg

SEQ ID NO: 137942 - DNA, 17 bp, Arabidopsis thaliana
tcagtgtctgagtcgca

SEQ ID NO: 137943 - DNA, 17 bp, Arabidopsis thaliana
tcagtgtgactttgctg

SEQ ID NO: 137944 - DNA, 17 bp, Arabidopsis thaliana
tcagtgtgcatgaccaa

SEQ ID NO: 137945 - DNA, 17 bp, Arabidopsis thaliana
tcagtgtgctagtgcac

SEQ ID NO: 137946 - DNA, 17 bp, Arabidopsis thaliana
tcagtgtgctgacagct

SEQ ID NO: 137947 - DNA, 17 bp, Arabidopsis thaliana
tcagtgtgtccacaaaa

SEQ ID NO: 137948 - DNA, 17 bp, Arabidopsis thaliana
tcagtgttaattgagtt

SEQ ID NO: 137949 - DNA, 17 bp, Arabidopsis thaliana
tcagtgttacaccactg

SEQ ID NO: 137950 - DNA, 17 bp, Arabidopsis thaliana
tcagtgtttgcttagtc

SEQ ID NO: 137951 - DNA, 17 bp, Arabidopsis thaliana
tcagttaaaatttgttg

SEQ ID NO: 137952 - DNA, 17 bp, Arabidopsis thaliana
tcagttaaccacagctt

SEQ ID NO: 137953 - DNA, 17 bp, Arabidopsis thaliana
tcagttaagacgggtgt

SEQ ID NO: 137954 - DNA, 17 bp, Arabidopsis thaliana
tcagttaattagtggct

SEQ ID NO: 137955 - DNA, 17 bp, Arabidopsis thaliana
tcagttaccacagggat

SEQ ID NO: 137956 - DNA, 17 bp, Arabidopsis thaliana
tcagttaggattgtcag

SEQ ID NO: 137957 - DNA, 17 bp, Arabidopsis thaliana
tcagttatagtttgttt

SEQ ID NO: 137958 - DNA, 17 bp, Arabidopsis thaliana
tcagttattcgcttgtt

SEQ ID NO: 137959 - DNA, 17 bp, Arabidopsis thaliana
tcagttcaatcgacggt

SEQ ID NO: 137960 - DNA, 17 bp, Arabidopsis thaliana
tcagttcaccacgttcc

SEQ ID NO: 137961 - DNA, 17 bp, Arabidopsis thaliana
tcagttcagattggctt

SEQ ID NO: 137962 - DNA, 17 bp, Arabidopsis thaliana
tcagttcatccactcat

SEQ ID NO: 137963 - DNA, 17 bp, Arabidopsis thaliana
tcagttccattcatcca

SEQ ID NO: 137964 - DNA, 17 bp, Arabidopsis thaliana
tcagttcgattttcggt

SEQ ID NO: 137965 - DNA, 17 bp, Arabidopsis thaliana
tcagttcgcaataagcc

SEQ ID NO: 137966 - DNA, 17 bp, Arabidopsis thaliana
tcagttcggttcggttg

SEQ ID NO: 137967 - DNA, 17 bp, Arabidopsis thaliana
tcagttctactcggttg

SEQ ID NO: 137968 - DNA, 17 bp, Arabidopsis thaliana
tcagttctaggttttct

SEQ ID NO: 137969 - DNA, 17 bp, Arabidopsis thaliana
tcagttctcagttgcag

SEQ ID NO: 137970 - DNA, 17 bp, Arabidopsis thaliana
tcagttctcggaatgcc

SEQ ID NO: 137971 - DNA, 17 bp, Arabidopsis thaliana
tcagttctgggtttccg

SEQ ID NO: 137972 - DNA, 17 bp, Arabidopsis thaliana
tcagttctttgactctt

SEQ ID NO: 137973 - DNA, 17 bp, Arabidopsis thaliana
tcagttgaccaatctcg

SEQ ID NO: 137974 - DNA, 17 bp, Arabidopsis thaliana
tcagttgaccagtccgc

SEQ ID NO: 137975 - DNA, 17 bp, Arabidopsis thaliana
tcagttgaccctgttgg

SEQ ID NO: 137976 - DNA, 17 bp, Arabidopsis thaliana
tcagttgacttgcctat

SEQ ID NO: 137977 - DNA, 17 bp, Arabidopsis thaliana
tcagttgagcccttttc

SEQ ID NO: 137978 - DNA, 17 bp, Arabidopsis thaliana
tcagttgagccttggtc

SEQ ID NO: 137979 - DNA, 17 bp, Arabidopsis thaliana
tcagttgaggggtgcta

SEQ ID NO: 137980 - DNA, 17 bp, Arabidopsis thaliana
tcagttgatttttgccg

SEQ ID NO: 137981 - DNA, 17 bp, Arabidopsis thaliana
tcagttgccgtagacca

SEQ ID NO: 137982 - DNA, 17 bp, Arabidopsis thaliana
tcagttgcctgtgttgt

SEQ ID NO: 137983 - DNA, 17 bp, Arabidopsis thaliana
tcagttgcctgtgtttt

SEQ ID NO: 137984 - DNA, 17 bp, Arabidopsis thaliana
tcagttgcggctggtgc

SEQ ID NO: 137985 - DNA, 17 bp, Arabidopsis thaliana
tcagttggaacgattga

SEQ ID NO: 137986 - DNA, 17 bp, Arabidopsis thaliana
tcagttggatcacggat

SEQ ID NO: 137987 - DNA, 17 bp, Arabidopsis thaliana
tcagttggattcggttt

SEQ ID NO: 137988 - DNA, 17 bp, Arabidopsis thaliana
tcagttggattgttgcg

SEQ ID NO: 137989 - DNA, 17 bp, Arabidopsis thaliana
tcagttggccgaaaact

SEQ ID NO: 137990 - DNA, 17 bp, Arabidopsis thaliana
tcagttggcggactgcc

SEQ ID NO: 137991 - DNA, 17 bp, Arabidopsis thaliana
tcagttggctgatcggt

SEQ ID NO: 137992 - DNA, 17 bp, Arabidopsis thaliana
tcagttgggcattgacc

SEQ ID NO: 137993 - DNA, 17 bp, Arabidopsis thaliana
tcagttgggcttcggcc

SEQ ID NO: 137994 - DNA, 17 bp, Arabidopsis thaliana
tcagttgggctttggcc

SEQ ID NO: 137995 - DNA, 17 bp, Arabidopsis thaliana
tcagttggtcgctgctt

SEQ ID NO: 137996 - DNA, 17 bp, Arabidopsis thaliana
tcagttggttaaagatt

SEQ ID NO: 137997 - DNA, 17 bp, Arabidopsis thaliana
tcagttggttaaagcta

SEQ ID NO: 137998 - DNA, 17 bp, Arabidopsis thaliana
tcagttggttaaagctt

SEQ ID NO: 137999 - DNA, 17 bp, Arabidopsis thaliana
tcagttggttaaaggtt

SEQ ID NO: 138000 - DNA, 17 bp, Arabidopsis thaliana
tcagttggttcaggaga

SEQ ID NO: 138001 - DNA, 17 bp, Arabidopsis thaliana
tcagttgtccagcgttt

SEQ ID NO: 138002 - DNA, 17 bp, Arabidopsis thaliana
tcagttgtgtcttctat

SEQ ID NO: 138003 - DNA, 17 bp, Arabidopsis thaliana
tcagttgttccgagtac

SEQ ID NO: 138004 - DNA, 17 bp, Arabidopsis thaliana
tcagttgttgatcagga

SEQ ID NO: 138005 - DNA, 17 bp, Arabidopsis thaliana
tcagtttaactcaggtg

SEQ ID NO: 138006 - DNA, 17 bp, Arabidopsis thaliana
tcagtttagccaggttt

SEQ ID NO: 138007 - DNA, 17 bp, Arabidopsis thaliana
tcagtttaggatctttg

SEQ ID NO: 138008 - DNA, 17 bp, Arabidopsis thaliana
tcagtttataggctgtt

SEQ ID NO: 138009 - DNA, 17 bp, Arabidopsis thaliana
tcagtttatagtttcgg

SEQ ID NO: 138010 - DNA, 17 bp, Arabidopsis thaliana
tcagtttcaccagactt

SEQ ID NO: 138011 - DNA, 17 bp, Arabidopsis thaliana
tcagtttcacgggcttg

SEQ ID NO: 138012 - DNA, 17 bp, Arabidopsis thaliana
tcagtttcagcacagac

SEQ ID NO: 138013 - DNA, 17 bp, Arabidopsis thaliana
tcagtttcagtttggtc

SEQ ID NO: 138014 - DNA, 17 bp, Arabidopsis thaliana
tcagtttcccttgtgat

SEQ ID NO: 138015 - DNA, 17 bp, Arabidopsis thaliana
tcagtttccgacaaata

SEQ ID NO: 138016 - DNA, 17 bp, Arabidopsis thaliana
tcagtttccgacaaatt

SEQ ID NO: 138017 - DNA, 17 bp, Arabidopsis thaliana
tcagtttccgacgaatt

SEQ ID NO: 138018 - DNA, 17 bp, Arabidopsis thaliana
tcagtttccgactaatt

SEQ ID NO: 138019 - DNA, 17 bp, Arabidopsis thaliana
tcagtttccttagcagg

SEQ ID NO: 138020 - DNA, 17 bp, Arabidopsis thaliana
tcagtttcgatcttgat

SEQ ID NO: 138021 - DNA, 17 bp, Arabidopsis thaliana
tcagtttctgctgctgg

SEQ ID NO: 138022 - DNA, 17 bp, Arabidopsis thaliana
tcagtttcttgcgcata

SEQ ID NO: 138023 - DNA, 17 bp, Arabidopsis thaliana
tcagtttcttgttcctc

SEQ ID NO: 138024 - DNA, 17 bp, Arabidopsis thaliana
tcagtttctttgatgac

SEQ ID NO: 138025 - DNA, 17 bp, Arabidopsis thaliana
tcagtttgcagagacct

SEQ ID NO: 138026 - DNA, 17 bp, Arabidopsis thaliana
tcagtttggaagcacta

SEQ ID NO: 138027 - DNA, 17 bp, Arabidopsis thaliana
tcagtttgggtcaacta

SEQ ID NO: 138028 - DNA, 17 bp, Arabidopsis thaliana
tcagtttgtagagacct

SEQ ID NO: 138029 - DNA, 17 bp, Arabidopsis thaliana
tcagtttgtgaagcgat

SEQ ID NO: 138030 - DNA, 17 bp, Arabidopsis thaliana
tcagtttgtgctgtcac

SEQ ID NO: 138031 - DNA, 17 bp, Arabidopsis thaliana
tcagtttgttctcggtt

SEQ ID NO: 138032 - DNA, 17 bp, Arabidopsis thaliana
tcagttttcgtcaggtg

SEQ ID NO: 138033 - DNA, 17 bp, Arabidopsis thaliana
tcagttttgctcataag

SEQ ID NO: 138034 - DNA, 17 bp, Arabidopsis thaliana
tcagtttttcatggtga

SEQ ID NO: 138035 - DNA, 17 bp, Arabidopsis thaliana
tcagtttttcgcttgtt

SEQ ID NO: 138036 - DNA, 17 bp, Arabidopsis thaliana
tcagttttttctatagt

SEQ ID NO: 138037 - DNA, 17 bp, Arabidopsis thaliana
tcataaatcttcttggg

SEQ ID NO: 138038 - DNA, 17 bp, Arabidopsis thaliana
tcataaccatcgggaac

SEQ ID NO: 138039 - DNA, 17 bp, Arabidopsis thaliana
tcataagattatgccac

SEQ ID NO: 138040 - DNA, 17 bp, Arabidopsis thaliana
tcataagattgtgccac

SEQ ID NO: 138041 - DNA, 17 bp, Arabidopsis thaliana
tcataagcctattgctc

SEQ ID NO: 138042 - DNA, 17 bp, Arabidopsis thaliana
tcataatcgctaagtcc

SEQ ID NO: 138043 - DNA, 17 bp, Arabidopsis thaliana
tcatacactcatcatct

SEQ ID NO: 138044 - DNA, 17 bp, Arabidopsis thaliana
tcatacatcaacttcgt

SEQ ID NO: 138045 - DNA, 17 bp, Arabidopsis thaliana
tcataccagtgatcgct

SEQ ID NO: 138046 - DNA, 17 bp, Arabidopsis thaliana
tcatacccggccgtcgg

SEQ ID NO: 138047 - DNA, 17 bp, Arabidopsis thaliana
tcatacgaaggcgggag

SEQ ID NO: 138048 - DNA, 17 bp, Arabidopsis thaliana
tcatacggtggattgcg

SEQ ID NO: 138049 - DNA, 17 bp, Arabidopsis thaliana
tcatacgtggattcaac

SEQ ID NO: 138050 - DNA, 17 bp, Arabidopsis thaliana
tcatactaatgcgtcac

SEQ ID NO: 138051 - DNA, 17 bp, Arabidopsis thaliana
tcatactcgaccaccta

SEQ ID NO: 138052 - DNA, 17 bp, Arabidopsis thaliana
tcatactcgaccttgtt

SEQ ID NO: 138053 - DNA, 17 bp, Arabidopsis thaliana
tcatactcgactaccca

SEQ ID NO: 138054 - DNA, 17 bp, Arabidopsis thaliana
tcatactcgatcatcat

SEQ ID NO: 138055 - DNA, 17 bp, Arabidopsis thaliana
tcatactggatcagatt

SEQ ID NO: 138056 - DNA, 17 bp, Arabidopsis thaliana
tcatacttcgccgtttt

SEQ ID NO: 138057 - DNA, 17 bp, Arabidopsis thaliana
tcatacttgggcttagt

SEQ ID NO: 138058 - DNA, 17 bp, Arabidopsis thaliana
tcatactttgaccgtaa

SEQ ID NO: 138059 - DNA, 17 bp, Arabidopsis thaliana
tcatagacgattctacc

SEQ ID NO: 138060 - DNA, 17 bp, Arabidopsis thaliana
tcatagattgtccgtta

SEQ ID NO: 138061 - DNA, 17 bp, Arabidopsis thaliana
tcatagcccaagcccta

SEQ ID NO: 138062 - DNA, 17 bp, Arabidopsis thaliana
tcatagccgcagtgttt

SEQ ID NO: 138063 - DNA, 17 bp, Arabidopsis thaliana
tcatagcgacgttgctt

SEQ ID NO: 138064 - DNA, 17 bp, Arabidopsis thaliana
tcatagcgtttccgtct

SEQ ID NO: 138065 - DNA, 17 bp, Arabidopsis thaliana
tcataggaccgtcccac

SEQ ID NO: 138066 - DNA, 17 bp, Arabidopsis thaliana
tcataggaccgtgccac

SEQ ID NO: 138067 - DNA, 17 bp, Arabidopsis thaliana
tcataggaccttgccac

SEQ ID NO: 138068 - DNA, 17 bp, Arabidopsis thaliana
tcataggactccgccgg

SEQ ID NO: 138069 - DNA, 17 bp, Arabidopsis thaliana
tcataggactccgctgg

SEQ ID NO: 138070 - DNA, 17 bp, Arabidopsis thaliana
tcataggatcgtgcaac

SEQ ID NO: 138071 - DNA, 17 bp, Arabidopsis thaliana
tcataggattatgccac

SEQ ID NO: 138072 - DNA, 17 bp, Arabidopsis thaliana
tcataggattgtgccac

SEQ ID NO: 138073 - DNA, 17 bp, Arabidopsis thaliana
tcataggattgtgccat

SEQ ID NO: 138074 - DNA, 17 bp, Arabidopsis thaliana
tcataggattgtgctac

SEQ ID NO: 138075 - DNA, 17 bp, Arabidopsis thaliana
tcataggcagcggcttg

SEQ ID NO: 138076 - DNA, 17 bp, Arabidopsis thaliana
tcatagtcctaattcgt

SEQ ID NO: 138077 - DNA, 17 bp, Arabidopsis thaliana
tcatagtcgttcgccag

SEQ ID NO: 138078 - DNA, 17 bp, Arabidopsis thaliana
tcatagtctcgggcatg

SEQ ID NO: 138079 - DNA, 17 bp, Arabidopsis thaliana
tcatagttccaagatca

SEQ ID NO: 138080 - DNA, 17 bp, Arabidopsis thaliana
tcatagttcttggaacg

SEQ ID NO: 138081 - DNA, 17 bp, Arabidopsis thaliana
tcatatcactgcaagtc

SEQ ID NO: 138082 - DNA, 17 bp, Arabidopsis thaliana
tcatatccatctgggaa

SEQ ID NO: 138083 - DNA, 17 bp, Arabidopsis thaliana
tcatatcctgtctgtta

SEQ ID NO: 138084 - DNA, 17 bp, Arabidopsis thaliana
tcatatctctgcgcttt

SEQ ID NO: 138085 - DNA, 17 bp, Arabidopsis thaliana
tcatatctggactgaga

SEQ ID NO: 138086 - DNA, 17 bp, Arabidopsis thaliana
tcatatcttgcagtcgt

SEQ ID NO: 138087 - DNA, 17 bp, Arabidopsis thaliana
tcatatcttgcagttgt

SEQ ID NO: 138088 - DNA, 17 bp, Arabidopsis thaliana
tcatatgacctgaatgc

SEQ ID NO: 138089 - DNA, 17 bp, Arabidopsis thaliana
tcatatgcatttggact

SEQ ID NO: 138090 - DNA, 17 bp, Arabidopsis thaliana
tcatatgcgaatcctgc

SEQ ID NO: 138091 - DNA, 17 bp, Arabidopsis thaliana
tcatatgctgatgtgtc

SEQ ID NO: 138092 - DNA, 17 bp, Arabidopsis thaliana
tcatatggagagagttt

SEQ ID NO: 138093 - DNA, 17 bp, Arabidopsis thaliana
tcatatgggatttagtc

SEQ ID NO: 138094 - DNA, 17 bp, Arabidopsis thaliana
tcatatggtatcagagc

SEQ ID NO: 138095 - DNA, 17 bp, Arabidopsis thaliana
tcatatgtcaagtctgt

SEQ ID NO: 138096 - DNA, 17 bp, Arabidopsis thaliana
tcatattatggacggga

SEQ ID NO: 138097 - DNA, 17 bp, Arabidopsis thaliana
tcatattcaaggttcgc

SEQ ID NO: 138098 - DNA, 17 bp, Arabidopsis thaliana
tcatattcatcagcatg

SEQ ID NO: 138099 - DNA, 17 bp, Arabidopsis thaliana
tcatattcattttggca

SEQ ID NO: 138100 - DNA, 17 bp, Arabidopsis thaliana
tcatattggcttctacc

SEQ ID NO: 138101 - DNA, 17 bp, Arabidopsis thaliana
tcatattttcatgtgtg

SEQ ID NO: 138102 - DNA, 17 bp, Arabidopsis thaliana
tcatcaaaactcctgaa

SEQ ID NO: 138103 - DNA, 17 bp, Arabidopsis thaliana
tcatcaaacttggtgat

SEQ ID NO: 138104 - DNA, 17 bp, Arabidopsis thaliana
tcatcaaacttgtctcg

SEQ ID NO: 138105 - DNA, 17 bp, Arabidopsis thaliana
tcatcaaagtagagtgc

SEQ ID NO: 138106 - DNA, 17 bp, Arabidopsis thaliana
tcatcaaatttggacag

SEQ ID NO: 138107 - DNA, 17 bp, Arabidopsis thaliana
tcatcaacacaattatc

SEQ ID NO: 138108 - DNA, 17 bp, Arabidopsis thaliana
tcatcaacagagggtcg

SEQ ID NO: 138109 - DNA, 17 bp, Arabidopsis thaliana
tcatcaacagcttccag

SEQ ID NO: 138110 - DNA, 17 bp, Arabidopsis thaliana
tcatcaacattgtagtc

SEQ ID NO: 138111 - DNA, 17 bp, Arabidopsis thaliana
tcatcaacgccatagcg

SEQ ID NO: 138112 - DNA, 17 bp, Arabidopsis thaliana
tcatcaacgtagaccag

SEQ ID NO: 138113 - DNA, 17 bp, Arabidopsis thaliana
tcatcaactcatttgac

SEQ ID NO: 138114 - DNA, 17 bp, Arabidopsis thaliana
tcatcaacttcgtatgt

SEQ ID NO: 138115 - DNA, 17 bp, Arabidopsis thaliana
tcatcaacttctagcaa

SEQ ID NO: 138116 - DNA, 17 bp, Arabidopsis thaliana
tcatcaagaggtcgagg

SEQ ID NO: 138117 - DNA, 17 bp, Arabidopsis thaliana
tcatcaagctttgatca

SEQ ID NO: 138118 - DNA, 17 bp, Arabidopsis thaliana
tcatcaaggatttctcc

SEQ ID NO: 138119 - DNA, 17 bp, Arabidopsis thaliana
tcatcaatggtgactgg

SEQ ID NO: 138120 - DNA, 17 bp, Arabidopsis thaliana
tcatcaattataatttg

SEQ ID NO: 138121 - DNA, 17 bp, Arabidopsis thaliana
tcatcaatttcgtatgc

SEQ ID NO: 138122 - DNA, 17 bp, Arabidopsis thaliana
tcatcaccagatttttt

SEQ ID NO: 138123 - DNA, 17 bp, Arabidopsis thaliana
tcatcaccataagtgag

SEQ ID NO: 138124 - DNA, 17 bp, Arabidopsis thaliana
tcatcaccatcatttag

SEQ ID NO: 138125 - DNA, 17 bp, Arabidopsis thaliana
tcatcaccccaagtgtc

SEQ ID NO: 138126 - DNA, 17 bp, Arabidopsis thaliana
tcatcaccctctgggag

SEQ ID NO: 138127 - DNA, 17 bp, Arabidopsis thaliana
tcatcaccgtcgttttg

SEQ ID NO: 138128 - DNA, 17 bp, Arabidopsis thaliana
tcatcacgggtttacgt

SEQ ID NO: 138129 - DNA, 17 bp, Arabidopsis thaliana
tcatcactgaacgtgaa

SEQ ID NO: 138130 - DNA, 17 bp, Arabidopsis thaliana
tcatcactgagaaccgc

SEQ ID NO: 138131 - DNA, 17 bp, Arabidopsis thaliana
tcatcagaaggtgagtt

SEQ ID NO: 138132 - DNA, 17 bp, Arabidopsis thaliana
tcatcagagtccgctgc

SEQ ID NO: 138133 - DNA, 17 bp, Arabidopsis thaliana
tcatcagatcaaccagg

SEQ ID NO: 138134 - DNA, 17 bp, Arabidopsis thaliana
tcatcagatctggagag

SEQ ID NO: 138135 - DNA, 17 bp, Arabidopsis thaliana
tcatcagcagaacaagc

SEQ ID NO: 138136 - DNA, 17 bp, Arabidopsis thaliana
tcatcagcatgaccgat

SEQ ID NO: 138137 - DNA, 17 bp, Arabidopsis thaliana
tcatcagccctttgtcg

SEQ ID NO: 138138 - DNA, 17 bp, Arabidopsis thaliana
tcatcagcgaggacgat

SEQ ID NO: 138139 - DNA, 17 bp, Arabidopsis thaliana
tcatcagctcgcgtgcg

SEQ ID NO: 138140 - DNA, 17 bp, Arabidopsis thaliana
tcatcagctcgcgttga

SEQ ID NO: 138141 - DNA, 17 bp, Arabidopsis thaliana
tcatcagctctatggcg

SEQ ID NO: 138142 - DNA, 17 bp, Arabidopsis thaliana
tcatcagctctctggtg

SEQ ID NO: 138143 - DNA, 17 bp, Arabidopsis thaliana
tcatcagcttgcgttga

SEQ ID NO: 138144 - DNA, 17 bp, Arabidopsis thaliana
tcatcagctttgtggcg

SEQ ID NO: 138145 - DNA, 17 bp, Arabidopsis thaliana
tcatcaggagattttga

SEQ ID NO: 138146 - DNA, 17 bp, Arabidopsis thaliana
tcatcaggagtccaagg

SEQ ID NO: 138147 - DNA, 17 bp, Arabidopsis thaliana
tcatcagggattgtgag

SEQ ID NO: 138148 - DNA, 17 bp, Arabidopsis thaliana
tcatcaggtctccaagg

SEQ ID NO: 138149 - DNA, 17 bp, Arabidopsis thaliana
tcatcaggtctgaacag

SEQ ID NO: 138150 - DNA, 17 bp, Arabidopsis thaliana
tcatcaggttaattgtc

SEQ ID NO: 138151 - DNA, 17 bp, Arabidopsis thaliana
tcatcaggtttcatttc

SEQ ID NO: 138152 - DNA, 17 bp, Arabidopsis thaliana
tcatcaggtttctgaag

SEQ ID NO: 138153 - DNA, 17 bp, Arabidopsis thaliana
tcatcaggttttttcgt

SEQ ID NO: 138154 - DNA, 17 bp, Arabidopsis thaliana
tcatcagtgttcgattc

SEQ ID NO: 138155 - DNA, 17 bp, Arabidopsis thaliana
tcatcagttctcggttg

SEQ ID NO: 138156 - DNA, 17 bp, Arabidopsis thaliana
tcatcataccccacttc

SEQ ID NO: 138157 - DNA, 17 bp, Arabidopsis thaliana
tcatcatatcctgttga

SEQ ID NO: 138158 - DNA, 17 bp, Arabidopsis thaliana
tcatcatcccaggtggt

SEQ ID NO: 138159 - DNA, 17 bp, Arabidopsis thaliana
tcatcatccgccgtggc

SEQ ID NO: 138160 - DNA, 17 bp, Arabidopsis thaliana
tcatcatcgccttgcgt

SEQ ID NO: 138161 - DNA, 17 bp, Arabidopsis thaliana
tcatcatcgctgatacg

SEQ ID NO: 138162 - DNA, 17 bp, Arabidopsis thaliana
tcatcatcgtttgcgtc

SEQ ID NO: 138163 - DNA, 17 bp, Arabidopsis thaliana
tcatcatctaagcccat

SEQ ID NO: 138164 - DNA, 17 bp, Arabidopsis thaliana
tcatcatctccgtccag

SEQ ID NO: 138165 - DNA, 17 bp, Arabidopsis thaliana
tcatcatctcgaaaggt

SEQ ID NO: 138166 - DNA, 17 bp, Arabidopsis thaliana
tcatcatctggtcacgg

SEQ ID NO: 138167 - DNA, 17 bp, Arabidopsis thaliana
tcatcatcttccggtgt

SEQ ID NO: 138168 - DNA, 17 bp, Arabidopsis thaliana
tcatcatcttctgaagc

SEQ ID NO: 138169 - DNA, 17 bp, Arabidopsis thaliana
tcatcatcttgtccgtt

SEQ ID NO: 138170 - DNA, 17 bp, Arabidopsis thaliana
tcatcatgaactttgca

SEQ ID NO: 138171 - DNA, 17 bp, Arabidopsis thaliana
tcatcatgaagtttgca

SEQ ID NO: 138172 - DNA, 17 bp, Arabidopsis thaliana
tcatcatgccccttatg

SEQ ID NO: 138173 - DNA, 17 bp, Arabidopsis thaliana
tcatcatgcgatctctt

SEQ ID NO: 138174 - DNA, 17 bp, Arabidopsis thaliana
tcatcatggcatgcttt

SEQ ID NO: 138175 - DNA, 17 bp, Arabidopsis thaliana
tcatcatgttcaggctg

SEQ ID NO: 138176 - DNA, 17 bp, Arabidopsis thaliana
tcatcatgttcgcagtt

SEQ ID NO: 138177 - DNA, 17 bp, Arabidopsis thaliana
tcatcattcaggtcgcc

SEQ ID NO: 138178 - DNA, 17 bp, Arabidopsis thaliana
tcatcatttccgtcaat

SEQ ID NO: 138179 - DNA, 17 bp, Arabidopsis thaliana
tcatccaagcgaaacga

SEQ ID NO: 138180 - DNA, 17 bp, Arabidopsis thaliana
tcatccaaggtggtgat

SEQ ID NO: 138181 - DNA, 17 bp, Arabidopsis thaliana
tcatccaatttggacag

SEQ ID NO: 138182 - DNA, 17 bp, Arabidopsis thaliana
tcatccacattgtaatc

SEQ ID NO: 138183 - DNA, 17 bp, Arabidopsis thaliana
tcatccaccatcgggta

SEQ ID NO: 138184 - DNA, 17 bp, Arabidopsis thaliana
tcatccaccatctggta

SEQ ID NO: 138185 - DNA, 17 bp, Arabidopsis thaliana
tcatccacgatcgtagg

SEQ ID NO: 138186 - DNA, 17 bp, Arabidopsis thaliana
tcatccactgagattca

SEQ ID NO: 138187 - DNA, 17 bp, Arabidopsis thaliana
tcatccactgtggtgac

SEQ ID NO: 138188 - DNA, 17 bp, Arabidopsis thaliana
tcatccacttaaggtgc

SEQ ID NO: 138189 - DNA, 17 bp, Arabidopsis thaliana
tcatccagatgactcat

SEQ ID NO: 138190 - DNA, 17 bp, Arabidopsis thaliana
tcatccagtggcaacca

SEQ ID NO: 138191 - DNA, 17 bp, Arabidopsis thaliana
tcatccagttgaatgca

SEQ ID NO: 138192 - DNA, 17 bp, Arabidopsis thaliana
tcatccatccttccttg

SEQ ID NO: 138193 - DNA, 17 bp, Arabidopsis thaliana
tcatccatctttcataa

SEQ ID NO: 138194 - DNA, 17 bp, Arabidopsis thaliana
tcatccatgtgtctact

SEQ ID NO: 138195 - DNA, 17 bp, Arabidopsis thaliana
tcatccatgttgtagtc

SEQ ID NO: 138196 - DNA, 17 bp, Arabidopsis thaliana
tcatccattcaaagtgc

SEQ ID NO: 138197 - DNA, 17 bp, Arabidopsis thaliana
tcatccccttccaccgt

SEQ ID NO: 138198 - DNA, 17 bp, Arabidopsis thaliana
tcatccctacatagcgg

SEQ ID NO: 138199 - DNA, 17 bp, Arabidopsis thaliana
tcatccctagcagtggc

SEQ ID NO: 138200 - DNA, 17 bp, Arabidopsis thaliana
tcatccctcgcgggtgc

SEQ ID NO: 138201 - DNA, 17 bp, Arabidopsis thaliana
tcatccgaatgagatgt

SEQ ID NO: 138202 - DNA, 17 bp, Arabidopsis thaliana
tcatccgagttgggacc

SEQ ID NO: 138203 - DNA, 17 bp, Arabidopsis thaliana
tcatccgatcatcccgg

SEQ ID NO: 138204 - DNA, 17 bp, Arabidopsis thaliana
tcatccgcagttgaatc

SEQ ID NO: 138205 - DNA, 17 bp, Arabidopsis thaliana
tcatccgccagttggac

SEQ ID NO: 138206 - DNA, 17 bp, Arabidopsis thaliana
tcatccgcgagttggac

SEQ ID NO: 138207 - DNA, 17 bp, Arabidopsis thaliana
tcatccgctattcttgt

SEQ ID NO: 138208 - DNA, 17 bp, Arabidopsis thaliana
tcatccgcttgcggtct

SEQ ID NO: 138209 - DNA, 17 bp, Arabidopsis thaliana
tcatccggaggaccgag

SEQ ID NO: 138210 - DNA, 17 bp, Arabidopsis thaliana
tcatccgggtggaataa

SEQ ID NO: 138211 - DNA, 17 bp, Arabidopsis thaliana
tcatccgggttaggtac

SEQ ID NO: 138212 - DNA, 17 bp, Arabidopsis thaliana
tcatccggtgaggctcg

SEQ ID NO: 138213 - DNA, 17 bp, Arabidopsis thaliana
tcatccggttaaaattc

SEQ ID NO: 138214 - DNA, 17 bp, Arabidopsis thaliana
tcatccggttcgactga

SEQ ID NO: 138215 - DNA, 17 bp, Arabidopsis thaliana
tcatccgtttgctgtaa

SEQ ID NO: 138216 - DNA, 17 bp, Arabidopsis thaliana
tcatcctaaccgggttc

SEQ ID NO: 138217 - DNA, 17 bp, Arabidopsis thaliana
tcatcctatttgccacg

SEQ ID NO: 138218 - DNA, 17 bp, Arabidopsis thaliana
tcatcctcaaaccatta

SEQ ID NO: 138219 - DNA, 17 bp, Arabidopsis thaliana
tcatcctcctgccactg

SEQ ID NO: 138220 - DNA, 17 bp, Arabidopsis thaliana
tcatcctcgacagatgg

SEQ ID NO: 138221 - DNA, 17 bp, Arabidopsis thaliana
tcatcctcgggatcact

SEQ ID NO: 138222 - DNA, 17 bp, Arabidopsis thaliana
tcatcctcggtgctaac

SEQ ID NO: 138223 - DNA, 17 bp, Arabidopsis thaliana
tcatcctcggtttgcaa

SEQ ID NO: 138224 - DNA, 17 bp, Arabidopsis thaliana
tcatcctcttcgctgga

SEQ ID NO: 138225 - DNA, 17 bp, Arabidopsis thaliana
tcatcctgcaagctgca

SEQ ID NO: 138226 - DNA, 17 bp, Arabidopsis thaliana
tcatcctgcagcttcag

SEQ ID NO: 138227 - DNA, 17 bp, Arabidopsis thaliana
tcatcctggaagccact

SEQ ID NO: 138228 - DNA, 17 bp, Arabidopsis thaliana
tcatcctggcgaacggc

SEQ ID NO: 138229 - DNA, 17 bp, Arabidopsis thaliana
tcatcctgttcatagac

SEQ ID NO: 138230 - DNA, 17 bp, Arabidopsis thaliana
tcatccttgtcgctcag

SEQ ID NO: 138231 - DNA, 17 bp, Arabidopsis thaliana
tcatccttgtcgctctg

SEQ ID NO: 138232 - DNA, 17 bp, Arabidopsis thaliana
tcatcgaggcctggctc

SEQ ID NO: 138233 - DNA, 17 bp, Arabidopsis thaliana
tcatcgcaatagttgct

SEQ ID NO: 138234 - DNA, 17 bp, Arabidopsis thaliana
tcatcgcaatggctatg

SEQ ID NO: 138235 - DNA, 17 bp, Arabidopsis thaliana
tcatcgcacagttgcag

SEQ ID NO: 138236 - DNA, 17 bp, Arabidopsis thaliana
tcatcgcacccgctggt

SEQ ID NO: 138237 - DNA, 17 bp, Arabidopsis thaliana
tcatcgccgaactggtt

SEQ ID NO: 138238 - DNA, 17 bp, Arabidopsis thaliana
tcatcgccgattatgag

SEQ ID NO: 138239 - DNA, 17 bp, Arabidopsis thaliana
tcatcgcctctgtattc

SEQ ID NO: 138240 - DNA, 17 bp, Arabidopsis thaliana
tcatcgcctttggataa

SEQ ID NO: 138241 - DNA, 17 bp, Arabidopsis thaliana
tcatcgcgaatcgtgtg

SEQ ID NO: 138242 - DNA, 17 bp, Arabidopsis thaliana
tcatcgcgcaggctacg

SEQ ID NO: 138243 - DNA, 17 bp, Arabidopsis thaliana
tcatcgcgcttggttga

SEQ ID NO: 138244 - DNA, 17 bp, Arabidopsis thaliana
tcatcgcgggtgcaccg

SEQ ID NO: 138245 - DNA, 17 bp, Arabidopsis thaliana
tcatcgctctgtttgtt

SEQ ID NO: 138246 - DNA, 17 bp, Arabidopsis thaliana
tcatcgctgatacgctt

SEQ ID NO: 138247 - DNA, 17 bp, Arabidopsis thaliana
tcatcgctgcgacaagc

SEQ ID NO: 138248 - DNA, 17 bp, Arabidopsis thaliana
tcatcgctgtttcagag

SEQ ID NO: 138249 - DNA, 17 bp, Arabidopsis thaliana
tcatcgctttggaagtg

SEQ ID NO: 138250 - DNA, 17 bp, Arabidopsis thaliana
tcatcggaaatgcttct

SEQ ID NO: 138251 - DNA, 17 bp, Arabidopsis thaliana
tcatcggaatcgtcgta

SEQ ID NO: 138252 - DNA, 17 bp, Arabidopsis thaliana
tcatcggagaagtgacc

SEQ ID NO: 138253 - DNA, 17 bp, Arabidopsis thaliana
tcatcggagttttgatc

SEQ ID NO: 138254 - DNA, 17 bp, Arabidopsis thaliana
tcatcggatctggcgat

SEQ ID NO: 138255 - DNA, 17 bp, Arabidopsis thaliana
tcatcggattttcacct

SEQ ID NO: 138256 - DNA, 17 bp, Arabidopsis thaliana
tcatcggcacctccagc

SEQ ID NO: 138257 - DNA, 17 bp, Arabidopsis thaliana
tcatcggctgatccggt

SEQ ID NO: 138258 - DNA, 17 bp, Arabidopsis thaliana
tcatcggctgattcggt

SEQ ID NO: 138259 - DNA, 17 bp, Arabidopsis thaliana
tcatcggctggcggact

SEQ ID NO: 138260 - DNA, 17 bp, Arabidopsis thaliana
tcatcggctggcgtact

SEQ ID NO: 138261 - DNA, 17 bp, Arabidopsis thaliana
tcatcggcttgtccctt

SEQ ID NO: 138262 - DNA, 17 bp, Arabidopsis thaliana
tcatcggcttgtttggg

SEQ ID NO: 138263 - DNA, 17 bp, Arabidopsis thaliana
tcatcgggtcccaccgg

SEQ ID NO: 138264 - DNA, 17 bp, Arabidopsis thaliana
tcatcgggttcggattg

SEQ ID NO: 138265 - DNA, 17 bp, Arabidopsis thaliana
tcatcgggttgagtatg

SEQ ID NO: 138266 - DNA, 17 bp, Arabidopsis thaliana
tcatcgtacatcttctg

SEQ ID NO: 138267 - DNA, 17 bp, Arabidopsis thaliana
tcatcgtacatcttttc

SEQ ID NO: 138268 - DNA, 17 bp, Arabidopsis thaliana
tcatcgtacatcttttg

SEQ ID NO: 138269 - DNA, 17 bp, Arabidopsis thaliana
tcatcgtagatgtcaag

SEQ ID NO: 138270 - DNA, 17 bp, Arabidopsis thaliana
tcatcgtatcacgctag

SEQ ID NO: 138271 - DNA, 17 bp, Arabidopsis thaliana
tcatcgtatttagccga

SEQ ID NO: 138272 - DNA, 17 bp, Arabidopsis thaliana
tcatcgtatttggtgcg

SEQ ID NO: 138273 - DNA, 17 bp, Arabidopsis thaliana
tcatcgtcaacgtcacc

SEQ ID NO: 138274 - DNA, 17 bp, Arabidopsis thaliana
tcatcgtcaagaacatc

SEQ ID NO: 138275 - DNA, 17 bp, Arabidopsis thaliana
tcatcgtcagaccaggt

SEQ ID NO: 138276 - DNA, 17 bp, Arabidopsis thaliana
tcatcgtcctcatggct

SEQ ID NO: 138277 - DNA, 17 bp, Arabidopsis thaliana
tcatcgtcctctgactc

SEQ ID NO: 138278 - DNA, 17 bp, Arabidopsis thaliana
tcatcgtcctggtcgaa

SEQ ID NO: 138279 - DNA, 17 bp, Arabidopsis thaliana
tcatcgtcgaaatcttt

SEQ ID NO: 138280 - DNA, 17 bp, Arabidopsis thaliana
tcatcgtcgagagggaa

SEQ ID NO: 138281 - DNA, 17 bp, Arabidopsis thaliana
tcatcgtcgtctgcttc

SEQ ID NO: 138282 - DNA, 17 bp, Arabidopsis thaliana
tcatcgtgatggggata

SEQ ID NO: 138283 - DNA, 17 bp, Arabidopsis thaliana
tcatcgtgatgggggta

SEQ ID NO: 138284 - DNA, 17 bp, Arabidopsis thaliana
tcatcgtgatggggtta

SEQ ID NO: 138285 - DNA, 17 bp, Arabidopsis thaliana
tcatcgtgcaggctacg

SEQ ID NO: 138286 - DNA, 17 bp, Arabidopsis thaliana
tcatcgtggtggtagcg

SEQ ID NO: 138287 - DNA, 17 bp, Arabidopsis thaliana
tcatcgttagcacttaa

SEQ ID NO: 138288 - DNA, 17 bp, Arabidopsis thaliana
tcatcgttctacacaac

SEQ ID NO: 138289 - DNA, 17 bp, Arabidopsis thaliana
tcatcgttgcgacaagc

SEQ ID NO: 138290 - DNA, 17 bp, Arabidopsis thaliana
tcatctaaaagattcat

SEQ ID NO: 138291 - DNA, 17 bp, Arabidopsis thaliana
tcatctaagcccatcat

SEQ ID NO: 138292 - DNA, 17 bp, Arabidopsis thaliana
tcatctaattagtgacg

SEQ ID NO: 138293 - DNA, 17 bp, Arabidopsis thaliana
tcatctaccaacctcgg

SEQ ID NO: 138294 - DNA, 17 bp, Arabidopsis thaliana
tcatctaccgacaagtg

SEQ ID NO: 138295 - DNA, 17 bp, Arabidopsis thaliana
tcatctaccgtcaagtg

SEQ ID NO: 138296 - DNA, 17 bp, Arabidopsis thaliana
tcatctacggtttggtg

SEQ ID NO: 138297 - DNA, 17 bp, Arabidopsis thaliana
tcatctactcgaccctg

SEQ ID NO: 138298 - DNA, 17 bp, Arabidopsis thaliana
tcatctactcttgttct

SEQ ID NO: 138299 - DNA, 17 bp, Arabidopsis thaliana
tcatctagtagtgtctc

SEQ ID NO: 138300 - DNA, 17 bp, Arabidopsis thaliana
tcatctagtagtgtctg

SEQ ID NO: 138301 - DNA, 17 bp, Arabidopsis thaliana
tcatctagtagtgtctt

SEQ ID NO: 138302 - DNA, 17 bp, Arabidopsis thaliana
tcatctagtttggtatg

SEQ ID NO: 138303 - DNA, 17 bp, Arabidopsis thaliana
tcatctataccgcattt

SEQ ID NO: 138304 - DNA, 17 bp, Arabidopsis thaliana
tcatctatctacgatca

SEQ ID NO: 138305 - DNA, 17 bp, Arabidopsis thaliana
tcatctatgtcctaact

SEQ ID NO: 138306 - DNA, 17 bp, Arabidopsis thaliana
tcatctatttcgttgtg

SEQ ID NO: 138307 - DNA, 17 bp, Arabidopsis thaliana
tcatctatttcgttgtt

SEQ ID NO: 138308 - DNA, 17 bp, Arabidopsis thaliana
tcatctcacagaacggt

SEQ ID NO: 138309 - DNA, 17 bp, Arabidopsis thaliana
tcatctcatcgatggtc

SEQ ID NO: 138310 - DNA, 17 bp, Arabidopsis thaliana
tcatctcatcttcatct

SEQ ID NO: 138311 - DNA, 17 bp, Arabidopsis thaliana
tcatctccacgtgtccc

SEQ ID NO: 138312 - DNA, 17 bp, Arabidopsis thaliana
tcatctccatcccagtg

SEQ ID NO: 138313 - DNA, 17 bp, Arabidopsis thaliana
tcatctccattttttgg

SEQ ID NO: 138314 - DNA, 17 bp, Arabidopsis thaliana
tcatctccgatctgaca

SEQ ID NO: 138315 - DNA, 17 bp, Arabidopsis thaliana
tcatctccgctcggatc

SEQ ID NO: 138316 - DNA, 17 bp, Arabidopsis thaliana
tcatctcctgaccacca

SEQ ID NO: 138317 - DNA, 17 bp, Arabidopsis thaliana
tcatctcgactgtcgat

SEQ ID NO: 138318 - DNA, 17 bp, Arabidopsis thaliana
tcatctcgagtgggtgt

SEQ ID NO: 138319 - DNA, 17 bp, Arabidopsis thaliana
tcatctcgatgttcatt

SEQ ID NO: 138320 - DNA, 17 bp, Arabidopsis thaliana
tcatctctcagaggcgg

SEQ ID NO: 138321 - DNA, 17 bp, Arabidopsis thaliana
tcatctctcatcaacta

SEQ ID NO: 138322 - DNA, 17 bp, Arabidopsis thaliana
tcatctctcggtcaact

SEQ ID NO: 138323 - DNA, 17 bp, Arabidopsis thaliana
tcatctctgccgcagtg

SEQ ID NO: 138324 - DNA, 17 bp, Arabidopsis thaliana
tcatctctgcttgtacc

SEQ ID NO: 138325 - DNA, 17 bp, Arabidopsis thaliana
tcatctctggaccgaga

SEQ ID NO: 138326 - DNA, 17 bp, Arabidopsis thaliana
tcatctctgtagcttct

SEQ ID NO: 138327 - DNA, 17 bp, Arabidopsis thaliana
tcatctcttccattgca

SEQ ID NO: 138328 - DNA, 17 bp, Arabidopsis thaliana
tcatctcttgcctgtct

SEQ ID NO: 138329 - DNA, 17 bp, Arabidopsis thaliana
tcatctctttcattgca

SEQ ID NO: 138330 - DNA, 17 bp, Arabidopsis thaliana
tcatctctttggctttc

SEQ ID NO: 138331 - DNA, 17 bp, Arabidopsis thaliana
tcatctgaagtgttgtt

SEQ ID NO: 138332 - DNA, 17 bp, Arabidopsis thaliana
tcatctgagctaattcc

SEQ ID NO: 138333 - DNA, 17 bp, Arabidopsis thaliana
tcatctgagtagtcgtg

SEQ ID NO: 138334 - DNA, 17 bp, Arabidopsis thaliana
tcatctgatccgctaaa

SEQ ID NO: 138335 - DNA, 17 bp, Arabidopsis thaliana
tcatctgattcatacta

SEQ ID NO: 138336 - DNA, 17 bp, Arabidopsis thaliana
tcatctgattcatcgac

SEQ ID NO: 138337 - DNA, 17 bp, Arabidopsis thaliana
tcatctgcacatggctg

SEQ ID NO: 138338 - DNA, 17 bp, Arabidopsis thaliana
tcatctgcaggtttgtt

SEQ ID NO: 138339 - DNA, 17 bp, Arabidopsis thaliana
tcatctgcagttgaacc

SEQ ID NO: 138340 - DNA, 17 bp, Arabidopsis thaliana
tcatctgcagtttcagt

SEQ ID NO: 138341 - DNA, 17 bp, Arabidopsis thaliana
tcatctgcccaatttgt

SEQ ID NO: 138342 - DNA, 17 bp, Arabidopsis thaliana
tcatctgcgagacgatt

SEQ ID NO: 138343 - DNA, 17 bp, Arabidopsis thaliana
tcatctgcgtctaccgc

SEQ ID NO: 138344 - DNA, 17 bp, Arabidopsis thaliana
tcatctggaactaccgg

SEQ ID NO: 138345 - DNA, 17 bp, Arabidopsis thaliana
tcatctggacggcagat

SEQ ID NO: 138346 - DNA, 17 bp, Arabidopsis thaliana
tcatctggactgccatc

SEQ ID NO: 138347 - DNA, 17 bp, Arabidopsis thaliana
tcatctggattggacca

SEQ ID NO: 138348 - DNA, 17 bp, Arabidopsis thaliana
tcatctggccaaagctg

SEQ ID NO: 138349 - DNA, 17 bp, Arabidopsis thaliana
tcatctggtggatggtg

SEQ ID NO: 138350 - DNA, 17 bp, Arabidopsis thaliana
tcatctggttgctaagg

SEQ ID NO: 138351 - DNA, 17 bp, Arabidopsis thaliana
tcatctggttgcttggg

SEQ ID NO: 138352 - DNA, 17 bp, Arabidopsis thaliana
tcatctgtgttaatcgg

SEQ ID NO: 138353 - DNA, 17 bp, Arabidopsis thaliana
tcatctgtttctagccg

SEQ ID NO: 138354 - DNA, 17 bp, Arabidopsis thaliana
tcatcttaaccgatttt

SEQ ID NO: 138355 - DNA, 17 bp, Arabidopsis thaliana
tcatcttacatgggact

SEQ ID NO: 138356 - DNA, 17 bp, Arabidopsis thaliana
tcatcttaccgatgggt

SEQ ID NO: 138357 - DNA, 17 bp, Arabidopsis thaliana
tcatcttacgacagatt

SEQ ID NO: 138358 - DNA, 17 bp, Arabidopsis thaliana
tcatcttagtaggacgg

SEQ ID NO: 138359 - DNA, 17 bp, Arabidopsis thaliana
tcatcttattgccaaga

SEQ ID NO: 138360 - DNA, 17 bp, Arabidopsis thaliana
tcatcttcagcatgctt

SEQ ID NO: 138361 - DNA, 17 bp, Arabidopsis thaliana
tcatcttcaggttcacc

SEQ ID NO: 138362 - DNA, 17 bp, Arabidopsis thaliana
tcatcttccagaggcgg

SEQ ID NO: 138363 - DNA, 17 bp, Arabidopsis thaliana
tcatcttccattgtgct

SEQ ID NO: 138364 - DNA, 17 bp, Arabidopsis thaliana
tcatcttccgctggatt

SEQ ID NO: 138365 - DNA, 17 bp, Arabidopsis thaliana
tcatcttcgatgtgcgc

SEQ ID NO: 138366 - DNA, 17 bp, Arabidopsis thaliana
tcatcttcgccggagtt

SEQ ID NO: 138367 - DNA, 17 bp, Arabidopsis thaliana
tcatcttcggacgagtt

SEQ ID NO: 138368 - DNA, 17 bp, Arabidopsis thaliana
tcatcttctaccgctgg

SEQ ID NO: 138369 - DNA, 17 bp, Arabidopsis thaliana
tcatcttctctgcctgc

SEQ ID NO: 138370 - DNA, 17 bp, Arabidopsis thaliana
tcatcttctgcagagct

SEQ ID NO: 138371 - DNA, 17 bp, Arabidopsis thaliana
tcatcttctggattagt

SEQ ID NO: 138372 - DNA, 17 bp, Arabidopsis thaliana
tcatcttcttcagattc

SEQ ID NO: 138373 - DNA, 17 bp, Arabidopsis thaliana
tcatcttcttggcgtgc

SEQ ID NO: 138374 - DNA, 17 bp, Arabidopsis thaliana
tcatcttgacgagtttg

SEQ ID NO: 138375 - DNA, 17 bp, Arabidopsis thaliana
tcatcttgacgcgaccc

SEQ ID NO: 138376 - DNA, 17 bp, Arabidopsis thaliana
tcatcttgaggaagcac

SEQ ID NO: 138377 - DNA, 17 bp, Arabidopsis thaliana
tcatcttgccgttttcg

SEQ ID NO: 138378 - DNA, 17 bp, Arabidopsis thaliana
tcatcttgcgttttgtc

SEQ ID NO: 138379 - DNA, 17 bp, Arabidopsis thaliana
tcatcttgctgatgggt

SEQ ID NO: 138380 - DNA, 17 bp, Arabidopsis thaliana
tcatcttgctgattgga

SEQ ID NO: 138381 - DNA, 17 bp, Arabidopsis thaliana
tcatcttggtcccgatc

SEQ ID NO: 138382 - DNA, 17 bp, Arabidopsis thaliana
tcatcttggttatcggc

SEQ ID NO: 138383 - DNA, 17 bp, Arabidopsis thaliana
tcatcttgtgctcatcc

SEQ ID NO: 138384 - DNA, 17 bp, Arabidopsis thaliana
tcatcttgtgtgccact

SEQ ID NO: 138385 - DNA, 17 bp, Arabidopsis thaliana
tcatctttatggctcag

SEQ ID NO: 138386 - DNA, 17 bp, Arabidopsis thaliana
tcatctttccgacgagc

SEQ ID NO: 138387 - DNA, 17 bp, Arabidopsis thaliana
tcatctttgctctttgg

SEQ ID NO: 138388 - DNA, 17 bp, Arabidopsis thaliana
tcatgaaacagctatac

SEQ ID NO: 138389 - DNA, 17 bp, Arabidopsis thaliana
tcatgaaaggatcctca

SEQ ID NO: 138390 - DNA, 17 bp, Arabidopsis thaliana
tcatgaacaagttgcca

SEQ ID NO: 138391 - DNA, 17 bp, Arabidopsis thaliana
tcatgaaccattcgccg

SEQ ID NO: 138392 - DNA, 17 bp, Arabidopsis thaliana
tcatgaacgctgcaggt

SEQ ID NO: 138393 - DNA, 17 bp, Arabidopsis thaliana
tcatgaactttgcaggc

SEQ ID NO: 138394 - DNA, 17 bp, Arabidopsis thaliana
tcatgaagctagccgca

SEQ ID NO: 138395 - DNA, 17 bp, Arabidopsis thaliana
tcatgaagtgttacgag

SEQ ID NO: 138396 - DNA, 17 bp, Arabidopsis thaliana
tcatgaagtttgcaggc

SEQ ID NO: 138397 - DNA, 17 bp, Arabidopsis thaliana
tcatgaatttttccttg

SEQ ID NO: 138398 - DNA, 17 bp, Arabidopsis thaliana
tcatgacaactcgacgg

SEQ ID NO: 138399 - DNA, 17 bp, Arabidopsis thaliana
tcatgacacaagcgtat

SEQ ID NO: 138400 - DNA, 17 bp, Arabidopsis thaliana
tcatgaccatttgcgct

SEQ ID NO: 138401 - DNA, 17 bp, Arabidopsis thaliana
tcatgagacacggttca

SEQ ID NO: 138402 - DNA, 17 bp, Arabidopsis thaliana
tcatgagatcgtgctgc

SEQ ID NO: 138403 - DNA, 17 bp, Arabidopsis thaliana
tcatgagcctattggtt

SEQ ID NO: 138404 - DNA, 17 bp, Arabidopsis thaliana
tcatgagcctttgtttt

SEQ ID NO: 138405 - DNA, 17 bp, Arabidopsis thaliana
tcatgagttcacggtta

SEQ ID NO: 138406 - DNA, 17 bp, Arabidopsis thaliana
tcatgataactcgacgg

SEQ ID NO: 138407 - DNA, 17 bp, Arabidopsis thaliana
tcatgataatcactaat

SEQ ID NO: 138408 - DNA, 17 bp, Arabidopsis thaliana
tcatgatctccacttta

SEQ ID NO: 138409 - DNA, 17 bp, Arabidopsis thaliana
tcatgatgacatgtccc

SEQ ID NO: 138410 - DNA, 17 bp, Arabidopsis thaliana
tcatgatgagttccggg

SEQ ID NO: 138411 - DNA, 17 bp, Arabidopsis thaliana
tcatgatgcggttcggt

SEQ ID NO: 138412 - DNA, 17 bp, Arabidopsis thaliana
tcatgattacaacctgc

SEQ ID NO: 138413 - DNA, 17 bp, Arabidopsis thaliana
tcatgattagtctttgg

SEQ ID NO: 138414 - DNA, 17 bp, Arabidopsis thaliana
tcatgattgattttttt

SEQ ID NO: 138415 - DNA, 17 bp, Arabidopsis thaliana
tcatgattggtgccgac

SEQ ID NO: 138416 - DNA, 17 bp, Arabidopsis thaliana
tcatgatttggcaaact

SEQ ID NO: 138417 - DNA, 17 bp, Arabidopsis thaliana
tcatgccaaagaccatt

SEQ ID NO: 138418 - DNA, 17 bp, Arabidopsis thaliana
tcatgccaagtttggcc

SEQ ID NO: 138419 - DNA, 17 bp, Arabidopsis thaliana
tcatgccagatagagcc

SEQ ID NO: 138420 - DNA, 17 bp, Arabidopsis thaliana
tcatgccagatagagct

SEQ ID NO: 138421 - DNA, 17 bp, Arabidopsis thaliana
tcatgccattgatcgct

SEQ ID NO: 138422 - DNA, 17 bp, Arabidopsis thaliana
tcatgccgactgttacg

SEQ ID NO: 138423 - DNA, 17 bp, Arabidopsis thaliana
tcatgcctacggccaag

SEQ ID NO: 138424 - DNA, 17 bp, Arabidopsis thaliana
tcatgcctatccgttcc

SEQ ID NO: 138425 - DNA, 17 bp, Arabidopsis thaliana
tcatgcgagcatgtttt

SEQ ID NO: 138426 - DNA, 17 bp, Arabidopsis thaliana
tcatgcgatctctttgg

SEQ ID NO: 138427 - DNA, 17 bp, Arabidopsis thaliana
tcatgcgatggtccctg

SEQ ID NO: 138428 - DNA, 17 bp, Arabidopsis thaliana
tcatgcgcctctatgtg

SEQ ID NO: 138429 - DNA, 17 bp, Arabidopsis thaliana
tcatgcgcttttattac

SEQ ID NO: 138430 - DNA, 17 bp, Arabidopsis thaliana
tcatgcggaccatctgc

SEQ ID NO: 138431 - DNA, 17 bp, Arabidopsis thaliana
tcatgcggctacgaggc

SEQ ID NO: 138432 - DNA, 17 bp, Arabidopsis thaliana
tcatgcgggtcggtaga

SEQ ID NO: 138433 - DNA, 17 bp, Arabidopsis thaliana
tcatgcggtgtattcag

SEQ ID NO: 138434 - DNA, 17 bp, Arabidopsis thaliana
tcatgcggttctagatc

SEQ ID NO: 138435 - DNA, 17 bp, Arabidopsis thaliana
tcatgcggtttaagcag

SEQ ID NO: 138436 - DNA, 17 bp, Arabidopsis thaliana
tcatgcgtcgcgtgggt

SEQ ID NO: 138437 - DNA, 17 bp, Arabidopsis thaliana
tcatgcgtgtcatcctt

SEQ ID NO: 138438 - DNA, 17 bp, Arabidopsis thaliana
tcatgctaaattgctcg

SEQ ID NO: 138439 - DNA, 17 bp, Arabidopsis thaliana
tcatgctcacttaacga

SEQ ID NO: 138440 - DNA, 17 bp, Arabidopsis thaliana
tcatgctcatcgacaaa

SEQ ID NO: 138441 - DNA, 17 bp, Arabidopsis thaliana
tcatgctcctggtagga

SEQ ID NO: 138442 - DNA, 17 bp, Arabidopsis thaliana
tcatgctgacttatggg

SEQ ID NO: 138443 - DNA, 17 bp, Arabidopsis thaliana
tcatgctggattgctga

SEQ ID NO: 138444 - DNA, 17 bp, Arabidopsis thaliana
tcatgctggcagcttca

SEQ ID NO: 138445 - DNA, 17 bp, Arabidopsis thaliana
tcatgcttagtccttgg

SEQ ID NO: 138446 - DNA, 17 bp, Arabidopsis thaliana
tcatgcttccgaggatg

SEQ ID NO: 138447 - DNA, 17 bp, Arabidopsis thaliana
tcatgctttggcgtcca

SEQ ID NO: 138448 - DNA, 17 bp, Arabidopsis thaliana
tcatggaacaaattcat

SEQ ID NO: 138449 - DNA, 17 bp, Arabidopsis thaliana
tcatggaaccatgggct

SEQ ID NO: 138450 - DNA, 17 bp, Arabidopsis thaliana
tcatggaacttgacttg

SEQ ID NO: 138451 - DNA, 17 bp, Arabidopsis thaliana
tcatggaagtcgaaatc

SEQ ID NO: 138452 - DNA, 17 bp, Arabidopsis thaliana
tcatggacagttttttc

SEQ ID NO: 138453 - DNA, 17 bp, Arabidopsis thaliana
tcatggaccgtccaact

SEQ ID NO: 138454 - DNA, 17 bp, Arabidopsis thaliana
tcatggaccgtcggatc

SEQ ID NO: 138455 - DNA, 17 bp, Arabidopsis thaliana
tcatggaccgttgatct

SEQ ID NO: 138456 - DNA, 17 bp, Arabidopsis thaliana
tcatggacctactgtta

SEQ ID NO: 138457 - DNA, 17 bp, Arabidopsis thaliana
tcatggacgctttctca

SEQ ID NO: 138458 - DNA, 17 bp, Arabidopsis thaliana
tcatggacgttgataag

SEQ ID NO: 138459 - DNA, 17 bp, Arabidopsis thaliana
tcatggacttgtcggct

SEQ ID NO: 138460 - DNA, 17 bp, Arabidopsis thaliana
tcatggactttggctac

SEQ ID NO: 138461 - DNA, 17 bp, Arabidopsis thaliana
tcatggagagagttggc

SEQ ID NO: 138462 - DNA, 17 bp, Arabidopsis thaliana
tcatggagcttgagtcg

SEQ ID NO: 138463 - DNA, 17 bp, Arabidopsis thaliana
tcatggagtagcggatg

SEQ ID NO: 138464 - DNA, 17 bp, Arabidopsis thaliana
tcatggagtatgctact

SEQ ID NO: 138465 - DNA, 17 bp, Arabidopsis thaliana
tcatggagtccatccca

SEQ ID NO: 138466 - DNA, 17 bp, Arabidopsis thaliana
tcatggataatcaggcc

SEQ ID NO: 138467 - DNA, 17 bp, Arabidopsis thaliana
tcatggatcaccgttcg

SEQ ID NO: 138468 - DNA, 17 bp, Arabidopsis thaliana
tcatggatcatcggttt

SEQ ID NO: 138469 - DNA, 17 bp, Arabidopsis thaliana
tcatggatccagcaccc

SEQ ID NO: 138470 - DNA, 17 bp, Arabidopsis thaliana
tcatggatccgcgatcg

SEQ ID NO: 138471 - DNA, 17 bp, Arabidopsis thaliana
tcatggatctggccaaa

SEQ ID NO: 138472 - DNA, 17 bp, Arabidopsis thaliana
tcatggatcttcgtgtc

SEQ ID NO: 138473 - DNA, 17 bp, Arabidopsis thaliana
tcatggattacgggttt

SEQ ID NO: 138474 - DNA, 17 bp, Arabidopsis thaliana
tcatggattccagggac

SEQ ID NO: 138475 - DNA, 17 bp, Arabidopsis thaliana
tcatggattcggggtat

SEQ ID NO: 138476 - DNA, 17 bp, Arabidopsis thaliana
tcatggattcgtcgttc

SEQ ID NO: 138477 - DNA, 17 bp, Arabidopsis thaliana
tcatggattcgtggtat

SEQ ID NO: 138478 - DNA, 17 bp, Arabidopsis thaliana
tcatggattgcctaacc

SEQ ID NO: 138479 - DNA, 17 bp, Arabidopsis thaliana
tcatggatttccacggg

SEQ ID NO: 138480 - DNA, 17 bp, Arabidopsis thaliana
tcatggcacgcgggcca

SEQ ID NO: 138481 - DNA, 17 bp, Arabidopsis thaliana
tcatggcaggacgggtt

SEQ ID NO: 138482 - DNA, 17 bp, Arabidopsis thaliana
tcatggccaacatgacc

SEQ ID NO: 138483 - DNA, 17 bp, Arabidopsis thaliana
tcatggccagtgtttca

SEQ ID NO: 138484 - DNA, 17 bp, Arabidopsis thaliana
tcatggccagttttttc

SEQ ID NO: 138485 - DNA, 17 bp, Arabidopsis thaliana
tcatggccgtcaaggga

SEQ ID NO: 138486 - DNA, 17 bp, Arabidopsis thaliana
tcatggccgtctcgcgt

SEQ ID NO: 138487 - DNA, 17 bp, Arabidopsis thaliana
tcatggcgggacgagat

SEQ ID NO: 138488 - DNA, 17 bp, Arabidopsis thaliana
tcatggctcaactatgg

SEQ ID NO: 138489 - DNA, 17 bp, Arabidopsis thaliana
tcatgggaagttgtcca

SEQ ID NO: 138490 - DNA, 17 bp, Arabidopsis thaliana
tcatgggatttacttac

SEQ ID NO: 138491 - DNA, 17 bp, Arabidopsis thaliana
tcatgggccaaggcatt

SEQ ID NO: 138492 - DNA, 17 bp, Arabidopsis thaliana
tcatggggatctatttg

SEQ ID NO: 138493 - DNA, 17 bp, Arabidopsis thaliana
tcatggggcttactggg

SEQ ID NO: 138494 - DNA, 17 bp, Arabidopsis thaliana
tcatggggcttggttac

SEQ ID NO: 138495 - DNA, 17 bp, Arabidopsis thaliana
tcatgggtcaactcaac

SEQ ID NO: 138496 - DNA, 17 bp, Arabidopsis thaliana
tcatgggtgaagatttg

SEQ ID NO: 138497 - DNA, 17 bp, Arabidopsis thaliana
tcatgggtgattctggt

SEQ ID NO: 138498 - DNA, 17 bp, Arabidopsis thaliana
tcatgggtgtttaatct

SEQ ID NO: 138499 - DNA, 17 bp, Arabidopsis thaliana
tcatgggtttgtccatg

SEQ ID NO: 138500 - DNA, 17 bp, Arabidopsis thaliana
tcatggtaatggttcgc

SEQ ID NO: 138501 - DNA, 17 bp, Arabidopsis thaliana
tcatggtatgacgcagg

SEQ ID NO: 138502 - DNA, 17 bp, Arabidopsis thaliana
tcatggtcaacaggcgt

SEQ ID NO: 138503 - DNA, 17 bp, Arabidopsis thaliana
tcatggtcaacgggtgt

SEQ ID NO: 138504 - DNA, 17 bp, Arabidopsis thaliana
tcatggtcagatccgtc

SEQ ID NO: 138505 - DNA, 17 bp, Arabidopsis thaliana
tcatggtcgataatagg

SEQ ID NO: 138506 - DNA, 17 bp, Arabidopsis thaliana
tcatggtcgcattggac

SEQ ID NO: 138507 - DNA, 17 bp, Arabidopsis thaliana
tcatggtctacagcaga

SEQ ID NO: 138508 - DNA, 17 bp, Arabidopsis thaliana
tcatggtctcaattatc

SEQ ID NO: 138509 - DNA, 17 bp, Arabidopsis thaliana
tcatggtgtagccaaag

SEQ ID NO: 138510 - DNA, 17 bp, Arabidopsis thaliana
tcatggtgtcgccaaag

SEQ ID NO: 138511 - DNA, 17 bp, Arabidopsis thaliana
tcatggtgtttcttgcc

SEQ ID NO: 138512 - DNA, 17 bp, Arabidopsis thaliana
tcatggttacagcggcc

SEQ ID NO: 138513 - DNA, 17 bp, Arabidopsis thaliana
tcatggttagcgcaagt

SEQ ID NO: 138514 - DNA, 17 bp, Arabidopsis thaliana
tcatggttatccacaga

SEQ ID NO: 138515 - DNA, 17 bp, Arabidopsis thaliana
tcatggttattcggctc

SEQ ID NO: 138516 - DNA, 17 bp, Arabidopsis thaliana
tcatggttgattctagc

SEQ ID NO: 138517 - DNA, 17 bp, Arabidopsis thaliana
tcatggtttggttctga

SEQ ID NO: 138518 - DNA, 17 bp, Arabidopsis thaliana
tcatgtaagccagtcgg

SEQ ID NO: 138519 - DNA, 17 bp, Arabidopsis thaliana
tcatgtaatgtctgatc

SEQ ID NO: 138520 - DNA, 17 bp, Arabidopsis thaliana
tcatgtacagtttttgc

SEQ ID NO: 138521 - DNA, 17 bp, Arabidopsis thaliana
tcatgtagagatggtgg

SEQ ID NO: 138522 - DNA, 17 bp, Arabidopsis thaliana
tcatgtagattttggcc

SEQ ID NO: 138523 - DNA, 17 bp, Arabidopsis thaliana
tcatgtagctcaggtgt

SEQ ID NO: 138524 - DNA, 17 bp, Arabidopsis thaliana
tcatgtagctgcggttt

SEQ ID NO: 138525 - DNA, 17 bp, Arabidopsis thaliana
tcatgtccaaatgggtt

SEQ ID NO: 138526 - DNA, 17 bp, Arabidopsis thaliana
tcatgtccacagagatc

SEQ ID NO: 138527 - DNA, 17 bp, Arabidopsis thaliana
tcatgtccactaagacc

SEQ ID NO: 138528 - DNA, 17 bp, Arabidopsis thaliana
tcatgtccactaaggca

SEQ ID NO: 138529 - DNA, 17 bp, Arabidopsis thaliana
tcatgtccattaaggcc

SEQ ID NO: 138530 - DNA, 17 bp, Arabidopsis thaliana
tcatgtccgtacagctc

SEQ ID NO: 138531 - DNA, 17 bp, Arabidopsis thaliana
tcatgtcgtcgaggatg

SEQ ID NO: 138532 - DNA, 17 bp, Arabidopsis thaliana
tcatgtctctacggtgc

SEQ ID NO: 138533 - DNA, 17 bp, Arabidopsis thaliana
tcatgtctctgagggtt

SEQ ID NO: 138534 - DNA, 17 bp, Arabidopsis thaliana
tcatgtctctgggggtt

SEQ ID NO: 138535 - DNA, 17 bp, Arabidopsis thaliana
tcatgtctgcttgtacc

SEQ ID NO: 138536 - DNA, 17 bp, Arabidopsis thaliana
tcatgtgacattcactg

SEQ ID NO: 138537 - DNA, 17 bp, Arabidopsis thaliana
tcatgtgactgcgtttt

SEQ ID NO: 138538 - DNA, 17 bp, Arabidopsis thaliana
tcatgtgagcacttggg

SEQ ID NO: 138539 - DNA, 17 bp, Arabidopsis thaliana
tcatgtgatggatgtca

SEQ ID NO: 138540 - DNA, 17 bp, Arabidopsis thaliana
tcatgtgcactgtgtac

SEQ ID NO: 138541 - DNA, 17 bp, Arabidopsis thaliana
tcatgtgcccatcttca

SEQ ID NO: 138542 - DNA, 17 bp, Arabidopsis thaliana
tcatgtgcgctttgtct

SEQ ID NO: 138543 - DNA, 17 bp, Arabidopsis thaliana
tcatgtgctaatgtgtc

SEQ ID NO: 138544 - DNA, 17 bp, Arabidopsis thaliana
tcatgtgctgatgtgtc

SEQ ID NO: 138545 - DNA, 17 bp, Arabidopsis thaliana
tcatgtggtgatttgta

SEQ ID NO: 138546 - DNA, 17 bp, Arabidopsis thaliana
tcatgtgtcaaactcgt

SEQ ID NO: 138547 - DNA, 17 bp, Arabidopsis thaliana
tcatgtgtcatgatctc

SEQ ID NO: 138548 - DNA, 17 bp, Arabidopsis thaliana
tcatgtgtttcacttag

SEQ ID NO: 138549 - DNA, 17 bp, Arabidopsis thaliana
tcatgttacttcgctcg

SEQ ID NO: 138550 - DNA, 17 bp, Arabidopsis thaliana
tcatgttattgggctgc

SEQ ID NO: 138551 - DNA, 17 bp, Arabidopsis thaliana
tcatgttcaggaactct

SEQ ID NO: 138552 - DNA, 17 bp, Arabidopsis thaliana
tcatgttcctcgacgaa

SEQ ID NO: 138553 - DNA, 17 bp, Arabidopsis thaliana
tcatgttctttgcagat

SEQ ID NO: 138554 - DNA, 17 bp, Arabidopsis thaliana
tcatgttgactggtggt

SEQ ID NO: 138555 - DNA, 17 bp, Arabidopsis thaliana
tcatgttgcaactgact

SEQ ID NO: 138556 - DNA, 17 bp, Arabidopsis thaliana
tcatgttgctcgtcact

SEQ ID NO: 138557 - DNA, 17 bp, Arabidopsis thaliana
tcatgttggatttgcgt

SEQ ID NO: 138558 - DNA, 17 bp, Arabidopsis thaliana
tcatgttgggcctttga

SEQ ID NO: 138559 - DNA, 17 bp, Arabidopsis thaliana
tcatgttgtcgctggtt

SEQ ID NO: 138560 - DNA, 17 bp, Arabidopsis thaliana
tcatgttgtgaaggcga

SEQ ID NO: 138561 - DNA, 17 bp, Arabidopsis thaliana
tcatgttttatttgacc

SEQ ID NO: 138562 - DNA, 17 bp, Arabidopsis thaliana
tcatgttttcaccataa

SEQ ID NO: 138563 - DNA, 17 bp, Arabidopsis thaliana
tcatgttttcatttgct

SEQ ID NO: 138564 - DNA, 17 bp, Arabidopsis thaliana
tcatgttttccgccaaa

SEQ ID NO: 138565 - DNA, 17 bp, Arabidopsis thaliana
tcatgttttgccacttc

SEQ ID NO: 138566 - DNA, 17 bp, Arabidopsis thaliana
tcatgtttttgatgagg

SEQ ID NO: 138567 - DNA, 17 bp, Arabidopsis thaliana
tcattacatgctgcttg

SEQ ID NO: 138568 - DNA, 17 bp, Arabidopsis thaliana
tcattaccgctcaggac

SEQ ID NO: 138569 - DNA, 17 bp, Arabidopsis thaliana
tcattaccgtttcgcag

SEQ ID NO: 138570 - DNA, 17 bp, Arabidopsis thaliana
tcattactgaaccacga

SEQ ID NO: 138571 - DNA, 17 bp, Arabidopsis thaliana
tcattagctcgcgttga

SEQ ID NO: 138572 - DNA, 17 bp, Arabidopsis thaliana
tcattcaacaccctcca

SEQ ID NO: 138573 - DNA, 17 bp, Arabidopsis thaliana
tcattcaacttagcatt

SEQ ID NO: 138574 - DNA, 17 bp, Arabidopsis thaliana
tcattcaatttcggacc

SEQ ID NO: 138575 - DNA, 17 bp, Arabidopsis thaliana
tcattcacagtctgtag

SEQ ID NO: 138576 - DNA, 17 bp, Arabidopsis thaliana
tcattcacgatcttcca

SEQ ID NO: 138577 - DNA, 17 bp, Arabidopsis thaliana
tcattcactgctgcgcc

SEQ ID NO: 138578 - DNA, 17 bp, Arabidopsis thaliana
tcattcagccctttgtc

SEQ ID NO: 138579 - DNA, 17 bp, Arabidopsis thaliana
tcattcagcgaccaaaa

SEQ ID NO: 138580 - DNA, 17 bp, Arabidopsis thaliana
tcattcagcgtttgatc

SEQ ID NO: 138581 - DNA, 17 bp, Arabidopsis thaliana
tcattcaggaaccgacg

SEQ ID NO: 138582 - DNA, 17 bp, Arabidopsis thaliana
tcattcaggaactgatt

SEQ ID NO: 138583 - DNA, 17 bp, Arabidopsis thaliana
tcattcagttgccgtag

SEQ ID NO: 138584 - DNA, 17 bp, Arabidopsis thaliana
tcattcagtttttcggt

SEQ ID NO: 138585 - DNA, 17 bp, Arabidopsis thaliana
tcattcatatgcagata

SEQ ID NO: 138586 - DNA, 17 bp, Arabidopsis thaliana
tcattcatatggagaga

SEQ ID NO: 138587 - DNA, 17 bp, Arabidopsis thaliana
tcattcatcatctggtc

SEQ ID NO: 138588 - DNA, 17 bp, Arabidopsis thaliana
tcattcattggccatga

SEQ ID NO: 138589 - DNA, 17 bp, Arabidopsis thaliana
tcattccatttggctgg

SEQ ID NO: 138590 - DNA, 17 bp, Arabidopsis thaliana
tcattcccgctatcccc

SEQ ID NO: 138591 - DNA, 17 bp, Arabidopsis thaliana
tcattcccggctggtgc

SEQ ID NO: 138592 - DNA, 17 bp, Arabidopsis thaliana
tcattcccttggatgtt

SEQ ID NO: 138593 - DNA, 17 bp, Arabidopsis thaliana
tcattccgctgcgaatg

SEQ ID NO: 138594 - DNA, 17 bp, Arabidopsis thaliana
tcattccggacatctcc

SEQ ID NO: 138595 - DNA, 17 bp, Arabidopsis thaliana
tcattccggacatctct

SEQ ID NO: 138596 - DNA, 17 bp, Arabidopsis thaliana
tcattccgtctcaagca

SEQ ID NO: 138597 - DNA, 17 bp, Arabidopsis thaliana
tcattcctctgcgatat

SEQ ID NO: 138598 - DNA, 17 bp, Arabidopsis thaliana
tcattcctgaccattgc

SEQ ID NO: 138599 - DNA, 17 bp, Arabidopsis thaliana
tcattccttctggatat

SEQ ID NO: 138600 - DNA, 17 bp, Arabidopsis thaliana
tcattccttttctccat

SEQ ID NO: 138601 - DNA, 17 bp, Arabidopsis thaliana
tcattcgaaacctgcat

SEQ ID NO: 138602 - DNA, 17 bp, Arabidopsis thaliana
tcattcgacctcaccca

SEQ ID NO: 138603 - DNA, 17 bp, Arabidopsis thaliana
tcattcgacttcccctg

SEQ ID NO: 138604 - DNA, 17 bp, Arabidopsis thaliana
tcattcgagcgttcttc

SEQ ID NO: 138605 - DNA, 17 bp, Arabidopsis thaliana
tcattcgcacagttccg

SEQ ID NO: 138606 - DNA, 17 bp, Arabidopsis thaliana
tcattcgcagtttcgtg

SEQ ID NO: 138607 - DNA, 17 bp, Arabidopsis thaliana
tcattcgccaaatgccg

SEQ ID NO: 138608 - DNA, 17 bp, Arabidopsis thaliana
tcattcgccgtcgtcga

SEQ ID NO: 138609 - DNA, 17 bp, Arabidopsis thaliana
tcattcgctctgttgct

SEQ ID NO: 138610 - DNA, 17 bp, Arabidopsis thaliana
tcattcggaccctaagt

SEQ ID NO: 138611 - DNA, 17 bp, Arabidopsis thaliana
tcattcggatacagtct

SEQ ID NO: 138612 - DNA, 17 bp, Arabidopsis thaliana
tcattcgggcattttcg

SEQ ID NO: 138613 - DNA, 17 bp, Arabidopsis thaliana
tcattcgggggatacga

SEQ ID NO: 138614 - DNA, 17 bp, Arabidopsis thaliana
tcattcggttggggagg

SEQ ID NO: 138615 - DNA, 17 bp, Arabidopsis thaliana
tcattcgtcatccaaac

SEQ ID NO: 138616 - DNA, 17 bp, Arabidopsis thaliana
tcattcgtggaaagaat

SEQ ID NO: 138617 - DNA, 17 bp, Arabidopsis thaliana
tcattcgtgttgtcgat

SEQ ID NO: 138618 - DNA, 17 bp, Arabidopsis thaliana
tcattcgttgccctctg

SEQ ID NO: 138619 - DNA, 17 bp, Arabidopsis thaliana
tcattcgttttcgctca

SEQ ID NO: 138620 - DNA, 17 bp, Arabidopsis thaliana
tcattctcaaaggaggt

SEQ ID NO: 138621 - DNA, 17 bp, Arabidopsis thaliana
tcattctcaactccagc

SEQ ID NO: 138622 - DNA, 17 bp, Arabidopsis thaliana
tcattctcatctgccat

SEQ ID NO: 138623 - DNA, 17 bp, Arabidopsis thaliana
tcattctcgaaccttac

SEQ ID NO: 138624 - DNA, 17 bp, Arabidopsis thaliana
tcattctcgatgagtta

SEQ ID NO: 138625 - DNA, 17 bp, Arabidopsis thaliana
tcattctcgggtactat

SEQ ID NO: 138626 - DNA, 17 bp, Arabidopsis thaliana
tcattctcggtgctaat

SEQ ID NO: 138627 - DNA, 17 bp, Arabidopsis thaliana
tcattctcgttactcaa

SEQ ID NO: 138628 - DNA, 17 bp, Arabidopsis thaliana
tcattctcgttgactac

SEQ ID NO: 138629 - DNA, 17 bp, Arabidopsis thaliana
tcattctctacacaacc

SEQ ID NO: 138630 - DNA, 17 bp, Arabidopsis thaliana
tcattctcttggatatt

SEQ ID NO: 138631 - DNA, 17 bp, Arabidopsis thaliana
tcattctctttaaggca

SEQ ID NO: 138632 - DNA, 17 bp, Arabidopsis thaliana
tcattctgaatggttac

SEQ ID NO: 138633 - DNA, 17 bp, Arabidopsis thaliana
tcattctgatgggccgt

SEQ ID NO: 138634 - DNA, 17 bp, Arabidopsis thaliana
tcattctgtcgtggaag

SEQ ID NO: 138635 - DNA, 17 bp, Arabidopsis thaliana
tcattctgtcttccggc

SEQ ID NO: 138636 - DNA, 17 bp, Arabidopsis thaliana
tcattcttagtggaagc

SEQ ID NO: 138637 - DNA, 17 bp, Arabidopsis thaliana
tcattcttcaggattgg

SEQ ID NO: 138638 - DNA, 17 bp, Arabidopsis thaliana
tcattcttcagtttggt

SEQ ID NO: 138639 - DNA, 17 bp, Arabidopsis thaliana
tcattcttgtatcagat

SEQ ID NO: 138640 - DNA, 17 bp, Arabidopsis thaliana
tcattgaccgactgagg

SEQ ID NO: 138641 - DNA, 17 bp, Arabidopsis thaliana
tcattgaccgtctgagg

SEQ ID NO: 138642 - DNA, 17 bp, Arabidopsis thaliana
tcattgacctcgactat

SEQ ID NO: 138643 - DNA, 17 bp, Arabidopsis thaliana
tcattgacggcggtgct

SEQ ID NO: 138644 - DNA, 17 bp, Arabidopsis thaliana
tcattgactctagtccg

SEQ ID NO: 138645 - DNA, 17 bp, Arabidopsis thaliana
tcattgactttttgtcg

SEQ ID NO: 138646 - DNA, 17 bp, Arabidopsis thaliana
tcattgagatcaccttt

SEQ ID NO: 138647 - DNA, 17 bp, Arabidopsis thaliana
tcattgagcgtgcgaaa

SEQ ID NO: 138648 - DNA, 17 bp, Arabidopsis thaliana
tcattgatcaacgggtt

SEQ ID NO: 138649 - DNA, 17 bp, Arabidopsis thaliana
tcattgatccagtggat

SEQ ID NO: 138650 - DNA, 17 bp, Arabidopsis thaliana
tcattgatccggcttta

SEQ ID NO: 138651 - DNA, 17 bp, Arabidopsis thaliana
tcattgatgacccgtct

SEQ ID NO: 138652 - DNA, 17 bp, Arabidopsis thaliana
tcattgattttcacatg

SEQ ID NO: 138653 - DNA, 17 bp, Arabidopsis thaliana
tcattgcagtcacctcc

SEQ ID NO: 138654 - DNA, 17 bp, Arabidopsis thaliana
tcattgcagtgattctt

SEQ ID NO: 138655 - DNA, 17 bp, Arabidopsis thaliana
tcattgccattttcttg

SEQ ID NO: 138656 - DNA, 17 bp, Arabidopsis thaliana
tcattgcccagacgagt

SEQ ID NO: 138657 - DNA, 17 bp, Arabidopsis thaliana
tcattgccggtgcagat

SEQ ID NO: 138658 - DNA, 17 bp, Arabidopsis thaliana
tcattgcctcagtgagt

SEQ ID NO: 138659 - DNA, 17 bp, Arabidopsis thaliana
tcattgcgcacagtagc

SEQ ID NO: 138660 - DNA, 17 bp, Arabidopsis thaliana
tcattgcgtcttatttc

SEQ ID NO: 138661 - DNA, 17 bp, Arabidopsis thaliana
tcattgctctgtcttca

SEQ ID NO: 138662 - DNA, 17 bp, Arabidopsis thaliana
tcattgctgttgcggcc

SEQ ID NO: 138663 - DNA, 17 bp, Arabidopsis thaliana
tcattggactgtatgag

SEQ ID NO: 138664 - DNA, 17 bp, Arabidopsis thaliana
tcattggcactggaagc

SEQ ID NO: 138665 - DNA, 17 bp, Arabidopsis thaliana
tcattggccacagttca

SEQ ID NO: 138666 - DNA, 17 bp, Arabidopsis thaliana
tcattggccatgagaac

SEQ ID NO: 138667 - DNA, 17 bp, Arabidopsis thaliana
tcattggcccggctgtg

SEQ ID NO: 138668 - DNA, 17 bp, Arabidopsis thaliana
tcattggccctgacatt

SEQ ID NO: 138669 - DNA, 17 bp, Arabidopsis thaliana
tcattggccgaaccgac

SEQ ID NO: 138670 - DNA, 17 bp, Arabidopsis thaliana
tcattggcgttattgta

SEQ ID NO: 138671 - DNA, 17 bp, Arabidopsis thaliana
tcattggctcatcagca

SEQ ID NO: 138672 - DNA, 17 bp, Arabidopsis thaliana
tcattggctcgcaactt

SEQ ID NO: 138673 - DNA, 17 bp, Arabidopsis thaliana
tcattggctctgagggc

SEQ ID NO: 138674 - DNA, 17 bp, Arabidopsis thaliana
tcattggctggcggact

SEQ ID NO: 138675 - DNA, 17 bp, Arabidopsis thaliana
tcattgggttgctttta

SEQ ID NO: 138676 - DNA, 17 bp, Arabidopsis thaliana
tcattggtccgtcagtt

SEQ ID NO: 138677 - DNA, 17 bp, Arabidopsis thaliana
tcattggtgaccgatca

SEQ ID NO: 138678 - DNA, 17 bp, Arabidopsis thaliana
tcattggtgataggtcg

SEQ ID NO: 138679 - DNA, 17 bp, Arabidopsis thaliana
tcattggttcaaatcca

SEQ ID NO: 138680 - DNA, 17 bp, Arabidopsis thaliana
tcattggttgcttctgg

SEQ ID NO: 138681 - DNA, 17 bp, Arabidopsis thaliana
tcattggttttcggacc

SEQ ID NO: 138682 - DNA, 17 bp, Arabidopsis thaliana
tcattgtaggtccgaca

SEQ ID NO: 138683 - DNA, 17 bp, Arabidopsis thaliana
tcattgtcacagagtct

SEQ ID NO: 138684 - DNA, 17 bp, Arabidopsis thaliana
tcattgtcactctgacc

SEQ ID NO: 138685 - DNA, 17 bp, Arabidopsis thaliana
tcattgtcatcggttgg

SEQ ID NO: 138686 - DNA, 17 bp, Arabidopsis thaliana
tcattgtccattgacga

SEQ ID NO: 138687 - DNA, 17 bp, Arabidopsis thaliana
tcattgtcctgctcgag

SEQ ID NO: 138688 - DNA, 17 bp, Arabidopsis thaliana
tcattgtcctgtacaga

SEQ ID NO: 138689 - DNA, 17 bp, Arabidopsis thaliana
tcattgtcgatacctgt

SEQ ID NO: 138690 - DNA, 17 bp, Arabidopsis thaliana
tcattgtctcagcgaca

SEQ ID NO: 138691 - DNA, 17 bp, Arabidopsis thaliana
tcattgtctttaggaag

SEQ ID NO: 138692 - DNA, 17 bp, Arabidopsis thaliana
tcattgtgcgaggaatg

SEQ ID NO: 138693 - DNA, 17 bp, Arabidopsis thaliana
tcattgtgctcgatcgc

SEQ ID NO: 138694 - DNA, 17 bp, Arabidopsis thaliana
tcattgtgttataggaa

SEQ ID NO: 138695 - DNA, 17 bp, Arabidopsis thaliana
tcattgtttgtcaggtg

SEQ ID NO: 138696 - DNA, 17 bp, Arabidopsis thaliana
tcattgtttgtgttgca

SEQ ID NO: 138697 - DNA, 17 bp, Arabidopsis thaliana
tcatttaaccagacgtt

SEQ ID NO: 138698 - DNA, 17 bp, Arabidopsis thaliana
tcatttaccatcgcaga

SEQ ID NO: 138699 - DNA, 17 bp, Arabidopsis thaliana
tcatttatccatttgat

SEQ ID NO: 138700 - DNA, 17 bp, Arabidopsis thaliana
tcatttcacacagttat

SEQ ID NO: 138701 - DNA, 17 bp, Arabidopsis thaliana
tcatttcagagtggact

SEQ ID NO: 138702 - DNA, 17 bp, Arabidopsis thaliana
tcatttcagcgaaatct

SEQ ID NO: 138703 - DNA, 17 bp, Arabidopsis thaliana
tcatttcatcgacggga

SEQ ID NO: 138704 - DNA, 17 bp, Arabidopsis thaliana
tcatttccagaggttct

SEQ ID NO: 138705 - DNA, 17 bp, Arabidopsis thaliana
tcatttccattgtggcg

SEQ ID NO: 138706 - DNA, 17 bp, Arabidopsis thaliana
tcatttcccggctggtg

SEQ ID NO: 138707 - DNA, 17 bp, Arabidopsis thaliana
tcatttccctgcggtgc

SEQ ID NO: 138708 - DNA, 17 bp, Arabidopsis thaliana
tcatttccgcagacctt

SEQ ID NO: 138709 - DNA, 17 bp, Arabidopsis thaliana
tcatttcggttcgggtt

SEQ ID NO: 138710 - DNA, 17 bp, Arabidopsis thaliana
tcatttctaaaccgttt

SEQ ID NO: 138711 - DNA, 17 bp, Arabidopsis thaliana
tcatttctcagaatgcc

SEQ ID NO: 138712 - DNA, 17 bp, Arabidopsis thaliana
tcatttctccgaatgcc

SEQ ID NO: 138713 - DNA, 17 bp, Arabidopsis thaliana
tcatttctccggttcag

SEQ ID NO: 138714 - DNA, 17 bp, Arabidopsis thaliana
tcatttctccgtttcag

SEQ ID NO: 138715 - DNA, 17 bp, Arabidopsis thaliana
tcatttctcggaacgcc

SEQ ID NO: 138716 - DNA, 17 bp, Arabidopsis thaliana
tcatttctcggaatgcc

SEQ ID NO: 138717 - DNA, 17 bp, Arabidopsis thaliana
tcatttcttttgttgct

SEQ ID NO: 138718 - DNA, 17 bp, Arabidopsis thaliana
tcatttgaacttctgtt

SEQ ID NO: 138719 - DNA, 17 bp, Arabidopsis thaliana
tcatttgaagtaccact

SEQ ID NO: 138720 - DNA, 17 bp, Arabidopsis thaliana
tcatttgagtcaagctg

SEQ ID NO: 138721 - DNA, 17 bp, Arabidopsis thaliana
tcatttgagtcacgggc

SEQ ID NO: 138722 - DNA, 17 bp, Arabidopsis thaliana
tcatttgagtctgacgg

SEQ ID NO: 138723 - DNA, 17 bp, Arabidopsis thaliana
tcatttgataacgagac

SEQ ID NO: 138724 - DNA, 17 bp, Arabidopsis thaliana
tcatttgatggtcagag

SEQ ID NO: 138725 - DNA, 17 bp, Arabidopsis thaliana
tcatttgatgtgcagac

SEQ ID NO: 138726 - DNA, 17 bp, Arabidopsis thaliana
tcatttgcacctagata

SEQ ID NO: 138727 - DNA, 17 bp, Arabidopsis thaliana
tcatttgcaggttctgg

SEQ ID NO: 138728 - DNA, 17 bp, Arabidopsis thaliana
tcatttgcagtgaattt

SEQ ID NO: 138729 - DNA, 17 bp, Arabidopsis thaliana
tcatttgcatgttgtgg

SEQ ID NO: 138730 - DNA, 17 bp, Arabidopsis thaliana
tcatttgcttgtggatg

SEQ ID NO: 138731 - DNA, 17 bp, Arabidopsis thaliana
tcatttggacccttgat

SEQ ID NO: 138732 - DNA, 17 bp, Arabidopsis thaliana
tcatttggagagaattg

SEQ ID NO: 138733 - DNA, 17 bp, Arabidopsis thaliana
tcatttggagctcgcta

SEQ ID NO: 138734 - DNA, 17 bp, Arabidopsis thaliana
tcatttggctaagggta

SEQ ID NO: 138735 - DNA, 17 bp, Arabidopsis thaliana
tcatttgggtatgcgtt

SEQ ID NO: 138736 - DNA, 17 bp, Arabidopsis thaliana
tcatttggtgtagactg

SEQ ID NO: 138737 - DNA, 17 bp, Arabidopsis thaliana
tcatttggttgagatct

SEQ ID NO: 138738 - DNA, 17 bp, Arabidopsis thaliana
tcatttgtcttgaggca

SEQ ID NO: 138739 - DNA, 17 bp, Arabidopsis thaliana
tcatttgtgtgtgattg

SEQ ID NO: 138740 - DNA, 17 bp, Arabidopsis thaliana
tcatttgtttctcggca

SEQ ID NO: 138741 - DNA, 17 bp, Arabidopsis thaliana
tcattttcagcggctgt

SEQ ID NO: 138742 - DNA, 17 bp, Arabidopsis thaliana
tcattttcctcgcgatt

SEQ ID NO: 138743 - DNA, 17 bp, Arabidopsis thaliana
tcattttcgacggcatt

SEQ ID NO: 138744 - DNA, 17 bp, Arabidopsis thaliana
tcattttcgctgatcaa

SEQ ID NO: 138745 - DNA, 17 bp, Arabidopsis thaliana
tcattttcgtgatttgg

SEQ ID NO: 138746 - DNA, 17 bp, Arabidopsis thaliana
tcattttcgttaccagg

SEQ ID NO: 138747 - DNA, 17 bp, Arabidopsis thaliana
tcattttctatgctctt

SEQ ID NO: 138748 - DNA, 17 bp, Arabidopsis thaliana
tcattttctcaggaaga

SEQ ID NO: 138749 - DNA, 17 bp, Arabidopsis thaliana
tcattttctgcaaagat

SEQ ID NO: 138750 - DNA, 17 bp, Arabidopsis thaliana
tcattttgattatgttc

SEQ ID NO: 138751 - DNA, 17 bp, Arabidopsis thaliana
tcattttgcagaaataa

SEQ ID NO: 138752 - DNA, 17 bp, Arabidopsis thaliana
tcattttgcgccgattc

SEQ ID NO: 138753 - DNA, 17 bp, Arabidopsis thaliana
tcattttggtttcacgg

SEQ ID NO: 138754 - DNA, 17 bp, Arabidopsis thaliana
tcatttttacgcgggtg

SEQ ID NO: 138755 - DNA, 17 bp, Arabidopsis thaliana
tcatttttattggaccg

SEQ ID NO: 138756 - DNA, 17 bp, Arabidopsis thaliana
tcatttttcatctccat

SEQ ID NO: 138757 - DNA, 17 bp, Arabidopsis thaliana
tccaaaaaaaccgcgga

SEQ ID NO: 138758 - DNA, 17 bp, Arabidopsis thaliana
tccaaaaccgtactgca

SEQ ID NO: 138759 - DNA, 17 bp, Arabidopsis thaliana
tccaaaagagcctcgcg

SEQ ID NO: 138760 - DNA, 17 bp, Arabidopsis thaliana
tccaaaagaggctcgcg

SEQ ID NO: 138761 - DNA, 17 bp, Arabidopsis thaliana
tccaaaagtgttgactt

SEQ ID NO: 138762 - DNA, 17 bp, Arabidopsis thaliana
tccaaaagttctacatt

SEQ ID NO: 138763 - DNA, 17 bp, Arabidopsis thaliana
tccaaaatccgactact

SEQ ID NO: 138764 - DNA, 17 bp, Arabidopsis thaliana
tccaaaatgaaatctac

SEQ ID NO: 138765 - DNA, 17 bp, Arabidopsis thaliana
tccaaaatgttaggttc

SEQ ID NO: 138766 - DNA, 17 bp, Arabidopsis thaliana
tccaaaattggcttggt

SEQ ID NO: 138767 - DNA, 17 bp, Arabidopsis thaliana
tccaaacactcttgttc

SEQ ID NO: 138768 - DNA, 17 bp, Arabidopsis thaliana
tccaaaccgaccgagcc

SEQ ID NO: 138769 - DNA, 17 bp, Arabidopsis thaliana
tccaaacctttgcagca

SEQ ID NO: 138770 - DNA, 17 bp, Arabidopsis thaliana
tccaaacgaatgatgat

SEQ ID NO: 138771 - DNA, 17 bp, Arabidopsis thaliana
tccaaagatgatacaga

SEQ ID NO: 138772 - DNA, 17 bp, Arabidopsis thaliana
tccaaagcaagcagttc

SEQ ID NO: 138773 - DNA, 17 bp, Arabidopsis thaliana
tccaaagccttactccc

SEQ ID NO: 138774 - DNA, 17 bp, Arabidopsis thaliana
tccaaagccttactcgc

SEQ ID NO: 138775 - DNA, 17 bp, Arabidopsis thaliana
tccaaagggatcgcact

SEQ ID NO: 138776 - DNA, 17 bp, Arabidopsis thaliana
tccaaagggatcgcagt

SEQ ID NO: 138777 - DNA, 17 bp, Arabidopsis thaliana
tccaaagggatcgcatt

SEQ ID NO: 138778 - DNA, 17 bp, Arabidopsis thaliana
tccaaagggttcgcatt

SEQ ID NO: 138779 - DNA, 17 bp, Arabidopsis thaliana
tccaaaggttttgtgat

SEQ ID NO: 138780 - DNA, 17 bp, Arabidopsis thaliana
tccaaagttgtgtgaga

SEQ ID NO: 138781 - DNA, 17 bp, Arabidopsis thaliana
tccaaatcgatcgtgga

SEQ ID NO: 138782 - DNA, 17 bp, Arabidopsis thaliana
tccaaatcgtgagtagg

SEQ ID NO: 138783 - DNA, 17 bp, Arabidopsis thaliana
tccaaatctctatcgcc

SEQ ID NO: 138784 - DNA, 17 bp, Arabidopsis thaliana
tccaaatctgttgtagt

SEQ ID NO: 138785 - DNA, 17 bp, Arabidopsis thaliana
tccaaatgactggcaca

SEQ ID NO: 138786 - DNA, 17 bp, Arabidopsis thaliana
tccaaatgcactatcaa

SEQ ID NO: 138787 - DNA, 17 bp, Arabidopsis thaliana
tccaaattctccatcgc

SEQ ID NO: 138788 - DNA, 17 bp, Arabidopsis thaliana
tccaaattgctgcattt

SEQ ID NO: 138789 - DNA, 17 bp, Arabidopsis thaliana
tccaacaacagggaaat

SEQ ID NO: 138790 - DNA, 17 bp, Arabidopsis thaliana
tccaacaacttgacaca

SEQ ID NO: 138791 - DNA, 17 bp, Arabidopsis thaliana
tccaacaagtttcagcc

SEQ ID NO: 138792 - DNA, 17 bp, Arabidopsis thaliana
tccaacacatccaactt

SEQ ID NO: 138793 - DNA, 17 bp, Arabidopsis thaliana
tccaacagtttcttgcc

SEQ ID NO: 138794 - DNA, 17 bp, Arabidopsis thaliana
tccaacagtttcttggc

SEQ ID NO: 138795 - DNA, 17 bp, Arabidopsis thaliana
tccaacatgtttccgac

SEQ ID NO: 138796 - DNA, 17 bp, Arabidopsis thaliana
tccaaccctcctgctga

SEQ ID NO: 138797 - DNA, 17 bp, Arabidopsis thaliana
tccaaccgatgtgggac

SEQ ID NO: 138798 - DNA, 17 bp, Arabidopsis thaliana
tccaaccggtccctctt

SEQ ID NO: 138799 - DNA, 17 bp, Arabidopsis thaliana
tccaacgagatagtctg

SEQ ID NO: 138800 - DNA, 17 bp, Arabidopsis thaliana
tccaacggattataccg

SEQ ID NO: 138801 - DNA, 17 bp, Arabidopsis thaliana
tccaacgggatctgacg

SEQ ID NO: 138802 - DNA, 17 bp, Arabidopsis thaliana
tccaacggtgaaaattt

SEQ ID NO: 138803 - DNA, 17 bp, Arabidopsis thaliana
tccaacggttaggataa

SEQ ID NO: 138804 - DNA, 17 bp, Arabidopsis thaliana
tccaacggttgtgaatc

SEQ ID NO: 138805 - DNA, 17 bp, Arabidopsis thaliana
tccaacggttttcggtg

SEQ ID NO: 138806 - DNA, 17 bp, Arabidopsis thaliana
tccaacgtgctgcagat

SEQ ID NO: 138807 - DNA, 17 bp, Arabidopsis thaliana
tccaacgtggaccttgg

SEQ ID NO: 138808 - DNA, 17 bp, Arabidopsis thaliana
tccaacgtgttcttggc

SEQ ID NO: 138809 - DNA, 17 bp, Arabidopsis thaliana
tccaacgtttactatac

SEQ ID NO: 138810 - DNA, 17 bp, Arabidopsis thaliana
tccaacgtttactatcc

SEQ ID NO: 138811 - DNA, 17 bp, Arabidopsis thaliana
tccaacgtttactatgc

SEQ ID NO: 138812 - DNA, 17 bp, Arabidopsis thaliana
tccaactacaactgcac

SEQ ID NO: 138813 - DNA, 17 bp, Arabidopsis thaliana
tccaactattacccatg

SEQ ID NO: 138814 - DNA, 17 bp, Arabidopsis thaliana
tccaactcccgtatgac

SEQ ID NO: 138815 - DNA, 17 bp, Arabidopsis thaliana
tccaactctttttggct

SEQ ID NO: 138816 - DNA, 17 bp, Arabidopsis thaliana
tccaactgaggtatccg

SEQ ID NO: 138817 - DNA, 17 bp, Arabidopsis thaliana
tccaactgctgcagtac

SEQ ID NO: 138818 - DNA, 17 bp, Arabidopsis thaliana
tccaacttagatttgcc

SEQ ID NO: 138819 - DNA, 17 bp, Arabidopsis thaliana
tccaacttcttcagttt

SEQ ID NO: 138820 - DNA, 17 bp, Arabidopsis thaliana
tccaacttgaagcttag

SEQ ID NO: 138821 - DNA, 17 bp, Arabidopsis thaliana
tccaactttcgggtcgg

SEQ ID NO: 138822 - DNA, 17 bp, Arabidopsis thaliana
tccaagacatattgcag

SEQ ID NO: 138823 - DNA, 17 bp, Arabidopsis thaliana
tccaagacggtgcgttt

SEQ ID NO: 138824 - DNA, 17 bp, Arabidopsis thaliana
tccaagactcggctgat

SEQ ID NO: 138825 - DNA, 17 bp, Arabidopsis thaliana
tccaagacttcgggttt

SEQ ID NO: 138826 - DNA, 17 bp, Arabidopsis thaliana
tccaagcaaatgatgat

SEQ ID NO: 138827 - DNA, 17 bp, Arabidopsis thaliana
tccaagcaataaaccaa

SEQ ID NO: 138828 - DNA, 17 bp, Arabidopsis thaliana
tccaagcaatagacccg

SEQ ID NO: 138829 - DNA, 17 bp, Arabidopsis thaliana
tccaagccgaatccact

SEQ ID NO: 138830 - DNA, 17 bp, Arabidopsis thaliana
tccaagcgaataatgaa

SEQ ID NO: 138831 - DNA, 17 bp, Arabidopsis thaliana
tccaagcgaataatgat

SEQ ID NO: 138832 - DNA, 17 bp, Arabidopsis thaliana
tccaagcgaatgatgaa

SEQ ID NO: 138833 - DNA, 17 bp, Arabidopsis thaliana
tccaagcgaatgatgat

SEQ ID NO: 138834 - DNA, 17 bp, Arabidopsis thaliana
tccaagcgatgatgata

SEQ ID NO: 138835 - DNA, 17 bp, Arabidopsis thaliana
tccaagcgatgtgggaa

SEQ ID NO: 138836 - DNA, 17 bp, Arabidopsis thaliana
tccaagcgtcgtcggat

SEQ ID NO: 138837 - DNA, 17 bp, Arabidopsis thaliana
tccaaggaaggcagcag

SEQ ID NO: 138838 - DNA, 17 bp, Arabidopsis thaliana
tccaaggaatccatacc

SEQ ID NO: 138839 - DNA, 17 bp, Arabidopsis thaliana
tccaaggactggcgaaa

SEQ ID NO: 138840 - DNA, 17 bp, Arabidopsis thaliana
tccaaggcgttccttgt

SEQ ID NO: 138841 - DNA, 17 bp, Arabidopsis thaliana
tccaaggctcaacacca

SEQ ID NO: 138842 - DNA, 17 bp, Arabidopsis thaliana
tccaagggttcgagctt

SEQ ID NO: 138843 - DNA, 17 bp, Arabidopsis thaliana
tccaagggttttgggat

SEQ ID NO: 138844 - DNA, 17 bp, Arabidopsis thaliana
tccaaggtccttggacc

SEQ ID NO: 138845 - DNA, 17 bp, Arabidopsis thaliana
tccaaggtcttgcgaga

SEQ ID NO: 138846 - DNA, 17 bp, Arabidopsis thaliana
tccaaggtgattggttg

SEQ ID NO: 138847 - DNA, 17 bp, Arabidopsis thaliana
tccaagtccatcatcct

SEQ ID NO: 138848 - DNA, 17 bp, Arabidopsis thaliana
tccaagtcctagttcag

SEQ ID NO: 138849 - DNA, 17 bp, Arabidopsis thaliana
tccaagtcgatcgtgga

SEQ ID NO: 138850 - DNA, 17 bp, Arabidopsis thaliana
tccaagtcttgggacag

SEQ ID NO: 138851 - DNA, 17 bp, Arabidopsis thaliana
tccaagtgattgcagca

SEQ ID NO: 138852 - DNA, 17 bp, Arabidopsis thaliana
tccaagtgcgtaacaac

SEQ ID NO: 138853 - DNA, 17 bp, Arabidopsis thaliana
tccaagtgctcaattgc

SEQ ID NO: 138854 - DNA, 17 bp, Arabidopsis thaliana
tccaagttcttgtcgca

SEQ ID NO: 138855 - DNA, 17 bp, Arabidopsis thaliana
tccaagttgcgaaagta

SEQ ID NO: 138856 - DNA, 17 bp, Arabidopsis thaliana
tccaatatgttcgtccg

SEQ ID NO: 138857 - DNA, 17 bp, Arabidopsis thaliana
tccaatcacatcatgat

SEQ ID NO: 138858 - DNA, 17 bp, Arabidopsis thaliana
tccaatcgaagtttgtg

SEQ ID NO: 138859 - DNA, 17 bp, Arabidopsis thaliana
tccaatcgactaggggt

SEQ ID NO: 138860 - DNA, 17 bp, Arabidopsis thaliana
tccaatcggttttcgtg

SEQ ID NO: 138861 - DNA, 17 bp, Arabidopsis thaliana
tccaatctgctagacga

SEQ ID NO: 138862 - DNA, 17 bp, Arabidopsis thaliana
tccaatgatctggcatc

SEQ ID NO: 138863 - DNA, 17 bp, Arabidopsis thaliana
tccaatgcgtactaacg

SEQ ID NO: 138864 - DNA, 17 bp, Arabidopsis thaliana
tccaatggagtgtgtgc

SEQ ID NO: 138865 - DNA, 17 bp, Arabidopsis thaliana
tccaatggatcctcgtt

SEQ ID NO: 138866 - DNA, 17 bp, Arabidopsis thaliana
tccaatggtaaatcttt

SEQ ID NO: 138867 - DNA, 17 bp, Arabidopsis thaliana
tccaatggtccagaatc

SEQ ID NO: 138868 - DNA, 17 bp, Arabidopsis thaliana
tccaatgtcttttctag

SEQ ID NO: 138869 - DNA, 17 bp, Arabidopsis thaliana
tccaattatgggtggat

SEQ ID NO: 138870 - DNA, 17 bp, Arabidopsis thaliana
tccaattgcggttctag

SEQ ID NO: 138871 - DNA, 17 bp, Arabidopsis thaliana
tccaattgggcatatga

SEQ ID NO: 138872 - DNA, 17 bp, Arabidopsis thaliana
tccaattgtatgcgcca

SEQ ID NO: 138873 - DNA, 17 bp, Arabidopsis thaliana
tccaatttctgcggata

SEQ ID NO: 138874 - DNA, 17 bp, Arabidopsis thaliana
tccaattttcaaattgt

SEQ ID NO: 138875 - DNA, 17 bp, Arabidopsis thaliana
tccaattttcgatgtgg

SEQ ID NO: 138876 - DNA, 17 bp, Arabidopsis thaliana
tccaattttgggtggat

SEQ ID NO: 138877 - DNA, 17 bp, Arabidopsis thaliana
tccacaacagacgatac

SEQ ID NO: 138878 - DNA, 17 bp, Arabidopsis thaliana
tccacaaccgagctagc

SEQ ID NO: 138879 - DNA, 17 bp, Arabidopsis thaliana
tccacaacttttagacc

SEQ ID NO: 138880 - DNA, 17 bp, Arabidopsis thaliana
tccacaagagccacaga

SEQ ID NO: 138881 - DNA, 17 bp, Arabidopsis thaliana
tccacaagcgataagaa

SEQ ID NO: 138882 - DNA, 17 bp, Arabidopsis thaliana
tccacaagctatcagaa

SEQ ID NO: 138883 - DNA, 17 bp, Arabidopsis thaliana
tccacaatgtccagtcc

SEQ ID NO: 138884 - DNA, 17 bp, Arabidopsis thaliana
tccacaatgtgtatgat

SEQ ID NO: 138885 - DNA, 17 bp, Arabidopsis thaliana
tccacaccatcttggtc

SEQ ID NO: 138886 - DNA, 17 bp, Arabidopsis thaliana
tccacacgcgtgacccg

SEQ ID NO: 138887 - DNA, 17 bp, Arabidopsis thaliana
tccacagatgtttgtcc

SEQ ID NO: 138888 - DNA, 17 bp, Arabidopsis thaliana
tccacagatttttctaa

SEQ ID NO: 138889 - DNA, 17 bp, Arabidopsis thaliana
tccacagcttcgatcct

SEQ ID NO: 138890 - DNA, 17 bp, Arabidopsis thaliana
tccacatatctcatcac

SEQ ID NO: 138891 - DNA, 17 bp, Arabidopsis thaliana
tccacatcagggaagaa

SEQ ID NO: 138892 - DNA, 17 bp, Arabidopsis thaliana
tccacatctttccatgt

SEQ ID NO: 138893 - DNA, 17 bp, Arabidopsis thaliana
tccaccaaactttgacc

SEQ ID NO: 138894 - DNA, 17 bp, Arabidopsis thaliana
tccaccaacgatcatat

SEQ ID NO: 138895 - DNA, 17 bp, Arabidopsis thaliana
tccaccacttgtgtctg

SEQ ID NO: 138896 - DNA, 17 bp, Arabidopsis thaliana
tccaccagtgtgtagga

SEQ ID NO: 138897 - DNA, 17 bp, Arabidopsis thaliana
tccaccccgtaggaact

SEQ ID NO: 138898 - DNA, 17 bp, Arabidopsis thaliana
tccacccgaccggagca

SEQ ID NO: 138899 - DNA, 17 bp, Arabidopsis thaliana
tccaccgcttatgtttg

SEQ ID NO: 138900 - DNA, 17 bp, Arabidopsis thaliana
tccaccggctggaagag

SEQ ID NO: 138901 - DNA, 17 bp, Arabidopsis thaliana
tccaccggtgagcttta

SEQ ID NO: 138902 - DNA, 17 bp, Arabidopsis thaliana
tccaccgtcatgttctc

SEQ ID NO: 138903 - DNA, 17 bp, Arabidopsis thaliana
tccaccgtctgattagc

SEQ ID NO: 138904 - DNA, 17 bp, Arabidopsis thaliana
tccacctattgccaatt

SEQ ID NO: 138905 - DNA, 17 bp, Arabidopsis thaliana
tccacctcattctaagt

SEQ ID NO: 138906 - DNA, 17 bp, Arabidopsis thaliana
tccacctctgtctgtga

SEQ ID NO: 138907 - DNA, 17 bp, Arabidopsis thaliana
tccacctgaccggagca

SEQ ID NO: 138908 - DNA, 17 bp, Arabidopsis thaliana
tccacctgggagattta

SEQ ID NO: 138909 - DNA, 17 bp, Arabidopsis thaliana
tccacctttggtttttc

SEQ ID NO: 138910 - DNA, 17 bp, Arabidopsis thaliana
tccacgacagacgacat

SEQ ID NO: 138911 - DNA, 17 bp, Arabidopsis thaliana
tccacgacagacgatac

SEQ ID NO: 138912 - DNA, 17 bp, Arabidopsis thaliana
tccacgacctatcgcac

SEQ ID NO: 138913 - DNA, 17 bp, Arabidopsis thaliana
tccacgaccttgggacg

SEQ ID NO: 138914 - DNA, 17 bp, Arabidopsis thaliana
tccacgatcacacttca

SEQ ID NO: 138915 - DNA, 17 bp, Arabidopsis thaliana
tccacgatccactgaga

SEQ ID NO: 138916 - DNA, 17 bp, Arabidopsis thaliana
tccacgattcagtgcaa

SEQ ID NO: 138917 - DNA, 17 bp, Arabidopsis thaliana
tccacgcggattacggt

SEQ ID NO: 138918 - DNA, 17 bp, Arabidopsis thaliana
tccacgctaagtggcat

SEQ ID NO: 138919 - DNA, 17 bp, Arabidopsis thaliana
tccacgctacgcctggg

SEQ ID NO: 138920 - DNA, 17 bp, Arabidopsis thaliana
tccacggacaatatggg

SEQ ID NO: 138921 - DNA, 17 bp, Arabidopsis thaliana
tccacggatctgttttc

SEQ ID NO: 138922 - DNA, 17 bp, Arabidopsis thaliana
tccacgggatgggatgt

SEQ ID NO: 138923 - DNA, 17 bp, Arabidopsis thaliana
tccacgggtattagatt

SEQ ID NO: 138924 - DNA, 17 bp, Arabidopsis thaliana
tccacgggtctgttttc

SEQ ID NO: 138925 - DNA, 17 bp, Arabidopsis thaliana
tccacgggtttactaaa

SEQ ID NO: 138926 - DNA, 17 bp, Arabidopsis thaliana
tccacggtgttaatgtt

SEQ ID NO: 138927 - DNA, 17 bp, Arabidopsis thaliana
tccacggttcgaatccc

SEQ ID NO: 138928 - DNA, 17 bp, Arabidopsis thaliana
tccacgtctgcctgggt

SEQ ID NO: 138929 - DNA, 17 bp, Arabidopsis thaliana
tccacgtgtacctaggg

SEQ ID NO: 138930 - DNA, 17 bp, Arabidopsis thaliana
tccactaaatcacataa

SEQ ID NO: 138931 - DNA, 17 bp, Arabidopsis thaliana
tccactaaatcgcataa

SEQ ID NO: 138932 - DNA, 17 bp, Arabidopsis thaliana
tccactaagattatcag

SEQ ID NO: 138933 - DNA, 17 bp, Arabidopsis thaliana
tccactaaggcccatgt

SEQ ID NO: 138934 - DNA, 17 bp, Arabidopsis thaliana
tccactacatcttggtt

SEQ ID NO: 138935 - DNA, 17 bp, Arabidopsis thaliana
tccactattggcaggaa

SEQ ID NO: 138936 - DNA, 17 bp, Arabidopsis thaliana
tccactcatcacggtgc

SEQ ID NO: 138937 - DNA, 17 bp, Arabidopsis thaliana
tccactcggaagagaag

SEQ ID NO: 138938 - DNA, 17 bp, Arabidopsis thaliana
tccactctacctgatac

SEQ ID NO: 138939 - DNA, 17 bp, Arabidopsis thaliana
tccactgaattccacgt

SEQ ID NO: 138940 - DNA, 17 bp, Arabidopsis thaliana
tccactgagatacagcc

SEQ ID NO: 138941 - DNA, 17 bp, Arabidopsis thaliana
tccactgagatccagcc

SEQ ID NO: 138942 - DNA, 17 bp, Arabidopsis thaliana
tccactgagattcagcc

SEQ ID NO: 138943 - DNA, 17 bp, Arabidopsis thaliana
tccactgagattcagtt

SEQ ID NO: 138944 - DNA, 17 bp, Arabidopsis thaliana
tccactgagattccgcc

SEQ ID NO: 138945 - DNA, 17 bp, Arabidopsis thaliana
tccactgagctctcgat

SEQ ID NO: 138946 - DNA, 17 bp, Arabidopsis thaliana
tccactgcctctttcct

SEQ ID NO: 138947 - DNA, 17 bp, Arabidopsis thaliana
tccactgctaccaggat

SEQ ID NO: 138948 - DNA, 17 bp, Arabidopsis thaliana
tccactggattggtacg

SEQ ID NO: 138949 - DNA, 17 bp, Arabidopsis thaliana
tccactgggacaatacc

SEQ ID NO: 138950 - DNA, 17 bp, Arabidopsis thaliana
tccactggtacgatcag

SEQ ID NO: 138951 - DNA, 17 bp, Arabidopsis thaliana
tccactggtttctgctg

SEQ ID NO: 138952 - DNA, 17 bp, Arabidopsis thaliana
tccacttattgccaatt

SEQ ID NO: 138953 - DNA, 17 bp, Arabidopsis thaliana
tccacttattttaggat

SEQ ID NO: 138954 - DNA, 17 bp, Arabidopsis thaliana
tccacttctcctcgatc

SEQ ID NO: 138955 - DNA, 17 bp, Arabidopsis thaliana
tccacttcttttggtct

SEQ ID NO: 138956 - DNA, 17 bp, Arabidopsis thaliana
tccacttgcagttgatg

SEQ ID NO: 138957 - DNA, 17 bp, Arabidopsis thaliana
tccacttgttttgagcc

SEQ ID NO: 138958 - DNA, 17 bp, Arabidopsis thaliana
tccactttggcattcag

SEQ ID NO: 138959 - DNA, 17 bp, Arabidopsis thaliana
tccactttggtgattgg

SEQ ID NO: 138960 - DNA, 17 bp, Arabidopsis thaliana
tccagaacctaagtcac

SEQ ID NO: 138961 - DNA, 17 bp, Arabidopsis thaliana
tccagaagtctaatgtt

SEQ ID NO: 138962 - DNA, 17 bp, Arabidopsis thaliana
tccagaattctaatgtt

SEQ ID NO: 138963 - DNA, 17 bp, Arabidopsis thaliana
tccagacctgggttcga

SEQ ID NO: 138964 - DNA, 17 bp, Arabidopsis thaliana
tccagagagctggacca

SEQ ID NO: 138965 - DNA, 17 bp, Arabidopsis thaliana
tccagaggcttgactga

SEQ ID NO: 138966 - DNA, 17 bp, Arabidopsis thaliana
tccagaggtctaatgtt

SEQ ID NO: 138967 - DNA, 17 bp, Arabidopsis thaliana
tccagatcagaaggttg

SEQ ID NO: 138968 - DNA, 17 bp, Arabidopsis thaliana
tccagatcgaggtagct

SEQ ID NO: 138969 - DNA, 17 bp, Arabidopsis thaliana
tccagatctgatgactt

SEQ ID NO: 138970 - DNA, 17 bp, Arabidopsis thaliana
tccagatcttgtccccg

SEQ ID NO: 138971 - DNA, 17 bp, Arabidopsis thaliana
tccagatgactgggtga

SEQ ID NO: 138972 - DNA, 17 bp, Arabidopsis thaliana
tccagatgattcatttg

SEQ ID NO: 138973 - DNA, 17 bp, Arabidopsis thaliana
tccagattcactctttg

SEQ ID NO: 138974 - DNA, 17 bp, Arabidopsis thaliana
tccagattttgaccttt

SEQ ID NO: 138975 - DNA, 17 bp, Arabidopsis thaliana
tccagcagttagtccga

SEQ ID NO: 138976 - DNA, 17 bp, Arabidopsis thaliana
tccagcatgtgggtact

SEQ ID NO: 138977 - DNA, 17 bp, Arabidopsis thaliana
tccagccaaggatgact

SEQ ID NO: 138978 - DNA, 17 bp, Arabidopsis thaliana
tccagccctttgtcgct

SEQ ID NO: 138979 - DNA, 17 bp, Arabidopsis thaliana
tccagcgacctgggttc

SEQ ID NO: 138980 - DNA, 17 bp, Arabidopsis thaliana
tccagcgacgcagccgg

SEQ ID NO: 138981 - DNA, 17 bp, Arabidopsis thaliana
tccagcgatctcgaacg

SEQ ID NO: 138982 - DNA, 17 bp, Arabidopsis thaliana
tccagcggaagatgaat

SEQ ID NO: 138983 - DNA, 17 bp, Arabidopsis thaliana
tccagcggaagatgatt

SEQ ID NO: 138984 - DNA, 17 bp, Arabidopsis thaliana
tccagcggatcaactaa

SEQ ID NO: 138985 - DNA, 17 bp, Arabidopsis thaliana
tccagcggctattagga

SEQ ID NO: 138986 - DNA, 17 bp, Arabidopsis thaliana
tccagcggctggaagag

SEQ ID NO: 138987 - DNA, 17 bp, Arabidopsis thaliana
tccagcggctggaaggg

SEQ ID NO: 138988 - DNA, 17 bp, Arabidopsis thaliana
tccagcggctggaatag

SEQ ID NO: 138989 - DNA, 17 bp, Arabidopsis thaliana
tccagcggtgtgcaatg

SEQ ID NO: 138990 - DNA, 17 bp, Arabidopsis thaliana
tccagcgtctacggaat

SEQ ID NO: 138991 - DNA, 17 bp, Arabidopsis thaliana
tccagcgttctgtagcc

SEQ ID NO: 138992 - DNA, 17 bp, Arabidopsis thaliana
tccagctgctgattgat

SEQ ID NO: 138993 - DNA, 17 bp, Arabidopsis thaliana
tccaggaacatacctcc

SEQ ID NO: 138994 - DNA, 17 bp, Arabidopsis thaliana
tccaggaagttttgtgc

SEQ ID NO: 138995 - DNA, 17 bp, Arabidopsis thaliana
tccaggacattcaaggg

SEQ ID NO: 138996 - DNA, 17 bp, Arabidopsis thaliana
tccaggaccaaaccacg

SEQ ID NO: 138997 - DNA, 17 bp, Arabidopsis thaliana
tccaggagtctatctgc

SEQ ID NO: 138998 - DNA, 17 bp, Arabidopsis thaliana
tccaggagttttgatag

SEQ ID NO: 138999 - DNA, 17 bp, Arabidopsis thaliana
tccaggcccgaaaccac

SEQ ID NO: 139000 - DNA, 17 bp, Arabidopsis thaliana
tccaggccctacgggtg

SEQ ID NO: 139001 - DNA, 17 bp, Arabidopsis thaliana
tccaggccctgggcagc

SEQ ID NO: 139002 - DNA, 17 bp, Arabidopsis thaliana
tccaggctcaagttgtt

SEQ ID NO: 139003 - DNA, 17 bp, Arabidopsis thaliana
tccagggagtctacagg

SEQ ID NO: 139004 - DNA, 17 bp, Arabidopsis thaliana
tccagggtgtatcgtag

SEQ ID NO: 139005 - DNA, 17 bp, Arabidopsis thaliana
tccaggtcatcacggcg

SEQ ID NO: 139006 - DNA, 17 bp, Arabidopsis thaliana
tccaggtccacaaatcg

SEQ ID NO: 139007 - DNA, 17 bp, Arabidopsis thaliana
tccaggtcctgatggat

SEQ ID NO: 139008 - DNA, 17 bp, Arabidopsis thaliana
tccaggtcgccatgttg

SEQ ID NO: 139009 - DNA, 17 bp, Arabidopsis thaliana
tccaggtctccggttga

SEQ ID NO: 139010 - DNA, 17 bp, Arabidopsis thaliana
tccaggtcttcaggctt

SEQ ID NO: 139011 - DNA, 17 bp, Arabidopsis thaliana
tccaggtgctggctatg

SEQ ID NO: 139012 - DNA, 17 bp, Arabidopsis thaliana
tccaggtgtaggtgttg

SEQ ID NO: 139013 - DNA, 17 bp, Arabidopsis thaliana
tccaggtgtgttgggta

SEQ ID NO: 139014 - DNA, 17 bp, Arabidopsis thaliana
tccagtacgcacagatc

SEQ ID NO: 139015 - DNA, 17 bp, Arabidopsis thaliana
tccagtacggtcgtggc

SEQ ID NO: 139016 - DNA, 17 bp, Arabidopsis thaliana
tccagtagggtgggtag

SEQ ID NO: 139017 - DNA, 17 bp, Arabidopsis thaliana
tccagtcaggagcgaaa

SEQ ID NO: 139018 - DNA, 17 bp, Arabidopsis thaliana
tccagtgaccagtcata

SEQ ID NO: 139019 - DNA, 17 bp, Arabidopsis thaliana
tccagtgattcgggctt

SEQ ID NO: 139020 - DNA, 17 bp, Arabidopsis thaliana
tccagtggattgggttc

SEQ ID NO: 139021 - DNA, 17 bp, Arabidopsis thaliana
tccagtggcagccattg

SEQ ID NO: 139022 - DNA, 17 bp, Arabidopsis thaliana
tccagtggcggactagc

SEQ ID NO: 139023 - DNA, 17 bp, Arabidopsis thaliana
tccagtgggatggactc

SEQ ID NO: 139024 - DNA, 17 bp, Arabidopsis thaliana
tccagtgggcggaaagg

SEQ ID NO: 139025 - DNA, 17 bp, Arabidopsis thaliana
tccagtggtgatctggc

SEQ ID NO: 139026 - DNA, 17 bp, Arabidopsis thaliana
tccagtggtgtggccgt

SEQ ID NO: 139027 - DNA, 17 bp, Arabidopsis thaliana
tccagtgttccgtctct

SEQ ID NO: 139028 - DNA, 17 bp, Arabidopsis thaliana
tccagttaatcctacgg

SEQ ID NO: 139029 - DNA, 17 bp, Arabidopsis thaliana
tccagttcgatcctggg

SEQ ID NO: 139030 - DNA, 17 bp, Arabidopsis thaliana
tccagttcggtcctggg

SEQ ID NO: 139031 - DNA, 17 bp, Arabidopsis thaliana
tccagttcgttcctggg

SEQ ID NO: 139032 - DNA, 17 bp, Arabidopsis thaliana
tccagttcttcggttat

SEQ ID NO: 139033 - DNA, 17 bp, Arabidopsis thaliana
tccagttgtggaacgat

SEQ ID NO: 139034 - DNA, 17 bp, Arabidopsis thaliana
tccagttgttagaccat

SEQ ID NO: 139035 - DNA, 17 bp, Arabidopsis thaliana
tccagtttgcttaggtg

SEQ ID NO: 139036 - DNA, 17 bp, Arabidopsis thaliana
tccagtttgtgtgcgtg

SEQ ID NO: 139037 - DNA, 17 bp, Arabidopsis thaliana
tccataacttaataaat

SEQ ID NO: 139038 - DNA, 17 bp, Arabidopsis thaliana
tccataactttaaatct

SEQ ID NO: 139039 - DNA, 17 bp, Arabidopsis thaliana
tccataactttagaccg

SEQ ID NO: 139040 - DNA, 17 bp, Arabidopsis thaliana
tccataacttttaaacc

SEQ ID NO: 139041 - DNA, 17 bp, Arabidopsis thaliana
tccataacttttagacc

SEQ ID NO: 139042 - DNA, 17 bp, Arabidopsis thaliana
tccataaggtgtgaata

SEQ ID NO: 139043 - DNA, 17 bp, Arabidopsis thaliana
tccataatctcaagtag

SEQ ID NO: 139044 - DNA, 17 bp, Arabidopsis thaliana
tccatacacggttttgt

SEQ ID NO: 139045 - DNA, 17 bp, Arabidopsis thaliana
tccatagacttgctctt

SEQ ID NO: 139046 - DNA, 17 bp, Arabidopsis thaliana
tccatagatgtttgtcc

SEQ ID NO: 139047 - DNA, 17 bp, Arabidopsis thaliana
tccatagtagggctgag

SEQ ID NO: 139048 - DNA, 17 bp, Arabidopsis thaliana
tccatagttaagcgtgt

SEQ ID NO: 139049 - DNA, 17 bp, Arabidopsis thaliana
tccatatccggtgtggg

SEQ ID NO: 139050 - DNA, 17 bp, Arabidopsis thaliana
tccatatgtgttggcca

SEQ ID NO: 139051 - DNA, 17 bp, Arabidopsis thaliana
tccatcactgaggacag

SEQ ID NO: 139052 - DNA, 17 bp, Arabidopsis thaliana
tccatcagaatggtaat

SEQ ID NO: 139053 - DNA, 17 bp, Arabidopsis thaliana
tccatcagtcggatact

SEQ ID NO: 139054 - DNA, 17 bp, Arabidopsis thaliana
tccatcccatccgacga

SEQ ID NO: 139055 - DNA, 17 bp, Arabidopsis thaliana
tccatcctgagttccat

SEQ ID NO: 139056 - DNA, 17 bp, Arabidopsis thaliana
tccatcgaccagaggct

SEQ ID NO: 139057 - DNA, 17 bp, Arabidopsis thaliana
tccatcgattaatgtcc

SEQ ID NO: 139058 - DNA, 17 bp, Arabidopsis thaliana
tccatcggctggaagag

SEQ ID NO: 139059 - DNA, 17 bp, Arabidopsis thaliana
tccatcgggagtttctg

SEQ ID NO: 139060 - DNA, 17 bp, Arabidopsis thaliana
tccatcggtagagatga

SEQ ID NO: 139061 - DNA, 17 bp, Arabidopsis thaliana
tccatcgtgactttgtc

SEQ ID NO: 139062 - DNA, 17 bp, Arabidopsis thaliana
tccatctgattgagcaa

SEQ ID NO: 139063 - DNA, 17 bp, Arabidopsis thaliana
tccatgaggttctgggc

SEQ ID NO: 139064 - DNA, 17 bp, Arabidopsis thaliana
tccatgcgagtatctca

SEQ ID NO: 139065 - DNA, 17 bp, Arabidopsis thaliana
tccatgcgcttaatgga

SEQ ID NO: 139066 - DNA, 17 bp, Arabidopsis thaliana
tccatggaaattgtgaa

SEQ ID NO: 139067 - DNA, 17 bp, Arabidopsis thaliana
tccatggaatagcggct

SEQ ID NO: 139068 - DNA, 17 bp, Arabidopsis thaliana
tccatgggtgattctgg

SEQ ID NO: 139069 - DNA, 17 bp, Arabidopsis thaliana
tccatgttctccggtat

SEQ ID NO: 139070 - DNA, 17 bp, Arabidopsis thaliana
tccattaaggcccatat

SEQ ID NO: 139071 - DNA, 17 bp, Arabidopsis thaliana
tccattaaggcccatgt

SEQ ID NO: 139072 - DNA, 17 bp, Arabidopsis thaliana
tccattaccgctcagga

SEQ ID NO: 139073 - DNA, 17 bp, Arabidopsis thaliana
tccattagaccgctatg

SEQ ID NO: 139074 - DNA, 17 bp, Arabidopsis thaliana
tccattaggaacggcag

SEQ ID NO: 139075 - DNA, 17 bp, Arabidopsis thaliana
tccattatggaccgtcc

SEQ ID NO: 139076 - DNA, 17 bp, Arabidopsis thaliana
tccattatgtgagactg

SEQ ID NO: 139077 - DNA, 17 bp, Arabidopsis thaliana
tccattcaacatgtcca

SEQ ID NO: 139078 - DNA, 17 bp, Arabidopsis thaliana
tccattccatcgaggct

SEQ ID NO: 139079 - DNA, 17 bp, Arabidopsis thaliana
tccattccgccattcgg

SEQ ID NO: 139080 - DNA, 17 bp, Arabidopsis thaliana
tccattcggagtttctg

SEQ ID NO: 139081 - DNA, 17 bp, Arabidopsis thaliana
tccattcggtcggcgat

SEQ ID NO: 139082 - DNA, 17 bp, Arabidopsis thaliana
tccattgaatgagaggt

SEQ ID NO: 139083 - DNA, 17 bp, Arabidopsis thaliana
tccattgaccttcttcc

SEQ ID NO: 139084 - DNA, 17 bp, Arabidopsis thaliana
tccattgaccttgttct

SEQ ID NO: 139085 - DNA, 17 bp, Arabidopsis thaliana
tccattgacgagagaac

SEQ ID NO: 139086 - DNA, 17 bp, Arabidopsis thaliana
tccattgactttttctc

SEQ ID NO: 139087 - DNA, 17 bp, Arabidopsis thaliana
tccattgactttttctg

SEQ ID NO: 139088 - DNA, 17 bp, Arabidopsis thaliana
tccattgactttttgtc

SEQ ID NO: 139089 - DNA, 17 bp, Arabidopsis thaliana
tccattgactttttgtt

SEQ ID NO: 139090 - DNA, 17 bp, Arabidopsis thaliana
tccattgctcctgttgc

SEQ ID NO: 139091 - DNA, 17 bp, Arabidopsis thaliana
tccattggaaacgatta

SEQ ID NO: 139092 - DNA, 17 bp, Arabidopsis thaliana
tccattggagggcaagt

SEQ ID NO: 139093 - DNA, 17 bp, Arabidopsis thaliana
tccattggagggcacgt

SEQ ID NO: 139094 - DNA, 17 bp, Arabidopsis thaliana
tccattggctgcatagt

SEQ ID NO: 139095 - DNA, 17 bp, Arabidopsis thaliana
tccattggggaatttgc

SEQ ID NO: 139096 - DNA, 17 bp, Arabidopsis thaliana
tccattgtcctgcttat

SEQ ID NO: 139097 - DNA, 17 bp, Arabidopsis thaliana
tccattgtcgtccagcg

SEQ ID NO: 139098 - DNA, 17 bp, Arabidopsis thaliana
tccattgtcgtccagct

SEQ ID NO: 139099 - DNA, 17 bp, Arabidopsis thaliana
tccatttaccatcgcag

SEQ ID NO: 139100 - DNA, 17 bp, Arabidopsis thaliana
tccatttacgatggcga

SEQ ID NO: 139101 - DNA, 17 bp, Arabidopsis thaliana
tccatttctctacgcta

SEQ ID NO: 139102 - DNA, 17 bp, Arabidopsis thaliana
tccatttgatttcgctt

SEQ ID NO: 139103 - DNA, 17 bp, Arabidopsis thaliana
tccatttgcggatagcg

SEQ ID NO: 139104 - DNA, 17 bp, Arabidopsis thaliana
tccatttggttgcaaag

SEQ ID NO: 139105 - DNA, 17 bp, Arabidopsis thaliana
tccatttttggtggttc

SEQ ID NO: 139106 - DNA, 17 bp, Arabidopsis thaliana
tcccaaaactagcttac

SEQ ID NO: 139107 - DNA, 17 bp, Arabidopsis thaliana
tcccaaaactctatagc

SEQ ID NO: 139108 - DNA, 17 bp, Arabidopsis thaliana
tcccaaaagactgtgct

SEQ ID NO: 139109 - DNA, 17 bp, Arabidopsis thaliana
tcccaaacaggctatcc

SEQ ID NO: 139110 - DNA, 17 bp, Arabidopsis thaliana
tcccaaacccatcccgc

SEQ ID NO: 139111 - DNA, 17 bp, Arabidopsis thaliana
tcccaaaccctaacgat

SEQ ID NO: 139112 - DNA, 17 bp, Arabidopsis thaliana
tcccaaaccgaccgctc

SEQ ID NO: 139113 - DNA, 17 bp, Arabidopsis thaliana
tcccaaacgtttgtgcc

SEQ ID NO: 139114 - DNA, 17 bp, Arabidopsis thaliana
tcccaaacttgactaca

SEQ ID NO: 139115 - DNA, 17 bp, Arabidopsis thaliana
tcccaaactttcgcccg

SEQ ID NO: 139116 - DNA, 17 bp, Arabidopsis thaliana
tcccaaagctgaggtat

SEQ ID NO: 139117 - DNA, 17 bp, Arabidopsis thaliana
tcccaaagtccggttag

SEQ ID NO: 139118 - DNA, 17 bp, Arabidopsis thaliana
tcccaaagttgaggtat

SEQ ID NO: 139119 - DNA, 17 bp, Arabidopsis thaliana
tcccaaatgtagacaaa

SEQ ID NO: 139120 - DNA, 17 bp, Arabidopsis thaliana
tcccaaatttccttgct

SEQ ID NO: 139121 - DNA, 17 bp, Arabidopsis thaliana
tcccaaatttgaaagtt

SEQ ID NO: 139122 - DNA, 17 bp, Arabidopsis thaliana
tcccaacagatacatct

SEQ ID NO: 139123 - DNA, 17 bp, Arabidopsis thaliana
tcccaaccgaatggccg

SEQ ID NO: 139124 - DNA, 17 bp, Arabidopsis thaliana
tcccaactactgcgatt

SEQ ID NO: 139125 - DNA, 17 bp, Arabidopsis thaliana
tcccaactccaagattt

SEQ ID NO: 139126 - DNA, 17 bp, Arabidopsis thaliana
tcccaactccaggatta

SEQ ID NO: 139127 - DNA, 17 bp, Arabidopsis thaliana
tcccaactccaggattt

SEQ ID NO: 139128 - DNA, 17 bp, Arabidopsis thaliana
tcccaagcccatttcaa

SEQ ID NO: 139129 - DNA, 17 bp, Arabidopsis thaliana
tcccaagcgtcactcga

SEQ ID NO: 139130 - DNA, 17 bp, Arabidopsis thaliana
tcccaaggctcgcttcg

SEQ ID NO: 139131 - DNA, 17 bp, Arabidopsis thaliana
tcccaagtccaacatag

SEQ ID NO: 139132 - DNA, 17 bp, Arabidopsis thaliana
tcccaagttcaggaata

SEQ ID NO: 139133 - DNA, 17 bp, Arabidopsis thaliana
tcccaatactgcggggc

SEQ ID NO: 139134 - DNA, 17 bp, Arabidopsis thaliana
tcccaatatgtgtttgt

SEQ ID NO: 139135 - DNA, 17 bp, Arabidopsis thaliana
tcccaatttcggcactt

SEQ ID NO: 139136 - DNA, 17 bp, Arabidopsis thaliana
tcccaatttcggcccta

SEQ ID NO: 139137 - DNA, 17 bp, Arabidopsis thaliana
tcccaattttccggata

SEQ ID NO: 139138 - DNA, 17 bp, Arabidopsis thaliana
tcccacaacttgacaca

SEQ ID NO: 139139 - DNA, 17 bp, Arabidopsis thaliana
tcccacagatgggcttt

SEQ ID NO: 139140 - DNA, 17 bp, Arabidopsis thaliana
tcccacagctttcttga

SEQ ID NO: 139141 - DNA, 17 bp, Arabidopsis thaliana
tcccacaggacaaccag

SEQ ID NO: 139142 - DNA, 17 bp, Arabidopsis thaliana
tcccacatcggaagttc

SEQ ID NO: 139143 - DNA, 17 bp, Arabidopsis thaliana
tcccacatcggaagttg

SEQ ID NO: 139144 - DNA, 17 bp, Arabidopsis thaliana
tcccaccacgaggcgct

SEQ ID NO: 139145 - DNA, 17 bp, Arabidopsis thaliana
tcccaccgtagtttgac

SEQ ID NO: 139146 - DNA, 17 bp, Arabidopsis thaliana
tcccacgacgaggttga

SEQ ID NO: 139147 - DNA, 17 bp, Arabidopsis thaliana
tcccacggactgcccag

SEQ ID NO: 139148 - DNA, 17 bp, Arabidopsis thaliana
tcccacggatccgagta

SEQ ID NO: 139149 - DNA, 17 bp, Arabidopsis thaliana
tcccacgtctgcctggg

SEQ ID NO: 139150 - DNA, 17 bp, Arabidopsis thaliana
tcccactataaaatcgt

SEQ ID NO: 139151 - DNA, 17 bp, Arabidopsis thaliana
tcccactgaagctaaga

SEQ ID NO: 139152 - DNA, 17 bp, Arabidopsis thaliana
tcccactgtccctgtct

SEQ ID NO: 139153 - DNA, 17 bp, Arabidopsis thaliana
tcccacttcacaccccg

SEQ ID NO: 139154 - DNA, 17 bp, Arabidopsis thaliana
tcccacttctgtagatg

SEQ ID NO: 139155 - DNA, 17 bp, Arabidopsis thaliana
tcccagaagatcaaggt

SEQ ID NO: 139156 - DNA, 17 bp, Arabidopsis thaliana
tcccagaaggtgtgttc

SEQ ID NO: 139157 - DNA, 17 bp, Arabidopsis thaliana
tcccagacatatcctcc

SEQ ID NO: 139158 - DNA, 17 bp, Arabidopsis thaliana
tcccagacggccttttt

SEQ ID NO: 139159 - DNA, 17 bp, Arabidopsis thaliana
tcccagatgtgtgcttt

SEQ ID NO: 139160 - DNA, 17 bp, Arabidopsis thaliana
tcccagattccaggttc

SEQ ID NO: 139161 - DNA, 17 bp, Arabidopsis thaliana
tcccagccaaggatgac

SEQ ID NO: 139162 - DNA, 17 bp, Arabidopsis thaliana
tcccagccaccaccaat

SEQ ID NO: 139163 - DNA, 17 bp, Arabidopsis thaliana
tcccagctggaccacca

SEQ ID NO: 139164 - DNA, 17 bp, Arabidopsis thaliana
tcccaggaagtggcaaa

SEQ ID NO: 139165 - DNA, 17 bp, Arabidopsis thaliana
tcccaggaccaacctgg

SEQ ID NO: 139166 - DNA, 17 bp, Arabidopsis thaliana
tcccaggaggtcaccca

SEQ ID NO: 139167 - DNA, 17 bp, Arabidopsis thaliana
tcccaggatcggaacct

SEQ ID NO: 139168 - DNA, 17 bp, Arabidopsis thaliana
tcccaggcctagttttt

SEQ ID NO: 139169 - DNA, 17 bp, Arabidopsis thaliana
tcccagggctcaaccct

SEQ ID NO: 139170 - DNA, 17 bp, Arabidopsis thaliana
tcccagtcccgaagaat

SEQ ID NO: 139171 - DNA, 17 bp, Arabidopsis thaliana
tcccagtggcagccaca

SEQ ID NO: 139172 - DNA, 17 bp, Arabidopsis thaliana
tcccagttccgaacccg

SEQ ID NO: 139173 - DNA, 17 bp, Arabidopsis thaliana
tcccagttcctaacccg

SEQ ID NO: 139174 - DNA, 17 bp, Arabidopsis thaliana
tcccagtttccctgtct

SEQ ID NO: 139175 - DNA, 17 bp, Arabidopsis thaliana
tcccatataggtattcg

SEQ ID NO: 139176 - DNA, 17 bp, Arabidopsis thaliana
tcccatatgtgcccaaa

SEQ ID NO: 139177 - DNA, 17 bp, Arabidopsis thaliana
tcccatatgtgtgcttt

SEQ ID NO: 139178 - DNA, 17 bp, Arabidopsis thaliana
tcccatcgccggatcca

SEQ ID NO: 139179 - DNA, 17 bp, Arabidopsis thaliana
tcccatctgcgcaaatg

SEQ ID NO: 139180 - DNA, 17 bp, Arabidopsis thaliana
tcccatctgtgtaattg

SEQ ID NO: 139181 - DNA, 17 bp, Arabidopsis thaliana
tcccatgaggcactctc

SEQ ID NO: 139182 - DNA, 17 bp, Arabidopsis thaliana
tcccatggaccgcccgg

SEQ ID NO: 139183 - DNA, 17 bp, Arabidopsis thaliana
tcccatggagagttcga

SEQ ID NO: 139184 - DNA, 17 bp, Arabidopsis thaliana
tcccatggcgatcgcgg

SEQ ID NO: 139185 - DNA, 17 bp, Arabidopsis thaliana
tcccatgtaagcacgtc

SEQ ID NO: 139186 - DNA, 17 bp, Arabidopsis thaliana
tcccattagtcgcttga

SEQ ID NO: 139187 - DNA, 17 bp, Arabidopsis thaliana
tcccattagtgatgagg

SEQ ID NO: 139188 - DNA, 17 bp, Arabidopsis thaliana
tcccattcattcccagt

SEQ ID NO: 139189 - DNA, 17 bp, Arabidopsis thaliana
tcccattttagcgagtg

SEQ ID NO: 139190 - DNA, 17 bp, Arabidopsis thaliana
tccccaaaggagaatgt

SEQ ID NO: 139191 - DNA, 17 bp, Arabidopsis thaliana
tccccaaatgtagacaa

SEQ ID NO: 139192 - DNA, 17 bp, Arabidopsis thaliana
tccccaaccgaatggcc

SEQ ID NO: 139193 - DNA, 17 bp, Arabidopsis thaliana
tccccaacttgctccat

SEQ ID NO: 139194 - DNA, 17 bp, Arabidopsis thaliana
tccccaagcgtttctaa

SEQ ID NO: 139195 - DNA, 17 bp, Arabidopsis thaliana
tccccaaggatgacttg

SEQ ID NO: 139196 - DNA, 17 bp, Arabidopsis thaliana
tccccaaggcgtggccg

SEQ ID NO: 139197 - DNA, 17 bp, Arabidopsis thaliana
tccccacagacggcgcc

SEQ ID NO: 139198 - DNA, 17 bp, Arabidopsis thaliana
tccccacgaaggagaag

SEQ ID NO: 139199 - DNA, 17 bp, Arabidopsis thaliana
tccccacgatctccaca

SEQ ID NO: 139200 - DNA, 17 bp, Arabidopsis thaliana
tccccagagcctccggt

SEQ ID NO: 139201 - DNA, 17 bp, Arabidopsis thaliana
tccccaggcctagtaac

SEQ ID NO: 139202 - DNA, 17 bp, Arabidopsis thaliana
tccccatacgactaata

SEQ ID NO: 139203 - DNA, 17 bp, Arabidopsis thaliana
tcccccatagctcagtg

SEQ ID NO: 139204 - DNA, 17 bp, Arabidopsis thaliana
tcccccatgactcaacc

SEQ ID NO: 139205 - DNA, 17 bp, Arabidopsis thaliana
tccccccatcgattggc

SEQ ID NO: 139206 - DNA, 17 bp, Arabidopsis thaliana
tcccccccccccccccc

SEQ ID NO: 139207 - DNA, 17 bp, Arabidopsis thaliana
tccccccgaaagaccac

SEQ ID NO: 139208 - DNA, 17 bp, Arabidopsis thaliana
tcccccgccttaccact

SEQ ID NO: 139209 - DNA, 17 bp, Arabidopsis thaliana
tccccctacctggcgcg

SEQ ID NO: 139210 - DNA, 17 bp, Arabidopsis thaliana
tccccctcacacttttt

SEQ ID NO: 139211 - DNA, 17 bp, Arabidopsis thaliana
tccccctctctctctct

SEQ ID NO: 139212 - DNA, 17 bp, Arabidopsis thaliana
tccccctctctctttct

SEQ ID NO: 139213 - DNA, 17 bp, Arabidopsis thaliana
tccccctggagcagtgg

SEQ ID NO: 139214 - DNA, 17 bp, Arabidopsis thaliana
tccccctgttatggtag

SEQ ID NO: 139215 - DNA, 17 bp, Arabidopsis thaliana
tccccgaaagaccacca

SEQ ID NO: 139216 - DNA, 17 bp, Arabidopsis thaliana
tccccgaaatgcgttga

SEQ ID NO: 139217 - DNA, 17 bp, Arabidopsis thaliana
tccccgatcaaagtcga

SEQ ID NO: 139218 - DNA, 17 bp, Arabidopsis thaliana
tccccgctgattctgcc

SEQ ID NO: 139219 - DNA, 17 bp, Arabidopsis thaliana
tccccggaaactaaagc

SEQ ID NO: 139220 - DNA, 17 bp, Arabidopsis thaliana
tccccggtttgccgaag

SEQ ID NO: 139221 - DNA, 17 bp, Arabidopsis thaliana
tccccgtcgtcaggttg

SEQ ID NO: 139222 - DNA, 17 bp, Arabidopsis thaliana
tccccgtgaccagcccc

SEQ ID NO: 139223 - DNA, 17 bp, Arabidopsis thaliana
tccccgtgggtatccga

SEQ ID NO: 139224 - DNA, 17 bp, Arabidopsis thaliana
tcccctattttgttcgt

SEQ ID NO: 139225 - DNA, 17 bp, Arabidopsis thaliana
tcccctattttgtttcg

SEQ ID NO: 139226 - DNA, 17 bp, Arabidopsis thaliana
tcccctcaaggcccaac

SEQ ID NO: 139227 - DNA, 17 bp, Arabidopsis thaliana
tcccctcttcgagacat

SEQ ID NO: 139228 - DNA, 17 bp, Arabidopsis thaliana
tcccctcttttgggctt

SEQ ID NO: 139229 - DNA, 17 bp, Arabidopsis thaliana
tcccctgagactacatt

SEQ ID NO: 139230 - DNA, 17 bp, Arabidopsis thaliana
tcccctgcgaggagtcc

SEQ ID NO: 139231 - DNA, 17 bp, Arabidopsis thaliana
tcccctgcggaaggatc

SEQ ID NO: 139232 - DNA, 17 bp, Arabidopsis thaliana
tccccttagatgttctg

SEQ ID NO: 139233 - DNA, 17 bp, Arabidopsis thaliana
tccccttaggcccgaaa

SEQ ID NO: 139234 - DNA, 17 bp, Arabidopsis thaliana
tccccttaggtccgtaa

SEQ ID NO: 139235 - DNA, 17 bp, Arabidopsis thaliana
tcccctttggcgctaag

SEQ ID NO: 139236 - DNA, 17 bp, Arabidopsis thaliana
tcccctttgtcgctaag

SEQ ID NO: 139237 - DNA, 17 bp, Arabidopsis thaliana
tcccgaaaccgaacacc

SEQ ID NO: 139238 - DNA, 17 bp, Arabidopsis thaliana
tcccgaacaacaatgga

SEQ ID NO: 139239 - DNA, 17 bp, Arabidopsis thaliana
tcccgaacccgggcgaa

SEQ ID NO: 139240 - DNA, 17 bp, Arabidopsis thaliana
tcccgaacccgggctca

SEQ ID NO: 139241 - DNA, 17 bp, Arabidopsis thaliana
tcccgaagacgaaacgc

SEQ ID NO: 139242 - DNA, 17 bp, Arabidopsis thaliana
tcccgaagccggcggcg

SEQ ID NO: 139243 - DNA, 17 bp, Arabidopsis thaliana
tcccgaagtgatgggat

SEQ ID NO: 139244 - DNA, 17 bp, Arabidopsis thaliana
tcccgaagttgtctctt

SEQ ID NO: 139245 - DNA, 17 bp, Arabidopsis thaliana
tcccgacaccgacaaac

SEQ ID NO: 139246 - DNA, 17 bp, Arabidopsis thaliana
tcccgaccgctggggct

SEQ ID NO: 139247 - DNA, 17 bp, Arabidopsis thaliana
tcccgacctgaaagatt

SEQ ID NO: 139248 - DNA, 17 bp, Arabidopsis thaliana
tcccgacgccggcgagc

SEQ ID NO: 139249 - DNA, 17 bp, Arabidopsis thaliana
tcccgacgtcggcaggg

SEQ ID NO: 139250 - DNA, 17 bp, Arabidopsis thaliana
tcccgactgactttgca

SEQ ID NO: 139251 - DNA, 17 bp, Arabidopsis thaliana
tcccgagaagtcctcgt

SEQ ID NO: 139252 - DNA, 17 bp, Arabidopsis thaliana
tcccgagagacagggat

SEQ ID NO: 139253 - DNA, 17 bp, Arabidopsis thaliana
tcccgagagattacaag

SEQ ID NO: 139254 - DNA, 17 bp, Arabidopsis thaliana
tcccgagatatcttgat

SEQ ID NO: 139255 - DNA, 17 bp, Arabidopsis thaliana
tcccgaggatgaagacc

SEQ ID NO: 139256 - DNA, 17 bp, Arabidopsis thaliana
tcccgagggacggagga

SEQ ID NO: 139257 - DNA, 17 bp, Arabidopsis thaliana
tcccgagggcacgtctg

SEQ ID NO: 139258 - DNA, 17 bp, Arabidopsis thaliana
tcccgaggttaagatca

SEQ ID NO: 139259 - DNA, 17 bp, Arabidopsis thaliana
tcccgagttaggaccaa

SEQ ID NO: 139260 - DNA, 17 bp, Arabidopsis thaliana
tcccgagttgggaccag

SEQ ID NO: 139261 - DNA, 17 bp, Arabidopsis thaliana
tcccgagtttggaatgc

SEQ ID NO: 139262 - DNA, 17 bp, Arabidopsis thaliana
tcccgatcactcgtgtg

SEQ ID NO: 139263 - DNA, 17 bp, Arabidopsis thaliana
tcccgcaatactattcg

SEQ ID NO: 139264 - DNA, 17 bp, Arabidopsis thaliana
tcccgcaatcgcaaccg

SEQ ID NO: 139265 - DNA, 17 bp, Arabidopsis thaliana
tcccgcaccacgaggcg

SEQ ID NO: 139266 - DNA, 17 bp, Arabidopsis thaliana
tcccgcaccacgggttg

SEQ ID NO: 139267 - DNA, 17 bp, Arabidopsis thaliana
tcccgcaggagatccgg

SEQ ID NO: 139268 - DNA, 17 bp, Arabidopsis thaliana
tcccgccaaaaaccaaa

SEQ ID NO: 139269 - DNA, 17 bp, Arabidopsis thaliana
tcccgccaaaaccgctt

SEQ ID NO: 139270 - DNA, 17 bp, Arabidopsis thaliana
tcccgccaaaacgttaa

SEQ ID NO: 139271 - DNA, 17 bp, Arabidopsis thaliana
tcccgccgccagttgca

SEQ ID NO: 139272 - DNA, 17 bp, Arabidopsis thaliana
tcccgcctctgggagat

SEQ ID NO: 139273 - DNA, 17 bp, Arabidopsis thaliana
tcccgcgagggtgagct

SEQ ID NO: 139274 - DNA, 17 bp, Arabidopsis thaliana
tcccgctcacgcccggt

SEQ ID NO: 139275 - DNA, 17 bp, Arabidopsis thaliana
tcccgctgagacgctct

SEQ ID NO: 139276 - DNA, 17 bp, Arabidopsis thaliana
tcccgctgtccctgtct

SEQ ID NO: 139277 - DNA, 17 bp, Arabidopsis thaliana
tcccgcttggccctgct

SEQ ID NO: 139278 - DNA, 17 bp, Arabidopsis thaliana
tcccggacggagctacg

SEQ ID NO: 139279 - DNA, 17 bp, Arabidopsis thaliana
tcccggaggaccaccac

SEQ ID NO: 139280 - DNA, 17 bp, Arabidopsis thaliana
tcccggatccacagctg

SEQ ID NO: 139281 - DNA, 17 bp, Arabidopsis thaliana
tcccggatcccccctcc

SEQ ID NO: 139282 - DNA, 17 bp, Arabidopsis thaliana
tcccggatttgctgctg

SEQ ID NO: 139283 - DNA, 17 bp, Arabidopsis thaliana
tcccgggaagtcctcct

SEQ ID NO: 139284 - DNA, 17 bp, Arabidopsis thaliana
tcccgggaagtcctcgt

SEQ ID NO: 139285 - DNA, 17 bp, Arabidopsis thaliana
tcccgggaggtcaccca

SEQ ID NO: 139286 - DNA, 17 bp, Arabidopsis thaliana
tcccgggtctcaacaga

SEQ ID NO: 139287 - DNA, 17 bp, Arabidopsis thaliana
tcccgggttaccacgcg

SEQ ID NO: 139288 - DNA, 17 bp, Arabidopsis thaliana
tcccggttggagatgaa

SEQ ID NO: 139289 - DNA, 17 bp, Arabidopsis thaliana
tcccggttggagatgac

SEQ ID NO: 139290 - DNA, 17 bp, Arabidopsis thaliana
tcccgtaaccgcaatcg

SEQ ID NO: 139291 - DNA, 17 bp, Arabidopsis thaliana
tcccgtaattcctccag

SEQ ID NO: 139292 - DNA, 17 bp, Arabidopsis thaliana
tcccgtagttacagagg

SEQ ID NO: 139293 - DNA, 17 bp, Arabidopsis thaliana
tcccgtattggtgtcgt

SEQ ID NO: 139294 - DNA, 17 bp, Arabidopsis thaliana
tcccgtcagttgccccg

SEQ ID NO: 139295 - DNA, 17 bp, Arabidopsis thaliana
tcccgtcgggcgttgac

SEQ ID NO: 139296 - DNA, 17 bp, Arabidopsis thaliana
tcccgtctagctcagtt

SEQ ID NO: 139297 - DNA, 17 bp, Arabidopsis thaliana
tcccgtgactagggcca

SEQ ID NO: 139298 - DNA, 17 bp, Arabidopsis thaliana
tcccgtgatcgtggtct

SEQ ID NO: 139299 - DNA, 17 bp, Arabidopsis thaliana
tcccgtgatctcccctt

SEQ ID NO: 139300 - DNA, 17 bp, Arabidopsis thaliana
tcccgttcattacgagg

SEQ ID NO: 139301 - DNA, 17 bp, Arabidopsis thaliana
tcccgttgcggtttaag

SEQ ID NO: 139302 - DNA, 17 bp, Arabidopsis thaliana
tcccgttgttgagatgt

SEQ ID NO: 139303 - DNA, 17 bp, Arabidopsis thaliana
tcccgtttacaccactt

SEQ ID NO: 139304 - DNA, 17 bp, Arabidopsis thaliana
tcccgtttatctcagtg

SEQ ID NO: 139305 - DNA, 17 bp, Arabidopsis thaliana
tcccgttttgcagttta

SEQ ID NO: 139306 - DNA, 17 bp, Arabidopsis thaliana
tccctaacaaggatttt

SEQ ID NO: 139307 - DNA, 17 bp, Arabidopsis thaliana
tccctaacctaatggtc

SEQ ID NO: 139308 - DNA, 17 bp, Arabidopsis thaliana
tccctaacctagaccaa

SEQ ID NO: 139309 - DNA, 17 bp, Arabidopsis thaliana
tccctaacgaggatcca

SEQ ID NO: 139310 - DNA, 17 bp, Arabidopsis thaliana
tccctaaggtggtggta

SEQ ID NO: 139311 - DNA, 17 bp, Arabidopsis thaliana
tccctaaggtggtgtta

SEQ ID NO: 139312 - DNA, 17 bp, Arabidopsis thaliana
tccctaagtacacggtt

SEQ ID NO: 139313 - DNA, 17 bp, Arabidopsis thaliana
tccctaagtgatgggat

SEQ ID NO: 139314 - DNA, 17 bp, Arabidopsis thaliana
tccctaatgttccagtt

SEQ ID NO: 139315 - DNA, 17 bp, Arabidopsis thaliana
tccctacagctgagagt

SEQ ID NO: 139316 - DNA, 17 bp, Arabidopsis thaliana
tccctacagtggtagca

SEQ ID NO: 139317 - DNA, 17 bp, Arabidopsis thaliana
tccctacatagcgggtg

SEQ ID NO: 139318 - DNA, 17 bp, Arabidopsis thaliana
tccctacatggcgggtg

SEQ ID NO: 139319 - DNA, 17 bp, Arabidopsis thaliana
tccctacatggtgggtg

SEQ ID NO: 139320 - DNA, 17 bp, Arabidopsis thaliana
tccctactcggtggtgt

SEQ ID NO: 139321 - DNA, 17 bp, Arabidopsis thaliana
tccctactgaattgtca

SEQ ID NO: 139322 - DNA, 17 bp, Arabidopsis thaliana
tccctactgcactgccg

SEQ ID NO: 139323 - DNA, 17 bp, Arabidopsis thaliana
tccctaggtggcgtgat

SEQ ID NO: 139324 - DNA, 17 bp, Arabidopsis thaliana
tccctatgggaatcact

SEQ ID NO: 139325 - DNA, 17 bp, Arabidopsis thaliana
tccctattagctcagtg

SEQ ID NO: 139326 - DNA, 17 bp, Arabidopsis thaliana
tccctattagctcagtt

SEQ ID NO: 139327 - DNA, 17 bp, Arabidopsis thaliana
tccctattccgagatta

SEQ ID NO: 139328 - DNA, 17 bp, Arabidopsis thaliana
tccctcaacacccaccc

SEQ ID NO: 139329 - DNA, 17 bp, Arabidopsis thaliana
tccctcagctgaaatga

SEQ ID NO: 139330 - DNA, 17 bp, Arabidopsis thaliana
tccctcaggagtgatag

SEQ ID NO: 139331 - DNA, 17 bp, Arabidopsis thaliana
tccctcaggatagctgg

SEQ ID NO: 139332 - DNA, 17 bp, Arabidopsis thaliana
tccctcaggtagctgga

SEQ ID NO: 139333 - DNA, 17 bp, Arabidopsis thaliana
tccctcattagctgcct

SEQ ID NO: 139334 - DNA, 17 bp, Arabidopsis thaliana
tccctccaaagggatcg

SEQ ID NO: 139335 - DNA, 17 bp, Arabidopsis thaliana
tccctccaagacatatt

SEQ ID NO: 139336 - DNA, 17 bp, Arabidopsis thaliana
tccctccagatcgaggt

SEQ ID NO: 139337 - DNA, 17 bp, Arabidopsis thaliana
tccctccaggcccaaaa

SEQ ID NO: 139338 - DNA, 17 bp, Arabidopsis thaliana
tccctcccaaatgtaga

SEQ ID NO: 139339 - DNA, 17 bp, Arabidopsis thaliana
tccctcccacatcggaa

SEQ ID NO: 139340 - DNA, 17 bp, Arabidopsis thaliana
tccctcccaggaccaac

SEQ ID NO: 139341 - DNA, 17 bp, Arabidopsis thaliana
tccctcccaggaggtca

SEQ ID NO: 139342 - DNA, 17 bp, Arabidopsis thaliana
tccctcccctgaagatt

SEQ ID NO: 139343 - DNA, 17 bp, Arabidopsis thaliana
tccctcccgcaatacta

SEQ ID NO: 139344 - DNA, 17 bp, Arabidopsis thaliana
tccctcccgcaatcgca

SEQ ID NO: 139345 - DNA, 17 bp, Arabidopsis thaliana
tccctcccgggaagtcc

SEQ ID NO: 139346 - DNA, 17 bp, Arabidopsis thaliana
tccctcccgtgtgtgtt

SEQ ID NO: 139347 - DNA, 17 bp, Arabidopsis thaliana
tccctccctaacctaat

SEQ ID NO: 139348 - DNA, 17 bp, Arabidopsis thaliana
tccctccctcattagct

SEQ ID NO: 139349 - DNA, 17 bp, Arabidopsis thaliana
tccctcccttaaccatg

SEQ ID NO: 139350 - DNA, 17 bp, Arabidopsis thaliana
tccctcccttaacgagg

SEQ ID NO: 139351 - DNA, 17 bp, Arabidopsis thaliana
tccctcccttagtaacg

SEQ ID NO: 139352 - DNA, 17 bp, Arabidopsis thaliana
tccctcccttcggtcgg

SEQ ID NO: 139353 - DNA, 17 bp, Arabidopsis thaliana
tccctccctttggatgt

SEQ ID NO: 139354 - DNA, 17 bp, Arabidopsis thaliana
tccctccgaagttccct

SEQ ID NO: 139355 - DNA, 17 bp, Arabidopsis thaliana
tccctccgcttttatgt

SEQ ID NO: 139356 - DNA, 17 bp, Arabidopsis thaliana
tccctccggaatctgcg

SEQ ID NO: 139357 - DNA, 17 bp, Arabidopsis thaliana
tccctccggaggaccga

SEQ ID NO: 139358 - DNA, 17 bp, Arabidopsis thaliana
tccctccggttcgtacc

SEQ ID NO: 139359 - DNA, 17 bp, Arabidopsis thaliana
tccctccgtgaatcgga

SEQ ID NO: 139360 - DNA, 17 bp, Arabidopsis thaliana
tccctccgttgtagtct

SEQ ID NO: 139361 - DNA, 17 bp, Arabidopsis thaliana
tccctcctaagtccaac

SEQ ID NO: 139362 - DNA, 17 bp, Arabidopsis thaliana
tccctcctcagccacaa

SEQ ID NO: 139363 - DNA, 17 bp, Arabidopsis thaliana
tccctcctcagcgacgg

SEQ ID NO: 139364 - DNA, 17 bp, Arabidopsis thaliana
tccctcctcaggattgg

SEQ ID NO: 139365 - DNA, 17 bp, Arabidopsis thaliana
tccctcctcagttcggg

SEQ ID NO: 139366 - DNA, 17 bp, Arabidopsis thaliana
tccctcctctcggattt

SEQ ID NO: 139367 - DNA, 17 bp, Arabidopsis thaliana
tccctcctctgtgggtc

SEQ ID NO: 139368 - DNA, 17 bp, Arabidopsis thaliana
tccctcctgagtccaac

SEQ ID NO: 139369 - DNA, 17 bp, Arabidopsis thaliana
tccctccttcgactctt

SEQ ID NO: 139370 - DNA, 17 bp, Arabidopsis thaliana
tccctccttcgatgtcg

SEQ ID NO: 139371 - DNA, 17 bp, Arabidopsis thaliana
tccctccttcgtcgtat

SEQ ID NO: 139372 - DNA, 17 bp, Arabidopsis thaliana
tccctccttggctctgg

SEQ ID NO: 139373 - DNA, 17 bp, Arabidopsis thaliana
tccctccttttaaggca

SEQ ID NO: 139374 - DNA, 17 bp, Arabidopsis thaliana
tccctcgaggttttgag

SEQ ID NO: 139375 - DNA, 17 bp, Arabidopsis thaliana
tccctcgcaagattctc

SEQ ID NO: 139376 - DNA, 17 bp, Arabidopsis thaliana
tccctcgcgggtgcacc

SEQ ID NO: 139377 - DNA, 17 bp, Arabidopsis thaliana
tccctcggcatgttctg

SEQ ID NO: 139378 - DNA, 17 bp, Arabidopsis thaliana
tccctcggccgtgacgg

SEQ ID NO: 139379 - DNA, 17 bp, Arabidopsis thaliana
tccctcgggattagctc

SEQ ID NO: 139380 - DNA, 17 bp, Arabidopsis thaliana
tccctcgggattctcgc

SEQ ID NO: 139381 - DNA, 17 bp, Arabidopsis thaliana
tccctcgggtgcaccgc

SEQ ID NO: 139382 - DNA, 17 bp, Arabidopsis thaliana
tccctcgtggtgcacca

SEQ ID NO: 139383 - DNA, 17 bp, Arabidopsis thaliana
tccctctagacctagct

SEQ ID NO: 139384 - DNA, 17 bp, Arabidopsis thaliana
tccctctaggccagaaa

SEQ ID NO: 139385 - DNA, 17 bp, Arabidopsis thaliana
tccctctccgccgattt

SEQ ID NO: 139386 - DNA, 17 bp, Arabidopsis thaliana
tccctctctaatcttcg

SEQ ID NO: 139387 - DNA, 17 bp, Arabidopsis thaliana
tccctctctaatctttg

SEQ ID NO: 139388 - DNA, 17 bp, Arabidopsis thaliana
tccctcttctactccaa

SEQ ID NO: 139389 - DNA, 17 bp, Arabidopsis thaliana
tccctgacttattcccc

SEQ ID NO: 139390 - DNA, 17 bp, Arabidopsis thaliana
tccctgacttattcctt

SEQ ID NO: 139391 - DNA, 17 bp, Arabidopsis thaliana
tccctgagactttggag

SEQ ID NO: 139392 - DNA, 17 bp, Arabidopsis thaliana
tccctgagcctcagcgg

SEQ ID NO: 139393 - DNA, 17 bp, Arabidopsis thaliana
tccctgagttgagacag

SEQ ID NO: 139394 - DNA, 17 bp, Arabidopsis thaliana
tccctgcaatggacatg

SEQ ID NO: 139395 - DNA, 17 bp, Arabidopsis thaliana
tccctgcagatgagttt

SEQ ID NO: 139396 - DNA, 17 bp, Arabidopsis thaliana
tccctgccctttgtaca

SEQ ID NO: 139397 - DNA, 17 bp, Arabidopsis thaliana
tccctgctaaggttcaa

SEQ ID NO: 139398 - DNA, 17 bp, Arabidopsis thaliana
tccctgctggaccgccg

SEQ ID NO: 139399 - DNA, 17 bp, Arabidopsis thaliana
tccctggaactggtggt

SEQ ID NO: 139400 - DNA, 17 bp, Arabidopsis thaliana
tccctggacggaccatt

SEQ ID NO: 139401 - DNA, 17 bp, Arabidopsis thaliana
tccctggagtttggact

SEQ ID NO: 139402 - DNA, 17 bp, Arabidopsis thaliana
tccctggcgattatggt

SEQ ID NO: 139403 - DNA, 17 bp, Arabidopsis thaliana
tccctggctccctgtat

SEQ ID NO: 139404 - DNA, 17 bp, Arabidopsis thaliana
tccctgggattggcttt

SEQ ID NO: 139405 - DNA, 17 bp, Arabidopsis thaliana
tccctggtttcagcgat

SEQ ID NO: 139406 - DNA, 17 bp, Arabidopsis thaliana
tccctgtcagttgggct

SEQ ID NO: 139407 - DNA, 17 bp, Arabidopsis thaliana
tccctgtcgctctgtag

SEQ ID NO: 139408 - DNA, 17 bp, Arabidopsis thaliana
tccctgttcttcgcttt

SEQ ID NO: 139409 - DNA, 17 bp, Arabidopsis thaliana
tccctgttgtagacctg

SEQ ID NO: 139410 - DNA, 17 bp, Arabidopsis thaliana
tcccttaaccatggttt

SEQ ID NO: 139411 - DNA, 17 bp, Arabidopsis thaliana
tcccttaacgaggatcc

SEQ ID NO: 139412 - DNA, 17 bp, Arabidopsis thaliana
tcccttaacgaggatct

SEQ ID NO: 139413 - DNA, 17 bp, Arabidopsis thaliana
tcccttaaggtttcatg

SEQ ID NO: 139414 - DNA, 17 bp, Arabidopsis thaliana
tcccttacagaataggc

SEQ ID NO: 139415 - DNA, 17 bp, Arabidopsis thaliana
tcccttaccttggactt

SEQ ID NO: 139416 - DNA, 17 bp, Arabidopsis thaliana
tcccttaccttttgact

SEQ ID NO: 139417 - DNA, 17 bp, Arabidopsis thaliana
tcccttagtaacggcga

SEQ ID NO: 139418 - DNA, 17 bp, Arabidopsis thaliana
tcccttatttggcgttt

SEQ ID NO: 139419 - DNA, 17 bp, Arabidopsis thaliana
tcccttattttgctacg

SEQ ID NO: 139420 - DNA, 17 bp, Arabidopsis thaliana
tcccttcaatccaaaga

SEQ ID NO: 139421 - DNA, 17 bp, Arabidopsis thaliana
tcccttcacggccggct

SEQ ID NO: 139422 - DNA, 17 bp, Arabidopsis thaliana
tcccttcacggccggtt

SEQ ID NO: 139423 - DNA, 17 bp, Arabidopsis thaliana
tcccttcagccaatccc

SEQ ID NO: 139424 - DNA, 17 bp, Arabidopsis thaliana
tcccttccaacaggcgt

SEQ ID NO: 139425 - DNA, 17 bp, Arabidopsis thaliana
tcccttcctatgggatg

SEQ ID NO: 139426 - DNA, 17 bp, Arabidopsis thaliana
tcccttcggtcggcgat

SEQ ID NO: 139427 - DNA, 17 bp, Arabidopsis thaliana
tcccttcgtttcgggct

SEQ ID NO: 139428 - DNA, 17 bp, Arabidopsis thaliana
tcccttctaacatgcct

SEQ ID NO: 139429 - DNA, 17 bp, Arabidopsis thaliana
tcccttctaactttgct

SEQ ID NO: 139430 - DNA, 17 bp, Arabidopsis thaliana
tcccttctcttgtcgct

SEQ ID NO: 139431 - DNA, 17 bp, Arabidopsis thaliana
tcccttgactcgagtcc

SEQ ID NO: 139432 - DNA, 17 bp, Arabidopsis thaliana
tcccttgactctagtcc

SEQ ID NO: 139433 - DNA, 17 bp, Arabidopsis thaliana
tcccttgagagacacgc

SEQ ID NO: 139434 - DNA, 17 bp, Arabidopsis thaliana
tcccttgagggccattg

SEQ ID NO: 139435 - DNA, 17 bp, Arabidopsis thaliana
tcccttgctctctccac

SEQ ID NO: 139436 - DNA, 17 bp, Arabidopsis thaliana
tcccttgcttgctaaat

SEQ ID NO: 139437 - DNA, 17 bp, Arabidopsis thaliana
tcccttggactcagagt

SEQ ID NO: 139438 - DNA, 17 bp, Arabidopsis thaliana
tcccttggatgttgaac

SEQ ID NO: 139439 - DNA, 17 bp, Arabidopsis thaliana
tcccttggcattagtcg

SEQ ID NO: 139440 - DNA, 17 bp, Arabidopsis thaliana
tcccttgggaacgagac

SEQ ID NO: 139441 - DNA, 17 bp, Arabidopsis thaliana
tcccttgggacatctat

SEQ ID NO: 139442 - DNA, 17 bp, Arabidopsis thaliana
tcccttggtgcaggtcg

SEQ ID NO: 139443 - DNA, 17 bp, Arabidopsis thaliana
tcccttggtgcaggtct

SEQ ID NO: 139444 - DNA, 17 bp, Arabidopsis thaliana
tcccttggtgcagttcg

SEQ ID NO: 139445 - DNA, 17 bp, Arabidopsis thaliana
tcccttgtatcagatcg

SEQ ID NO: 139446 - DNA, 17 bp, Arabidopsis thaliana
tccctttcttctagttt

SEQ ID NO: 139447 - DNA, 17 bp, Arabidopsis thaliana
tccctttcttgacttac

SEQ ID NO: 139448 - DNA, 17 bp, Arabidopsis thaliana
tccctttggatgtcgtc

SEQ ID NO: 139449 - DNA, 17 bp, Arabidopsis thaliana
tccctttggatgtcgtt

SEQ ID NO: 139450 - DNA, 17 bp, Arabidopsis thaliana
tccctttggatgtcttc

SEQ ID NO: 139451 - DNA, 17 bp, Arabidopsis thaliana
tccctttgtcgagacag

SEQ ID NO: 139452 - DNA, 17 bp, Arabidopsis thaliana
tccctttgtcgctaaga

SEQ ID NO: 139453 - DNA, 17 bp, Arabidopsis thaliana
tcccttttctagcctta

SEQ ID NO: 139454 - DNA, 17 bp, Arabidopsis thaliana
tccgaaaagacttcatc

SEQ ID NO: 139455 - DNA, 17 bp, Arabidopsis thaliana
tccgaaagggacacaga

SEQ ID NO: 139456 - DNA, 17 bp, Arabidopsis thaliana
tccgaaatagaccgttt

SEQ ID NO: 139457 - DNA, 17 bp, Arabidopsis thaliana
tccgaaatggtcaacta

SEQ ID NO: 139458 - DNA, 17 bp, Arabidopsis thaliana
tccgaaatttttggcgg

SEQ ID NO: 139459 - DNA, 17 bp, Arabidopsis thaliana
tccgaacagagttaaac

SEQ ID NO: 139460 - DNA, 17 bp, Arabidopsis thaliana
tccgaacattccgagaa

SEQ ID NO: 139461 - DNA, 17 bp, Arabidopsis thaliana
tccgaacccgtcggctg

SEQ ID NO: 139462 - DNA, 17 bp, Arabidopsis thaliana
tccgaacgacccgaacc

SEQ ID NO: 139463 - DNA, 17 bp, Arabidopsis thaliana
tccgaacgacgcttccg

SEQ ID NO: 139464 - DNA, 17 bp, Arabidopsis thaliana
tccgaacgcaaatcctc

SEQ ID NO: 139465 - DNA, 17 bp, Arabidopsis thaliana
tccgaacgtttcattca

SEQ ID NO: 139466 - DNA, 17 bp, Arabidopsis thaliana
tccgaagattcgggatg

SEQ ID NO: 139467 - DNA, 17 bp, Arabidopsis thaliana
tccgaagcaaatcgagg

SEQ ID NO: 139468 - DNA, 17 bp, Arabidopsis thaliana
tccgaagcgacactttc

SEQ ID NO: 139469 - DNA, 17 bp, Arabidopsis thaliana
tccgaaggaccgagtgc

SEQ ID NO: 139470 - DNA, 17 bp, Arabidopsis thaliana
tccgaagtgacatcaac

SEQ ID NO: 139471 - DNA, 17 bp, Arabidopsis thaliana
tccgaagtgattggctc

SEQ ID NO: 139472 - DNA, 17 bp, Arabidopsis thaliana
tccgaagtttccctcag

SEQ ID NO: 139473 - DNA, 17 bp, Arabidopsis thaliana
tccgaatagtggctgcg

SEQ ID NO: 139474 - DNA, 17 bp, Arabidopsis thaliana
tccgaatcaggtcagca

SEQ ID NO: 139475 - DNA, 17 bp, Arabidopsis thaliana
tccgaatcttagtgggt

SEQ ID NO: 139476 - DNA, 17 bp, Arabidopsis thaliana
tccgaatggcacacagg

SEQ ID NO: 139477 - DNA, 17 bp, Arabidopsis thaliana
tccgaatggtgactgca

SEQ ID NO: 139478 - DNA, 17 bp, Arabidopsis thaliana
tccgaatggtgactgcg

SEQ ID NO: 139479 - DNA, 17 bp, Arabidopsis thaliana
tccgaatggtgattgcg

SEQ ID NO: 139480 - DNA, 17 bp, Arabidopsis thaliana
tccgaattttgaggatg

SEQ ID NO: 139481 - DNA, 17 bp, Arabidopsis thaliana
tccgacaaaagatctgg

SEQ ID NO: 139482 - DNA, 17 bp, Arabidopsis thaliana
tccgacaaagatctggt

SEQ ID NO: 139483 - DNA, 17 bp, Arabidopsis thaliana
tccgacaaagatttggt

SEQ ID NO: 139484 - DNA, 17 bp, Arabidopsis thaliana
tccgacaacctatggtt

SEQ ID NO: 139485 - DNA, 17 bp, Arabidopsis thaliana
tccgacaagtctaagta

SEQ ID NO: 139486 - DNA, 17 bp, Arabidopsis thaliana
tccgacaatgaccgtaa

SEQ ID NO: 139487 - DNA, 17 bp, Arabidopsis thaliana
tccgacaattacttcct

SEQ ID NO: 139488 - DNA, 17 bp, Arabidopsis thaliana
tccgacaggtactatac

SEQ ID NO: 139489 - DNA, 17 bp, Arabidopsis thaliana
tccgacagtcacttccc

SEQ ID NO: 139490 - DNA, 17 bp, Arabidopsis thaliana
tccgaccaggcttcatt

SEQ ID NO: 139491 - DNA, 17 bp, Arabidopsis thaliana
tccgaccagttgaatgc

SEQ ID NO: 139492 - DNA, 17 bp, Arabidopsis thaliana
tccgaccatcgtttcgg

SEQ ID NO: 139493 - DNA, 17 bp, Arabidopsis thaliana
tccgaccgcatgccgtt

SEQ ID NO: 139494 - DNA, 17 bp, Arabidopsis thaliana
tccgaccgcatgctgtt

SEQ ID NO: 139495 - DNA, 17 bp, Arabidopsis thaliana
tccgacgaaataagcta

SEQ ID NO: 139496 - DNA, 17 bp, Arabidopsis thaliana
tccgacgacatccatgt

SEQ ID NO: 139497 - DNA, 17 bp, Arabidopsis thaliana
tccgacgaccatctgct

SEQ ID NO: 139498 - DNA, 17 bp, Arabidopsis thaliana
tccgacgacgaattctg

SEQ ID NO: 139499 - DNA, 17 bp, Arabidopsis thaliana
tccgacgactgtcaccg

SEQ ID NO: 139500 - DNA, 17 bp, Arabidopsis thaliana
tccgacgacttgcaact

SEQ ID NO: 139501 - DNA, 17 bp, Arabidopsis thaliana
tccgacgatgttgaact

SEQ ID NO: 139502 - DNA, 17 bp, Arabidopsis thaliana
tccgacggaccagatca

SEQ ID NO: 139503 - DNA, 17 bp, Arabidopsis thaliana
tccgacggagtagcgtg

SEQ ID NO: 139504 - DNA, 17 bp, Arabidopsis thaliana
tccgacggcatgggatt

SEQ ID NO: 139505 - DNA, 17 bp, Arabidopsis thaliana
tccgacggtgccgagtg

SEQ ID NO: 139506 - DNA, 17 bp, Arabidopsis thaliana
tccgacgtcaccgtatc

SEQ ID NO: 139507 - DNA, 17 bp, Arabidopsis thaliana
tccgacgtgatttactc

SEQ ID NO: 139508 - DNA, 17 bp, Arabidopsis thaliana
tccgacgtgattttctc

SEQ ID NO: 139509 - DNA, 17 bp, Arabidopsis thaliana
tccgactaatgccagaa

SEQ ID NO: 139510 - DNA, 17 bp, Arabidopsis thaliana
tccgactaatgccagag

SEQ ID NO: 139511 - DNA, 17 bp, Arabidopsis thaliana
tccgactatgttccaac

SEQ ID NO: 139512 - DNA, 17 bp, Arabidopsis thaliana
tccgactatttcctgcg

SEQ ID NO: 139513 - DNA, 17 bp, Arabidopsis thaliana
tccgactctcggcaacg

SEQ ID NO: 139514 - DNA, 17 bp, Arabidopsis thaliana
tccgactgcggcaccca

SEQ ID NO: 139515 - DNA, 17 bp, Arabidopsis thaliana
tccgactgttcagatct

SEQ ID NO: 139516 - DNA, 17 bp, Arabidopsis thaliana
tccgacttattctccag

SEQ ID NO: 139517 - DNA, 17 bp, Arabidopsis thaliana
tccgacttgtactttcg

SEQ ID NO: 139518 - DNA, 17 bp, Arabidopsis thaliana
tccgactttgtgaaatg

SEQ ID NO: 139519 - DNA, 17 bp, Arabidopsis thaliana
tccgagaaacaggggaa

SEQ ID NO: 139520 - DNA, 17 bp, Arabidopsis thaliana
tccgagactacccgtgg

SEQ ID NO: 139521 - DNA, 17 bp, Arabidopsis thaliana
tccgagactatccgtgg

SEQ ID NO: 139522 - DNA, 17 bp, Arabidopsis thaliana
tccgagactatctgtgg

SEQ ID NO: 139523 - DNA, 17 bp, Arabidopsis thaliana
tccgagactggggtcag

SEQ ID NO: 139524 - DNA, 17 bp, Arabidopsis thaliana
tccgagacttcatcgac

SEQ ID NO: 139525 - DNA, 17 bp, Arabidopsis thaliana
tccgagagattcgatgt

SEQ ID NO: 139526 - DNA, 17 bp, Arabidopsis thaliana
tccgagatatcaggccc

SEQ ID NO: 139527 - DNA, 17 bp, Arabidopsis thaliana
tccgagatatcaggtcc

SEQ ID NO: 139528 - DNA, 17 bp, Arabidopsis thaliana
tccgagatctttgttct

SEQ ID NO: 139529 - DNA, 17 bp, Arabidopsis thaliana
tccgagattcactggct

SEQ ID NO: 139530 - DNA, 17 bp, Arabidopsis thaliana
tccgagattttcagaaa

SEQ ID NO: 139531 - DNA, 17 bp, Arabidopsis thaliana
tccgagcagcgcataga

SEQ ID NO: 139532 - DNA, 17 bp, Arabidopsis thaliana
tccgaggaatcgtcgac

SEQ ID NO: 139533 - DNA, 17 bp, Arabidopsis thaliana
tccgaggaatcgtcgat

SEQ ID NO: 139534 - DNA, 17 bp, Arabidopsis thaliana
tccgagggcacgtctgc

SEQ ID NO: 139535 - DNA, 17 bp, Arabidopsis thaliana
tccgagggggacacagg

SEQ ID NO: 139536 - DNA, 17 bp, Arabidopsis thaliana
tccgagtgaaggggaga

SEQ ID NO: 139537 - DNA, 17 bp, Arabidopsis thaliana
tccgagttgggaccagt

SEQ ID NO: 139538 - DNA, 17 bp, Arabidopsis thaliana
tccgatacttggtgtga

SEQ ID NO: 139539 - DNA, 17 bp, Arabidopsis thaliana
tccgatagtatccctcg

SEQ ID NO: 139540 - DNA, 17 bp, Arabidopsis thaliana
tccgatatcgtccagcg

SEQ ID NO: 139541 - DNA, 17 bp, Arabidopsis thaliana
tccgatatggtttgctg

SEQ ID NO: 139542 - DNA, 17 bp, Arabidopsis thaliana
tccgatcagacttagcc

SEQ ID NO: 139543 - DNA, 17 bp, Arabidopsis thaliana
tccgatccgtctggccg

SEQ ID NO: 139544 - DNA, 17 bp, Arabidopsis thaliana
tccgatgactcttcaac

SEQ ID NO: 139545 - DNA, 17 bp, Arabidopsis thaliana
tccgatgagacttgtta

SEQ ID NO: 139546 - DNA, 17 bp, Arabidopsis thaliana
tccgatgaggatggtct

SEQ ID NO: 139547 - DNA, 17 bp, Arabidopsis thaliana
tccgatgatgtcgttag

SEQ ID NO: 139548 - DNA, 17 bp, Arabidopsis thaliana
tccgatggagatggtct

SEQ ID NO: 139549 - DNA, 17 bp, Arabidopsis thaliana
tccgatggaggtccagg

SEQ ID NO: 139550 - DNA, 17 bp, Arabidopsis thaliana
tccgatggagttgcgag

SEQ ID NO: 139551 - DNA, 17 bp, Arabidopsis thaliana
tccgatggcgtccagca

SEQ ID NO: 139552 - DNA, 17 bp, Arabidopsis thaliana
tccgatggctctttctc

SEQ ID NO: 139553 - DNA, 17 bp, Arabidopsis thaliana
tccgatgggcttggaga

SEQ ID NO: 139554 - DNA, 17 bp, Arabidopsis thaliana
tccgatgtcgtccagca

SEQ ID NO: 139555 - DNA, 17 bp, Arabidopsis thaliana
tccgatgtcgtccagcg

SEQ ID NO: 139556 - DNA, 17 bp, Arabidopsis thaliana
tccgatgtcgtccatcg

SEQ ID NO: 139557 - DNA, 17 bp, Arabidopsis thaliana
tccgatgtctccagcgg

SEQ ID NO: 139558 - DNA, 17 bp, Arabidopsis thaliana
tccgatgtgcgaccttt

SEQ ID NO: 139559 - DNA, 17 bp, Arabidopsis thaliana
tccgatgtgggacattg

SEQ ID NO: 139560 - DNA, 17 bp, Arabidopsis thaliana
tccgatgtgggaccttt

SEQ ID NO: 139561 - DNA, 17 bp, Arabidopsis thaliana
tccgatgttgtccagcg

SEQ ID NO: 139562 - DNA, 17 bp, Arabidopsis thaliana
tccgattagacttccga

SEQ ID NO: 139563 - DNA, 17 bp, Arabidopsis thaliana
tccgattatttaactcc

SEQ ID NO: 139564 - DNA, 17 bp, Arabidopsis thaliana
tccgattcaaactgttt

SEQ ID NO: 139565 - DNA, 17 bp, Arabidopsis thaliana
tccgattccaagcagtt

SEQ ID NO: 139566 - DNA, 17 bp, Arabidopsis thaliana
tccgattcggcagttcg

SEQ ID NO: 139567 - DNA, 17 bp, Arabidopsis thaliana
tccgattgaggaacgtg

SEQ ID NO: 139568 - DNA, 17 bp, Arabidopsis thaliana
tccgattgcgtgctttt

SEQ ID NO: 139569 - DNA, 17 bp, Arabidopsis thaliana
tccgattggaccatcac

SEQ ID NO: 139570 - DNA, 17 bp, Arabidopsis thaliana
tccgattgtgctgatct

SEQ ID NO: 139571 - DNA, 17 bp, Arabidopsis thaliana
tccgattgttagagctg

SEQ ID NO: 139572 - DNA, 17 bp, Arabidopsis thaliana
tccgatttagacttagg

SEQ ID NO: 139573 - DNA, 17 bp, Arabidopsis thaliana
tccgatttcgccggcga

SEQ ID NO: 139574 - DNA, 17 bp, Arabidopsis thaliana
tccgatttgcggcgaac

SEQ ID NO: 139575 - DNA, 17 bp, Arabidopsis thaliana
tccgattttacggttgt

SEQ ID NO: 139576 - DNA, 17 bp, Arabidopsis thaliana
tccgcaaactcccacaa

SEQ ID NO: 139577 - DNA, 17 bp, Arabidopsis thaliana
tccgcaaacttccgcag

SEQ ID NO: 139578 - DNA, 17 bp, Arabidopsis thaliana
tccgcaaagtcgtaaga

SEQ ID NO: 139579 - DNA, 17 bp, Arabidopsis thaliana
tccgcaactccatatac

SEQ ID NO: 139580 - DNA, 17 bp, Arabidopsis thaliana
tccgcaagacggttagc

SEQ ID NO: 139581 - DNA, 17 bp, Arabidopsis thaliana
tccgcaattggctgaag

SEQ ID NO: 139582 - DNA, 17 bp, Arabidopsis thaliana
tccgcacgtctgcctgg

SEQ ID NO: 139583 - DNA, 17 bp, Arabidopsis thaliana
tccgcacgtctgggtgt

SEQ ID NO: 139584 - DNA, 17 bp, Arabidopsis thaliana
tccgcactgcgctacag

SEQ ID NO: 139585 - DNA, 17 bp, Arabidopsis thaliana
tccgcagacaatgtgtt

SEQ ID NO: 139586 - DNA, 17 bp, Arabidopsis thaliana
tccgcagacactgtgtt

SEQ ID NO: 139587 - DNA, 17 bp, Arabidopsis thaliana
tccgcagacagtgtgtt

SEQ ID NO: 139588 - DNA, 17 bp, Arabidopsis thaliana
tccgcagaccttgtgtt

SEQ ID NO: 139589 - DNA, 17 bp, Arabidopsis thaliana
tccgcagactttgtgtt

SEQ ID NO: 139590 - DNA, 17 bp, Arabidopsis thaliana
tccgcagccttgtgttc

SEQ ID NO: 139591 - DNA, 17 bp, Arabidopsis thaliana
tccgcagcggtttatta

SEQ ID NO: 139592 - DNA, 17 bp, Arabidopsis thaliana
tccgcagcggtttattg

SEQ ID NO: 139593 - DNA, 17 bp, Arabidopsis thaliana
tccgcagctcttgtgtg

SEQ ID NO: 139594 - DNA, 17 bp, Arabidopsis thaliana
tccgcagtccggtgcgg

SEQ ID NO: 139595 - DNA, 17 bp, Arabidopsis thaliana
tccgcagtcgcaaccgc

SEQ ID NO: 139596 - DNA, 17 bp, Arabidopsis thaliana
tccgcagttaagcgtgc

SEQ ID NO: 139597 - DNA, 17 bp, Arabidopsis thaliana
tccgcagttaagcgtgt

SEQ ID NO: 139598 - DNA, 17 bp, Arabidopsis thaliana
tccgccaaaaacgtaaa

SEQ ID NO: 139599 - DNA, 17 bp, Arabidopsis thaliana
tccgccagtgtggagag

SEQ ID NO: 139600 - DNA, 17 bp, Arabidopsis thaliana
tccgccatcatcctcaa

SEQ ID NO: 139601 - DNA, 17 bp, Arabidopsis thaliana
tccgccattagcccgca

SEQ ID NO: 139602 - DNA, 17 bp, Arabidopsis thaliana
tccgccatttgcaggtc

SEQ ID NO: 139603 - DNA, 17 bp, Arabidopsis thaliana
tccgcccgccgcccgat

SEQ ID NO: 139604 - DNA, 17 bp, Arabidopsis thaliana
tccgcccgggggacgga

SEQ ID NO: 139605 - DNA, 17 bp, Arabidopsis thaliana
tccgcccgggggacggg

SEQ ID NO: 139606 - DNA, 17 bp, Arabidopsis thaliana
tccgccgaacggactta

SEQ ID NO: 139607 - DNA, 17 bp, Arabidopsis thaliana
tccgccgacgccgaatc

SEQ ID NO: 139608 - DNA, 17 bp, Arabidopsis thaliana
tccgccgagccacgcgt

SEQ ID NO: 139609 - DNA, 17 bp, Arabidopsis thaliana
tccgccgatcgattcgg

SEQ ID NO: 139610 - DNA, 17 bp, Arabidopsis thaliana
tccgccgccaacagcgc

SEQ ID NO: 139611 - DNA, 17 bp, Arabidopsis thaliana
tccgccgcctttttgtc

SEQ ID NO: 139612 - DNA, 17 bp, Arabidopsis thaliana
tccgccgctacggtgat

SEQ ID NO: 139613 - DNA, 17 bp, Arabidopsis thaliana
tccgccggataaccaga

SEQ ID NO: 139614 - DNA, 17 bp, Arabidopsis thaliana
tccgccggctatgttgt

SEQ ID NO: 139615 - DNA, 17 bp, Arabidopsis thaliana
tccgccggtttgttctg

SEQ ID NO: 139616 - DNA, 17 bp, Arabidopsis thaliana
tccgccgtgatcatcat

SEQ ID NO: 139617 - DNA, 17 bp, Arabidopsis thaliana
tccgccgtgatttgtca

SEQ ID NO: 139618 - DNA, 17 bp, Arabidopsis thaliana
tccgcctgtcgaccgtt

SEQ ID NO: 139619 - DNA, 17 bp, Arabidopsis thaliana
tccgccttctccaccag

SEQ ID NO: 139620 - DNA, 17 bp, Arabidopsis thaliana
tccgcctttggtgtgca

SEQ ID NO: 139621 - DNA, 17 bp, Arabidopsis thaliana
tccgcgaatctgttgga

SEQ ID NO: 139622 - DNA, 17 bp, Arabidopsis thaliana
tccgcggatctcggacg

SEQ ID NO: 139623 - DNA, 17 bp, Arabidopsis thaliana
tccgcgtttccgtttcc

SEQ ID NO: 139624 - DNA, 17 bp, Arabidopsis thaliana
tccgctaaggagtgtgt

SEQ ID NO: 139625 - DNA, 17 bp, Arabidopsis thaliana
tccgctaaggcgtgtgt

SEQ ID NO: 139626 - DNA, 17 bp, Arabidopsis thaliana
tccgctactacggctgt

SEQ ID NO: 139627 - DNA, 17 bp, Arabidopsis thaliana
tccgctactttcgcaac

SEQ ID NO: 139628 - DNA, 17 bp, Arabidopsis thaliana
tccgctatggtgaaatt

SEQ ID NO: 139629 - DNA, 17 bp, Arabidopsis thaliana
tccgctcagtcccggta

SEQ ID NO: 139630 - DNA, 17 bp, Arabidopsis thaliana
tccgctccgattggccc

SEQ ID NO: 139631 - DNA, 17 bp, Arabidopsis thaliana
tccgctctgctagatca

SEQ ID NO: 139632 - DNA, 17 bp, Arabidopsis thaliana
tccgctgaagtggttct

SEQ ID NO: 139633 - DNA, 17 bp, Arabidopsis thaliana
tccgctgacagccgacg

SEQ ID NO: 139634 - DNA, 17 bp, Arabidopsis thaliana
tccgctgagatttcctg

SEQ ID NO: 139635 - DNA, 17 bp, Arabidopsis thaliana
tccgctgatccctggtc

SEQ ID NO: 139636 - DNA, 17 bp, Arabidopsis thaliana
tccgctgctatatcttt

SEQ ID NO: 139637 - DNA, 17 bp, Arabidopsis thaliana
tccgctgctccggtcct

SEQ ID NO: 139638 - DNA, 17 bp, Arabidopsis thaliana
tccgctgctccggtctt

SEQ ID NO: 139639 - DNA, 17 bp, Arabidopsis thaliana
tccgctggagcagacct

SEQ ID NO: 139640 - DNA, 17 bp, Arabidopsis thaliana
tccgctggatctgatgc

SEQ ID NO: 139641 - DNA, 17 bp, Arabidopsis thaliana
tccgctggatctgattc

SEQ ID NO: 139642 - DNA, 17 bp, Arabidopsis thaliana
tccgctggggttaacgt

SEQ ID NO: 139643 - DNA, 17 bp, Arabidopsis thaliana
tccgctgtagcacaccg

SEQ ID NO: 139644 - DNA, 17 bp, Arabidopsis thaliana
tccgctgtagcacatca

SEQ ID NO: 139645 - DNA, 17 bp, Arabidopsis thaliana
tccgctgtagcacatcc

SEQ ID NO: 139646 - DNA, 17 bp, Arabidopsis thaliana
tccgctgtagcacttca

SEQ ID NO: 139647 - DNA, 17 bp, Arabidopsis thaliana
tccgctgtccactttct

SEQ ID NO: 139648 - DNA, 17 bp, Arabidopsis thaliana
tccgctgtcctggtgtg

SEQ ID NO: 139649 - DNA, 17 bp, Arabidopsis thaliana
tccgctgtgctgagaca

SEQ ID NO: 139650 - DNA, 17 bp, Arabidopsis thaliana
tccgcttcaagttcttt

SEQ ID NO: 139651 - DNA, 17 bp, Arabidopsis thaliana
tccgcttcgatccgtat

SEQ ID NO: 139652 - DNA, 17 bp, Arabidopsis thaliana
tccgcttcgtgcccaaa

SEQ ID NO: 139653 - DNA, 17 bp, Arabidopsis thaliana
tccgcttcgtgcccaga

SEQ ID NO: 139654 - DNA, 17 bp, Arabidopsis thaliana
tccgcttgatccgctct

SEQ ID NO: 139655 - DNA, 17 bp, Arabidopsis thaliana
tccgcttgcagagagaa

SEQ ID NO: 139656 - DNA, 17 bp, Arabidopsis thaliana
tccgcttggaccgctgt

SEQ ID NO: 139657 - DNA, 17 bp, Arabidopsis thaliana
tccgcttgggccgctgt

SEQ ID NO: 139658 - DNA, 17 bp, Arabidopsis thaliana
tccgcttgggttgcgag

SEQ ID NO: 139659 - DNA, 17 bp, Arabidopsis thaliana
tccgctttacatttgca

SEQ ID NO: 139660 - DNA, 17 bp, Arabidopsis thaliana
tccgctttattgctttc

SEQ ID NO: 139661 - DNA, 17 bp, Arabidopsis thaliana
tccgctttattgctttg

SEQ ID NO: 139662 - DNA, 17 bp, Arabidopsis thaliana
tccgctttgccaatcgc

SEQ ID NO: 139663 - DNA, 17 bp, Arabidopsis thaliana
tccgctttggccgagtg

SEQ ID NO: 139664 - DNA, 17 bp, Arabidopsis thaliana
tccgctttgtccgttcc

SEQ ID NO: 139665 - DNA, 17 bp, Arabidopsis thaliana
tccgcttttacatttgc

SEQ ID NO: 139666 - DNA, 17 bp, Arabidopsis thaliana
tccgcttttatgttagt

SEQ ID NO: 139667 - DNA, 17 bp, Arabidopsis thaliana
tccgcttttatgtttgt

SEQ ID NO: 139668 - DNA, 17 bp, Arabidopsis thaliana
tccgctttttccaccag

SEQ ID NO: 139669 - DNA, 17 bp, Arabidopsis thaliana
tccgctttttttgtgac

SEQ ID NO: 139670 - DNA, 17 bp, Arabidopsis thaliana
tccggaaagtgattgtc

SEQ ID NO: 139671 - DNA, 17 bp, Arabidopsis thaliana
tccggaaccgggacgtg

SEQ ID NO: 139672 - DNA, 17 bp, Arabidopsis thaliana
tccggaactatcctctt

SEQ ID NO: 139673 - DNA, 17 bp, Arabidopsis thaliana
tccggaacttccgtgtc

SEQ ID NO: 139674 - DNA, 17 bp, Arabidopsis thaliana
tccggaagcctaaagta

SEQ ID NO: 139675 - DNA, 17 bp, Arabidopsis thaliana
tccggaatccggttgtg

SEQ ID NO: 139676 - DNA, 17 bp, Arabidopsis thaliana
tccggaatctgcggcga

SEQ ID NO: 139677 - DNA, 17 bp, Arabidopsis thaliana
tccggacaactgctccg

SEQ ID NO: 139678 - DNA, 17 bp, Arabidopsis thaliana
tccggacagcagatcac

SEQ ID NO: 139679 - DNA, 17 bp, Arabidopsis thaliana
tccggacattccgacgg

SEQ ID NO: 139680 - DNA, 17 bp, Arabidopsis thaliana
tccggaccacctggatt

SEQ ID NO: 139681 - DNA, 17 bp, Arabidopsis thaliana
tccggacccgggcgaag

SEQ ID NO: 139682 - DNA, 17 bp, Arabidopsis thaliana
tccggacccgggcgcag

SEQ ID NO: 139683 - DNA, 17 bp, Arabidopsis thaliana
tccggaccttctttgct

SEQ ID NO: 139684 - DNA, 17 bp, Arabidopsis thaliana
tccggactaatggagat

SEQ ID NO: 139685 - DNA, 17 bp, Arabidopsis thaliana
tccggagacgtcggcgg

SEQ ID NO: 139686 - DNA, 17 bp, Arabidopsis thaliana
tccggagacgtcggcgt

SEQ ID NO: 139687 - DNA, 17 bp, Arabidopsis thaliana
tccggagaggaccttgg

SEQ ID NO: 139688 - DNA, 17 bp, Arabidopsis thaliana
tccggagagtccgatcg

SEQ ID NO: 139689 - DNA, 17 bp, Arabidopsis thaliana
tccggaggaccaagtgc

SEQ ID NO: 139690 - DNA, 17 bp, Arabidopsis thaliana
tccggaggaccgagtcc

SEQ ID NO: 139691 - DNA, 17 bp, Arabidopsis thaliana
tccggaggaccgagtga

SEQ ID NO: 139692 - DNA, 17 bp, Arabidopsis thaliana
tccggaggaccgagtgc

SEQ ID NO: 139693 - DNA, 17 bp, Arabidopsis thaliana
tccggagttggcgattt

SEQ ID NO: 139694 - DNA, 17 bp, Arabidopsis thaliana
tccggatatccgcttcg

SEQ ID NO: 139695 - DNA, 17 bp, Arabidopsis thaliana
tccggatatctgcttcg

SEQ ID NO: 139696 - DNA, 17 bp, Arabidopsis thaliana
tccggatattatgtcca

SEQ ID NO: 139697 - DNA, 17 bp, Arabidopsis thaliana
tccggatattcgctttg

SEQ ID NO: 139698 - DNA, 17 bp, Arabidopsis thaliana
tccggatatttgcttcg

SEQ ID NO: 139699 - DNA, 17 bp, Arabidopsis thaliana
tccggatctgttgagga

SEQ ID NO: 139700 - DNA, 17 bp, Arabidopsis thaliana
tccggatgactgggtga

SEQ ID NO: 139701 - DNA, 17 bp, Arabidopsis thaliana
tccggattcgggtcagg

SEQ ID NO: 139702 - DNA, 17 bp, Arabidopsis thaliana
tccggatttcttcagca

SEQ ID NO: 139703 - DNA, 17 bp, Arabidopsis thaliana
tccggcaagattcatag

SEQ ID NO: 139704 - DNA, 17 bp, Arabidopsis thaliana
tccggcaagttgacctt

SEQ ID NO: 139705 - DNA, 17 bp, Arabidopsis thaliana
tccggcagattctcggc

SEQ ID NO: 139706 - DNA, 17 bp, Arabidopsis thaliana
tccggcattggtaatct

SEQ ID NO: 139707 - DNA, 17 bp, Arabidopsis thaliana
tccggcgaaaaccccgg

SEQ ID NO: 139708 - DNA, 17 bp, Arabidopsis thaliana
tccggcgaaaatcacgg

SEQ ID NO: 139709 - DNA, 17 bp, Arabidopsis thaliana
tccggcgaaaatcccgg

SEQ ID NO: 139710 - DNA, 17 bp, Arabidopsis thaliana
tccggcgaaggttcccg

SEQ ID NO: 139711 - DNA, 17 bp, Arabidopsis thaliana
tccggcgacggcggtgg

SEQ ID NO: 139712 - DNA, 17 bp, Arabidopsis thaliana
tccggcgacttttccgg

SEQ ID NO: 139713 - DNA, 17 bp, Arabidopsis thaliana
tccggcgagacgtagcg

SEQ ID NO: 139714 - DNA, 17 bp, Arabidopsis thaliana
tccggcgctgttacttt

SEQ ID NO: 139715 - DNA, 17 bp, Arabidopsis thaliana
tccggcggaccaggttg

SEQ ID NO: 139716 - DNA, 17 bp, Arabidopsis thaliana
tccggcggaccgagtgc

SEQ ID NO: 139717 - DNA, 17 bp, Arabidopsis thaliana
tccggctgacttattca

SEQ ID NO: 139718 - DNA, 17 bp, Arabidopsis thaliana
tccgggaaaggaccagg

SEQ ID NO: 139719 - DNA, 17 bp, Arabidopsis thaliana
tccgggaagcatttgca

SEQ ID NO: 139720 - DNA, 17 bp, Arabidopsis thaliana
tccgggacctcgttatg

SEQ ID NO: 139721 - DNA, 17 bp, Arabidopsis thaliana
tccgggagttttatgac

SEQ ID NO: 139722 - DNA, 17 bp, Arabidopsis thaliana
tccgggatatcctactg

SEQ ID NO: 139723 - DNA, 17 bp, Arabidopsis thaliana
tccgggatccacggata

SEQ ID NO: 139724 - DNA, 17 bp, Arabidopsis thaliana
tccgggcagttttgacg

SEQ ID NO: 139725 - DNA, 17 bp, Arabidopsis thaliana
tccgggcggaggacagt

SEQ ID NO: 139726 - DNA, 17 bp, Arabidopsis thaliana
tccgggcggaggacatt

SEQ ID NO: 139727 - DNA, 17 bp, Arabidopsis thaliana
tccgggcggagggacgg

SEQ ID NO: 139728 - DNA, 17 bp, Arabidopsis thaliana
tccgggctcttggtgat

SEQ ID NO: 139729 - DNA, 17 bp, Arabidopsis thaliana
tccgggctttcagacag

SEQ ID NO: 139730 - DNA, 17 bp, Arabidopsis thaliana
tccggggaagtgtttgt

SEQ ID NO: 139731 - DNA, 17 bp, Arabidopsis thaliana
tccggggacacaggtcg

SEQ ID NO: 139732 - DNA, 17 bp, Arabidopsis thaliana
tccggggaccgtgggta

SEQ ID NO: 139733 - DNA, 17 bp, Arabidopsis thaliana
tccgggggtgaaagctg

SEQ ID NO: 139734 - DNA, 17 bp, Arabidopsis thaliana
tccggggtacaacccct

SEQ ID NO: 139735 - DNA, 17 bp, Arabidopsis thaliana
tccggggtttgcaacgg

SEQ ID NO: 139736 - DNA, 17 bp, Arabidopsis thaliana
tccgggttccatctgct

SEQ ID NO: 139737 - DNA, 17 bp, Arabidopsis thaliana
tccgggttcttattgcg

SEQ ID NO: 139738 - DNA, 17 bp, Arabidopsis thaliana
tccggtaaattgcttgt

SEQ ID NO: 139739 - DNA, 17 bp, Arabidopsis thaliana
tccggtacccgggcgaa

SEQ ID NO: 139740 - DNA, 17 bp, Arabidopsis thaliana
tccggtatctttggact

SEQ ID NO: 139741 - DNA, 17 bp, Arabidopsis thaliana
tccggtcaacaagagat

SEQ ID NO: 139742 - DNA, 17 bp, Arabidopsis thaliana
tccggtccgccgatcga

SEQ ID NO: 139743 - DNA, 17 bp, Arabidopsis thaliana
tccggtccgccgatcta

SEQ ID NO: 139744 - DNA, 17 bp, Arabidopsis thaliana
tccggtccgcctttggt

SEQ ID NO: 139745 - DNA, 17 bp, Arabidopsis thaliana
tccggtcgaacccgggc

SEQ ID NO: 139746 - DNA, 17 bp, Arabidopsis thaliana
tccggtcgcagcgggac

SEQ ID NO: 139747 - DNA, 17 bp, Arabidopsis thaliana
tccggtcttatgggcaa

SEQ ID NO: 139748 - DNA, 17 bp, Arabidopsis thaliana
tccggtgaaagacttct

SEQ ID NO: 139749 - DNA, 17 bp, Arabidopsis thaliana
tccggtgaagtgttcgg

SEQ ID NO: 139750 - DNA, 17 bp, Arabidopsis thaliana
tccggtgacccacggct

SEQ ID NO: 139751 - DNA, 17 bp, Arabidopsis thaliana
tccggtgaccctgttcg

SEQ ID NO: 139752 - DNA, 17 bp, Arabidopsis thaliana
tccggtgacttttccgg

SEQ ID NO: 139753 - DNA, 17 bp, Arabidopsis thaliana
tccggtgccaggcgggc

SEQ ID NO: 139754 - DNA, 17 bp, Arabidopsis thaliana
tccggtgcgcccccggc

SEQ ID NO: 139755 - DNA, 17 bp, Arabidopsis thaliana
tccggtgcgttgaacca

SEQ ID NO: 139756 - DNA, 17 bp, Arabidopsis thaliana
tccggtgtctacggcat

SEQ ID NO: 139757 - DNA, 17 bp, Arabidopsis thaliana
tccggtgtgatgatgtg

SEQ ID NO: 139758 - DNA, 17 bp, Arabidopsis thaliana
tccggtgttgatcgtcg

SEQ ID NO: 139759 - DNA, 17 bp, Arabidopsis thaliana
tccggtgttggccagct

SEQ ID NO: 139760 - DNA, 17 bp, Arabidopsis thaliana
tccggttaagagtttaa

SEQ ID NO: 139761 - DNA, 17 bp, Arabidopsis thaliana
tccggttatctctcaag

SEQ ID NO: 139762 - DNA, 17 bp, Arabidopsis thaliana
tccggttattacggcca

SEQ ID NO: 139763 - DNA, 17 bp, Arabidopsis thaliana
tccggttattatggcca

SEQ ID NO: 139764 - DNA, 17 bp, Arabidopsis thaliana
tccggttcacccgggcg

SEQ ID NO: 139765 - DNA, 17 bp, Arabidopsis thaliana
tccggttcactgtctgg

SEQ ID NO: 139766 - DNA, 17 bp, Arabidopsis thaliana
tccggttccaacccggg

SEQ ID NO: 139767 - DNA, 17 bp, Arabidopsis thaliana
tccggttcgaacccggg

SEQ ID NO: 139768 - DNA, 17 bp, Arabidopsis thaliana
tccggttcggacccggg

SEQ ID NO: 139769 - DNA, 17 bp, Arabidopsis thaliana
tccggttcgtacccggg

SEQ ID NO: 139770 - DNA, 17 bp, Arabidopsis thaliana
tccggttcgttggcagt

SEQ ID NO: 139771 - DNA, 17 bp, Arabidopsis thaliana
tccggttgaacccgggc

SEQ ID NO: 139772 - DNA, 17 bp, Arabidopsis thaliana
tccggttgcggttaaag

SEQ ID NO: 139773 - DNA, 17 bp, Arabidopsis thaliana
tccggttgcggtttaag

SEQ ID NO: 139774 - DNA, 17 bp, Arabidopsis thaliana
tccggttgttcgagttg

SEQ ID NO: 139775 - DNA, 17 bp, Arabidopsis thaliana
tccggtttcccgggcga

SEQ ID NO: 139776 - DNA, 17 bp, Arabidopsis thaliana
tccggtttgatgaactg

SEQ ID NO: 139777 - DNA, 17 bp, Arabidopsis thaliana
tccggtttgtcgggttt

SEQ ID NO: 139778 - DNA, 17 bp, Arabidopsis thaliana
tccgtaaattcattctc

SEQ ID NO: 139779 - DNA, 17 bp, Arabidopsis thaliana
tccgtaacatttggtcc

SEQ ID NO: 139780 - DNA, 17 bp, Arabidopsis thaliana
tccgtaacttcgggaaa

SEQ ID NO: 139781 - DNA, 17 bp, Arabidopsis thaliana
tccgtaagtcttgaggt

SEQ ID NO: 139782 - DNA, 17 bp, Arabidopsis thaliana
tccgtactctctgcaga

SEQ ID NO: 139783 - DNA, 17 bp, Arabidopsis thaliana
tccgtacttttggttct

SEQ ID NO: 139784 - DNA, 17 bp, Arabidopsis thaliana
tccgtagacgctggaat

SEQ ID NO: 139785 - DNA, 17 bp, Arabidopsis thaliana
tccgtaggaccgagtgc

SEQ ID NO: 139786 - DNA, 17 bp, Arabidopsis thaliana
tccgtaggtgtacctgc

SEQ ID NO: 139787 - DNA, 17 bp, Arabidopsis thaliana
tccgtagttacagaggc

SEQ ID NO: 139788 - DNA, 17 bp, Arabidopsis thaliana
tccgtatcgcaatagtt

SEQ ID NO: 139789 - DNA, 17 bp, Arabidopsis thaliana
tccgtatcgcattagtt

SEQ ID NO: 139790 - DNA, 17 bp, Arabidopsis thaliana
tccgtcaagtaactaag

SEQ ID NO: 139791 - DNA, 17 bp, Arabidopsis thaliana
tccgtcaatgtcgttgt

SEQ ID NO: 139792 - DNA, 17 bp, Arabidopsis thaliana
tccgtcagacgatcggc

SEQ ID NO: 139793 - DNA, 17 bp, Arabidopsis thaliana
tccgtcagcggtctagt

SEQ ID NO: 139794 - DNA, 17 bp, Arabidopsis thaliana
tccgtcagctgcggatt

SEQ ID NO: 139795 - DNA, 17 bp, Arabidopsis thaliana
tccgtcatttgcagaac

SEQ ID NO: 139796 - DNA, 17 bp, Arabidopsis thaliana
tccgtccaaggctaaat

SEQ ID NO: 139797 - DNA, 17 bp, Arabidopsis thaliana
tccgtccgattgcgttc

SEQ ID NO: 139798 - DNA, 17 bp, Arabidopsis thaliana
tccgtcgaatcccgctc

SEQ ID NO: 139799 - DNA, 17 bp, Arabidopsis thaliana
tccgtcgactctggaaa

SEQ ID NO: 139800 - DNA, 17 bp, Arabidopsis thaliana
tccgtcgacttggctgg

SEQ ID NO: 139801 - DNA, 17 bp, Arabidopsis thaliana
tccgtcgccggctgatc

SEQ ID NO: 139802 - DNA, 17 bp, Arabidopsis thaliana
tccgtcgtagcctagct

SEQ ID NO: 139803 - DNA, 17 bp, Arabidopsis thaliana
tccgtcgtagtctagct

SEQ ID NO: 139804 - DNA, 17 bp, Arabidopsis thaliana
tccgtcgtagtttagct

SEQ ID NO: 139805 - DNA, 17 bp, Arabidopsis thaliana
tccgtctcactccaggt

SEQ ID NO: 139806 - DNA, 17 bp, Arabidopsis thaliana
tccgtctgcctgggtgt

SEQ ID NO: 139807 - DNA, 17 bp, Arabidopsis thaliana
tccgtcttcttcattgg

SEQ ID NO: 139808 - DNA, 17 bp, Arabidopsis thaliana
tccgtgaatcggaggcg

SEQ ID NO: 139809 - DNA, 17 bp, Arabidopsis thaliana
tccgtgatggatattcc

SEQ ID NO: 139810 - DNA, 17 bp, Arabidopsis thaliana
tccgtgatgttatcgtt

SEQ ID NO: 139811 - DNA, 17 bp, Arabidopsis thaliana
tccgtgcaagtctctgt

SEQ ID NO: 139812 - DNA, 17 bp, Arabidopsis thaliana
tccgtgcattggtcggc

SEQ ID NO: 139813 - DNA, 17 bp, Arabidopsis thaliana
tccgtggagttcaagat

SEQ ID NO: 139814 - DNA, 17 bp, Arabidopsis thaliana
tccgtggtccaacctgg

SEQ ID NO: 139815 - DNA, 17 bp, Arabidopsis thaliana
tccgtgtgcgagtgtat

SEQ ID NO: 139816 - DNA, 17 bp, Arabidopsis thaliana
tccgtgtttcttggagt

SEQ ID NO: 139817 - DNA, 17 bp, Arabidopsis thaliana
tccgttaaatcctctgt

SEQ ID NO: 139818 - DNA, 17 bp, Arabidopsis thaliana
tccgttaacgaacgaga

SEQ ID NO: 139819 - DNA, 17 bp, Arabidopsis thaliana
tccgttagcggttcagt

SEQ ID NO: 139820 - DNA, 17 bp, Arabidopsis thaliana
tccgttagcggttcatt

SEQ ID NO: 139821 - DNA, 17 bp, Arabidopsis thaliana
tccgttaggtttgttgc

SEQ ID NO: 139822 - DNA, 17 bp, Arabidopsis thaliana
tccgttaggtttgttgt

SEQ ID NO: 139823 - DNA, 17 bp, Arabidopsis thaliana
tccgttatcgtccagcg

SEQ ID NO: 139824 - DNA, 17 bp, Arabidopsis thaliana
tccgttcactcgaccac

SEQ ID NO: 139825 - DNA, 17 bp, Arabidopsis thaliana
tccgttcgaccgtctcg

SEQ ID NO: 139826 - DNA, 17 bp, Arabidopsis thaliana
tccgttcggcggaagcg

SEQ ID NO: 139827 - DNA, 17 bp, Arabidopsis thaliana
tccgttcggcggaaggg

SEQ ID NO: 139828 - DNA, 17 bp, Arabidopsis thaliana
tccgttctacttggctt

SEQ ID NO: 139829 - DNA, 17 bp, Arabidopsis thaliana
tccgttgacttaacgac

SEQ ID NO: 139830 - DNA, 17 bp, Arabidopsis thaliana
tccgttgagttggatta

SEQ ID NO: 139831 - DNA, 17 bp, Arabidopsis thaliana
tccgttgattaggtcaa

SEQ ID NO: 139832 - DNA, 17 bp, Arabidopsis thaliana
tccgttgccgagagtcg

SEQ ID NO: 139833 - DNA, 17 bp, Arabidopsis thaliana
tccgttggtgtgcgccc

SEQ ID NO: 139834 - DNA, 17 bp, Arabidopsis thaliana
tccgttgtaacccaccc

SEQ ID NO: 139835 - DNA, 17 bp, Arabidopsis thaliana
tccgttgtagtctagct

SEQ ID NO: 139836 - DNA, 17 bp, Arabidopsis thaliana
tccgttgtagtctagga

SEQ ID NO: 139837 - DNA, 17 bp, Arabidopsis thaliana
tccgttgtcgtccagcg

SEQ ID NO: 139838 - DNA, 17 bp, Arabidopsis thaliana
tccgttgtctgttcgac

SEQ ID NO: 139839 - DNA, 17 bp, Arabidopsis thaliana
tccgtttattcgtttca

SEQ ID NO: 139840 - DNA, 17 bp, Arabidopsis thaliana
tccgtttccatcgcagt

SEQ ID NO: 139841 - DNA, 17 bp, Arabidopsis thaliana
tccgtttccgttccaac

SEQ ID NO: 139842 - DNA, 17 bp, Arabidopsis thaliana
tccgtttcgaacccggg

SEQ ID NO: 139843 - DNA, 17 bp, Arabidopsis thaliana
tccgtttgacgaggctg

SEQ ID NO: 139844 - DNA, 17 bp, Arabidopsis thaliana
tccgtttgagacacttt

SEQ ID NO: 139845 - DNA, 17 bp, Arabidopsis thaliana
tccgtttgaggcacttt

SEQ ID NO: 139846 - DNA, 17 bp, Arabidopsis thaliana
tccgtttgaggcagtat

SEQ ID NO: 139847 - DNA, 17 bp, Arabidopsis thaliana
tccgttttagacttagg

SEQ ID NO: 139848 - DNA, 17 bp, Arabidopsis thaliana
tccgttttttcgtcaga

SEQ ID NO: 139849 - DNA, 17 bp, Arabidopsis thaliana
tcctaaagcggcctgtt

SEQ ID NO: 139850 - DNA, 17 bp, Arabidopsis thaliana
tcctaaatggctctctc

SEQ ID NO: 139851 - DNA, 17 bp, Arabidopsis thaliana
tcctaaccgggttccaa

SEQ ID NO: 139852 - DNA, 17 bp, Arabidopsis thaliana
tcctaactatcacaggt

SEQ ID NO: 139853 - DNA, 17 bp, Arabidopsis thaliana
tcctaactatcacagtt

SEQ ID NO: 139854 - DNA, 17 bp, Arabidopsis thaliana
tcctaactatccttctg

SEQ ID NO: 139855 - DNA, 17 bp, Arabidopsis thaliana
tcctaagaaattccttc

SEQ ID NO: 139856 - DNA, 17 bp, Arabidopsis thaliana
tcctaagagtcggggga

SEQ ID NO: 139857 - DNA, 17 bp, Arabidopsis thaliana
tcctaagcgttggagtt

SEQ ID NO: 139858 - DNA, 17 bp, Arabidopsis thaliana
tcctaagctgcagtgga

SEQ ID NO: 139859 - DNA, 17 bp, Arabidopsis thaliana
tcctaagctgtagggga

SEQ ID NO: 139860 - DNA, 17 bp, Arabidopsis thaliana
tcctaagcttgtgtcac

SEQ ID NO: 139861 - DNA, 17 bp, Arabidopsis thaliana
tcctaaggtgcagcaga

SEQ ID NO: 139862 - DNA, 17 bp, Arabidopsis thaliana
tcctaaggtttcgtttt

SEQ ID NO: 139863 - DNA, 17 bp, Arabidopsis thaliana
tcctaagtccaacataa

SEQ ID NO: 139864 - DNA, 17 bp, Arabidopsis thaliana
tcctaagtccaacatac

SEQ ID NO: 139865 - DNA, 17 bp, Arabidopsis thaliana
tcctaagtccaacatag

SEQ ID NO: 139866 - DNA, 17 bp, Arabidopsis thaliana
tcctaagtccaacgtag

SEQ ID NO: 139867 - DNA, 17 bp, Arabidopsis thaliana
tcctaagtcttttggtt

SEQ ID NO: 139868 - DNA, 17 bp, Arabidopsis thaliana
tcctaagtgtgcgttgg

SEQ ID NO: 139869 - DNA, 17 bp, Arabidopsis thaliana
tcctaagttgcgagaat

SEQ ID NO: 139870 - DNA, 17 bp, Arabidopsis thaliana
tcctaatggtggtgtag

SEQ ID NO: 139871 - DNA, 17 bp, Arabidopsis thaliana
tcctacaactgctattg

SEQ ID NO: 139872 - DNA, 17 bp, Arabidopsis thaliana
tcctacacagctggtgg

SEQ ID NO: 139873 - DNA, 17 bp, Arabidopsis thaliana
tcctacagctgcttgct

SEQ ID NO: 139874 - DNA, 17 bp, Arabidopsis thaliana
tcctacagtcttgatcc

SEQ ID NO: 139875 - DNA, 17 bp, Arabidopsis thaliana
tcctacatagctggtgg

SEQ ID NO: 139876 - DNA, 17 bp, Arabidopsis thaliana
tcctacatcttagcaac

SEQ ID NO: 139877 - DNA, 17 bp, Arabidopsis thaliana
tcctacatcttccagag

SEQ ID NO: 139878 - DNA, 17 bp, Arabidopsis thaliana
tcctaccaatttgagat

SEQ ID NO: 139879 - DNA, 17 bp, Arabidopsis thaliana
tcctacgggaggcagca

SEQ ID NO: 139880 - DNA, 17 bp, Arabidopsis thaliana
tcctacggtggcggcct

SEQ ID NO: 139881 - DNA, 17 bp, Arabidopsis thaliana
tcctacggtgtctcttt

SEQ ID NO: 139882 - DNA, 17 bp, Arabidopsis thaliana
tcctactacttctggga

SEQ ID NO: 139883 - DNA, 17 bp, Arabidopsis thaliana
tcctactcaacatccga

SEQ ID NO: 139884 - DNA, 17 bp, Arabidopsis thaliana
tcctactgagggtcggc

SEQ ID NO: 139885 - DNA, 17 bp, Arabidopsis thaliana
tcctacttctgcagcta

SEQ ID NO: 139886 - DNA, 17 bp, Arabidopsis thaliana
tcctacttgtggagctg

SEQ ID NO: 139887 - DNA, 17 bp, Arabidopsis thaliana
tcctaggcggagctaga

SEQ ID NO: 139888 - DNA, 17 bp, Arabidopsis thaliana
tcctaggctttgaatgt

SEQ ID NO: 139889 - DNA, 17 bp, Arabidopsis thaliana
tcctagtaaaccggaat

SEQ ID NO: 139890 - DNA, 17 bp, Arabidopsis thaliana
tcctagtcgcatcctgt

SEQ ID NO: 139891 - DNA, 17 bp, Arabidopsis thaliana
tcctagttcaattgccc

SEQ ID NO: 139892 - DNA, 17 bp, Arabidopsis thaliana
tcctatccggaaatcac

SEQ ID NO: 139893 - DNA, 17 bp, Arabidopsis thaliana
tcctatcctcgagatat

SEQ ID NO: 139894 - DNA, 17 bp, Arabidopsis thaliana
tcctatcggctgatccg

SEQ ID NO: 139895 - DNA, 17 bp, Arabidopsis thaliana
tcctatcggctgattcg

SEQ ID NO: 139896 - DNA, 17 bp, Arabidopsis thaliana
tcctatcggtaggctac

SEQ ID NO: 139897 - DNA, 17 bp, Arabidopsis thaliana
tcctatgatgtcctagt

SEQ ID NO: 139898 - DNA, 17 bp, Arabidopsis thaliana
tcctatgctcggctctg

SEQ ID NO: 139899 - DNA, 17 bp, Arabidopsis thaliana
tcctatgtccagttata

SEQ ID NO: 139900 - DNA, 17 bp, Arabidopsis thaliana
tcctattccgtactcca

SEQ ID NO: 139901 - DNA, 17 bp, Arabidopsis thaliana
tcctattctctggcgcc

SEQ ID NO: 139902 - DNA, 17 bp, Arabidopsis thaliana
tcctattgctcggctgt

SEQ ID NO: 139903 - DNA, 17 bp, Arabidopsis thaliana
tcctattgtgttggcct

SEQ ID NO: 139904 - DNA, 17 bp, Arabidopsis thaliana
tcctatttcctctcgct

SEQ ID NO: 139905 - DNA, 17 bp, Arabidopsis thaliana
tcctatttctcagctgt

SEQ ID NO: 139906 - DNA, 17 bp, Arabidopsis thaliana
tcctcaacgtgttcatt

SEQ ID NO: 139907 - DNA, 17 bp, Arabidopsis thaliana
tcctcaacttggtgcag

SEQ ID NO: 139908 - DNA, 17 bp, Arabidopsis thaliana
tcctcaagcgggatatc

SEQ ID NO: 139909 - DNA, 17 bp, Arabidopsis thaliana
tcctcaagtctatcggt

SEQ ID NO: 139910 - DNA, 17 bp, Arabidopsis thaliana
tcctcaatcggaatcgc

SEQ ID NO: 139911 - DNA, 17 bp, Arabidopsis thaliana
tcctcaatggtgttggc

SEQ ID NO: 139912 - DNA, 17 bp, Arabidopsis thaliana
tcctcaattgcttggcc

SEQ ID NO: 139913 - DNA, 17 bp, Arabidopsis thaliana
tcctcaattggtgtggg

SEQ ID NO: 139914 - DNA, 17 bp, Arabidopsis thaliana
tcctcaattggtgtgtg

SEQ ID NO: 139915 - DNA, 17 bp, Arabidopsis thaliana
tcctcaatttgtgtgcc

SEQ ID NO: 139916 - DNA, 17 bp, Arabidopsis thaliana
tcctcacaaattctcag

SEQ ID NO: 139917 - DNA, 17 bp, Arabidopsis thaliana
tcctcacacccaagcgg

SEQ ID NO: 139918 - DNA, 17 bp, Arabidopsis thaliana
tcctcaccgtgagagac

SEQ ID NO: 139919 - DNA, 17 bp, Arabidopsis thaliana
tcctcagattggtcgca

SEQ ID NO: 139920 - DNA, 17 bp, Arabidopsis thaliana
tcctcagcaaccgcagc

SEQ ID NO: 139921 - DNA, 17 bp, Arabidopsis thaliana
tcctcagcaggtgggca

SEQ ID NO: 139922 - DNA, 17 bp, Arabidopsis thaliana
tcctcagccaagaccaa

SEQ ID NO: 139923 - DNA, 17 bp, Arabidopsis thaliana
tcctcagccacaaattt

SEQ ID NO: 139924 - DNA, 17 bp, Arabidopsis thaliana
tcctcagcgacggaccc

SEQ ID NO: 139925 - DNA, 17 bp, Arabidopsis thaliana
tcctcagcgacggaccg

SEQ ID NO: 139926 - DNA, 17 bp, Arabidopsis thaliana
tcctcagcgacggacgc

SEQ ID NO: 139927 - DNA, 17 bp, Arabidopsis thaliana
tcctcaggattagctcg

SEQ ID NO: 139928 - DNA, 17 bp, Arabidopsis thaliana
tcctcaggattggctcg

SEQ ID NO: 139929 - DNA, 17 bp, Arabidopsis thaliana
tcctcaggcatgtggaa

SEQ ID NO: 139930 - DNA, 17 bp, Arabidopsis thaliana
tcctcaggcttatggta

SEQ ID NO: 139931 - DNA, 17 bp, Arabidopsis thaliana
tcctcaggtttgacttg

SEQ ID NO: 139932 - DNA, 17 bp, Arabidopsis thaliana
tcctcagtagctcaggg

SEQ ID NO: 139933 - DNA, 17 bp, Arabidopsis thaliana
tcctcagtagctcagta

SEQ ID NO: 139934 - DNA, 17 bp, Arabidopsis thaliana
tcctcagtagctcagtg

SEQ ID NO: 139935 - DNA, 17 bp, Arabidopsis thaliana
tcctcagtgacggaccg

SEQ ID NO: 139936 - DNA, 17 bp, Arabidopsis thaliana
tcctcagttcagattgc

SEQ ID NO: 139937 - DNA, 17 bp, Arabidopsis thaliana
tcctcagttcggattgc

SEQ ID NO: 139938 - DNA, 17 bp, Arabidopsis thaliana
tcctcagttcgggttgc

SEQ ID NO: 139939 - DNA, 17 bp, Arabidopsis thaliana
tcctcagttggcggact

SEQ ID NO: 139940 - DNA, 17 bp, Arabidopsis thaliana
tcctcatacttggatct

SEQ ID NO: 139941 - DNA, 17 bp, Arabidopsis thaliana
tcctcatatggagagag

SEQ ID NO: 139942 - DNA, 17 bp, Arabidopsis thaliana
tcctcatatgttggctg

SEQ ID NO: 139943 - DNA, 17 bp, Arabidopsis thaliana
tcctcatattggctttt

SEQ ID NO: 139944 - DNA, 17 bp, Arabidopsis thaliana
tcctcatctcaagggct

SEQ ID NO: 139945 - DNA, 17 bp, Arabidopsis thaliana
tcctcatctccaaagtg

SEQ ID NO: 139946 - DNA, 17 bp, Arabidopsis thaliana
tcctcatctccattgtt

SEQ ID NO: 139947 - DNA, 17 bp, Arabidopsis thaliana
tcctcatctccgctcgg

SEQ ID NO: 139948 - DNA, 17 bp, Arabidopsis thaliana
tcctcatctgggcctgg

SEQ ID NO: 139949 - DNA, 17 bp, Arabidopsis thaliana
tcctcatggaaaagtga

SEQ ID NO: 139950 - DNA, 17 bp, Arabidopsis thaliana
tcctcatgggcatgctt

SEQ ID NO: 139951 - DNA, 17 bp, Arabidopsis thaliana
tcctcattctcctacat

SEQ ID NO: 139952 - DNA, 17 bp, Arabidopsis thaliana
tcctcatttggagaaag

SEQ ID NO: 139953 - DNA, 17 bp, Arabidopsis thaliana
tcctccaacagtgccac

SEQ ID NO: 139954 - DNA, 17 bp, Arabidopsis thaliana
tcctccaatctactcga

SEQ ID NO: 139955 - DNA, 17 bp, Arabidopsis thaliana
tcctccaatgactcttt

SEQ ID NO: 139956 - DNA, 17 bp, Arabidopsis thaliana
tcctccagaatgctcca

SEQ ID NO: 139957 - DNA, 17 bp, Arabidopsis thaliana
tcctccaggttttcctc

SEQ ID NO: 139958 - DNA, 17 bp, Arabidopsis thaliana
tcctccatcggaaattg

SEQ ID NO: 139959 - DNA, 17 bp, Arabidopsis thaliana
tcctcccggtaggacct

SEQ ID NO: 139960 - DNA, 17 bp, Arabidopsis thaliana
tcctccgaacaaaaccg

SEQ ID NO: 139961 - DNA, 17 bp, Arabidopsis thaliana
tcctccgatgaaggctt

SEQ ID NO: 139962 - DNA, 17 bp, Arabidopsis thaliana
tcctccgctgattttcc

SEQ ID NO: 139963 - DNA, 17 bp, Arabidopsis thaliana
tcctccggattttcaag

SEQ ID NO: 139964 - DNA, 17 bp, Arabidopsis thaliana
tcctccggcttgcccct

SEQ ID NO: 139965 - DNA, 17 bp, Arabidopsis thaliana
tcctccgtcggcctgtg

SEQ ID NO: 139966 - DNA, 17 bp, Arabidopsis thaliana
tcctccgttgcagtcga

SEQ ID NO: 139967 - DNA, 17 bp, Arabidopsis thaliana
tcctccgtttattcgtt

SEQ ID NO: 139968 - DNA, 17 bp, Arabidopsis thaliana
tcctcctattgcaaaac

SEQ ID NO: 139969 - DNA, 17 bp, Arabidopsis thaliana
tcctcctctattgcagc

SEQ ID NO: 139970 - DNA, 17 bp, Arabidopsis thaliana
tcctcctctccgtacag

SEQ ID NO: 139971 - DNA, 17 bp, Arabidopsis thaliana
tcctcctgagtatccgc

SEQ ID NO: 139972 - DNA, 17 bp, Arabidopsis thaliana
tcctcctggatattcgg

SEQ ID NO: 139973 - DNA, 17 bp, Arabidopsis thaliana
tcctcctggcagtcaca

SEQ ID NO: 139974 - DNA, 17 bp, Arabidopsis thaliana
tcctcctgtaaaaggcc

SEQ ID NO: 139975 - DNA, 17 bp, Arabidopsis thaliana
tcctccttagccacctc

SEQ ID NO: 139976 - DNA, 17 bp, Arabidopsis thaliana
tcctccttcactggctc

SEQ ID NO: 139977 - DNA, 17 bp, Arabidopsis thaliana
tcctccttggggttgta

SEQ ID NO: 139978 - DNA, 17 bp, Arabidopsis thaliana
tcctccttgtgctcagc

SEQ ID NO: 139979 - DNA, 17 bp, Arabidopsis thaliana
tcctcgaaccttcggca

SEQ ID NO: 139980 - DNA, 17 bp, Arabidopsis thaliana
tcctcgaatgcatatac

SEQ ID NO: 139981 - DNA, 17 bp, Arabidopsis thaliana
tcctcgaccactccttg

SEQ ID NO: 139982 - DNA, 17 bp, Arabidopsis thaliana
tcctcgaccatgatcta

SEQ ID NO: 139983 - DNA, 17 bp, Arabidopsis thaliana
tcctcgagttttccacc

SEQ ID NO: 139984 - DNA, 17 bp, Arabidopsis thaliana
tcctcgatcatggtcga

SEQ ID NO: 139985 - DNA, 17 bp, Arabidopsis thaliana
tcctcgattgtgaaaac

SEQ ID NO: 139986 - DNA, 17 bp, Arabidopsis thaliana
tcctcgcaggaggtata

SEQ ID NO: 139987 - DNA, 17 bp, Arabidopsis thaliana
tcctcgcaggggagaga

SEQ ID NO: 139988 - DNA, 17 bp, Arabidopsis thaliana
tcctcgcctccttggtg

SEQ ID NO: 139989 - DNA, 17 bp, Arabidopsis thaliana
tcctcgcgattgaaggt

SEQ ID NO: 139990 - DNA, 17 bp, Arabidopsis thaliana
tcctcggacagttggta

SEQ ID NO: 139991 - DNA, 17 bp, Arabidopsis thaliana
tcctcggaccaggcttc

SEQ ID NO: 139992 - DNA, 17 bp, Arabidopsis thaliana
tcctcggacccggtcga

SEQ ID NO: 139993 - DNA, 17 bp, Arabidopsis thaliana
tcctcggactcgatttt

SEQ ID NO: 139994 - DNA, 17 bp, Arabidopsis thaliana
tcctcggatgtagagac

SEQ ID NO: 139995 - DNA, 17 bp, Arabidopsis thaliana
tcctcggcttcgcggag

SEQ ID NO: 139996 - DNA, 17 bp, Arabidopsis thaliana
tcctcgggatgacaggt

SEQ ID NO: 139997 - DNA, 17 bp, Arabidopsis thaliana
tcctcgggttcccagcc

SEQ ID NO: 139998 - DNA, 17 bp, Arabidopsis thaliana
tcctcgggttcgggtac

SEQ ID NO: 139999 - DNA, 17 bp, Arabidopsis thaliana
tcctcgtcctggtcgac

SEQ ID NO: 140000 - DNA, 17 bp, Arabidopsis thaliana
tcctcgtcctggtcgat

SEQ ID NO: 140001 - DNA, 17 bp, Arabidopsis thaliana
tcctcgtgaactacttt

SEQ ID NO: 140002 - DNA, 17 bp, Arabidopsis thaliana
tcctcgtggatgtcgtc

SEQ ID NO: 140003 - DNA, 17 bp, Arabidopsis thaliana
tcctcgttttggccggt

SEQ ID NO: 140004 - DNA, 17 bp, Arabidopsis thaliana
tcctctaaagtcccgac

SEQ ID NO: 140005 - DNA, 17 bp, Arabidopsis thaliana
tcctctaactgatcaac

SEQ ID NO: 140006 - DNA, 17 bp, Arabidopsis thaliana
tcctctactcgaccgcg

SEQ ID NO: 140007 - DNA, 17 bp, Arabidopsis thaliana
tcctctagggtgctcgg

SEQ ID NO: 140008 - DNA, 17 bp, Arabidopsis thaliana
tcctctaggtgcaatct

SEQ ID NO: 140009 - DNA, 17 bp, Arabidopsis thaliana
tcctctaggtgcaatta

SEQ ID NO: 140010 - DNA, 17 bp, Arabidopsis thaliana
tcctctatggacttgtg

SEQ ID NO: 140011 - DNA, 17 bp, Arabidopsis thaliana
tcctctattcatctttg

SEQ ID NO: 140012 - DNA, 17 bp, Arabidopsis thaliana
tcctctattgtacttgg

SEQ ID NO: 140013 - DNA, 17 bp, Arabidopsis thaliana
tcctctcatcgccacct

SEQ ID NO: 140014 - DNA, 17 bp, Arabidopsis thaliana
tcctctcatcttcgcct

SEQ ID NO: 140015 - DNA, 17 bp, Arabidopsis thaliana
tcctctccatccttctc

SEQ ID NO: 140016 - DNA, 17 bp, Arabidopsis thaliana
tcctctcgcttacgttt

SEQ ID NO: 140017 - DNA, 17 bp, Arabidopsis thaliana
tcctctcggatttcggt

SEQ ID NO: 140018 - DNA, 17 bp, Arabidopsis thaliana
tcctctcggcttgggtc

SEQ ID NO: 140019 - DNA, 17 bp, Arabidopsis thaliana
tcctctctatgatggct

SEQ ID NO: 140020 - DNA, 17 bp, Arabidopsis thaliana
tcctctgactgcctgcg

SEQ ID NO: 140021 - DNA, 17 bp, Arabidopsis thaliana
tcctctgcagcaaccac

SEQ ID NO: 140022 - DNA, 17 bp, Arabidopsis thaliana
tcctctgcagcaaccgc

SEQ ID NO: 140023 - DNA, 17 bp, Arabidopsis thaliana
tcctctgcagcctcccc

SEQ ID NO: 140024 - DNA, 17 bp, Arabidopsis thaliana
tcctctgcatagaactt

SEQ ID NO: 140025 - DNA, 17 bp, Arabidopsis thaliana
tcctctgcccctggttg

SEQ ID NO: 140026 - DNA, 17 bp, Arabidopsis thaliana
tcctctgcgatattcaa

SEQ ID NO: 140027 - DNA, 17 bp, Arabidopsis thaliana
tcctctgcttgctacta

SEQ ID NO: 140028 - DNA, 17 bp, Arabidopsis thaliana
tcctctggagcttggaa

SEQ ID NO: 140029 - DNA, 17 bp, Arabidopsis thaliana
tcctctgggatatcgag

SEQ ID NO: 140030 - DNA, 17 bp, Arabidopsis thaliana
tcctctggtttaagccg

SEQ ID NO: 140031 - DNA, 17 bp, Arabidopsis thaliana
tcctctgtcgttgtcgg

SEQ ID NO: 140032 - DNA, 17 bp, Arabidopsis thaliana
tcctctgtgggtcgttc

SEQ ID NO: 140033 - DNA, 17 bp, Arabidopsis thaliana
tcctctgttctgctctg

SEQ ID NO: 140034 - DNA, 17 bp, Arabidopsis thaliana
tcctctgttgctgctct

SEQ ID NO: 140035 - DNA, 17 bp, Arabidopsis thaliana
tcctcttactccagcca

SEQ ID NO: 140036 - DNA, 17 bp, Arabidopsis thaliana
tcctcttcaacggtgtc

SEQ ID NO: 140037 - DNA, 17 bp, Arabidopsis thaliana
tcctcttcaggttctca

SEQ ID NO: 140038 - DNA, 17 bp, Arabidopsis thaliana
tcctcttcatccttgat

SEQ ID NO: 140039 - DNA, 17 bp, Arabidopsis thaliana
tcctcttcgctgaactt

SEQ ID NO: 140040 - DNA, 17 bp, Arabidopsis thaliana
tcctcttcgctgctttt

SEQ ID NO: 140041 - DNA, 17 bp, Arabidopsis thaliana
tcctcttgatcctggat

SEQ ID NO: 140042 - DNA, 17 bp, Arabidopsis thaliana
tcctcttgatgacacgt

SEQ ID NO: 140043 - DNA, 17 bp, Arabidopsis thaliana
tcctcttgcgatctatt

SEQ ID NO: 140044 - DNA, 17 bp, Arabidopsis thaliana
tcctcttggacttgctt

SEQ ID NO: 140045 - DNA, 17 bp, Arabidopsis thaliana
tcctcttggtcacatca

SEQ ID NO: 140046 - DNA, 17 bp, Arabidopsis thaliana
tcctcttgtaagccttt

SEQ ID NO: 140047 - DNA, 17 bp, Arabidopsis thaliana
tcctcttgtgaaaagag

SEQ ID NO: 140048 - DNA, 17 bp, Arabidopsis thaliana
tcctctttctcttgaca

SEQ ID NO: 140049 - DNA, 17 bp, Arabidopsis thaliana
tcctctttgagcttgac

SEQ ID NO: 140050 - DNA, 17 bp, Arabidopsis thaliana
tcctctttgtttaccag

SEQ ID NO: 140051 - DNA, 17 bp, Arabidopsis thaliana
tcctgaacatctgtctg

SEQ ID NO: 140052 - DNA, 17 bp, Arabidopsis thaliana
tcctgaaccaactgaga

SEQ ID NO: 140053 - DNA, 17 bp, Arabidopsis thaliana
tcctgaaggtggactgt

SEQ ID NO: 140054 - DNA, 17 bp, Arabidopsis thaliana
tcctgaatggctctctc

SEQ ID NO: 140055 - DNA, 17 bp, Arabidopsis thaliana
tcctgaatgggctctga

SEQ ID NO: 140056 - DNA, 17 bp, Arabidopsis thaliana
tcctgaattgctcgggc

SEQ ID NO: 140057 - DNA, 17 bp, Arabidopsis thaliana
tcctgaccattgctgtg

SEQ ID NO: 140058 - DNA, 17 bp, Arabidopsis thaliana
tcctgacctttgaacct

SEQ ID NO: 140059 - DNA, 17 bp, Arabidopsis thaliana
tcctgacgagttatcca

SEQ ID NO: 140060 - DNA, 17 bp, Arabidopsis thaliana
tcctgagaactggtcac

SEQ ID NO: 140061 - DNA, 17 bp, Arabidopsis thaliana
tcctgagacgagattga

SEQ ID NO: 140062 - DNA, 17 bp, Arabidopsis thaliana
tcctgagacgtcggcgg

SEQ ID NO: 140063 - DNA, 17 bp, Arabidopsis thaliana
tcctgagaggatatggc

SEQ ID NO: 140064 - DNA, 17 bp, Arabidopsis thaliana
tcctgagatcttgaagt

SEQ ID NO: 140065 - DNA, 17 bp, Arabidopsis thaliana
tcctgagcagcgcatag

SEQ ID NO: 140066 - DNA, 17 bp, Arabidopsis thaliana
tcctgagcattaagcca

SEQ ID NO: 140067 - DNA, 17 bp, Arabidopsis thaliana
tcctgagcggtaatgga

SEQ ID NO: 140068 - DNA, 17 bp, Arabidopsis thaliana
tcctgagctgtttctga

SEQ ID NO: 140069 - DNA, 17 bp, Arabidopsis thaliana
tcctgagggattacgag

SEQ ID NO: 140070 - DNA, 17 bp, Arabidopsis thaliana
tcctgagtccaacatag

SEQ ID NO: 140071 - DNA, 17 bp, Arabidopsis thaliana
tcctgagtctactatgc

SEQ ID NO: 140072 - DNA, 17 bp, Arabidopsis thaliana
tcctgatcgtggtctgc

SEQ ID NO: 140073 - DNA, 17 bp, Arabidopsis thaliana
tcctgatgtcggctctt

SEQ ID NO: 140074 - DNA, 17 bp, Arabidopsis thaliana
tcctgatttgggctata

SEQ ID NO: 140075 - DNA, 17 bp, Arabidopsis thaliana
tcctgcaaggcaagaag

SEQ ID NO: 140076 - DNA, 17 bp, Arabidopsis thaliana
tcctgcagaggtaatgc

SEQ ID NO: 140077 - DNA, 17 bp, Arabidopsis thaliana
tcctgccaggggctttg

SEQ ID NO: 140078 - DNA, 17 bp, Arabidopsis thaliana
tcctgccagtagtcata

SEQ ID NO: 140079 - DNA, 17 bp, Arabidopsis thaliana
tcctgccagttgctcaa

SEQ ID NO: 140080 - DNA, 17 bp, Arabidopsis thaliana
tcctgcgaaaggcttgt

SEQ ID NO: 140081 - DNA, 17 bp, Arabidopsis thaliana
tcctgcgacctggggac

SEQ ID NO: 140082 - DNA, 17 bp, Arabidopsis thaliana
tcctgcgacctgggttc

SEQ ID NO: 140083 - DNA, 17 bp, Arabidopsis thaliana
tcctgcggtatgggata

SEQ ID NO: 140084 - DNA, 17 bp, Arabidopsis thaliana
tcctgcggtgtgcgtta

SEQ ID NO: 140085 - DNA, 17 bp, Arabidopsis thaliana
tcctgcgttgcctactt

SEQ ID NO: 140086 - DNA, 17 bp, Arabidopsis thaliana
tcctgctaagttgcggt

SEQ ID NO: 140087 - DNA, 17 bp, Arabidopsis thaliana
tcctgctggaaatactc

SEQ ID NO: 140088 - DNA, 17 bp, Arabidopsis thaliana
tcctgcttggtttctcg

SEQ ID NO: 140089 - DNA, 17 bp, Arabidopsis thaliana
tcctgctttgcaagaaa

SEQ ID NO: 140090 - DNA, 17 bp, Arabidopsis thaliana
tcctgctttttcgcctc

SEQ ID NO: 140091 - DNA, 17 bp, Arabidopsis thaliana
tcctggaactgactgct

SEQ ID NO: 140092 - DNA, 17 bp, Arabidopsis thaliana
tcctggactgtgtttcc

SEQ ID NO: 140093 - DNA, 17 bp, Arabidopsis thaliana
tcctggagttcgacttc

SEQ ID NO: 140094 - DNA, 17 bp, Arabidopsis thaliana
tcctggatgacagattg

SEQ ID NO: 140095 - DNA, 17 bp, Arabidopsis thaliana
tcctggattcttcttcg

SEQ ID NO: 140096 - DNA, 17 bp, Arabidopsis thaliana
tcctggcgaacggctat

SEQ ID NO: 140097 - DNA, 17 bp, Arabidopsis thaliana
tcctggctcaggatgaa

SEQ ID NO: 140098 - DNA, 17 bp, Arabidopsis thaliana
tcctggctcaggatgga

SEQ ID NO: 140099 - DNA, 17 bp, Arabidopsis thaliana
tcctgggaactcagcaa

SEQ ID NO: 140100 - DNA, 17 bp, Arabidopsis thaliana
tcctgggaccgtaggta

SEQ ID NO: 140101 - DNA, 17 bp, Arabidopsis thaliana
tcctgggactagggttg

SEQ ID NO: 140102 - DNA, 17 bp, Arabidopsis thaliana
tcctgggtgaccgatag

SEQ ID NO: 140103 - DNA, 17 bp, Arabidopsis thaliana
tcctggtacttttctgg

SEQ ID NO: 140104 - DNA, 17 bp, Arabidopsis thaliana
tcctggtagggtagttg

SEQ ID NO: 140105 - DNA, 17 bp, Arabidopsis thaliana
tcctggtcctgacatat

SEQ ID NO: 140106 - DNA, 17 bp, Arabidopsis thaliana
tcctggtgagatatgat

SEQ ID NO: 140107 - DNA, 17 bp, Arabidopsis thaliana
tcctggttctggcggtt

SEQ ID NO: 140108 - DNA, 17 bp, Arabidopsis thaliana
tcctgtagatggatcga

SEQ ID NO: 140109 - DNA, 17 bp, Arabidopsis thaliana
tcctgtatgatggcact

SEQ ID NO: 140110 - DNA, 17 bp, Arabidopsis thaliana
tcctgtcaaacccgtcc

SEQ ID NO: 140111 - DNA, 17 bp, Arabidopsis thaliana
tcctgtcacctgttgct

SEQ ID NO: 140112 - DNA, 17 bp, Arabidopsis thaliana
tcctgtcatcgagagct

SEQ ID NO: 140113 - DNA, 17 bp, Arabidopsis thaliana
tcctgtccactttgctt

SEQ ID NO: 140114 - DNA, 17 bp, Arabidopsis thaliana
tcctgtccagtttgctt

SEQ ID NO: 140115 - DNA, 17 bp, Arabidopsis thaliana
tcctgtctgttactcga

SEQ ID NO: 140116 - DNA, 17 bp, Arabidopsis thaliana
tcctgtcttcttgagga

SEQ ID NO: 140117 - DNA, 17 bp, Arabidopsis thaliana
tcctgtgaccggattac

SEQ ID NO: 140118 - DNA, 17 bp, Arabidopsis thaliana
tcctgtgacttttccag

SEQ ID NO: 140119 - DNA, 17 bp, Arabidopsis thaliana
tcctgtgccgatgttga

SEQ ID NO: 140120 - DNA, 17 bp, Arabidopsis thaliana
tcctgtgggctgtcttt

SEQ ID NO: 140121 - DNA, 17 bp, Arabidopsis thaliana
tcctgtgggctgttgtt

SEQ ID NO: 140122 - DNA, 17 bp, Arabidopsis thaliana
tcctgtggtccttgggt

SEQ ID NO: 140123 - DNA, 17 bp, Arabidopsis thaliana
tcctgtgttcgatgact

SEQ ID NO: 140124 - DNA, 17 bp, Arabidopsis thaliana
tcctgttaccggcatat

SEQ ID NO: 140125 - DNA, 17 bp, Arabidopsis thaliana
tcctgttacgcttgtga

SEQ ID NO: 140126 - DNA, 17 bp, Arabidopsis thaliana
tcctgttcagcgcatta

SEQ ID NO: 140127 - DNA, 17 bp, Arabidopsis thaliana
tcctgttctgagcatac

SEQ ID NO: 140128 - DNA, 17 bp, Arabidopsis thaliana
tccttaacagggtctct

SEQ ID NO: 140129 - DNA, 17 bp, Arabidopsis thaliana
tccttacaatctcaaga

SEQ ID NO: 140130 - DNA, 17 bp, Arabidopsis thaliana
tccttacattgcctgaa

SEQ ID NO: 140131 - DNA, 17 bp, Arabidopsis thaliana
tccttacccaggttcga

SEQ ID NO: 140132 - DNA, 17 bp, Arabidopsis thaliana
tccttacccaggtttga

SEQ ID NO: 140133 - DNA, 17 bp, Arabidopsis thaliana
tccttacctctaggaac

SEQ ID NO: 140134 - DNA, 17 bp, Arabidopsis thaliana
tccttactcgatcgttc

SEQ ID NO: 140135 - DNA, 17 bp, Arabidopsis thaliana
tccttagacacggcgcc

SEQ ID NO: 140136 - DNA, 17 bp, Arabidopsis thaliana
tccttagaccttgatgt

SEQ ID NO: 140137 - DNA, 17 bp, Arabidopsis thaliana
tccttagcgacggaccg

SEQ ID NO: 140138 - DNA, 17 bp, Arabidopsis thaliana
tccttagcggatttcga

SEQ ID NO: 140139 - DNA, 17 bp, Arabidopsis thaliana
tccttaggctatgccgc

SEQ ID NO: 140140 - DNA, 17 bp, Arabidopsis thaliana
tccttagtaacggcgag

SEQ ID NO: 140141 - DNA, 17 bp, Arabidopsis thaliana
tccttagtagccgtttg

SEQ ID NO: 140142 - DNA, 17 bp, Arabidopsis thaliana
tccttatcggtcttgct

SEQ ID NO: 140143 - DNA, 17 bp, Arabidopsis thaliana
tccttatctggtgggtt

SEQ ID NO: 140144 - DNA, 17 bp, Arabidopsis thaliana
tccttcaaggcaggtca

SEQ ID NO: 140145 - DNA, 17 bp, Arabidopsis thaliana
tccttcaagtttgcagt

SEQ ID NO: 140146 - DNA, 17 bp, Arabidopsis thaliana
tccttcaccacacactc

SEQ ID NO: 140147 - DNA, 17 bp, Arabidopsis thaliana
tccttcagctgcttgtt

SEQ ID NO: 140148 - DNA, 17 bp, Arabidopsis thaliana
tccttcagggagaagtc

SEQ ID NO: 140149 - DNA, 17 bp, Arabidopsis thaliana
tccttcagtgctgaaca

SEQ ID NO: 140150 - DNA, 17 bp, Arabidopsis thaliana
tccttcagtttgggagg

SEQ ID NO: 140151 - DNA, 17 bp, Arabidopsis thaliana
tccttcatctaagcgtg

SEQ ID NO: 140152 - DNA, 17 bp, Arabidopsis thaliana
tccttcatgtgcgcttg

SEQ ID NO: 140153 - DNA, 17 bp, Arabidopsis thaliana
tccttccaggtgagctt

SEQ ID NO: 140154 - DNA, 17 bp, Arabidopsis thaliana
tccttccatcgtttgca

SEQ ID NO: 140155 - DNA, 17 bp, Arabidopsis thaliana
tccttccatcttctccg

SEQ ID NO: 140156 - DNA, 17 bp, Arabidopsis thaliana
tccttcccggctggtgc

SEQ ID NO: 140157 - DNA, 17 bp, Arabidopsis thaliana
tccttccgctataaccg

SEQ ID NO: 140158 - DNA, 17 bp, Arabidopsis thaliana
tccttcctaaaggtttt

SEQ ID NO: 140159 - DNA, 17 bp, Arabidopsis thaliana
tccttcctgtatggatt

SEQ ID NO: 140160 - DNA, 17 bp, Arabidopsis thaliana
tccttcgactcttatta

SEQ ID NO: 140161 - DNA, 17 bp, Arabidopsis thaliana
tccttcgatgtcagctc

SEQ ID NO: 140162 - DNA, 17 bp, Arabidopsis thaliana
tccttcgatgtcggctc

SEQ ID NO: 140163 - DNA, 17 bp, Arabidopsis thaliana
tccttcgatgtcggctt

SEQ ID NO: 140164 - DNA, 17 bp, Arabidopsis thaliana
tccttcgatgtctgctc

SEQ ID NO: 140165 - DNA, 17 bp, Arabidopsis thaliana
tccttcgccgtcagacg

SEQ ID NO: 140166 - DNA, 17 bp, Arabidopsis thaliana
tccttcggcttgccccc

SEQ ID NO: 140167 - DNA, 17 bp, Arabidopsis thaliana
tccttcggcttgcccct

SEQ ID NO: 140168 - DNA, 17 bp, Arabidopsis thaliana
tccttcgggaaatggtt

SEQ ID NO: 140169 - DNA, 17 bp, Arabidopsis thaliana
tccttcgtcgtattcgt

SEQ ID NO: 140170 - DNA, 17 bp, Arabidopsis thaliana
tccttcgtggatatgac

SEQ ID NO: 140171 - DNA, 17 bp, Arabidopsis thaliana
tccttctagtgcggaaa

SEQ ID NO: 140172 - DNA, 17 bp, Arabidopsis thaliana
tccttctagtgcggaat

SEQ ID NO: 140173 - DNA, 17 bp, Arabidopsis thaliana
tccttctatgtcggctc

SEQ ID NO: 140174 - DNA, 17 bp, Arabidopsis thaliana
tccttctcaaagctttc

SEQ ID NO: 140175 - DNA, 17 bp, Arabidopsis thaliana
tccttctccgtattcag

SEQ ID NO: 140176 - DNA, 17 bp, Arabidopsis thaliana
tccttctctcttgaatc

SEQ ID NO: 140177 - DNA, 17 bp, Arabidopsis thaliana
tccttctctttcggatc

SEQ ID NO: 140178 - DNA, 17 bp, Arabidopsis thaliana
tccttctggatattcgg

SEQ ID NO: 140179 - DNA, 17 bp, Arabidopsis thaliana
tccttctggccatttgg

SEQ ID NO: 140180 - DNA, 17 bp, Arabidopsis thaliana
tccttctggttatgcgt

SEQ ID NO: 140181 - DNA, 17 bp, Arabidopsis thaliana
tccttctggtttgctgc

SEQ ID NO: 140182 - DNA, 17 bp, Arabidopsis thaliana
tccttctggtttttgct

SEQ ID NO: 140183 - DNA, 17 bp, Arabidopsis thaliana
tccttcttatcaaacta

SEQ ID NO: 140184 - DNA, 17 bp, Arabidopsis thaliana
tccttcttatcaaactg

SEQ ID NO: 140185 - DNA, 17 bp, Arabidopsis thaliana
tccttcttccactgagg

SEQ ID NO: 140186 - DNA, 17 bp, Arabidopsis thaliana
tccttcttcttgagact

SEQ ID NO: 140187 - DNA, 17 bp, Arabidopsis thaliana
tccttcttgtaggtgac

SEQ ID NO: 140188 - DNA, 17 bp, Arabidopsis thaliana
tccttgaaaccgcttgt

SEQ ID NO: 140189 - DNA, 17 bp, Arabidopsis thaliana
tccttgaacattgcgtc

SEQ ID NO: 140190 - DNA, 17 bp, Arabidopsis thaliana
tccttgaactgacataa

SEQ ID NO: 140191 - DNA, 17 bp, Arabidopsis thaliana
tccttgacgagctagtg

SEQ ID NO: 140192 - DNA, 17 bp, Arabidopsis thaliana
tccttgacggatctata

SEQ ID NO: 140193 - DNA, 17 bp, Arabidopsis thaliana
tccttgacggatgaaat

SEQ ID NO: 140194 - DNA, 17 bp, Arabidopsis thaliana
tccttgactatgccatt

SEQ ID NO: 140195 - DNA, 17 bp, Arabidopsis thaliana
tccttgagatcccagat

SEQ ID NO: 140196 - DNA, 17 bp, Arabidopsis thaliana
tccttgagcagttgatc

SEQ ID NO: 140197 - DNA, 17 bp, Arabidopsis thaliana
tccttgagcatgtttgg

SEQ ID NO: 140198 - DNA, 17 bp, Arabidopsis thaliana
tccttgaggcacttgtc

SEQ ID NO: 140199 - DNA, 17 bp, Arabidopsis thaliana
tccttgatctttgacat

SEQ ID NO: 140200 - DNA, 17 bp, Arabidopsis thaliana
tccttgattttgatctt

SEQ ID NO: 140201 - DNA, 17 bp, Arabidopsis thaliana
tccttgccatgattcca

SEQ ID NO: 140202 - DNA, 17 bp, Arabidopsis thaliana
tccttgcgataggcgat

SEQ ID NO: 140203 - DNA, 17 bp, Arabidopsis thaliana
tccttgcgatgattcca

SEQ ID NO: 140204 - DNA, 17 bp, Arabidopsis thaliana
tccttgcgcagtaagct

SEQ ID NO: 140205 - DNA, 17 bp, Arabidopsis thaliana
tccttgcggataggtct

SEQ ID NO: 140206 - DNA, 17 bp, Arabidopsis thaliana
tccttgcggtgtgtgtg

SEQ ID NO: 140207 - DNA, 17 bp, Arabidopsis thaliana
tccttgcgtctgaaaca

SEQ ID NO: 140208 - DNA, 17 bp, Arabidopsis thaliana
tccttggacaattcgac

SEQ ID NO: 140209 - DNA, 17 bp, Arabidopsis thaliana
tccttggagattttgga

SEQ ID NO: 140210 - DNA, 17 bp, Arabidopsis thaliana
tccttggagtgccggtt

SEQ ID NO: 140211 - DNA, 17 bp, Arabidopsis thaliana
tccttggattctctgga

SEQ ID NO: 140212 - DNA, 17 bp, Arabidopsis thaliana
tccttggatttgttgtt

SEQ ID NO: 140213 - DNA, 17 bp, Arabidopsis thaliana
tccttggcatagacatc

SEQ ID NO: 140214 - DNA, 17 bp, Arabidopsis thaliana
tccttggcgcagcagtg

SEQ ID NO: 140215 - DNA, 17 bp, Arabidopsis thaliana
tccttggctaagtccgt

SEQ ID NO: 140216 - DNA, 17 bp, Arabidopsis thaliana
tccttggctagtgcgct

SEQ ID NO: 140217 - DNA, 17 bp, Arabidopsis thaliana
tccttggctctggcggt

SEQ ID NO: 140218 - DNA, 17 bp, Arabidopsis thaliana
tccttgggattctgaat

SEQ ID NO: 140219 - DNA, 17 bp, Arabidopsis thaliana
tccttggggttgtagga

SEQ ID NO: 140220 - DNA, 17 bp, Arabidopsis thaliana
tccttgggtttggtcat

SEQ ID NO: 140221 - DNA, 17 bp, Arabidopsis thaliana
tccttggtgacatttcc

SEQ ID NO: 140222 - DNA, 17 bp, Arabidopsis thaliana
tccttggttcgtacccg

SEQ ID NO: 140223 - DNA, 17 bp, Arabidopsis thaliana
tccttggttgcagcttg

SEQ ID NO: 140224 - DNA, 17 bp, Arabidopsis thaliana
tccttgtaggatacttg

SEQ ID NO: 140225 - DNA, 17 bp, Arabidopsis thaliana
tccttgtcagaagacct

SEQ ID NO: 140226 - DNA, 17 bp, Arabidopsis thaliana
tccttgtcgcgctgtaa

SEQ ID NO: 140227 - DNA, 17 bp, Arabidopsis thaliana
tccttgtcgctctgtaa

SEQ ID NO: 140228 - DNA, 17 bp, Arabidopsis thaliana
tccttgtgcgtgtttgt

SEQ ID NO: 140229 - DNA, 17 bp, Arabidopsis thaliana
tccttgtgttggcttcg

SEQ ID NO: 140230 - DNA, 17 bp, Arabidopsis thaliana
tccttgttcggctaatc

SEQ ID NO: 140231 - DNA, 17 bp, Arabidopsis thaliana
tcctttaagatccggtt

SEQ ID NO: 140232 - DNA, 17 bp, Arabidopsis thaliana
tcctttacggatgatca

SEQ ID NO: 140233 - DNA, 17 bp, Arabidopsis thaliana
tcctttagcggtgtcct

SEQ ID NO: 140234 - DNA, 17 bp, Arabidopsis thaliana
tcctttaggctttgttt

SEQ ID NO: 140235 - DNA, 17 bp, Arabidopsis thaliana
tcctttattttgtttcg

SEQ ID NO: 140236 - DNA, 17 bp, Arabidopsis thaliana
tcctttcatccgcagtt

SEQ ID NO: 140237 - DNA, 17 bp, Arabidopsis thaliana
tcctttcatctgattct

SEQ ID NO: 140238 - DNA, 17 bp, Arabidopsis thaliana
tcctttcattgcgtcga

SEQ ID NO: 140239 - DNA, 17 bp, Arabidopsis thaliana
tcctttcccagatgtgt

SEQ ID NO: 140240 - DNA, 17 bp, Arabidopsis thaliana
tcctttccccaaggcgt

SEQ ID NO: 140241 - DNA, 17 bp, Arabidopsis thaliana
tcctttccgccaaatgc

SEQ ID NO: 140242 - DNA, 17 bp, Arabidopsis thaliana
tcctttcgatccttatt

SEQ ID NO: 140243 - DNA, 17 bp, Arabidopsis thaliana
tcctttcggaattcgga

SEQ ID NO: 140244 - DNA, 17 bp, Arabidopsis thaliana
tcctttcgtcggagggc

SEQ ID NO: 140245 - DNA, 17 bp, Arabidopsis thaliana
tcctttcgtgaatatct

SEQ ID NO: 140246 - DNA, 17 bp, Arabidopsis thaliana
tcctttcgtgctggttt

SEQ ID NO: 140247 - DNA, 17 bp, Arabidopsis thaliana
tcctttcgttgttgcca

SEQ ID NO: 140248 - DNA, 17 bp, Arabidopsis thaliana
tcctttctacaggtatc

SEQ ID NO: 140249 - DNA, 17 bp, Arabidopsis thaliana
tcctttctcaggcgttg

SEQ ID NO: 140250 - DNA, 17 bp, Arabidopsis thaliana
tcctttctcgcagacga

SEQ ID NO: 140251 - DNA, 17 bp, Arabidopsis thaliana
tcctttctctcttgcca

SEQ ID NO: 140252 - DNA, 17 bp, Arabidopsis thaliana
tcctttcttccgacaac

SEQ ID NO: 140253 - DNA, 17 bp, Arabidopsis thaliana
tcctttgaaaatgctca

SEQ ID NO: 140254 - DNA, 17 bp, Arabidopsis thaliana
tcctttgaccattgctt

SEQ ID NO: 140255 - DNA, 17 bp, Arabidopsis thaliana
tcctttgaccgaaacag

SEQ ID NO: 140256 - DNA, 17 bp, Arabidopsis thaliana
tcctttgacctatttgt

SEQ ID NO: 140257 - DNA, 17 bp, Arabidopsis thaliana
tcctttgacctttttct

SEQ ID NO: 140258 - DNA, 17 bp, Arabidopsis thaliana
tcctttgacggtcctat

SEQ ID NO: 140259 - DNA, 17 bp, Arabidopsis thaliana
tcctttgagaatgagaa

SEQ ID NO: 140260 - DNA, 17 bp, Arabidopsis thaliana
tcctttgatgtggcgaa

SEQ ID NO: 140261 - DNA, 17 bp, Arabidopsis thaliana
tcctttgcacgcgcttt

SEQ ID NO: 140262 - DNA, 17 bp, Arabidopsis thaliana
tcctttgcagacgactt

SEQ ID NO: 140263 - DNA, 17 bp, Arabidopsis thaliana
tcctttggatgtcgtct

SEQ ID NO: 140264 - DNA, 17 bp, Arabidopsis thaliana
tcctttggcagattttg

SEQ ID NO: 140265 - DNA, 17 bp, Arabidopsis thaliana
tcctttggctgtgtatc

SEQ ID NO: 140266 - DNA, 17 bp, Arabidopsis thaliana
tcctttgggagccacta

SEQ ID NO: 140267 - DNA, 17 bp, Arabidopsis thaliana
tcctttggtggataccg

SEQ ID NO: 140268 - DNA, 17 bp, Arabidopsis thaliana
tcctttggtttccattt

SEQ ID NO: 140269 - DNA, 17 bp, Arabidopsis thaliana
tcctttgtatttttcga

SEQ ID NO: 140270 - DNA, 17 bp, Arabidopsis thaliana
tcctttgtcttctttag

SEQ ID NO: 140271 - DNA, 17 bp, Arabidopsis thaliana
tcctttgtgtgctcggg

SEQ ID NO: 140272 - DNA, 17 bp, Arabidopsis thaliana
tcctttgtgttgaccaa

SEQ ID NO: 140273 - DNA, 17 bp, Arabidopsis thaliana
tccttttaaggcactta

SEQ ID NO: 140274 - DNA, 17 bp, Arabidopsis thaliana
tccttttaaggcacttg

SEQ ID NO: 140275 - DNA, 17 bp, Arabidopsis thaliana
tccttttaatcgtcggc

SEQ ID NO: 140276 - DNA, 17 bp, Arabidopsis thaliana
tccttttacggagttga

SEQ ID NO: 140277 - DNA, 17 bp, Arabidopsis thaliana
tccttttccatgcgctt

SEQ ID NO: 140278 - DNA, 17 bp, Arabidopsis thaliana
tccttttcgtgatttgg

SEQ ID NO: 140279 - DNA, 17 bp, Arabidopsis thaliana
tccttttgagacacttc

SEQ ID NO: 140280 - DNA, 17 bp, Arabidopsis thaliana
tccttttgaggcacttg

SEQ ID NO: 140281 - DNA, 17 bp, Arabidopsis thaliana
tccttttgaggcacttt

SEQ ID NO: 140282 - DNA, 17 bp, Arabidopsis thaliana
tccttttgaggcatttt

SEQ ID NO: 140283 - DNA, 17 bp, Arabidopsis thaliana
tccttttgtgctgctgc

SEQ ID NO: 140284 - DNA, 17 bp, Arabidopsis thaliana
tccttttgtgggatggt

SEQ ID NO: 140285 - DNA, 17 bp, Arabidopsis thaliana
tccttttgttgcaggct

SEQ ID NO: 140286 - DNA, 17 bp, Arabidopsis thaliana
tccttttgttggatgaa

SEQ ID NO: 140287 - DNA, 17 bp, Arabidopsis thaliana
tcctttttcatgcgctt

SEQ ID NO: 140288 - DNA, 17 bp, Arabidopsis thaliana
tcctttttccaggtagc

SEQ ID NO: 140289 - DNA, 17 bp, Arabidopsis thaliana
tcctttttcgttggcag

SEQ ID NO: 140290 - DNA, 17 bp, Arabidopsis thaliana
tcctttttcttcgtcgc

SEQ ID NO: 140291 - DNA, 17 bp, Arabidopsis thaliana
tcctttttcttctctgg

SEQ ID NO: 140292 - DNA, 17 bp, Arabidopsis thaliana
tcctttttggaggcttg

SEQ ID NO: 140293 - DNA, 17 bp, Arabidopsis thaliana
tccttttttgcagtcga

SEQ ID NO: 140294 - DNA, 17 bp, Arabidopsis thaliana
tcgaaaaaaggcacatt

SEQ ID NO: 140295 - DNA, 17 bp, Arabidopsis thaliana
tcgaaaacacagctcta

SEQ ID NO: 140296 - DNA, 17 bp, Arabidopsis thaliana
tcgaaaacattaaccga

SEQ ID NO: 140297 - DNA, 17 bp, Arabidopsis thaliana
tcgaaaaccttccaatc

SEQ ID NO: 140298 - DNA, 17 bp, Arabidopsis thaliana
tcgaaaacttgtcttgc

SEQ ID NO: 140299 - DNA, 17 bp, Arabidopsis thaliana
tcgaaaaggtttccgtg

SEQ ID NO: 140300 - DNA, 17 bp, Arabidopsis thaliana
tcgaaaatccgaatgtc

SEQ ID NO: 140301 - DNA, 17 bp, Arabidopsis thaliana
tcgaaaatccggaggac

SEQ ID NO: 140302 - DNA, 17 bp, Arabidopsis thaliana
tcgaaaattcacagtag

SEQ ID NO: 140303 - DNA, 17 bp, Arabidopsis thaliana
tcgaaacaaggtgtggc

SEQ ID NO: 140304 - DNA, 17 bp, Arabidopsis thaliana
tcgaaacaagtgagctt

SEQ ID NO: 140305 - DNA, 17 bp, Arabidopsis thaliana
tcgaaacaccgattttg

SEQ ID NO: 140306 - DNA, 17 bp, Arabidopsis thaliana
tcgaaacagacagtgtg

SEQ ID NO: 140307 - DNA, 17 bp, Arabidopsis thaliana
tcgaaaccctagagtcg

SEQ ID NO: 140308 - DNA, 17 bp, Arabidopsis thaliana
tcgaaaccgattgttca

SEQ ID NO: 140309 - DNA, 17 bp, Arabidopsis thaliana
tcgaaacctgcatgggc

SEQ ID NO: 140310 - DNA, 17 bp, Arabidopsis thaliana
tcgaaacctgctctgat

SEQ ID NO: 140311 - DNA, 17 bp, Arabidopsis thaliana
tcgaaacctggctcgaa

SEQ ID NO: 140312 - DNA, 17 bp, Arabidopsis thaliana
tcgaaacctggctctga

SEQ ID NO: 140313 - DNA, 17 bp, Arabidopsis thaliana
tcgaaacctggctctgc

SEQ ID NO: 140314 - DNA, 17 bp, Arabidopsis thaliana
tcgaaaccttgttacga

SEQ ID NO: 140315 - DNA, 17 bp, Arabidopsis thaliana
tcgaaacgaggtgtggc

SEQ ID NO: 140316 - DNA, 17 bp, Arabidopsis thaliana
tcgaaacgagtgtccct

SEQ ID NO: 140317 - DNA, 17 bp, Arabidopsis thaliana
tcgaaacgttggtcggt

SEQ ID NO: 140318 - DNA, 17 bp, Arabidopsis thaliana
tcgaaacttgtaatcct

SEQ ID NO: 140319 - DNA, 17 bp, Arabidopsis thaliana
tcgaaagagtcgcagcg

SEQ ID NO: 140320 - DNA, 17 bp, Arabidopsis thaliana
tcgaaagatgtctgcca

SEQ ID NO: 140321 - DNA, 17 bp, Arabidopsis thaliana
tcgaaagcacgggatta

SEQ ID NO: 140322 - DNA, 17 bp, Arabidopsis thaliana
tcgaaagcttcacagcc

SEQ ID NO: 140323 - DNA, 17 bp, Arabidopsis thaliana
tcgaaagtctccccgac

SEQ ID NO: 140324 - DNA, 17 bp, Arabidopsis thaliana
tcgaaagttgagtagga

SEQ ID NO: 140325 - DNA, 17 bp, Arabidopsis thaliana
tcgaaatagccgttctc

SEQ ID NO: 140326 - DNA, 17 bp, Arabidopsis thaliana
tcgaaatccgatttcct

SEQ ID NO: 140327 - DNA, 17 bp, Arabidopsis thaliana
tcgaaatccgctaagga

SEQ ID NO: 140328 - DNA, 17 bp, Arabidopsis thaliana
tcgaaatcgttcttttc

SEQ ID NO: 140329 - DNA, 17 bp, Arabidopsis thaliana
tcgaaatctattaggtt

SEQ ID NO: 140330 - DNA, 17 bp, Arabidopsis thaliana
tcgaaatgaagagagaa

SEQ ID NO: 140331 - DNA, 17 bp, Arabidopsis thaliana
tcgaaatgttttggcgg

SEQ ID NO: 140332 - DNA, 17 bp, Arabidopsis thaliana
tcgaaattacaggtttc

SEQ ID NO: 140333 - DNA, 17 bp, Arabidopsis thaliana
tcgaaattcagcatttg

SEQ ID NO: 140334 - DNA, 17 bp, Arabidopsis thaliana
tcgaaattcatcatttg

SEQ ID NO: 140335 - DNA, 17 bp, Arabidopsis thaliana
tcgaaattcatcttctg

SEQ ID NO: 140336 - DNA, 17 bp, Arabidopsis thaliana
tcgaaattccgggattc

SEQ ID NO: 140337 - DNA, 17 bp, Arabidopsis thaliana
tcgaaattgaattgccg

SEQ ID NO: 140338 - DNA, 17 bp, Arabidopsis thaliana
tcgaaattggagatgtt

SEQ ID NO: 140339 - DNA, 17 bp, Arabidopsis thaliana
tcgaaattttttggcgg

SEQ ID NO: 140340 - DNA, 17 bp, Arabidopsis thaliana
tcgaacaacggtgtacc

SEQ ID NO: 140341 - DNA, 17 bp, Arabidopsis thaliana
tcgaacaattttcttct

SEQ ID NO: 140342 - DNA, 17 bp, Arabidopsis thaliana
tcgaacacaccttctgg

SEQ ID NO: 140343 - DNA, 17 bp, Arabidopsis thaliana
tcgaacactttttcgac

SEQ ID NO: 140344 - DNA, 17 bp, Arabidopsis thaliana
tcgaacaggcgatctct

SEQ ID NO: 140345 - DNA, 17 bp, Arabidopsis thaliana
tcgaacagtttcggtct

SEQ ID NO: 140346 - DNA, 17 bp, Arabidopsis thaliana
tcgaacatctgacctat

SEQ ID NO: 140347 - DNA, 17 bp, Arabidopsis thaliana
tcgaacatgtgatctct

SEQ ID NO: 140348 - DNA, 17 bp, Arabidopsis thaliana
tcgaaccaaagacctct

SEQ ID NO: 140349 - DNA, 17 bp, Arabidopsis thaliana
tcgaaccacacgtgatg

SEQ ID NO: 140350 - DNA, 17 bp, Arabidopsis thaliana
tcgaaccacctagtagc

SEQ ID NO: 140351 - DNA, 17 bp, Arabidopsis thaliana
tcgaaccactgcgcaca

SEQ ID NO: 140352 - DNA, 17 bp, Arabidopsis thaliana
tcgaaccaggccttatt

SEQ ID NO: 140353 - DNA, 17 bp, Arabidopsis thaliana
tcgaaccaggcttcatt

SEQ ID NO: 140354 - DNA, 17 bp, Arabidopsis thaliana
tcgaaccagggccgaat

SEQ ID NO: 140355 - DNA, 17 bp, Arabidopsis thaliana
tcgaaccatctagtagc

SEQ ID NO: 140356 - DNA, 17 bp, Arabidopsis thaliana
tcgaaccccagacctct

SEQ ID NO: 140357 - DNA, 17 bp, Arabidopsis thaliana
tcgaaccccgttgggcc

SEQ ID NO: 140358 - DNA, 17 bp, Arabidopsis thaliana
tcgaacccgggcgaagc

SEQ ID NO: 140359 - DNA, 17 bp, Arabidopsis thaliana
tcgaacccgggcgaagt

SEQ ID NO: 140360 - DNA, 17 bp, Arabidopsis thaliana
tcgaacccgggctcaga

SEQ ID NO: 140361 - DNA, 17 bp, Arabidopsis thaliana
tcgaacccggtagggcc

SEQ ID NO: 140362 - DNA, 17 bp, Arabidopsis thaliana
tcgaacccggttgagcc

SEQ ID NO: 140363 - DNA, 17 bp, Arabidopsis thaliana
tcgaacccggttgggcc

SEQ ID NO: 140364 - DNA, 17 bp, Arabidopsis thaliana
tcgaaccctgctgtcga

SEQ ID NO: 140365 - DNA, 17 bp, Arabidopsis thaliana
tcgaaccctgctgttga

SEQ ID NO: 140366 - DNA, 17 bp, Arabidopsis thaliana
tcgaaccgatgacctct

SEQ ID NO: 140367 - DNA, 17 bp, Arabidopsis thaliana
tcgaaccgcttgaaccg

SEQ ID NO: 140368 - DNA, 17 bp, Arabidopsis thaliana
tcgaaccggacagtgcg

SEQ ID NO: 140369 - DNA, 17 bp, Arabidopsis thaliana
tcgaacctaacacctct

SEQ ID NO: 140370 - DNA, 17 bp, Arabidopsis thaliana
tcgaacctaacagctct

SEQ ID NO: 140371 - DNA, 17 bp, Arabidopsis thaliana
tcgaacctaccacttaa

SEQ ID NO: 140372 - DNA, 17 bp, Arabidopsis thaliana
tcgaacctcgttcctca

SEQ ID NO: 140373 - DNA, 17 bp, Arabidopsis thaliana
tcgaacgaccttcaaca

SEQ ID NO: 140374 - DNA, 17 bp, Arabidopsis thaliana
tcgaacgacgcgtgggt

SEQ ID NO: 140375 - DNA, 17 bp, Arabidopsis thaliana
tcgaacgagattcgttt

SEQ ID NO: 140376 - DNA, 17 bp, Arabidopsis thaliana
tcgaacgataccgtccg

SEQ ID NO: 140377 - DNA, 17 bp, Arabidopsis thaliana
tcgaacgcgaagggtga

SEQ ID NO: 140378 - DNA, 17 bp, Arabidopsis thaliana
tcgaacgctatgttgga

SEQ ID NO: 140379 - DNA, 17 bp, Arabidopsis thaliana
tcgaacggaaacactaa

SEQ ID NO: 140380 - DNA, 17 bp, Arabidopsis thaliana
tcgaacgggaagctcca

SEQ ID NO: 140381 - DNA, 17 bp, Arabidopsis thaliana
tcgaacggtttcagtga

SEQ ID NO: 140382 - DNA, 17 bp, Arabidopsis thaliana
tcgaactacgggtcgtc

SEQ ID NO: 140383 - DNA, 17 bp, Arabidopsis thaliana
tcgaactattgactcag

SEQ ID NO: 140384 - DNA, 17 bp, Arabidopsis thaliana
tcgaactcatctttggt

SEQ ID NO: 140385 - DNA, 17 bp, Arabidopsis thaliana
tcgaactccaggatgag

SEQ ID NO: 140386 - DNA, 17 bp, Arabidopsis thaliana
tcgaactcggaagtcat

SEQ ID NO: 140387 - DNA, 17 bp, Arabidopsis thaliana
tcgaactctctagcagg

SEQ ID NO: 140388 - DNA, 17 bp, Arabidopsis thaliana
tcgaactggatgaccta

SEQ ID NO: 140389 - DNA, 17 bp, Arabidopsis thaliana
tcgaacttatttacaat

SEQ ID NO: 140390 - DNA, 17 bp, Arabidopsis thaliana
tcgaacttgggcgaagc

SEQ ID NO: 140391 - DNA, 17 bp, Arabidopsis thaliana
tcgaagacgacgaccca

SEQ ID NO: 140392 - DNA, 17 bp, Arabidopsis thaliana
tcgaagacgatcagaaa

SEQ ID NO: 140393 - DNA, 17 bp, Arabidopsis thaliana
tcgaagacgatcagata

SEQ ID NO: 140394 - DNA, 17 bp, Arabidopsis thaliana
tcgaagatgtgcgttct

SEQ ID NO: 140395 - DNA, 17 bp, Arabidopsis thaliana
tcgaagattggtctcgt

SEQ ID NO: 140396 - DNA, 17 bp, Arabidopsis thaliana
tcgaagcatttctctag

SEQ ID NO: 140397 - DNA, 17 bp, Arabidopsis thaliana
tcgaagcccaaagacag

SEQ ID NO: 140398 - DNA, 17 bp, Arabidopsis thaliana
tcgaagcgtgtgatatg

SEQ ID NO: 140399 - DNA, 17 bp, Arabidopsis thaliana
tcgaagctgcgtttgac

SEQ ID NO: 140400 - DNA, 17 bp, Arabidopsis thaliana
tcgaaggattcgaaggg

SEQ ID NO: 140401 - DNA, 17 bp, Arabidopsis thaliana
tcgaaggattcgaaggt

SEQ ID NO: 140402 - DNA, 17 bp, Arabidopsis thaliana
tcgaaggccgaagagag

SEQ ID NO: 140403 - DNA, 17 bp, Arabidopsis thaliana
tcgaaggcgaaacctag

SEQ ID NO: 140404 - DNA, 17 bp, Arabidopsis thaliana
tcgaagggggtgttatt

SEQ ID NO: 140405 - DNA, 17 bp, Arabidopsis thaliana
tcgaagtactttcacca

SEQ ID NO: 140406 - DNA, 17 bp, Arabidopsis thaliana
tcgaagtaggcaaaatc

SEQ ID NO: 140407 - DNA, 17 bp, Arabidopsis thaliana
tcgaagtccgaggtgtt

SEQ ID NO: 140408 - DNA, 17 bp, Arabidopsis thaliana
tcgaagtcgaactccag

SEQ ID NO: 140409 - DNA, 17 bp, Arabidopsis thaliana
tcgaagtgactacatcg

SEQ ID NO: 140410 - DNA, 17 bp, Arabidopsis thaliana
tcgaagtgcgatacggt

SEQ ID NO: 140411 - DNA, 17 bp, Arabidopsis thaliana
tcgaagttccaagtcct

SEQ ID NO: 140412 - DNA, 17 bp, Arabidopsis thaliana
tcgaagttttgtggacg

SEQ ID NO: 140413 - DNA, 17 bp, Arabidopsis thaliana
tcgaatacgttatgggc

SEQ ID NO: 140414 - DNA, 17 bp, Arabidopsis thaliana
tcgaatatccgcttcga

SEQ ID NO: 140415 - DNA, 17 bp, Arabidopsis thaliana
tcgaatattaccccacg

SEQ ID NO: 140416 - DNA, 17 bp, Arabidopsis thaliana
tcgaatcactttgtcga

SEQ ID NO: 140417 - DNA, 17 bp, Arabidopsis thaliana
tcgaatcagcacatcta

SEQ ID NO: 140418 - DNA, 17 bp, Arabidopsis thaliana
tcgaatccaagtttgtg

SEQ ID NO: 140419 - DNA, 17 bp, Arabidopsis thaliana
tcgaatccaggtgtcgg

SEQ ID NO: 140420 - DNA, 17 bp, Arabidopsis thaliana
tcgaatccctcctcccc

SEQ ID NO: 140421 - DNA, 17 bp, Arabidopsis thaliana
tcgaatccctcctcgcc

SEQ ID NO: 140422 - DNA, 17 bp, Arabidopsis thaliana
tcgaatccctctctttc

SEQ ID NO: 140423 - DNA, 17 bp, Arabidopsis thaliana
tcgaatccgatccgatg

SEQ ID NO: 140424 - DNA, 17 bp, Arabidopsis thaliana
tcgaatccgccaaggcc

SEQ ID NO: 140425 - DNA, 17 bp, Arabidopsis thaliana
tcgaatccgggtgtcgg

SEQ ID NO: 140426 - DNA, 17 bp, Arabidopsis thaliana
tcgaatccggtagggcc

SEQ ID NO: 140427 - DNA, 17 bp, Arabidopsis thaliana
tcgaatccggttgggct

SEQ ID NO: 140428 - DNA, 17 bp, Arabidopsis thaliana
tcgaatcctacttgggg

SEQ ID NO: 140429 - DNA, 17 bp, Arabidopsis thaliana
tcgaatcctgccgttca

SEQ ID NO: 140430 - DNA, 17 bp, Arabidopsis thaliana
tcgaatcctgctgtcga

SEQ ID NO: 140431 - DNA, 17 bp, Arabidopsis thaliana
tcgaatcctgctgttga

SEQ ID NO: 140432 - DNA, 17 bp, Arabidopsis thaliana
tcgaatcctgtcacctt

SEQ ID NO: 140433 - DNA, 17 bp, Arabidopsis thaliana
tcgaatccttccgtccc

SEQ ID NO: 140434 - DNA, 17 bp, Arabidopsis thaliana
tcgaatccttctgttga

SEQ ID NO: 140435 - DNA, 17 bp, Arabidopsis thaliana
tcgaatccttttactcc

SEQ ID NO: 140436 - DNA, 17 bp, Arabidopsis thaliana
tcgaatcgacgaacagt

SEQ ID NO: 140437 - DNA, 17 bp, Arabidopsis thaliana
tcgaatcgacgaccgaa

SEQ ID NO: 140438 - DNA, 17 bp, Arabidopsis thaliana
tcgaatcgacgacctta

SEQ ID NO: 140439 - DNA, 17 bp, Arabidopsis thaliana
tcgaatcggcgacctct

SEQ ID NO: 140440 - DNA, 17 bp, Arabidopsis thaliana
tcgaatctcccaggtgt

SEQ ID NO: 140441 - DNA, 17 bp, Arabidopsis thaliana
tcgaatctctcaggcga

SEQ ID NO: 140442 - DNA, 17 bp, Arabidopsis thaliana
tcgaatctctcaggtgt

SEQ ID NO: 140443 - DNA, 17 bp, Arabidopsis thaliana
tcgaatctcttgcgttt

SEQ ID NO: 140444 - DNA, 17 bp, Arabidopsis thaliana
tcgaatctgccggtgtc

SEQ ID NO: 140445 - DNA, 17 bp, Arabidopsis thaliana
tcgaatcttggtcatca

SEQ ID NO: 140446 - DNA, 17 bp, Arabidopsis thaliana
tcgaatctttggatctt

SEQ ID NO: 140447 - DNA, 17 bp, Arabidopsis thaliana
tcgaatctttgggtctt

SEQ ID NO: 140448 - DNA, 17 bp, Arabidopsis thaliana
tcgaatctttggttctt

SEQ ID NO: 140449 - DNA, 17 bp, Arabidopsis thaliana
tcgaatgacctgcattc

SEQ ID NO: 140450 - DNA, 17 bp, Arabidopsis thaliana
tcgaatgacgaggccgt

SEQ ID NO: 140451 - DNA, 17 bp, Arabidopsis thaliana
tcgaatgatacggctca

SEQ ID NO: 140452 - DNA, 17 bp, Arabidopsis thaliana
tcgaatgctacatggtt

SEQ ID NO: 140453 - DNA, 17 bp, Arabidopsis thaliana
tcgaatggagtttgcac

SEQ ID NO: 140454 - DNA, 17 bp, Arabidopsis thaliana
tcgaatggagtttgcag

SEQ ID NO: 140455 - DNA, 17 bp, Arabidopsis thaliana
tcgaatgggttgcttca

SEQ ID NO: 140456 - DNA, 17 bp, Arabidopsis thaliana
tcgaatggttacggcga

SEQ ID NO: 140457 - DNA, 17 bp, Arabidopsis thaliana
tcgaattttttgcgcca

SEQ ID NO: 140458 - DNA, 17 bp, Arabidopsis thaliana
tcgacaaactgttcctc

SEQ ID NO: 140459 - DNA, 17 bp, Arabidopsis thaliana
tcgacaaagcagaacag

SEQ ID NO: 140460 - DNA, 17 bp, Arabidopsis thaliana
tcgacaaagtcttctcg

SEQ ID NO: 140461 - DNA, 17 bp, Arabidopsis thaliana
tcgacaaagtgggctgg

SEQ ID NO: 140462 - DNA, 17 bp, Arabidopsis thaliana
tcgacaaatcctcggac

SEQ ID NO: 140463 - DNA, 17 bp, Arabidopsis thaliana
tcgacaacacgaatccg

SEQ ID NO: 140464 - DNA, 17 bp, Arabidopsis thaliana
tcgacaactcggctagg

SEQ ID NO: 140465 - DNA, 17 bp, Arabidopsis thaliana
tcgacaacttttagacc

SEQ ID NO: 140466 - DNA, 17 bp, Arabidopsis thaliana
tcgacaagattgcagcg

SEQ ID NO: 140467 - DNA, 17 bp, Arabidopsis thaliana
tcgacaagattgtgtac

SEQ ID NO: 140468 - DNA, 17 bp, Arabidopsis thaliana
tcgacaagcggcgacct

SEQ ID NO: 140469 - DNA, 17 bp, Arabidopsis thaliana
tcgacaagttcgggtcc

SEQ ID NO: 140470 - DNA, 17 bp, Arabidopsis thaliana
tcgacaatcactttccg

SEQ ID NO: 140471 - DNA, 17 bp, Arabidopsis thaliana
tcgacaatgatccttcc

SEQ ID NO: 140472 - DNA, 17 bp, Arabidopsis thaliana
tcgacacaggtggtgca

SEQ ID NO: 140473 - DNA, 17 bp, Arabidopsis thaliana
tcgacaccggtttcatc

SEQ ID NO: 140474 - DNA, 17 bp, Arabidopsis thaliana
tcgacaccgtcgcattg

SEQ ID NO: 140475 - DNA, 17 bp, Arabidopsis thaliana
tcgacaccgtcgtattg

SEQ ID NO: 140476 - DNA, 17 bp, Arabidopsis thaliana
tcgacacctgttggaaa

SEQ ID NO: 140477 - DNA, 17 bp, Arabidopsis thaliana
tcgacacgtcagcatgg

SEQ ID NO: 140478 - DNA, 17 bp, Arabidopsis thaliana
tcgacaggcggtcagca

SEQ ID NO: 140479 - DNA, 17 bp, Arabidopsis thaliana
tcgacaggtttgggcat

SEQ ID NO: 140480 - DNA, 17 bp, Arabidopsis thaliana
tcgacagtttggccgag

SEQ ID NO: 140481 - DNA, 17 bp, Arabidopsis thaliana
tcgacagttttcaattg

SEQ ID NO: 140482 - DNA, 17 bp, Arabidopsis thaliana
tcgacatcaacgagatg

SEQ ID NO: 140483 - DNA, 17 bp, Arabidopsis thaliana
tcgacatcgagggtcgg

SEQ ID NO: 140484 - DNA, 17 bp, Arabidopsis thaliana
tcgacatctatacggca

SEQ ID NO: 140485 - DNA, 17 bp, Arabidopsis thaliana
tcgacatctctccattg

SEQ ID NO: 140486 - DNA, 17 bp, Arabidopsis thaliana
tcgacatctcttttcat

SEQ ID NO: 140487 - DNA, 17 bp, Arabidopsis thaliana
tcgacatctttacggca

SEQ ID NO: 140488 - DNA, 17 bp, Arabidopsis thaliana
tcgacatctttttgcac

SEQ ID NO: 140489 - DNA, 17 bp, Arabidopsis thaliana
tcgacatgccatgggat

SEQ ID NO: 140490 - DNA, 17 bp, Arabidopsis thaliana
tcgacatgggaacccgg

SEQ ID NO: 140491 - DNA, 17 bp, Arabidopsis thaliana
tcgacattgaccagtgt

SEQ ID NO: 140492 - DNA, 17 bp, Arabidopsis thaliana
tcgacatttccgtcctt

SEQ ID NO: 140493 - DNA, 17 bp, Arabidopsis thaliana
tcgacattttccatatt

SEQ ID NO: 140494 - DNA, 17 bp, Arabidopsis thaliana
tcgaccaaactcgtcct

SEQ ID NO: 140495 - DNA, 17 bp, Arabidopsis thaliana
tcgaccaacggtgtacc

SEQ ID NO: 140496 - DNA, 17 bp, Arabidopsis thaliana
tcgaccaagcatgcggt

SEQ ID NO: 140497 - DNA, 17 bp, Arabidopsis thaliana
tcgaccaagcggtatca

SEQ ID NO: 140498 - DNA, 17 bp, Arabidopsis thaliana
tcgaccaagggtgacca

SEQ ID NO: 140499 - DNA, 17 bp, Arabidopsis thaliana
tcgaccaaggtgtgaac

SEQ ID NO: 140500 - DNA, 17 bp, Arabidopsis thaliana
tcgaccacccagttgtc

SEQ ID NO: 140501 - DNA, 17 bp, Arabidopsis thaliana
tcgaccacccagttgtt

SEQ ID NO: 140502 - DNA, 17 bp, Arabidopsis thaliana
tcgaccacctttctcgt

SEQ ID NO: 140503 - DNA, 17 bp, Arabidopsis thaliana
tcgaccactccttcgcg

SEQ ID NO: 140504 - DNA, 17 bp, Arabidopsis thaliana
tcgaccacttgtgctta

SEQ ID NO: 140505 - DNA, 17 bp, Arabidopsis thaliana
tcgaccaggagtggaaa

SEQ ID NO: 140506 - DNA, 17 bp, Arabidopsis thaliana
tcgaccaggcttcatcc

SEQ ID NO: 140507 - DNA, 17 bp, Arabidopsis thaliana
tcgaccaggcttcattc

SEQ ID NO: 140508 - DNA, 17 bp, Arabidopsis thaliana
tcgaccagggggtcgag

SEQ ID NO: 140509 - DNA, 17 bp, Arabidopsis thaliana
tcgaccaggtccgagac

SEQ ID NO: 140510 - DNA, 17 bp, Arabidopsis thaliana
tcgaccagtcactcgag

SEQ ID NO: 140511 - DNA, 17 bp, Arabidopsis thaliana
tcgaccagttactcgag

SEQ ID NO: 140512 - DNA, 17 bp, Arabidopsis thaliana
tcgaccagtttggtaga

SEQ ID NO: 140513 - DNA, 17 bp, Arabidopsis thaliana
tcgaccataagtgcttt

SEQ ID NO: 140514 - DNA, 17 bp, Arabidopsis thaliana
tcgaccatatcctactt

SEQ ID NO: 140515 - DNA, 17 bp, Arabidopsis thaliana
tcgaccatcatctcaga

SEQ ID NO: 140516 - DNA, 17 bp, Arabidopsis thaliana
tcgaccatgatcgagga

SEQ ID NO: 140517 - DNA, 17 bp, Arabidopsis thaliana
tcgaccatgatttcagt

SEQ ID NO: 140518 - DNA, 17 bp, Arabidopsis thaliana
tcgacccaaacccgtcc

SEQ ID NO: 140519 - DNA, 17 bp, Arabidopsis thaliana
tcgacccaatgatcgag

SEQ ID NO: 140520 - DNA, 17 bp, Arabidopsis thaliana
tcgacccactggccgag

SEQ ID NO: 140521 - DNA, 17 bp, Arabidopsis thaliana
tcgacccagaatctcct

SEQ ID NO: 140522 - DNA, 17 bp, Arabidopsis thaliana
tcgacccagaatttctt

SEQ ID NO: 140523 - DNA, 17 bp, Arabidopsis thaliana
tcgaccccaggtcaggc

SEQ ID NO: 140524 - DNA, 17 bp, Arabidopsis thaliana
tcgacccccaggtcgag

SEQ ID NO: 140525 - DNA, 17 bp, Arabidopsis thaliana
tcgacccctacctggcg

SEQ ID NO: 140526 - DNA, 17 bp, Arabidopsis thaliana
tcgacccctctctctag

SEQ ID NO: 140527 - DNA, 17 bp, Arabidopsis thaliana
tcgacccctgtataggc

SEQ ID NO: 140528 - DNA, 17 bp, Arabidopsis thaliana
tcgacccgccgaagcga

SEQ ID NO: 140529 - DNA, 17 bp, Arabidopsis thaliana
tcgacccgtccagtgct

SEQ ID NO: 140530 - DNA, 17 bp, Arabidopsis thaliana
tcgacccgtcttgaaac

SEQ ID NO: 140531 - DNA, 17 bp, Arabidopsis thaliana
tcgacccgtcttgtaac

SEQ ID NO: 140532 - DNA, 17 bp, Arabidopsis thaliana
tcgacccgtgcagtgct

SEQ ID NO: 140533 - DNA, 17 bp, Arabidopsis thaliana
tcgacccgttagtctac

SEQ ID NO: 140534 - DNA, 17 bp, Arabidopsis thaliana
tcgaccctaattaggac

SEQ ID NO: 140535 - DNA, 17 bp, Arabidopsis thaliana
tcgaccctctaccctat

SEQ ID NO: 140536 - DNA, 17 bp, Arabidopsis thaliana
tcgacccttcacttggt

SEQ ID NO: 140537 - DNA, 17 bp, Arabidopsis thaliana
tcgaccgacacgtcgac

SEQ ID NO: 140538 - DNA, 17 bp, Arabidopsis thaliana
tcgaccgaccgatcgca

SEQ ID NO: 140539 - DNA, 17 bp, Arabidopsis thaliana
tcgaccgaccgtccggc

SEQ ID NO: 140540 - DNA, 17 bp, Arabidopsis thaliana
tcgaccgaccttcccag

SEQ ID NO: 140541 - DNA, 17 bp, Arabidopsis thaliana
tcgaccgacgcggataa

SEQ ID NO: 140542 - DNA, 17 bp, Arabidopsis thaliana
tcgaccgagacgacaag

SEQ ID NO: 140543 - DNA, 17 bp, Arabidopsis thaliana
tcgaccgagatgacagg

SEQ ID NO: 140544 - DNA, 17 bp, Arabidopsis thaliana
tcgaccgagattacctg

SEQ ID NO: 140545 - DNA, 17 bp, Arabidopsis thaliana
tcgaccgcccattttgc

SEQ ID NO: 140546 - DNA, 17 bp, Arabidopsis thaliana
tcgaccggacactcgat

SEQ ID NO: 140547 - DNA, 17 bp, Arabidopsis thaliana
tcgaccggctcggccca

SEQ ID NO: 140548 - DNA, 17 bp, Arabidopsis thaliana
tcgaccgggtccgagac

SEQ ID NO: 140549 - DNA, 17 bp, Arabidopsis thaliana
tcgaccgggtccgagga

SEQ ID NO: 140550 - DNA, 17 bp, Arabidopsis thaliana
tcgaccggtttactcta

SEQ ID NO: 140551 - DNA, 17 bp, Arabidopsis thaliana
tcgaccgtttgctgacc

SEQ ID NO: 140552 - DNA, 17 bp, Arabidopsis thaliana
tcgacctaaggacttgg

SEQ ID NO: 140553 - DNA, 17 bp, Arabidopsis thaliana
tcgacctcacttagtgc

SEQ ID NO: 140554 - DNA, 17 bp, Arabidopsis thaliana
tcgacctcatcggcttt

SEQ ID NO: 140555 - DNA, 17 bp, Arabidopsis thaliana
tcgacctcattccacta

SEQ ID NO: 140556 - DNA, 17 bp, Arabidopsis thaliana
tcgacctcctcactcga

SEQ ID NO: 140557 - DNA, 17 bp, Arabidopsis thaliana
tcgacctcgtcactcaa

SEQ ID NO: 140558 - DNA, 17 bp, Arabidopsis thaliana
tcgacctctcttcttct

SEQ ID NO: 140559 - DNA, 17 bp, Arabidopsis thaliana
tcgacctgacggcggac

SEQ ID NO: 140560 - DNA, 17 bp, Arabidopsis thaliana
tcgacctggaggaatta

SEQ ID NO: 140561 - DNA, 17 bp, Arabidopsis thaliana
tcgacctgtcactcgac

SEQ ID NO: 140562 - DNA, 17 bp, Arabidopsis thaliana
tcgaccttagctcagtt

SEQ ID NO: 140563 - DNA, 17 bp, Arabidopsis thaliana
tcgaccttgggccgagt

SEQ ID NO: 140564 - DNA, 17 bp, Arabidopsis thaliana
tcgacgaaagaagtttt

SEQ ID NO: 140565 - DNA, 17 bp, Arabidopsis thaliana
tcgacgaacctagatat

SEQ ID NO: 140566 - DNA, 17 bp, Arabidopsis thaliana
tcgacgaagcatgcggt

SEQ ID NO: 140567 - DNA, 17 bp, Arabidopsis thaliana
tcgacgaagccatggtg

SEQ ID NO: 140568 - DNA, 17 bp, Arabidopsis thaliana
tcgacgaatcctcggac

SEQ ID NO: 140569 - DNA, 17 bp, Arabidopsis thaliana
tcgacgaatggcttatg

SEQ ID NO: 140570 - DNA, 17 bp, Arabidopsis thaliana
tcgacgaattatgagcc

SEQ ID NO: 140571 - DNA, 17 bp, Arabidopsis thaliana
tcgacgaattcagttta

SEQ ID NO: 140572 - DNA, 17 bp, Arabidopsis thaliana
tcgacgacgggacaggt

SEQ ID NO: 140573 - DNA, 17 bp, Arabidopsis thaliana
tcgacgacgttttgacg

SEQ ID NO: 140574 - DNA, 17 bp, Arabidopsis thaliana
tcgacgactctcggcaa

SEQ ID NO: 140575 - DNA, 17 bp, Arabidopsis thaliana
tcgacgactttctcatt

SEQ ID NO: 140576 - DNA, 17 bp, Arabidopsis thaliana
tcgacgactttggatga

SEQ ID NO: 140577 - DNA, 17 bp, Arabidopsis thaliana
tcgacgagaatcggtcg

SEQ ID NO: 140578 - DNA, 17 bp, Arabidopsis thaliana
tcgacgagatctttgag

SEQ ID NO: 140579 - DNA, 17 bp, Arabidopsis thaliana
tcgacgagctctacatt

SEQ ID NO: 140580 - DNA, 17 bp, Arabidopsis thaliana
tcgacgagctttggtga

SEQ ID NO: 140581 - DNA, 17 bp, Arabidopsis thaliana
tcgacgaggttgatgat

SEQ ID NO: 140582 - DNA, 17 bp, Arabidopsis thaliana
tcgacgagtttggcagg

SEQ ID NO: 140583 - DNA, 17 bp, Arabidopsis thaliana
tcgacgatactgcccaa

SEQ ID NO: 140584 - DNA, 17 bp, Arabidopsis thaliana
tcgacgatagtgtttta

SEQ ID NO: 140585 - DNA, 17 bp, Arabidopsis thaliana
tcgacgatatctctgac

SEQ ID NO: 140586 - DNA, 17 bp, Arabidopsis thaliana
tcgacgatctctatggt

SEQ ID NO: 140587 - DNA, 17 bp, Arabidopsis thaliana
tcgacgatgttgtggct

SEQ ID NO: 140588 - DNA, 17 bp, Arabidopsis thaliana
tcgacgattcctcggac

SEQ ID NO: 140589 - DNA, 17 bp, Arabidopsis thaliana
tcgacgattcgctagat

SEQ ID NO: 140590 - DNA, 17 bp, Arabidopsis thaliana
tcgacgattctcgatct

SEQ ID NO: 140591 - DNA, 17 bp, Arabidopsis thaliana
tcgacgatttcaacccc

SEQ ID NO: 140592 - DNA, 17 bp, Arabidopsis thaliana
tcgacgatttcaagtcc

SEQ ID NO: 140593 - DNA, 17 bp, Arabidopsis thaliana
tcgacgcacatctctcc

SEQ ID NO: 140594 - DNA, 17 bp, Arabidopsis thaliana
tcgacgcagatgatttt

SEQ ID NO: 140595 - DNA, 17 bp, Arabidopsis thaliana
tcgacgcatggacgagc

SEQ ID NO: 140596 - DNA, 17 bp, Arabidopsis thaliana
tcgacgcatggacgagt

SEQ ID NO: 140597 - DNA, 17 bp, Arabidopsis thaliana
tcgacgccggtaagctg

SEQ ID NO: 140598 - DNA, 17 bp, Arabidopsis thaliana
tcgacgccggtgagctg

SEQ ID NO: 140599 - DNA, 17 bp, Arabidopsis thaliana
tcgacgcggattacggg

SEQ ID NO: 140600 - DNA, 17 bp, Arabidopsis thaliana
tcgacgcggattacggt

SEQ ID NO: 140601 - DNA, 17 bp, Arabidopsis thaliana
tcgacgcgtggacgagc

SEQ ID NO: 140602 - DNA, 17 bp, Arabidopsis thaliana
tcgacgctggagagttt

SEQ ID NO: 140603 - DNA, 17 bp, Arabidopsis thaliana
tcgacgctggtgtagct

SEQ ID NO: 140604 - DNA, 17 bp, Arabidopsis thaliana
tcgacggaagcgtcgtt

SEQ ID NO: 140605 - DNA, 17 bp, Arabidopsis thaliana
tcgacggatcatgttca

SEQ ID NO: 140606 - DNA, 17 bp, Arabidopsis thaliana
tcgacggatctctatag

SEQ ID NO: 140607 - DNA, 17 bp, Arabidopsis thaliana
tcgacggatctctatgg

SEQ ID NO: 140608 - DNA, 17 bp, Arabidopsis thaliana
tcgacggcattacggta

SEQ ID NO: 140609 - DNA, 17 bp, Arabidopsis thaliana
tcgacggcgacacacac

SEQ ID NO: 140610 - DNA, 17 bp, Arabidopsis thaliana
tcgacggcgatatgttg

SEQ ID NO: 140611 - DNA, 17 bp, Arabidopsis thaliana
tcgacggctaaccgcta

SEQ ID NO: 140612 - DNA, 17 bp, Arabidopsis thaliana
tcgacgggaaaattacg

SEQ ID NO: 140613 - DNA, 17 bp, Arabidopsis thaliana
tcgacgggattgtggcg

SEQ ID NO: 140614 - DNA, 17 bp, Arabidopsis thaliana
tcgacgggggcctcggg

SEQ ID NO: 140615 - DNA, 17 bp, Arabidopsis thaliana
tcgacgggtttggcagg

SEQ ID NO: 140616 - DNA, 17 bp, Arabidopsis thaliana
tcgacggtgaacgaggt

SEQ ID NO: 140617 - DNA, 17 bp, Arabidopsis thaliana
tcgacggtgacgacgga

SEQ ID NO: 140618 - DNA, 17 bp, Arabidopsis thaliana
tcgacggtgattttcga

SEQ ID NO: 140619 - DNA, 17 bp, Arabidopsis thaliana
tcgacggttctttcagc

SEQ ID NO: 140620 - DNA, 17 bp, Arabidopsis thaliana
tcgacggttgcaatgat

SEQ ID NO: 140621 - DNA, 17 bp, Arabidopsis thaliana
tcgacggtttcggggtt

SEQ ID NO: 140622 - DNA, 17 bp, Arabidopsis thaliana
tcgactaaatacccgac

SEQ ID NO: 140623 - DNA, 17 bp, Arabidopsis thaliana
tcgactaacattgtcac

SEQ ID NO: 140624 - DNA, 17 bp, Arabidopsis thaliana
tcgactaaggcgagttc

SEQ ID NO: 140625 - DNA, 17 bp, Arabidopsis thaliana
tcgactaagtccttgtc

SEQ ID NO: 140626 - DNA, 17 bp, Arabidopsis thaliana
tcgactaatccggtcag

SEQ ID NO: 140627 - DNA, 17 bp, Arabidopsis thaliana
tcgactaattacaagcc

SEQ ID NO: 140628 - DNA, 17 bp, Arabidopsis thaliana
tcgactaattagttcaa

SEQ ID NO: 140629 - DNA, 17 bp, Arabidopsis thaliana
tcgactagccatgttaa

SEQ ID NO: 140630 - DNA, 17 bp, Arabidopsis thaliana
tcgactaggatatgttg

SEQ ID NO: 140631 - DNA, 17 bp, Arabidopsis thaliana
tcgactagggcacgctt

SEQ ID NO: 140632 - DNA, 17 bp, Arabidopsis thaliana
tcgactaggggtgttat

SEQ ID NO: 140633 - DNA, 17 bp, Arabidopsis thaliana
tcgactagggttttgcc

SEQ ID NO: 140634 - DNA, 17 bp, Arabidopsis thaliana
tcgactagtcggcccac

SEQ ID NO: 140635 - DNA, 17 bp, Arabidopsis thaliana
tcgactatccagtccat

SEQ ID NO: 140636 - DNA, 17 bp, Arabidopsis thaliana
tcgactatctttagcct

SEQ ID NO: 140637 - DNA, 17 bp, Arabidopsis thaliana
tcgactatgttccaggt

SEQ ID NO: 140638 - DNA, 17 bp, Arabidopsis thaliana
tcgactcagttgagaca

SEQ ID NO: 140639 - DNA, 17 bp, Arabidopsis thaliana
tcgactcatcacatcct

SEQ ID NO: 140640 - DNA, 17 bp, Arabidopsis thaliana
tcgactcatggttcata

SEQ ID NO: 140641 - DNA, 17 bp, Arabidopsis thaliana
tcgactcatgtggtcga

SEQ ID NO: 140642 - DNA, 17 bp, Arabidopsis thaliana
tcgactcattcaagcac

SEQ ID NO: 140643 - DNA, 17 bp, Arabidopsis thaliana
tcgactccaaaccgttc

SEQ ID NO: 140644 - DNA, 17 bp, Arabidopsis thaliana
tcgactcccactgtggt

SEQ ID NO: 140645 - DNA, 17 bp, Arabidopsis thaliana
tcgactccgtccttggc

SEQ ID NO: 140646 - DNA, 17 bp, Arabidopsis thaliana
tcgactcctgaatctca

SEQ ID NO: 140647 - DNA, 17 bp, Arabidopsis thaliana
tcgactcgctaaaggcc

SEQ ID NO: 140648 - DNA, 17 bp, Arabidopsis thaliana
tcgactcgctcgtggaa

SEQ ID NO: 140649 - DNA, 17 bp, Arabidopsis thaliana
tcgactcggttatctgc

SEQ ID NO: 140650 - DNA, 17 bp, Arabidopsis thaliana
tcgactcgttcaagcac

SEQ ID NO: 140651 - DNA, 17 bp, Arabidopsis thaliana
tcgactctaccactaat

SEQ ID NO: 140652 - DNA, 17 bp, Arabidopsis thaliana
tcgactctagtccgact

SEQ ID NO: 140653 - DNA, 17 bp, Arabidopsis thaliana
tcgactctcggcaacgg

SEQ ID NO: 140654 - DNA, 17 bp, Arabidopsis thaliana
tcgactctgtttctagc

SEQ ID NO: 140655 - DNA, 17 bp, Arabidopsis thaliana
tcgactcttcgaacttt

SEQ ID NO: 140656 - DNA, 17 bp, Arabidopsis thaliana
tcgactgagattcagcc

SEQ ID NO: 140657 - DNA, 17 bp, Arabidopsis thaliana
tcgactgatccggtcag

SEQ ID NO: 140658 - DNA, 17 bp, Arabidopsis thaliana
tcgactgattagttcaa

SEQ ID NO: 140659 - DNA, 17 bp, Arabidopsis thaliana
tcgactgctctctgcta

SEQ ID NO: 140660 - DNA, 17 bp, Arabidopsis thaliana
tcgactggaccgctgac

SEQ ID NO: 140661 - DNA, 17 bp, Arabidopsis thaliana
tcgactggacgtccatt

SEQ ID NO: 140662 - DNA, 17 bp, Arabidopsis thaliana
tcgactggtgcaggtcg

SEQ ID NO: 140663 - DNA, 17 bp, Arabidopsis thaliana
tcgactgtaattcagcc

SEQ ID NO: 140664 - DNA, 17 bp, Arabidopsis thaliana
tcgactgtaattcggtc

SEQ ID NO: 140665 - DNA, 17 bp, Arabidopsis thaliana
tcgactgtcaattagag

SEQ ID NO: 140666 - DNA, 17 bp, Arabidopsis thaliana
tcgactgtcatactaca

SEQ ID NO: 140667 - DNA, 17 bp, Arabidopsis thaliana
tcgactgtcctgagcat

SEQ ID NO: 140668 - DNA, 17 bp, Arabidopsis thaliana
tcgactgttttgccact

SEQ ID NO: 140669 - DNA, 17 bp, Arabidopsis thaliana
tcgacttaaaccgcaat

SEQ ID NO: 140670 - DNA, 17 bp, Arabidopsis thaliana
tcgacttaaatacgcga

SEQ ID NO: 140671 - DNA, 17 bp, Arabidopsis thaliana
tcgacttaatgtgtgat

SEQ ID NO: 140672 - DNA, 17 bp, Arabidopsis thaliana
tcgacttatcacagctg

SEQ ID NO: 140673 - DNA, 17 bp, Arabidopsis thaliana
tcgacttccactgtggt

SEQ ID NO: 140674 - DNA, 17 bp, Arabidopsis thaliana
tcgacttccatccaatt

SEQ ID NO: 140675 - DNA, 17 bp, Arabidopsis thaliana
tcgacttcccctggggc

SEQ ID NO: 140676 - DNA, 17 bp, Arabidopsis thaliana
tcgacttcccctggggg

SEQ ID NO: 140677 - DNA, 17 bp, Arabidopsis thaliana
tcgacttcccttggggg

SEQ ID NO: 140678 - DNA, 17 bp, Arabidopsis thaliana
tcgacttccgttgttgc

SEQ ID NO: 140679 - DNA, 17 bp, Arabidopsis thaliana
tcgacttcctactcgac

SEQ ID NO: 140680 - DNA, 17 bp, Arabidopsis thaliana
tcgacttcctctggggg

SEQ ID NO: 140681 - DNA, 17 bp, Arabidopsis thaliana
tcgacttcctgggggta

SEQ ID NO: 140682 - DNA, 17 bp, Arabidopsis thaliana
tcgacttcctttggggg

SEQ ID NO: 140683 - DNA, 17 bp, Arabidopsis thaliana
tcgacttcggcaaggag

SEQ ID NO: 140684 - DNA, 17 bp, Arabidopsis thaliana
tcgacttctgcagtagc

SEQ ID NO: 140685 - DNA, 17 bp, Arabidopsis thaliana
tcgacttcttggggctg

SEQ ID NO: 140686 - DNA, 17 bp, Arabidopsis thaliana
tcgacttctttgctcgg

SEQ ID NO: 140687 - DNA, 17 bp, Arabidopsis thaliana
tcgacttgaactttctg

SEQ ID NO: 140688 - DNA, 17 bp, Arabidopsis thaliana
tcgacttgagcttcctg

SEQ ID NO: 140689 - DNA, 17 bp, Arabidopsis thaliana
tcgacttggacagggtc

SEQ ID NO: 140690 - DNA, 17 bp, Arabidopsis thaliana
tcgacttggatagcgtc

SEQ ID NO: 140691 - DNA, 17 bp, Arabidopsis thaliana
tcgacttgtgcagcctc

SEQ ID NO: 140692 - DNA, 17 bp, Arabidopsis thaliana
tcgactttcaggtgaca

SEQ ID NO: 140693 - DNA, 17 bp, Arabidopsis thaliana
tcgactttccgactagc

SEQ ID NO: 140694 - DNA, 17 bp, Arabidopsis thaliana
tcgactttcttttcagg

SEQ ID NO: 140695 - DNA, 17 bp, Arabidopsis thaliana
tcgactttgctccaagc

SEQ ID NO: 140696 - DNA, 17 bp, Arabidopsis thaliana
tcgactttgggccgagt

SEQ ID NO: 140697 - DNA, 17 bp, Arabidopsis thaliana
tcgactttggtgaattg

SEQ ID NO: 140698 - DNA, 17 bp, Arabidopsis thaliana
tcgagaaaaaagtttca

SEQ ID NO: 140699 - DNA, 17 bp, Arabidopsis thaliana
tcgagaaaaagggtgta

SEQ ID NO: 140700 - DNA, 17 bp, Arabidopsis thaliana
tcgagaaacttgagagt

SEQ ID NO: 140701 - DNA, 17 bp, Arabidopsis thaliana
tcgagaagacgagattg

SEQ ID NO: 140702 - DNA, 17 bp, Arabidopsis thaliana
tcgagaagacgagcctg

SEQ ID NO: 140703 - DNA, 17 bp, Arabidopsis thaliana
tcgagaagggctgcgag

SEQ ID NO: 140704 - DNA, 17 bp, Arabidopsis thaliana
tcgagaatcaaccacag

SEQ ID NO: 140705 - DNA, 17 bp, Arabidopsis thaliana
tcgagaatgttggtcat

SEQ ID NO: 140706 - DNA, 17 bp, Arabidopsis thaliana
tcgagacacggcggttc

SEQ ID NO: 140707 - DNA, 17 bp, Arabidopsis thaliana
tcgagacactatcccga

SEQ ID NO: 140708 - DNA, 17 bp, Arabidopsis thaliana
tcgagacccaagatttc

SEQ ID NO: 140709 - DNA, 17 bp, Arabidopsis thaliana
tcgagacgggttgacgg

SEQ ID NO: 140710 - DNA, 17 bp, Arabidopsis thaliana
tcgagacttgacggatc

SEQ ID NO: 140711 - DNA, 17 bp, Arabidopsis thaliana
tcgagagaagtccgctc

SEQ ID NO: 140712 - DNA, 17 bp, Arabidopsis thaliana
tcgagagattacagact

SEQ ID NO: 140713 - DNA, 17 bp, Arabidopsis thaliana
tcgagaggacaccagga

SEQ ID NO: 140714 - DNA, 17 bp, Arabidopsis thaliana
tcgagaggatagggccc

SEQ ID NO: 140715 - DNA, 17 bp, Arabidopsis thaliana
tcgagaggcccatcagg

SEQ ID NO: 140716 - DNA, 17 bp, Arabidopsis thaliana
tcgagagttcgatctat

SEQ ID NO: 140717 - DNA, 17 bp, Arabidopsis thaliana
tcgagagttcgcctctc

SEQ ID NO: 140718 - DNA, 17 bp, Arabidopsis thaliana
tcgagatattatccgcc

SEQ ID NO: 140719 - DNA, 17 bp, Arabidopsis thaliana
tcgagatcaaaaatcac

SEQ ID NO: 140720 - DNA, 17 bp, Arabidopsis thaliana
tcgagatcatactttgg

SEQ ID NO: 140721 - DNA, 17 bp, Arabidopsis thaliana
tcgagatcatccattgt

SEQ ID NO: 140722 - DNA, 17 bp, Arabidopsis thaliana
tcgagatccattgctcg

SEQ ID NO: 140723 - DNA, 17 bp, Arabidopsis thaliana
tcgagatctctgcgagt

SEQ ID NO: 140724 - DNA, 17 bp, Arabidopsis thaliana
tcgagatctgatgggcc

SEQ ID NO: 140725 - DNA, 17 bp, Arabidopsis thaliana
tcgagatctttgagacg

SEQ ID NO: 140726 - DNA, 17 bp, Arabidopsis thaliana
tcgagatgagctctgcg

SEQ ID NO: 140727 - DNA, 17 bp, Arabidopsis thaliana
tcgagattaaacgatgg

SEQ ID NO: 140728 - DNA, 17 bp, Arabidopsis thaliana
tcgagattagtcaggtt

SEQ ID NO: 140729 - DNA, 17 bp, Arabidopsis thaliana
tcgagattcttcggaca

SEQ ID NO: 140730 - DNA, 17 bp, Arabidopsis thaliana
tcgagattgatggaatc

SEQ ID NO: 140731 - DNA, 17 bp, Arabidopsis thaliana
tcgagattgctcgtcaa

SEQ ID NO: 140732 - DNA, 17 bp, Arabidopsis thaliana
tcgagatttcgcggtcc

SEQ ID NO: 140733 - DNA, 17 bp, Arabidopsis thaliana
tcgagatttctcaattc

SEQ ID NO: 140734 - DNA, 17 bp, Arabidopsis thaliana
tcgagatttgggctcta

SEQ ID NO: 140735 - DNA, 17 bp, Arabidopsis thaliana
tcgagattttgtccgtt

SEQ ID NO: 140736 - DNA, 17 bp, Arabidopsis thaliana
tcgagattttgtcgttg

SEQ ID NO: 140737 - DNA, 17 bp, Arabidopsis thaliana
tcgagcaaatggagaga

SEQ ID NO: 140738 - DNA, 17 bp, Arabidopsis thaliana
tcgagcaagatgacgat

SEQ ID NO: 140739 - DNA, 17 bp, Arabidopsis thaliana
tcgagcaatcaagttgg

SEQ ID NO: 140740 - DNA, 17 bp, Arabidopsis thaliana
tcgagcaatttcaggat

SEQ ID NO: 140741 - DNA, 17 bp, Arabidopsis thaliana
tcgagcaccgaatcgaa

SEQ ID NO: 140742 - DNA, 17 bp, Arabidopsis thaliana
tcgagcagccactcgac

SEQ ID NO: 140743 - DNA, 17 bp, Arabidopsis thaliana
tcgagcagggacgaaag

SEQ ID NO: 140744 - DNA, 17 bp, Arabidopsis thaliana
tcgagcattttcgtgat

SEQ ID NO: 140745 - DNA, 17 bp, Arabidopsis thaliana
tcgagccagacaacagt

SEQ ID NO: 140746 - DNA, 17 bp, Arabidopsis thaliana
tcgagccccgccggaag

SEQ ID NO: 140747 - DNA, 17 bp, Arabidopsis thaliana
tcgagccccgccgggac

SEQ ID NO: 140748 - DNA, 17 bp, Arabidopsis thaliana
tcgagccccgtcagtcc

SEQ ID NO: 140749 - DNA, 17 bp, Arabidopsis thaliana
tcgagccgacccgagcc

SEQ ID NO: 140750 - DNA, 17 bp, Arabidopsis thaliana
tcgagcgaccgatcgca

SEQ ID NO: 140751 - DNA, 17 bp, Arabidopsis thaliana
tcgagcgactcctctcc

SEQ ID NO: 140752 - DNA, 17 bp, Arabidopsis thaliana
tcgagcgcaggagcaac

SEQ ID NO: 140753 - DNA, 17 bp, Arabidopsis thaliana
tcgagcgcgggaatgtc

SEQ ID NO: 140754 - DNA, 17 bp, Arabidopsis thaliana
tcgagcggccactcgac

SEQ ID NO: 140755 - DNA, 17 bp, Arabidopsis thaliana
tcgaggaagtccgaaag

SEQ ID NO: 140756 - DNA, 17 bp, Arabidopsis thaliana
tcgaggaatcgacgctt

SEQ ID NO: 140757 - DNA, 17 bp, Arabidopsis thaliana
tcgaggaatcgtcgctt

SEQ ID NO: 140758 - DNA, 17 bp, Arabidopsis thaliana
tcgaggaccttctgaac

SEQ ID NO: 140759 - DNA, 17 bp, Arabidopsis thaliana
tcgaggacgaatctatg

SEQ ID NO: 140760 - DNA, 17 bp, Arabidopsis thaliana
tcgaggacgagcttcat

SEQ ID NO: 140761 - DNA, 17 bp, Arabidopsis thaliana
tcgaggagaagctctgc

SEQ ID NO: 140762 - DNA, 17 bp, Arabidopsis thaliana
tcgaggagataactcga

SEQ ID NO: 140763 - DNA, 17 bp, Arabidopsis thaliana
tcgaggagcctcgataa

SEQ ID NO: 140764 - DNA, 17 bp, Arabidopsis thaliana
tcgaggagctgatgtac

SEQ ID NO: 140765 - DNA, 17 bp, Arabidopsis thaliana
tcgaggagtccgacagg

SEQ ID NO: 140766 - DNA, 17 bp, Arabidopsis thaliana
tcgaggagtctgacatg

SEQ ID NO: 140767 - DNA, 17 bp, Arabidopsis thaliana
tcgaggatctccgagta

SEQ ID NO: 140768 - DNA, 17 bp, Arabidopsis thaliana
tcgaggatgtgtttgag

SEQ ID NO: 140769 - DNA, 17 bp, Arabidopsis thaliana
tcgaggatttggttatg

SEQ ID NO: 140770 - DNA, 17 bp, Arabidopsis thaliana
tcgaggcactctgtcac

SEQ ID NO: 140771 - DNA, 17 bp, Arabidopsis thaliana
tcgaggcagaagtcgcg

SEQ ID NO: 140772 - DNA, 17 bp, Arabidopsis thaliana
tcgaggccaagttttcg

SEQ ID NO: 140773 - DNA, 17 bp, Arabidopsis thaliana
tcgaggcgagaccagtg

SEQ ID NO: 140774 - DNA, 17 bp, Arabidopsis thaliana
tcgaggcgcccgtgact

SEQ ID NO: 140775 - DNA, 17 bp, Arabidopsis thaliana
tcgaggcgctgttagtt

SEQ ID NO: 140776 - DNA, 17 bp, Arabidopsis thaliana
tcgaggcggttactcag

SEQ ID NO: 140777 - DNA, 17 bp, Arabidopsis thaliana
tcgaggcgttagtgtgg

SEQ ID NO: 140778 - DNA, 17 bp, Arabidopsis thaliana
tcgaggctcatcgcttg

SEQ ID NO: 140779 - DNA, 17 bp, Arabidopsis thaliana
tcgaggcttcacttgaa

SEQ ID NO: 140780 - DNA, 17 bp, Arabidopsis thaliana
tcgagggacagaggaaa

SEQ ID NO: 140781 - DNA, 17 bp, Arabidopsis thaliana
tcgagggacctcatttc

SEQ ID NO: 140782 - DNA, 17 bp, Arabidopsis thaliana
tcgagggactctgttaa

SEQ ID NO: 140783 - DNA, 17 bp, Arabidopsis thaliana
tcgagggacttggtgtc

SEQ ID NO: 140784 - DNA, 17 bp, Arabidopsis thaliana
tcgagggagtagactca

SEQ ID NO: 140785 - DNA, 17 bp, Arabidopsis thaliana
tcgagggcacgactgcc

SEQ ID NO: 140786 - DNA, 17 bp, Arabidopsis thaliana
tcgagggcacgtctgcc

SEQ ID NO: 140787 - DNA, 17 bp, Arabidopsis thaliana
tcgagggcctcacttct

SEQ ID NO: 140788 - DNA, 17 bp, Arabidopsis thaliana
tcgaggggtatgcctaa

SEQ ID NO: 140789 - DNA, 17 bp, Arabidopsis thaliana
tcgagggttcgaatccc

SEQ ID NO: 140790 - DNA, 17 bp, Arabidopsis thaliana
tcgaggtagcggacaaa

SEQ ID NO: 140791 - DNA, 17 bp, Arabidopsis thaliana
tcgaggtcatactttgg

SEQ ID NO: 140792 - DNA, 17 bp, Arabidopsis thaliana
tcgaggtcattgttttc

SEQ ID NO: 140793 - DNA, 17 bp, Arabidopsis thaliana
tcgaggtcccgagttcg

SEQ ID NO: 140794 - DNA, 17 bp, Arabidopsis thaliana
tcgaggtgtcgtctgtc

SEQ ID NO: 140795 - DNA, 17 bp, Arabidopsis thaliana
tcgaggtgttgcgcttt

SEQ ID NO: 140796 - DNA, 17 bp, Arabidopsis thaliana
tcgaggttccgacaggc

SEQ ID NO: 140797 - DNA, 17 bp, Arabidopsis thaliana
tcgaggttctggccgaa

SEQ ID NO: 140798 - DNA, 17 bp, Arabidopsis thaliana
tcgagtaacagacagga

SEQ ID NO: 140799 - DNA, 17 bp, Arabidopsis thaliana
tcgagtaacctcagctc

SEQ ID NO: 140800 - DNA, 17 bp, Arabidopsis thaliana
tcgagtagagcagatca

SEQ ID NO: 140801 - DNA, 17 bp, Arabidopsis thaliana
tcgagtagtgcggtgcg

SEQ ID NO: 140802 - DNA, 17 bp, Arabidopsis thaliana
tcgagtatgtcgaccga

SEQ ID NO: 140803 - DNA, 17 bp, Arabidopsis thaliana
tcgagtcagggatgagt

SEQ ID NO: 140804 - DNA, 17 bp, Arabidopsis thaliana
tcgagtcccaactaccg

SEQ ID NO: 140805 - DNA, 17 bp, Arabidopsis thaliana
tcgagtcccaactactg

SEQ ID NO: 140806 - DNA, 17 bp, Arabidopsis thaliana
tcgagtcccaccgggtg

SEQ ID NO: 140807 - DNA, 17 bp, Arabidopsis thaliana
tcgagtcccactgggcg

SEQ ID NO: 140808 - DNA, 17 bp, Arabidopsis thaliana
tcgagtccgagtagcgg

SEQ ID NO: 140809 - DNA, 17 bp, Arabidopsis thaliana
tcgagtccgcttatctc

SEQ ID NO: 140810 - DNA, 17 bp, Arabidopsis thaliana
tcgagtccgtatagccc

SEQ ID NO: 140811 - DNA, 17 bp, Arabidopsis thaliana
tcgagtcctcgtggagc

SEQ ID NO: 140812 - DNA, 17 bp, Arabidopsis thaliana
tcgagtcctctcaccgg

SEQ ID NO: 140813 - DNA, 17 bp, Arabidopsis thaliana
tcgagtcctgctgtcga

SEQ ID NO: 140814 - DNA, 17 bp, Arabidopsis thaliana
tcgagtccttctgcttt

SEQ ID NO: 140815 - DNA, 17 bp, Arabidopsis thaliana
tcgagtctcagctactg

SEQ ID NO: 140816 - DNA, 17 bp, Arabidopsis thaliana
tcgagtctgctggattt

SEQ ID NO: 140817 - DNA, 17 bp, Arabidopsis thaliana
tcgagtctttgaacgca

SEQ ID NO: 140818 - DNA, 17 bp, Arabidopsis thaliana
tcgagtgacgcttgaga

SEQ ID NO: 140819 - DNA, 17 bp, Arabidopsis thaliana
tcgagtgacgcttggga

SEQ ID NO: 140820 - DNA, 17 bp, Arabidopsis thaliana
tcgagtgactggtcgag

SEQ ID NO: 140821 - DNA, 17 bp, Arabidopsis thaliana
tcgagtgactggttgag

SEQ ID NO: 140822 - DNA, 17 bp, Arabidopsis thaliana
tcgagtgagatacgaga

SEQ ID NO: 140823 - DNA, 17 bp, Arabidopsis thaliana
tcgagtgagccgactgt

SEQ ID NO: 140824 - DNA, 17 bp, Arabidopsis thaliana
tcgagtgatacttctga

SEQ ID NO: 140825 - DNA, 17 bp, Arabidopsis thaliana
tcgagtgatagtccagc

SEQ ID NO: 140826 - DNA, 17 bp, Arabidopsis thaliana
tcgagtggcttgggctg

SEQ ID NO: 140827 - DNA, 17 bp, Arabidopsis thaliana
tcgagtggttctgatgg

SEQ ID NO: 140828 - DNA, 17 bp, Arabidopsis thaliana
tcgagtggtttgtcatg

SEQ ID NO: 140829 - DNA, 17 bp, Arabidopsis thaliana
tcgagtgtccgatcact

SEQ ID NO: 140830 - DNA, 17 bp, Arabidopsis thaliana
tcgagtgtgagcatgcc

SEQ ID NO: 140831 - DNA, 17 bp, Arabidopsis thaliana
tcgagtgtgagcatgcg

SEQ ID NO: 140832 - DNA, 17 bp, Arabidopsis thaliana
tcgagttaccactgctt

SEQ ID NO: 140833 - DNA, 17 bp, Arabidopsis thaliana
tcgagttacggaccgtg

SEQ ID NO: 140834 - DNA, 17 bp, Arabidopsis thaliana
tcgagttcaagtctcgg

SEQ ID NO: 140835 - DNA, 17 bp, Arabidopsis thaliana
tcgagttcaggctccga

SEQ ID NO: 140836 - DNA, 17 bp, Arabidopsis thaliana
tcgagttccaactactg

SEQ ID NO: 140837 - DNA, 17 bp, Arabidopsis thaliana
tcgagttccagctatcg

SEQ ID NO: 140838 - DNA, 17 bp, Arabidopsis thaliana
tcgagttccagctattg

SEQ ID NO: 140839 - DNA, 17 bp, Arabidopsis thaliana
tcgagttccctccagtt

SEQ ID NO: 140840 - DNA, 17 bp, Arabidopsis thaliana
tcgagttcggtttctgg

SEQ ID NO: 140841 - DNA, 17 bp, Arabidopsis thaliana
tcgagttcgttcctcgc

SEQ ID NO: 140842 - DNA, 17 bp, Arabidopsis thaliana
tcgagttgagtatgtgc

SEQ ID NO: 140843 - DNA, 17 bp, Arabidopsis thaliana
tcgagtttggcatttcg

SEQ ID NO: 140844 - DNA, 17 bp, Arabidopsis thaliana
tcgagtttgtccgatga

SEQ ID NO: 140845 - DNA, 17 bp, Arabidopsis thaliana
tcgataaacctccgcat

SEQ ID NO: 140846 - DNA, 17 bp, Arabidopsis thaliana
tcgataaacctctacat

SEQ ID NO: 140847 - DNA, 17 bp, Arabidopsis thaliana
tcgataaacctctccat

SEQ ID NO: 140848 - DNA, 17 bp, Arabidopsis thaliana
tcgataaacctctgcat

SEQ ID NO: 140849 - DNA, 17 bp, Arabidopsis thaliana
tcgataaacttctgcat

SEQ ID NO: 140850 - DNA, 17 bp, Arabidopsis thaliana
tcgataacagttgaccc

SEQ ID NO: 140851 - DNA, 17 bp, Arabidopsis thaliana
tcgataactcaacatac

SEQ ID NO: 140852 - DNA, 17 bp, Arabidopsis thaliana
tcgataagattgtggac

SEQ ID NO: 140853 - DNA, 17 bp, Arabidopsis thaliana
tcgataagattgtgtac

SEQ ID NO: 140854 - DNA, 17 bp, Arabidopsis thaliana
tcgataagcacacgcgt

SEQ ID NO: 140855 - DNA, 17 bp, Arabidopsis thaliana
tcgataatctttgatct

SEQ ID NO: 140856 - DNA, 17 bp, Arabidopsis thaliana
tcgataattgcgtctga

SEQ ID NO: 140857 - DNA, 17 bp, Arabidopsis thaliana
tcgatactagtcaacgc

SEQ ID NO: 140858 - DNA, 17 bp, Arabidopsis thaliana
tcgatactgtcagcgct

SEQ ID NO: 140859 - DNA, 17 bp, Arabidopsis thaliana
tcgatagactgattggg

SEQ ID NO: 140860 - DNA, 17 bp, Arabidopsis thaliana
tcgatagactgcgtttt

SEQ ID NO: 140861 - DNA, 17 bp, Arabidopsis thaliana
tcgatagagattctggc

SEQ ID NO: 140862 - DNA, 17 bp, Arabidopsis thaliana
tcgataggaagctaatt

SEQ ID NO: 140863 - DNA, 17 bp, Arabidopsis thaliana
tcgatcaaatgttgaca

SEQ ID NO: 140864 - DNA, 17 bp, Arabidopsis thaliana
tcgatcaacaccagttt

SEQ ID NO: 140865 - DNA, 17 bp, Arabidopsis thaliana
tcgatcaagaatgagtc

SEQ ID NO: 140866 - DNA, 17 bp, Arabidopsis thaliana
tcgatcacagccaacgg

SEQ ID NO: 140867 - DNA, 17 bp, Arabidopsis thaliana
tcgatcacagggtccct

SEQ ID NO: 140868 - DNA, 17 bp, Arabidopsis thaliana
tcgatcacgaatccgag

SEQ ID NO: 140869 - DNA, 17 bp, Arabidopsis thaliana
tcgatcagacaatcaga

SEQ ID NO: 140870 - DNA, 17 bp, Arabidopsis thaliana
tcgatcagatgttgaca

SEQ ID NO: 140871 - DNA, 17 bp, Arabidopsis thaliana
tcgatcagatgttgcca

SEQ ID NO: 140872 - DNA, 17 bp, Arabidopsis thaliana
tcgatcagcagaccgag

SEQ ID NO: 140873 - DNA, 17 bp, Arabidopsis thaliana
tcgatcagccgataggg

SEQ ID NO: 140874 - DNA, 17 bp, Arabidopsis thaliana
tcgatcagcttttgggt

SEQ ID NO: 140875 - DNA, 17 bp, Arabidopsis thaliana
tcgatcagtcgctgctt

SEQ ID NO: 140876 - DNA, 17 bp, Arabidopsis thaliana
tcgatccaaagccgtca

SEQ ID NO: 140877 - DNA, 17 bp, Arabidopsis thaliana
tcgatccacgctcaccg

SEQ ID NO: 140878 - DNA, 17 bp, Arabidopsis thaliana
tcgatccagtatgcgag

SEQ ID NO: 140879 - DNA, 17 bp, Arabidopsis thaliana
tcgatccatcttggggc

SEQ ID NO: 140880 - DNA, 17 bp, Arabidopsis thaliana
tcgatccccacagacgg

SEQ ID NO: 140881 - DNA, 17 bp, Arabidopsis thaliana
tcgatccctgtataggc

SEQ ID NO: 140882 - DNA, 17 bp, Arabidopsis thaliana
tcgatccgcgtagaaat

SEQ ID NO: 140883 - DNA, 17 bp, Arabidopsis thaliana
tcgatccgctaattttt

SEQ ID NO: 140884 - DNA, 17 bp, Arabidopsis thaliana
tcgatccgggcggagga

SEQ ID NO: 140885 - DNA, 17 bp, Arabidopsis thaliana
tcgatccggttgctgtt

SEQ ID NO: 140886 - DNA, 17 bp, Arabidopsis thaliana
tcgatcctattgtgttg

SEQ ID NO: 140887 - DNA, 17 bp, Arabidopsis thaliana
tcgatcctgcgtgtggg

SEQ ID NO: 140888 - DNA, 17 bp, Arabidopsis thaliana
tcgatcctgggcagcac

SEQ ID NO: 140889 - DNA, 17 bp, Arabidopsis thaliana
tcgatcctttggtctct

SEQ ID NO: 140890 - DNA, 17 bp, Arabidopsis thaliana
tcgatcgaaagcacggg

SEQ ID NO: 140891 - DNA, 17 bp, Arabidopsis thaliana
tcgatcgacacactctt

SEQ ID NO: 140892 - DNA, 17 bp, Arabidopsis thaliana
tcgatcgacaccagttg

SEQ ID NO: 140893 - DNA, 17 bp, Arabidopsis thaliana
tcgatcgacaccggttt

SEQ ID NO: 140894 - DNA, 17 bp, Arabidopsis thaliana
tcgatcgacagtccatg

SEQ ID NO: 140895 - DNA, 17 bp, Arabidopsis thaliana
tcgatcgacatgaggtg

SEQ ID NO: 140896 - DNA, 17 bp, Arabidopsis thaliana
tcgatcgacatggggtg

SEQ ID NO: 140897 - DNA, 17 bp, Arabidopsis thaliana
tcgatcgagcaccatct

SEQ ID NO: 140898 - DNA, 17 bp, Arabidopsis thaliana
tcgatcgatccggacgt

SEQ ID NO: 140899 - DNA, 17 bp, Arabidopsis thaliana
tcgatcgattttgtgcg

SEQ ID NO: 140900 - DNA, 17 bp, Arabidopsis thaliana
tcgatcgcaaggcagac

SEQ ID NO: 140901 - DNA, 17 bp, Arabidopsis thaliana
tcgatcgcaaggcagag

SEQ ID NO: 140902 - DNA, 17 bp, Arabidopsis thaliana
tcgatcgcaaggcggaa

SEQ ID NO: 140903 - DNA, 17 bp, Arabidopsis thaliana
tcgatcgcacccgctgg

SEQ ID NO: 140904 - DNA, 17 bp, Arabidopsis thaliana
tcgatcggacggtgaga

SEQ ID NO: 140905 - DNA, 17 bp, Arabidopsis thaliana
tcgatcggacgtcttcg

SEQ ID NO: 140906 - DNA, 17 bp, Arabidopsis thaliana
tcgatcggccgagggca

SEQ ID NO: 140907 - DNA, 17 bp, Arabidopsis thaliana
tcgatcggcgaaaatgc

SEQ ID NO: 140908 - DNA, 17 bp, Arabidopsis thaliana
tcgatcggtgtgcattg

SEQ ID NO: 140909 - DNA, 17 bp, Arabidopsis thaliana
tcgatcggtgttcaagc

SEQ ID NO: 140910 - DNA, 17 bp, Arabidopsis thaliana
tcgatcgtaggtgaacc

SEQ ID NO: 140911 - DNA, 17 bp, Arabidopsis thaliana
tcgatcgtcggctatga

SEQ ID NO: 140912 - DNA, 17 bp, Arabidopsis thaliana
tcgatcgtgtcgtcggt

SEQ ID NO: 140913 - DNA, 17 bp, Arabidopsis thaliana
tcgatcgtgttcggatc

SEQ ID NO: 140914 - DNA, 17 bp, Arabidopsis thaliana
tcgatctacatcgacga

SEQ ID NO: 140915 - DNA, 17 bp, Arabidopsis thaliana
tcgatctaccaatctgc

SEQ ID NO: 140916 - DNA, 17 bp, Arabidopsis thaliana
tcgatctattcatggac

SEQ ID NO: 140917 - DNA, 17 bp, Arabidopsis thaliana
tcgatctattgagtgtt

SEQ ID NO: 140918 - DNA, 17 bp, Arabidopsis thaliana
tcgatctcacgcgctaa

SEQ ID NO: 140919 - DNA, 17 bp, Arabidopsis thaliana
tcgatctcattgggccg

SEQ ID NO: 140920 - DNA, 17 bp, Arabidopsis thaliana
tcgatctcggctcttcg

SEQ ID NO: 140921 - DNA, 17 bp, Arabidopsis thaliana
tcgatctctcctgaacc

SEQ ID NO: 140922 - DNA, 17 bp, Arabidopsis thaliana
tcgatctgaaggtcgcg

SEQ ID NO: 140923 - DNA, 17 bp, Arabidopsis thaliana
tcgatctgcaaccgatc

SEQ ID NO: 140924 - DNA, 17 bp, Arabidopsis thaliana
tcgatctggtattcgac

SEQ ID NO: 140925 - DNA, 17 bp, Arabidopsis thaliana
tcgatctggtggattac

SEQ ID NO: 140926 - DNA, 17 bp, Arabidopsis thaliana
tcgatctgtggctaatt

SEQ ID NO: 140927 - DNA, 17 bp, Arabidopsis thaliana
tcgatctgttaatttca

SEQ ID NO: 140928 - DNA, 17 bp, Arabidopsis thaliana
tcgatctttgttgcgcc

SEQ ID NO: 140929 - DNA, 17 bp, Arabidopsis thaliana
tcgatgaaccgctgcct

SEQ ID NO: 140930 - DNA, 17 bp, Arabidopsis thaliana
tcgatgaacttcaagct

SEQ ID NO: 140931 - DNA, 17 bp, Arabidopsis thaliana
tcgatgaagtctcggac

SEQ ID NO: 140932 - DNA, 17 bp, Arabidopsis thaliana
tcgatgacacgctttag

SEQ ID NO: 140933 - DNA, 17 bp, Arabidopsis thaliana
tcgatgaccaatcgccg

SEQ ID NO: 140934 - DNA, 17 bp, Arabidopsis thaliana
tcgatgaccgtgctcac

SEQ ID NO: 140935 - DNA, 17 bp, Arabidopsis thaliana
tcgatgagattcgggtt

SEQ ID NO: 140936 - DNA, 17 bp, Arabidopsis thaliana
tcgatgagtaggagggc

SEQ ID NO: 140937 - DNA, 17 bp, Arabidopsis thaliana
tcgatgagtaggagggt

SEQ ID NO: 140938 - DNA, 17 bp, Arabidopsis thaliana
tcgatgataagttccgg

SEQ ID NO: 140939 - DNA, 17 bp, Arabidopsis thaliana
tcgatgatggtgtcggc

SEQ ID NO: 140940 - DNA, 17 bp, Arabidopsis thaliana
tcgatgcaaaaattgag

SEQ ID NO: 140941 - DNA, 17 bp, Arabidopsis thaliana
tcgatggcaagcttcag

SEQ ID NO: 140942 - DNA, 17 bp, Arabidopsis thaliana
tcgatggcggaggcgcg

SEQ ID NO: 140943 - DNA, 17 bp, Arabidopsis thaliana
tcgatgggtttggcagg

SEQ ID NO: 140944 - DNA, 17 bp, Arabidopsis thaliana
tcgatggttcacgggat

SEQ ID NO: 140945 - DNA, 17 bp, Arabidopsis thaliana
tcgatggttgatcgttg

SEQ ID NO: 140946 - DNA, 17 bp, Arabidopsis thaliana
tcgatgtagactaaact

SEQ ID NO: 140947 - DNA, 17 bp, Arabidopsis thaliana
tcgatgtccaagcgatt

SEQ ID NO: 140948 - DNA, 17 bp, Arabidopsis thaliana
tcgatgtcggccttcat

SEQ ID NO: 140949 - DNA, 17 bp, Arabidopsis thaliana
tcgatgtcggctcttcc

SEQ ID NO: 140950 - DNA, 17 bp, Arabidopsis thaliana
tcgatgtcggctcttcg

SEQ ID NO: 140951 - DNA, 17 bp, Arabidopsis thaliana
tcgatgtcggcttttcc

SEQ ID NO: 140952 - DNA, 17 bp, Arabidopsis thaliana
tcgatgtcgtccagcgg

SEQ ID NO: 140953 - DNA, 17 bp, Arabidopsis thaliana
tcgatgtgggacctttg

SEQ ID NO: 140954 - DNA, 17 bp, Arabidopsis thaliana
tcgatgtgtaatcctga

SEQ ID NO: 140955 - DNA, 17 bp, Arabidopsis thaliana
tcgatgttagtgtctgg

SEQ ID NO: 140956 - DNA, 17 bp, Arabidopsis thaliana
tcgattaacggtgtacc

SEQ ID NO: 140957 - DNA, 17 bp, Arabidopsis thaliana
tcgattaagacagcaag

SEQ ID NO: 140958 - DNA, 17 bp, Arabidopsis thaliana
tcgattaagacagcagg

SEQ ID NO: 140959 - DNA, 17 bp, Arabidopsis thaliana
tcgattaattttgggtg

SEQ ID NO: 140960 - DNA, 17 bp, Arabidopsis thaliana
tcgattagatggtgaga

SEQ ID NO: 140961 - DNA, 17 bp, Arabidopsis thaliana
tcgattagtgcccgcaa

SEQ ID NO: 140962 - DNA, 17 bp, Arabidopsis thaliana
tcgattataccggatta

SEQ ID NO: 140963 - DNA, 17 bp, Arabidopsis thaliana
tcgattatccggaattt

SEQ ID NO: 140964 - DNA, 17 bp, Arabidopsis thaliana
tcgattatcctacatgg

SEQ ID NO: 140965 - DNA, 17 bp, Arabidopsis thaliana
tcgattatctcaggaat

SEQ ID NO: 140966 - DNA, 17 bp, Arabidopsis thaliana
tcgattatggcagcggt

SEQ ID NO: 140967 - DNA, 17 bp, Arabidopsis thaliana
tcgattatgtcaccgtc

SEQ ID NO: 140968 - DNA, 17 bp, Arabidopsis thaliana
tcgattcaccagaaccg

SEQ ID NO: 140969 - DNA, 17 bp, Arabidopsis thaliana
tcgattcacggccaaca

SEQ ID NO: 140970 - DNA, 17 bp, Arabidopsis thaliana
tcgattcaggacattct

SEQ ID NO: 140971 - DNA, 17 bp, Arabidopsis thaliana
tcgattccactaagtcg

SEQ ID NO: 140972 - DNA, 17 bp, Arabidopsis thaliana
tcgattccccgcacctc

SEQ ID NO: 140973 - DNA, 17 bp, Arabidopsis thaliana
tcgattcccgctacccg

SEQ ID NO: 140974 - DNA, 17 bp, Arabidopsis thaliana
tcgattcccgctatccg

SEQ ID NO: 140975 - DNA, 17 bp, Arabidopsis thaliana
tcgattcccgctctccc

SEQ ID NO: 140976 - DNA, 17 bp, Arabidopsis thaliana
tcgattcccggctggtg

SEQ ID NO: 140977 - DNA, 17 bp, Arabidopsis thaliana
tcgattccctcgacttt

SEQ ID NO: 140978 - DNA, 17 bp, Arabidopsis thaliana
tcgattccgatagccgg

SEQ ID NO: 140979 - DNA, 17 bp, Arabidopsis thaliana
tcgattccggagaggga

SEQ ID NO: 140980 - DNA, 17 bp, Arabidopsis thaliana
tcgattccggcaggtcg

SEQ ID NO: 140981 - DNA, 17 bp, Arabidopsis thaliana
tcgattccgttaagttg

SEQ ID NO: 140982 - DNA, 17 bp, Arabidopsis thaliana
tcgattccttagcttct

SEQ ID NO: 140983 - DNA, 17 bp, Arabidopsis thaliana
tcgattcggctaaactt

SEQ ID NO: 140984 - DNA, 17 bp, Arabidopsis thaliana
tcgattcggggcgattt

SEQ ID NO: 140985 - DNA, 17 bp, Arabidopsis thaliana
tcgattcggggcgtgga

SEQ ID NO: 140986 - DNA, 17 bp, Arabidopsis thaliana
tcgattcggttttggtt

SEQ ID NO: 140987 - DNA, 17 bp, Arabidopsis thaliana
tcgattctatggaacta

SEQ ID NO: 140988 - DNA, 17 bp, Arabidopsis thaliana
tcgattctccggctggc

SEQ ID NO: 140989 - DNA, 17 bp, Arabidopsis thaliana
tcgattctgtaaactcc

SEQ ID NO: 140990 - DNA, 17 bp, Arabidopsis thaliana
tcgattcttagcaactg

SEQ ID NO: 140991 - DNA, 17 bp, Arabidopsis thaliana
tcgattgaactgattca

SEQ ID NO: 140992 - DNA, 17 bp, Arabidopsis thaliana
tcgattgaatgatccgg

SEQ ID NO: 140993 - DNA, 17 bp, Arabidopsis thaliana
tcgattgagtttccgcc

SEQ ID NO: 140994 - DNA, 17 bp, Arabidopsis thaliana
tcgattgcgacggtgaa

SEQ ID NO: 140995 - DNA, 17 bp, Arabidopsis thaliana
tcgattgctaggattgc

SEQ ID NO: 140996 - DNA, 17 bp, Arabidopsis thaliana
tcgattgctgtcagagc

SEQ ID NO: 140997 - DNA, 17 bp, Arabidopsis thaliana
tcgattggctttgttgt

SEQ ID NO: 140998 - DNA, 17 bp, Arabidopsis thaliana
tcgattgggtccacgat

SEQ ID NO: 140999 - DNA, 17 bp, Arabidopsis thaliana
tcgattgggtcgacgat

SEQ ID NO: 141000 - DNA, 17 bp, Arabidopsis thaliana
tcgattggtgcaggtcg

SEQ ID NO: 141001 - DNA, 17 bp, Arabidopsis thaliana
tcgattggttaacgcac

SEQ ID NO: 141002 - DNA, 17 bp, Arabidopsis thaliana
tcgatttaaaactggat

SEQ ID NO: 141003 - DNA, 17 bp, Arabidopsis thaliana
tcgatttaccacagctg

SEQ ID NO: 141004 - DNA, 17 bp, Arabidopsis thaliana
tcgatttagtaccgcta

SEQ ID NO: 141005 - DNA, 17 bp, Arabidopsis thaliana
tcgatttatctgactgc

SEQ ID NO: 141006 - DNA, 17 bp, Arabidopsis thaliana
tcgatttcaaccctcct

SEQ ID NO: 141007 - DNA, 17 bp, Arabidopsis thaliana
tcgatttccaaagtcgc

SEQ ID NO: 141008 - DNA, 17 bp, Arabidopsis thaliana
tcgatttcgttatctca

SEQ ID NO: 141009 - DNA, 17 bp, Arabidopsis thaliana
tcgatttctgtaacgcc

SEQ ID NO: 141010 - DNA, 17 bp, Arabidopsis thaliana
tcgatttgatttgggct

SEQ ID NO: 141011 - DNA, 17 bp, Arabidopsis thaliana
tcgatttgcttttgatt

SEQ ID NO: 141012 - DNA, 17 bp, Arabidopsis thaliana
tcgatttggacagcgtc

SEQ ID NO: 141013 - DNA, 17 bp, Arabidopsis thaliana
tcgatttggccggatca

SEQ ID NO: 141014 - DNA, 17 bp, Arabidopsis thaliana
tcgatttggccgggtca

SEQ ID NO: 141015 - DNA, 17 bp, Arabidopsis thaliana
tcgatttggccgtgtca

SEQ ID NO: 141016 - DNA, 17 bp, Arabidopsis thaliana
tcgatttggcgtgatca

SEQ ID NO: 141017 - DNA, 17 bp, Arabidopsis thaliana
tcgatttggctgggtca

SEQ ID NO: 141018 - DNA, 17 bp, Arabidopsis thaliana
tcgatttggggatttag

SEQ ID NO: 141019 - DNA, 17 bp, Arabidopsis thaliana
tcgatttgtgtgaaacg

SEQ ID NO: 141020 - DNA, 17 bp, Arabidopsis thaliana
tcgattttagcaactaa

SEQ ID NO: 141021 - DNA, 17 bp, Arabidopsis thaliana
tcgattttagcaactga

SEQ ID NO: 141022 - DNA, 17 bp, Arabidopsis thaliana
tcgattttcaccggttt

SEQ ID NO: 141023 - DNA, 17 bp, Arabidopsis thaliana
tcgattttcggttcaga

SEQ ID NO: 141024 - DNA, 17 bp, Arabidopsis thaliana
tcgattttctgattaat

SEQ ID NO: 141025 - DNA, 17 bp, Arabidopsis thaliana
tcgattttctgattagt

SEQ ID NO: 141026 - DNA, 17 bp, Arabidopsis thaliana
tcgattttgccactgat

SEQ ID NO: 141027 - DNA, 17 bp, Arabidopsis thaliana
tcgattttgctccaagc

SEQ ID NO: 141028 - DNA, 17 bp, Arabidopsis thaliana
tcgattttgctgttgag

SEQ ID NO: 141029 - DNA, 17 bp, Arabidopsis thaliana
tcgatttttagccgcgg

SEQ ID NO: 141030 - DNA, 17 bp, Arabidopsis thaliana
tcgcaaaacgactgttt

SEQ ID NO: 141031 - DNA, 17 bp, Arabidopsis thaliana
tcgcaaaccccttgact

SEQ ID NO: 141032 - DNA, 17 bp, Arabidopsis thaliana
tcgcaaactttactacg

SEQ ID NO: 141033 - DNA, 17 bp, Arabidopsis thaliana
tcgcaaaggaccaattt

SEQ ID NO: 141034 - DNA, 17 bp, Arabidopsis thaliana
tcgcaaagttttggctg

SEQ ID NO: 141035 - DNA, 17 bp, Arabidopsis thaliana
tcgcaacaaagcccgac

SEQ ID NO: 141036 - DNA, 17 bp, Arabidopsis thaliana
tcgcaaccgtgaagggg

SEQ ID NO: 141037 - DNA, 17 bp, Arabidopsis thaliana
tcgcaacctgtagatgg

SEQ ID NO: 141038 - DNA, 17 bp, Arabidopsis thaliana
tcgcaacttggagatcg

SEQ ID NO: 141039 - DNA, 17 bp, Arabidopsis thaliana
tcgcaactttggccagc

SEQ ID NO: 141040 - DNA, 17 bp, Arabidopsis thaliana
tcgcaagacgattagcc

SEQ ID NO: 141041 - DNA, 17 bp, Arabidopsis thaliana
tcgcaagactgctttca

SEQ ID NO: 141042 - DNA, 17 bp, Arabidopsis thaliana
tcgcaagatcgccgctt

SEQ ID NO: 141043 - DNA, 17 bp, Arabidopsis thaliana
tcgcaagctcccgacgc

SEQ ID NO: 141044 - DNA, 17 bp, Arabidopsis thaliana
tcgcaagctgttctgaa

SEQ ID NO: 141045 - DNA, 17 bp, Arabidopsis thaliana
tcgcaagctgttctgac

SEQ ID NO: 141046 - DNA, 17 bp, Arabidopsis thaliana
tcgcaaggatgacttgc

SEQ ID NO: 141047 - DNA, 17 bp, Arabidopsis thaliana
tcgcaaggcctctactg

SEQ ID NO: 141048 - DNA, 17 bp, Arabidopsis thaliana
tcgcaaggctgaaacaa

SEQ ID NO: 141049 - DNA, 17 bp, Arabidopsis thaliana
tcgcaaggctgaaactt

SEQ ID NO: 141050 - DNA, 17 bp, Arabidopsis thaliana
tcgcaagtcaacttttg

SEQ ID NO: 141051 - DNA, 17 bp, Arabidopsis thaliana
tcgcaagtgttacggag

SEQ ID NO: 141052 - DNA, 17 bp, Arabidopsis thaliana
tcgcaatactagacttc

SEQ ID NO: 141053 - DNA, 17 bp, Arabidopsis thaliana
tcgcaatagttgcttcg

SEQ ID NO: 141054 - DNA, 17 bp, Arabidopsis thaliana
tcgcaatggatggtgat

SEQ ID NO: 141055 - DNA, 17 bp, Arabidopsis thaliana
tcgcaatggctatggat

SEQ ID NO: 141056 - DNA, 17 bp, Arabidopsis thaliana
tcgcaatggtttgttgt

SEQ ID NO: 141057 - DNA, 17 bp, Arabidopsis thaliana
tcgcaattgacgcttca

SEQ ID NO: 141058 - DNA, 17 bp, Arabidopsis thaliana
tcgcaattggatcagta

SEQ ID NO: 141059 - DNA, 17 bp, Arabidopsis thaliana
tcgcacaaagtttcggg

SEQ ID NO: 141060 - DNA, 17 bp, Arabidopsis thaliana
tcgcacaagacagagat

SEQ ID NO: 141061 - DNA, 17 bp, Arabidopsis thaliana
tcgcacaattggtcagc

SEQ ID NO: 141062 - DNA, 17 bp, Arabidopsis thaliana
tcgcacaattggtcatc

SEQ ID NO: 141063 - DNA, 17 bp, Arabidopsis thaliana
tcgcacacagtagtact

SEQ ID NO: 141064 - DNA, 17 bp, Arabidopsis thaliana
tcgcacaggcaatcgct

SEQ ID NO: 141065 - DNA, 17 bp, Arabidopsis thaliana
tcgcacatcttttgcct

SEQ ID NO: 141066 - DNA, 17 bp, Arabidopsis thaliana
tcgcaccaaataccgtt

SEQ ID NO: 141067 - DNA, 17 bp, Arabidopsis thaliana
tcgcaccaacctcgcct

SEQ ID NO: 141068 - DNA, 17 bp, Arabidopsis thaliana
tcgcaccaatcgccata

SEQ ID NO: 141069 - DNA, 17 bp, Arabidopsis thaliana
tcgcaccacgaggcgct

SEQ ID NO: 141070 - DNA, 17 bp, Arabidopsis thaliana
tcgcaccaggcttcatc

SEQ ID NO: 141071 - DNA, 17 bp, Arabidopsis thaliana
tcgcaccaggcttcatt

SEQ ID NO: 141072 - DNA, 17 bp, Arabidopsis thaliana
tcgcaccagtgatccag

SEQ ID NO: 141073 - DNA, 17 bp, Arabidopsis thaliana
tcgcacccgctggttta

SEQ ID NO: 141074 - DNA, 17 bp, Arabidopsis thaliana
tcgcaccctgtaaatgg

SEQ ID NO: 141075 - DNA, 17 bp, Arabidopsis thaliana
tcgcaccctgtagatgg

SEQ ID NO: 141076 - DNA, 17 bp, Arabidopsis thaliana
tcgcacctctaagttca

SEQ ID NO: 141077 - DNA, 17 bp, Arabidopsis thaliana
tcgcacctgctggttta

SEQ ID NO: 141078 - DNA, 17 bp, Arabidopsis thaliana
tcgcacctgtagatgga

SEQ ID NO: 141079 - DNA, 17 bp, Arabidopsis thaliana
tcgcacggcggtctgac

SEQ ID NO: 141080 - DNA, 17 bp, Arabidopsis thaliana
tcgcacggttctgacag

SEQ ID NO: 141081 - DNA, 17 bp, Arabidopsis thaliana
tcgcacgtctgcctggg

SEQ ID NO: 141082 - DNA, 17 bp, Arabidopsis thaliana
tcgcacgtgtgtactcg

SEQ ID NO: 141083 - DNA, 17 bp, Arabidopsis thaliana
tcgcactacttaatccg

SEQ ID NO: 141084 - DNA, 17 bp, Arabidopsis thaliana
tcgcactatgggagctg

SEQ ID NO: 141085 - DNA, 17 bp, Arabidopsis thaliana
tcgcactcgctgattta

SEQ ID NO: 141086 - DNA, 17 bp, Arabidopsis thaliana
tcgcactctgctgggcc

SEQ ID NO: 141087 - DNA, 17 bp, Arabidopsis thaliana
tcgcactgaactgcttc

SEQ ID NO: 141088 - DNA, 17 bp, Arabidopsis thaliana
tcgcactgcaggcttcc

SEQ ID NO: 141089 - DNA, 17 bp, Arabidopsis thaliana
tcgcactgctctatctg

SEQ ID NO: 141090 - DNA, 17 bp, Arabidopsis thaliana
tcgcactgctttaaact

SEQ ID NO: 141091 - DNA, 17 bp, Arabidopsis thaliana
tcgcactggatcacagg

SEQ ID NO: 141092 - DNA, 17 bp, Arabidopsis thaliana
tcgcactgtagatggat

SEQ ID NO: 141093 - DNA, 17 bp, Arabidopsis thaliana
tcgcacttaagctctgg

SEQ ID NO: 141094 - DNA, 17 bp, Arabidopsis thaliana
tcgcacttctatgttcg

SEQ ID NO: 141095 - DNA, 17 bp, Arabidopsis thaliana
tcgcactttgtgagtca

SEQ ID NO: 141096 - DNA, 17 bp, Arabidopsis thaliana
tcgcactttttccacac

SEQ ID NO: 141097 - DNA, 17 bp, Arabidopsis thaliana
tcgcagaaactttcttt

SEQ ID NO: 141098 - DNA, 17 bp, Arabidopsis thaliana
tcgcagaagagatagcg

SEQ ID NO: 141099 - DNA, 17 bp, Arabidopsis thaliana
tcgcagacatcttctca

SEQ ID NO: 141100 - DNA, 17 bp, Arabidopsis thaliana
tcgcagaccgaagtcct

SEQ ID NO: 141101 - DNA, 17 bp, Arabidopsis thaliana
tcgcagaccttgtgttc

SEQ ID NO: 141102 - DNA, 17 bp, Arabidopsis thaliana
tcgcagatctacaaatt

SEQ ID NO: 141103 - DNA, 17 bp, Arabidopsis thaliana
tcgcagatggtccgctg

SEQ ID NO: 141104 - DNA, 17 bp, Arabidopsis thaliana
tcgcagcagtttattgt

SEQ ID NO: 141105 - DNA, 17 bp, Arabidopsis thaliana
tcgcagcctgtagatgg

SEQ ID NO: 141106 - DNA, 17 bp, Arabidopsis thaliana
tcgcagcgactatcacc

SEQ ID NO: 141107 - DNA, 17 bp, Arabidopsis thaliana
tcgcagcgactcaacgg

SEQ ID NO: 141108 - DNA, 17 bp, Arabidopsis thaliana
tcgcagcgactgtcgcc

SEQ ID NO: 141109 - DNA, 17 bp, Arabidopsis thaliana
tcgcagcggaattgaca

SEQ ID NO: 141110 - DNA, 17 bp, Arabidopsis thaliana
tcgcagcggaattggca

SEQ ID NO: 141111 - DNA, 17 bp, Arabidopsis thaliana
tcgcagcgggtgcggtt

SEQ ID NO: 141112 - DNA, 17 bp, Arabidopsis thaliana
tcgcagcgtttgttagt

SEQ ID NO: 141113 - DNA, 17 bp, Arabidopsis thaliana
tcgcagctacaatacta

SEQ ID NO: 141114 - DNA, 17 bp, Arabidopsis thaliana
tcgcagcttcgacacag

SEQ ID NO: 141115 - DNA, 17 bp, Arabidopsis thaliana
tcgcagctttctgattc

SEQ ID NO: 141116 - DNA, 17 bp, Arabidopsis thaliana
tcgcaggacttaacatt

SEQ ID NO: 141117 - DNA, 17 bp, Arabidopsis thaliana
tcgcaggagagatagcg

SEQ ID NO: 141118 - DNA, 17 bp, Arabidopsis thaliana
tcgcaggaggtccgaaa

SEQ ID NO: 141119 - DNA, 17 bp, Arabidopsis thaliana
tcgcaggagtcgagatg

SEQ ID NO: 141120 - DNA, 17 bp, Arabidopsis thaliana
tcgcaggctgaagagta

SEQ ID NO: 141121 - DNA, 17 bp, Arabidopsis thaliana
tcgcaggctgtgtcagc

SEQ ID NO: 141122 - DNA, 17 bp, Arabidopsis thaliana
tcgcagggtgggccgcg

SEQ ID NO: 141123 - DNA, 17 bp, Arabidopsis thaliana
tcgcagggtttgggcgg

SEQ ID NO: 141124 - DNA, 17 bp, Arabidopsis thaliana
tcgcagggtttttggct

SEQ ID NO: 141125 - DNA, 17 bp, Arabidopsis thaliana
tcgcaggtagctgacgc

SEQ ID NO: 141126 - DNA, 17 bp, Arabidopsis thaliana
tcgcaggtcaggcgggc

SEQ ID NO: 141127 - DNA, 17 bp, Arabidopsis thaliana
tcgcagtacgcggattc

SEQ ID NO: 141128 - DNA, 17 bp, Arabidopsis thaliana
tcgcagtagttgggact

SEQ ID NO: 141129 - DNA, 17 bp, Arabidopsis thaliana
tcgcagtctccttggct

SEQ ID NO: 141130 - DNA, 17 bp, Arabidopsis thaliana
tcgcagtcttttgtctg

SEQ ID NO: 141131 - DNA, 17 bp, Arabidopsis thaliana
tcgcagtgagggcattt

SEQ ID NO: 141132 - DNA, 17 bp, Arabidopsis thaliana
tcgcagttacgcgtgct

SEQ ID NO: 141133 - DNA, 17 bp, Arabidopsis thaliana
tcgcagttctattctgg

SEQ ID NO: 141134 - DNA, 17 bp, Arabidopsis thaliana
tcgcagttgcggaatat

SEQ ID NO: 141135 - DNA, 17 bp, Arabidopsis thaliana
tcgcagtttcttctggg

SEQ ID NO: 141136 - DNA, 17 bp, Arabidopsis thaliana
tcgcatatgatttgttg

SEQ ID NO: 141137 - DNA, 17 bp, Arabidopsis thaliana
tcgcatatggacagagt

SEQ ID NO: 141138 - DNA, 17 bp, Arabidopsis thaliana
tcgcatcctgtagaggg

SEQ ID NO: 141139 - DNA, 17 bp, Arabidopsis thaliana
tcgcatcctgtagatgg

SEQ ID NO: 141140 - DNA, 17 bp, Arabidopsis thaliana
tcgcatcctgtaggtgg

SEQ ID NO: 141141 - DNA, 17 bp, Arabidopsis thaliana
tcgcattagccgaagct

SEQ ID NO: 141142 - DNA, 17 bp, Arabidopsis thaliana
tcgcattcctgtagatg

SEQ ID NO: 141143 - DNA, 17 bp, Arabidopsis thaliana
tcgcattctgagatggt

SEQ ID NO: 141144 - DNA, 17 bp, Arabidopsis thaliana
tcgcattctgtagatgg

SEQ ID NO: 141145 - DNA, 17 bp, Arabidopsis thaliana
tcgcattgaataagccg

SEQ ID NO: 141146 - DNA, 17 bp, Arabidopsis thaliana
tcgcattgcacgtctgc

SEQ ID NO: 141147 - DNA, 17 bp, Arabidopsis thaliana
tcgcattgcctctgtgc

SEQ ID NO: 141148 - DNA, 17 bp, Arabidopsis thaliana
tcgcatttcgctacgtt

SEQ ID NO: 141149 - DNA, 17 bp, Arabidopsis thaliana
tcgcatttggagagagt

SEQ ID NO: 141150 - DNA, 17 bp, Arabidopsis thaliana
tcgcattttcgtgattt

SEQ ID NO: 141151 - DNA, 17 bp, Arabidopsis thaliana
tcgccaaaacccgattt

SEQ ID NO: 141152 - DNA, 17 bp, Arabidopsis thaliana
tcgccaaaagattgggg

SEQ ID NO: 141153 - DNA, 17 bp, Arabidopsis thaliana
tcgccaaaccatgtttt

SEQ ID NO: 141154 - DNA, 17 bp, Arabidopsis thaliana
tcgccaacagtaaggaa

SEQ ID NO: 141155 - DNA, 17 bp, Arabidopsis thaliana
tcgccaaccattccgaa

SEQ ID NO: 141156 - DNA, 17 bp, Arabidopsis thaliana
tcgccaactccaagatt

SEQ ID NO: 141157 - DNA, 17 bp, Arabidopsis thaliana
tcgccaactcctgaaat

SEQ ID NO: 141158 - DNA, 17 bp, Arabidopsis thaliana
tcgccaactggtgtaag

SEQ ID NO: 141159 - DNA, 17 bp, Arabidopsis thaliana
tcgccaagaatttgtca

SEQ ID NO: 141160 - DNA, 17 bp, Arabidopsis thaliana
tcgccaagatgacccca

SEQ ID NO: 141161 - DNA, 17 bp, Arabidopsis thaliana
tcgccaaggatgacttg

SEQ ID NO: 141162 - DNA, 17 bp, Arabidopsis thaliana
tcgccaataaccgccca

SEQ ID NO: 141163 - DNA, 17 bp, Arabidopsis thaliana
tcgccacacaaggtgtc

SEQ ID NO: 141164 - DNA, 17 bp, Arabidopsis thaliana
tcgccacctggggctgt

SEQ ID NO: 141165 - DNA, 17 bp, Arabidopsis thaliana
tcgccactcttatttac

SEQ ID NO: 141166 - DNA, 17 bp, Arabidopsis thaliana
tcgccacttgtcttctg

SEQ ID NO: 141167 - DNA, 17 bp, Arabidopsis thaliana
tcgccagagatccagac

SEQ ID NO: 141168 - DNA, 17 bp, Arabidopsis thaliana
tcgccagggtctccccc

SEQ ID NO: 141169 - DNA, 17 bp, Arabidopsis thaliana
tcgccaggtttgggcat

SEQ ID NO: 141170 - DNA, 17 bp, Arabidopsis thaliana
tcgccagtgaaatcttg

SEQ ID NO: 141171 - DNA, 17 bp, Arabidopsis thaliana
tcgccagtgtagcaggt

SEQ ID NO: 141172 - DNA, 17 bp, Arabidopsis thaliana
tcgccagttgacttaac

SEQ ID NO: 141173 - DNA, 17 bp, Arabidopsis thaliana
tcgccagttgacttacc

SEQ ID NO: 141174 - DNA, 17 bp, Arabidopsis thaliana
tcgccatcgcaactgct

SEQ ID NO: 141175 - DNA, 17 bp, Arabidopsis thaliana
tcgccatcgctggagac

SEQ ID NO: 141176 - DNA, 17 bp, Arabidopsis thaliana
tcgccatctattttggt

SEQ ID NO: 141177 - DNA, 17 bp, Arabidopsis thaliana
tcgccatctcttaccgc

SEQ ID NO: 141178 - DNA, 17 bp, Arabidopsis thaliana
tcgccatgtcttcatca

SEQ ID NO: 141179 - DNA, 17 bp, Arabidopsis thaliana
tcgccattatttctgac

SEQ ID NO: 141180 - DNA, 17 bp, Arabidopsis thaliana
tcgccattgtagctgta

SEQ ID NO: 141181 - DNA, 17 bp, Arabidopsis thaliana
tcgccattttcgagatg

SEQ ID NO: 141182 - DNA, 17 bp, Arabidopsis thaliana
tcgcccaaccgacttcc

SEQ ID NO: 141183 - DNA, 17 bp, Arabidopsis thaliana
tcgcccaagccgcttga

SEQ ID NO: 141184 - DNA, 17 bp, Arabidopsis thaliana
tcgcccacttggtgcag

SEQ ID NO: 141185 - DNA, 17 bp, Arabidopsis thaliana
tcgcccataaccgccca

SEQ ID NO: 141186 - DNA, 17 bp, Arabidopsis thaliana
tcgcccatagctcagtg

SEQ ID NO: 141187 - DNA, 17 bp, Arabidopsis thaliana
tcgcccattcatcgtcc

SEQ ID NO: 141188 - DNA, 17 bp, Arabidopsis thaliana
tcgccccagaacctctt

SEQ ID NO: 141189 - DNA, 17 bp, Arabidopsis thaliana
tcgcccccatcgtctag

SEQ ID NO: 141190 - DNA, 17 bp, Arabidopsis thaliana
tcgccccccacccggcc

SEQ ID NO: 141191 - DNA, 17 bp, Arabidopsis thaliana
tcgccccctcgagatga

SEQ ID NO: 141192 - DNA, 17 bp, Arabidopsis thaliana
tcgccccgccagaagca

SEQ ID NO: 141193 - DNA, 17 bp, Arabidopsis thaliana
tcgcccctatgacaagc

SEQ ID NO: 141194 - DNA, 17 bp, Arabidopsis thaliana
tcgcccgagacacctgt

SEQ ID NO: 141195 - DNA, 17 bp, Arabidopsis thaliana
tcgcccgccaagagcaa

SEQ ID NO: 141196 - DNA, 17 bp, Arabidopsis thaliana
tcgcccgcgcaggttcg

SEQ ID NO: 141197 - DNA, 17 bp, Arabidopsis thaliana
tcgcccgtctagctcag

SEQ ID NO: 141198 - DNA, 17 bp, Arabidopsis thaliana
tcgcccgtgatcgtggt

SEQ ID NO: 141199 - DNA, 17 bp, Arabidopsis thaliana
tcgcccgtggtcgagga

SEQ ID NO: 141200 - DNA, 17 bp, Arabidopsis thaliana
tcgccctaaatcgcttc

SEQ ID NO: 141201 - DNA, 17 bp, Arabidopsis thaliana
tcgccctacgctactgg

SEQ ID NO: 141202 - DNA, 17 bp, Arabidopsis thaliana
tcgccctcatcgtctag

SEQ ID NO: 141203 - DNA, 17 bp, Arabidopsis thaliana
tcgccctgtagatggat

SEQ ID NO: 141204 - DNA, 17 bp, Arabidopsis thaliana
tcgcccttaatctactg

SEQ ID NO: 141205 - DNA, 17 bp, Arabidopsis thaliana
tcgcccttgggaagact

SEQ ID NO: 141206 - DNA, 17 bp, Arabidopsis thaliana
tcgccctttgtcgctaa

SEQ ID NO: 141207 - DNA, 17 bp, Arabidopsis thaliana
tcgccgacagaagagac

SEQ ID NO: 141208 - DNA, 17 bp, Arabidopsis thaliana
tcgccgactaatgtttt

SEQ ID NO: 141209 - DNA, 17 bp, Arabidopsis thaliana
tcgccgacttgagtttc

SEQ ID NO: 141210 - DNA, 17 bp, Arabidopsis thaliana
tcgccgagagttcaaga

SEQ ID NO: 141211 - DNA, 17 bp, Arabidopsis thaliana
tcgccgagggcacttct

SEQ ID NO: 141212 - DNA, 17 bp, Arabidopsis thaliana
tcgccgcagatctgttt

SEQ ID NO: 141213 - DNA, 17 bp, Arabidopsis thaliana
tcgccgcgtgccggccg

SEQ ID NO: 141214 - DNA, 17 bp, Arabidopsis thaliana
tcgccgctcaatgagtg

SEQ ID NO: 141215 - DNA, 17 bp, Arabidopsis thaliana
tcgccgctggatggatg

SEQ ID NO: 141216 - DNA, 17 bp, Arabidopsis thaliana
tcgccgctttcaagcac

SEQ ID NO: 141217 - DNA, 17 bp, Arabidopsis thaliana
tcgccggaaatgtgggc

SEQ ID NO: 141218 - DNA, 17 bp, Arabidopsis thaliana
tcgccggaagcttcacc

SEQ ID NO: 141219 - DNA, 17 bp, Arabidopsis thaliana
tcgccggagatacgacc

SEQ ID NO: 141220 - DNA, 17 bp, Arabidopsis thaliana
tcgccggagtgtaacag

SEQ ID NO: 141221 - DNA, 17 bp, Arabidopsis thaliana
tcgccggcgtcgggact

SEQ ID NO: 141222 - DNA, 17 bp, Arabidopsis thaliana
tcgccggtccactcccc

SEQ ID NO: 141223 - DNA, 17 bp, Arabidopsis thaliana
tcgccggttagtgacca

SEQ ID NO: 141224 - DNA, 17 bp, Arabidopsis thaliana
tcgccggttgtaggctg

SEQ ID NO: 141225 - DNA, 17 bp, Arabidopsis thaliana
tcgccgtcctctaggtg

SEQ ID NO: 141226 - DNA, 17 bp, Arabidopsis thaliana
tcgccgtcgaaattgcc

SEQ ID NO: 141227 - DNA, 17 bp, Arabidopsis thaliana
tcgccgtcgtgcccgga

SEQ ID NO: 141228 - DNA, 17 bp, Arabidopsis thaliana
tcgccgttaacagggct

SEQ ID NO: 141229 - DNA, 17 bp, Arabidopsis thaliana
tcgccgttactaaggga

SEQ ID NO: 141230 - DNA, 17 bp, Arabidopsis thaliana
tcgccgttactagtcaa

SEQ ID NO: 141231 - DNA, 17 bp, Arabidopsis thaliana
tcgccgttcgcgctagc

SEQ ID NO: 141232 - DNA, 17 bp, Arabidopsis thaliana
tcgccgttgcgagttcg

SEQ ID NO: 141233 - DNA, 17 bp, Arabidopsis thaliana
tcgccgtttacgaattt

SEQ ID NO: 141234 - DNA, 17 bp, Arabidopsis thaliana
tcgcctaacggcgtgcc

SEQ ID NO: 141235 - DNA, 17 bp, Arabidopsis thaliana
tcgcctaagatttttgt

SEQ ID NO: 141236 - DNA, 17 bp, Arabidopsis thaliana
tcgcctaggattcaatt

SEQ ID NO: 141237 - DNA, 17 bp, Arabidopsis thaliana
tcgcctatggggtcgct

SEQ ID NO: 141238 - DNA, 17 bp, Arabidopsis thaliana
tcgcctattgttggact

SEQ ID NO: 141239 - DNA, 17 bp, Arabidopsis thaliana
tcgcctcagaaccttct

SEQ ID NO: 141240 - DNA, 17 bp, Arabidopsis thaliana
tcgcctcagcggcggtg

SEQ ID NO: 141241 - DNA, 17 bp, Arabidopsis thaliana
tcgcctccacaatttct

SEQ ID NO: 141242 - DNA, 17 bp, Arabidopsis thaliana
tcgcctccacctagtga

SEQ ID NO: 141243 - DNA, 17 bp, Arabidopsis thaliana
tcgcctcgacctattct

SEQ ID NO: 141244 - DNA, 17 bp, Arabidopsis thaliana
tcgcctcgtagccgcat

SEQ ID NO: 141245 - DNA, 17 bp, Arabidopsis thaliana
tcgcctctccggtgact

SEQ ID NO: 141246 - DNA, 17 bp, Arabidopsis thaliana
tcgcctctgggagatgt

SEQ ID NO: 141247 - DNA, 17 bp, Arabidopsis thaliana
tcgcctgaatattgtgt

SEQ ID NO: 141248 - DNA, 17 bp, Arabidopsis thaliana
tcgcctgcaaaatgacg

SEQ ID NO: 141249 - DNA, 17 bp, Arabidopsis thaliana
tcgcctgcatttctgac

SEQ ID NO: 141250 - DNA, 17 bp, Arabidopsis thaliana
tcgcctgccatctatcc

SEQ ID NO: 141251 - DNA, 17 bp, Arabidopsis thaliana
tcgcctgccatctattc

SEQ ID NO: 141252 - DNA, 17 bp, Arabidopsis thaliana
tcgcctggtgcaggtcg

SEQ ID NO: 141253 - DNA, 17 bp, Arabidopsis thaliana
tcgcctgtagatggatc

SEQ ID NO: 141254 - DNA, 17 bp, Arabidopsis thaliana
tcgcctgtgagaaagtt

SEQ ID NO: 141255 - DNA, 17 bp, Arabidopsis thaliana
tcgccttaggggattac

SEQ ID NO: 141256 - DNA, 17 bp, Arabidopsis thaliana
tcgccttatgacaagca

SEQ ID NO: 141257 - DNA, 17 bp, Arabidopsis thaliana
tcgccttcgaggtggat

SEQ ID NO: 141258 - DNA, 17 bp, Arabidopsis thaliana
tcgccttcgatgtcggc

SEQ ID NO: 141259 - DNA, 17 bp, Arabidopsis thaliana
tcgccttcttgggattc

SEQ ID NO: 141260 - DNA, 17 bp, Arabidopsis thaliana
tcgccttgtctattgaa

SEQ ID NO: 141261 - DNA, 17 bp, Arabidopsis thaliana
tcgcctttaggatctgg

SEQ ID NO: 141262 - DNA, 17 bp, Arabidopsis thaliana
tcgcctttgtcgctaag

SEQ ID NO: 141263 - DNA, 17 bp, Arabidopsis thaliana
tcgcgaaaataatactg

SEQ ID NO: 141264 - DNA, 17 bp, Arabidopsis thaliana
tcgcgaaactaagtgat

SEQ ID NO: 141265 - DNA, 17 bp, Arabidopsis thaliana
tcgcgaaatttatgtat

SEQ ID NO: 141266 - DNA, 17 bp, Arabidopsis thaliana
tcgcgaactttccaatt

SEQ ID NO: 141267 - DNA, 17 bp, Arabidopsis thaliana
tcgcgaatggccggctt

SEQ ID NO: 141268 - DNA, 17 bp, Arabidopsis thaliana
tcgcgaattaccggcag

SEQ ID NO: 141269 - DNA, 17 bp, Arabidopsis thaliana
tcgcgaattctcggacc

SEQ ID NO: 141270 - DNA, 17 bp, Arabidopsis thaliana
tcgcgacaaatcctcgg

SEQ ID NO: 141271 - DNA, 17 bp, Arabidopsis thaliana
tcgcgacaagatttgtt

SEQ ID NO: 141272 - DNA, 17 bp, Arabidopsis thaliana
tcgcgacaggagatttg

SEQ ID NO: 141273 - DNA, 17 bp, Arabidopsis thaliana
tcgcgacagtgtgctac

SEQ ID NO: 141274 - DNA, 17 bp, Arabidopsis thaliana
tcgcgaccgaaatggca

SEQ ID NO: 141275 - DNA, 17 bp, Arabidopsis thaliana
tcgcgaccggacttgtt

SEQ ID NO: 141276 - DNA, 17 bp, Arabidopsis thaliana
tcgcgaccttcaatccc

SEQ ID NO: 141277 - DNA, 17 bp, Arabidopsis thaliana
tcgcgacgcggattacg

SEQ ID NO: 141278 - DNA, 17 bp, Arabidopsis thaliana
tcgcgacggatcgcatg

SEQ ID NO: 141279 - DNA, 17 bp, Arabidopsis thaliana
tcgcgacgtcgcgggcg

SEQ ID NO: 141280 - DNA, 17 bp, Arabidopsis thaliana
tcgcgagaagtccacta

SEQ ID NO: 141281 - DNA, 17 bp, Arabidopsis thaliana
tcgcgagggcacgtctg

SEQ ID NO: 141282 - DNA, 17 bp, Arabidopsis thaliana
tcgcgagggcagggtcg

SEQ ID NO: 141283 - DNA, 17 bp, Arabidopsis thaliana
tcgcgagtctgtttata

SEQ ID NO: 141284 - DNA, 17 bp, Arabidopsis thaliana
tcgcgagtctgtttgta

SEQ ID NO: 141285 - DNA, 17 bp, Arabidopsis thaliana
tcgcgataatgcgataa

SEQ ID NO: 141286 - DNA, 17 bp, Arabidopsis thaliana
tcgcgatcactcgtgtg

SEQ ID NO: 141287 - DNA, 17 bp, Arabidopsis thaliana
tcgcgatctttggatgg

SEQ ID NO: 141288 - DNA, 17 bp, Arabidopsis thaliana
tcgcgatgaggcgcgct

SEQ ID NO: 141289 - DNA, 17 bp, Arabidopsis thaliana
tcgcgatggtaagacct

SEQ ID NO: 141290 - DNA, 17 bp, Arabidopsis thaliana
tcgcgatgtcggctctt

SEQ ID NO: 141291 - DNA, 17 bp, Arabidopsis thaliana
tcgcgatgtggtctttc

SEQ ID NO: 141292 - DNA, 17 bp, Arabidopsis thaliana
tcgcgattaacgatttg

SEQ ID NO: 141293 - DNA, 17 bp, Arabidopsis thaliana
tcgcgattcgatgaaaa

SEQ ID NO: 141294 - DNA, 17 bp, Arabidopsis thaliana
tcgcgattcttccccaa

SEQ ID NO: 141295 - DNA, 17 bp, Arabidopsis thaliana
tcgcgcaagtttgccag

SEQ ID NO: 141296 - DNA, 17 bp, Arabidopsis thaliana
tcgcgcatcctgtagat

SEQ ID NO: 141297 - DNA, 17 bp, Arabidopsis thaliana
tcgcgcatttttgtgat

SEQ ID NO: 141298 - DNA, 17 bp, Arabidopsis thaliana
tcgcgccaagctatccg

SEQ ID NO: 141299 - DNA, 17 bp, Arabidopsis thaliana
tcgcgccagagcaagtc

SEQ ID NO: 141300 - DNA, 17 bp, Arabidopsis thaliana
tcgcgccctgtagatgg

SEQ ID NO: 141301 - DNA, 17 bp, Arabidopsis thaliana
tcgcgccgacgtgggtg

SEQ ID NO: 141302 - DNA, 17 bp, Arabidopsis thaliana
tcgcgcctgtagatgga

SEQ ID NO: 141303 - DNA, 17 bp, Arabidopsis thaliana
tcgcgcctgtaggatgg

SEQ ID NO: 141304 - DNA, 17 bp, Arabidopsis thaliana
tcgcgcgaaactgggat

SEQ ID NO: 141305 - DNA, 17 bp, Arabidopsis thaliana
tcgcgctaatggtgctc

SEQ ID NO: 141306 - DNA, 17 bp, Arabidopsis thaliana
tcgcgctacgctgcggt

SEQ ID NO: 141307 - DNA, 17 bp, Arabidopsis thaliana
tcgcgctgagatggatc

SEQ ID NO: 141308 - DNA, 17 bp, Arabidopsis thaliana
tcgcgctgctgaaccac

SEQ ID NO: 141309 - DNA, 17 bp, Arabidopsis thaliana
tcgcgcttggttgaaaa

SEQ ID NO: 141310 - DNA, 17 bp, Arabidopsis thaliana
tcgcgcttgtacggctt

SEQ ID NO: 141311 - DNA, 17 bp, Arabidopsis thaliana
tcgcggaactgtgcgaa

SEQ ID NO: 141312 - DNA, 17 bp, Arabidopsis thaliana
tcgcggaagtctttgtg

SEQ ID NO: 141313 - DNA, 17 bp, Arabidopsis thaliana
tcgcggaattccaaagc

SEQ ID NO: 141314 - DNA, 17 bp, Arabidopsis thaliana
tcgcggaccatttgaca

SEQ ID NO: 141315 - DNA, 17 bp, Arabidopsis thaliana
tcgcggacttgaaatcg

SEQ ID NO: 141316 - DNA, 17 bp, Arabidopsis thaliana
tcgcggagctgcgcttg

SEQ ID NO: 141317 - DNA, 17 bp, Arabidopsis thaliana
tcgcggatctatctaca

SEQ ID NO: 141318 - DNA, 17 bp, Arabidopsis thaliana
tcgcggatgtgcttgat

SEQ ID NO: 141319 - DNA, 17 bp, Arabidopsis thaliana
tcgcggatttgagtaga

SEQ ID NO: 141320 - DNA, 17 bp, Arabidopsis thaliana
tcgcggcgacgtgggtg

SEQ ID NO: 141321 - DNA, 17 bp, Arabidopsis thaliana
tcgcggcttggtctggt

SEQ ID NO: 141322 - DNA, 17 bp, Arabidopsis thaliana
tcgcgggatactgctcg

SEQ ID NO: 141323 - DNA, 17 bp, Arabidopsis thaliana
tcgcgggcgttacaagt

SEQ ID NO: 141324 - DNA, 17 bp, Arabidopsis thaliana
tcgcgggtattttcggg

SEQ ID NO: 141325 - DNA, 17 bp, Arabidopsis thaliana
tcgcgggtgcaccgccg

SEQ ID NO: 141326 - DNA, 17 bp, Arabidopsis thaliana
tcgcgggttcaattccc

SEQ ID NO: 141327 - DNA, 17 bp, Arabidopsis thaliana
tcgcgggttcaggttcg

SEQ ID NO: 141328 - DNA, 17 bp, Arabidopsis thaliana
tcgcgggttcgagcccc

SEQ ID NO: 141329 - DNA, 17 bp, Arabidopsis thaliana
tcgcgggttgcttgctg

SEQ ID NO: 141330 - DNA, 17 bp, Arabidopsis thaliana
tcgcggtcagattttct

SEQ ID NO: 141331 - DNA, 17 bp, Arabidopsis thaliana
tcgcggtcgaactaccg

SEQ ID NO: 141332 - DNA, 17 bp, Arabidopsis thaliana
tcgcggtctgatccttt

SEQ ID NO: 141333 - DNA, 17 bp, Arabidopsis thaliana
tcgcggtgcaccgccga

SEQ ID NO: 141334 - DNA, 17 bp, Arabidopsis thaliana
tcgcggtggtacagaca

SEQ ID NO: 141335 - DNA, 17 bp, Arabidopsis thaliana
tcgcggtggtccagaca

SEQ ID NO: 141336 - DNA, 17 bp, Arabidopsis thaliana
tcgcggtgtgaccactt

SEQ ID NO: 141337 - DNA, 17 bp, Arabidopsis thaliana
tcgcggtgtttttggcc

SEQ ID NO: 141338 - DNA, 17 bp, Arabidopsis thaliana
tcgcggtgtttttggct

SEQ ID NO: 141339 - DNA, 17 bp, Arabidopsis thaliana
tcgcggttcggaattgg

SEQ ID NO: 141340 - DNA, 17 bp, Arabidopsis thaliana
tcgcggttcggttcggt

SEQ ID NO: 141341 - DNA, 17 bp, Arabidopsis thaliana
tcgcggttttgagtgcg

SEQ ID NO: 141342 - DNA, 17 bp, Arabidopsis thaliana
tcgcgtaacaaggtttc

SEQ ID NO: 141343 - DNA, 17 bp, Arabidopsis thaliana
tcgcgtagagttcattt

SEQ ID NO: 141344 - DNA, 17 bp, Arabidopsis thaliana
tcgcgtatctgcttccg

SEQ ID NO: 141345 - DNA, 17 bp, Arabidopsis thaliana
tcgcgtatgtgggctca

SEQ ID NO: 141346 - DNA, 17 bp, Arabidopsis thaliana
tcgcgtcacctgggtca

SEQ ID NO: 141347 - DNA, 17 bp, Arabidopsis thaliana
tcgcgtcacgggtaagc

SEQ ID NO: 141348 - DNA, 17 bp, Arabidopsis thaliana
tcgcgtcagtagtccaa

SEQ ID NO: 141349 - DNA, 17 bp, Arabidopsis thaliana
tcgcgtcatgttatccg

SEQ ID NO: 141350 - DNA, 17 bp, Arabidopsis thaliana
tcgcgtcctgtagatgg

SEQ ID NO: 141351 - DNA, 17 bp, Arabidopsis thaliana
tcgcgtcgactatctcc

SEQ ID NO: 141352 - DNA, 17 bp, Arabidopsis thaliana
tcgcgtctacctgggtg

SEQ ID NO: 141353 - DNA, 17 bp, Arabidopsis thaliana
tcgcgtctgagaaaacg

SEQ ID NO: 141354 - DNA, 17 bp, Arabidopsis thaliana
tcgcgtctgatcagcta

SEQ ID NO: 141355 - DNA, 17 bp, Arabidopsis thaliana
tcgcgtctgcctgggtg

SEQ ID NO: 141356 - DNA, 17 bp, Arabidopsis thaliana
tcgcgtctgtaatccaa

SEQ ID NO: 141357 - DNA, 17 bp, Arabidopsis thaliana
tcgcgtctgtagtccaa

SEQ ID NO: 141358 - DNA, 17 bp, Arabidopsis thaliana
tcgcgtgactcctgata

SEQ ID NO: 141359 - DNA, 17 bp, Arabidopsis thaliana
tcgcgtgattttacggt

SEQ ID NO: 141360 - DNA, 17 bp, Arabidopsis thaliana
tcgcgtggcctatcgat

SEQ ID NO: 141361 - DNA, 17 bp, Arabidopsis thaliana
tcgcgtggtctgcagca

SEQ ID NO: 141362 - DNA, 17 bp, Arabidopsis thaliana
tcgcgtggtgtccggcg

SEQ ID NO: 141363 - DNA, 17 bp, Arabidopsis thaliana
tcgcgtgtgcggtttat

SEQ ID NO: 141364 - DNA, 17 bp, Arabidopsis thaliana
tcgcgttacggctgagt

SEQ ID NO: 141365 - DNA, 17 bp, Arabidopsis thaliana
tcgcgttcacactacga

SEQ ID NO: 141366 - DNA, 17 bp, Arabidopsis thaliana
tcgcgttccactgagat

SEQ ID NO: 141367 - DNA, 17 bp, Arabidopsis thaliana
tcgcgttgactacgtcc

SEQ ID NO: 141368 - DNA, 17 bp, Arabidopsis thaliana
tcgcgttgagatttatt

SEQ ID NO: 141369 - DNA, 17 bp, Arabidopsis thaliana
tcgcgttgcggcgatgg

SEQ ID NO: 141370 - DNA, 17 bp, Arabidopsis thaliana
tcgcgttggctaagtcc

SEQ ID NO: 141371 - DNA, 17 bp, Arabidopsis thaliana
tcgcgttgtatacggtc

SEQ ID NO: 141372 - DNA, 17 bp, Arabidopsis thaliana
tcgcgtttcccggctgg

SEQ ID NO: 141373 - DNA, 17 bp, Arabidopsis thaliana
tcgcgtttgcggttgcg

SEQ ID NO: 141374 - DNA, 17 bp, Arabidopsis thaliana
tcgcgtttttgacggga

SEQ ID NO: 141375 - DNA, 17 bp, Arabidopsis thaliana
tcgctaaaaacgtaaat

SEQ ID NO: 141376 - DNA, 17 bp, Arabidopsis thaliana
tcgctaaaatcggtttg

SEQ ID NO: 141377 - DNA, 17 bp, Arabidopsis thaliana
tcgctaaaatcgtagat

SEQ ID NO: 141378 - DNA, 17 bp, Arabidopsis thaliana
tcgctaaaccgcggccg

SEQ ID NO: 141379 - DNA, 17 bp, Arabidopsis thaliana
tcgctaaaccgcggctg

SEQ ID NO: 141380 - DNA, 17 bp, Arabidopsis thaliana
tcgctaaactcggcgcg

SEQ ID NO: 141381 - DNA, 17 bp, Arabidopsis thaliana
tcgctaaaggccctgtt

SEQ ID NO: 141382 - DNA, 17 bp, Arabidopsis thaliana
tcgctaaatccagcgac

SEQ ID NO: 141383 - DNA, 17 bp, Arabidopsis thaliana
tcgctaacaaccgctac

SEQ ID NO: 141384 - DNA, 17 bp, Arabidopsis thaliana
tcgctaacaatccgacg

SEQ ID NO: 141385 - DNA, 17 bp, Arabidopsis thaliana
tcgctaacgaccgaacc

SEQ ID NO: 141386 - DNA, 17 bp, Arabidopsis thaliana
tcgctaacgactaatgc

SEQ ID NO: 141387 - DNA, 17 bp, Arabidopsis thaliana
tcgctaacgactattgc

SEQ ID NO: 141388 - DNA, 17 bp, Arabidopsis thaliana
tcgctaacgatcaaatg

SEQ ID NO: 141389 - DNA, 17 bp, Arabidopsis thaliana
tcgctaagaagaatcat

SEQ ID NO: 141390 - DNA, 17 bp, Arabidopsis thaliana
tcgctaagagtcaggat

SEQ ID NO: 141391 - DNA, 17 bp, Arabidopsis thaliana
tcgctaagctcaggcct

SEQ ID NO: 141392 - DNA, 17 bp, Arabidopsis thaliana
tcgctaaggcaggtctg

SEQ ID NO: 141393 - DNA, 17 bp, Arabidopsis thaliana
tcgctaaggtaatcctt

SEQ ID NO: 141394 - DNA, 17 bp, Arabidopsis thaliana
tcgctaagtcagctacc

SEQ ID NO: 141395 - DNA, 17 bp, Arabidopsis thaliana
tcgctaagtccgttcgg

SEQ ID NO: 141396 - DNA, 17 bp, Arabidopsis thaliana
tcgctaagttgagcaag

SEQ ID NO: 141397 - DNA, 17 bp, Arabidopsis thaliana
tcgctaagttgagtaag

SEQ ID NO: 141398 - DNA, 17 bp, Arabidopsis thaliana
tcgctaagttgttcgtt

SEQ ID NO: 141399 - DNA, 17 bp, Arabidopsis thaliana
tcgctaatatgtggttt

SEQ ID NO: 141400 - DNA, 17 bp, Arabidopsis thaliana
tcgctaatccaccatcc

SEQ ID NO: 141401 - DNA, 17 bp, Arabidopsis thaliana
tcgctaatctatcggca

SEQ ID NO: 141402 - DNA, 17 bp, Arabidopsis thaliana
tcgctaatgacgaatgc

SEQ ID NO: 141403 - DNA, 17 bp, Arabidopsis thaliana
tcgctaatgcctaattg

SEQ ID NO: 141404 - DNA, 17 bp, Arabidopsis thaliana
tcgctaatgtcgatcga

SEQ ID NO: 141405 - DNA, 17 bp, Arabidopsis thaliana
tcgctaattcatctgcg

SEQ ID NO: 141406 - DNA, 17 bp, Arabidopsis thaliana
tcgctaattggtctacg

SEQ ID NO: 141407 - DNA, 17 bp, Arabidopsis thaliana
tcgctacaagctaaacg

SEQ ID NO: 141408 - DNA, 17 bp, Arabidopsis thaliana
tcgctacactgatgtat

SEQ ID NO: 141409 - DNA, 17 bp, Arabidopsis thaliana
tcgctacagcacccgct

SEQ ID NO: 141410 - DNA, 17 bp, Arabidopsis thaliana
tcgctacaggcaatgca

SEQ ID NO: 141411 - DNA, 17 bp, Arabidopsis thaliana
tcgctacgaatggcttg

SEQ ID NO: 141412 - DNA, 17 bp, Arabidopsis thaliana
tcgctacggttacttct

SEQ ID NO: 141413 - DNA, 17 bp, Arabidopsis thaliana
tcgctacgtaatgtctg

SEQ ID NO: 141414 - DNA, 17 bp, Arabidopsis thaliana
tcgctacgtcagctacc

SEQ ID NO: 141415 - DNA, 17 bp, Arabidopsis thaliana
tcgctacgtcagtagtg

SEQ ID NO: 141416 - DNA, 17 bp, Arabidopsis thaliana
tcgctacgtcgtcaatg

SEQ ID NO: 141417 - DNA, 17 bp, Arabidopsis thaliana
tcgctactgtgcgcaat

SEQ ID NO: 141418 - DNA, 17 bp, Arabidopsis thaliana
tcgctactgtgctcaat

SEQ ID NO: 141419 - DNA, 17 bp, Arabidopsis thaliana
tcgctacttgaccaagc

SEQ ID NO: 141420 - DNA, 17 bp, Arabidopsis thaliana
tcgctactttgcaagat

SEQ ID NO: 141421 - DNA, 17 bp, Arabidopsis thaliana
tcgctacttttgatcgc

SEQ ID NO: 141422 - DNA, 17 bp, Arabidopsis thaliana
tcgctacttttggtcgc

SEQ ID NO: 141423 - DNA, 17 bp, Arabidopsis thaliana
tcgctacttttgttcgc

SEQ ID NO: 141424 - DNA, 17 bp, Arabidopsis thaliana
tcgctagaaagtgtgcc

SEQ ID NO: 141425 - DNA, 17 bp, Arabidopsis thaliana
tcgctagattgtgtgat

SEQ ID NO: 141426 - DNA, 17 bp, Arabidopsis thaliana
tcgctataggctttcat

SEQ ID NO: 141427 - DNA, 17 bp, Arabidopsis thaliana
tcgctatatccagcgac

SEQ ID NO: 141428 - DNA, 17 bp, Arabidopsis thaliana
tcgctatccacaagctt

SEQ ID NO: 141429 - DNA, 17 bp, Arabidopsis thaliana
tcgctatctgtacaccg

SEQ ID NO: 141430 - DNA, 17 bp, Arabidopsis thaliana
tcgctatgaacgcttgg

SEQ ID NO: 141431 - DNA, 17 bp, Arabidopsis thaliana
tcgctatggcgttgatg

SEQ ID NO: 141432 - DNA, 17 bp, Arabidopsis thaliana
tcgctatgttgctggta

SEQ ID NO: 141433 - DNA, 17 bp, Arabidopsis thaliana
tcgctattagctcagtg

SEQ ID NO: 141434 - DNA, 17 bp, Arabidopsis thaliana
tcgctattagctcagtt

SEQ ID NO: 141435 - DNA, 17 bp, Arabidopsis thaliana
tcgctatttccagagag

SEQ ID NO: 141436 - DNA, 17 bp, Arabidopsis thaliana
tcgctatttttggtcgc

SEQ ID NO: 141437 - DNA, 17 bp, Arabidopsis thaliana
tcgctcaaactaggtta

SEQ ID NO: 141438 - DNA, 17 bp, Arabidopsis thaliana
tcgctcaaagttaagaa

SEQ ID NO: 141439 - DNA, 17 bp, Arabidopsis thaliana
tcgctcaatgtggacgc

SEQ ID NO: 141440 - DNA, 17 bp, Arabidopsis thaliana
tcgctcaattcctcgct

SEQ ID NO: 141441 - DNA, 17 bp, Arabidopsis thaliana
tcgctcaattttccgac

SEQ ID NO: 141442 - DNA, 17 bp, Arabidopsis thaliana
tcgctcagaaaatggta

SEQ ID NO: 141443 - DNA, 17 bp, Arabidopsis thaliana
tcgctcagaaccactat

SEQ ID NO: 141444 - DNA, 17 bp, Arabidopsis thaliana
tcgctcagacgtcgacg

SEQ ID NO: 141445 - DNA, 17 bp, Arabidopsis thaliana
tcgctcagataagttca

SEQ ID NO: 141446 - DNA, 17 bp, Arabidopsis thaliana
tcgctcagatttggctg

SEQ ID NO: 141447 - DNA, 17 bp, Arabidopsis thaliana
tcgctcagcctcaacgc

SEQ ID NO: 141448 - DNA, 17 bp, Arabidopsis thaliana
tcgctcagtgactatgg

SEQ ID NO: 141449 - DNA, 17 bp, Arabidopsis thaliana
tcgctcattgtattagc

SEQ ID NO: 141450 - DNA, 17 bp, Arabidopsis thaliana
tcgctccaaccgggtgt

SEQ ID NO: 141451 - DNA, 17 bp, Arabidopsis thaliana
tcgctccacaacggtaa

SEQ ID NO: 141452 - DNA, 17 bp, Arabidopsis thaliana
tcgctcccgtgatcgtg

SEQ ID NO: 141453 - DNA, 17 bp, Arabidopsis thaliana
tcgctccgattggacca

SEQ ID NO: 141454 - DNA, 17 bp, Arabidopsis thaliana
tcgctcctaccgactga

SEQ ID NO: 141455 - DNA, 17 bp, Arabidopsis thaliana
tcgctcctaccgattga

SEQ ID NO: 141456 - DNA, 17 bp, Arabidopsis thaliana
tcgctcctgcgtgtggg

SEQ ID NO: 141457 - DNA, 17 bp, Arabidopsis thaliana
tcgctcctgtagatgga

SEQ ID NO: 141458 - DNA, 17 bp, Arabidopsis thaliana
tcgctcctgtagatggt

SEQ ID NO: 141459 - DNA, 17 bp, Arabidopsis thaliana
tcgctcctgtaggatgg

SEQ ID NO: 141460 - DNA, 17 bp, Arabidopsis thaliana
tcgctccttgtgggatg

SEQ ID NO: 141461 - DNA, 17 bp, Arabidopsis thaliana
tcgctcgaacccgggct

SEQ ID NO: 141462 - DNA, 17 bp, Arabidopsis thaliana
tcgctcgaacccggttg

SEQ ID NO: 141463 - DNA, 17 bp, Arabidopsis thaliana
tcgctcgaagacgatca

SEQ ID NO: 141464 - DNA, 17 bp, Arabidopsis thaliana
tcgctcgaatatccgct

SEQ ID NO: 141465 - DNA, 17 bp, Arabidopsis thaliana
tcgctcgacatcagggg

SEQ ID NO: 141466 - DNA, 17 bp, Arabidopsis thaliana
tcgctcgacatctcttt

SEQ ID NO: 141467 - DNA, 17 bp, Arabidopsis thaliana
tcgctcgaccagaggct

SEQ ID NO: 141468 - DNA, 17 bp, Arabidopsis thaliana
tcgctcgacctccagta

SEQ ID NO: 141469 - DNA, 17 bp, Arabidopsis thaliana
tcgctcgacctcctcac

SEQ ID NO: 141470 - DNA, 17 bp, Arabidopsis thaliana
tcgctcgacgaacctag

SEQ ID NO: 141471 - DNA, 17 bp, Arabidopsis thaliana
tcgctcgacgcggatta

SEQ ID NO: 141472 - DNA, 17 bp, Arabidopsis thaliana
tcgctcgacttccatcc

SEQ ID NO: 141473 - DNA, 17 bp, Arabidopsis thaliana
tcgctcgacttcccctg

SEQ ID NO: 141474 - DNA, 17 bp, Arabidopsis thaliana
tcgctcgacttgggtat

SEQ ID NO: 141475 - DNA, 17 bp, Arabidopsis thaliana
tcgctcgataaacctct

SEQ ID NO: 141476 - DNA, 17 bp, Arabidopsis thaliana
tcgctcgatgagtagga

SEQ ID NO: 141477 - DNA, 17 bp, Arabidopsis thaliana
tcgctcgatgtgtctgt

SEQ ID NO: 141478 - DNA, 17 bp, Arabidopsis thaliana
tcgctcgattccggcag

SEQ ID NO: 141479 - DNA, 17 bp, Arabidopsis thaliana
tcgctcgattcggggcg

SEQ ID NO: 141480 - DNA, 17 bp, Arabidopsis thaliana
tcgctcgattctccggc

SEQ ID NO: 141481 - DNA, 17 bp, Arabidopsis thaliana
tcgctcgcaagactgct

SEQ ID NO: 141482 - DNA, 17 bp, Arabidopsis thaliana
tcgctcgcaatggatgg

SEQ ID NO: 141483 - DNA, 17 bp, Arabidopsis thaliana
tcgctcgcacctgtaga

SEQ ID NO: 141484 - DNA, 17 bp, Arabidopsis thaliana
tcgctcgcagaagagat

SEQ ID NO: 141485 - DNA, 17 bp, Arabidopsis thaliana
tcgctcgcaggagagat

SEQ ID NO: 141486 - DNA, 17 bp, Arabidopsis thaliana
tcgctcgccactacgtc

SEQ ID NO: 141487 - DNA, 17 bp, Arabidopsis thaliana
tcgctcgcctccacaat

SEQ ID NO: 141488 - DNA, 17 bp, Arabidopsis thaliana
tcgctcgcgaagtttcc

SEQ ID NO: 141489 - DNA, 17 bp, Arabidopsis thaliana
tcgctcgcgagaagtcc

SEQ ID NO: 141490 - DNA, 17 bp, Arabidopsis thaliana
tcgctcgcggacttgaa

SEQ ID NO: 141491 - DNA, 17 bp, Arabidopsis thaliana
tcgctcgcggcgacgtg

SEQ ID NO: 141492 - DNA, 17 bp, Arabidopsis thaliana
tcgctcgctaagttgag

SEQ ID NO: 141493 - DNA, 17 bp, Arabidopsis thaliana
tcgctcgctaagttgtt

SEQ ID NO: 141494 - DNA, 17 bp, Arabidopsis thaliana
tcgctcgctatcgcagc

SEQ ID NO: 141495 - DNA, 17 bp, Arabidopsis thaliana
tcgctcgctcggggcgt

SEQ ID NO: 141496 - DNA, 17 bp, Arabidopsis thaliana
tcgctcgctgccgtgat

SEQ ID NO: 141497 - DNA, 17 bp, Arabidopsis thaliana
tcgctcgctgtcgctgt

SEQ ID NO: 141498 - DNA, 17 bp, Arabidopsis thaliana
tcgctcgctgtgttgtt

SEQ ID NO: 141499 - DNA, 17 bp, Arabidopsis thaliana
tcgctcgcttcgtgccc

SEQ ID NO: 141500 - DNA, 17 bp, Arabidopsis thaliana
tcgctcgcttgcagaga

SEQ ID NO: 141501 - DNA, 17 bp, Arabidopsis thaliana
tcgctcgcttggtcagg

SEQ ID NO: 141502 - DNA, 17 bp, Arabidopsis thaliana
tcgctcgcttggtgcag

SEQ ID NO: 141503 - DNA, 17 bp, Arabidopsis thaliana
tcgctcgctttacccac

SEQ ID NO: 141504 - DNA, 17 bp, Arabidopsis thaliana
tcgctcggaaattacgg

SEQ ID NO: 141505 - DNA, 17 bp, Arabidopsis thaliana
tcgctcggaccaggctt

SEQ ID NO: 141506 - DNA, 17 bp, Arabidopsis thaliana
tcgctcggaccaggtag

SEQ ID NO: 141507 - DNA, 17 bp, Arabidopsis thaliana
tcgctcggaccaggttt

SEQ ID NO: 141508 - DNA, 17 bp, Arabidopsis thaliana
tcgctcggaggaccgag

SEQ ID NO: 141509 - DNA, 17 bp, Arabidopsis thaliana
tcgctcggatatccgct

SEQ ID NO: 141510 - DNA, 17 bp, Arabidopsis thaliana
tcgctcggccggtccgc

SEQ ID NO: 141511 - DNA, 17 bp, Arabidopsis thaliana
tcgctcggcggaagcgt

SEQ ID NO: 141512 - DNA, 17 bp, Arabidopsis thaliana
tcgctcggcttagaatt

SEQ ID NO: 141513 - DNA, 17 bp, Arabidopsis thaliana
tcgctcggcttagtttc

SEQ ID NO: 141514 - DNA, 17 bp, Arabidopsis thaliana
tcgctcggcttgagtaa

SEQ ID NO: 141515 - DNA, 17 bp, Arabidopsis thaliana
tcgctcggcttgtccct

SEQ ID NO: 141516 - DNA, 17 bp, Arabidopsis thaliana
tcgctcgggcattttcg

SEQ ID NO: 141517 - DNA, 17 bp, Arabidopsis thaliana
tcgctcgggcatttttg

SEQ ID NO: 141518 - DNA, 17 bp, Arabidopsis thaliana
tcgctcggtctagcagc

SEQ ID NO: 141519 - DNA, 17 bp, Arabidopsis thaliana
tcgctcggtgcaggtcg

SEQ ID NO: 141520 - DNA, 17 bp, Arabidopsis thaliana
tcgctcggttaaagtac

SEQ ID NO: 141521 - DNA, 17 bp, Arabidopsis thaliana
tcgctcggttaggcttc

SEQ ID NO: 141522 - DNA, 17 bp, Arabidopsis thaliana
tcgctcggttcctgaat

SEQ ID NO: 141523 - DNA, 17 bp, Arabidopsis thaliana
tcgctcgtctactgaag

SEQ ID NO: 141524 - DNA, 17 bp, Arabidopsis thaliana
tcgctcgtctgtagtcc

SEQ ID NO: 141525 - DNA, 17 bp, Arabidopsis thaliana
tcgctcgtctttccact

SEQ ID NO: 141526 - DNA, 17 bp, Arabidopsis thaliana
tcgctcgtgctaaagag

SEQ ID NO: 141527 - DNA, 17 bp, Arabidopsis thaliana
tcgctcgtgtcgtgcca

SEQ ID NO: 141528 - DNA, 17 bp, Arabidopsis thaliana
tcgctcgttcatttggc

SEQ ID NO: 141529 - DNA, 17 bp, Arabidopsis thaliana
tcgctcgtttatccatt

SEQ ID NO: 141530 - DNA, 17 bp, Arabidopsis thaliana
tcgctcgtttccggcag

SEQ ID NO: 141531 - DNA, 17 bp, Arabidopsis thaliana
tcgctcgtttcgtcgct

SEQ ID NO: 141532 - DNA, 17 bp, Arabidopsis thaliana
tcgctcgtttctcggaa

SEQ ID NO: 141533 - DNA, 17 bp, Arabidopsis thaliana
tcgctcgttttcgctga

SEQ ID NO: 141534 - DNA, 17 bp, Arabidopsis thaliana
tcgctctagtccgactt

SEQ ID NO: 141535 - DNA, 17 bp, Arabidopsis thaliana
tcgctctcgatcgtagg

SEQ ID NO: 141536 - DNA, 17 bp, Arabidopsis thaliana
tcgctctcgtttaatgg

SEQ ID NO: 141537 - DNA, 17 bp, Arabidopsis thaliana
tcgctctgagactgcat

SEQ ID NO: 141538 - DNA, 17 bp, Arabidopsis thaliana
tcgctctgtgccagcag

SEQ ID NO: 141539 - DNA, 17 bp, Arabidopsis thaliana
tcgctctgttgcttgta

SEQ ID NO: 141540 - DNA, 17 bp, Arabidopsis thaliana
tcgctcttaccgattga

SEQ ID NO: 141541 - DNA, 17 bp, Arabidopsis thaliana
tcgctctttccttgcaa

SEQ ID NO: 141542 - DNA, 17 bp, Arabidopsis thaliana
tcgctgaaaccagcgac

SEQ ID NO: 141543 - DNA, 17 bp, Arabidopsis thaliana
tcgctgaaaccagggaa

SEQ ID NO: 141544 - DNA, 17 bp, Arabidopsis thaliana
tcgctgaaaccagggac

SEQ ID NO: 141545 - DNA, 17 bp, Arabidopsis thaliana
tcgctgaaccaacgaca

SEQ ID NO: 141546 - DNA, 17 bp, Arabidopsis thaliana
tcgctgaaccaatgatg

SEQ ID NO: 141547 - DNA, 17 bp, Arabidopsis thaliana
tcgctgaaccaatggtg

SEQ ID NO: 141548 - DNA, 17 bp, Arabidopsis thaliana
tcgctgaaccagcgaca

SEQ ID NO: 141549 - DNA, 17 bp, Arabidopsis thaliana
tcgctgaacggggttag

SEQ ID NO: 141550 - DNA, 17 bp, Arabidopsis thaliana
tcgctgaactagcgaca

SEQ ID NO: 141551 - DNA, 17 bp, Arabidopsis thaliana
tcgctgaatccagcgac

SEQ ID NO: 141552 - DNA, 17 bp, Arabidopsis thaliana
tcgctgaatctcagtgg

SEQ ID NO: 141553 - DNA, 17 bp, Arabidopsis thaliana
tcgctgagaatgagatt

SEQ ID NO: 141554 - DNA, 17 bp, Arabidopsis thaliana
tcgctgagacaatcgct

SEQ ID NO: 141555 - DNA, 17 bp, Arabidopsis thaliana
tcgctgatcgctggcga

SEQ ID NO: 141556 - DNA, 17 bp, Arabidopsis thaliana
tcgctgattcgaccagg

SEQ ID NO: 141557 - DNA, 17 bp, Arabidopsis thaliana
tcgctgattcgacctgg

SEQ ID NO: 141558 - DNA, 17 bp, Arabidopsis thaliana
tcgctgattgtagtcgt

SEQ ID NO: 141559 - DNA, 17 bp, Arabidopsis thaliana
tcgctgattgtcttgct

SEQ ID NO: 141560 - DNA, 17 bp, Arabidopsis thaliana
tcgctgcaaaacctagg

SEQ ID NO: 141561 - DNA, 17 bp, Arabidopsis thaliana
tcgctgcaaccatcttc

SEQ ID NO: 141562 - DNA, 17 bp, Arabidopsis thaliana
tcgctgcaactcaattt

SEQ ID NO: 141563 - DNA, 17 bp, Arabidopsis thaliana
tcgctgcagtagcggtt

SEQ ID NO: 141564 - DNA, 17 bp, Arabidopsis thaliana
tcgctgccgtgatcggg

SEQ ID NO: 141565 - DNA, 17 bp, Arabidopsis thaliana
tcgctgccgtgatcgta

SEQ ID NO: 141566 - DNA, 17 bp, Arabidopsis thaliana
tcgctgccgtgatcgtg

SEQ ID NO: 141567 - DNA, 17 bp, Arabidopsis thaliana
tcgctgccgtgatggtg

SEQ ID NO: 141568 - DNA, 17 bp, Arabidopsis thaliana
tcgctgcctgggtgtca

SEQ ID NO: 141569 - DNA, 17 bp, Arabidopsis thaliana
tcgctgcgacaagcacc

SEQ ID NO: 141570 - DNA, 17 bp, Arabidopsis thaliana
tcgctgcgactctttca

SEQ ID NO: 141571 - DNA, 17 bp, Arabidopsis thaliana
tcgctgcgtagagtgct

SEQ ID NO: 141572 - DNA, 17 bp, Arabidopsis thaliana
tcgctgctatgtggatg

SEQ ID NO: 141573 - DNA, 17 bp, Arabidopsis thaliana
tcgctgctgctgtttca

SEQ ID NO: 141574 - DNA, 17 bp, Arabidopsis thaliana
tcgctgctggtgcttgt

SEQ ID NO: 141575 - DNA, 17 bp, Arabidopsis thaliana
tcgctgctgtgatcgtg

SEQ ID NO: 141576 - DNA, 17 bp, Arabidopsis thaliana
tcgctggacaatgggtc

SEQ ID NO: 141577 - DNA, 17 bp, Arabidopsis thaliana
tcgctggacattctcta

SEQ ID NO: 141578 - DNA, 17 bp, Arabidopsis thaliana
tcgctggaggtacatgc

SEQ ID NO: 141579 - DNA, 17 bp, Arabidopsis thaliana
tcgctggataaagttga

SEQ ID NO: 141580 - DNA, 17 bp, Arabidopsis thaliana
tcgctggatccactgtc

SEQ ID NO: 141581 - DNA, 17 bp, Arabidopsis thaliana
tcgctggatccagcgac

SEQ ID NO: 141582 - DNA, 17 bp, Arabidopsis thaliana
tcgctggattcagcgac

SEQ ID NO: 141583 - DNA, 17 bp, Arabidopsis thaliana
tcgctggcctctttcga

SEQ ID NO: 141584 - DNA, 17 bp, Arabidopsis thaliana
tcgctggcgactgtcgc

SEQ ID NO: 141585 - DNA, 17 bp, Arabidopsis thaliana
tcgctggcgattgtcgt

SEQ ID NO: 141586 - DNA, 17 bp, Arabidopsis thaliana
tcgctggctgatgtgga

SEQ ID NO: 141587 - DNA, 17 bp, Arabidopsis thaliana
tcgctgggatctggggc

SEQ ID NO: 141588 - DNA, 17 bp, Arabidopsis thaliana
tcgctgggtgcaggtcg

SEQ ID NO: 141589 - DNA, 17 bp, Arabidopsis thaliana
tcgctggtccactcccc

SEQ ID NO: 141590 - DNA, 17 bp, Arabidopsis thaliana
tcgctggtcgctacttt

SEQ ID NO: 141591 - DNA, 17 bp, Arabidopsis thaliana
tcgctggtcgctggtcg

SEQ ID NO: 141592 - DNA, 17 bp, Arabidopsis thaliana
tcgctggtcgctgtcgc

SEQ ID NO: 141593 - DNA, 17 bp, Arabidopsis thaliana
tcgctggtctttgatcc

SEQ ID NO: 141594 - DNA, 17 bp, Arabidopsis thaliana
tcgctggtggtcaagat

SEQ ID NO: 141595 - DNA, 17 bp, Arabidopsis thaliana
tcgctggttgatcctgc

SEQ ID NO: 141596 - DNA, 17 bp, Arabidopsis thaliana
tcgctggttgcatgatg

SEQ ID NO: 141597 - DNA, 17 bp, Arabidopsis thaliana
tcgctggttgctgtcgc

SEQ ID NO: 141598 - DNA, 17 bp, Arabidopsis thaliana
tcgctggttttagtcgc

SEQ ID NO: 141599 - DNA, 17 bp, Arabidopsis thaliana
tcgctggttttgttagt

SEQ ID NO: 141600 - DNA, 17 bp, Arabidopsis thaliana
tcgctgtaattggtcgc

SEQ ID NO: 141601 - DNA, 17 bp, Arabidopsis thaliana
tcgctgtccatagaggt

SEQ ID NO: 141602 - DNA, 17 bp, Arabidopsis thaliana
tcgctgtcgctggtcgc

SEQ ID NO: 141603 - DNA, 17 bp, Arabidopsis thaliana
tcgctgtcgctgtcgct

SEQ ID NO: 141604 - DNA, 17 bp, Arabidopsis thaliana
tcgctgtgacagcaata

SEQ ID NO: 141605 - DNA, 17 bp, Arabidopsis thaliana
tcgctgtgataatgatt

SEQ ID NO: 141606 - DNA, 17 bp, Arabidopsis thaliana
tcgctgtgatgtttgag

SEQ ID NO: 141607 - DNA, 17 bp, Arabidopsis thaliana
tcgctgtgggatgtcaa

SEQ ID NO: 141608 - DNA, 17 bp, Arabidopsis thaliana
tcgctgtgttgttcgtt

SEQ ID NO: 141609 - DNA, 17 bp, Arabidopsis thaliana
tcgctgttatgagtttg

SEQ ID NO: 141610 - DNA, 17 bp, Arabidopsis thaliana
tcgctgttcagacctgg

SEQ ID NO: 141611 - DNA, 17 bp, Arabidopsis thaliana
tcgcttaaaggctttgc

SEQ ID NO: 141612 - DNA, 17 bp, Arabidopsis thaliana
tcgcttaacttacacgg

SEQ ID NO: 141613 - DNA, 17 bp, Arabidopsis thaliana
tcgcttaagaggatgat

SEQ ID NO: 141614 - DNA, 17 bp, Arabidopsis thaliana
tcgcttacgtttgccac

SEQ ID NO: 141615 - DNA, 17 bp, Arabidopsis thaliana
tcgcttactaacggtcc

SEQ ID NO: 141616 - DNA, 17 bp, Arabidopsis thaliana
tcgcttagagtctgtgt

SEQ ID NO: 141617 - DNA, 17 bp, Arabidopsis thaliana
tcgcttagtgcaggtcg

SEQ ID NO: 141618 - DNA, 17 bp, Arabidopsis thaliana
tcgcttatgttctccgg

SEQ ID NO: 141619 - DNA, 17 bp, Arabidopsis thaliana
tcgcttattcccgagga

SEQ ID NO: 141620 - DNA, 17 bp, Arabidopsis thaliana
tcgcttattgattgttt

SEQ ID NO: 141621 - DNA, 17 bp, Arabidopsis thaliana
tcgcttcatcttcccgg

SEQ ID NO: 141622 - DNA, 17 bp, Arabidopsis thaliana
tcgcttccgacctttat

SEQ ID NO: 141623 - DNA, 17 bp, Arabidopsis thaliana
tcgcttccgttaactga

SEQ ID NO: 141624 - DNA, 17 bp, Arabidopsis thaliana
tcgcttcgacaacatcg

SEQ ID NO: 141625 - DNA, 17 bp, Arabidopsis thaliana
tcgcttcggcgggtcga

SEQ ID NO: 141626 - DNA, 17 bp, Arabidopsis thaliana
tcgcttcgtatcactgg

SEQ ID NO: 141627 - DNA, 17 bp, Arabidopsis thaliana
tcgcttcgtgcaggtcg

SEQ ID NO: 141628 - DNA, 17 bp, Arabidopsis thaliana
tcgcttcgtgcccaggc

SEQ ID NO: 141629 - DNA, 17 bp, Arabidopsis thaliana
tcgcttctcaatggata

SEQ ID NO: 141630 - DNA, 17 bp, Arabidopsis thaliana
tcgcttctccgttccgt

SEQ ID NO: 141631 - DNA, 17 bp, Arabidopsis thaliana
tcgcttctcttaccgta

SEQ ID NO: 141632 - DNA, 17 bp, Arabidopsis thaliana
tcgcttctgatacttga

SEQ ID NO: 141633 - DNA, 17 bp, Arabidopsis thaliana
tcgcttcttcgagaagt

SEQ ID NO: 141634 - DNA, 17 bp, Arabidopsis thaliana
tcgcttgcagagagaaa

SEQ ID NO: 141635 - DNA, 17 bp, Arabidopsis thaliana
tcgcttgcagagggaaa

SEQ ID NO: 141636 - DNA, 17 bp, Arabidopsis thaliana
tcgcttgccgctgtagc

SEQ ID NO: 141637 - DNA, 17 bp, Arabidopsis thaliana
tcgcttgctacttggtg

SEQ ID NO: 141638 - DNA, 17 bp, Arabidopsis thaliana
tcgcttgctacttggtt

SEQ ID NO: 141639 - DNA, 17 bp, Arabidopsis thaliana
tcgcttgctgccggccc

SEQ ID NO: 141640 - DNA, 17 bp, Arabidopsis thaliana
tcgcttggaccaaagaa

SEQ ID NO: 141641 - DNA, 17 bp, Arabidopsis thaliana
tcgcttggcgaacacct

SEQ ID NO: 141642 - DNA, 17 bp, Arabidopsis thaliana
tcgcttggcgcacgtcg

SEQ ID NO: 141643 - DNA, 17 bp, Arabidopsis thaliana
tcgcttggcgcaggtcg

SEQ ID NO: 141644 - DNA, 17 bp, Arabidopsis thaliana
tcgcttggcgcaggtct

SEQ ID NO: 141645 - DNA, 17 bp, Arabidopsis thaliana
tcgcttgggaacgcggt

SEQ ID NO: 141646 - DNA, 17 bp, Arabidopsis thaliana
tcgcttggggcaggtcg

SEQ ID NO: 141647 - DNA, 17 bp, Arabidopsis thaliana
tcgcttggggcaggtct

SEQ ID NO: 141648 - DNA, 17 bp, Arabidopsis thaliana
tcgcttggggtgcgaga

SEQ ID NO: 141649 - DNA, 17 bp, Arabidopsis thaliana
tcgcttggtacaggtcg

SEQ ID NO: 141650 - DNA, 17 bp, Arabidopsis thaliana
tcgcttggtcaggtcgg

SEQ ID NO: 141651 - DNA, 17 bp, Arabidopsis thaliana
tcgcttggtgaaggtcg

SEQ ID NO: 141652 - DNA, 17 bp, Arabidopsis thaliana
tcgcttggtgcaagtcg

SEQ ID NO: 141653 - DNA, 17 bp, Arabidopsis thaliana
tcgcttggtgcacctgg

SEQ ID NO: 141654 - DNA, 17 bp, Arabidopsis thaliana
tcgcttggtgcagatcg

SEQ ID NO: 141655 - DNA, 17 bp, Arabidopsis thaliana
tcgcttggtgcaggacg

SEQ ID NO: 141656 - DNA, 17 bp, Arabidopsis thaliana
tcgcttggtgcaggccg

SEQ ID NO: 141657 - DNA, 17 bp, Arabidopsis thaliana
tcgcttggtgcagggcg

SEQ ID NO: 141658 - DNA, 17 bp, Arabidopsis thaliana
tcgcttggtgcaggggg

SEQ ID NO: 141659 - DNA, 17 bp, Arabidopsis thaliana
tcgcttggtgcaggtca

SEQ ID NO: 141660 - DNA, 17 bp, Arabidopsis thaliana
tcgcttggtgcaggtcc

SEQ ID NO: 141661 - DNA, 17 bp, Arabidopsis thaliana
tcgcttggtgcaggtcg

SEQ ID NO: 141662 - DNA, 17 bp, Arabidopsis thaliana
tcgcttggtgcaggtct

SEQ ID NO: 141663 - DNA, 17 bp, Arabidopsis thaliana
tcgcttggtgcaggtgt

SEQ ID NO: 141664 - DNA, 17 bp, Arabidopsis thaliana
tcgcttggtgcaggttg

SEQ ID NO: 141665 - DNA, 17 bp, Arabidopsis thaliana
tcgcttggtgcagtcgg

SEQ ID NO: 141666 - DNA, 17 bp, Arabidopsis thaliana
tcgcttggtgcagttcg

SEQ ID NO: 141667 - DNA, 17 bp, Arabidopsis thaliana
tcgcttggtgcatgtcg

SEQ ID NO: 141668 - DNA, 17 bp, Arabidopsis thaliana
tcgcttggtgcatgtct

SEQ ID NO: 141669 - DNA, 17 bp, Arabidopsis thaliana
tcgcttggtgccaaggc

SEQ ID NO: 141670 - DNA, 17 bp, Arabidopsis thaliana
tcgcttggtgccggtcg

SEQ ID NO: 141671 - DNA, 17 bp, Arabidopsis thaliana
tcgcttggtgcgggtcg

SEQ ID NO: 141672 - DNA, 17 bp, Arabidopsis thaliana
tcgcttggtgctggtcg

SEQ ID NO: 141673 - DNA, 17 bp, Arabidopsis thaliana
tcgcttggtggaggtcg

SEQ ID NO: 141674 - DNA, 17 bp, Arabidopsis thaliana
tcgcttggttcaggtcg

SEQ ID NO: 141675 - DNA, 17 bp, Arabidopsis thaliana
tcgcttgtcatcgaaat

SEQ ID NO: 141676 - DNA, 17 bp, Arabidopsis thaliana
tcgcttgtgcaggtcgg

SEQ ID NO: 141677 - DNA, 17 bp, Arabidopsis thaliana
tcgcttgtgtggaaagg

SEQ ID NO: 141678 - DNA, 17 bp, Arabidopsis thaliana
tcgcttgttgcaggtcg

SEQ ID NO: 141679 - DNA, 17 bp, Arabidopsis thaliana
tcgctttaatgcgctta

SEQ ID NO: 141680 - DNA, 17 bp, Arabidopsis thaliana
tcgctttacccactgtt

SEQ ID NO: 141681 - DNA, 17 bp, Arabidopsis thaliana
tcgctttcgctggtttc

SEQ ID NO: 141682 - DNA, 17 bp, Arabidopsis thaliana
tcgctttcggttctctg

SEQ ID NO: 141683 - DNA, 17 bp, Arabidopsis thaliana
tcgctttgaccgggtca

SEQ ID NO: 141684 - DNA, 17 bp, Arabidopsis thaliana
tcgctttggccgagtgg

SEQ ID NO: 141685 - DNA, 17 bp, Arabidopsis thaliana
tcgctttgggtgcgaga

SEQ ID NO: 141686 - DNA, 17 bp, Arabidopsis thaliana
tcgctttgtgcaggtcg

SEQ ID NO: 141687 - DNA, 17 bp, Arabidopsis thaliana
tcgctttgtttggtgtc

SEQ ID NO: 141688 - DNA, 17 bp, Arabidopsis thaliana
tcgctttgttttcgcag

SEQ ID NO: 141689 - DNA, 17 bp, Arabidopsis thaliana
tcgcttttagctgtttg

SEQ ID NO: 141690 - DNA, 17 bp, Arabidopsis thaliana
tcgcttttatgcgttca

SEQ ID NO: 141691 - DNA, 17 bp, Arabidopsis thaliana
tcgcttttattgccttc

SEQ ID NO: 141692 - DNA, 17 bp, Arabidopsis thaliana
tcgcttttccctcttgg

SEQ ID NO: 141693 - DNA, 17 bp, Arabidopsis thaliana
tcgcttttcttcctgtg

SEQ ID NO: 141694 - DNA, 17 bp, Arabidopsis thaliana
tcgcttttggtcgctga

SEQ ID NO: 141695 - DNA, 17 bp, Arabidopsis thaliana
tcgcttttgtcgctaag

SEQ ID NO: 141696 - DNA, 17 bp, Arabidopsis thaliana
tcggaaactgaactttt

SEQ ID NO: 141697 - DNA, 17 bp, Arabidopsis thaliana
tcggaaactgtagtcgt

SEQ ID NO: 141698 - DNA, 17 bp, Arabidopsis thaliana
tcggaaagcccaaagac

SEQ ID NO: 141699 - DNA, 17 bp, Arabidopsis thaliana
tcggaaagcccaaagag

SEQ ID NO: 141700 - DNA, 17 bp, Arabidopsis thaliana
tcggaaagtctgtcagt

SEQ ID NO: 141701 - DNA, 17 bp, Arabidopsis thaliana
tcggaaatacttctcag

SEQ ID NO: 141702 - DNA, 17 bp, Arabidopsis thaliana
tcggaaatctgaagatt

SEQ ID NO: 141703 - DNA, 17 bp, Arabidopsis thaliana
tcggaaatgcttctcag

SEQ ID NO: 141704 - DNA, 17 bp, Arabidopsis thaliana
tcggaaatgttgtgcga

SEQ ID NO: 141705 - DNA, 17 bp, Arabidopsis thaliana
tcggaaattacggctta

SEQ ID NO: 141706 - DNA, 17 bp, Arabidopsis thaliana
tcggaaattacggcttt

SEQ ID NO: 141707 - DNA, 17 bp, Arabidopsis thaliana
tcggaaattcgcgtggt

SEQ ID NO: 141708 - DNA, 17 bp, Arabidopsis thaliana
tcggaaatttgcgtgat

SEQ ID NO: 141709 - DNA, 17 bp, Arabidopsis thaliana
tcggaaatttgcgtggt

SEQ ID NO: 141710 - DNA, 17 bp, Arabidopsis thaliana
tcggaacaaggccttat

SEQ ID NO: 141711 - DNA, 17 bp, Arabidopsis thaliana
tcggaacaggcttcatt

SEQ ID NO: 141712 - DNA, 17 bp, Arabidopsis thaliana
tcggaacaggtatgcct

SEQ ID NO: 141713 - DNA, 17 bp, Arabidopsis thaliana
tcggaacctggctctga

SEQ ID NO: 141714 - DNA, 17 bp, Arabidopsis thaliana
tcggaacgacgcttccg

SEQ ID NO: 141715 - DNA, 17 bp, Arabidopsis thaliana
tcggaacgaggtctgaa

SEQ ID NO: 141716 - DNA, 17 bp, Arabidopsis thaliana
tcggaactgttctgctt

SEQ ID NO: 141717 - DNA, 17 bp, Arabidopsis thaliana
tcggaagactccgagct

SEQ ID NO: 141718 - DNA, 17 bp, Arabidopsis thaliana
tcggaagctgctcggat

SEQ ID NO: 141719 - DNA, 17 bp, Arabidopsis thaliana
tcggaaggaggttgcgt

SEQ ID NO: 141720 - DNA, 17 bp, Arabidopsis thaliana
tcggaaggcttcattcc

SEQ ID NO: 141721 - DNA, 17 bp, Arabidopsis thaliana
tcggaagtctgtcagtt

SEQ ID NO: 141722 - DNA, 17 bp, Arabidopsis thaliana
tcggaagttgaggagga

SEQ ID NO: 141723 - DNA, 17 bp, Arabidopsis thaliana
tcggaagttgaggcgga

SEQ ID NO: 141724 - DNA, 17 bp, Arabidopsis thaliana
tcggaagttgtgactta

SEQ ID NO: 141725 - DNA, 17 bp, Arabidopsis thaliana
tcggaatctccgggtca

SEQ ID NO: 141726 - DNA, 17 bp, Arabidopsis thaliana
tcggaattgggtgtcgg

SEQ ID NO: 141727 - DNA, 17 bp, Arabidopsis thaliana
tcggaatttgtctgttg

SEQ ID NO: 141728 - DNA, 17 bp, Arabidopsis thaliana
tcggacaacacagattt

SEQ ID NO: 141729 - DNA, 17 bp, Arabidopsis thaliana
tcggacaacttctgcag

SEQ ID NO: 141730 - DNA, 17 bp, Arabidopsis thaliana
tcggacaattgatcaac

SEQ ID NO: 141731 - DNA, 17 bp, Arabidopsis thaliana
tcggacacaggtactgg

SEQ ID NO: 141732 - DNA, 17 bp, Arabidopsis thaliana
tcggacacataaggtta

SEQ ID NO: 141733 - DNA, 17 bp, Arabidopsis thaliana
tcggacacgggttcgag

SEQ ID NO: 141734 - DNA, 17 bp, Arabidopsis thaliana
tcggacagaccgaccga

SEQ ID NO: 141735 - DNA, 17 bp, Arabidopsis thaliana
tcggacagaccgaccgt

SEQ ID NO: 141736 - DNA, 17 bp, Arabidopsis thaliana
tcggacagacctttcca

SEQ ID NO: 141737 - DNA, 17 bp, Arabidopsis thaliana
tcggacagccttacagt

SEQ ID NO: 141738 - DNA, 17 bp, Arabidopsis thaliana
tcggacaggcttcatcc

SEQ ID NO: 141739 - DNA, 17 bp, Arabidopsis thaliana
tcggacaggcttcattc

SEQ ID NO: 141740 - DNA, 17 bp, Arabidopsis thaliana
tcggacatgccgtgaaa

SEQ ID NO: 141741 - DNA, 17 bp, Arabidopsis thaliana
tcggacatgggccacgg

SEQ ID NO: 141742 - DNA, 17 bp, Arabidopsis thaliana
tcggacatggtctctat

SEQ ID NO: 141743 - DNA, 17 bp, Arabidopsis thaliana
tcggaccaagcttcatt

SEQ ID NO: 141744 - DNA, 17 bp, Arabidopsis thaliana
tcggaccaagcttcgtc

SEQ ID NO: 141745 - DNA, 17 bp, Arabidopsis thaliana
tcggaccaatccggctg

SEQ ID NO: 141746 - DNA, 17 bp, Arabidopsis thaliana
tcggaccaatgatcacc

SEQ ID NO: 141747 - DNA, 17 bp, Arabidopsis thaliana
tcggaccacgccacctg

SEQ ID NO: 141748 - DNA, 17 bp, Arabidopsis thaliana
tcggaccacgcttcatc

SEQ ID NO: 141749 - DNA, 17 bp, Arabidopsis thaliana
tcggaccacgcttcatt

SEQ ID NO: 141750 - DNA, 17 bp, Arabidopsis thaliana
tcggaccagacttcatc

SEQ ID NO: 141751 - DNA, 17 bp, Arabidopsis thaliana
tcggaccagacttcatt

SEQ ID NO: 141752 - DNA, 17 bp, Arabidopsis thaliana
tcggaccagccttcatt

SEQ ID NO: 141753 - DNA, 17 bp, Arabidopsis thaliana
tcggaccaggattcatt

SEQ ID NO: 141754 - DNA, 17 bp, Arabidopsis thaliana
tcggaccaggcatcatt

SEQ ID NO: 141755 - DNA, 17 bp, Arabidopsis thaliana
tcggaccaggccattcc

SEQ ID NO: 141756 - DNA, 17 bp, Arabidopsis thaliana
tcggaccaggccccccc

SEQ ID NO: 141757 - DNA, 17 bp, Arabidopsis thaliana
tcggaccaggcctcatc

SEQ ID NO: 141758 - DNA, 17 bp, Arabidopsis thaliana
tcggaccaggcctcatt

SEQ ID NO: 141759 - DNA, 17 bp, Arabidopsis thaliana
tcggaccaggccttatt

SEQ ID NO: 141760 - DNA, 17 bp, Arabidopsis thaliana
tcggaccaggctacatt

SEQ ID NO: 141761 - DNA, 17 bp, Arabidopsis thaliana
tcggaccaggctcattc

SEQ ID NO: 141762 - DNA, 17 bp, Arabidopsis thaliana
tcggaccaggctccatt

SEQ ID NO: 141763 - DNA, 17 bp, Arabidopsis thaliana
tcggaccaggcttattc

SEQ ID NO: 141764 - DNA, 17 bp, Arabidopsis thaliana
tcggaccaggcttcaaa

SEQ ID NO: 141765 - DNA, 17 bp, Arabidopsis thaliana
tcggaccaggcttcaat

SEQ ID NO: 141766 - DNA, 17 bp, Arabidopsis thaliana
tcggaccaggcttcacc

SEQ ID NO: 141767 - DNA, 17 bp, Arabidopsis thaliana
tcggaccaggcttcact

SEQ ID NO: 141768 - DNA, 17 bp, Arabidopsis thaliana
tcggaccaggcttcagt

SEQ ID NO: 141769 - DNA, 17 bp, Arabidopsis thaliana
tcggaccaggcttcata

SEQ ID NO: 141770 - DNA, 17 bp, Arabidopsis thaliana
tcggaccaggcttcatc

SEQ ID NO: 141771 - DNA, 17 bp, Arabidopsis thaliana
tcggaccaggcttcatt

SEQ ID NO: 141772 - DNA, 17 bp, Arabidopsis thaliana
tcggaccaggcttcccc

SEQ ID NO: 141773 - DNA, 17 bp, Arabidopsis thaliana
tcggaccaggcttcctt

SEQ ID NO: 141774 - DNA, 17 bp, Arabidopsis thaliana
tcggaccaggcttcgat

SEQ ID NO: 141775 - DNA, 17 bp, Arabidopsis thaliana
tcggaccaggcttcgtt

SEQ ID NO: 141776 - DNA, 17 bp, Arabidopsis thaliana
tcggaccaggcttctcc

SEQ ID NO: 141777 - DNA, 17 bp, Arabidopsis thaliana
tcggaccaggcttcttc

SEQ ID NO: 141778 - DNA, 17 bp, Arabidopsis thaliana
tcggaccaggcttcttg

SEQ ID NO: 141779 - DNA, 17 bp, Arabidopsis thaliana
tcggaccaggctttccc

SEQ ID NO: 141780 - DNA, 17 bp, Arabidopsis thaliana
tcggaccaggcttttcc

SEQ ID NO: 141781 - DNA, 17 bp, Arabidopsis thaliana
tcggaccagggcattcc

SEQ ID NO: 141782 - DNA, 17 bp, Arabidopsis thaliana
tcggaccagggttcatt

SEQ ID NO: 141783 - DNA, 17 bp, Arabidopsis thaliana
tcggaccaggtctcatt

SEQ ID NO: 141784 - DNA, 17 bp, Arabidopsis thaliana
tcggaccaggtcttatt

SEQ ID NO: 141785 - DNA, 17 bp, Arabidopsis thaliana
tcggaccaggttcattc

SEQ ID NO: 141786 - DNA, 17 bp, Arabidopsis thaliana
tcggaccaggtttcatc

SEQ ID NO: 141787 - DNA, 17 bp, Arabidopsis thaliana
tcggaccaggtttcatt

SEQ ID NO: 141788 - DNA, 17 bp, Arabidopsis thaliana
tcggaccagtcagccag

SEQ ID NO: 141789 - DNA, 17 bp, Arabidopsis thaliana
tcggaccagtcttcatt

SEQ ID NO: 141790 - DNA, 17 bp, Arabidopsis thaliana
tcggaccagtcttcctt

SEQ ID NO: 141791 - DNA, 17 bp, Arabidopsis thaliana
tcggaccatccgccaaa

SEQ ID NO: 141792 - DNA, 17 bp, Arabidopsis thaliana
tcggaccatgcttcatt

SEQ ID NO: 141793 - DNA, 17 bp, Arabidopsis thaliana
tcggacccaaggcgaga

SEQ ID NO: 141794 - DNA, 17 bp, Arabidopsis thaliana
tcggaccccccaccctc

SEQ ID NO: 141795 - DNA, 17 bp, Arabidopsis thaliana
tcggacccgggctcaga

SEQ ID NO: 141796 - DNA, 17 bp, Arabidopsis thaliana
tcggacccggtcgacga

SEQ ID NO: 141797 - DNA, 17 bp, Arabidopsis thaliana
tcggacccggtgtccca

SEQ ID NO: 141798 - DNA, 17 bp, Arabidopsis thaliana
tcggaccgagtgccgct

SEQ ID NO: 141799 - DNA, 17 bp, Arabidopsis thaliana
tcggaccgcacatttaa

SEQ ID NO: 141800 - DNA, 17 bp, Arabidopsis thaliana
tcggaccgcatggatgg

SEQ ID NO: 141801 - DNA, 17 bp, Arabidopsis thaliana
tcggaccgccttgaatt

SEQ ID NO: 141802 - DNA, 17 bp, Arabidopsis thaliana
tcggaccgcttcattcc

SEQ ID NO: 141803 - DNA, 17 bp, Arabidopsis thaliana
tcggaccggcctacggt

SEQ ID NO: 141804 - DNA, 17 bp, Arabidopsis thaliana
tcggaccggttcttagt

SEQ ID NO: 141805 - DNA, 17 bp, Arabidopsis thaliana
tcggaccgtctgtcggt

SEQ ID NO: 141806 - DNA, 17 bp, Arabidopsis thaliana
tcggacctacgatcgtg

SEQ ID NO: 141807 - DNA, 17 bp, Arabidopsis thaliana
tcggacctgaaagatta

SEQ ID NO: 141808 - DNA, 17 bp, Arabidopsis thaliana
tcggacctgagagatta

SEQ ID NO: 141809 - DNA, 17 bp, Arabidopsis thaliana
tcggacctgatagattt

SEQ ID NO: 141810 - DNA, 17 bp, Arabidopsis thaliana
tcggacctggtcgacga

SEQ ID NO: 141811 - DNA, 17 bp, Arabidopsis thaliana
tcggaccttttgcgata

SEQ ID NO: 141812 - DNA, 17 bp, Arabidopsis thaliana
tcggacgacggaagggg

SEQ ID NO: 141813 - DNA, 17 bp, Arabidopsis thaliana
tcggacgacggtgatcg

SEQ ID NO: 141814 - DNA, 17 bp, Arabidopsis thaliana
tcggacgagccaccaac

SEQ ID NO: 141815 - DNA, 17 bp, Arabidopsis thaliana
tcggacgcgagttctat

SEQ ID NO: 141816 - DNA, 17 bp, Arabidopsis thaliana
tcggacgggaagtggtg

SEQ ID NO: 141817 - DNA, 17 bp, Arabidopsis thaliana
tcggacgggaggtgggg

SEQ ID NO: 141818 - DNA, 17 bp, Arabidopsis thaliana
tcggacggtgacccaat

SEQ ID NO: 141819 - DNA, 17 bp, Arabidopsis thaliana
tcggacggttgatcggt

SEQ ID NO: 141820 - DNA, 17 bp, Arabidopsis thaliana
tcggacgtcttcggcgt

SEQ ID NO: 141821 - DNA, 17 bp, Arabidopsis thaliana
tcggacgtgccggagtg

SEQ ID NO: 141822 - DNA, 17 bp, Arabidopsis thaliana
tcggacgtttgcatgat

SEQ ID NO: 141823 - DNA, 17 bp, Arabidopsis thaliana
tcggactagaatctcct

SEQ ID NO: 141824 - DNA, 17 bp, Arabidopsis thaliana
tcggactaggcttcatc

SEQ ID NO: 141825 - DNA, 17 bp, Arabidopsis thaliana
tcggactaggcttcatt

SEQ ID NO: 141826 - DNA, 17 bp, Arabidopsis thaliana
tcggactcccatatgtt

SEQ ID NO: 141827 - DNA, 17 bp, Arabidopsis thaliana
tcggactcgtcggaagt

SEQ ID NO: 141828 - DNA, 17 bp, Arabidopsis thaliana
tcggactctcggcaacg

SEQ ID NO: 141829 - DNA, 17 bp, Arabidopsis thaliana
tcggactgccggaagaa

SEQ ID NO: 141830 - DNA, 17 bp, Arabidopsis thaliana
tcggactgcgacggtga

SEQ ID NO: 141831 - DNA, 17 bp, Arabidopsis thaliana
tcggactgctccggtcg

SEQ ID NO: 141832 - DNA, 17 bp, Arabidopsis thaliana
tcggactggggtaagcc

SEQ ID NO: 141833 - DNA, 17 bp, Arabidopsis thaliana
tcggactggggtgagcc

SEQ ID NO: 141834 - DNA, 17 bp, Arabidopsis thaliana
tcggactgtatcaccaa

SEQ ID NO: 141835 - DNA, 17 bp, Arabidopsis thaliana
tcggacttccagtctga

SEQ ID NO: 141836 - DNA, 17 bp, Arabidopsis thaliana
tcggacttgggggatta

SEQ ID NO: 141837 - DNA, 17 bp, Arabidopsis thaliana
tcggactttggagttac

SEQ ID NO: 141838 - DNA, 17 bp, Arabidopsis thaliana
tcggagaaaccccgttg

SEQ ID NO: 141839 - DNA, 17 bp, Arabidopsis thaliana
tcggagaactaggcagt

SEQ ID NO: 141840 - DNA, 17 bp, Arabidopsis thaliana
tcggagaagtgaccaga

SEQ ID NO: 141841 - DNA, 17 bp, Arabidopsis thaliana
tcggagaatcttctggt

SEQ ID NO: 141842 - DNA, 17 bp, Arabidopsis thaliana
tcggagataggcgctcg

SEQ ID NO: 141843 - DNA, 17 bp, Arabidopsis thaliana
tcggagattattgagca

SEQ ID NO: 141844 - DNA, 17 bp, Arabidopsis thaliana
tcggagattcgcggaag

SEQ ID NO: 141845 - DNA, 17 bp, Arabidopsis thaliana
tcggagattgtcggatt

SEQ ID NO: 141846 - DNA, 17 bp, Arabidopsis thaliana
tcggagatttactactg

SEQ ID NO: 141847 - DNA, 17 bp, Arabidopsis thaliana
tcggagccagattattc

SEQ ID NO: 141848 - DNA, 17 bp, Arabidopsis thaliana
tcggagcgaggatttac

SEQ ID NO: 141849 - DNA, 17 bp, Arabidopsis thaliana
tcggagctcgttgggaa

SEQ ID NO: 141850 - DNA, 17 bp, Arabidopsis thaliana
tcggagctttctcaaca

SEQ ID NO: 141851 - DNA, 17 bp, Arabidopsis thaliana
tcggaggaccgagtgcc

SEQ ID NO: 141852 - DNA, 17 bp, Arabidopsis thaliana
tcggaggatttgcgtcc

SEQ ID NO: 141853 - DNA, 17 bp, Arabidopsis thaliana
tcggaggccaaacttgg

SEQ ID NO: 141854 - DNA, 17 bp, Arabidopsis thaliana
tcggagggcacgtctgc

SEQ ID NO: 141855 - DNA, 17 bp, Arabidopsis thaliana
tcggagtccctattgct

SEQ ID NO: 141856 - DNA, 17 bp, Arabidopsis thaliana
tcggagttctaacctgg

SEQ ID NO: 141857 - DNA, 17 bp, Arabidopsis thaliana
tcggagttgcgactcct

SEQ ID NO: 141858 - DNA, 17 bp, Arabidopsis thaliana
tcggagttgcgagtcct

SEQ ID NO: 141859 - DNA, 17 bp, Arabidopsis thaliana
tcggagttgcgagttcc

SEQ ID NO: 141860 - DNA, 17 bp, Arabidopsis thaliana
tcggataagattgcggt

SEQ ID NO: 141861 - DNA, 17 bp, Arabidopsis thaliana
tcggatagccagtgttc

SEQ ID NO: 141862 - DNA, 17 bp, Arabidopsis thaliana
tcggataggggacagca

SEQ ID NO: 141863 - DNA, 17 bp, Arabidopsis thaliana
tcggataggggacatca

SEQ ID NO: 141864 - DNA, 17 bp, Arabidopsis thaliana
tcggatatagattttta

SEQ ID NO: 141865 - DNA, 17 bp, Arabidopsis thaliana
tcggatatccacgggta

SEQ ID NO: 141866 - DNA, 17 bp, Arabidopsis thaliana
tcggatatccgcttcgt

SEQ ID NO: 141867 - DNA, 17 bp, Arabidopsis thaliana
tcggatatcggctcaga

SEQ ID NO: 141868 - DNA, 17 bp, Arabidopsis thaliana
tcggatatctgagcagc

SEQ ID NO: 141869 - DNA, 17 bp, Arabidopsis thaliana
tcggatatgtccgagtg

SEQ ID NO: 141870 - DNA, 17 bp, Arabidopsis thaliana
tcggatcaggcttcatt

SEQ ID NO: 141871 - DNA, 17 bp, Arabidopsis thaliana
tcggatcctggatagca

SEQ ID NO: 141872 - DNA, 17 bp, Arabidopsis thaliana
tcggatgaagtggtgtg

SEQ ID NO: 141873 - DNA, 17 bp, Arabidopsis thaliana
tcggatgacaaatttgc

SEQ ID NO: 141874 - DNA, 17 bp, Arabidopsis thaliana
tcggatgactttcgaca

SEQ ID NO: 141875 - DNA, 17 bp, Arabidopsis thaliana
tcggatgatgtcggatt

SEQ ID NO: 141876 - DNA, 17 bp, Arabidopsis thaliana
tcggatggactctctgg

SEQ ID NO: 141877 - DNA, 17 bp, Arabidopsis thaliana
tcggatggcggcgacgt

SEQ ID NO: 141878 - DNA, 17 bp, Arabidopsis thaliana
tcggatgggtcggccgg

SEQ ID NO: 141879 - DNA, 17 bp, Arabidopsis thaliana
tcggatggtagaaagat

SEQ ID NO: 141880 - DNA, 17 bp, Arabidopsis thaliana
tcggatggttgattcta

SEQ ID NO: 141881 - DNA, 17 bp, Arabidopsis thaliana
tcggatgtagcgcagct

SEQ ID NO: 141882 - DNA, 17 bp, Arabidopsis thaliana
tcggatgttgcgttcag

SEQ ID NO: 141883 - DNA, 17 bp, Arabidopsis thaliana
tcggattaaccgggttg

SEQ ID NO: 141884 - DNA, 17 bp, Arabidopsis thaliana
tcggattactgagattt

SEQ ID NO: 141885 - DNA, 17 bp, Arabidopsis thaliana
tcggattagcggatatc

SEQ ID NO: 141886 - DNA, 17 bp, Arabidopsis thaliana
tcggattaggcttcatc

SEQ ID NO: 141887 - DNA, 17 bp, Arabidopsis thaliana
tcggattaggcttcatt

SEQ ID NO: 141888 - DNA, 17 bp, Arabidopsis thaliana
tcggattaggcttcttt

SEQ ID NO: 141889 - DNA, 17 bp, Arabidopsis thaliana
tcggattatacgcagca

SEQ ID NO: 141890 - DNA, 17 bp, Arabidopsis thaliana
tcggattatctgatgtt

SEQ ID NO: 141891 - DNA, 17 bp, Arabidopsis thaliana
tcggattcaggacaact

SEQ ID NO: 141892 - DNA, 17 bp, Arabidopsis thaliana
tcggattcatcaaaagt

SEQ ID NO: 141893 - DNA, 17 bp, Arabidopsis thaliana
tcggattcgacaacacc

SEQ ID NO: 141894 - DNA, 17 bp, Arabidopsis thaliana
tcggattcgcttggtgc

SEQ ID NO: 141895 - DNA, 17 bp, Arabidopsis thaliana
tcggattcggtttggtt

SEQ ID NO: 141896 - DNA, 17 bp, Arabidopsis thaliana
tcggattcgttctacaa

SEQ ID NO: 141897 - DNA, 17 bp, Arabidopsis thaliana
tcggattcttgctactg

SEQ ID NO: 141898 - DNA, 17 bp, Arabidopsis thaliana
tcggattgactcgaacc

SEQ ID NO: 141899 - DNA, 17 bp, Arabidopsis thaliana
tcggattgagtatgtac

SEQ ID NO: 141900 - DNA, 17 bp, Arabidopsis thaliana
tcggattgataagacgg

SEQ ID NO: 141901 - DNA, 17 bp, Arabidopsis thaliana
tcggattgcaggctgca

SEQ ID NO: 141902 - DNA, 17 bp, Arabidopsis thaliana
tcggattgctgttattg

SEQ ID NO: 141903 - DNA, 17 bp, Arabidopsis thaliana
tcggattggaccagtac

SEQ ID NO: 141904 - DNA, 17 bp, Arabidopsis thaliana
tcggattgttgcactac

SEQ ID NO: 141905 - DNA, 17 bp, Arabidopsis thaliana
tcggattgttgcacttc

SEQ ID NO: 141906 - DNA, 17 bp, Arabidopsis thaliana
tcggattgttggaggat

SEQ ID NO: 141907 - DNA, 17 bp, Arabidopsis thaliana
tcggatttaggccaacc

SEQ ID NO: 141908 - DNA, 17 bp, Arabidopsis thaliana
tcggatttagggtgtag

SEQ ID NO: 141909 - DNA, 17 bp, Arabidopsis thaliana
tcggatttcctagaggg

SEQ ID NO: 141910 - DNA, 17 bp, Arabidopsis thaliana
tcggatttcggttcaga

SEQ ID NO: 141911 - DNA, 17 bp, Arabidopsis thaliana
tcggatttcggtttgga

SEQ ID NO: 141912 - DNA, 17 bp, Arabidopsis thaliana
tcggatttggttgctct

SEQ ID NO: 141913 - DNA, 17 bp, Arabidopsis thaliana
tcggatttgttcttaaa

SEQ ID NO: 141914 - DNA, 17 bp, Arabidopsis thaliana
tcggattttggatactt

SEQ ID NO: 141915 - DNA, 17 bp, Arabidopsis thaliana
tcggatttttcgggtcg

SEQ ID NO: 141916 - DNA, 17 bp, Arabidopsis thaliana
tcggcaaaagtggtaga

SEQ ID NO: 141917 - DNA, 17 bp, Arabidopsis thaliana
tcggcaacgatccgagg

SEQ ID NO: 141918 - DNA, 17 bp, Arabidopsis thaliana
tcggcaacggatatcca

SEQ ID NO: 141919 - DNA, 17 bp, Arabidopsis thaliana
tcggcaacggatatccc

SEQ ID NO: 141920 - DNA, 17 bp, Arabidopsis thaliana
tcggcaacggatatctc

SEQ ID NO: 141921 - DNA, 17 bp, Arabidopsis thaliana
tcggcaacttatggtgc

SEQ ID NO: 141922 - DNA, 17 bp, Arabidopsis thaliana
tcggcaagtatgatggt

SEQ ID NO: 141923 - DNA, 17 bp, Arabidopsis thaliana
tcggcaagttgtccttc

SEQ ID NO: 141924 - DNA, 17 bp, Arabidopsis thaliana
tcggcaatcgggcggcg

SEQ ID NO: 141925 - DNA, 17 bp, Arabidopsis thaliana
tcggcaatcttcggtgt

SEQ ID NO: 141926 - DNA, 17 bp, Arabidopsis thaliana
tcggcaattcacagtag

SEQ ID NO: 141927 - DNA, 17 bp, Arabidopsis thaliana
tcggcaattcacagtct

SEQ ID NO: 141928 - DNA, 17 bp, Arabidopsis thaliana
tcggcacaaaacttcct

SEQ ID NO: 141929 - DNA, 17 bp, Arabidopsis thaliana
tcggcaccagcctcaac

SEQ ID NO: 141930 - DNA, 17 bp, Arabidopsis thaliana
tcggcacctccgacgat

SEQ ID NO: 141931 - DNA, 17 bp, Arabidopsis thaliana
tcggcacggatggctgc

SEQ ID NO: 141932 - DNA, 17 bp, Arabidopsis thaliana
tcggcacgtctgcctgg

SEQ ID NO: 141933 - DNA, 17 bp, Arabidopsis thaliana
tcggcacgtctgcctgt

SEQ ID NO: 141934 - DNA, 17 bp, Arabidopsis thaliana
tcggcagctaagttatg

SEQ ID NO: 141935 - DNA, 17 bp, Arabidopsis thaliana
tcggcaggaaaatgttg

SEQ ID NO: 141936 - DNA, 17 bp, Arabidopsis thaliana
tcggcagggtaccgcgg

SEQ ID NO: 141937 - DNA, 17 bp, Arabidopsis thaliana
tcggcaggtgcaatgtg

SEQ ID NO: 141938 - DNA, 17 bp, Arabidopsis thaliana
tcggcagtaggagcgaa

SEQ ID NO: 141939 - DNA, 17 bp, Arabidopsis thaliana
tcggcagtaggtgaaca

SEQ ID NO: 141940 - DNA, 17 bp, Arabidopsis thaliana
tcggcagtgtgctactg

SEQ ID NO: 141941 - DNA, 17 bp, Arabidopsis thaliana
tcggcagttcgatctat

SEQ ID NO: 141942 - DNA, 17 bp, Arabidopsis thaliana
tcggcatagacttgacg

SEQ ID NO: 141943 - DNA, 17 bp, Arabidopsis thaliana
tcggcatatgcgtaaga

SEQ ID NO: 141944 - DNA, 17 bp, Arabidopsis thaliana
tcggcatgatgatgagg

SEQ ID NO: 141945 - DNA, 17 bp, Arabidopsis thaliana
tcggcatgcgtcttggc

SEQ ID NO: 141946 - DNA, 17 bp, Arabidopsis thaliana
tcggcatgctcgggagc

SEQ ID NO: 141947 - DNA, 17 bp, Arabidopsis thaliana
tcggcatgtcccatccg

SEQ ID NO: 141948 - DNA, 17 bp, Arabidopsis thaliana
tcggcattgatccagtt

SEQ ID NO: 141949 - DNA, 17 bp, Arabidopsis thaliana
tcggcattggtcggctt

SEQ ID NO: 141950 - DNA, 17 bp, Arabidopsis thaliana
tcggcatttatttttcg

SEQ ID NO: 141951 - DNA, 17 bp, Arabidopsis thaliana
tcggcattttcttgatt

SEQ ID NO: 141952 - DNA, 17 bp, Arabidopsis thaliana
tcggccaaaaacctcct

SEQ ID NO: 141953 - DNA, 17 bp, Arabidopsis thaliana
tcggccaaagtgtgaac

SEQ ID NO: 141954 - DNA, 17 bp, Arabidopsis thaliana
tcggccaagaaccttct

SEQ ID NO: 141955 - DNA, 17 bp, Arabidopsis thaliana
tcggccaaggtgtgaac

SEQ ID NO: 141956 - DNA, 17 bp, Arabidopsis thaliana
tcggccaagtttcccat

SEQ ID NO: 141957 - DNA, 17 bp, Arabidopsis thaliana
tcggccaatagccaact

SEQ ID NO: 141958 - DNA, 17 bp, Arabidopsis thaliana
tcggccaatccattatt

SEQ ID NO: 141959 - DNA, 17 bp, Arabidopsis thaliana
tcggccaatctactcgg

SEQ ID NO: 141960 - DNA, 17 bp, Arabidopsis thaliana
tcggccaatcttcttga

SEQ ID NO: 141961 - DNA, 17 bp, Arabidopsis thaliana
tcggccaggcttcattc

SEQ ID NO: 141962 - DNA, 17 bp, Arabidopsis thaliana
tcggccatccaattaca

SEQ ID NO: 141963 - DNA, 17 bp, Arabidopsis thaliana
tcggccatgacgaaatc

SEQ ID NO: 141964 - DNA, 17 bp, Arabidopsis thaliana
tcggccattccgtagac

SEQ ID NO: 141965 - DNA, 17 bp, Arabidopsis thaliana
tcggccattttcgtgat

SEQ ID NO: 141966 - DNA, 17 bp, Arabidopsis thaliana
tcggcccaaaacctcct

SEQ ID NO: 141967 - DNA, 17 bp, Arabidopsis thaliana
tcggcccaatggactag

SEQ ID NO: 141968 - DNA, 17 bp, Arabidopsis thaliana
tcggcccagaacctact

SEQ ID NO: 141969 - DNA, 17 bp, Arabidopsis thaliana
tcggcccagaacctcct

SEQ ID NO: 141970 - DNA, 17 bp, Arabidopsis thaliana
tcggcccagaatctctt

SEQ ID NO: 141971 - DNA, 17 bp, Arabidopsis thaliana
tcggcccaggcttcatt

SEQ ID NO: 141972 - DNA, 17 bp, Arabidopsis thaliana
tcggcccattaagacaa

SEQ ID NO: 141973 - DNA, 17 bp, Arabidopsis thaliana
tcggccccgggtctttc

SEQ ID NO: 141974 - DNA, 17 bp, Arabidopsis thaliana
tcggcccctctctctag

SEQ ID NO: 141975 - DNA, 17 bp, Arabidopsis thaliana
tcggccctttgccgcta

SEQ ID NO: 141976 - DNA, 17 bp, Arabidopsis thaliana
tcggccctttgtcgcta

SEQ ID NO: 141977 - DNA, 17 bp, Arabidopsis thaliana
tcggccgaagcccgtaa

SEQ ID NO: 141978 - DNA, 17 bp, Arabidopsis thaliana
tcggccgaatccattga

SEQ ID NO: 141979 - DNA, 17 bp, Arabidopsis thaliana
tcggccgacatactcga

SEQ ID NO: 141980 - DNA, 17 bp, Arabidopsis thaliana
tcggccgaccctcatta

SEQ ID NO: 141981 - DNA, 17 bp, Arabidopsis thaliana
tcggccgacctcggtag

SEQ ID NO: 141982 - DNA, 17 bp, Arabidopsis thaliana
tcggccgagggcacgtc

SEQ ID NO: 141983 - DNA, 17 bp, Arabidopsis thaliana
tcggccgagtaactttc

SEQ ID NO: 141984 - DNA, 17 bp, Arabidopsis thaliana
tcggccgagtacctctc

SEQ ID NO: 141985 - DNA, 17 bp, Arabidopsis thaliana
tcggccgagtacgacct

SEQ ID NO: 141986 - DNA, 17 bp, Arabidopsis thaliana
tcggccgagtataagct

SEQ ID NO: 141987 - DNA, 17 bp, Arabidopsis thaliana
tcggccgagtgccttac

SEQ ID NO: 141988 - DNA, 17 bp, Arabidopsis thaliana
tcggccgcagcgttttg

SEQ ID NO: 141989 - DNA, 17 bp, Arabidopsis thaliana
tcggccggcccgccttt

SEQ ID NO: 141990 - DNA, 17 bp, Arabidopsis thaliana
tcggccggtccgccctt

SEQ ID NO: 141991 - DNA, 17 bp, Arabidopsis thaliana
tcggccggtccgccttt

SEQ ID NO: 141992 - DNA, 17 bp, Arabidopsis thaliana
tcggccggtccgctttg

SEQ ID NO: 141993 - DNA, 17 bp, Arabidopsis thaliana
tcggccgttacgttaga

SEQ ID NO: 141994 - DNA, 17 bp, Arabidopsis thaliana
tcggcctaaggtcggta

SEQ ID NO: 141995 - DNA, 17 bp, Arabidopsis thaliana
tcggcctaagttatgag

SEQ ID NO: 141996 - DNA, 17 bp, Arabidopsis thaliana
tcggcctatcccatccg

SEQ ID NO: 141997 - DNA, 17 bp, Arabidopsis thaliana
tcggcctcactactact

SEQ ID NO: 141998 - DNA, 17 bp, Arabidopsis thaliana
tcggcctgtcccggtcg

SEQ ID NO: 141999 - DNA, 17 bp, Arabidopsis thaliana
tcggcctgtcggaacct

SEQ ID NO: 142000 - DNA, 17 bp, Arabidopsis thaliana
tcggcctgtgggctcat

SEQ ID NO: 142001 - DNA, 17 bp, Arabidopsis thaliana
tcggcctgtgggctccc

SEQ ID NO: 142002 - DNA, 17 bp, Arabidopsis thaliana
tcggcctgtgggctctg

SEQ ID NO: 142003 - DNA, 17 bp, Arabidopsis thaliana
tcggccttcaaagtcca

SEQ ID NO: 142004 - DNA, 17 bp, Arabidopsis thaliana
tcggccttgtccttgat

SEQ ID NO: 142005 - DNA, 17 bp, Arabidopsis thaliana
tcggcgaaaaaattacg

SEQ ID NO: 142006 - DNA, 17 bp, Arabidopsis thaliana
tcggcgaagccatggtg

SEQ ID NO: 142007 - DNA, 17 bp, Arabidopsis thaliana
tcggcgaatttgacact

SEQ ID NO: 142008 - DNA, 17 bp, Arabidopsis thaliana
tcggcgaatttgaggtt

SEQ ID NO: 142009 - DNA, 17 bp, Arabidopsis thaliana
tcggcgacgaccttagc

SEQ ID NO: 142010 - DNA, 17 bp, Arabidopsis thaliana
tcggcgacgacgttagc

SEQ ID NO: 142011 - DNA, 17 bp, Arabidopsis thaliana
tcggcgactcataggca

SEQ ID NO: 142012 - DNA, 17 bp, Arabidopsis thaliana
tcggcgacttggttggc

SEQ ID NO: 142013 - DNA, 17 bp, Arabidopsis thaliana
tcggcgacttttccggc

SEQ ID NO: 142014 - DNA, 17 bp, Arabidopsis thaliana
tcggcgagttagacggg

SEQ ID NO: 142015 - DNA, 17 bp, Arabidopsis thaliana
tcggcgatacgctcctg

SEQ ID NO: 142016 - DNA, 17 bp, Arabidopsis thaliana
tcggcgatcatttcgtt

SEQ ID NO: 142017 - DNA, 17 bp, Arabidopsis thaliana
tcggcgatccagcatgg

SEQ ID NO: 142018 - DNA, 17 bp, Arabidopsis thaliana
tcggcgatgcgtcctgg

SEQ ID NO: 142019 - DNA, 17 bp, Arabidopsis thaliana
tcggcggaagcgtcgtt

SEQ ID NO: 142020 - DNA, 17 bp, Arabidopsis thaliana
tcggcggaagcgtcttt

SEQ ID NO: 142021 - DNA, 17 bp, Arabidopsis thaliana
tcggcggaccggattgc

SEQ ID NO: 142022 - DNA, 17 bp, Arabidopsis thaliana
tcggcggaggacaggga

SEQ ID NO: 142023 - DNA, 17 bp, Arabidopsis thaliana
tcggcggatcaagtggt

SEQ ID NO: 142024 - DNA, 17 bp, Arabidopsis thaliana
tcggcggatgtacccac

SEQ ID NO: 142025 - DNA, 17 bp, Arabidopsis thaliana
tcggcggatgtagccaa

SEQ ID NO: 142026 - DNA, 17 bp, Arabidopsis thaliana
tcggcggctcccttttt

SEQ ID NO: 142027 - DNA, 17 bp, Arabidopsis thaliana
tcggcggcttcatctac

SEQ ID NO: 142028 - DNA, 17 bp, Arabidopsis thaliana
tcggcggcttgaatccg

SEQ ID NO: 142029 - DNA, 17 bp, Arabidopsis thaliana
tcggcggcttgttggga

SEQ ID NO: 142030 - DNA, 17 bp, Arabidopsis thaliana
tcggcgggggcctcggg

SEQ ID NO: 142031 - DNA, 17 bp, Arabidopsis thaliana
tcggcgggtcgatccgg

SEQ ID NO: 142032 - DNA, 17 bp, Arabidopsis thaliana
tcggcgtagaattcgcc

SEQ ID NO: 142033 - DNA, 17 bp, Arabidopsis thaliana
tcggcgtagcgcgggta

SEQ ID NO: 142034 - DNA, 17 bp, Arabidopsis thaliana
tcggcgtcagaccatac

SEQ ID NO: 142035 - DNA, 17 bp, Arabidopsis thaliana
tcggcgtccgacgacca

SEQ ID NO: 142036 - DNA, 17 bp, Arabidopsis thaliana
tcggcgtcggacttttg

SEQ ID NO: 142037 - DNA, 17 bp, Arabidopsis thaliana
tcggcgtctctggcagc

SEQ ID NO: 142038 - DNA, 17 bp, Arabidopsis thaliana
tcggcgttgacccgttc

SEQ ID NO: 142039 - DNA, 17 bp, Arabidopsis thaliana
tcggcgttggagagatc

SEQ ID NO: 142040 - DNA, 17 bp, Arabidopsis thaliana
tcggctaactctgccca

SEQ ID NO: 142041 - DNA, 17 bp, Arabidopsis thaliana
tcggctaactctgtgcc

SEQ ID NO: 142042 - DNA, 17 bp, Arabidopsis thaliana
tcggctaacttggggcc

SEQ ID NO: 142043 - DNA, 17 bp, Arabidopsis thaliana
tcggctaatacggtcag

SEQ ID NO: 142044 - DNA, 17 bp, Arabidopsis thaliana
tcggctaatccggttag

SEQ ID NO: 142045 - DNA, 17 bp, Arabidopsis thaliana
tcggctaatgcgcagta

SEQ ID NO: 142046 - DNA, 17 bp, Arabidopsis thaliana
tcggctaattcggttat

SEQ ID NO: 142047 - DNA, 17 bp, Arabidopsis thaliana
tcggctaccaaggaact

SEQ ID NO: 142048 - DNA, 17 bp, Arabidopsis thaliana
tcggctacttgatcatg

SEQ ID NO: 142049 - DNA, 17 bp, Arabidopsis thaliana
tcggctagagccggtcc

SEQ ID NO: 142050 - DNA, 17 bp, Arabidopsis thaliana
tcggctagcgtctggta

SEQ ID NO: 142051 - DNA, 17 bp, Arabidopsis thaliana
tcggctaggcttctatc

SEQ ID NO: 142052 - DNA, 17 bp, Arabidopsis thaliana
tcggctatgagtttcgt

SEQ ID NO: 142053 - DNA, 17 bp, Arabidopsis thaliana
tcggctatgccgtcagc

SEQ ID NO: 142054 - DNA, 17 bp, Arabidopsis thaliana
tcggctatggtgaaatt

SEQ ID NO: 142055 - DNA, 17 bp, Arabidopsis thaliana
tcggctatgtaacggtt

SEQ ID NO: 142056 - DNA, 17 bp, Arabidopsis thaliana
tcggctcactcgagacg

SEQ ID NO: 142057 - DNA, 17 bp, Arabidopsis thaliana
tcggctcagcactatca

SEQ ID NO: 142058 - DNA, 17 bp, Arabidopsis thaliana
tcggctcaggaccattg

SEQ ID NO: 142059 - DNA, 17 bp, Arabidopsis thaliana
tcggctcgacgttgctg

SEQ ID NO: 142060 - DNA, 17 bp, Arabidopsis thaliana
tcggctcggcaggatag

SEQ ID NO: 142061 - DNA, 17 bp, Arabidopsis thaliana
tcggctctaatctgaca

SEQ ID NO: 142062 - DNA, 17 bp, Arabidopsis thaliana
tcggctctcgcatcgat

SEQ ID NO: 142063 - DNA, 17 bp, Arabidopsis thaliana
tcggctctggtcgacgt

SEQ ID NO: 142064 - DNA, 17 bp, Arabidopsis thaliana
tcggctctgtggcaacc

SEQ ID NO: 142065 - DNA, 17 bp, Arabidopsis thaliana
tcggctctgtttctagt

SEQ ID NO: 142066 - DNA, 17 bp, Arabidopsis thaliana
tcggctcttcctatcat

SEQ ID NO: 142067 - DNA, 17 bp, Arabidopsis thaliana
tcggctcttccttgtga

SEQ ID NO: 142068 - DNA, 17 bp, Arabidopsis thaliana
tcggctcttcgccaccc

SEQ ID NO: 142069 - DNA, 17 bp, Arabidopsis thaliana
tcggctcttcgccacct

SEQ ID NO: 142070 - DNA, 17 bp, Arabidopsis thaliana
tcggctctttttatcat

SEQ ID NO: 142071 - DNA, 17 bp, Arabidopsis thaliana
tcggctgaactaaattg

SEQ ID NO: 142072 - DNA, 17 bp, Arabidopsis thaliana
tcggctgaactggttgg

SEQ ID NO: 142073 - DNA, 17 bp, Arabidopsis thaliana
tcggctgatccgctcag

SEQ ID NO: 142074 - DNA, 17 bp, Arabidopsis thaliana
tcggctgatccggtaag

SEQ ID NO: 142075 - DNA, 17 bp, Arabidopsis thaliana
tcggctgatccggtcag

SEQ ID NO: 142076 - DNA, 17 bp, Arabidopsis thaliana
tcggctgatccggttag

SEQ ID NO: 142077 - DNA, 17 bp, Arabidopsis thaliana
tcggctgatccggttat

SEQ ID NO: 142078 - DNA, 17 bp, Arabidopsis thaliana
tcggctgatctgattag

SEQ ID NO: 142079 - DNA, 17 bp, Arabidopsis thaliana
tcggctgattcggttag

SEQ ID NO: 142080 - DNA, 17 bp, Arabidopsis thaliana
tcggctgattcggttat

SEQ ID NO: 142081 - DNA, 17 bp, Arabidopsis thaliana
tcggctgcgagcatagc

SEQ ID NO: 142082 - DNA, 17 bp, Arabidopsis thaliana
tcggctggaaatcacgg

SEQ ID NO: 142083 - DNA, 17 bp, Arabidopsis thaliana
tcggctggaggccgagt

SEQ ID NO: 142084 - DNA, 17 bp, Arabidopsis thaliana
tcggctggcggactggt

SEQ ID NO: 142085 - DNA, 17 bp, Arabidopsis thaliana
tcggctgtcagcggact

SEQ ID NO: 142086 - DNA, 17 bp, Arabidopsis thaliana
tcggctgtcaggccgcg

SEQ ID NO: 142087 - DNA, 17 bp, Arabidopsis thaliana
tcggcttacgacgtcct

SEQ ID NO: 142088 - DNA, 17 bp, Arabidopsis thaliana
tcggcttagaattctcc

SEQ ID NO: 142089 - DNA, 17 bp, Arabidopsis thaliana
tcggcttaggaccattg

SEQ ID NO: 142090 - DNA, 17 bp, Arabidopsis thaliana
tcggcttagtggtgttg

SEQ ID NO: 142091 - DNA, 17 bp, Arabidopsis thaliana
tcggcttagtttccggg

SEQ ID NO: 142092 - DNA, 17 bp, Arabidopsis thaliana
tcggcttagttttctgg

SEQ ID NO: 142093 - DNA, 17 bp, Arabidopsis thaliana
tcggcttatgcccagta

SEQ ID NO: 142094 - DNA, 17 bp, Arabidopsis thaliana
tcggcttcatacctaga

SEQ ID NO: 142095 - DNA, 17 bp, Arabidopsis thaliana
tcggcttccaacttatt

SEQ ID NO: 142096 - DNA, 17 bp, Arabidopsis thaliana
tcggcttccttttgttc

SEQ ID NO: 142097 - DNA, 17 bp, Arabidopsis thaliana
tcggcttcgcttttggg

SEQ ID NO: 142098 - DNA, 17 bp, Arabidopsis thaliana
tcggcttcggacgtagg

SEQ ID NO: 142099 - DNA, 17 bp, Arabidopsis thaliana
tcggcttctgaaaggca

SEQ ID NO: 142100 - DNA, 17 bp, Arabidopsis thaliana
tcggcttcttagaggga

SEQ ID NO: 142101 - DNA, 17 bp, Arabidopsis thaliana
tcggcttcttgttcgtg

SEQ ID NO: 142102 - DNA, 17 bp, Arabidopsis thaliana
tcggcttgaaccgcatt

SEQ ID NO: 142103 - DNA, 17 bp, Arabidopsis thaliana
tcggcttgagtaacgca

SEQ ID NO: 142104 - DNA, 17 bp, Arabidopsis thaliana
tcggcttgatggtttct

SEQ ID NO: 142105 - DNA, 17 bp, Arabidopsis thaliana
tcggcttggatttgatt

SEQ ID NO: 142106 - DNA, 17 bp, Arabidopsis thaliana
tcggcttgggtcagcgt

SEQ ID NO: 142107 - DNA, 17 bp, Arabidopsis thaliana
tcggcttggttcacact

SEQ ID NO: 142108 - DNA, 17 bp, Arabidopsis thaliana
tcggcttgtcccttcgg

SEQ ID NO: 142109 - DNA, 17 bp, Arabidopsis thaliana
tcggcttgtcccttcgt

SEQ ID NO: 142110 - DNA, 17 bp, Arabidopsis thaliana
tcggctttaacatttgc

SEQ ID NO: 142111 - DNA, 17 bp, Arabidopsis thaliana
tcggctttccgacggat

SEQ ID NO: 142112 - DNA, 17 bp, Arabidopsis thaliana
tcggctttgaatggatg

SEQ ID NO: 142113 - DNA, 17 bp, Arabidopsis thaliana
tcggctttgaatggtta

SEQ ID NO: 142114 - DNA, 17 bp, Arabidopsis thaliana
tcggctttggccgagtg

SEQ ID NO: 142115 - DNA, 17 bp, Arabidopsis thaliana
tcggctttgttgctagt

SEQ ID NO: 142116 - DNA, 17 bp, Arabidopsis thaliana
tcggcttttgagttctt

SEQ ID NO: 142117 - DNA, 17 bp, Arabidopsis thaliana
tcggctttttgtcagga

SEQ ID NO: 142118 - DNA, 17 bp, Arabidopsis thaliana
tcgggaaaaggatcggt

SEQ ID NO: 142119 - DNA, 17 bp, Arabidopsis thaliana
tcgggaaaaggattggc

SEQ ID NO: 142120 - DNA, 17 bp, Arabidopsis thaliana
tcgggaagcgtcgttcg

SEQ ID NO: 142121 - DNA, 17 bp, Arabidopsis thaliana
tcgggaatatgaccagt

SEQ ID NO: 142122 - DNA, 17 bp, Arabidopsis thaliana
tcgggaattcgcggaag

SEQ ID NO: 142123 - DNA, 17 bp, Arabidopsis thaliana
tcgggaatttgatcgaa

SEQ ID NO: 142124 - DNA, 17 bp, Arabidopsis thaliana
tcgggacaaggggtgcc

SEQ ID NO: 142125 - DNA, 17 bp, Arabidopsis thaliana
tcgggacagacagtgtg

SEQ ID NO: 142126 - DNA, 17 bp, Arabidopsis thaliana
tcgggacagaggagaca

SEQ ID NO: 142127 - DNA, 17 bp, Arabidopsis thaliana
tcgggacagatagtgag

SEQ ID NO: 142128 - DNA, 17 bp, Arabidopsis thaliana
tcgggacccgaaagatg

SEQ ID NO: 142129 - DNA, 17 bp, Arabidopsis thaliana
tcgggacgaattgccag

SEQ ID NO: 142130 - DNA, 17 bp, Arabidopsis thaliana
tcgggacgggttggcgg

SEQ ID NO: 142131 - DNA, 17 bp, Arabidopsis thaliana
tcgggacttatttacaa

SEQ ID NO: 142132 - DNA, 17 bp, Arabidopsis thaliana
tcgggactttgcttctc

SEQ ID NO: 142133 - DNA, 17 bp, Arabidopsis thaliana
tcgggagaaggggtgac

SEQ ID NO: 142134 - DNA, 17 bp, Arabidopsis thaliana
tcgggagaaggggtgcc

SEQ ID NO: 142135 - DNA, 17 bp, Arabidopsis thaliana
tcgggagacatggtcca

SEQ ID NO: 142136 - DNA, 17 bp, Arabidopsis thaliana
tcgggagaccgcacacc

SEQ ID NO: 142137 - DNA, 17 bp, Arabidopsis thaliana
tcgggagattctctaac

SEQ ID NO: 142138 - DNA, 17 bp, Arabidopsis thaliana
tcgggagctttccccgg

SEQ ID NO: 142139 - DNA, 17 bp, Arabidopsis thaliana
tcgggaggcttcattcc

SEQ ID NO: 142140 - DNA, 17 bp, Arabidopsis thaliana
tcgggagggaagcggat

SEQ ID NO: 142141 - DNA, 17 bp, Arabidopsis thaliana
tcgggagggtgctatgc

SEQ ID NO: 142142 - DNA, 17 bp, Arabidopsis thaliana
tcgggaggttttctacc

SEQ ID NO: 142143 - DNA, 17 bp, Arabidopsis thaliana
tcgggagtatgaccggg

SEQ ID NO: 142144 - DNA, 17 bp, Arabidopsis thaliana
tcgggagtatggccgtg

SEQ ID NO: 142145 - DNA, 17 bp, Arabidopsis thaliana
tcgggagtttctggatc

SEQ ID NO: 142146 - DNA, 17 bp, Arabidopsis thaliana
tcgggatacatgctcga

SEQ ID NO: 142147 - DNA, 17 bp, Arabidopsis thaliana
tcgggatacggttgtgg

SEQ ID NO: 142148 - DNA, 17 bp, Arabidopsis thaliana
tcgggataggtaagttt

SEQ ID NO: 142149 - DNA, 17 bp, Arabidopsis thaliana
tcgggatcactgccgga

SEQ ID NO: 142150 - DNA, 17 bp, Arabidopsis thaliana
tcgggatccctcgcggg

SEQ ID NO: 142151 - DNA, 17 bp, Arabidopsis thaliana
tcgggatgacggtatcg

SEQ ID NO: 142152 - DNA, 17 bp, Arabidopsis thaliana
tcgggatgattcttcga

SEQ ID NO: 142153 - DNA, 17 bp, Arabidopsis thaliana
tcgggatggatatttcg

SEQ ID NO: 142154 - DNA, 17 bp, Arabidopsis thaliana
tcgggatggctcagatc

SEQ ID NO: 142155 - DNA, 17 bp, Arabidopsis thaliana
tcgggatggctctgcaa

SEQ ID NO: 142156 - DNA, 17 bp, Arabidopsis thaliana
tcgggatgtgttgggac

SEQ ID NO: 142157 - DNA, 17 bp, Arabidopsis thaliana
tcgggattacggtggcg

SEQ ID NO: 142158 - DNA, 17 bp, Arabidopsis thaliana
tcgggattcagatctgt

SEQ ID NO: 142159 - DNA, 17 bp, Arabidopsis thaliana
tcgggattcgttaacat

SEQ ID NO: 142160 - DNA, 17 bp, Arabidopsis thaliana
tcgggattttggcaagg

SEQ ID NO: 142161 - DNA, 17 bp, Arabidopsis thaliana
tcgggcaaataatttgc

SEQ ID NO: 142162 - DNA, 17 bp, Arabidopsis thaliana
tcgggcaacccgaatac

SEQ ID NO: 142163 - DNA, 17 bp, Arabidopsis thaliana
tcgggcaaggtaacgat

SEQ ID NO: 142164 - DNA, 17 bp, Arabidopsis thaliana
tcgggcaccgctgtggg

SEQ ID NO: 142165 - DNA, 17 bp, Arabidopsis thaliana
tcgggcacgtcagcctg

SEQ ID NO: 142166 - DNA, 17 bp, Arabidopsis thaliana
tcgggcacgtctgcctg

SEQ ID NO: 142167 - DNA, 17 bp, Arabidopsis thaliana
tcgggcatgacgttaat

SEQ ID NO: 142168 - DNA, 17 bp, Arabidopsis thaliana
tcgggcatggaggatga

SEQ ID NO: 142169 - DNA, 17 bp, Arabidopsis thaliana
tcgggcatggaggatgg

SEQ ID NO: 142170 - DNA, 17 bp, Arabidopsis thaliana
tcgggcatgtgatacct

SEQ ID NO: 142171 - DNA, 17 bp, Arabidopsis thaliana
tcgggcatttcgtgatt

SEQ ID NO: 142172 - DNA, 17 bp, Arabidopsis thaliana
tcgggcattttcgtaat

SEQ ID NO: 142173 - DNA, 17 bp, Arabidopsis thaliana
tcgggcattttcgtgac

SEQ ID NO: 142174 - DNA, 17 bp, Arabidopsis thaliana
tcgggcattttcgtgat

SEQ ID NO: 142175 - DNA, 17 bp, Arabidopsis thaliana
tcgggcatttttgtgat

SEQ ID NO: 142176 - DNA, 17 bp, Arabidopsis thaliana
tcgggcgaatgctcgat

SEQ ID NO: 142177 - DNA, 17 bp, Arabidopsis thaliana
tcgggcggtaaattccg

SEQ ID NO: 142178 - DNA, 17 bp, Arabidopsis thaliana
tcgggcgtaccaagcgg

SEQ ID NO: 142179 - DNA, 17 bp, Arabidopsis thaliana
tcgggcgtcatctccta

SEQ ID NO: 142180 - DNA, 17 bp, Arabidopsis thaliana
tcgggcgtttggtctag

SEQ ID NO: 142181 - DNA, 17 bp, Arabidopsis thaliana
tcgggctcgagactcca

SEQ ID NO: 142182 - DNA, 17 bp, Arabidopsis thaliana
tcgggctcgtgatttgt

SEQ ID NO: 142183 - DNA, 17 bp, Arabidopsis thaliana
tcgggctctatctggca

SEQ ID NO: 142184 - DNA, 17 bp, Arabidopsis thaliana
tcgggctgcgatttcag

SEQ ID NO: 142185 - DNA, 17 bp, Arabidopsis thaliana
tcgggctgctagtcaag

SEQ ID NO: 142186 - DNA, 17 bp, Arabidopsis thaliana
tcgggcttttgatacgc

SEQ ID NO: 142187 - DNA, 17 bp, Arabidopsis thaliana
tcggggaacctgtggct

SEQ ID NO: 142188 - DNA, 17 bp, Arabidopsis thaliana
tcggggaattacgggct

SEQ ID NO: 142189 - DNA, 17 bp, Arabidopsis thaliana
tcggggaattcagttta

SEQ ID NO: 142190 - DNA, 17 bp, Arabidopsis thaliana
tcggggacaaattgcgt

SEQ ID NO: 142191 - DNA, 17 bp, Arabidopsis thaliana
tcggggatagtttgact

SEQ ID NO: 142192 - DNA, 17 bp, Arabidopsis thaliana
tcggggatgtagctcaa

SEQ ID NO: 142193 - DNA, 17 bp, Arabidopsis thaliana
tcggggatgtagctcag

SEQ ID NO: 142194 - DNA, 17 bp, Arabidopsis thaliana
tcggggattctcgctct

SEQ ID NO: 142195 - DNA, 17 bp, Arabidopsis thaliana
tcggggatttgtccaca

SEQ ID NO: 142196 - DNA, 17 bp, Arabidopsis thaliana
tcggggattttcgtgat

SEQ ID NO: 142197 - DNA, 17 bp, Arabidopsis thaliana
tcggggatttttgtgat

SEQ ID NO: 142198 - DNA, 17 bp, Arabidopsis thaliana
tcggggcatttctaccg

SEQ ID NO: 142199 - DNA, 17 bp, Arabidopsis thaliana
tcggggccggaactcga

SEQ ID NO: 142200 - DNA, 17 bp, Arabidopsis thaliana
tcggggccgttcttctt

SEQ ID NO: 142201 - DNA, 17 bp, Arabidopsis thaliana
tcggggcgtggaccgac

SEQ ID NO: 142202 - DNA, 17 bp, Arabidopsis thaliana
tcggggcttttcgtgat

SEQ ID NO: 142203 - DNA, 17 bp, Arabidopsis thaliana
tcgggggaaacccgtct

SEQ ID NO: 142204 - DNA, 17 bp, Arabidopsis thaliana
tcgggggacggactggg

SEQ ID NO: 142205 - DNA, 17 bp, Arabidopsis thaliana
tcgggggcattcgtatt

SEQ ID NO: 142206 - DNA, 17 bp, Arabidopsis thaliana
tcgggggctgggactgg

SEQ ID NO: 142207 - DNA, 17 bp, Arabidopsis thaliana
tcgggggtcccagttcc

SEQ ID NO: 142208 - DNA, 17 bp, Arabidopsis thaliana
tcgggggttcgaatccc

SEQ ID NO: 142209 - DNA, 17 bp, Arabidopsis thaliana
tcggggtcatcaggcaa

SEQ ID NO: 142210 - DNA, 17 bp, Arabidopsis thaliana
tcggggtcgagtgatgt

SEQ ID NO: 142211 - DNA, 17 bp, Arabidopsis thaliana
tcggggtgtccatgtcc

SEQ ID NO: 142212 - DNA, 17 bp, Arabidopsis thaliana
tcggggtgttgattgat

SEQ ID NO: 142213 - DNA, 17 bp, Arabidopsis thaliana
tcggggttgtgtcgcaa

SEQ ID NO: 142214 - DNA, 17 bp, Arabidopsis thaliana
tcgggtaaatcctttgg

SEQ ID NO: 142215 - DNA, 17 bp, Arabidopsis thaliana
tcgggtaagcgggtcgg

SEQ ID NO: 142216 - DNA, 17 bp, Arabidopsis thaliana
tcgggtagtgaagtcga

SEQ ID NO: 142217 - DNA, 17 bp, Arabidopsis thaliana
tcgggtatcgggtttgg

SEQ ID NO: 142218 - DNA, 17 bp, Arabidopsis thaliana
tcgggtattcgattcgg

SEQ ID NO: 142219 - DNA, 17 bp, Arabidopsis thaliana
tcgggtattcgggttgg

SEQ ID NO: 142220 - DNA, 17 bp, Arabidopsis thaliana
tcgggtattttcgtgat

SEQ ID NO: 142221 - DNA, 17 bp, Arabidopsis thaliana
tcgggtatttttcccag

SEQ ID NO: 142222 - DNA, 17 bp, Arabidopsis thaliana
tcgggtcaaccaggttg

SEQ ID NO: 142223 - DNA, 17 bp, Arabidopsis thaliana
tcgggtcaaccgggtta

SEQ ID NO: 142224 - DNA, 17 bp, Arabidopsis thaliana
tcgggtcactcgcttac

SEQ ID NO: 142225 - DNA, 17 bp, Arabidopsis thaliana
tcgggtcaggcgtttac

SEQ ID NO: 142226 - DNA, 17 bp, Arabidopsis thaliana
tcgggtcataacggagg

SEQ ID NO: 142227 - DNA, 17 bp, Arabidopsis thaliana
tcgggtccacttttgtc

SEQ ID NO: 142228 - DNA, 17 bp, Arabidopsis thaliana
tcgggtccagttgggtt

SEQ ID NO: 142229 - DNA, 17 bp, Arabidopsis thaliana
tcgggtcccacccgccc

SEQ ID NO: 142230 - DNA, 17 bp, Arabidopsis thaliana
tcgggtcccaccgggcg

SEQ ID NO: 142231 - DNA, 17 bp, Arabidopsis thaliana
tcgggtcccaccgggtg

SEQ ID NO: 142232 - DNA, 17 bp, Arabidopsis thaliana
tcgggtcccactgggtg

SEQ ID NO: 142233 - DNA, 17 bp, Arabidopsis thaliana
tcgggtcccgacaggca

SEQ ID NO: 142234 - DNA, 17 bp, Arabidopsis thaliana
tcgggtccgtttcttcg

SEQ ID NO: 142235 - DNA, 17 bp, Arabidopsis thaliana
tcgggtccgttttttcg

SEQ ID NO: 142236 - DNA, 17 bp, Arabidopsis thaliana
tcgggtcggatcttttg

SEQ ID NO: 142237 - DNA, 17 bp, Arabidopsis thaliana
tcgggtcggtcgatagt

SEQ ID NO: 142238 - DNA, 17 bp, Arabidopsis thaliana
tcgggtcggttcggttt

SEQ ID NO: 142239 - DNA, 17 bp, Arabidopsis thaliana
tcgggtcggttcttcgg

SEQ ID NO: 142240 - DNA, 17 bp, Arabidopsis thaliana
tcgggtctaaggaattg

SEQ ID NO: 142241 - DNA, 17 bp, Arabidopsis thaliana
tcgggtctgagagatta

SEQ ID NO: 142242 - DNA, 17 bp, Arabidopsis thaliana
tcgggtctgggtggatt

SEQ ID NO: 142243 - DNA, 17 bp, Arabidopsis thaliana
tcgggtgctgacggttt

SEQ ID NO: 142244 - DNA, 17 bp, Arabidopsis thaliana
tcgggtgcttagcctaa

SEQ ID NO: 142245 - DNA, 17 bp, Arabidopsis thaliana
tcgggtgcttcttggct

SEQ ID NO: 142246 - DNA, 17 bp, Arabidopsis thaliana
tcgggtggagcgatttg

SEQ ID NO: 142247 - DNA, 17 bp, Arabidopsis thaliana
tcgggtggagggagact

SEQ ID NO: 142248 - DNA, 17 bp, Arabidopsis thaliana
tcgggtggtgcaggtcg

SEQ ID NO: 142249 - DNA, 17 bp, Arabidopsis thaliana
tcgggtgtaaaggagga

SEQ ID NO: 142250 - DNA, 17 bp, Arabidopsis thaliana
tcgggttagggttttcg

SEQ ID NO: 142251 - DNA, 17 bp, Arabidopsis thaliana
tcgggttcctcgaagta

SEQ ID NO: 142252 - DNA, 17 bp, Arabidopsis thaliana
tcgggttcggttctttt

SEQ ID NO: 142253 - DNA, 17 bp, Arabidopsis thaliana
tcgggttcgtgattggt

SEQ ID NO: 142254 - DNA, 17 bp, Arabidopsis thaliana
tcgggttcgtttcccgg

SEQ ID NO: 142255 - DNA, 17 bp, Arabidopsis thaliana
tcgggttcttacgtcta

SEQ ID NO: 142256 - DNA, 17 bp, Arabidopsis thaliana
tcgggttgagtatgtgc

SEQ ID NO: 142257 - DNA, 17 bp, Arabidopsis thaliana
tcgggttgcccgaccat

SEQ ID NO: 142258 - DNA, 17 bp, Arabidopsis thaliana
tcgggttgccttgtgga

SEQ ID NO: 142259 - DNA, 17 bp, Arabidopsis thaliana
tcgggttgccttgtgtt

SEQ ID NO: 142260 - DNA, 17 bp, Arabidopsis thaliana
tcgggttgttgcttgtt

SEQ ID NO: 142261 - DNA, 17 bp, Arabidopsis thaliana
tcgggttgtttgggaat

SEQ ID NO: 142262 - DNA, 17 bp, Arabidopsis thaliana
tcgggttgtttgggagt

SEQ ID NO: 142263 - DNA, 17 bp, Arabidopsis thaliana
tcgggtttaagcttttt

SEQ ID NO: 142264 - DNA, 17 bp, Arabidopsis thaliana
tcgggtttaatcgggtt

SEQ ID NO: 142265 - DNA, 17 bp, Arabidopsis thaliana
tcgggtttactggtttg

SEQ ID NO: 142266 - DNA, 17 bp, Arabidopsis thaliana
tcgggttttgaagttta

SEQ ID NO: 142267 - DNA, 17 bp, Arabidopsis thaliana
tcgggtttttatttcat

SEQ ID NO: 142268 - DNA, 17 bp, Arabidopsis thaliana
tcggtaaacctctgcat

SEQ ID NO: 142269 - DNA, 17 bp, Arabidopsis thaliana
tcggtaacggatatctc

SEQ ID NO: 142270 - DNA, 17 bp, Arabidopsis thaliana
tcggtaatcaaagacgg

SEQ ID NO: 142271 - DNA, 17 bp, Arabidopsis thaliana
tcggtagaggagtgccg

SEQ ID NO: 142272 - DNA, 17 bp, Arabidopsis thaliana
tcggtagccgtggcttt

SEQ ID NO: 142273 - DNA, 17 bp, Arabidopsis thaliana
tcggtagcggccacgcc

SEQ ID NO: 142274 - DNA, 17 bp, Arabidopsis thaliana
tcggtagctgctgcgtt

SEQ ID NO: 142275 - DNA, 17 bp, Arabidopsis thaliana
tcggtaggacgtgtcgg

SEQ ID NO: 142276 - DNA, 17 bp, Arabidopsis thaliana
tcggtaggcttcatccc

SEQ ID NO: 142277 - DNA, 17 bp, Arabidopsis thaliana
tcggtaggcttcatcct

SEQ ID NO: 142278 - DNA, 17 bp, Arabidopsis thaliana
tcggtatccaagcttgc

SEQ ID NO: 142279 - DNA, 17 bp, Arabidopsis thaliana
tcggtatcgtctgtcgt

SEQ ID NO: 142280 - DNA, 17 bp, Arabidopsis thaliana
tcggtatctaaccattc

SEQ ID NO: 142281 - DNA, 17 bp, Arabidopsis thaliana
tcggtatgttccggcaa

SEQ ID NO: 142282 - DNA, 17 bp, Arabidopsis thaliana
tcggtattgtggtctaa

SEQ ID NO: 142283 - DNA, 17 bp, Arabidopsis thaliana
tcggtatttcagtctgt

SEQ ID NO: 142284 - DNA, 17 bp, Arabidopsis thaliana
tcggtcagatgtggttt

SEQ ID NO: 142285 - DNA, 17 bp, Arabidopsis thaliana
tcggtcagcgtcgactc

SEQ ID NO: 142286 - DNA, 17 bp, Arabidopsis thaliana
tcggtcaggtatgcttt

SEQ ID NO: 142287 - DNA, 17 bp, Arabidopsis thaliana
tcggtcagtttgtcact

SEQ ID NO: 142288 - DNA, 17 bp, Arabidopsis thaliana
tcggtcattgtgtcgcc

SEQ ID NO: 142289 - DNA, 17 bp, Arabidopsis thaliana
tcggtccaaaacctcct

SEQ ID NO: 142290 - DNA, 17 bp, Arabidopsis thaliana
tcggtccaggcttcatt

SEQ ID NO: 142291 - DNA, 17 bp, Arabidopsis thaliana
tcggtccataaacttgt

SEQ ID NO: 142292 - DNA, 17 bp, Arabidopsis thaliana
tcggtccatcacagctc

SEQ ID NO: 142293 - DNA, 17 bp, Arabidopsis thaliana
tcggtcccaaggctcgc

SEQ ID NO: 142294 - DNA, 17 bp, Arabidopsis thaliana
tcggtcccagacgccaa

SEQ ID NO: 142295 - DNA, 17 bp, Arabidopsis thaliana
tcggtccccacagacgg

SEQ ID NO: 142296 - DNA, 17 bp, Arabidopsis thaliana
tcggtccgctacgtccg

SEQ ID NO: 142297 - DNA, 17 bp, Arabidopsis thaliana
tcggtccgtctaaccgc

SEQ ID NO: 142298 - DNA, 17 bp, Arabidopsis thaliana
tcggtcctaagtctaaa

SEQ ID NO: 142299 - DNA, 17 bp, Arabidopsis thaliana
tcggtcctcccaaactc

SEQ ID NO: 142300 - DNA, 17 bp, Arabidopsis thaliana
tcggtcctgcgtgtggg

SEQ ID NO: 142301 - DNA, 17 bp, Arabidopsis thaliana
tcggtcgagagggatgg

SEQ ID NO: 142302 - DNA, 17 bp, Arabidopsis thaliana
tcggtcgatctttggtt

SEQ ID NO: 142303 - DNA, 17 bp, Arabidopsis thaliana
tcggtcgatttcttact

SEQ ID NO: 142304 - DNA, 17 bp, Arabidopsis thaliana
tcggtcgcagggttatg

SEQ ID NO: 142305 - DNA, 17 bp, Arabidopsis thaliana
tcggtcgcatctgtaga

SEQ ID NO: 142306 - DNA, 17 bp, Arabidopsis thaliana
tcggtcgctgccgtgat

SEQ ID NO: 142307 - DNA, 17 bp, Arabidopsis thaliana
tcggtcggaccggacgg

SEQ ID NO: 142308 - DNA, 17 bp, Arabidopsis thaliana
tcggtcggccaatagcc

SEQ ID NO: 142309 - DNA, 17 bp, Arabidopsis thaliana
tcggtcggcgatacgct

SEQ ID NO: 142310 - DNA, 17 bp, Arabidopsis thaliana
tcggtcggcttgtccct

SEQ ID NO: 142311 - DNA, 17 bp, Arabidopsis thaliana
tcggtcggtccgccttt

SEQ ID NO: 142312 - DNA, 17 bp, Arabidopsis thaliana
tcggtcggtgcagatct

SEQ ID NO: 142313 - DNA, 17 bp, Arabidopsis thaliana
tcggtcggtttagaaat

SEQ ID NO: 142314 - DNA, 17 bp, Arabidopsis thaliana
tcggtcgttcaaagctg

SEQ ID NO: 142315 - DNA, 17 bp, Arabidopsis thaliana
tcggtctaacgggcatg

SEQ ID NO: 142316 - DNA, 17 bp, Arabidopsis thaliana
tcggtctaacgtttgca

SEQ ID NO: 142317 - DNA, 17 bp, Arabidopsis thaliana
tcggtctaggcctccgt

SEQ ID NO: 142318 - DNA, 17 bp, Arabidopsis thaliana
tcggtctgagaaggtgg

SEQ ID NO: 142319 - DNA, 17 bp, Arabidopsis thaliana
tcggtctgaggctcttt

SEQ ID NO: 142320 - DNA, 17 bp, Arabidopsis thaliana
tcggtctgcctgggtgt

SEQ ID NO: 142321 - DNA, 17 bp, Arabidopsis thaliana
tcggtctgtagcgattt

SEQ ID NO: 142322 - DNA, 17 bp, Arabidopsis thaliana
tcggtcttcgtggttca

SEQ ID NO: 142323 - DNA, 17 bp, Arabidopsis thaliana
tcggtgaacctgcggaa

SEQ ID NO: 142324 - DNA, 17 bp, Arabidopsis thaliana
tcggtgaacgaatcagg

SEQ ID NO: 142325 - DNA, 17 bp, Arabidopsis thaliana
tcggtgaacgacctgtg

SEQ ID NO: 142326 - DNA, 17 bp, Arabidopsis thaliana
tcggtgaacttcttgga

SEQ ID NO: 142327 - DNA, 17 bp, Arabidopsis thaliana
tcggtgacggagaatta

SEQ ID NO: 142328 - DNA, 17 bp, Arabidopsis thaliana
tcggtgacggagattca

SEQ ID NO: 142329 - DNA, 17 bp, Arabidopsis thaliana
tcggtgactcaaggtta

SEQ ID NO: 142330 - DNA, 17 bp, Arabidopsis thaliana
tcggtgactctgattcg

SEQ ID NO: 142331 - DNA, 17 bp, Arabidopsis thaliana
tcggtgagctgatcgtg

SEQ ID NO: 142332 - DNA, 17 bp, Arabidopsis thaliana
tcggtgaggttgtgaat

SEQ ID NO: 142333 - DNA, 17 bp, Arabidopsis thaliana
tcggtgatggagccgat

SEQ ID NO: 142334 - DNA, 17 bp, Arabidopsis thaliana
tcggtgattgccgactc

SEQ ID NO: 142335 - DNA, 17 bp, Arabidopsis thaliana
tcggtgatttctagctc

SEQ ID NO: 142336 - DNA, 17 bp, Arabidopsis thaliana
tcggtgatttgttattg

SEQ ID NO: 142337 - DNA, 17 bp, Arabidopsis thaliana
tcggtgcagatcttggc

SEQ ID NO: 142338 - DNA, 17 bp, Arabidopsis thaliana
tcggtgcagatcttggt

SEQ ID NO: 142339 - DNA, 17 bp, Arabidopsis thaliana
tcggtgcattggtcggc

SEQ ID NO: 142340 - DNA, 17 bp, Arabidopsis thaliana
tcggtgcatttctaccg

SEQ ID NO: 142341 - DNA, 17 bp, Arabidopsis thaliana
tcggtgcggatggcaga

SEQ ID NO: 142342 - DNA, 17 bp, Arabidopsis thaliana
tcggtgcggtggtgcca

SEQ ID NO: 142343 - DNA, 17 bp, Arabidopsis thaliana
tcggtgctgggccgtta

SEQ ID NO: 142344 - DNA, 17 bp, Arabidopsis thaliana
tcggtggaacactggct

SEQ ID NO: 142345 - DNA, 17 bp, Arabidopsis thaliana
tcggtggaggtgctggg

SEQ ID NO: 142346 - DNA, 17 bp, Arabidopsis thaliana
tcggtggagtcgtcaac

SEQ ID NO: 142347 - DNA, 17 bp, Arabidopsis thaliana
tcggtggatcttagaaa

SEQ ID NO: 142348 - DNA, 17 bp, Arabidopsis thaliana
tcggtggatcttagtcg

SEQ ID NO: 142349 - DNA, 17 bp, Arabidopsis thaliana
tcggtggcagagatgtt

SEQ ID NO: 142350 - DNA, 17 bp, Arabidopsis thaliana
tcggtggctatcaagga

SEQ ID NO: 142351 - DNA, 17 bp, Arabidopsis thaliana
tcggtggctccagtgac

SEQ ID NO: 142352 - DNA, 17 bp, Arabidopsis thaliana
tcggtgggccacgtccg

SEQ ID NO: 142353 - DNA, 17 bp, Arabidopsis thaliana
tcggtgggccggtttct

SEQ ID NO: 142354 - DNA, 17 bp, Arabidopsis thaliana
tcggtgggtgcgcctat

SEQ ID NO: 142355 - DNA, 17 bp, Arabidopsis thaliana
tcggtggtattccctat

SEQ ID NO: 142356 - DNA, 17 bp, Arabidopsis thaliana
tcggtggttgtctgtcg

SEQ ID NO: 142357 - DNA, 17 bp, Arabidopsis thaliana
tcggtgtccaccgggtt

SEQ ID NO: 142358 - DNA, 17 bp, Arabidopsis thaliana
tcggtgtgatggcaact

SEQ ID NO: 142359 - DNA, 17 bp, Arabidopsis thaliana
tcggtgtgcattggtcg

SEQ ID NO: 142360 - DNA, 17 bp, Arabidopsis thaliana
tcggtgtgcattggtgg

SEQ ID NO: 142361 - DNA, 17 bp, Arabidopsis thaliana
tcggtgtttcgactcgc

SEQ ID NO: 142362 - DNA, 17 bp, Arabidopsis thaliana
tcggttaaagtacggtt

SEQ ID NO: 142363 - DNA, 17 bp, Arabidopsis thaliana
tcggttaaccggcgtct

SEQ ID NO: 142364 - DNA, 17 bp, Arabidopsis thaliana
tcggttaagcaaacgcg

SEQ ID NO: 142365 - DNA, 17 bp, Arabidopsis thaliana
tcggttaatccgacagg

SEQ ID NO: 142366 - DNA, 17 bp, Arabidopsis thaliana
tcggttaatctaagtta

SEQ ID NO: 142367 - DNA, 17 bp, Arabidopsis thaliana
tcggttaggatatctgg

SEQ ID NO: 142368 - DNA, 17 bp, Arabidopsis thaliana
tcggttaggcttcattc

SEQ ID NO: 142369 - DNA, 17 bp, Arabidopsis thaliana
tcggttagggtcattcg

SEQ ID NO: 142370 - DNA, 17 bp, Arabidopsis thaliana
tcggttaggttagggtt

SEQ ID NO: 142371 - DNA, 17 bp, Arabidopsis thaliana
tcggttatgaaacttcg

SEQ ID NO: 142372 - DNA, 17 bp, Arabidopsis thaliana
tcggttattgcgtcttc

SEQ ID NO: 142373 - DNA, 17 bp, Arabidopsis thaliana
tcggttcaaatcccact

SEQ ID NO: 142374 - DNA, 17 bp, Arabidopsis thaliana
tcggttcaaccggttca

SEQ ID NO: 142375 - DNA, 17 bp, Arabidopsis thaliana
tcggttcaaggacgcaa

SEQ ID NO: 142376 - DNA, 17 bp, Arabidopsis thaliana
tcggttcataggtgttt

SEQ ID NO: 142377 - DNA, 17 bp, Arabidopsis thaliana
tcggttcccattaggca

SEQ ID NO: 142378 - DNA, 17 bp, Arabidopsis thaliana
tcggttccgaggaatcg

SEQ ID NO: 142379 - DNA, 17 bp, Arabidopsis thaliana
tcggttccggcaggtcg

SEQ ID NO: 142380 - DNA, 17 bp, Arabidopsis thaliana
tcggttccgttacaagt

SEQ ID NO: 142381 - DNA, 17 bp, Arabidopsis thaliana
tcggttcctatctaccg

SEQ ID NO: 142382 - DNA, 17 bp, Arabidopsis thaliana
tcggttcctcctccagt

SEQ ID NO: 142383 - DNA, 17 bp, Arabidopsis thaliana
tcggttcgaatcccact

SEQ ID NO: 142384 - DNA, 17 bp, Arabidopsis thaliana
tcggttcgaatcccgtc

SEQ ID NO: 142385 - DNA, 17 bp, Arabidopsis thaliana
tcggttcgaattgcgtg

SEQ ID NO: 142386 - DNA, 17 bp, Arabidopsis thaliana
tcggttcgaccgtttga

SEQ ID NO: 142387 - DNA, 17 bp, Arabidopsis thaliana
tcggttcgagtccgagt

SEQ ID NO: 142388 - DNA, 17 bp, Arabidopsis thaliana
tcggttcgattcggata

SEQ ID NO: 142389 - DNA, 17 bp, Arabidopsis thaliana
tcggttcggacttgggt

SEQ ID NO: 142390 - DNA, 17 bp, Arabidopsis thaliana
tcggttcggataatcgg

SEQ ID NO: 142391 - DNA, 17 bp, Arabidopsis thaliana
tcggttcggatccaatc

SEQ ID NO: 142392 - DNA, 17 bp, Arabidopsis thaliana
tcggttcgggtcggaga

SEQ ID NO: 142393 - DNA, 17 bp, Arabidopsis thaliana
tcggttcgggtcggttc

SEQ ID NO: 142394 - DNA, 17 bp, Arabidopsis thaliana
tcggttcggttattggc

SEQ ID NO: 142395 - DNA, 17 bp, Arabidopsis thaliana
tcggttctccgttctgc

SEQ ID NO: 142396 - DNA, 17 bp, Arabidopsis thaliana
tcggttctctggattcg

SEQ ID NO: 142397 - DNA, 17 bp, Arabidopsis thaliana
tcggttcttcgcctcca

SEQ ID NO: 142398 - DNA, 17 bp, Arabidopsis thaliana
tcggttcttcgggttcg

SEQ ID NO: 142399 - DNA, 17 bp, Arabidopsis thaliana
tcggttgaatgactctc

SEQ ID NO: 142400 - DNA, 17 bp, Arabidopsis thaliana
tcggttgacacatcgca

SEQ ID NO: 142401 - DNA, 17 bp, Arabidopsis thaliana
tcggttgactacacggc

SEQ ID NO: 142402 - DNA, 17 bp, Arabidopsis thaliana
tcggttgatccgctcgg

SEQ ID NO: 142403 - DNA, 17 bp, Arabidopsis thaliana
tcggttgcactttgtct

SEQ ID NO: 142404 - DNA, 17 bp, Arabidopsis thaliana
tcggttgccttcagaga

SEQ ID NO: 142405 - DNA, 17 bp, Arabidopsis thaliana
tcggttgccttcaggga

SEQ ID NO: 142406 - DNA, 17 bp, Arabidopsis thaliana
tcggttgcgcatggttt

SEQ ID NO: 142407 - DNA, 17 bp, Arabidopsis thaliana
tcggttgcggttgcggg

SEQ ID NO: 142408 - DNA, 17 bp, Arabidopsis thaliana
tcggttgctatgtttgc

SEQ ID NO: 142409 - DNA, 17 bp, Arabidopsis thaliana
tcggttggaccgcaggg

SEQ ID NO: 142410 - DNA, 17 bp, Arabidopsis thaliana
tcggttggagatttcca

SEQ ID NO: 142411 - DNA, 17 bp, Arabidopsis thaliana
tcggttggcagcggctg

SEQ ID NO: 142412 - DNA, 17 bp, Arabidopsis thaliana
tcggttggcgatacgct

SEQ ID NO: 142413 - DNA, 17 bp, Arabidopsis thaliana
tcggttggctaattgtt

SEQ ID NO: 142414 - DNA, 17 bp, Arabidopsis thaliana
tcggttggggaagacac

SEQ ID NO: 142415 - DNA, 17 bp, Arabidopsis thaliana
tcggttggtgcaggtcg

SEQ ID NO: 142416 - DNA, 17 bp, Arabidopsis thaliana
tcggttggtgcgttcaa

SEQ ID NO: 142417 - DNA, 17 bp, Arabidopsis thaliana
tcggttgtctgtcggtt

SEQ ID NO: 142418 - DNA, 17 bp, Arabidopsis thaliana
tcggttgtggacttgtt

SEQ ID NO: 142419 - DNA, 17 bp, Arabidopsis thaliana
tcggtttaaaatcgctg

SEQ ID NO: 142420 - DNA, 17 bp, Arabidopsis thaliana
tcggtttaagtttctct

SEQ ID NO: 142421 - DNA, 17 bp, Arabidopsis thaliana
tcggtttatttcgatga

SEQ ID NO: 142422 - DNA, 17 bp, Arabidopsis thaliana
tcggtttatttgcctag

SEQ ID NO: 142423 - DNA, 17 bp, Arabidopsis thaliana
tcggtttcgggaagcgc

SEQ ID NO: 142424 - DNA, 17 bp, Arabidopsis thaliana
tcggtttcggtccgatt

SEQ ID NO: 142425 - DNA, 17 bp, Arabidopsis thaliana
tcggtttcggttcagat

SEQ ID NO: 142426 - DNA, 17 bp, Arabidopsis thaliana
tcggtttcttcgtctgt

SEQ ID NO: 142427 - DNA, 17 bp, Arabidopsis thaliana
tcggtttgagtatgtgc

SEQ ID NO: 142428 - DNA, 17 bp, Arabidopsis thaliana
tcggtttgctcggtttt

SEQ ID NO: 142429 - DNA, 17 bp, Arabidopsis thaliana
tcggtttgggttccagt

SEQ ID NO: 142430 - DNA, 17 bp, Arabidopsis thaliana
tcggtttggttattttt

SEQ ID NO: 142431 - DNA, 17 bp, Arabidopsis thaliana
tcggtttggttcggcta

SEQ ID NO: 142432 - DNA, 17 bp, Arabidopsis thaliana
tcggtttgtaagacctt

SEQ ID NO: 142433 - DNA, 17 bp, Arabidopsis thaliana
tcggtttgtagatggtt

SEQ ID NO: 142434 - DNA, 17 bp, Arabidopsis thaliana
tcggtttgttcggttcg

SEQ ID NO: 142435 - DNA, 17 bp, Arabidopsis thaliana
tcggtttgtttattttt

SEQ ID NO: 142436 - DNA, 17 bp, Arabidopsis thaliana
tcggttttgcggtgcgg

SEQ ID NO: 142437 - DNA, 17 bp, Arabidopsis thaliana
tcggttttgctccagaa

SEQ ID NO: 142438 - DNA, 17 bp, Arabidopsis thaliana
tcggttttggttcagtt

SEQ ID NO: 142439 - DNA, 17 bp, Arabidopsis thaliana
tcggtttttggtgggcg

SEQ ID NO: 142440 - DNA, 17 bp, Arabidopsis thaliana
tcgtaaaaccgccgcgt

SEQ ID NO: 142441 - DNA, 17 bp, Arabidopsis thaliana
tcgtaaaatttttttcc

SEQ ID NO: 142442 - DNA, 17 bp, Arabidopsis thaliana
tcgtaaaccgacgtttt

SEQ ID NO: 142443 - DNA, 17 bp, Arabidopsis thaliana
tcgtaaatccgtcgcaa

SEQ ID NO: 142444 - DNA, 17 bp, Arabidopsis thaliana
tcgtaaatctcggctga

SEQ ID NO: 142445 - DNA, 17 bp, Arabidopsis thaliana
tcgtaacctggctctca

SEQ ID NO: 142446 - DNA, 17 bp, Arabidopsis thaliana
tcgtaacctggctctga

SEQ ID NO: 142447 - DNA, 17 bp, Arabidopsis thaliana
tcgtaacgcctagggtt

SEQ ID NO: 142448 - DNA, 17 bp, Arabidopsis thaliana
tcgtaacggctgaagca

SEQ ID NO: 142449 - DNA, 17 bp, Arabidopsis thaliana
tcgtaagcaaggttgga

SEQ ID NO: 142450 - DNA, 17 bp, Arabidopsis thaliana
tcgtaagccgattctac

SEQ ID NO: 142451 - DNA, 17 bp, Arabidopsis thaliana
tcgtaatccacatcggt

SEQ ID NO: 142452 - DNA, 17 bp, Arabidopsis thaliana
tcgtaatctcaacttcg

SEQ ID NO: 142453 - DNA, 17 bp, Arabidopsis thaliana
tcgtacactcaggacgt

SEQ ID NO: 142454 - DNA, 17 bp, Arabidopsis thaliana
tcgtacatcgccgctct

SEQ ID NO: 142455 - DNA, 17 bp, Arabidopsis thaliana
tcgtaccacagacttta

SEQ ID NO: 142456 - DNA, 17 bp, Arabidopsis thaliana
tcgtaccaggcttcatc

SEQ ID NO: 142457 - DNA, 17 bp, Arabidopsis thaliana
tcgtaccaggcttcatt

SEQ ID NO: 142458 - DNA, 17 bp, Arabidopsis thaliana
tcgtacccaaccgcttc

SEQ ID NO: 142459 - DNA, 17 bp, Arabidopsis thaliana
tcgtacccgggcgaagc

SEQ ID NO: 142460 - DNA, 17 bp, Arabidopsis thaliana
tcgtacccgggctcaga

SEQ ID NO: 142461 - DNA, 17 bp, Arabidopsis thaliana
tcgtacccggttgagcc

SEQ ID NO: 142462 - DNA, 17 bp, Arabidopsis thaliana
tcgtaccctgctgtcga

SEQ ID NO: 142463 - DNA, 17 bp, Arabidopsis thaliana
tcgtacgtctgcctggg

SEQ ID NO: 142464 - DNA, 17 bp, Arabidopsis thaliana
tcgtacgttacgaatct

SEQ ID NO: 142465 - DNA, 17 bp, Arabidopsis thaliana
tcgtactaatgcgacat

SEQ ID NO: 142466 - DNA, 17 bp, Arabidopsis thaliana
tcgtactaggatgggag

SEQ ID NO: 142467 - DNA, 17 bp, Arabidopsis thaliana
tcgtactaggatgggtg

SEQ ID NO: 142468 - DNA, 17 bp, Arabidopsis thaliana
tcgtactatcgacccaa

SEQ ID NO: 142469 - DNA, 17 bp, Arabidopsis thaliana
tcgtactcagactcgtt

SEQ ID NO: 142470 - DNA, 17 bp, Arabidopsis thaliana
tcgtactcataaccgca

SEQ ID NO: 142471 - DNA, 17 bp, Arabidopsis thaliana
tcgtactccaccaccca

SEQ ID NO: 142472 - DNA, 17 bp, Arabidopsis thaliana
tcgtactctttctctct

SEQ ID NO: 142473 - DNA, 17 bp, Arabidopsis thaliana
tcgtactgaaccgcttc

SEQ ID NO: 142474 - DNA, 17 bp, Arabidopsis thaliana
tcgtactgagttcaatt

SEQ ID NO: 142475 - DNA, 17 bp, Arabidopsis thaliana
tcgtactggatggtctt

SEQ ID NO: 142476 - DNA, 17 bp, Arabidopsis thaliana
tcgtactgtcaaaatgt

SEQ ID NO: 142477 - DNA, 17 bp, Arabidopsis thaliana
tcgtactgtgtggtttc

SEQ ID NO: 142478 - DNA, 17 bp, Arabidopsis thaliana
tcgtacttctattagct

SEQ ID NO: 142479 - DNA, 17 bp, Arabidopsis thaliana
tcgtactttgccttgtc

SEQ ID NO: 142480 - DNA, 17 bp, Arabidopsis thaliana
tcgtactttttcgggca

SEQ ID NO: 142481 - DNA, 17 bp, Arabidopsis thaliana
tcgtagacgttgacaat

SEQ ID NO: 142482 - DNA, 17 bp, Arabidopsis thaliana
tcgtagactgtcgttct

SEQ ID NO: 142483 - DNA, 17 bp, Arabidopsis thaliana
tcgtagatcgtcttttt

SEQ ID NO: 142484 - DNA, 17 bp, Arabidopsis thaliana
tcgtagattgtccatta

SEQ ID NO: 142485 - DNA, 17 bp, Arabidopsis thaliana
tcgtagattgtccgtta

SEQ ID NO: 142486 - DNA, 17 bp, Arabidopsis thaliana
tcgtagccaggttcgac

SEQ ID NO: 142487 - DNA, 17 bp, Arabidopsis thaliana
tcgtagcctgcgcgatg

SEQ ID NO: 142488 - DNA, 17 bp, Arabidopsis thaliana
tcgtaggactactcggt

SEQ ID NO: 142489 - DNA, 17 bp, Arabidopsis thaliana
tcgtagggcacgtctgc

SEQ ID NO: 142490 - DNA, 17 bp, Arabidopsis thaliana
tcgtaggtgaacctgcg

SEQ ID NO: 142491 - DNA, 17 bp, Arabidopsis thaliana
tcgtaggtgaagctgcg

SEQ ID NO: 142492 - DNA, 17 bp, Arabidopsis thaliana
tcgtaggtggacctgcg

SEQ ID NO: 142493 - DNA, 17 bp, Arabidopsis thaliana
tcgtagtacaaagatcg

SEQ ID NO: 142494 - DNA, 17 bp, Arabidopsis thaliana
tcgtagtcgaaccttgg

SEQ ID NO: 142495 - DNA, 17 bp, Arabidopsis thaliana
tcgtagtcgcatcctgt

SEQ ID NO: 142496 - DNA, 17 bp, Arabidopsis thaliana
tcgtagtcgcattctgt

SEQ ID NO: 142497 - DNA, 17 bp, Arabidopsis thaliana
tcgtagttcctacgggg

SEQ ID NO: 142498 - DNA, 17 bp, Arabidopsis thaliana
tcgtagttgaaccttgg

SEQ ID NO: 142499 - DNA, 17 bp, Arabidopsis thaliana
tcgtagttttgtggtag

SEQ ID NO: 142500 - DNA, 17 bp, Arabidopsis thaliana
tcgtatcaccttaacgg

SEQ ID NO: 142501 - DNA, 17 bp, Arabidopsis thaliana
tcgtatcaggtcgcttc

SEQ ID NO: 142502 - DNA, 17 bp, Arabidopsis thaliana
tcgtatcaggtgcagag

SEQ ID NO: 142503 - DNA, 17 bp, Arabidopsis thaliana
tcgtatcagtttcacca

SEQ ID NO: 142504 - DNA, 17 bp, Arabidopsis thaliana
tcgtatccaagtgtgtt

SEQ ID NO: 142505 - DNA, 17 bp, Arabidopsis thaliana
tcgtatccggtagggcc

SEQ ID NO: 142506 - DNA, 17 bp, Arabidopsis thaliana
tcgtatcctgccgttca

SEQ ID NO: 142507 - DNA, 17 bp, Arabidopsis thaliana
tcgtatcctgctgttga

SEQ ID NO: 142508 - DNA, 17 bp, Arabidopsis thaliana
tcgtatcggattacgcc

SEQ ID NO: 142509 - DNA, 17 bp, Arabidopsis thaliana
tcgtatcgtagctgctc

SEQ ID NO: 142510 - DNA, 17 bp, Arabidopsis thaliana
tcgtatctctcaggcga

SEQ ID NO: 142511 - DNA, 17 bp, Arabidopsis thaliana
tcgtatctctcaggtgt

SEQ ID NO: 142512 - DNA, 17 bp, Arabidopsis thaliana
tcgtatctctgacattc

SEQ ID NO: 142513 - DNA, 17 bp, Arabidopsis thaliana
tcgtatctgttagcgtt

SEQ ID NO: 142514 - DNA, 17 bp, Arabidopsis thaliana
tcgtatgcagtcacgat

SEQ ID NO: 142515 - DNA, 17 bp, Arabidopsis thaliana
tcgtatggattttggcc

SEQ ID NO: 142516 - DNA, 17 bp, Arabidopsis thaliana
tcgtatggtcgcaaggc

SEQ ID NO: 142517 - DNA, 17 bp, Arabidopsis thaliana
tcgtattcgtagctaca

SEQ ID NO: 142518 - DNA, 17 bp, Arabidopsis thaliana
tcgtattctaccttggt

SEQ ID NO: 142519 - DNA, 17 bp, Arabidopsis thaliana
tcgtattgtggatgtcg

SEQ ID NO: 142520 - DNA, 17 bp, Arabidopsis thaliana
tcgtcaacttcgtatgc

SEQ ID NO: 142521 - DNA, 17 bp, Arabidopsis thaliana
tcgtcaatcggctggaa

SEQ ID NO: 142522 - DNA, 17 bp, Arabidopsis thaliana
tcgtcaatggtgattaa

SEQ ID NO: 142523 - DNA, 17 bp, Arabidopsis thaliana
tcgtcaatgtccgccat

SEQ ID NO: 142524 - DNA, 17 bp, Arabidopsis thaliana
tcgtcaccgctcaagat

SEQ ID NO: 142525 - DNA, 17 bp, Arabidopsis thaliana
tcgtcacgaggtttggg

SEQ ID NO: 142526 - DNA, 17 bp, Arabidopsis thaliana
tcgtcacggataacggt

SEQ ID NO: 142527 - DNA, 17 bp, Arabidopsis thaliana
tcgtcactcttatggga

SEQ ID NO: 142528 - DNA, 17 bp, Arabidopsis thaliana
tcgtcacttgttttctg

SEQ ID NO: 142529 - DNA, 17 bp, Arabidopsis thaliana
tcgtcagaacagcttgc

SEQ ID NO: 142530 - DNA, 17 bp, Arabidopsis thaliana
tcgtcagacggatcgat

SEQ ID NO: 142531 - DNA, 17 bp, Arabidopsis thaliana
tcgtcagccctttgtcg

SEQ ID NO: 142532 - DNA, 17 bp, Arabidopsis thaliana
tcgtcagcgattttggg

SEQ ID NO: 142533 - DNA, 17 bp, Arabidopsis thaliana
tcgtcagggtccaagtg

SEQ ID NO: 142534 - DNA, 17 bp, Arabidopsis thaliana
tcgtcaggtattgatgt

SEQ ID NO: 142535 - DNA, 17 bp, Arabidopsis thaliana
tcgtcagtttccgagct

SEQ ID NO: 142536 - DNA, 17 bp, Arabidopsis thaliana
tcgtcagtttgatgtcc

SEQ ID NO: 142537 - DNA, 17 bp, Arabidopsis thaliana
tcgtcatacttggtgta

SEQ ID NO: 142538 - DNA, 17 bp, Arabidopsis thaliana
tcgtcatagtctttctt

SEQ ID NO: 142539 - DNA, 17 bp, Arabidopsis thaliana
tcgtcatagttttcttg

SEQ ID NO: 142540 - DNA, 17 bp, Arabidopsis thaliana
tcgtcatatctacggtt

SEQ ID NO: 142541 - DNA, 17 bp, Arabidopsis thaliana
tcgtcatcagagtcgtg

SEQ ID NO: 142542 - DNA, 17 bp, Arabidopsis thaliana
tcgtcatcagctcgcgt

SEQ ID NO: 142543 - DNA, 17 bp, Arabidopsis thaliana
tcgtcatcatttctttg

SEQ ID NO: 142544 - DNA, 17 bp, Arabidopsis thaliana
tcgtcatccataagcct

SEQ ID NO: 142545 - DNA, 17 bp, Arabidopsis thaliana
tcgtcatcgagctgctg

SEQ ID NO: 142546 - DNA, 17 bp, Arabidopsis thaliana
tcgtcatcggatctggc

SEQ ID NO: 142547 - DNA, 17 bp, Arabidopsis thaliana
tcgtcatcgttttgcct

SEQ ID NO: 142548 - DNA, 17 bp, Arabidopsis thaliana
tcgtcatctctacaaat

SEQ ID NO: 142549 - DNA, 17 bp, Arabidopsis thaliana
tcgtcatgatttgttag

SEQ ID NO: 142550 - DNA, 17 bp, Arabidopsis thaliana
tcgtcattaggatgtca

SEQ ID NO: 142551 - DNA, 17 bp, Arabidopsis thaliana
tcgtcattctgtcttcc

SEQ ID NO: 142552 - DNA, 17 bp, Arabidopsis thaliana
tcgtcattcttcagtta

SEQ ID NO: 142553 - DNA, 17 bp, Arabidopsis thaliana
tcgtcattgagttggct

SEQ ID NO: 142554 - DNA, 17 bp, Arabidopsis thaliana
tcgtcattgttttgatg

SEQ ID NO: 142555 - DNA, 17 bp, Arabidopsis thaliana
tcgtccaaatactctgc

SEQ ID NO: 142556 - DNA, 17 bp, Arabidopsis thaliana
tcgtccaacatcctatg

SEQ ID NO: 142557 - DNA, 17 bp, Arabidopsis thaliana
tcgtccacagtagtact

SEQ ID NO: 142558 - DNA, 17 bp, Arabidopsis thaliana
tcgtccaccgccttcaa

SEQ ID NO: 142559 - DNA, 17 bp, Arabidopsis thaliana
tcgtccacggagggtta

SEQ ID NO: 142560 - DNA, 17 bp, Arabidopsis thaliana
tcgtccagccagatgat

SEQ ID NO: 142561 - DNA, 17 bp, Arabidopsis thaliana
tcgtccagcgtctacgg

SEQ ID NO: 142562 - DNA, 17 bp, Arabidopsis thaliana
tcgtccagtttgcttca

SEQ ID NO: 142563 - DNA, 17 bp, Arabidopsis thaliana
tcgtccataggttctgc

SEQ ID NO: 142564 - DNA, 17 bp, Arabidopsis thaliana
tcgtccatgcttctaga

SEQ ID NO: 142565 - DNA, 17 bp, Arabidopsis thaliana
tcgtccatgggtaatct

SEQ ID NO: 142566 - DNA, 17 bp, Arabidopsis thaliana
tcgtcccaccgggtgtg

SEQ ID NO: 142567 - DNA, 17 bp, Arabidopsis thaliana
tcgtcccatgtactgca

SEQ ID NO: 142568 - DNA, 17 bp, Arabidopsis thaliana
tcgtcccggctggtgca

SEQ ID NO: 142569 - DNA, 17 bp, Arabidopsis thaliana
tcgtccgaatggtgact

SEQ ID NO: 142570 - DNA, 17 bp, Arabidopsis thaliana
tcgtccgagccctttaa

SEQ ID NO: 142571 - DNA, 17 bp, Arabidopsis thaliana
tcgtccgctcctactgc

SEQ ID NO: 142572 - DNA, 17 bp, Arabidopsis thaliana
tcgtccgtcggctttag

SEQ ID NO: 142573 - DNA, 17 bp, Arabidopsis thaliana
tcgtcctaaggctttag

SEQ ID NO: 142574 - DNA, 17 bp, Arabidopsis thaliana
tcgtcctacaatctaac

SEQ ID NO: 142575 - DNA, 17 bp, Arabidopsis thaliana
tcgtcctagatattcgg

SEQ ID NO: 142576 - DNA, 17 bp, Arabidopsis thaliana
tcgtcctcagcgacgga

SEQ ID NO: 142577 - DNA, 17 bp, Arabidopsis thaliana
tcgtcctcctagtgtga

SEQ ID NO: 142578 - DNA, 17 bp, Arabidopsis thaliana
tcgtcctctgaattgcg

SEQ ID NO: 142579 - DNA, 17 bp, Arabidopsis thaliana
tcgtcctctggctcaag

SEQ ID NO: 142580 - DNA, 17 bp, Arabidopsis thaliana
tcgtcctcttctgccaa

SEQ ID NO: 142581 - DNA, 17 bp, Arabidopsis thaliana
tcgtcctgtaaaaaaaa

SEQ ID NO: 142582 - DNA, 17 bp, Arabidopsis thaliana
tcgtcctgtgggctgtt

SEQ ID NO: 142583 - DNA, 17 bp, Arabidopsis thaliana
tcgtccttaccgtcaga

SEQ ID NO: 142584 - DNA, 17 bp, Arabidopsis thaliana
tcgtccttccttacaca

SEQ ID NO: 142585 - DNA, 17 bp, Arabidopsis thaliana
tcgtccttctctatgtg

SEQ ID NO: 142586 - DNA, 17 bp, Arabidopsis thaliana
tcgtccttgaattgtct

SEQ ID NO: 142587 - DNA, 17 bp, Arabidopsis thaliana
tcgtcgagtccttctgc

SEQ ID NO: 142588 - DNA, 17 bp, Arabidopsis thaliana
tcgtcgcaagaacccct

SEQ ID NO: 142589 - DNA, 17 bp, Arabidopsis thaliana
tcgtcgcagactgagat

SEQ ID NO: 142590 - DNA, 17 bp, Arabidopsis thaliana
tcgtcgcagagatggag

SEQ ID NO: 142591 - DNA, 17 bp, Arabidopsis thaliana
tcgtcgcaggtgtggtt

SEQ ID NO: 142592 - DNA, 17 bp, Arabidopsis thaliana
tcgtcgccgatcaaaac

SEQ ID NO: 142593 - DNA, 17 bp, Arabidopsis thaliana
tcgtcgcgcgacttggt

SEQ ID NO: 142594 - DNA, 17 bp, Arabidopsis thaliana
tcgtcgcggtttcttct

SEQ ID NO: 142595 - DNA, 17 bp, Arabidopsis thaliana
tcgtcgcttccatcttc

SEQ ID NO: 142596 - DNA, 17 bp, Arabidopsis thaliana
tcgtcgctttggccgag

SEQ ID NO: 142597 - DNA, 17 bp, Arabidopsis thaliana
tcgtcgctttgtccgag

SEQ ID NO: 142598 - DNA, 17 bp, Arabidopsis thaliana
tcgtcggagggctgtct

SEQ ID NO: 142599 - DNA, 17 bp, Arabidopsis thaliana
tcgtcggatccagtgtc

SEQ ID NO: 142600 - DNA, 17 bp, Arabidopsis thaliana
tcgtcggatctatgtcg

SEQ ID NO: 142601 - DNA, 17 bp, Arabidopsis thaliana
tcgtcggcgaagaggtt

SEQ ID NO: 142602 - DNA, 17 bp, Arabidopsis thaliana
tcgtcggcgaagagtaa

SEQ ID NO: 142603 - DNA, 17 bp, Arabidopsis thaliana
tcgtcggctatgagttt

SEQ ID NO: 142604 - DNA, 17 bp, Arabidopsis thaliana
tcgtcggctgacaggcg

SEQ ID NO: 142605 - DNA, 17 bp, Arabidopsis thaliana
tcgtcggcttagttttc

SEQ ID NO: 142606 - DNA, 17 bp, Arabidopsis thaliana
tcgtcgggtcccactgg

SEQ ID NO: 142607 - DNA, 17 bp, Arabidopsis thaliana
tcgtcgggttggaagtg

SEQ ID NO: 142608 - DNA, 17 bp, Arabidopsis thaliana
tcgtcggttcggccaat

SEQ ID NO: 142609 - DNA, 17 bp, Arabidopsis thaliana
tcgtcgtaactggaagt

SEQ ID NO: 142610 - DNA, 17 bp, Arabidopsis thaliana
tcgtcgtaggaggagct

SEQ ID NO: 142611 - DNA, 17 bp, Arabidopsis thaliana
tcgtcgtcaacaaggaa

SEQ ID NO: 142612 - DNA, 17 bp, Arabidopsis thaliana
tcgtcgtcatcgttttg

SEQ ID NO: 142613 - DNA, 17 bp, Arabidopsis thaliana
tcgtcgtccaactgatc

SEQ ID NO: 142614 - DNA, 17 bp, Arabidopsis thaliana
tcgtcgtccagtagcga

SEQ ID NO: 142615 - DNA, 17 bp, Arabidopsis thaliana
tcgtcgtcctcgttgtc

SEQ ID NO: 142616 - DNA, 17 bp, Arabidopsis thaliana
tcgtcgtcgaataatct

SEQ ID NO: 142617 - DNA, 17 bp, Arabidopsis thaliana
tcgtcgtcgtattcgag

SEQ ID NO: 142618 - DNA, 17 bp, Arabidopsis thaliana
tcgtcgtcgtcttcgaa

SEQ ID NO: 142619 - DNA, 17 bp, Arabidopsis thaliana
tcgtcgtctccggcgtg

SEQ ID NO: 142620 - DNA, 17 bp, Arabidopsis thaliana
tcgtcgtcttactgatc

SEQ ID NO: 142621 - DNA, 17 bp, Arabidopsis thaliana
tcgtcgtcttcattgct

SEQ ID NO: 142622 - DNA, 17 bp, Arabidopsis thaliana
tcgtcgtgacgtaggca

SEQ ID NO: 142623 - DNA, 17 bp, Arabidopsis thaliana
tcgtcgtgactcggtga

SEQ ID NO: 142624 - DNA, 17 bp, Arabidopsis thaliana
tcgtcgtgcagcttctg

SEQ ID NO: 142625 - DNA, 17 bp, Arabidopsis thaliana
tcgtcgtgcggatctag

SEQ ID NO: 142626 - DNA, 17 bp, Arabidopsis thaliana
tcgtcgtggagattttg

SEQ ID NO: 142627 - DNA, 17 bp, Arabidopsis thaliana
tcgtcgttcataagatc

SEQ ID NO: 142628 - DNA, 17 bp, Arabidopsis thaliana
tcgtcgttctaagactc

SEQ ID NO: 142629 - DNA, 17 bp, Arabidopsis thaliana
tcgtcgttctcggctgg

SEQ ID NO: 142630 - DNA, 17 bp, Arabidopsis thaliana
tcgtcgttgtagtatag

SEQ ID NO: 142631 - DNA, 17 bp, Arabidopsis thaliana
tcgtctaaccgattact

SEQ ID NO: 142632 - DNA, 17 bp, Arabidopsis thaliana
tcgtctaactgttgtat

SEQ ID NO: 142633 - DNA, 17 bp, Arabidopsis thaliana
tcgtctaagatatgtac

SEQ ID NO: 142634 - DNA, 17 bp, Arabidopsis thaliana
tcgtctactgaaagttg

SEQ ID NO: 142635 - DNA, 17 bp, Arabidopsis thaliana
tcgtctactgaagtgat

SEQ ID NO: 142636 - DNA, 17 bp, Arabidopsis thaliana
tcgtctagaccctctta

SEQ ID NO: 142637 - DNA, 17 bp, Arabidopsis thaliana
tcgtctatcattcccga

SEQ ID NO: 142638 - DNA, 17 bp, Arabidopsis thaliana
tcgtctatctactacat

SEQ ID NO: 142639 - DNA, 17 bp, Arabidopsis thaliana
tcgtctattattccaga

SEQ ID NO: 142640 - DNA, 17 bp, Arabidopsis thaliana
tcgtctcaaatttgaaa

SEQ ID NO: 142641 - DNA, 17 bp, Arabidopsis thaliana
tcgtctcaactcgctac

SEQ ID NO: 142642 - DNA, 17 bp, Arabidopsis thaliana
tcgtctcaagcggatgt

SEQ ID NO: 142643 - DNA, 17 bp, Arabidopsis thaliana
tcgtctcagagatgata

SEQ ID NO: 142644 - DNA, 17 bp, Arabidopsis thaliana
tcgtctcagagatgtta

SEQ ID NO: 142645 - DNA, 17 bp, Arabidopsis thaliana
tcgtctcaggcttggtg

SEQ ID NO: 142646 - DNA, 17 bp, Arabidopsis thaliana
tcgtctcagttcgctgc

SEQ ID NO: 142647 - DNA, 17 bp, Arabidopsis thaliana
tcgtctcatcgatggtc

SEQ ID NO: 142648 - DNA, 17 bp, Arabidopsis thaliana
tcgtctccagagatgtg

SEQ ID NO: 142649 - DNA, 17 bp, Arabidopsis thaliana
tcgtctccgaatcttag

SEQ ID NO: 142650 - DNA, 17 bp, Arabidopsis thaliana
tcgtctccgattgtcac

SEQ ID NO: 142651 - DNA, 17 bp, Arabidopsis thaliana
tcgtctccgttcttctg

SEQ ID NO: 142652 - DNA, 17 bp, Arabidopsis thaliana
tcgtctcgcggatgggt

SEQ ID NO: 142653 - DNA, 17 bp, Arabidopsis thaliana
tcgtctcggcagacgca

SEQ ID NO: 142654 - DNA, 17 bp, Arabidopsis thaliana
tcgtctcggttcacgat

SEQ ID NO: 142655 - DNA, 17 bp, Arabidopsis thaliana
tcgtctcggttcgcaat

SEQ ID NO: 142656 - DNA, 17 bp, Arabidopsis thaliana
tcgtctcggttcgcgat

SEQ ID NO: 142657 - DNA, 17 bp, Arabidopsis thaliana
tcgtctcggtttgcgat

SEQ ID NO: 142658 - DNA, 17 bp, Arabidopsis thaliana
tcgtctctgtcttgatt

SEQ ID NO: 142659 - DNA, 17 bp, Arabidopsis thaliana
tcgtctcttgtgtgtgt

SEQ ID NO: 142660 - DNA, 17 bp, Arabidopsis thaliana
tcgtctgacttgggtat

SEQ ID NO: 142661 - DNA, 17 bp, Arabidopsis thaliana
tcgtctgaggtttgcta

SEQ ID NO: 142662 - DNA, 17 bp, Arabidopsis thaliana
tcgtctgcaaaggattc

SEQ ID NO: 142663 - DNA, 17 bp, Arabidopsis thaliana
tcgtctgcctgggtgtc

SEQ ID NO: 142664 - DNA, 17 bp, Arabidopsis thaliana
tcgtctgcctggtctcc

SEQ ID NO: 142665 - DNA, 17 bp, Arabidopsis thaliana
tcgtctggtgaggttgt

SEQ ID NO: 142666 - DNA, 17 bp, Arabidopsis thaliana
tcgtctggtgtcctagg

SEQ ID NO: 142667 - DNA, 17 bp, Arabidopsis thaliana
tcgtctgtagtccaacg

SEQ ID NO: 142668 - DNA, 17 bp, Arabidopsis thaliana
tcgtctgtagtccaaga

SEQ ID NO: 142669 - DNA, 17 bp, Arabidopsis thaliana
tcgtctgtcaggtacgc

SEQ ID NO: 142670 - DNA, 17 bp, Arabidopsis thaliana
tcgtctgtcgtggatct

SEQ ID NO: 142671 - DNA, 17 bp, Arabidopsis thaliana
tcgtctgttgcgttttc

SEQ ID NO: 142672 - DNA, 17 bp, Arabidopsis thaliana
tcgtctgttgctatggt

SEQ ID NO: 142673 - DNA, 17 bp, Arabidopsis thaliana
tcgtcttagactttgct

SEQ ID NO: 142674 - DNA, 17 bp, Arabidopsis thaliana
tcgtcttattgaccgac

SEQ ID NO: 142675 - DNA, 17 bp, Arabidopsis thaliana
tcgtcttcagcctcttg

SEQ ID NO: 142676 - DNA, 17 bp, Arabidopsis thaliana
tcgtcttccatgagagt

SEQ ID NO: 142677 - DNA, 17 bp, Arabidopsis thaliana
tcgtcttccccgcggtt

SEQ ID NO: 142678 - DNA, 17 bp, Arabidopsis thaliana
tcgtcttcgctggtcct

SEQ ID NO: 142679 - DNA, 17 bp, Arabidopsis thaliana
tcgtcttcgtactctga

SEQ ID NO: 142680 - DNA, 17 bp, Arabidopsis thaliana
tcgtcttcgtggtccag

SEQ ID NO: 142681 - DNA, 17 bp, Arabidopsis thaliana
tcgtcttctcgggttct

SEQ ID NO: 142682 - DNA, 17 bp, Arabidopsis thaliana
tcgtcttctgacttctc

SEQ ID NO: 142683 - DNA, 17 bp, Arabidopsis thaliana
tcgtcttcttcctttga

SEQ ID NO: 142684 - DNA, 17 bp, Arabidopsis thaliana
tcgtcttcttctacacg

SEQ ID NO: 142685 - DNA, 17 bp, Arabidopsis thaliana
tcgtcttcttctacatg

SEQ ID NO: 142686 - DNA, 17 bp, Arabidopsis thaliana
tcgtcttgcagatgagt

SEQ ID NO: 142687 - DNA, 17 bp, Arabidopsis thaliana
tcgtcttgtgttgctca

SEQ ID NO: 142688 - DNA, 17 bp, Arabidopsis thaliana
tcgtcttgtttgttgcc

SEQ ID NO: 142689 - DNA, 17 bp, Arabidopsis thaliana
tcgtctttatggcggcg

SEQ ID NO: 142690 - DNA, 17 bp, Arabidopsis thaliana
tcgtctttccacaggtg

SEQ ID NO: 142691 - DNA, 17 bp, Arabidopsis thaliana
tcgtctttccactaagc

SEQ ID NO: 142692 - DNA, 17 bp, Arabidopsis thaliana
tcgtctttccttacaca

SEQ ID NO: 142693 - DNA, 17 bp, Arabidopsis thaliana
tcgtctttctgcaccga

SEQ ID NO: 142694 - DNA, 17 bp, Arabidopsis thaliana
tcgtcttttcactaagc

SEQ ID NO: 142695 - DNA, 17 bp, Arabidopsis thaliana
tcgtgaaactggtttgc

SEQ ID NO: 142696 - DNA, 17 bp, Arabidopsis thaliana
tcgtgaacctgcggaag

SEQ ID NO: 142697 - DNA, 17 bp, Arabidopsis thaliana
tcgtgaactttcaaatt

SEQ ID NO: 142698 - DNA, 17 bp, Arabidopsis thaliana
tcgtgaatctaggaaaa

SEQ ID NO: 142699 - DNA, 17 bp, Arabidopsis thaliana
tcgtgaatgcgcccgat

SEQ ID NO: 142700 - DNA, 17 bp, Arabidopsis thaliana
tcgtgaattcgtgaaat

SEQ ID NO: 142701 - DNA, 17 bp, Arabidopsis thaliana
tcgtgaatttggctagg

SEQ ID NO: 142702 - DNA, 17 bp, Arabidopsis thaliana
tcgtgaccctgtaccaa

SEQ ID NO: 142703 - DNA, 17 bp, Arabidopsis thaliana
tcgtgaccgttttctcg

SEQ ID NO: 142704 - DNA, 17 bp, Arabidopsis thaliana
tcgtgactttgtccgta

SEQ ID NO: 142705 - DNA, 17 bp, Arabidopsis thaliana
tcgtgagacaggttagt

SEQ ID NO: 142706 - DNA, 17 bp, Arabidopsis thaliana
tcgtgagacagttagct

SEQ ID NO: 142707 - DNA, 17 bp, Arabidopsis thaliana
tcgtgagacagttcggt

SEQ ID NO: 142708 - DNA, 17 bp, Arabidopsis thaliana
tcgtgagacagttcgtt

SEQ ID NO: 142709 - DNA, 17 bp, Arabidopsis thaliana
tcgtgagatgatcagaa

SEQ ID NO: 142710 - DNA, 17 bp, Arabidopsis thaliana
tcgtgagctctatgaga

SEQ ID NO: 142711 - DNA, 17 bp, Arabidopsis thaliana
tcgtgagggttcaagtc

SEQ ID NO: 142712 - DNA, 17 bp, Arabidopsis thaliana
tcgtgagtcgccgttat

SEQ ID NO: 142713 - DNA, 17 bp, Arabidopsis thaliana
tcgtgagttcggtcctc

SEQ ID NO: 142714 - DNA, 17 bp, Arabidopsis thaliana
tcgtgagttgttttgtt

SEQ ID NO: 142715 - DNA, 17 bp, Arabidopsis thaliana
tcgtgagtttttgctgt

SEQ ID NO: 142716 - DNA, 17 bp, Arabidopsis thaliana
tcgtgatccgatgaagg

SEQ ID NO: 142717 - DNA, 17 bp, Arabidopsis thaliana
tcgtgatcgtggtctgc

SEQ ID NO: 142718 - DNA, 17 bp, Arabidopsis thaliana
tcgtgatctgttcgtcg

SEQ ID NO: 142719 - DNA, 17 bp, Arabidopsis thaliana
tcgtgatgaattttcta

SEQ ID NO: 142720 - DNA, 17 bp, Arabidopsis thaliana
tcgtgatgcgatagttc

SEQ ID NO: 142721 - DNA, 17 bp, Arabidopsis thaliana
tcgtgatggggatagat

SEQ ID NO: 142722 - DNA, 17 bp, Arabidopsis thaliana
tcgtgatgtgtgctgct

SEQ ID NO: 142723 - DNA, 17 bp, Arabidopsis thaliana
tcgtgattcacctcggc

SEQ ID NO: 142724 - DNA, 17 bp, Arabidopsis thaliana
tcgtgattcgcccgggt

SEQ ID NO: 142725 - DNA, 17 bp, Arabidopsis thaliana
tcgtgattgtgctatat

SEQ ID NO: 142726 - DNA, 17 bp, Arabidopsis thaliana
tcgtgatttgggctata

SEQ ID NO: 142727 - DNA, 17 bp, Arabidopsis thaliana
tcgtgatttgggctgta

SEQ ID NO: 142728 - DNA, 17 bp, Arabidopsis thaliana
tcgtgatttggtcattc

SEQ ID NO: 142729 - DNA, 17 bp, Arabidopsis thaliana
tcgtgatttgtgctata

SEQ ID NO: 142730 - DNA, 17 bp, Arabidopsis thaliana
tcgtgatttgtggttgt

SEQ ID NO: 142731 - DNA, 17 bp, Arabidopsis thaliana
tcgtgccaaatagtcca

SEQ ID NO: 142732 - DNA, 17 bp, Arabidopsis thaliana
tcgtgccaaatagtgca

SEQ ID NO: 142733 - DNA, 17 bp, Arabidopsis thaliana
tcgtgccaaattatccg

SEQ ID NO: 142734 - DNA, 17 bp, Arabidopsis thaliana
tcgtgccaacttatccg

SEQ ID NO: 142735 - DNA, 17 bp, Arabidopsis thaliana
tcgtgccaagttatccg

SEQ ID NO: 142736 - DNA, 17 bp, Arabidopsis thaliana
tcgtgcccaaacctagt

SEQ ID NO: 142737 - DNA, 17 bp, Arabidopsis thaliana
tcgtgcccagaccctgt

SEQ ID NO: 142738 - DNA, 17 bp, Arabidopsis thaliana
tcgtgccccgccggaag

SEQ ID NO: 142739 - DNA, 17 bp, Arabidopsis thaliana
tcgtgccccgccgggac

SEQ ID NO: 142740 - DNA, 17 bp, Arabidopsis thaliana
tcgtgcccgagttttct

SEQ ID NO: 142741 - DNA, 17 bp, Arabidopsis thaliana
tcgtgcccggaccctgc

SEQ ID NO: 142742 - DNA, 17 bp, Arabidopsis thaliana
tcgtgcccggaccctgt

SEQ ID NO: 142743 - DNA, 17 bp, Arabidopsis thaliana
tcgtgccgtaaggtgtt

SEQ ID NO: 142744 - DNA, 17 bp, Arabidopsis thaliana
tcgtgcctctctcaccc

SEQ ID NO: 142745 - DNA, 17 bp, Arabidopsis thaliana
tcgtgcgactttgaaat

SEQ ID NO: 142746 - DNA, 17 bp, Arabidopsis thaliana
tcgtgcgagacgattag

SEQ ID NO: 142747 - DNA, 17 bp, Arabidopsis thaliana
tcgtgcgccggattatg

SEQ ID NO: 142748 - DNA, 17 bp, Arabidopsis thaliana
tcgtgcgctggattaat

SEQ ID NO: 142749 - DNA, 17 bp, Arabidopsis thaliana
tcgtgcgctggattatg

SEQ ID NO: 142750 - DNA, 17 bp, Arabidopsis thaliana
tcgtgcggctgatgtga

SEQ ID NO: 142751 - DNA, 17 bp, Arabidopsis thaliana
tcgtgcgggagaagtac

SEQ ID NO: 142752 - DNA, 17 bp, Arabidopsis thaliana
tcgtgcgggagaagtgc

SEQ ID NO: 142753 - DNA, 17 bp, Arabidopsis thaliana
tcgtgcggttttgggtg

SEQ ID NO: 142754 - DNA, 17 bp, Arabidopsis thaliana
tcgtgcgtgctcgaaaa

SEQ ID NO: 142755 - DNA, 17 bp, Arabidopsis thaliana
tcgtgcgtgctcgagaa

SEQ ID NO: 142756 - DNA, 17 bp, Arabidopsis thaliana
tcgtgcgtgcttgagaa

SEQ ID NO: 142757 - DNA, 17 bp, Arabidopsis thaliana
tcgtgcgttttttagat

SEQ ID NO: 142758 - DNA, 17 bp, Arabidopsis thaliana
tcgtgctaaagagcgtg

SEQ ID NO: 142759 - DNA, 17 bp, Arabidopsis thaliana
tcgtgctcaaagcggcc

SEQ ID NO: 142760 - DNA, 17 bp, Arabidopsis thaliana
tcgtgctcctggcgtcg

SEQ ID NO: 142761 - DNA, 17 bp, Arabidopsis thaliana
tcgtgctgctaggcgaa

SEQ ID NO: 142762 - DNA, 17 bp, Arabidopsis thaliana
tcgtgctgctattgatg

SEQ ID NO: 142763 - DNA, 17 bp, Arabidopsis thaliana
tcgtgctggtttgtgct

SEQ ID NO: 142764 - DNA, 17 bp, Arabidopsis thaliana
tcgtgctgtggtttcgg

SEQ ID NO: 142765 - DNA, 17 bp, Arabidopsis thaliana
tcgtgctgttgtggtac

SEQ ID NO: 142766 - DNA, 17 bp, Arabidopsis thaliana
tcgtgcttgacttcttg

SEQ ID NO: 142767 - DNA, 17 bp, Arabidopsis thaliana
tcgtgcttggatggcgg

SEQ ID NO: 142768 - DNA, 17 bp, Arabidopsis thaliana
tcgtggaaagattgcac

SEQ ID NO: 142769 - DNA, 17 bp, Arabidopsis thaliana
tcgtggaagtctatttt

SEQ ID NO: 142770 - DNA, 17 bp, Arabidopsis thaliana
tcgtggaatcatggcaa

SEQ ID NO: 142771 - DNA, 17 bp, Arabidopsis thaliana
tcgtggaattgcgtttt

SEQ ID NO: 142772 - DNA, 17 bp, Arabidopsis thaliana
tcgtggaccaaattaga

SEQ ID NO: 142773 - DNA, 17 bp, Arabidopsis thaliana
tcgtggacgtgcggcag

SEQ ID NO: 142774 - DNA, 17 bp, Arabidopsis thaliana
tcgtggactctgaagat

SEQ ID NO: 142775 - DNA, 17 bp, Arabidopsis thaliana
tcgtggagaaatagacc

SEQ ID NO: 142776 - DNA, 17 bp, Arabidopsis thaliana
tcgtggagtcgcgtctc

SEQ ID NO: 142777 - DNA, 17 bp, Arabidopsis thaliana
tcgtggatcagtgtagt

SEQ ID NO: 142778 - DNA, 17 bp, Arabidopsis thaliana
tcgtggatcctctctgt

SEQ ID NO: 142779 - DNA, 17 bp, Arabidopsis thaliana
tcgtggatgtaccaaaa

SEQ ID NO: 142780 - DNA, 17 bp, Arabidopsis thaliana
tcgtggatgtttctacc

SEQ ID NO: 142781 - DNA, 17 bp, Arabidopsis thaliana
tcgtggcaactaagatg

SEQ ID NO: 142782 - DNA, 17 bp, Arabidopsis thaliana
tcgtggcagatcatttt

SEQ ID NO: 142783 - DNA, 17 bp, Arabidopsis thaliana
tcgtggccgctaccgac

SEQ ID NO: 142784 - DNA, 17 bp, Arabidopsis thaliana
tcgtggcggtcggagtc

SEQ ID NO: 142785 - DNA, 17 bp, Arabidopsis thaliana
tcgtgggaatcgtgttg

SEQ ID NO: 142786 - DNA, 17 bp, Arabidopsis thaliana
tcgtgggacctcatttc

SEQ ID NO: 142787 - DNA, 17 bp, Arabidopsis thaliana
tcgtgggatgggtcggc

SEQ ID NO: 142788 - DNA, 17 bp, Arabidopsis thaliana
tcgtgggattttcggtg

SEQ ID NO: 142789 - DNA, 17 bp, Arabidopsis thaliana
tcgtgggcacaaacatc

SEQ ID NO: 142790 - DNA, 17 bp, Arabidopsis thaliana
tcgtgggcattcgggta

SEQ ID NO: 142791 - DNA, 17 bp, Arabidopsis thaliana
tcgtgggttcgactccc

SEQ ID NO: 142792 - DNA, 17 bp, Arabidopsis thaliana
tcgtgggttcggtcccc

SEQ ID NO: 142793 - DNA, 17 bp, Arabidopsis thaliana
tcgtggtaggaggcaga

SEQ ID NO: 142794 - DNA, 17 bp, Arabidopsis thaliana
tcgtggtcaagagggca

SEQ ID NO: 142795 - DNA, 17 bp, Arabidopsis thaliana
tcgtggtcaggtggtta

SEQ ID NO: 142796 - DNA, 17 bp, Arabidopsis thaliana
tcgtggtccaggtcgtc

SEQ ID NO: 142797 - DNA, 17 bp, Arabidopsis thaliana
tcgtggtctcactctcg

SEQ ID NO: 142798 - DNA, 17 bp, Arabidopsis thaliana
tcgtggtctgcagcaag

SEQ ID NO: 142799 - DNA, 17 bp, Arabidopsis thaliana
tcgtggtctgcagcacg

SEQ ID NO: 142800 - DNA, 17 bp, Arabidopsis thaliana
tcgtggtgcgacagggt

SEQ ID NO: 142801 - DNA, 17 bp, Arabidopsis thaliana
tcgtggtgttgatgatg

SEQ ID NO: 142802 - DNA, 17 bp, Arabidopsis thaliana
tcgtggttctgggctgg

SEQ ID NO: 142803 - DNA, 17 bp, Arabidopsis thaliana
tcgtggtttacacttag

SEQ ID NO: 142804 - DNA, 17 bp, Arabidopsis thaliana
tcgtggtttgtgctata

SEQ ID NO: 142805 - DNA, 17 bp, Arabidopsis thaliana
tcgtgtagaatgtcgaa

SEQ ID NO: 142806 - DNA, 17 bp, Arabidopsis thaliana
tcgtgtagtcaatgcgc

SEQ ID NO: 142807 - DNA, 17 bp, Arabidopsis thaliana
tcgtgtagtgagattgg

SEQ ID NO: 142808 - DNA, 17 bp, Arabidopsis thaliana
tcgtgtcaactaagatg

SEQ ID NO: 142809 - DNA, 17 bp, Arabidopsis thaliana
tcgtgtcaagttatccg

SEQ ID NO: 142810 - DNA, 17 bp, Arabidopsis thaliana
tcgtgtccaggcagtat

SEQ ID NO: 142811 - DNA, 17 bp, Arabidopsis thaliana
tcgtgtcccaccgggcg

SEQ ID NO: 142812 - DNA, 17 bp, Arabidopsis thaliana
tcgtgtcccaccgggtg

SEQ ID NO: 142813 - DNA, 17 bp, Arabidopsis thaliana
tcgtgtcccactgggtg

SEQ ID NO: 142814 - DNA, 17 bp, Arabidopsis thaliana
tcgtgtcccgaatctgg

SEQ ID NO: 142815 - DNA, 17 bp, Arabidopsis thaliana
tcgtgtcccgaatctgt

SEQ ID NO: 142816 - DNA, 17 bp, Arabidopsis thaliana
tcgtgtcccgcggtggc

SEQ ID NO: 142817 - DNA, 17 bp, Arabidopsis thaliana
tcgtgtccggttgaatg

SEQ ID NO: 142818 - DNA, 17 bp, Arabidopsis thaliana
tcgtgtcgtgccaatgt

SEQ ID NO: 142819 - DNA, 17 bp, Arabidopsis thaliana
tcgtgtcgttcgtttag

SEQ ID NO: 142820 - DNA, 17 bp, Arabidopsis thaliana
tcgtgtctgaatggtaa

SEQ ID NO: 142821 - DNA, 17 bp, Arabidopsis thaliana
tcgtgtcttctcattgg

SEQ ID NO: 142822 - DNA, 17 bp, Arabidopsis thaliana
tcgtgtgaacttttgct

SEQ ID NO: 142823 - DNA, 17 bp, Arabidopsis thaliana
tcgtgtgaactttttgc

SEQ ID NO: 142824 - DNA, 17 bp, Arabidopsis thaliana
tcgtgtgaattttgtgc

SEQ ID NO: 142825 - DNA, 17 bp, Arabidopsis thaliana
tcgtgtgcattggtcgg

SEQ ID NO: 142826 - DNA, 17 bp, Arabidopsis thaliana
tcgtgtgccagacttgc

SEQ ID NO: 142827 - DNA, 17 bp, Arabidopsis thaliana
tcgtgtgcctctgatgt

SEQ ID NO: 142828 - DNA, 17 bp, Arabidopsis thaliana
tcgtgtgcggacatcat

SEQ ID NO: 142829 - DNA, 17 bp, Arabidopsis thaliana
tcgtgtgctgcgtttcg

SEQ ID NO: 142830 - DNA, 17 bp, Arabidopsis thaliana
tcgtgtggattttggcc

SEQ ID NO: 142831 - DNA, 17 bp, Arabidopsis thaliana
tcgtgttacgagtcgga

SEQ ID NO: 142832 - DNA, 17 bp, Arabidopsis thaliana
tcgtgttccatttgacg

SEQ ID NO: 142833 - DNA, 17 bp, Arabidopsis thaliana
tcgtgttcggatcgcgg

SEQ ID NO: 142834 - DNA, 17 bp, Arabidopsis thaliana
tcgtgttcttcgcattc

SEQ ID NO: 142835 - DNA, 17 bp, Arabidopsis thaliana
tcgtgttctttgtgtta

SEQ ID NO: 142836 - DNA, 17 bp, Arabidopsis thaliana
tcgtgttgcttgacttc

SEQ ID NO: 142837 - DNA, 17 bp, Arabidopsis thaliana
tcgtgttggctacagct

SEQ ID NO: 142838 - DNA, 17 bp, Arabidopsis thaliana
tcgtgttggtccaccgg

SEQ ID NO: 142839 - DNA, 17 bp, Arabidopsis thaliana
tcgtgttgtcgatttca

SEQ ID NO: 142840 - DNA, 17 bp, Arabidopsis thaliana
tcgtgttgttttttcag

SEQ ID NO: 142841 - DNA, 17 bp, Arabidopsis thaliana
tcgtgtttttatctatg

SEQ ID NO: 142842 - DNA, 17 bp, Arabidopsis thaliana
tcgtgtttttcccgatt

SEQ ID NO: 142843 - DNA, 17 bp, Arabidopsis thaliana
tcgttacaatgcgcctc

SEQ ID NO: 142844 - DNA, 17 bp, Arabidopsis thaliana
tcgttacaatgtgcctc

SEQ ID NO: 142845 - DNA, 17 bp, Arabidopsis thaliana
tcgttaccccgctccac

SEQ ID NO: 142846 - DNA, 17 bp, Arabidopsis thaliana
tcgttactcgaccaccc

SEQ ID NO: 142847 - DNA, 17 bp, Arabidopsis thaliana
tcgttagccaagcagga

SEQ ID NO: 142848 - DNA, 17 bp, Arabidopsis thaliana
tcgttagcgattccaaa

SEQ ID NO: 142849 - DNA, 17 bp, Arabidopsis thaliana
tcgttagctaagtccgt

SEQ ID NO: 142850 - DNA, 17 bp, Arabidopsis thaliana
tcgttagcttatagtca

SEQ ID NO: 142851 - DNA, 17 bp, Arabidopsis thaliana
tcgttagtctagccatc

SEQ ID NO: 142852 - DNA, 17 bp, Arabidopsis thaliana
tcgttagtgttcttgag

SEQ ID NO: 142853 - DNA, 17 bp, Arabidopsis thaliana
tcgttagttgcctctgt

SEQ ID NO: 142854 - DNA, 17 bp, Arabidopsis thaliana
tcgttatcttaatgatc

SEQ ID NO: 142855 - DNA, 17 bp, Arabidopsis thaliana
tcgttattacctgtggt

SEQ ID NO: 142856 - DNA, 17 bp, Arabidopsis thaliana
tcgttatttccccttga

SEQ ID NO: 142857 - DNA, 17 bp, Arabidopsis thaliana
tcgttcaaagctgacaa

SEQ ID NO: 142858 - DNA, 17 bp, Arabidopsis thaliana
tcgttcagaacctcctg

SEQ ID NO: 142859 - DNA, 17 bp, Arabidopsis thaliana
tcgttcagtaacggcta

SEQ ID NO: 142860 - DNA, 17 bp, Arabidopsis thaliana
tcgttcatttggcggca

SEQ ID NO: 142861 - DNA, 17 bp, Arabidopsis thaliana
tcgttccaatgtttgtc

SEQ ID NO: 142862 - DNA, 17 bp, Arabidopsis thaliana
tcgttccacaactggat

SEQ ID NO: 142863 - DNA, 17 bp, Arabidopsis thaliana
tcgttccagtcagtgat

SEQ ID NO: 142864 - DNA, 17 bp, Arabidopsis thaliana
tcgttcccagctggacc

SEQ ID NO: 142865 - DNA, 17 bp, Arabidopsis thaliana
tcgttccccacagacgg

SEQ ID NO: 142866 - DNA, 17 bp, Arabidopsis thaliana
tcgttcccgggccttgt

SEQ ID NO: 142867 - DNA, 17 bp, Arabidopsis thaliana
tcgttccctgtataggc

SEQ ID NO: 142868 - DNA, 17 bp, Arabidopsis thaliana
tcgttccgacgtcaagg

SEQ ID NO: 142869 - DNA, 17 bp, Arabidopsis thaliana
tcgttcctctggcgatt

SEQ ID NO: 142870 - DNA, 17 bp, Arabidopsis thaliana
tcgttcctgcgtgtggg

SEQ ID NO: 142871 - DNA, 17 bp, Arabidopsis thaliana
tcgttcctgggcagcac

SEQ ID NO: 142872 - DNA, 17 bp, Arabidopsis thaliana
tcgttccttacgttggc

SEQ ID NO: 142873 - DNA, 17 bp, Arabidopsis thaliana
tcgttccttcgttcagc

SEQ ID NO: 142874 - DNA, 17 bp, Arabidopsis thaliana
tcgttcgaggtgttgcg

SEQ ID NO: 142875 - DNA, 17 bp, Arabidopsis thaliana
tcgttcgatccgcttcg

SEQ ID NO: 142876 - DNA, 17 bp, Arabidopsis thaliana
tcgttcgccgagagttc

SEQ ID NO: 142877 - DNA, 17 bp, Arabidopsis thaliana
tcgttcgccgtcgaaat

SEQ ID NO: 142878 - DNA, 17 bp, Arabidopsis thaliana
tcgttcggaccgccttg

SEQ ID NO: 142879 - DNA, 17 bp, Arabidopsis thaliana
tcgttcgggagaagggg

SEQ ID NO: 142880 - DNA, 17 bp, Arabidopsis thaliana
tcgttcggttcagtcca

SEQ ID NO: 142881 - DNA, 17 bp, Arabidopsis thaliana
tcgttcgtcatgcggga

SEQ ID NO: 142882 - DNA, 17 bp, Arabidopsis thaliana
tcgttcgtctgacttgg

SEQ ID NO: 142883 - DNA, 17 bp, Arabidopsis thaliana
tcgttcgtgacttttta

SEQ ID NO: 142884 - DNA, 17 bp, Arabidopsis thaliana
tcgttcgttccccacag

SEQ ID NO: 142885 - DNA, 17 bp, Arabidopsis thaliana
tcgttctagaataatcc

SEQ ID NO: 142886 - DNA, 17 bp, Arabidopsis thaliana
tcgttctgactcgttga

SEQ ID NO: 142887 - DNA, 17 bp, Arabidopsis thaliana
tcgttctgcaccggatt

SEQ ID NO: 142888 - DNA, 17 bp, Arabidopsis thaliana
tcgttctgcagtgtact

SEQ ID NO: 142889 - DNA, 17 bp, Arabidopsis thaliana
tcgttctgccaagccat

SEQ ID NO: 142890 - DNA, 17 bp, Arabidopsis thaliana
tcgttctgccggcagga

SEQ ID NO: 142891 - DNA, 17 bp, Arabidopsis thaliana
tcgttctgttgtggttg

SEQ ID NO: 142892 - DNA, 17 bp, Arabidopsis thaliana
tcgttcttcgcggattt

SEQ ID NO: 142893 - DNA, 17 bp, Arabidopsis thaliana
tcgttcttgctgtggct

SEQ ID NO: 142894 - DNA, 17 bp, Arabidopsis thaliana
tcgttcttgtctgagtt

SEQ ID NO: 142895 - DNA, 17 bp, Arabidopsis thaliana
tcgttcttttggttttt

SEQ ID NO: 142896 - DNA, 17 bp, Arabidopsis thaliana
tcgttgaccaacattga

SEQ ID NO: 142897 - DNA, 17 bp, Arabidopsis thaliana
tcgttgaccaagcgtgt

SEQ ID NO: 142898 - DNA, 17 bp, Arabidopsis thaliana
tcgttgacgaagcgtgt

SEQ ID NO: 142899 - DNA, 17 bp, Arabidopsis thaliana
tcgttgactaagccaat

SEQ ID NO: 142900 - DNA, 17 bp, Arabidopsis thaliana
tcgttgacttgaccatt

SEQ ID NO: 142901 - DNA, 17 bp, Arabidopsis thaliana
tcgttgactttgccatt

SEQ ID NO: 142902 - DNA, 17 bp, Arabidopsis thaliana
tcgttgactttgctatt

SEQ ID NO: 142903 - DNA, 17 bp, Arabidopsis thaliana
tcgttgacttttatctc

SEQ ID NO: 142904 - DNA, 17 bp, Arabidopsis thaliana
tcgttgattcgatgtga

SEQ ID NO: 142905 - DNA, 17 bp, Arabidopsis thaliana
tcgttgcaagcaactat

SEQ ID NO: 142906 - DNA, 17 bp, Arabidopsis thaliana
tcgttgcactgccaaac

SEQ ID NO: 142907 - DNA, 17 bp, Arabidopsis thaliana
tcgttgcactgccaaag

SEQ ID NO: 142908 - DNA, 17 bp, Arabidopsis thaliana
tcgttgcgaaaattgtg

SEQ ID NO: 142909 - DNA, 17 bp, Arabidopsis thaliana
tcgttgcgaccactttt

SEQ ID NO: 142910 - DNA, 17 bp, Arabidopsis thaliana
tcgttgcgtcaaatcag

SEQ ID NO: 142911 - DNA, 17 bp, Arabidopsis thaliana
tcgttgctagttgtctg

SEQ ID NO: 142912 - DNA, 17 bp, Arabidopsis thaliana
tcgttgctgctcctaca

SEQ ID NO: 142913 - DNA, 17 bp, Arabidopsis thaliana
tcgttggaccgtttccc

SEQ ID NO: 142914 - DNA, 17 bp, Arabidopsis thaliana
tcgttggaccgtttcct

SEQ ID NO: 142915 - DNA, 17 bp, Arabidopsis thaliana
tcgttggaccgtttctc

SEQ ID NO: 142916 - DNA, 17 bp, Arabidopsis thaliana
tcgttggcagtagaccc

SEQ ID NO: 142917 - DNA, 17 bp, Arabidopsis thaliana
tcgttggcgaactggtc

SEQ ID NO: 142918 - DNA, 17 bp, Arabidopsis thaliana
tcgttggcgggacgggt

SEQ ID NO: 142919 - DNA, 17 bp, Arabidopsis thaliana
tcgttggctaagtccgt

SEQ ID NO: 142920 - DNA, 17 bp, Arabidopsis thaliana
tcgttggcttaacgact

SEQ ID NO: 142921 - DNA, 17 bp, Arabidopsis thaliana
tcgttggtcccaaggct

SEQ ID NO: 142922 - DNA, 17 bp, Arabidopsis thaliana
tcgttggtcttcaacga

SEQ ID NO: 142923 - DNA, 17 bp, Arabidopsis thaliana
tcgttgtaactgtaggc

SEQ ID NO: 142924 - DNA, 17 bp, Arabidopsis thaliana
tcgttgtagatctcgtg

SEQ ID NO: 142925 - DNA, 17 bp, Arabidopsis thaliana
tcgttgtcacacagctg

SEQ ID NO: 142926 - DNA, 17 bp, Arabidopsis thaliana
tcgttgtccaagaaggt

SEQ ID NO: 142927 - DNA, 17 bp, Arabidopsis thaliana
tcgttgtcgctctgaaa

SEQ ID NO: 142928 - DNA, 17 bp, Arabidopsis thaliana
tcgttgtcgctggttgc

SEQ ID NO: 142929 - DNA, 17 bp, Arabidopsis thaliana
tcgttgtcgctgtcgct

SEQ ID NO: 142930 - DNA, 17 bp, Arabidopsis thaliana
tcgttgtctacgatttc

SEQ ID NO: 142931 - DNA, 17 bp, Arabidopsis thaliana
tcgttgtctacgtcgtc

SEQ ID NO: 142932 - DNA, 17 bp, Arabidopsis thaliana
tcgttgtctgaatccgc

SEQ ID NO: 142933 - DNA, 17 bp, Arabidopsis thaliana
tcgttgtctgtcggttc

SEQ ID NO: 142934 - DNA, 17 bp, Arabidopsis thaliana
tcgttgtgttggacttg

SEQ ID NO: 142935 - DNA, 17 bp, Arabidopsis thaliana
tcgttgttgccggaaag

SEQ ID NO: 142936 - DNA, 17 bp, Arabidopsis thaliana
tcgttgttgcgcttggt

SEQ ID NO: 142937 - DNA, 17 bp, Arabidopsis thaliana
tcgtttaccctacatgc

SEQ ID NO: 142938 - DNA, 17 bp, Arabidopsis thaliana
tcgtttcacgtcgggtt

SEQ ID NO: 142939 - DNA, 17 bp, Arabidopsis thaliana
tcgtttcatctgattct

SEQ ID NO: 142940 - DNA, 17 bp, Arabidopsis thaliana
tcgtttccattgtggac

SEQ ID NO: 142941 - DNA, 17 bp, Arabidopsis thaliana
tcgtttccatttttggt

SEQ ID NO: 142942 - DNA, 17 bp, Arabidopsis thaliana
tcgtttcccagctggtg

SEQ ID NO: 142943 - DNA, 17 bp, Arabidopsis thaliana
tcgtttcccggctggtg

SEQ ID NO: 142944 - DNA, 17 bp, Arabidopsis thaliana
tcgtttcccggctggtt

SEQ ID NO: 142945 - DNA, 17 bp, Arabidopsis thaliana
tcgtttccggcaggtcg

SEQ ID NO: 142946 - DNA, 17 bp, Arabidopsis thaliana
tcgtttccggcaggtct

SEQ ID NO: 142947 - DNA, 17 bp, Arabidopsis thaliana
tcgtttccggctggtgc

SEQ ID NO: 142948 - DNA, 17 bp, Arabidopsis thaliana
tcgtttcctcagtttac

SEQ ID NO: 142949 - DNA, 17 bp, Arabidopsis thaliana
tcgtttccttgctccat

SEQ ID NO: 142950 - DNA, 17 bp, Arabidopsis thaliana
tcgtttccttgtcgcta

SEQ ID NO: 142951 - DNA, 17 bp, Arabidopsis thaliana
tcgtttcgccgtcggat

SEQ ID NO: 142952 - DNA, 17 bp, Arabidopsis thaliana
tcgtttcgcttggatta

SEQ ID NO: 142953 - DNA, 17 bp, Arabidopsis thaliana
tcgtttcgtcgctgcaa

SEQ ID NO: 142954 - DNA, 17 bp, Arabidopsis thaliana
tcgtttcgtgcccaggc

SEQ ID NO: 142955 - DNA, 17 bp, Arabidopsis thaliana
tcgtttctcggaacacc

SEQ ID NO: 142956 - DNA, 17 bp, Arabidopsis thaliana
tcgtttctcggaacgcc

SEQ ID NO: 142957 - DNA, 17 bp, Arabidopsis thaliana
tcgtttctcggaatgcc

SEQ ID NO: 142958 - DNA, 17 bp, Arabidopsis thaliana
tcgtttctcggaatgcg

SEQ ID NO: 142959 - DNA, 17 bp, Arabidopsis thaliana
tcgtttcttggaacgcc

SEQ ID NO: 142960 - DNA, 17 bp, Arabidopsis thaliana
tcgtttcttttaccatc

SEQ ID NO: 142961 - DNA, 17 bp, Arabidopsis thaliana
tcgtttgaaacctctct

SEQ ID NO: 142962 - DNA, 17 bp, Arabidopsis thaliana
tcgtttgacttgacacg

SEQ ID NO: 142963 - DNA, 17 bp, Arabidopsis thaliana
tcgtttgacttgacact

SEQ ID NO: 142964 - DNA, 17 bp, Arabidopsis thaliana
tcgtttgatcacttcca

SEQ ID NO: 142965 - DNA, 17 bp, Arabidopsis thaliana
tcgtttgattgttgctg

SEQ ID NO: 142966 - DNA, 17 bp, Arabidopsis thaliana
tcgtttgcagtcacgat

SEQ ID NO: 142967 - DNA, 17 bp, Arabidopsis thaliana
tcgtttgcatgtcgctg

SEQ ID NO: 142968 - DNA, 17 bp, Arabidopsis thaliana
tcgtttgccacaactat

SEQ ID NO: 142969 - DNA, 17 bp, Arabidopsis thaliana
tcgtttgccacaactgt

SEQ ID NO: 142970 - DNA, 17 bp, Arabidopsis thaliana
tcgtttgccattctaca

SEQ ID NO: 142971 - DNA, 17 bp, Arabidopsis thaliana
tcgtttgcctgtcgcta

SEQ ID NO: 142972 - DNA, 17 bp, Arabidopsis thaliana
tcgtttgcctgtcgctg

SEQ ID NO: 142973 - DNA, 17 bp, Arabidopsis thaliana
tcgtttgcggttgcggg

SEQ ID NO: 142974 - DNA, 17 bp, Arabidopsis thaliana
tcgtttgctcatttggg

SEQ ID NO: 142975 - DNA, 17 bp, Arabidopsis thaliana
tcgtttggaccatcgtc

SEQ ID NO: 142976 - DNA, 17 bp, Arabidopsis thaliana
tcgtttggaccgcagta

SEQ ID NO: 142977 - DNA, 17 bp, Arabidopsis thaliana
tcgtttggaccgctgta

SEQ ID NO: 142978 - DNA, 17 bp, Arabidopsis thaliana
tcgtttgggttttgggg

SEQ ID NO: 142979 - DNA, 17 bp, Arabidopsis thaliana
tcgtttggtgcaggtcg

SEQ ID NO: 142980 - DNA, 17 bp, Arabidopsis thaliana
tcgtttggtgcaggtct

SEQ ID NO: 142981 - DNA, 17 bp, Arabidopsis thaliana
tcgtttgtctatcgctg

SEQ ID NO: 142982 - DNA, 17 bp, Arabidopsis thaliana
tcgtttgtctgtcgctg

SEQ ID NO: 142983 - DNA, 17 bp, Arabidopsis thaliana
tcgtttgtcttgatcca

SEQ ID NO: 142984 - DNA, 17 bp, Arabidopsis thaliana
tcgtttgtttgtcgctg

SEQ ID NO: 142985 - DNA, 17 bp, Arabidopsis thaliana
tcgttttcaagctgggc

SEQ ID NO: 142986 - DNA, 17 bp, Arabidopsis thaliana
tcgttttcacggcgagt

SEQ ID NO: 142987 - DNA, 17 bp, Arabidopsis thaliana
tcgttttcccttaacgg

SEQ ID NO: 142988 - DNA, 17 bp, Arabidopsis thaliana
tcgttttcgccagagat

SEQ ID NO: 142989 - DNA, 17 bp, Arabidopsis thaliana
tcgttttcgctgatttt

SEQ ID NO: 142990 - DNA, 17 bp, Arabidopsis thaliana
tcgttttctaagctgtt

SEQ ID NO: 142991 - DNA, 17 bp, Arabidopsis thaliana
tcgttttctcagtttac

SEQ ID NO: 142992 - DNA, 17 bp, Arabidopsis thaliana
tcgttttctcatctaat

SEQ ID NO: 142993 - DNA, 17 bp, Arabidopsis thaliana
tcgttttcttgtcgcag

SEQ ID NO: 142994 - DNA, 17 bp, Arabidopsis thaliana
tcgttttgacctgctga

SEQ ID NO: 142995 - DNA, 17 bp, Arabidopsis thaliana
tcgttttgcccttgctg

SEQ ID NO: 142996 - DNA, 17 bp, Arabidopsis thaliana
tcgttttgcctctgctg

SEQ ID NO: 142997 - DNA, 17 bp, Arabidopsis thaliana
tcgttttggttgcagga

SEQ ID NO: 142998 - DNA, 17 bp, Arabidopsis thaliana
tcgtttttacaacaagt

SEQ ID NO: 142999 - DNA, 17 bp, Arabidopsis thaliana
tcgtttttcacatcaag

SEQ ID NO: 143000 - DNA, 17 bp, Arabidopsis thaliana
tcgtttttcaggaatgg

SEQ ID NO: 143001 - DNA, 17 bp, Arabidopsis thaliana
tcgtttttggtcaattg

SEQ ID NO: 143002 - DNA, 17 bp, Arabidopsis thaliana
tcgtttttgttatttgg

SEQ ID NO: 143003 - DNA, 17 bp, Arabidopsis thaliana
tcgttttttcaggggac

SEQ ID NO: 143004 - DNA, 17 bp, Arabidopsis thaliana
tcgttttttcagttagg

SEQ ID NO: 143005 - DNA, 17 bp, Arabidopsis thaliana
tctaaaaaatggacact

SEQ ID NO: 143006 - DNA, 17 bp, Arabidopsis thaliana
tctaaaaagtttggact

SEQ ID NO: 143007 - DNA, 17 bp, Arabidopsis thaliana
tctaaaacttcagccgc

SEQ ID NO: 143008 - DNA, 17 bp, Arabidopsis thaliana
tctaaaatatcggttcg

SEQ ID NO: 143009 - DNA, 17 bp, Arabidopsis thaliana
tctaaaatccgggttgg

SEQ ID NO: 143010 - DNA, 17 bp, Arabidopsis thaliana
tctaaaccattgggatt

SEQ ID NO: 143011 - DNA, 17 bp, Arabidopsis thaliana
tctaaaccgaccgagcc

SEQ ID NO: 143012 - DNA, 17 bp, Arabidopsis thaliana
tctaaacgacggtaagt

SEQ ID NO: 143013 - DNA, 17 bp, Arabidopsis thaliana
tctaaacttggtatgtg

SEQ ID NO: 143014 - DNA, 17 bp, Arabidopsis thaliana
tctaaagacaggggagc

SEQ ID NO: 143015 - DNA, 17 bp, Arabidopsis thaliana
tctaaagacctctatgc

SEQ ID NO: 143016 - DNA, 17 bp, Arabidopsis thaliana
tctaaagcgcatacgga

SEQ ID NO: 143017 - DNA, 17 bp, Arabidopsis thaliana
tctaaagctctgactgt

SEQ ID NO: 143018 - DNA, 17 bp, Arabidopsis thaliana
tctaaagcttccacggc

SEQ ID NO: 143019 - DNA, 17 bp, Arabidopsis thaliana
tctaaataacaggcgta

SEQ ID NO: 143020 - DNA, 17 bp, Arabidopsis thaliana
tctaaataacagtctag

SEQ ID NO: 143021 - DNA, 17 bp, Arabidopsis thaliana
tctaaatctctggtttt

SEQ ID NO: 143022 - DNA, 17 bp, Arabidopsis thaliana
tctaaatggtgactgcg

SEQ ID NO: 143023 - DNA, 17 bp, Arabidopsis thaliana
tctaaatttgtccgatg

SEQ ID NO: 143024 - DNA, 17 bp, Arabidopsis thaliana
tctaacatccgcaatgt

SEQ ID NO: 143025 - DNA, 17 bp, Arabidopsis thaliana
tctaacgcgctaacagc

SEQ ID NO: 143026 - DNA, 17 bp, Arabidopsis thaliana
tctaacgtctctttgcc

SEQ ID NO: 143027 - DNA, 17 bp, Arabidopsis thaliana
tctaactagaacgccgc

SEQ ID NO: 143028 - DNA, 17 bp, Arabidopsis thaliana
tctaactgtgatggaga

SEQ ID NO: 143029 - DNA, 17 bp, Arabidopsis thaliana
tctaactttgcctacca

SEQ ID NO: 143030 - DNA, 17 bp, Arabidopsis thaliana
tctaagaagttcattga

SEQ ID NO: 143031 - DNA, 17 bp, Arabidopsis thaliana
tctaagagattacgggt

SEQ ID NO: 143032 - DNA, 17 bp, Arabidopsis thaliana
tctaagagttgtgttgg

SEQ ID NO: 143033 - DNA, 17 bp, Arabidopsis thaliana
tctaagatccggttgcg

SEQ ID NO: 143034 - DNA, 17 bp, Arabidopsis thaliana
tctaagattcgcctagg

SEQ ID NO: 143035 - DNA, 17 bp, Arabidopsis thaliana
tctaagcagacggcgac

SEQ ID NO: 143036 - DNA, 17 bp, Arabidopsis thaliana
tctaagcgatgtgggac

SEQ ID NO: 143037 - DNA, 17 bp, Arabidopsis thaliana
tctaagcgtttaggtaa

SEQ ID NO: 143038 - DNA, 17 bp, Arabidopsis thaliana
tctaagcgtttaggtac

SEQ ID NO: 143039 - DNA, 17 bp, Arabidopsis thaliana
tctaagcttagcctagg

SEQ ID NO: 143040 - DNA, 17 bp, Arabidopsis thaliana
tctaagcttcgcctagg

SEQ ID NO: 143041 - DNA, 17 bp, Arabidopsis thaliana
tctaaggatgggtgact

SEQ ID NO: 143042 - DNA, 17 bp, Arabidopsis thaliana
tctaaggccaaactcgt

SEQ ID NO: 143043 - DNA, 17 bp, Arabidopsis thaliana
tctaaggccgaggacac

SEQ ID NO: 143044 - DNA, 17 bp, Arabidopsis thaliana
tctaaggcgcctggtcc

SEQ ID NO: 143045 - DNA, 17 bp, Arabidopsis thaliana
tctaagggtgcctaacc

SEQ ID NO: 143046 - DNA, 17 bp, Arabidopsis thaliana
tctaaggtctgaggtct

SEQ ID NO: 143047 - DNA, 17 bp, Arabidopsis thaliana
tctaagtacgcagatcg

SEQ ID NO: 143048 - DNA, 17 bp, Arabidopsis thaliana
tctaagtatcgcctaag

SEQ ID NO: 143049 - DNA, 17 bp, Arabidopsis thaliana
tctaagtcaagccaagc

SEQ ID NO: 143050 - DNA, 17 bp, Arabidopsis thaliana
tctaagtcgagttcaat

SEQ ID NO: 143051 - DNA, 17 bp, Arabidopsis thaliana
tctaagtctcacctggg

SEQ ID NO: 143052 - DNA, 17 bp, Arabidopsis thaliana
tctaagtcttctattga

SEQ ID NO: 143053 - DNA, 17 bp, Arabidopsis thaliana
tctaagtgactacatcg

SEQ ID NO: 143054 - DNA, 17 bp, Arabidopsis thaliana
tctaagtgcacttatct

SEQ ID NO: 143055 - DNA, 17 bp, Arabidopsis thaliana
tctaagttccggtaagt

SEQ ID NO: 143056 - DNA, 17 bp, Arabidopsis thaliana
tctaagtttcgcccagg

SEQ ID NO: 143057 - DNA, 17 bp, Arabidopsis thaliana
tctaagtttcgcctaag

SEQ ID NO: 143058 - DNA, 17 bp, Arabidopsis thaliana
tctaagtttcgcctagg

SEQ ID NO: 143059 - DNA, 17 bp, Arabidopsis thaliana
tctaatcgttcttgtct

SEQ ID NO: 143060 - DNA, 17 bp, Arabidopsis thaliana
tctaatctcagtgttcc

SEQ ID NO: 143061 - DNA, 17 bp, Arabidopsis thaliana
tctaatcttgatgatgc

SEQ ID NO: 143062 - DNA, 17 bp, Arabidopsis thaliana
tctaatgcacctgcgca

SEQ ID NO: 143063 - DNA, 17 bp, Arabidopsis thaliana
tctaatgcctcggatga

SEQ ID NO: 143064 - DNA, 17 bp, Arabidopsis thaliana
tctaatggagttgatca

SEQ ID NO: 143065 - DNA, 17 bp, Arabidopsis thaliana
tctaatgtctcggatga

SEQ ID NO: 143066 - DNA, 17 bp, Arabidopsis thaliana
tctaatgttccagttcc

SEQ ID NO: 143067 - DNA, 17 bp, Arabidopsis thaliana
tctaatttcaaatcgcc

SEQ ID NO: 143068 - DNA, 17 bp, Arabidopsis thaliana
tctaatttgtctgcggt

SEQ ID NO: 143069 - DNA, 17 bp, Arabidopsis thaliana
tctaatttttcgggtcg

SEQ ID NO: 143070 - DNA, 17 bp, Arabidopsis thaliana
tctacaaaccgaaccgc

SEQ ID NO: 143071 - DNA, 17 bp, Arabidopsis thaliana
tctacaaaccgacatcg

SEQ ID NO: 143072 - DNA, 17 bp, Arabidopsis thaliana
tctacaaagcagtgcaa

SEQ ID NO: 143073 - DNA, 17 bp, Arabidopsis thaliana
tctacaaattgcgccaa

SEQ ID NO: 143074 - DNA, 17 bp, Arabidopsis thaliana
tctacaactggattctg

SEQ ID NO: 143075 - DNA, 17 bp, Arabidopsis thaliana
tctacaagagttgcctg

SEQ ID NO: 143076 - DNA, 17 bp, Arabidopsis thaliana
tctacaagctgacacgt

SEQ ID NO: 143077 - DNA, 17 bp, Arabidopsis thaliana
tctacaagttgcactcg

SEQ ID NO: 143078 - DNA, 17 bp, Arabidopsis thaliana
tctacaccttttggaat

SEQ ID NO: 143079 - DNA, 17 bp, Arabidopsis thaliana
tctacagaagacctgaa

SEQ ID NO: 143080 - DNA, 17 bp, Arabidopsis thaliana
tctacagaagacctgga

SEQ ID NO: 143081 - DNA, 17 bp, Arabidopsis thaliana
tctacagacatgctcgt

SEQ ID NO: 143082 - DNA, 17 bp, Arabidopsis thaliana
tctacagactacggatt

SEQ ID NO: 143083 - DNA, 17 bp, Arabidopsis thaliana
tctacagattgacttag

SEQ ID NO: 143084 - DNA, 17 bp, Arabidopsis thaliana
tctacagcaagacgtct

SEQ ID NO: 143085 - DNA, 17 bp, Arabidopsis thaliana
tctacagctataactgc

SEQ ID NO: 143086 - DNA, 17 bp, Arabidopsis thaliana
tctacagctgacctttg

SEQ ID NO: 143087 - DNA, 17 bp, Arabidopsis thaliana
tctacagcttcttcgca

SEQ ID NO: 143088 - DNA, 17 bp, Arabidopsis thaliana
tctacagcttgcttttg

SEQ ID NO: 143089 - DNA, 17 bp, Arabidopsis thaliana
tctacagcttgtgccgt

SEQ ID NO: 143090 - DNA, 17 bp, Arabidopsis thaliana
tctacaggagacttatt

SEQ ID NO: 143091 - DNA, 17 bp, Arabidopsis thaliana
tctacaggattggtggg

SEQ ID NO: 143092 - DNA, 17 bp, Arabidopsis thaliana
tctacagttctgtggtc

SEQ ID NO: 143093 - DNA, 17 bp, Arabidopsis thaliana
tctacatacttgcgtga

SEQ ID NO: 143094 - DNA, 17 bp, Arabidopsis thaliana
tctacatacttgcgtgg

SEQ ID NO: 143095 - DNA, 17 bp, Arabidopsis thaliana
tctacatcagtcgccat

SEQ ID NO: 143096 - DNA, 17 bp, Arabidopsis thaliana
tctacatcgcggtatcc

SEQ ID NO: 143097 - DNA, 17 bp, Arabidopsis thaliana
tctacatgacgttatct

SEQ ID NO: 143098 - DNA, 17 bp, Arabidopsis thaliana
tctacatgagcttcatc

SEQ ID NO: 143099 - DNA, 17 bp, Arabidopsis thaliana
tctacatgccgaagtgg

SEQ ID NO: 143100 - DNA, 17 bp, Arabidopsis thaliana
tctacatgcgattcatc

SEQ ID NO: 143101 - DNA, 17 bp, Arabidopsis thaliana
tctacatgtagcagctg

SEQ ID NO: 143102 - DNA, 17 bp, Arabidopsis thaliana
tctacatgtgcttagcc

SEQ ID NO: 143103 - DNA, 17 bp, Arabidopsis thaliana
tctacatgtgtggcgat

SEQ ID NO: 143104 - DNA, 17 bp, Arabidopsis thaliana
tctacatgttgctgctt

SEQ ID NO: 143105 - DNA, 17 bp, Arabidopsis thaliana
tctacattagcgaatcc

SEQ ID NO: 143106 - DNA, 17 bp, Arabidopsis thaliana
tctacattattgctcga

SEQ ID NO: 143107 - DNA, 17 bp, Arabidopsis thaliana
tctacattccgaggcgg

SEQ ID NO: 143108 - DNA, 17 bp, Arabidopsis thaliana
tctaccaaaggatctgc

SEQ ID NO: 143109 - DNA, 17 bp, Arabidopsis thaliana
tctaccacccagttgtc

SEQ ID NO: 143110 - DNA, 17 bp, Arabidopsis thaliana
tctaccactgagctaag

SEQ ID NO: 143111 - DNA, 17 bp, Arabidopsis thaliana
tctaccacttttgccga

SEQ ID NO: 143112 - DNA, 17 bp, Arabidopsis thaliana
tctaccaggcttcattc

SEQ ID NO: 143113 - DNA, 17 bp, Arabidopsis thaliana
tctaccatttgaggaga

SEQ ID NO: 143114 - DNA, 17 bp, Arabidopsis thaliana
tctacccgctgatcaac

SEQ ID NO: 143115 - DNA, 17 bp, Arabidopsis thaliana
tctaccgaagctgacca

SEQ ID NO: 143116 - DNA, 17 bp, Arabidopsis thaliana
tctaccgactttgtgct

SEQ ID NO: 143117 - DNA, 17 bp, Arabidopsis thaliana
tctaccgaggctggccg

SEQ ID NO: 143118 - DNA, 17 bp, Arabidopsis thaliana
tctaccgcaagagttgc

SEQ ID NO: 143119 - DNA, 17 bp, Arabidopsis thaliana
tctaccgcgagacgctt

SEQ ID NO: 143120 - DNA, 17 bp, Arabidopsis thaliana
tctaccggagctgaccg

SEQ ID NO: 143121 - DNA, 17 bp, Arabidopsis thaliana
tctaccgggactgaccg

SEQ ID NO: 143122 - DNA, 17 bp, Arabidopsis thaliana
tctaccggggctgaccg

SEQ ID NO: 143123 - DNA, 17 bp, Arabidopsis thaliana
tctaccggggttgaccg

SEQ ID NO: 143124 - DNA, 17 bp, Arabidopsis thaliana
tctaccggtctattgga

SEQ ID NO: 143125 - DNA, 17 bp, Arabidopsis thaliana
tctaccggtgctgacca

SEQ ID NO: 143126 - DNA, 17 bp, Arabidopsis thaliana
tctaccgtgcgctggat

SEQ ID NO: 143127 - DNA, 17 bp, Arabidopsis thaliana
tctacctacttcctccg

SEQ ID NO: 143128 - DNA, 17 bp, Arabidopsis thaliana
tctacctaggctttgct

SEQ ID NO: 143129 - DNA, 17 bp, Arabidopsis thaliana
tctacctctcatgttgc

SEQ ID NO: 143130 - DNA, 17 bp, Arabidopsis thaliana
tctacctggaagtcgag

SEQ ID NO: 143131 - DNA, 17 bp, Arabidopsis thaliana
tctacctttggtgtcca

SEQ ID NO: 143132 - DNA, 17 bp, Arabidopsis thaliana
tctacgaaaccatagtt

SEQ ID NO: 143133 - DNA, 17 bp, Arabidopsis thaliana
tctacgaacaatctaca

SEQ ID NO: 143134 - DNA, 17 bp, Arabidopsis thaliana
tctacgaacgttggcgg

SEQ ID NO: 143135 - DNA, 17 bp, Arabidopsis thaliana
tctacgaggacccgtgg

SEQ ID NO: 143136 - DNA, 17 bp, Arabidopsis thaliana
tctacgaggtcagtcaa

SEQ ID NO: 143137 - DNA, 17 bp, Arabidopsis thaliana
tctacgagtcgggttgt

SEQ ID NO: 143138 - DNA, 17 bp, Arabidopsis thaliana
tctacgagtctgttcag

SEQ ID NO: 143139 - DNA, 17 bp, Arabidopsis thaliana
tctacgagtgccttgta

SEQ ID NO: 143140 - DNA, 17 bp, Arabidopsis thaliana
tctacgatgtcagcgcc

SEQ ID NO: 143141 - DNA, 17 bp, Arabidopsis thaliana
tctacgcagcgattagt

SEQ ID NO: 143142 - DNA, 17 bp, Arabidopsis thaliana
tctacgccttgctgtgc

SEQ ID NO: 143143 - DNA, 17 bp, Arabidopsis thaliana
tctacgcgatggctttc

SEQ ID NO: 143144 - DNA, 17 bp, Arabidopsis thaliana
tctacgcggattacggt

SEQ ID NO: 143145 - DNA, 17 bp, Arabidopsis thaliana
tctacggacagctatag

SEQ ID NO: 143146 - DNA, 17 bp, Arabidopsis thaliana
tctacggagattagcag

SEQ ID NO: 143147 - DNA, 17 bp, Arabidopsis thaliana
tctacggatttggcagg

SEQ ID NO: 143148 - DNA, 17 bp, Arabidopsis thaliana
tctacggggacacaggt

SEQ ID NO: 143149 - DNA, 17 bp, Arabidopsis thaliana
tctacggggctgctcag

SEQ ID NO: 143150 - DNA, 17 bp, Arabidopsis thaliana
tctacggtgaccactga

SEQ ID NO: 143151 - DNA, 17 bp, Arabidopsis thaliana
tctactagaatctcggc

SEQ ID NO: 143152 - DNA, 17 bp, Arabidopsis thaliana
tctactagaccagatct

SEQ ID NO: 143153 - DNA, 17 bp, Arabidopsis thaliana
tctactatcctgggcct

SEQ ID NO: 143154 - DNA, 17 bp, Arabidopsis thaliana
tctactatggccgctag

SEQ ID NO: 143155 - DNA, 17 bp, Arabidopsis thaliana
tctactcaacttccgat

SEQ ID NO: 143156 - DNA, 17 bp, Arabidopsis thaliana
tctactcaggattcggt

SEQ ID NO: 143157 - DNA, 17 bp, Arabidopsis thaliana
tctactcagttgctgcc

SEQ ID NO: 143158 - DNA, 17 bp, Arabidopsis thaliana
tctactcatttggaagt

SEQ ID NO: 143159 - DNA, 17 bp, Arabidopsis thaliana
tctactccaaattccat

SEQ ID NO: 143160 - DNA, 17 bp, Arabidopsis thaliana
tctactccagcaacatg

SEQ ID NO: 143161 - DNA, 17 bp, Arabidopsis thaliana
tctactccgctattgtc

SEQ ID NO: 143162 - DNA, 17 bp, Arabidopsis thaliana
tctactccggtgacgat

SEQ ID NO: 143163 - DNA, 17 bp, Arabidopsis thaliana
tctactcgagtcttccc

SEQ ID NO: 143164 - DNA, 17 bp, Arabidopsis thaliana
tctactcggtgacgata

SEQ ID NO: 143165 - DNA, 17 bp, Arabidopsis thaliana
tctactcgttcactcga

SEQ ID NO: 143166 - DNA, 17 bp, Arabidopsis thaliana
tctactcttggcaagct

SEQ ID NO: 143167 - DNA, 17 bp, Arabidopsis thaliana
tctactctttgcgtatt

SEQ ID NO: 143168 - DNA, 17 bp, Arabidopsis thaliana
tctactgagattcagcc

SEQ ID NO: 143169 - DNA, 17 bp, Arabidopsis thaliana
tctactgataccgatcg

SEQ ID NO: 143170 - DNA, 17 bp, Arabidopsis thaliana
tctactgatggcttaga

SEQ ID NO: 143171 - DNA, 17 bp, Arabidopsis thaliana
tctactgatgttgctgc

SEQ ID NO: 143172 - DNA, 17 bp, Arabidopsis thaliana
tctactgcggccagcac

SEQ ID NO: 143173 - DNA, 17 bp, Arabidopsis thaliana
tctactgcggtgacgat

SEQ ID NO: 143174 - DNA, 17 bp, Arabidopsis thaliana
tctactggaagaaaggc

SEQ ID NO: 143175 - DNA, 17 bp, Arabidopsis thaliana
tctactgtatgttgcac

SEQ ID NO: 143176 - DNA, 17 bp, Arabidopsis thaliana
tctactgtccaagagcc

SEQ ID NO: 143177 - DNA, 17 bp, Arabidopsis thaliana
tctactgtgttctacgc

SEQ ID NO: 143178 - DNA, 17 bp, Arabidopsis thaliana
tctacttctatgcggtc

SEQ ID NO: 143179 - DNA, 17 bp, Arabidopsis thaliana
tctacttcttggttgtc

SEQ ID NO: 143180 - DNA, 17 bp, Arabidopsis thaliana
tctacttgaaacgtttg

SEQ ID NO: 143181 - DNA, 17 bp, Arabidopsis thaliana
tctacttgattcgtcac

SEQ ID NO: 143182 - DNA, 17 bp, Arabidopsis thaliana
tctacttggatcgctgt

SEQ ID NO: 143183 - DNA, 17 bp, Arabidopsis thaliana
tctacttgggatctgat

SEQ ID NO: 143184 - DNA, 17 bp, Arabidopsis thaliana
tctacttgtgtctatgt

SEQ ID NO: 143185 - DNA, 17 bp, Arabidopsis thaliana
tctactttgacccatac

SEQ ID NO: 143186 - DNA, 17 bp, Arabidopsis thaliana
tctactttgatggtgaa

SEQ ID NO: 143187 - DNA, 17 bp, Arabidopsis thaliana
tctactttgcttctcag

SEQ ID NO: 143188 - DNA, 17 bp, Arabidopsis thaliana
tctactttgggcgatga

SEQ ID NO: 143189 - DNA, 17 bp, Arabidopsis thaliana
tctactttggttgtcgg

SEQ ID NO: 143190 - DNA, 17 bp, Arabidopsis thaliana
tctagaaattgcaggtc

SEQ ID NO: 143191 - DNA, 17 bp, Arabidopsis thaliana
tctagaacacagtgttt

SEQ ID NO: 143192 - DNA, 17 bp, Arabidopsis thaliana
tctagaacactaaacgc

SEQ ID NO: 143193 - DNA, 17 bp, Arabidopsis thaliana
tctagaacaggtatctg

SEQ ID NO: 143194 - DNA, 17 bp, Arabidopsis thaliana
tctagaactcatggtga

SEQ ID NO: 143195 - DNA, 17 bp, Arabidopsis thaliana
tctagaacttggatttg

SEQ ID NO: 143196 - DNA, 17 bp, Arabidopsis thaliana
tctagaacttttagacc

SEQ ID NO: 143197 - DNA, 17 bp, Arabidopsis thaliana
tctagaagcagggcacg

SEQ ID NO: 143198 - DNA, 17 bp, Arabidopsis thaliana
tctagaaggattacggg

SEQ ID NO: 143199 - DNA, 17 bp, Arabidopsis thaliana
tctagagatgtgatttt

SEQ ID NO: 143200 - DNA, 17 bp, Arabidopsis thaliana
tctagagcggcactcct

SEQ ID NO: 143201 - DNA, 17 bp, Arabidopsis thaliana
tctagagctcagaagct

SEQ ID NO: 143202 - DNA, 17 bp, Arabidopsis thaliana
tctagatccgccactgt

SEQ ID NO: 143203 - DNA, 17 bp, Arabidopsis thaliana
tctagatccgtcactgg

SEQ ID NO: 143204 - DNA, 17 bp, Arabidopsis thaliana
tctagatctgcaggttt

SEQ ID NO: 143205 - DNA, 17 bp, Arabidopsis thaliana
tctagatgaggcccagc

SEQ ID NO: 143206 - DNA, 17 bp, Arabidopsis thaliana
tctagcaaaatcttttc

SEQ ID NO: 143207 - DNA, 17 bp, Arabidopsis thaliana
tctagcagctccggtgc

SEQ ID NO: 143208 - DNA, 17 bp, Arabidopsis thaliana
tctagccattcgctaag

SEQ ID NO: 143209 - DNA, 17 bp, Arabidopsis thaliana
tctagcgacctgggttc

SEQ ID NO: 143210 - DNA, 17 bp, Arabidopsis thaliana
tctagcgagttcttgat

SEQ ID NO: 143211 - DNA, 17 bp, Arabidopsis thaliana
tctagcgcaggcttgaa

SEQ ID NO: 143212 - DNA, 17 bp, Arabidopsis thaliana
tctagcgctaatcccag

SEQ ID NO: 143213 - DNA, 17 bp, Arabidopsis thaliana
tctagcgctcttgatct

SEQ ID NO: 143214 - DNA, 17 bp, Arabidopsis thaliana
tctagcggatttggatt

SEQ ID NO: 143215 - DNA, 17 bp, Arabidopsis thaliana
tctagcgggttgtgtgc

SEQ ID NO: 143216 - DNA, 17 bp, Arabidopsis thaliana
tctagcggttagacgga

SEQ ID NO: 143217 - DNA, 17 bp, Arabidopsis thaliana
tctagcggttaggacat

SEQ ID NO: 143218 - DNA, 17 bp, Arabidopsis thaliana
tctaggaaacgcgtttc

SEQ ID NO: 143219 - DNA, 17 bp, Arabidopsis thaliana
tctaggaacaggcctcg

SEQ ID NO: 143220 - DNA, 17 bp, Arabidopsis thaliana
tctaggactcatggagc

SEQ ID NO: 143221 - DNA, 17 bp, Arabidopsis thaliana
tctaggactttgcgaaa

SEQ ID NO: 143222 - DNA, 17 bp, Arabidopsis thaliana
tctaggacttttgctgg

SEQ ID NO: 143223 - DNA, 17 bp, Arabidopsis thaliana
tctaggaggctttgggt

SEQ ID NO: 143224 - DNA, 17 bp, Arabidopsis thaliana
tctaggatttcactcgt

SEQ ID NO: 143225 - DNA, 17 bp, Arabidopsis thaliana
tctaggatttcatccgt

SEQ ID NO: 143226 - DNA, 17 bp, Arabidopsis thaliana
tctaggattttccagct

SEQ ID NO: 143227 - DNA, 17 bp, Arabidopsis thaliana
tctaggcgacgcctaga

SEQ ID NO: 143228 - DNA, 17 bp, Arabidopsis thaliana
tctaggcgtttgggtat

SEQ ID NO: 143229 - DNA, 17 bp, Arabidopsis thaliana
tctagggataacaggct

SEQ ID NO: 143230 - DNA, 17 bp, Arabidopsis thaliana
tctagggattttggcca

SEQ ID NO: 143231 - DNA, 17 bp, Arabidopsis thaliana
tctagggcacgtctgcc

SEQ ID NO: 143232 - DNA, 17 bp, Arabidopsis thaliana
tctagggctgcggttgc

SEQ ID NO: 143233 - DNA, 17 bp, Arabidopsis thaliana
tctagggcttccagaat

SEQ ID NO: 143234 - DNA, 17 bp, Arabidopsis thaliana
tctagggctttgtcatc

SEQ ID NO: 143235 - DNA, 17 bp, Arabidopsis thaliana
tctaggtcaaaatttgg

SEQ ID NO: 143236 - DNA, 17 bp, Arabidopsis thaliana
tctaggtgcaatctgat

SEQ ID NO: 143237 - DNA, 17 bp, Arabidopsis thaliana
tctaggtgcaatttgat

SEQ ID NO: 143238 - DNA, 17 bp, Arabidopsis thaliana
tctaggtgttaggcatt

SEQ ID NO: 143239 - DNA, 17 bp, Arabidopsis thaliana
tctaggtgttatgttgg

SEQ ID NO: 143240 - DNA, 17 bp, Arabidopsis thaliana
tctaggttagcgttcga

SEQ ID NO: 143241 - DNA, 17 bp, Arabidopsis thaliana
tctaggttccactgttt

SEQ ID NO: 143242 - DNA, 17 bp, Arabidopsis thaliana
tctaggtttcggcgaat

SEQ ID NO: 143243 - DNA, 17 bp, Arabidopsis thaliana
tctaggtttgccaaggt

SEQ ID NO: 143244 - DNA, 17 bp, Arabidopsis thaliana
tctagtaaacacgaaac

SEQ ID NO: 143245 - DNA, 17 bp, Arabidopsis thaliana
tctagtccgactttgtg

SEQ ID NO: 143246 - DNA, 17 bp, Arabidopsis thaliana
tctagtcctcggcaacg

SEQ ID NO: 143247 - DNA, 17 bp, Arabidopsis thaliana
tctagttgctggttggg

SEQ ID NO: 143248 - DNA, 17 bp, Arabidopsis thaliana
tctagttgggttgctcg

SEQ ID NO: 143249 - DNA, 17 bp, Arabidopsis thaliana
tctagttgggtttgttc

SEQ ID NO: 143250 - DNA, 17 bp, Arabidopsis thaliana
tctagtttggccgagtg

SEQ ID NO: 143251 - DNA, 17 bp, Arabidopsis thaliana
tctataacttttagacc

SEQ ID NO: 143252 - DNA, 17 bp, Arabidopsis thaliana
tctataagtgccagtgt

SEQ ID NO: 143253 - DNA, 17 bp, Arabidopsis thaliana
tctatagattgacccgc

SEQ ID NO: 143254 - DNA, 17 bp, Arabidopsis thaliana
tctataggcgggcctta

SEQ ID NO: 143255 - DNA, 17 bp, Arabidopsis thaliana
tctatagtctgctcgga

SEQ ID NO: 143256 - DNA, 17 bp, Arabidopsis thaliana
tctatcacgatcactat

SEQ ID NO: 143257 - DNA, 17 bp, Arabidopsis thaliana
tctatcagtccaaccgt

SEQ ID NO: 143258 - DNA, 17 bp, Arabidopsis thaliana
tctatcagttcgacgga

SEQ ID NO: 143259 - DNA, 17 bp, Arabidopsis thaliana
tctatcagttgtgcttt

SEQ ID NO: 143260 - DNA, 17 bp, Arabidopsis thaliana
tctatcatgtgagcagt

SEQ ID NO: 143261 - DNA, 17 bp, Arabidopsis thaliana
tctatcattgcgccgtt

SEQ ID NO: 143262 - DNA, 17 bp, Arabidopsis thaliana
tctatccaactgactaa

SEQ ID NO: 143263 - DNA, 17 bp, Arabidopsis thaliana
tctatccaccgcggttt

SEQ ID NO: 143264 - DNA, 17 bp, Arabidopsis thaliana
tctatcccccccgttgt

SEQ ID NO: 143265 - DNA, 17 bp, Arabidopsis thaliana
tctatcctaccacctga

SEQ ID NO: 143266 - DNA, 17 bp, Arabidopsis thaliana
tctatcgccatgagtca

SEQ ID NO: 143267 - DNA, 17 bp, Arabidopsis thaliana
tctatcgctctcgacat

SEQ ID NO: 143268 - DNA, 17 bp, Arabidopsis thaliana
tctatcggcaccacttg

SEQ ID NO: 143269 - DNA, 17 bp, Arabidopsis thaliana
tctatcgtatcggatta

SEQ ID NO: 143270 - DNA, 17 bp, Arabidopsis thaliana
tctatctcacatggtct

SEQ ID NO: 143271 - DNA, 17 bp, Arabidopsis thaliana
tctatctcaggcacttc

SEQ ID NO: 143272 - DNA, 17 bp, Arabidopsis thaliana
tctatctcctttacatg

SEQ ID NO: 143273 - DNA, 17 bp, Arabidopsis thaliana
tctatctcgatcgatgg

SEQ ID NO: 143274 - DNA, 17 bp, Arabidopsis thaliana
tctatctctatggctct

SEQ ID NO: 143275 - DNA, 17 bp, Arabidopsis thaliana
tctatctctgtgggatt

SEQ ID NO: 143276 - DNA, 17 bp, Arabidopsis thaliana
tctatctgcgtagaatc

SEQ ID NO: 143277 - DNA, 17 bp, Arabidopsis thaliana
tctatctggcttagacg

SEQ ID NO: 143278 - DNA, 17 bp, Arabidopsis thaliana
tctatctgtgaagcgta

SEQ ID NO: 143279 - DNA, 17 bp, Arabidopsis thaliana
tctatcttcctggaagc

SEQ ID NO: 143280 - DNA, 17 bp, Arabidopsis thaliana
tctatcttctagctccc

SEQ ID NO: 143281 - DNA, 17 bp, Arabidopsis thaliana
tctatgaagtttgtgac

SEQ ID NO: 143282 - DNA, 17 bp, Arabidopsis thaliana
tctatgaatcggccttc

SEQ ID NO: 143283 - DNA, 17 bp, Arabidopsis thaliana
tctatgaccagagttac

SEQ ID NO: 143284 - DNA, 17 bp, Arabidopsis thaliana
tctatgacttcacccgt

SEQ ID NO: 143285 - DNA, 17 bp, Arabidopsis thaliana
tctatgatttcgactct

SEQ ID NO: 143286 - DNA, 17 bp, Arabidopsis thaliana
tctatgcctcaaagtcg

SEQ ID NO: 143287 - DNA, 17 bp, Arabidopsis thaliana
tctatgcgctgctcgga

SEQ ID NO: 143288 - DNA, 17 bp, Arabidopsis thaliana
tctatgcggcgcacaac

SEQ ID NO: 143289 - DNA, 17 bp, Arabidopsis thaliana
tctatggaatgaccgaa

SEQ ID NO: 143290 - DNA, 17 bp, Arabidopsis thaliana
tctatggcatacattgc

SEQ ID NO: 143291 - DNA, 17 bp, Arabidopsis thaliana
tctatggcccaggtctg

SEQ ID NO: 143292 - DNA, 17 bp, Arabidopsis thaliana
tctatggcttatgatca

SEQ ID NO: 143293 - DNA, 17 bp, Arabidopsis thaliana
tctatgggaccaaagcc

SEQ ID NO: 143294 - DNA, 17 bp, Arabidopsis thaliana
tctatgggagtctggct

SEQ ID NO: 143295 - DNA, 17 bp, Arabidopsis thaliana
tctatggggcgtaggcc

SEQ ID NO: 143296 - DNA, 17 bp, Arabidopsis thaliana
tctatgggtggtggtgc

SEQ ID NO: 143297 - DNA, 17 bp, Arabidopsis thaliana
tctatgggtggtgttgc

SEQ ID NO: 143298 - DNA, 17 bp, Arabidopsis thaliana
tctatgtacccgtcagt

SEQ ID NO: 143299 - DNA, 17 bp, Arabidopsis thaliana
tctatgtcaccattcat

SEQ ID NO: 143300 - DNA, 17 bp, Arabidopsis thaliana
tctatgtcaccatttat

SEQ ID NO: 143301 - DNA, 17 bp, Arabidopsis thaliana
tctatgtctcacggggg

SEQ ID NO: 143302 - DNA, 17 bp, Arabidopsis thaliana
tctatgttgcgctgttg

SEQ ID NO: 143303 - DNA, 17 bp, Arabidopsis thaliana
tctattactcatgtgct

SEQ ID NO: 143304 - DNA, 17 bp, Arabidopsis thaliana
tctattcagagccgtgc

SEQ ID NO: 143305 - DNA, 17 bp, Arabidopsis thaliana
tctattctaccaaagga

SEQ ID NO: 143306 - DNA, 17 bp, Arabidopsis thaliana
tctattgccgccaaatc

SEQ ID NO: 143307 - DNA, 17 bp, Arabidopsis thaliana
tctattgcgtctacgcc

SEQ ID NO: 143308 - DNA, 17 bp, Arabidopsis thaliana
tctattgcgtgatccga

SEQ ID NO: 143309 - DNA, 17 bp, Arabidopsis thaliana
tctattgctaggattgc

SEQ ID NO: 143310 - DNA, 17 bp, Arabidopsis thaliana
tctattggaccaagact

SEQ ID NO: 143311 - DNA, 17 bp, Arabidopsis thaliana
tctattggggaatttgc

SEQ ID NO: 143312 - DNA, 17 bp, Arabidopsis thaliana
tctattgttgcgtgcca

SEQ ID NO: 143313 - DNA, 17 bp, Arabidopsis thaliana
tctatttgacacgtgtc

SEQ ID NO: 143314 - DNA, 17 bp, Arabidopsis thaliana
tctatttgcggatggta

SEQ ID NO: 143315 - DNA, 17 bp, Arabidopsis thaliana
tctatttgctgtgggtc

SEQ ID NO: 143316 - DNA, 17 bp, Arabidopsis thaliana
tctatttggcgtgatgt

SEQ ID NO: 143317 - DNA, 17 bp, Arabidopsis thaliana
tctatttggctgggtca

SEQ ID NO: 143318 - DNA, 17 bp, Arabidopsis thaliana
tctattttagagtttct

SEQ ID NO: 143319 - DNA, 17 bp, Arabidopsis thaliana
tctcaaaaatgacgacc

SEQ ID NO: 143320 - DNA, 17 bp, Arabidopsis thaliana
tctcaaaactggttcgg

SEQ ID NO: 143321 - DNA, 17 bp, Arabidopsis thaliana
tctcaaaatgattgtca

SEQ ID NO: 143322 - DNA, 17 bp, Arabidopsis thaliana
tctcaaacacatcctcg

SEQ ID NO: 143323 - DNA, 17 bp, Arabidopsis thaliana
tctcaaacaggagtttg

SEQ ID NO: 143324 - DNA, 17 bp, Arabidopsis thaliana
tctcaaacccaaatgcg

SEQ ID NO: 143325 - DNA, 17 bp, Arabidopsis thaliana
tctcaaactcggatcag

SEQ ID NO: 143326 - DNA, 17 bp, Arabidopsis thaliana
tctcaaacttttatgcc

SEQ ID NO: 143327 - DNA, 17 bp, Arabidopsis thaliana
tctcaaagattaagcca

SEQ ID NO: 143328 - DNA, 17 bp, Arabidopsis thaliana
tctcaaagctttcatgg

SEQ ID NO: 143329 - DNA, 17 bp, Arabidopsis thaliana
tctcaaagctttgacgg

SEQ ID NO: 143330 - DNA, 17 bp, Arabidopsis thaliana
tctcaaagtgccttctc

SEQ ID NO: 143331 - DNA, 17 bp, Arabidopsis thaliana
tctcaaagtgctgatgt

SEQ ID NO: 143332 - DNA, 17 bp, Arabidopsis thaliana
tctcaaatatttttcct

SEQ ID NO: 143333 - DNA, 17 bp, Arabidopsis thaliana
tctcaaatccgggtgcc

SEQ ID NO: 143334 - DNA, 17 bp, Arabidopsis thaliana
tctcaaattacgatcat

SEQ ID NO: 143335 - DNA, 17 bp, Arabidopsis thaliana
tctcaaattgcgttacc

SEQ ID NO: 143336 - DNA, 17 bp, Arabidopsis thaliana
tctcaacaagctcgctg

SEQ ID NO: 143337 - DNA, 17 bp, Arabidopsis thaliana
tctcaacacaggaatcg

SEQ ID NO: 143338 - DNA, 17 bp, Arabidopsis thaliana
tctcaacagtggtttgc

SEQ ID NO: 143339 - DNA, 17 bp, Arabidopsis thaliana
tctcaacatagcctcat

SEQ ID NO: 143340 - DNA, 17 bp, Arabidopsis thaliana
tctcaacctggctctga

SEQ ID NO: 143341 - DNA, 17 bp, Arabidopsis thaliana
tctcaacgattgtcgag

SEQ ID NO: 143342 - DNA, 17 bp, Arabidopsis thaliana
tctcaacgatttagatt

SEQ ID NO: 143343 - DNA, 17 bp, Arabidopsis thaliana
tctcaacgctttgatgg

SEQ ID NO: 143344 - DNA, 17 bp, Arabidopsis thaliana
tctcaacggattcatct

SEQ ID NO: 143345 - DNA, 17 bp, Arabidopsis thaliana
tctcaacgtgccgctgc

SEQ ID NO: 143346 - DNA, 17 bp, Arabidopsis thaliana
tctcaactcaggggcgt

SEQ ID NO: 143347 - DNA, 17 bp, Arabidopsis thaliana
tctcaactccaggattt

SEQ ID NO: 143348 - DNA, 17 bp, Arabidopsis thaliana
tctcaactgaatgagcc

SEQ ID NO: 143349 - DNA, 17 bp, Arabidopsis thaliana
tctcaagaaattgaaag

SEQ ID NO: 143350 - DNA, 17 bp, Arabidopsis thaliana
tctcaagactggggtta

SEQ ID NO: 143351 - DNA, 17 bp, Arabidopsis thaliana
tctcaagagagtttctg

SEQ ID NO: 143352 - DNA, 17 bp, Arabidopsis thaliana
tctcaagattggctctt

SEQ ID NO: 143353 - DNA, 17 bp, Arabidopsis thaliana
tctcaagcagctccgac

SEQ ID NO: 143354 - DNA, 17 bp, Arabidopsis thaliana
tctcaagcggattcttc

SEQ ID NO: 143355 - DNA, 17 bp, Arabidopsis thaliana
tctcaagcgggttttgg

SEQ ID NO: 143356 - DNA, 17 bp, Arabidopsis thaliana
tctcaagctcgcaggct

SEQ ID NO: 143357 - DNA, 17 bp, Arabidopsis thaliana
tctcaagcttgcccatg

SEQ ID NO: 143358 - DNA, 17 bp, Arabidopsis thaliana
tctcaagtcaaagtttg

SEQ ID NO: 143359 - DNA, 17 bp, Arabidopsis thaliana
tctcaagttccttcaga

SEQ ID NO: 143360 - DNA, 17 bp, Arabidopsis thaliana
tctcaagttgcgctcca

SEQ ID NO: 143361 - DNA, 17 bp, Arabidopsis thaliana
tctcaagttgggtctaa

SEQ ID NO: 143362 - DNA, 17 bp, Arabidopsis thaliana
tctcaataactttatgg

SEQ ID NO: 143363 - DNA, 17 bp, Arabidopsis thaliana
tctcaataggaagcaac

SEQ ID NO: 143364 - DNA, 17 bp, Arabidopsis thaliana
tctcaatatccatcact

SEQ ID NO: 143365 - DNA, 17 bp, Arabidopsis thaliana
tctcaatgccccttgca

SEQ ID NO: 143366 - DNA, 17 bp, Arabidopsis thaliana
tctcaatgccgatcaat

SEQ ID NO: 143367 - DNA, 17 bp, Arabidopsis thaliana
tctcaattaccgcggac

SEQ ID NO: 143368 - DNA, 17 bp, Arabidopsis thaliana
tctcaattctcaaaagt

SEQ ID NO: 143369 - DNA, 17 bp, Arabidopsis thaliana
tctcacaaatggtctag

SEQ ID NO: 143370 - DNA, 17 bp, Arabidopsis thaliana
tctcacaagcgtcacgt

SEQ ID NO: 143371 - DNA, 17 bp, Arabidopsis thaliana
tctcacagactgttcgg

SEQ ID NO: 143372 - DNA, 17 bp, Arabidopsis thaliana
tctcacagactgtttgg

SEQ ID NO: 143373 - DNA, 17 bp, Arabidopsis thaliana
tctcacagctaattgaa

SEQ ID NO: 143374 - DNA, 17 bp, Arabidopsis thaliana
tctcacatccacatgtc

SEQ ID NO: 143375 - DNA, 17 bp, Arabidopsis thaliana
tctcaccaagatcaatg

SEQ ID NO: 143376 - DNA, 17 bp, Arabidopsis thaliana
tctcaccaatcttattt

SEQ ID NO: 143377 - DNA, 17 bp, Arabidopsis thaliana
tctcacccagaacctgc

SEQ ID NO: 143378 - DNA, 17 bp, Arabidopsis thaliana
tctcacccatcgatgtg

SEQ ID NO: 143379 - DNA, 17 bp, Arabidopsis thaliana
tctcaccgacggcgtga

SEQ ID NO: 143380 - DNA, 17 bp, Arabidopsis thaliana
tctcaccgtttgtgtcc

SEQ ID NO: 143381 - DNA, 17 bp, Arabidopsis thaliana
tctcaccttgtgtgact

SEQ ID NO: 143382 - DNA, 17 bp, Arabidopsis thaliana
tctcacgaagagtccgt

SEQ ID NO: 143383 - DNA, 17 bp, Arabidopsis thaliana
tctcacgaagtcgggat

SEQ ID NO: 143384 - DNA, 17 bp, Arabidopsis thaliana
tctcacgagaacgggac

SEQ ID NO: 143385 - DNA, 17 bp, Arabidopsis thaliana
tctcacgatggttgtgc

SEQ ID NO: 143386 - DNA, 17 bp, Arabidopsis thaliana
tctcacgatttgggatc

SEQ ID NO: 143387 - DNA, 17 bp, Arabidopsis thaliana
tctcacgcgctaactgc

SEQ ID NO: 143388 - DNA, 17 bp, Arabidopsis thaliana
tctcacgggggacaatg

SEQ ID NO: 143389 - DNA, 17 bp, Arabidopsis thaliana
tctcacgtacaaggcac

SEQ ID NO: 143390 - DNA, 17 bp, Arabidopsis thaliana
tctcacgtctgcctggg

SEQ ID NO: 143391 - DNA, 17 bp, Arabidopsis thaliana
tctcacgtgttaagctt

SEQ ID NO: 143392 - DNA, 17 bp, Arabidopsis thaliana
tctcactaatggaaatg

SEQ ID NO: 143393 - DNA, 17 bp, Arabidopsis thaliana
tctcactagggtggtgg

SEQ ID NO: 143394 - DNA, 17 bp, Arabidopsis thaliana
tctcactgaaccttatg

SEQ ID NO: 143395 - DNA, 17 bp, Arabidopsis thaliana
tctcactgctctatctg

SEQ ID NO: 143396 - DNA, 17 bp, Arabidopsis thaliana
tctcactgctctttctg

SEQ ID NO: 143397 - DNA, 17 bp, Arabidopsis thaliana
tctcacttccatagcgc

SEQ ID NO: 143398 - DNA, 17 bp, Arabidopsis thaliana
tctcacttgagaaactt

SEQ ID NO: 143399 - DNA, 17 bp, Arabidopsis thaliana
tctcacttgagagacca

SEQ ID NO: 143400 - DNA, 17 bp, Arabidopsis thaliana
tctcacttgagagacta

SEQ ID NO: 143401 - DNA, 17 bp, Arabidopsis thaliana
tctcagaagatcaaggt

SEQ ID NO: 143402 - DNA, 17 bp, Arabidopsis thaliana
tctcagaagatgaaggt

SEQ ID NO: 143403 - DNA, 17 bp, Arabidopsis thaliana
tctcagaatgcttcagt

SEQ ID NO: 143404 - DNA, 17 bp, Arabidopsis thaliana
tctcagacaggtaatca

SEQ ID NO: 143405 - DNA, 17 bp, Arabidopsis thaliana
tctcagacatggcgtat

SEQ ID NO: 143406 - DNA, 17 bp, Arabidopsis thaliana
tctcagagataacgaac

SEQ ID NO: 143407 - DNA, 17 bp, Arabidopsis thaliana
tctcagagatgtcaccg

SEQ ID NO: 143408 - DNA, 17 bp, Arabidopsis thaliana
tctcagagtgttagcga

SEQ ID NO: 143409 - DNA, 17 bp, Arabidopsis thaliana
tctcagatcgttggcca

SEQ ID NO: 143410 - DNA, 17 bp, Arabidopsis thaliana
tctcagatgaaattgtc

SEQ ID NO: 143411 - DNA, 17 bp, Arabidopsis thaliana
tctcagatgagcctttg

SEQ ID NO: 143412 - DNA, 17 bp, Arabidopsis thaliana
tctcagattcgccgatt

SEQ ID NO: 143413 - DNA, 17 bp, Arabidopsis thaliana
tctcagcaccaagtttg

SEQ ID NO: 143414 - DNA, 17 bp, Arabidopsis thaliana
tctcagcagttctcgga

SEQ ID NO: 143415 - DNA, 17 bp, Arabidopsis thaliana
tctcagcatggttcagg

SEQ ID NO: 143416 - DNA, 17 bp, Arabidopsis thaliana
tctcagcatttattgac

SEQ ID NO: 143417 - DNA, 17 bp, Arabidopsis thaliana
tctcagctgccagaatg

SEQ ID NO: 143418 - DNA, 17 bp, Arabidopsis thaliana
tctcagctgtcgaatta

SEQ ID NO: 143419 - DNA, 17 bp, Arabidopsis thaliana
tctcagcttggactggg

SEQ ID NO: 143420 - DNA, 17 bp, Arabidopsis thaliana
tctcagcttttccccct

SEQ ID NO: 143421 - DNA, 17 bp, Arabidopsis thaliana
tctcaggatatgagagt

SEQ ID NO: 143422 - DNA, 17 bp, Arabidopsis thaliana
tctcaggcacagctgtg

SEQ ID NO: 143423 - DNA, 17 bp, Arabidopsis thaliana
tctcaggcatgtcacag

SEQ ID NO: 143424 - DNA, 17 bp, Arabidopsis thaliana
tctcaggccgaattgtc

SEQ ID NO: 143425 - DNA, 17 bp, Arabidopsis thaliana
tctcaggctgctacagt

SEQ ID NO: 143426 - DNA, 17 bp, Arabidopsis thaliana
tctcagggggggtcttc

SEQ ID NO: 143427 - DNA, 17 bp, Arabidopsis thaliana
tctcaggtagacagttc

SEQ ID NO: 143428 - DNA, 17 bp, Arabidopsis thaliana
tctcaggtagacagttt

SEQ ID NO: 143429 - DNA, 17 bp, Arabidopsis thaliana
tctcaggtgaaagtact

SEQ ID NO: 143430 - DNA, 17 bp, Arabidopsis thaliana
tctcaggtttacgtttt

SEQ ID NO: 143431 - DNA, 17 bp, Arabidopsis thaliana
tctcaggtttggtgccg

SEQ ID NO: 143432 - DNA, 17 bp, Arabidopsis thaliana
tctcagtatgctaggtg

SEQ ID NO: 143433 - DNA, 17 bp, Arabidopsis thaliana
tctcagtcgcatcctgt

SEQ ID NO: 143434 - DNA, 17 bp, Arabidopsis thaliana
tctcagtctttgttcgg

SEQ ID NO: 143435 - DNA, 17 bp, Arabidopsis thaliana
tctcagtgacacaagct

SEQ ID NO: 143436 - DNA, 17 bp, Arabidopsis thaliana
tctcagtgatgaggagc

SEQ ID NO: 143437 - DNA, 17 bp, Arabidopsis thaliana
tctcagtggatcgtggc

SEQ ID NO: 143438 - DNA, 17 bp, Arabidopsis thaliana
tctcagtggcattcgtc

SEQ ID NO: 143439 - DNA, 17 bp, Arabidopsis thaliana
tctcagtggtctgacca

SEQ ID NO: 143440 - DNA, 17 bp, Arabidopsis thaliana
tctcagtggtggtttac

SEQ ID NO: 143441 - DNA, 17 bp, Arabidopsis thaliana
tctcagtgtcgtgccta

SEQ ID NO: 143442 - DNA, 17 bp, Arabidopsis thaliana
tctcagttaagcgtgct

SEQ ID NO: 143443 - DNA, 17 bp, Arabidopsis thaliana
tctcagttaattcacgg

SEQ ID NO: 143444 - DNA, 17 bp, Arabidopsis thaliana
tctcagttctactcggt

SEQ ID NO: 143445 - DNA, 17 bp, Arabidopsis thaliana
tctcagttcttctcggt

SEQ ID NO: 143446 - DNA, 17 bp, Arabidopsis thaliana
tctcagtttgcgttgcc

SEQ ID NO: 143447 - DNA, 17 bp, Arabidopsis thaliana
tctcagtttggtctaac

SEQ ID NO: 143448 - DNA, 17 bp, Arabidopsis thaliana
tctcagttttgcggatg

SEQ ID NO: 143449 - DNA, 17 bp, Arabidopsis thaliana
tctcagttttgtgtttg

SEQ ID NO: 143450 - DNA, 17 bp, Arabidopsis thaliana
tctcataactttgatct

SEQ ID NO: 143451 - DNA, 17 bp, Arabidopsis thaliana
tctcataagcttgttgc

SEQ ID NO: 143452 - DNA, 17 bp, Arabidopsis thaliana
tctcataaggaagaccg

SEQ ID NO: 143453 - DNA, 17 bp, Arabidopsis thaliana
tctcatacgaggggtta

SEQ ID NO: 143454 - DNA, 17 bp, Arabidopsis thaliana
tctcatagtgcggtgcg

SEQ ID NO: 143455 - DNA, 17 bp, Arabidopsis thaliana
tctcatatgtgatgagt

SEQ ID NO: 143456 - DNA, 17 bp, Arabidopsis thaliana
tctcatatttgagacgg

SEQ ID NO: 143457 - DNA, 17 bp, Arabidopsis thaliana
tctcatcaagtttagct

SEQ ID NO: 143458 - DNA, 17 bp, Arabidopsis thaliana
tctcatcacaagtcaat

SEQ ID NO: 143459 - DNA, 17 bp, Arabidopsis thaliana
tctcatcacaagtctat

SEQ ID NO: 143460 - DNA, 17 bp, Arabidopsis thaliana
tctcatcaggagttgga

SEQ ID NO: 143461 - DNA, 17 bp, Arabidopsis thaliana
tctcatcatcgccttgc

SEQ ID NO: 143462 - DNA, 17 bp, Arabidopsis thaliana
tctcatcatggatgaag

SEQ ID NO: 143463 - DNA, 17 bp, Arabidopsis thaliana
tctcatcattggagatg

SEQ ID NO: 143464 - DNA, 17 bp, Arabidopsis thaliana
tctcatccaatttggac

SEQ ID NO: 143465 - DNA, 17 bp, Arabidopsis thaliana
tctcatccaatttgtac

SEQ ID NO: 143466 - DNA, 17 bp, Arabidopsis thaliana
tctcatccactttggac

SEQ ID NO: 143467 - DNA, 17 bp, Arabidopsis thaliana
tctcatccatcatttgc

SEQ ID NO: 143468 - DNA, 17 bp, Arabidopsis thaliana
tctcatccgacgattgg

SEQ ID NO: 143469 - DNA, 17 bp, Arabidopsis thaliana
tctcatccgagttgaac

SEQ ID NO: 143470 - DNA, 17 bp, Arabidopsis thaliana
tctcatcctgttcgcta

SEQ ID NO: 143471 - DNA, 17 bp, Arabidopsis thaliana
tctcatcggctgtttgg

SEQ ID NO: 143472 - DNA, 17 bp, Arabidopsis thaliana
tctcatcgtatttggag

SEQ ID NO: 143473 - DNA, 17 bp, Arabidopsis thaliana
tctcatcgtggtggtag

SEQ ID NO: 143474 - DNA, 17 bp, Arabidopsis thaliana
tctcatcgtttaaaact

SEQ ID NO: 143475 - DNA, 17 bp, Arabidopsis thaliana
tctcatctcaaccgact

SEQ ID NO: 143476 - DNA, 17 bp, Arabidopsis thaliana
tctcatctctgcaaact

SEQ ID NO: 143477 - DNA, 17 bp, Arabidopsis thaliana
tctcatctctgcaaagt

SEQ ID NO: 143478 - DNA, 17 bp, Arabidopsis thaliana
tctcatctgttcattgg

SEQ ID NO: 143479 - DNA, 17 bp, Arabidopsis thaliana
tctcatctgttgactgg

SEQ ID NO: 143480 - DNA, 17 bp, Arabidopsis thaliana
tctcatcttcagctttt

SEQ ID NO: 143481 - DNA, 17 bp, Arabidopsis thaliana
tctcatcttccggtgct

SEQ ID NO: 143482 - DNA, 17 bp, Arabidopsis thaliana
tctcatcttctgcgtaa

SEQ ID NO: 143483 - DNA, 17 bp, Arabidopsis thaliana
tctcatctttcttcctt

SEQ ID NO: 143484 - DNA, 17 bp, Arabidopsis thaliana
tctcatgatgtgttttt

SEQ ID NO: 143485 - DNA, 17 bp, Arabidopsis thaliana
tctcatgcagagttcga

SEQ ID NO: 143486 - DNA, 17 bp, Arabidopsis thaliana
tctcatggagagttcga

SEQ ID NO: 143487 - DNA, 17 bp, Arabidopsis thaliana
tctcatggagagttcta

SEQ ID NO: 143488 - DNA, 17 bp, Arabidopsis thaliana
tctcatggattcgtggt

SEQ ID NO: 143489 - DNA, 17 bp, Arabidopsis thaliana
tctcatgtaagcacgtc

SEQ ID NO: 143490 - DNA, 17 bp, Arabidopsis thaliana
tctcatgtagagttcga

SEQ ID NO: 143491 - DNA, 17 bp, Arabidopsis thaliana
tctcatgtgctaatgtg

SEQ ID NO: 143492 - DNA, 17 bp, Arabidopsis thaliana
tctcatgtgctgatgtg

SEQ ID NO: 143493 - DNA, 17 bp, Arabidopsis thaliana
tctcattacaaccgttt

SEQ ID NO: 143494 - DNA, 17 bp, Arabidopsis thaliana
tctcattagatagcgtt

SEQ ID NO: 143495 - DNA, 17 bp, Arabidopsis thaliana
tctcattattacagcgg

SEQ ID NO: 143496 - DNA, 17 bp, Arabidopsis thaliana
tctcattcattgacaca

SEQ ID NO: 143497 - DNA, 17 bp, Arabidopsis thaliana
tctcattcgttgttcgc

SEQ ID NO: 143498 - DNA, 17 bp, Arabidopsis thaliana
tctcattctcgaccacc

SEQ ID NO: 143499 - DNA, 17 bp, Arabidopsis thaliana
tctcattgagagttcga

SEQ ID NO: 143500 - DNA, 17 bp, Arabidopsis thaliana
tctcattgcggcgttag

SEQ ID NO: 143501 - DNA, 17 bp, Arabidopsis thaliana
tctcattgctcgggata

SEQ ID NO: 143502 - DNA, 17 bp, Arabidopsis thaliana
tctcattgctgatgtgt

SEQ ID NO: 143503 - DNA, 17 bp, Arabidopsis thaliana
tctcattgggttatgcg

SEQ ID NO: 143504 - DNA, 17 bp, Arabidopsis thaliana
tctcattggttgcgaaa

SEQ ID NO: 143505 - DNA, 17 bp, Arabidopsis thaliana
tctcatttagccaaaac

SEQ ID NO: 143506 - DNA, 17 bp, Arabidopsis thaliana
tctcatttcttctgctg

SEQ ID NO: 143507 - DNA, 17 bp, Arabidopsis thaliana
tctcatttgagtgacca

SEQ ID NO: 143508 - DNA, 17 bp, Arabidopsis thaliana
tctcatttgcggtctaa

SEQ ID NO: 143509 - DNA, 17 bp, Arabidopsis thaliana
tctcattttacgcacct

SEQ ID NO: 143510 - DNA, 17 bp, Arabidopsis thaliana
tctcattttcgtgattt

SEQ ID NO: 143511 - DNA, 17 bp, Arabidopsis thaliana
tctcatttttggggcgg

SEQ ID NO: 143512 - DNA, 17 bp, Arabidopsis thaliana
tctccaaaatgtcacag

SEQ ID NO: 143513 - DNA, 17 bp, Arabidopsis thaliana
tctccaaatgagtgaca

SEQ ID NO: 143514 - DNA, 17 bp, Arabidopsis thaliana
tctccaacatgtttccg

SEQ ID NO: 143515 - DNA, 17 bp, Arabidopsis thaliana
tctccaacggacaatca

SEQ ID NO: 143516 - DNA, 17 bp, Arabidopsis thaliana
tctccaacgtcacaatc

SEQ ID NO: 143517 - DNA, 17 bp, Arabidopsis thaliana
tctccaactgtgtgaca

SEQ ID NO: 143518 - DNA, 17 bp, Arabidopsis thaliana
tctccaagctttcatgg

SEQ ID NO: 143519 - DNA, 17 bp, Arabidopsis thaliana
tctccaaggatgacttg

SEQ ID NO: 143520 - DNA, 17 bp, Arabidopsis thaliana
tctccaaggtgaacagc

SEQ ID NO: 143521 - DNA, 17 bp, Arabidopsis thaliana
tctccaagttgcgaaag

SEQ ID NO: 143522 - DNA, 17 bp, Arabidopsis thaliana
tctccaatcccataggc

SEQ ID NO: 143523 - DNA, 17 bp, Arabidopsis thaliana
tctccaatcgttctcta

SEQ ID NO: 143524 - DNA, 17 bp, Arabidopsis thaliana
tctccaatcgttctttc

SEQ ID NO: 143525 - DNA, 17 bp, Arabidopsis thaliana
tctccaatctgctagac

SEQ ID NO: 143526 - DNA, 17 bp, Arabidopsis thaliana
tctccaatggtgagagc

SEQ ID NO: 143527 - DNA, 17 bp, Arabidopsis thaliana
tctccaattgtcgattc

SEQ ID NO: 143528 - DNA, 17 bp, Arabidopsis thaliana
tctccaatttctgctcg

SEQ ID NO: 143529 - DNA, 17 bp, Arabidopsis thaliana
tctccacaaccggcaca

SEQ ID NO: 143530 - DNA, 17 bp, Arabidopsis thaliana
tctccacatgtcgcagg

SEQ ID NO: 143531 - DNA, 17 bp, Arabidopsis thaliana
tctccaccatcgctagt

SEQ ID NO: 143532 - DNA, 17 bp, Arabidopsis thaliana
tctccaccgtaatctgc

SEQ ID NO: 143533 - DNA, 17 bp, Arabidopsis thaliana
tctccacgctacagaga

SEQ ID NO: 143534 - DNA, 17 bp, Arabidopsis thaliana
tctccacgctcaccgca

SEQ ID NO: 143535 - DNA, 17 bp, Arabidopsis thaliana
tctccacggtccagaca

SEQ ID NO: 143536 - DNA, 17 bp, Arabidopsis thaliana
tctccagagattgtgtg

SEQ ID NO: 143537 - DNA, 17 bp, Arabidopsis thaliana
tctccagaggaggctgt

SEQ ID NO: 143538 - DNA, 17 bp, Arabidopsis thaliana
tctccagccgctggacc

SEQ ID NO: 143539 - DNA, 17 bp, Arabidopsis thaliana
tctccagcggctaactg

SEQ ID NO: 143540 - DNA, 17 bp, Arabidopsis thaliana
tctccagcggtgtgcaa

SEQ ID NO: 143541 - DNA, 17 bp, Arabidopsis thaliana
tctccaggttagctcga

SEQ ID NO: 143542 - DNA, 17 bp, Arabidopsis thaliana
tctccaggttcagctgc

SEQ ID NO: 143543 - DNA, 17 bp, Arabidopsis thaliana
tctccaggttggtgatc

SEQ ID NO: 143544 - DNA, 17 bp, Arabidopsis thaliana
tctccagttcggttctg

SEQ ID NO: 143545 - DNA, 17 bp, Arabidopsis thaliana
tctccatagagcgtttt

SEQ ID NO: 143546 - DNA, 17 bp, Arabidopsis thaliana
tctccatatgagctttg

SEQ ID NO: 143547 - DNA, 17 bp, Arabidopsis thaliana
tctccatatgggtgaca

SEQ ID NO: 143548 - DNA, 17 bp, Arabidopsis thaliana
tctccatcagctcgttg

SEQ ID NO: 143549 - DNA, 17 bp, Arabidopsis thaliana
tctccatcagctgcgga

SEQ ID NO: 143550 - DNA, 17 bp, Arabidopsis thaliana
tctccatccagatgatc

SEQ ID NO: 143551 - DNA, 17 bp, Arabidopsis thaliana
tctccatcccaaagctg

SEQ ID NO: 143552 - DNA, 17 bp, Arabidopsis thaliana
tctccatcccattgtta

SEQ ID NO: 143553 - DNA, 17 bp, Arabidopsis thaliana
tctccatccgaagtttc

SEQ ID NO: 143554 - DNA, 17 bp, Arabidopsis thaliana
tctccatccttggtaag

SEQ ID NO: 143555 - DNA, 17 bp, Arabidopsis thaliana
tctccatcgagatggat

SEQ ID NO: 143556 - DNA, 17 bp, Arabidopsis thaliana
tctccatcgcgtgactt

SEQ ID NO: 143557 - DNA, 17 bp, Arabidopsis thaliana
tctccatcgggagtttc

SEQ ID NO: 143558 - DNA, 17 bp, Arabidopsis thaliana
tctccatctactgtggt

SEQ ID NO: 143559 - DNA, 17 bp, Arabidopsis thaliana
tctccatcttctggttg

SEQ ID NO: 143560 - DNA, 17 bp, Arabidopsis thaliana
tctccatcttgttgagc

SEQ ID NO: 143561 - DNA, 17 bp, Arabidopsis thaliana
tctccatctttcttctt

SEQ ID NO: 143562 - DNA, 17 bp, Arabidopsis thaliana
tctccatgcgcttgatg

SEQ ID NO: 143563 - DNA, 17 bp, Arabidopsis thaliana
tctccatggagcggtgg

SEQ ID NO: 143564 - DNA, 17 bp, Arabidopsis thaliana
tctccattgacgaaggt

SEQ ID NO: 143565 - DNA, 17 bp, Arabidopsis thaliana
tctccattgactttttg

SEQ ID NO: 143566 - DNA, 17 bp, Arabidopsis thaliana
tctccatttgggtgaca

SEQ ID NO: 143567 - DNA, 17 bp, Arabidopsis thaliana
tctcccaaacgtttgtg

SEQ ID NO: 143568 - DNA, 17 bp, Arabidopsis thaliana
tctcccaagtttcttgc

SEQ ID NO: 143569 - DNA, 17 bp, Arabidopsis thaliana
tctcccaatctctatcg

SEQ ID NO: 143570 - DNA, 17 bp, Arabidopsis thaliana
tctcccagaaggtgtgt

SEQ ID NO: 143571 - DNA, 17 bp, Arabidopsis thaliana
tctcccagaggcgggac

SEQ ID NO: 143572 - DNA, 17 bp, Arabidopsis thaliana
tctcccagtggtgtgcc

SEQ ID NO: 143573 - DNA, 17 bp, Arabidopsis thaliana
tctcccatccaccttct

SEQ ID NO: 143574 - DNA, 17 bp, Arabidopsis thaliana
tctccccacagacggcc

SEQ ID NO: 143575 - DNA, 17 bp, Arabidopsis thaliana
tctccccacagacggcg

SEQ ID NO: 143576 - DNA, 17 bp, Arabidopsis thaliana
tctccccctacctggcg

SEQ ID NO: 143577 - DNA, 17 bp, Arabidopsis thaliana
tctccccctctctctag

SEQ ID NO: 143578 - DNA, 17 bp, Arabidopsis thaliana
tctcccctgcgagcagt

SEQ ID NO: 143579 - DNA, 17 bp, Arabidopsis thaliana
tctcccgatgtgtagaa

SEQ ID NO: 143580 - DNA, 17 bp, Arabidopsis thaliana
tctcccgctcttttgca

SEQ ID NO: 143581 - DNA, 17 bp, Arabidopsis thaliana
tctcccggtaggacctc

SEQ ID NO: 143582 - DNA, 17 bp, Arabidopsis thaliana
tctccctagcggatagc

SEQ ID NO: 143583 - DNA, 17 bp, Arabidopsis thaliana
tctccctcgacgatttt

SEQ ID NO: 143584 - DNA, 17 bp, Arabidopsis thaliana
tctccctctctctcttt

SEQ ID NO: 143585 - DNA, 17 bp, Arabidopsis thaliana
tctccctgcgatgtacc

SEQ ID NO: 143586 - DNA, 17 bp, Arabidopsis thaliana
tctcccttctactttct

SEQ ID NO: 143587 - DNA, 17 bp, Arabidopsis thaliana
tctcccttctcaaacac

SEQ ID NO: 143588 - DNA, 17 bp, Arabidopsis thaliana
tctcccttctcaaacgc

SEQ ID NO: 143589 - DNA, 17 bp, Arabidopsis thaliana
tctcccttgcaaatttt

SEQ ID NO: 143590 - DNA, 17 bp, Arabidopsis thaliana
tctcccttgcgtagagg

SEQ ID NO: 143591 - DNA, 17 bp, Arabidopsis thaliana
tctccctttgtcccttc

SEQ ID NO: 143592 - DNA, 17 bp, Arabidopsis thaliana
tctcccttttcttactg

SEQ ID NO: 143593 - DNA, 17 bp, Arabidopsis thaliana
tctccgaaagcgccgcg

SEQ ID NO: 143594 - DNA, 17 bp, Arabidopsis thaliana
tctccgaatcttagtgg

SEQ ID NO: 143595 - DNA, 17 bp, Arabidopsis thaliana
tctccgacagagttttc

SEQ ID NO: 143596 - DNA, 17 bp, Arabidopsis thaliana
tctccgacataggcaaa

SEQ ID NO: 143597 - DNA, 17 bp, Arabidopsis thaliana
tctccgacatggttctg

SEQ ID NO: 143598 - DNA, 17 bp, Arabidopsis thaliana
tctccgacccttgcttg

SEQ ID NO: 143599 - DNA, 17 bp, Arabidopsis thaliana
tctccgacgtttatcag

SEQ ID NO: 143600 - DNA, 17 bp, Arabidopsis thaliana
tctccgagaagttggca

SEQ ID NO: 143601 - DNA, 17 bp, Arabidopsis thaliana
tctccgagaggcgtgac

SEQ ID NO: 143602 - DNA, 17 bp, Arabidopsis thaliana
tctccgagatgtggatt

SEQ ID NO: 143603 - DNA, 17 bp, Arabidopsis thaliana
tctccgagcagcgtata

SEQ ID NO: 143604 - DNA, 17 bp, Arabidopsis thaliana
tctccgagcgatctacc

SEQ ID NO: 143605 - DNA, 17 bp, Arabidopsis thaliana
tctccgagtaccgccgt

SEQ ID NO: 143606 - DNA, 17 bp, Arabidopsis thaliana
tctccgagtaccgctgt

SEQ ID NO: 143607 - DNA, 17 bp, Arabidopsis thaliana
tctccgatttcactcaa

SEQ ID NO: 143608 - DNA, 17 bp, Arabidopsis thaliana
tctccgatttggatcct

SEQ ID NO: 143609 - DNA, 17 bp, Arabidopsis thaliana
tctccgcagatcccgga

SEQ ID NO: 143610 - DNA, 17 bp, Arabidopsis thaliana
tctccgcagtgactgta

SEQ ID NO: 143611 - DNA, 17 bp, Arabidopsis thaliana
tctccgcatgcaccaca

SEQ ID NO: 143612 - DNA, 17 bp, Arabidopsis thaliana
tctccgccgattttcac

SEQ ID NO: 143613 - DNA, 17 bp, Arabidopsis thaliana
tctccgccgatttttac

SEQ ID NO: 143614 - DNA, 17 bp, Arabidopsis thaliana
tctccgccggagcaggc

SEQ ID NO: 143615 - DNA, 17 bp, Arabidopsis thaliana
tctccgcgattcgttca

SEQ ID NO: 143616 - DNA, 17 bp, Arabidopsis thaliana
tctccgctacagagagc

SEQ ID NO: 143617 - DNA, 17 bp, Arabidopsis thaliana
tctccgctagatcaact

SEQ ID NO: 143618 - DNA, 17 bp, Arabidopsis thaliana
tctccgctatagagagc

SEQ ID NO: 143619 - DNA, 17 bp, Arabidopsis thaliana
tctccgctcagatctac

SEQ ID NO: 143620 - DNA, 17 bp, Arabidopsis thaliana
tctccgctcagatctgc

SEQ ID NO: 143621 - DNA, 17 bp, Arabidopsis thaliana
tctccgctccgatctgc

SEQ ID NO: 143622 - DNA, 17 bp, Arabidopsis thaliana
tctccggccattgcttg

SEQ ID NO: 143623 - DNA, 17 bp, Arabidopsis thaliana
tctccggcgagacgtag

SEQ ID NO: 143624 - DNA, 17 bp, Arabidopsis thaliana
tctccggcgagtccgag

SEQ ID NO: 143625 - DNA, 17 bp, Arabidopsis thaliana
tctccggctcaggccac

SEQ ID NO: 143626 - DNA, 17 bp, Arabidopsis thaliana
tctccgggtgattgtct

SEQ ID NO: 143627 - DNA, 17 bp, Arabidopsis thaliana
tctccggtcgcggtctt

SEQ ID NO: 143628 - DNA, 17 bp, Arabidopsis thaliana
tctccggtcttcgcttc

SEQ ID NO: 143629 - DNA, 17 bp, Arabidopsis thaliana
tctccgtattagtgaca

SEQ ID NO: 143630 - DNA, 17 bp, Arabidopsis thaliana
tctccgtctatggaaac

SEQ ID NO: 143631 - DNA, 17 bp, Arabidopsis thaliana
tctccgttccgttgagg

SEQ ID NO: 143632 - DNA, 17 bp, Arabidopsis thaliana
tctccgttgattttgag

SEQ ID NO: 143633 - DNA, 17 bp, Arabidopsis thaliana
tctccgttttgcattgt

SEQ ID NO: 143634 - DNA, 17 bp, Arabidopsis thaliana
tctcctaaaagtcctgc

SEQ ID NO: 143635 - DNA, 17 bp, Arabidopsis thaliana
tctcctacaacttgaca

SEQ ID NO: 143636 - DNA, 17 bp, Arabidopsis thaliana
tctcctacataggtggt

SEQ ID NO: 143637 - DNA, 17 bp, Arabidopsis thaliana
tctcctaccacctattt

SEQ ID NO: 143638 - DNA, 17 bp, Arabidopsis thaliana
tctcctactctcttgca

SEQ ID NO: 143639 - DNA, 17 bp, Arabidopsis thaliana
tctcctaggctttgtgg

SEQ ID NO: 143640 - DNA, 17 bp, Arabidopsis thaliana
tctcctagtggtgattt

SEQ ID NO: 143641 - DNA, 17 bp, Arabidopsis thaliana
tctcctagtttcgacat

SEQ ID NO: 143642 - DNA, 17 bp, Arabidopsis thaliana
tctcctatccaaattac

SEQ ID NO: 143643 - DNA, 17 bp, Arabidopsis thaliana
tctcctatcttcaccgt

SEQ ID NO: 143644 - DNA, 17 bp, Arabidopsis thaliana
tctcctcaccgtctccg

SEQ ID NO: 143645 - DNA, 17 bp, Arabidopsis thaliana
tctcctcagcttgctgc

SEQ ID NO: 143646 - DNA, 17 bp, Arabidopsis thaliana
tctcctcagttggcgga

SEQ ID NO: 143647 - DNA, 17 bp, Arabidopsis thaliana
tctcctcatggccattt

SEQ ID NO: 143648 - DNA, 17 bp, Arabidopsis thaliana
tctcctccaatggtagg

SEQ ID NO: 143649 - DNA, 17 bp, Arabidopsis thaliana
tctcctccacggattac

SEQ ID NO: 143650 - DNA, 17 bp, Arabidopsis thaliana
tctcctccgctgatttt

SEQ ID NO: 143651 - DNA, 17 bp, Arabidopsis thaliana
tctcctcctcccggtgt

SEQ ID NO: 143652 - DNA, 17 bp, Arabidopsis thaliana
tctcctcctgtgagtga

SEQ ID NO: 143653 - DNA, 17 bp, Arabidopsis thaliana
tctcctcgagggcctca

SEQ ID NO: 143654 - DNA, 17 bp, Arabidopsis thaliana
tctcctcggcatgtgga

SEQ ID NO: 143655 - DNA, 17 bp, Arabidopsis thaliana
tctcctctcaccggatt

SEQ ID NO: 143656 - DNA, 17 bp, Arabidopsis thaliana
tctcctctcttcttctt

SEQ ID NO: 143657 - DNA, 17 bp, Arabidopsis thaliana
tctcctctgactttctc

SEQ ID NO: 143658 - DNA, 17 bp, Arabidopsis thaliana
tctcctctgatcgccaa

SEQ ID NO: 143659 - DNA, 17 bp, Arabidopsis thaliana
tctcctctgtgcccata

SEQ ID NO: 143660 - DNA, 17 bp, Arabidopsis thaliana
tctcctgatcgccaact

SEQ ID NO: 143661 - DNA, 17 bp, Arabidopsis thaliana
tctcctgatgatgatgt

SEQ ID NO: 143662 - DNA, 17 bp, Arabidopsis thaliana
tctcctgattggtcgca

SEQ ID NO: 143663 - DNA, 17 bp, Arabidopsis thaliana
tctcctgctgatgggtt

SEQ ID NO: 143664 - DNA, 17 bp, Arabidopsis thaliana
tctcctgcttcaatggc

SEQ ID NO: 143665 - DNA, 17 bp, Arabidopsis thaliana
tctcctggatattcggt

SEQ ID NO: 143666 - DNA, 17 bp, Arabidopsis thaliana
tctcctggtgcaggtcg

SEQ ID NO: 143667 - DNA, 17 bp, Arabidopsis thaliana
tctcctgtttccgcttt

SEQ ID NO: 143668 - DNA, 17 bp, Arabidopsis thaliana
tctccttcaagtttgca

SEQ ID NO: 143669 - DNA, 17 bp, Arabidopsis thaliana
tctccttcactgcgtgc

SEQ ID NO: 143670 - DNA, 17 bp, Arabidopsis thaliana
tctccttcctgaagatc

SEQ ID NO: 143671 - DNA, 17 bp, Arabidopsis thaliana
tctccttctcaatgcgc

SEQ ID NO: 143672 - DNA, 17 bp, Arabidopsis thaliana
tctccttctccatgcgc

SEQ ID NO: 143673 - DNA, 17 bp, Arabidopsis thaliana
tctccttctccatgctc

SEQ ID NO: 143674 - DNA, 17 bp, Arabidopsis thaliana
tctccttctctttctct

SEQ ID NO: 143675 - DNA, 17 bp, Arabidopsis thaliana
tctccttctgctgcggc

SEQ ID NO: 143676 - DNA, 17 bp, Arabidopsis thaliana
tctccttctgcttgaca

SEQ ID NO: 143677 - DNA, 17 bp, Arabidopsis thaliana
tctccttcttcgctgac

SEQ ID NO: 143678 - DNA, 17 bp, Arabidopsis thaliana
tctccttcttcgctgcc

SEQ ID NO: 143679 - DNA, 17 bp, Arabidopsis thaliana
tctccttcttgcgtgct

SEQ ID NO: 143680 - DNA, 17 bp, Arabidopsis thaliana
tctccttgaagtcgcca

SEQ ID NO: 143681 - DNA, 17 bp, Arabidopsis thaliana
tctccttgcagctgagc

SEQ ID NO: 143682 - DNA, 17 bp, Arabidopsis thaliana
tctccttggctaaacct

SEQ ID NO: 143683 - DNA, 17 bp, Arabidopsis thaliana
tctccttggtgatcatt

SEQ ID NO: 143684 - DNA, 17 bp, Arabidopsis thaliana
tctcctttgacattcct

SEQ ID NO: 143685 - DNA, 17 bp, Arabidopsis thaliana
tctcctttgctgttttg

SEQ ID NO: 143686 - DNA, 17 bp, Arabidopsis thaliana
tctcctttgtcgctaag

SEQ ID NO: 143687 - DNA, 17 bp, Arabidopsis thaliana
tctcctttgttcgtcag

SEQ ID NO: 143688 - DNA, 17 bp, Arabidopsis thaliana
tctccttttcggggcga

SEQ ID NO: 143689 - DNA, 17 bp, Arabidopsis thaliana
tctccttttgatcctgg

SEQ ID NO: 143690 - DNA, 17 bp, Arabidopsis thaliana
tctcgaaactctgaatg

SEQ ID NO: 143691 - DNA, 17 bp, Arabidopsis thaliana
tctcgaaactgctctgg

SEQ ID NO: 143692 - DNA, 17 bp, Arabidopsis thaliana
tctcgaacccgggcgaa

SEQ ID NO: 143693 - DNA, 17 bp, Arabidopsis thaliana
tctcgaaccgaatggcc

SEQ ID NO: 143694 - DNA, 17 bp, Arabidopsis thaliana
tctcgaacgtcgctgag

SEQ ID NO: 143695 - DNA, 17 bp, Arabidopsis thaliana
tctcgaagaggattggt

SEQ ID NO: 143696 - DNA, 17 bp, Arabidopsis thaliana
tctcgaagattaagcca

SEQ ID NO: 143697 - DNA, 17 bp, Arabidopsis thaliana
tctcgaagcccggtgta

SEQ ID NO: 143698 - DNA, 17 bp, Arabidopsis thaliana
tctcgaaggattatgga

SEQ ID NO: 143699 - DNA, 17 bp, Arabidopsis thaliana
tctcgaaggttttgact

SEQ ID NO: 143700 - DNA, 17 bp, Arabidopsis thaliana
tctcgaagtagctatgg

SEQ ID NO: 143701 - DNA, 17 bp, Arabidopsis thaliana
tctcgaatcagacgctt

SEQ ID NO: 143702 - DNA, 17 bp, Arabidopsis thaliana
tctcgaatggagacttg

SEQ ID NO: 143703 - DNA, 17 bp, Arabidopsis thaliana
tctcgacaagtgcgatg

SEQ ID NO: 143704 - DNA, 17 bp, Arabidopsis thaliana
tctcgacaatgatttct

SEQ ID NO: 143705 - DNA, 17 bp, Arabidopsis thaliana
tctcgacagtttgattc

SEQ ID NO: 143706 - DNA, 17 bp, Arabidopsis thaliana
tctcgacgaagaatgga

SEQ ID NO: 143707 - DNA, 17 bp, Arabidopsis thaliana
tctcgacgacggcagca

SEQ ID NO: 143708 - DNA, 17 bp, Arabidopsis thaliana
tctcgacgccggcgttt

SEQ ID NO: 143709 - DNA, 17 bp, Arabidopsis thaliana
tctcgacgcggattacg

SEQ ID NO: 143710 - DNA, 17 bp, Arabidopsis thaliana
tctcgacggaaagatgt

SEQ ID NO: 143711 - DNA, 17 bp, Arabidopsis thaliana
tctcgacgggaaaacga

SEQ ID NO: 143712 - DNA, 17 bp, Arabidopsis thaliana
tctcgactggtcgcatt

SEQ ID NO: 143713 - DNA, 17 bp, Arabidopsis thaliana
tctcgacttggcccagt

SEQ ID NO: 143714 - DNA, 17 bp, Arabidopsis thaliana
tctcgagacattttgtt

SEQ ID NO: 143715 - DNA, 17 bp, Arabidopsis thaliana
tctcgagactgccacaa

SEQ ID NO: 143716 - DNA, 17 bp, Arabidopsis thaliana
tctcgagataggttttg

SEQ ID NO: 143717 - DNA, 17 bp, Arabidopsis thaliana
tctcgagcaggctacct

SEQ ID NO: 143718 - DNA, 17 bp, Arabidopsis thaliana
tctcgagccgtctggac

SEQ ID NO: 143719 - DNA, 17 bp, Arabidopsis thaliana
tctcgagcgcaggttta

SEQ ID NO: 143720 - DNA, 17 bp, Arabidopsis thaliana
tctcgagctgcttccgc

SEQ ID NO: 143721 - DNA, 17 bp, Arabidopsis thaliana
tctcgaggagtgttagg

SEQ ID NO: 143722 - DNA, 17 bp, Arabidopsis thaliana
tctcgagggcacgtctg

SEQ ID NO: 143723 - DNA, 17 bp, Arabidopsis thaliana
tctcgagtacctacgta

SEQ ID NO: 143724 - DNA, 17 bp, Arabidopsis thaliana
tctcgagtccagtatgc

SEQ ID NO: 143725 - DNA, 17 bp, Arabidopsis thaliana
tctcgataaggttgtgt

SEQ ID NO: 143726 - DNA, 17 bp, Arabidopsis thaliana
tctcgatcagagctgtg

SEQ ID NO: 143727 - DNA, 17 bp, Arabidopsis thaliana
tctcgatcagtcgctgg

SEQ ID NO: 143728 - DNA, 17 bp, Arabidopsis thaliana
tctcgatccgtagaatt

SEQ ID NO: 143729 - DNA, 17 bp, Arabidopsis thaliana
tctcgatcggaagcaaa

SEQ ID NO: 143730 - DNA, 17 bp, Arabidopsis thaliana
tctcgatcggttaaccc

SEQ ID NO: 143731 - DNA, 17 bp, Arabidopsis thaliana
tctcgatcgtgtcgtcg

SEQ ID NO: 143732 - DNA, 17 bp, Arabidopsis thaliana
tctcgatctgtcacgat

SEQ ID NO: 143733 - DNA, 17 bp, Arabidopsis thaliana
tctcgatcttgccttca

SEQ ID NO: 143734 - DNA, 17 bp, Arabidopsis thaliana
tctcgatgagttatgga

SEQ ID NO: 143735 - DNA, 17 bp, Arabidopsis thaliana
tctcgatggatcacgat

SEQ ID NO: 143736 - DNA, 17 bp, Arabidopsis thaliana
tctcgatgtagactaaa

SEQ ID NO: 143737 - DNA, 17 bp, Arabidopsis thaliana
tctcgatgtctaccagt

SEQ ID NO: 143738 - DNA, 17 bp, Arabidopsis thaliana
tctcgatgtcttagcct

SEQ ID NO: 143739 - DNA, 17 bp, Arabidopsis thaliana
tctcgatgtgaaatatg

SEQ ID NO: 143740 - DNA, 17 bp, Arabidopsis thaliana
tctcgattccgtgtgac

SEQ ID NO: 143741 - DNA, 17 bp, Arabidopsis thaliana
tctcgattcctttcagg

SEQ ID NO: 143742 - DNA, 17 bp, Arabidopsis thaliana
tctcgattggcttttcg

SEQ ID NO: 143743 - DNA, 17 bp, Arabidopsis thaliana
tctcgattgtggaccac

SEQ ID NO: 143744 - DNA, 17 bp, Arabidopsis thaliana
tctcgcaaatcgggata

SEQ ID NO: 143745 - DNA, 17 bp, Arabidopsis thaliana
tctcgcaagttgcaatt

SEQ ID NO: 143746 - DNA, 17 bp, Arabidopsis thaliana
tctcgcagaccgaagtc

SEQ ID NO: 143747 - DNA, 17 bp, Arabidopsis thaliana
tctcgcagagatatttg

SEQ ID NO: 143748 - DNA, 17 bp, Arabidopsis thaliana
tctcgcaggagaaactt

SEQ ID NO: 143749 - DNA, 17 bp, Arabidopsis thaliana
tctcgcaggcttcattc

SEQ ID NO: 143750 - DNA, 17 bp, Arabidopsis thaliana
tctcgccagagcgttac

SEQ ID NO: 143751 - DNA, 17 bp, Arabidopsis thaliana
tctcgcccaagcacgct

SEQ ID NO: 143752 - DNA, 17 bp, Arabidopsis thaliana
tctcgccgcagatctgt

SEQ ID NO: 143753 - DNA, 17 bp, Arabidopsis thaliana
tctcgcgacgtcgcggg

SEQ ID NO: 143754 - DNA, 17 bp, Arabidopsis thaliana
tctcgcgagttactaac

SEQ ID NO: 143755 - DNA, 17 bp, Arabidopsis thaliana
tctcgcggaagagttcc

SEQ ID NO: 143756 - DNA, 17 bp, Arabidopsis thaliana
tctcgctacgctgcggt

SEQ ID NO: 143757 - DNA, 17 bp, Arabidopsis thaliana
tctcgctatggcgttca

SEQ ID NO: 143758 - DNA, 17 bp, Arabidopsis thaliana
tctcgctcctctgagca

SEQ ID NO: 143759 - DNA, 17 bp, Arabidopsis thaliana
tctcgctcctttgagca

SEQ ID NO: 143760 - DNA, 17 bp, Arabidopsis thaliana
tctcgctcggttcaccc

SEQ ID NO: 143761 - DNA, 17 bp, Arabidopsis thaliana
tctcgctgtgttgttcg

SEQ ID NO: 143762 - DNA, 17 bp, Arabidopsis thaliana
tctcgcttctaagtttg

SEQ ID NO: 143763 - DNA, 17 bp, Arabidopsis thaliana
tctcgcttgagaggatg

SEQ ID NO: 143764 - DNA, 17 bp, Arabidopsis thaliana
tctcgcttggtgcaggt

SEQ ID NO: 143765 - DNA, 17 bp, Arabidopsis thaliana
tctcgctttgactacgt

SEQ ID NO: 143766 - DNA, 17 bp, Arabidopsis thaliana
tctcggaacctgagacc

SEQ ID NO: 143767 - DNA, 17 bp, Arabidopsis thaliana
tctcggaatcggtgttt

SEQ ID NO: 143768 - DNA, 17 bp, Arabidopsis thaliana
tctcggaatgccccctt

SEQ ID NO: 143769 - DNA, 17 bp, Arabidopsis thaliana
tctcggaccaggcttca

SEQ ID NO: 143770 - DNA, 17 bp, Arabidopsis thaliana
tctcggacccggtcgac

SEQ ID NO: 143771 - DNA, 17 bp, Arabidopsis thaliana
tctcggactgacgaaat

SEQ ID NO: 143772 - DNA, 17 bp, Arabidopsis thaliana
tctcggagaactgctga

SEQ ID NO: 143773 - DNA, 17 bp, Arabidopsis thaliana
tctcggagatgtagagt

SEQ ID NO: 143774 - DNA, 17 bp, Arabidopsis thaliana
tctcggagcagcaacaa

SEQ ID NO: 143775 - DNA, 17 bp, Arabidopsis thaliana
tctcggattcgcaagct

SEQ ID NO: 143776 - DNA, 17 bp, Arabidopsis thaliana
tctcggattcgcttggt

SEQ ID NO: 143777 - DNA, 17 bp, Arabidopsis thaliana
tctcggcaacggatatc

SEQ ID NO: 143778 - DNA, 17 bp, Arabidopsis thaliana
tctcggccccgaacctc

SEQ ID NO: 143779 - DNA, 17 bp, Arabidopsis thaliana
tctcggccgaatcctgt

SEQ ID NO: 143780 - DNA, 17 bp, Arabidopsis thaliana
tctcggcgacgtgggtg

SEQ ID NO: 143781 - DNA, 17 bp, Arabidopsis thaliana
tctcggcgagacgtagg

SEQ ID NO: 143782 - DNA, 17 bp, Arabidopsis thaliana
tctcggctattccaagg

SEQ ID NO: 143783 - DNA, 17 bp, Arabidopsis thaliana
tctcggctattctaagg

SEQ ID NO: 143784 - DNA, 17 bp, Arabidopsis thaliana
tctcggctctcacatcg

SEQ ID NO: 143785 - DNA, 17 bp, Arabidopsis thaliana
tctcggcttggactgcg

SEQ ID NO: 143786 - DNA, 17 bp, Arabidopsis thaliana
tctcggcttgggtcagc

SEQ ID NO: 143787 - DNA, 17 bp, Arabidopsis thaliana
tctcgggaagattatgg

SEQ ID NO: 143788 - DNA, 17 bp, Arabidopsis thaliana
tctcgggatgagggtat

SEQ ID NO: 143789 - DNA, 17 bp, Arabidopsis thaliana
tctcgggattttggcca

SEQ ID NO: 143790 - DNA, 17 bp, Arabidopsis thaliana
tctcgggcccatgtttc

SEQ ID NO: 143791 - DNA, 17 bp, Arabidopsis thaliana
tctcgggcgatggcgta

SEQ ID NO: 143792 - DNA, 17 bp, Arabidopsis thaliana
tctcgggtattccaagg

SEQ ID NO: 143793 - DNA, 17 bp, Arabidopsis thaliana
tctcggtatttcagacg

SEQ ID NO: 143794 - DNA, 17 bp, Arabidopsis thaliana
tctcggtccgcctttgg

SEQ ID NO: 143795 - DNA, 17 bp, Arabidopsis thaliana
tctcggtcctgcagcag

SEQ ID NO: 143796 - DNA, 17 bp, Arabidopsis thaliana
tctcggtcttgtcgtgc

SEQ ID NO: 143797 - DNA, 17 bp, Arabidopsis thaliana
tctcggtgggccggttt

SEQ ID NO: 143798 - DNA, 17 bp, Arabidopsis thaliana
tctcggttagatgtttt

SEQ ID NO: 143799 - DNA, 17 bp, Arabidopsis thaliana
tctcggttccaacaatt

SEQ ID NO: 143800 - DNA, 17 bp, Arabidopsis thaliana
tctcggttcgcgaccca

SEQ ID NO: 143801 - DNA, 17 bp, Arabidopsis thaliana
tctcggttcgcgatcca

SEQ ID NO: 143802 - DNA, 17 bp, Arabidopsis thaliana
tctcggttcgttttgtc

SEQ ID NO: 143803 - DNA, 17 bp, Arabidopsis thaliana
tctcggttctagggatg

SEQ ID NO: 143804 - DNA, 17 bp, Arabidopsis thaliana
tctcggttctcttctgt

SEQ ID NO: 143805 - DNA, 17 bp, Arabidopsis thaliana
tctcggttctgacacgc

SEQ ID NO: 143806 - DNA, 17 bp, Arabidopsis thaliana
tctcggttgctatgttt

SEQ ID NO: 143807 - DNA, 17 bp, Arabidopsis thaliana
tctcggtttccacatct

SEQ ID NO: 143808 - DNA, 17 bp, Arabidopsis thaliana
tctcggtttgtaagacc

SEQ ID NO: 143809 - DNA, 17 bp, Arabidopsis thaliana
tctcggttttgctccag

SEQ ID NO: 143810 - DNA, 17 bp, Arabidopsis thaliana
tctcgtaatgacaatct

SEQ ID NO: 143811 - DNA, 17 bp, Arabidopsis thaliana
tctcgtaatgcagatgt

SEQ ID NO: 143812 - DNA, 17 bp, Arabidopsis thaliana
tctcgtacccgggcgaa

SEQ ID NO: 143813 - DNA, 17 bp, Arabidopsis thaliana
tctcgtagtttacgcga

SEQ ID NO: 143814 - DNA, 17 bp, Arabidopsis thaliana
tctcgtatccgctgcaa

SEQ ID NO: 143815 - DNA, 17 bp, Arabidopsis thaliana
tctcgtcaatggacaat

SEQ ID NO: 143816 - DNA, 17 bp, Arabidopsis thaliana
tctcgtcatcagagtcg

SEQ ID NO: 143817 - DNA, 17 bp, Arabidopsis thaliana
tctcgtcccaaggctcg

SEQ ID NO: 143818 - DNA, 17 bp, Arabidopsis thaliana
tctcgtcccactgggtg

SEQ ID NO: 143819 - DNA, 17 bp, Arabidopsis thaliana
tctcgtcccgtgtactt

SEQ ID NO: 143820 - DNA, 17 bp, Arabidopsis thaliana
tctcgtccgacttcagg

SEQ ID NO: 143821 - DNA, 17 bp, Arabidopsis thaliana
tctcgtcgaaattttgt

SEQ ID NO: 143822 - DNA, 17 bp, Arabidopsis thaliana
tctcgtcgctcaacgga

SEQ ID NO: 143823 - DNA, 17 bp, Arabidopsis thaliana
tctcgtcgggggtgctc

SEQ ID NO: 143824 - DNA, 17 bp, Arabidopsis thaliana
tctcgtcgtatttctag

SEQ ID NO: 143825 - DNA, 17 bp, Arabidopsis thaliana
tctcgtcgtggctctcc

SEQ ID NO: 143826 - DNA, 17 bp, Arabidopsis thaliana
tctcgtcgttttaatgt

SEQ ID NO: 143827 - DNA, 17 bp, Arabidopsis thaliana
tctcgtctaggttggac

SEQ ID NO: 143828 - DNA, 17 bp, Arabidopsis thaliana
tctcgtctgcctgggtg

SEQ ID NO: 143829 - DNA, 17 bp, Arabidopsis thaliana
tctcgtcttattgaccg

SEQ ID NO: 143830 - DNA, 17 bp, Arabidopsis thaliana
tctcgtgcagttactag

SEQ ID NO: 143831 - DNA, 17 bp, Arabidopsis thaliana
tctcgtgctttacgcaa

SEQ ID NO: 143832 - DNA, 17 bp, Arabidopsis thaliana
tctcgtgtgggtggtgt

SEQ ID NO: 143833 - DNA, 17 bp, Arabidopsis thaliana
tctcgtgttaccaagat

SEQ ID NO: 143834 - DNA, 17 bp, Arabidopsis thaliana
tctcgttacaccctttc

SEQ ID NO: 143835 - DNA, 17 bp, Arabidopsis thaliana
tctcgttacggctgagt

SEQ ID NO: 143836 - DNA, 17 bp, Arabidopsis thaliana
tctcgttagttgagtct

SEQ ID NO: 143837 - DNA, 17 bp, Arabidopsis thaliana
tctcgttatcagcctat

SEQ ID NO: 143838 - DNA, 17 bp, Arabidopsis thaliana
tctcgttattaccagat

SEQ ID NO: 143839 - DNA, 17 bp, Arabidopsis thaliana
tctcgttcagtcgacgg

SEQ ID NO: 143840 - DNA, 17 bp, Arabidopsis thaliana
tctcgttcatcagtggg

SEQ ID NO: 143841 - DNA, 17 bp, Arabidopsis thaliana
tctcgttcgattgataa

SEQ ID NO: 143842 - DNA, 17 bp, Arabidopsis thaliana
tctcgttcgtgcaagtt

SEQ ID NO: 143843 - DNA, 17 bp, Arabidopsis thaliana
tctcgttgactgcttgt

SEQ ID NO: 143844 - DNA, 17 bp, Arabidopsis thaliana
tctcgttgagatcgttc

SEQ ID NO: 143845 - DNA, 17 bp, Arabidopsis thaliana
tctcgttgtcagcctat

SEQ ID NO: 143846 - DNA, 17 bp, Arabidopsis thaliana
tctcgttgtcggtgaac

SEQ ID NO: 143847 - DNA, 17 bp, Arabidopsis thaliana
tctcgttgtgtattacc

SEQ ID NO: 143848 - DNA, 17 bp, Arabidopsis thaliana
tctctaaaagtgcctaa

SEQ ID NO: 143849 - DNA, 17 bp, Arabidopsis thaliana
tctctaaatgtgcctaa

SEQ ID NO: 143850 - DNA, 17 bp, Arabidopsis thaliana
tctctaacagagtggcc

SEQ ID NO: 143851 - DNA, 17 bp, Arabidopsis thaliana
tctctaacccgatacgc

SEQ ID NO: 143852 - DNA, 17 bp, Arabidopsis thaliana
tctctaacctggtgtcg

SEQ ID NO: 143853 - DNA, 17 bp, Arabidopsis thaliana
tctctaacgacgataga

SEQ ID NO: 143854 - DNA, 17 bp, Arabidopsis thaliana
tctctaacgacgatata

SEQ ID NO: 143855 - DNA, 17 bp, Arabidopsis thaliana
tctctaactttgacaca

SEQ ID NO: 143856 - DNA, 17 bp, Arabidopsis thaliana
tctctaagaatcctaag

SEQ ID NO: 143857 - DNA, 17 bp, Arabidopsis thaliana
tctctaagcttagcgtt

SEQ ID NO: 143858 - DNA, 17 bp, Arabidopsis thaliana
tctctaagtttcgccta

SEQ ID NO: 143859 - DNA, 17 bp, Arabidopsis thaliana
tctctaatcgccgcagg

SEQ ID NO: 143860 - DNA, 17 bp, Arabidopsis thaliana
tctctacaagactcggt

SEQ ID NO: 143861 - DNA, 17 bp, Arabidopsis thaliana
tctctacagttctaatt

SEQ ID NO: 143862 - DNA, 17 bp, Arabidopsis thaliana
tctctacattggaggtg

SEQ ID NO: 143863 - DNA, 17 bp, Arabidopsis thaliana
tctctaccaaacctcga

SEQ ID NO: 143864 - DNA, 17 bp, Arabidopsis thaliana
tctctaccaagtgtcgt

SEQ ID NO: 143865 - DNA, 17 bp, Arabidopsis thaliana
tctctaccgactttgtg

SEQ ID NO: 143866 - DNA, 17 bp, Arabidopsis thaliana
tctctaccgcgatgtat

SEQ ID NO: 143867 - DNA, 17 bp, Arabidopsis thaliana
tctctagaaattgcgga

SEQ ID NO: 143868 - DNA, 17 bp, Arabidopsis thaliana
tctctagcaataggacc

SEQ ID NO: 143869 - DNA, 17 bp, Arabidopsis thaliana
tctctagccttctgtca

SEQ ID NO: 143870 - DNA, 17 bp, Arabidopsis thaliana
tctctagctttcttatt

SEQ ID NO: 143871 - DNA, 17 bp, Arabidopsis thaliana
tctctagtcttctagtc

SEQ ID NO: 143872 - DNA, 17 bp, Arabidopsis thaliana
tctctatacacatgcga

SEQ ID NO: 143873 - DNA, 17 bp, Arabidopsis thaliana
tctctatcccaagggat

SEQ ID NO: 143874 - DNA, 17 bp, Arabidopsis thaliana
tctctatcgatattacg

SEQ ID NO: 143875 - DNA, 17 bp, Arabidopsis thaliana
tctctatcgatcggcaa

SEQ ID NO: 143876 - DNA, 17 bp, Arabidopsis thaliana
tctctatcggtttcgac

SEQ ID NO: 143877 - DNA, 17 bp, Arabidopsis thaliana
tctctatctcacacgct

SEQ ID NO: 143878 - DNA, 17 bp, Arabidopsis thaliana
tctctatctcaggcact

SEQ ID NO: 143879 - DNA, 17 bp, Arabidopsis thaliana
tctctatctttgctgga

SEQ ID NO: 143880 - DNA, 17 bp, Arabidopsis thaliana
tctctatggatcggaag

SEQ ID NO: 143881 - DNA, 17 bp, Arabidopsis thaliana
tctctatggatcttcgt

SEQ ID NO: 143882 - DNA, 17 bp, Arabidopsis thaliana
tctctatgggtggtggt

SEQ ID NO: 143883 - DNA, 17 bp, Arabidopsis thaliana
tctctattagctcagtg

SEQ ID NO: 143884 - DNA, 17 bp, Arabidopsis thaliana
tctctattaggcacaag

SEQ ID NO: 143885 - DNA, 17 bp, Arabidopsis thaliana
tctctattgagtttcca

SEQ ID NO: 143886 - DNA, 17 bp, Arabidopsis thaliana
tctctcaaaacgtttga

SEQ ID NO: 143887 - DNA, 17 bp, Arabidopsis thaliana
tctctcaaaagagtttc

SEQ ID NO: 143888 - DNA, 17 bp, Arabidopsis thaliana
tctctcaaacttggccc

SEQ ID NO: 143889 - DNA, 17 bp, Arabidopsis thaliana
tctctcaaagtgctgat

SEQ ID NO: 143890 - DNA, 17 bp, Arabidopsis thaliana
tctctcaaataagagat

SEQ ID NO: 143891 - DNA, 17 bp, Arabidopsis thaliana
tctctcaacgatttaga

SEQ ID NO: 143892 - DNA, 17 bp, Arabidopsis thaliana
tctctcaactatgattc

SEQ ID NO: 143893 - DNA, 17 bp, Arabidopsis thaliana
tctctcaaggtcgagtg

SEQ ID NO: 143894 - DNA, 17 bp, Arabidopsis thaliana
tctctcaatcagggccg

SEQ ID NO: 143895 - DNA, 17 bp, Arabidopsis thaliana
tctctcaattttcgctg

SEQ ID NO: 143896 - DNA, 17 bp, Arabidopsis thaliana
tctctcaccgacgtgat

SEQ ID NO: 143897 - DNA, 17 bp, Arabidopsis thaliana
tctctcacgcgtcagag

SEQ ID NO: 143898 - DNA, 17 bp, Arabidopsis thaliana
tctctcactaacataga

SEQ ID NO: 143899 - DNA, 17 bp, Arabidopsis thaliana
tctctcactatacctcg

SEQ ID NO: 143900 - DNA, 17 bp, Arabidopsis thaliana
tctctcagattctaccc

SEQ ID NO: 143901 - DNA, 17 bp, Arabidopsis thaliana
tctctcagattctaccg

SEQ ID NO: 143902 - DNA, 17 bp, Arabidopsis thaliana
tctctcaggcgacgcca

SEQ ID NO: 143903 - DNA, 17 bp, Arabidopsis thaliana
tctctcaggcttcattc

SEQ ID NO: 143904 - DNA, 17 bp, Arabidopsis thaliana
tctctcaggtggaggtg

SEQ ID NO: 143905 - DNA, 17 bp, Arabidopsis thaliana
tctctcaggttgagatt

SEQ ID NO: 143906 - DNA, 17 bp, Arabidopsis thaliana
tctctcagttccggttc

SEQ ID NO: 143907 - DNA, 17 bp, Arabidopsis thaliana
tctctcagttctactcg

SEQ ID NO: 143908 - DNA, 17 bp, Arabidopsis thaliana
tctctcatctaccgcct

SEQ ID NO: 143909 - DNA, 17 bp, Arabidopsis thaliana
tctctcattcatcggaa

SEQ ID NO: 143910 - DNA, 17 bp, Arabidopsis thaliana
tctctcattgatgtgct

SEQ ID NO: 143911 - DNA, 17 bp, Arabidopsis thaliana
tctctccacgctcaccg

SEQ ID NO: 143912 - DNA, 17 bp, Arabidopsis thaliana
tctctccacggatccga

SEQ ID NO: 143913 - DNA, 17 bp, Arabidopsis thaliana
tctctccagaggaaaat

SEQ ID NO: 143914 - DNA, 17 bp, Arabidopsis thaliana
tctctccatcagctgcg

SEQ ID NO: 143915 - DNA, 17 bp, Arabidopsis thaliana
tctctccatctacagtg

SEQ ID NO: 143916 - DNA, 17 bp, Arabidopsis thaliana
tctctccattaaaagta

SEQ ID NO: 143917 - DNA, 17 bp, Arabidopsis thaliana
tctctccatttgcttga

SEQ ID NO: 143918 - DNA, 17 bp, Arabidopsis thaliana
tctctccatttgggtga

SEQ ID NO: 143919 - DNA, 17 bp, Arabidopsis thaliana
tctctccccacagacgg

SEQ ID NO: 143920 - DNA, 17 bp, Arabidopsis thaliana
tctctccccttctccgc

SEQ ID NO: 143921 - DNA, 17 bp, Arabidopsis thaliana
tctctcccggctggtgc

SEQ ID NO: 143922 - DNA, 17 bp, Arabidopsis thaliana
tctctccgacatggttc

SEQ ID NO: 143923 - DNA, 17 bp, Arabidopsis thaliana
tctctccgccggagcag

SEQ ID NO: 143924 - DNA, 17 bp, Arabidopsis thaliana
tctctccgctctatctg

SEQ ID NO: 143925 - DNA, 17 bp, Arabidopsis thaliana
tctctccggctggtgca

SEQ ID NO: 143926 - DNA, 17 bp, Arabidopsis thaliana
tctctccgggtgattgt

SEQ ID NO: 143927 - DNA, 17 bp, Arabidopsis thaliana
tctctccggtttcttga

SEQ ID NO: 143928 - DNA, 17 bp, Arabidopsis thaliana
tctctcctgagtgactt

SEQ ID NO: 143929 - DNA, 17 bp, Arabidopsis thaliana
tctctcctgccagaaac

SEQ ID NO: 143930 - DNA, 17 bp, Arabidopsis thaliana
tctctcctgggaggttg

SEQ ID NO: 143931 - DNA, 17 bp, Arabidopsis thaliana
tctctcctgggcagcac

SEQ ID NO: 143932 - DNA, 17 bp, Arabidopsis thaliana
tctctccttagtgactt

SEQ ID NO: 143933 - DNA, 17 bp, Arabidopsis thaliana
tctctccttctgctgcg

SEQ ID NO: 143934 - DNA, 17 bp, Arabidopsis thaliana
tctctccttctgcttga

SEQ ID NO: 143935 - DNA, 17 bp, Arabidopsis thaliana
tctctcgaaacacgtgc

SEQ ID NO: 143936 - DNA, 17 bp, Arabidopsis thaliana
tctctcgaaaggcgatt

SEQ ID NO: 143937 - DNA, 17 bp, Arabidopsis thaliana
tctctcgaagagaatcc

SEQ ID NO: 143938 - DNA, 17 bp, Arabidopsis thaliana
tctctcgaagtgcagcg

SEQ ID NO: 143939 - DNA, 17 bp, Arabidopsis thaliana
tctctcgactgttgacg

SEQ ID NO: 143940 - DNA, 17 bp, Arabidopsis thaliana
tctctcgactgtttcgt

SEQ ID NO: 143941 - DNA, 17 bp, Arabidopsis thaliana
tctctcgatgatgtgct

SEQ ID NO: 143942 - DNA, 17 bp, Arabidopsis thaliana
tctctcgctggatttca

SEQ ID NO: 143943 - DNA, 17 bp, Arabidopsis thaliana
tctctcgggattggctc

SEQ ID NO: 143944 - DNA, 17 bp, Arabidopsis thaliana
tctctcgggggcgaaca

SEQ ID NO: 143945 - DNA, 17 bp, Arabidopsis thaliana
tctctcggtaaaaggcg

SEQ ID NO: 143946 - DNA, 17 bp, Arabidopsis thaliana
tctctcggtgcaggtcg

SEQ ID NO: 143947 - DNA, 17 bp, Arabidopsis thaliana
tctctcgtatcttgtta

SEQ ID NO: 143948 - DNA, 17 bp, Arabidopsis thaliana
tctctcgtcacatcact

SEQ ID NO: 143949 - DNA, 17 bp, Arabidopsis thaliana
tctctcgtccgtcggct

SEQ ID NO: 143950 - DNA, 17 bp, Arabidopsis thaliana
tctctcgtggaagaccg

SEQ ID NO: 143951 - DNA, 17 bp, Arabidopsis thaliana
tctctcgttcagtcgac

SEQ ID NO: 143952 - DNA, 17 bp, Arabidopsis thaliana
tctctctaactttgaca

SEQ ID NO: 143953 - DNA, 17 bp, Arabidopsis thaliana
tctctctaagtcagaat

SEQ ID NO: 143954 - DNA, 17 bp, Arabidopsis thaliana
tctctctacaaaaatct

SEQ ID NO: 143955 - DNA, 17 bp, Arabidopsis thaliana
tctctctacatccattg

SEQ ID NO: 143956 - DNA, 17 bp, Arabidopsis thaliana
tctctctacgactcatt

SEQ ID NO: 143957 - DNA, 17 bp, Arabidopsis thaliana
tctctctacggccacaa

SEQ ID NO: 143958 - DNA, 17 bp, Arabidopsis thaliana
tctctctagaacacagt

SEQ ID NO: 143959 - DNA, 17 bp, Arabidopsis thaliana
tctctctaggattcgtc

SEQ ID NO: 143960 - DNA, 17 bp, Arabidopsis thaliana
tctctctaggctagcac

SEQ ID NO: 143961 - DNA, 17 bp, Arabidopsis thaliana
tctctctagggattttg

SEQ ID NO: 143962 - DNA, 17 bp, Arabidopsis thaliana
tctctctagtgtgtgac

SEQ ID NO: 143963 - DNA, 17 bp, Arabidopsis thaliana
tctctctatcacaacgg

SEQ ID NO: 143964 - DNA, 17 bp, Arabidopsis thaliana
tctctctcaaagattaa

SEQ ID NO: 143965 - DNA, 17 bp, Arabidopsis thaliana
tctctctcaacgctttg

SEQ ID NO: 143966 - DNA, 17 bp, Arabidopsis thaliana
tctctctcaagttgggt

SEQ ID NO: 143967 - DNA, 17 bp, Arabidopsis thaliana
tctctctcacgcgctct

SEQ ID NO: 143968 - DNA, 17 bp, Arabidopsis thaliana
tctctctcactgtgcct

SEQ ID NO: 143969 - DNA, 17 bp, Arabidopsis thaliana
tctctctcacttgagag

SEQ ID NO: 143970 - DNA, 17 bp, Arabidopsis thaliana
tctctctcatcattgga

SEQ ID NO: 143971 - DNA, 17 bp, Arabidopsis thaliana
tctctctcatccaattt

SEQ ID NO: 143972 - DNA, 17 bp, Arabidopsis thaliana
tctctctcatttagcca

SEQ ID NO: 143973 - DNA, 17 bp, Arabidopsis thaliana
tctctctcatttgagtg

SEQ ID NO: 143974 - DNA, 17 bp, Arabidopsis thaliana
tctctctccatatgggt

SEQ ID NO: 143975 - DNA, 17 bp, Arabidopsis thaliana
tctctctccatcttctg

SEQ ID NO: 143976 - DNA, 17 bp, Arabidopsis thaliana
tctctctccccctacct

SEQ ID NO: 143977 - DNA, 17 bp, Arabidopsis thaliana
tctctctcctatcttca

SEQ ID NO: 143978 - DNA, 17 bp, Arabidopsis thaliana
tctctctcctctgatcg

SEQ ID NO: 143979 - DNA, 17 bp, Arabidopsis thaliana
tctctctcctgagtgac

SEQ ID NO: 143980 - DNA, 17 bp, Arabidopsis thaliana
tctctctcctgtttccg

SEQ ID NO: 143981 - DNA, 17 bp, Arabidopsis thaliana
tctctctcgaaaggcga

SEQ ID NO: 143982 - DNA, 17 bp, Arabidopsis thaliana
tctctctcgcaagttgc

SEQ ID NO: 143983 - DNA, 17 bp, Arabidopsis thaliana
tctctctcggtcctgca

SEQ ID NO: 143984 - DNA, 17 bp, Arabidopsis thaliana
tctctctcgtaatcttc

SEQ ID NO: 143985 - DNA, 17 bp, Arabidopsis thaliana
tctctctcgtgaaaacc

SEQ ID NO: 143986 - DNA, 17 bp, Arabidopsis thaliana
tctctctctaatcgccg

SEQ ID NO: 143987 - DNA, 17 bp, Arabidopsis thaliana
tctctctctcccggctg

SEQ ID NO: 143988 - DNA, 17 bp, Arabidopsis thaliana
tctctctctccgggtga

SEQ ID NO: 143989 - DNA, 17 bp, Arabidopsis thaliana
tctctctctcctgagtg

SEQ ID NO: 143990 - DNA, 17 bp, Arabidopsis thaliana
tctctctctcgaagtgc

SEQ ID NO: 143991 - DNA, 17 bp, Arabidopsis thaliana
tctctctctctattcag

SEQ ID NO: 143992 - DNA, 17 bp, Arabidopsis thaliana
tctctctctctccctct

SEQ ID NO: 143993 - DNA, 17 bp, Arabidopsis thaliana
tctctctctctcgaaag

SEQ ID NO: 143994 - DNA, 17 bp, Arabidopsis thaliana
tctctctctctctcgca

SEQ ID NO: 143995 - DNA, 17 bp, Arabidopsis thaliana
tctctctctctctctgc

SEQ ID NO: 143996 - DNA, 17 bp, Arabidopsis thaliana
tctctctctctgcatgt

SEQ ID NO: 143997 - DNA, 17 bp, Arabidopsis thaliana
tctctctctctttggtc

SEQ ID NO: 143998 - DNA, 17 bp, Arabidopsis thaliana
tctctctctgcctttcc

SEQ ID NO: 143999 - DNA, 17 bp, Arabidopsis thaliana
tctctctctgcctttgc

SEQ ID NO: 144000 - DNA, 17 bp, Arabidopsis thaliana
tctctctctgcggtagt

SEQ ID NO: 144001 - DNA, 17 bp, Arabidopsis thaliana
tctctctcttctccagc

SEQ ID NO: 144002 - DNA, 17 bp, Arabidopsis thaliana
tctctctcttctccgct

SEQ ID NO: 144003 - DNA, 17 bp, Arabidopsis thaliana
tctctctcttgaactcg

SEQ ID NO: 144004 - DNA, 17 bp, Arabidopsis thaliana
tctctctctttcacaca

SEQ ID NO: 144005 - DNA, 17 bp, Arabidopsis thaliana
tctctctctttcgtcta

SEQ ID NO: 144006 - DNA, 17 bp, Arabidopsis thaliana
tctctctctttgtcttc

SEQ ID NO: 144007 - DNA, 17 bp, Arabidopsis thaliana
tctctctgaatcgcttt

SEQ ID NO: 144008 - DNA, 17 bp, Arabidopsis thaliana
tctctctgacatgtggc

SEQ ID NO: 144009 - DNA, 17 bp, Arabidopsis thaliana
tctctctgactagtcca

SEQ ID NO: 144010 - DNA, 17 bp, Arabidopsis thaliana
tctctctgataaccgcc

SEQ ID NO: 144011 - DNA, 17 bp, Arabidopsis thaliana
tctctctgcaagcgaag

SEQ ID NO: 144012 - DNA, 17 bp, Arabidopsis thaliana
tctctctgcagcttcga

SEQ ID NO: 144013 - DNA, 17 bp, Arabidopsis thaliana
tctctctgccaaaaaca

SEQ ID NO: 144014 - DNA, 17 bp, Arabidopsis thaliana
tctctctgccgtctcga

SEQ ID NO: 144015 - DNA, 17 bp, Arabidopsis thaliana
tctctctggctggacca

SEQ ID NO: 144016 - DNA, 17 bp, Arabidopsis thaliana
tctctctgggagtgctg

SEQ ID NO: 144017 - DNA, 17 bp, Arabidopsis thaliana
tctctctggtcaggata

SEQ ID NO: 144018 - DNA, 17 bp, Arabidopsis thaliana
tctctctggttcaaatc

SEQ ID NO: 144019 - DNA, 17 bp, Arabidopsis thaliana
tctctctgtaaccaaac

SEQ ID NO: 144020 - DNA, 17 bp, Arabidopsis thaliana
tctctcttaaacttgtg

SEQ ID NO: 144021 - DNA, 17 bp, Arabidopsis thaliana
tctctcttagatgttga

SEQ ID NO: 144022 - DNA, 17 bp, Arabidopsis thaliana
tctctcttagcaactgt

SEQ ID NO: 144023 - DNA, 17 bp, Arabidopsis thaliana
tctctcttagtcgcact

SEQ ID NO: 144024 - DNA, 17 bp, Arabidopsis thaliana
tctctcttagtcgcatc

SEQ ID NO: 144025 - DNA, 17 bp, Arabidopsis thaliana
tctctcttagtcgcatt

SEQ ID NO: 144026 - DNA, 17 bp, Arabidopsis thaliana
tctctcttagtcgctcc

SEQ ID NO: 144027 - DNA, 17 bp, Arabidopsis thaliana
tctctcttcatctatgt

SEQ ID NO: 144028 - DNA, 17 bp, Arabidopsis thaliana
tctctcttcctcccgtc

SEQ ID NO: 144029 - DNA, 17 bp, Arabidopsis thaliana
tctctcttctccttctc

SEQ ID NO: 144030 - DNA, 17 bp, Arabidopsis thaliana
tctctcttcttcctctt

SEQ ID NO: 144031 - DNA, 17 bp, Arabidopsis thaliana
tctctcttgaaaacgca

SEQ ID NO: 144032 - DNA, 17 bp, Arabidopsis thaliana
tctctcttgaatctcgg

SEQ ID NO: 144033 - DNA, 17 bp, Arabidopsis thaliana
tctctcttggaacacgg

SEQ ID NO: 144034 - DNA, 17 bp, Arabidopsis thaliana
tctctcttggatattcg

SEQ ID NO: 144035 - DNA, 17 bp, Arabidopsis thaliana
tctctcttggatccgcc

SEQ ID NO: 144036 - DNA, 17 bp, Arabidopsis thaliana
tctctctttagcgcaga

SEQ ID NO: 144037 - DNA, 17 bp, Arabidopsis thaliana
tctctctttctacggtg

SEQ ID NO: 144038 - DNA, 17 bp, Arabidopsis thaliana
tctctctttgacagtca

SEQ ID NO: 144039 - DNA, 17 bp, Arabidopsis thaliana
tctctctttgaccttgg

SEQ ID NO: 144040 - DNA, 17 bp, Arabidopsis thaliana
tctctcttttcctgtgc

SEQ ID NO: 144041 - DNA, 17 bp, Arabidopsis thaliana
tctctcttttgggctta

SEQ ID NO: 144042 - DNA, 17 bp, Arabidopsis thaliana
tctctctttttcccatc

SEQ ID NO: 144043 - DNA, 17 bp, Arabidopsis thaliana
tctctgaacaagaggga

SEQ ID NO: 144044 - DNA, 17 bp, Arabidopsis thaliana
tctctgaacgcacgatc

SEQ ID NO: 144045 - DNA, 17 bp, Arabidopsis thaliana
tctctgaatctggctcg

SEQ ID NO: 144046 - DNA, 17 bp, Arabidopsis thaliana
tctctgaattcggtcga

SEQ ID NO: 144047 - DNA, 17 bp, Arabidopsis thaliana
tctctgaattctacgga

SEQ ID NO: 144048 - DNA, 17 bp, Arabidopsis thaliana
tctctgacagaatcgcc

SEQ ID NO: 144049 - DNA, 17 bp, Arabidopsis thaliana
tctctgaccaaaggcca

SEQ ID NO: 144050 - DNA, 17 bp, Arabidopsis thaliana
tctctgactgactgaga

SEQ ID NO: 144051 - DNA, 17 bp, Arabidopsis thaliana
tctctgagacagtactg

SEQ ID NO: 144052 - DNA, 17 bp, Arabidopsis thaliana
tctctgagactgtccct

SEQ ID NO: 144053 - DNA, 17 bp, Arabidopsis thaliana
tctctgagattgtttgc

SEQ ID NO: 144054 - DNA, 17 bp, Arabidopsis thaliana
tctctgaggcaaaatcc

SEQ ID NO: 144055 - DNA, 17 bp, Arabidopsis thaliana
tctctgagggctgggct

SEQ ID NO: 144056 - DNA, 17 bp, Arabidopsis thaliana
tctctgagtgcagaatc

SEQ ID NO: 144057 - DNA, 17 bp, Arabidopsis thaliana
tctctgatccaactatg

SEQ ID NO: 144058 - DNA, 17 bp, Arabidopsis thaliana
tctctgatccagtttca

SEQ ID NO: 144059 - DNA, 17 bp, Arabidopsis thaliana
tctctgattcattgttg

SEQ ID NO: 144060 - DNA, 17 bp, Arabidopsis thaliana
tctctgcaatagcgagc

SEQ ID NO: 144061 - DNA, 17 bp, Arabidopsis thaliana
tctctgcaatggacatg

SEQ ID NO: 144062 - DNA, 17 bp, Arabidopsis thaliana
tctctgcaattgtcact

SEQ ID NO: 144063 - DNA, 17 bp, Arabidopsis thaliana
tctctgcaccgtgatca

SEQ ID NO: 144064 - DNA, 17 bp, Arabidopsis thaliana
tctctgcagaaaggagc

SEQ ID NO: 144065 - DNA, 17 bp, Arabidopsis thaliana
tctctgcagccaaactt

SEQ ID NO: 144066 - DNA, 17 bp, Arabidopsis thaliana
tctctgcccgttgctct

SEQ ID NO: 144067 - DNA, 17 bp, Arabidopsis thaliana
tctctgccgcagtgact

SEQ ID NO: 144068 - DNA, 17 bp, Arabidopsis thaliana
tctctgccgtgatcgtg

SEQ ID NO: 144069 - DNA, 17 bp, Arabidopsis thaliana
tctctgcctttgcgttt

SEQ ID NO: 144070 - DNA, 17 bp, Arabidopsis thaliana
tctctgcgatatcacga

SEQ ID NO: 144071 - DNA, 17 bp, Arabidopsis thaliana
tctctgcggtagttttg

SEQ ID NO: 144072 - DNA, 17 bp, Arabidopsis thaliana
tctctgcgttcatcgat

SEQ ID NO: 144073 - DNA, 17 bp, Arabidopsis thaliana
tctctgctcgctaagct

SEQ ID NO: 144074 - DNA, 17 bp, Arabidopsis thaliana
tctctgctgaccctcct

SEQ ID NO: 144075 - DNA, 17 bp, Arabidopsis thaliana
tctctgctggaggtggc

SEQ ID NO: 144076 - DNA, 17 bp, Arabidopsis thaliana
tctctgctgtttgtgtt

SEQ ID NO: 144077 - DNA, 17 bp, Arabidopsis thaliana
tctctgcttctgcctcg

SEQ ID NO: 144078 - DNA, 17 bp, Arabidopsis thaliana
tctctgcttgtaccttg

SEQ ID NO: 144079 - DNA, 17 bp, Arabidopsis thaliana
tctctgctttctacggt

SEQ ID NO: 144080 - DNA, 17 bp, Arabidopsis thaliana
tctctggaattagtggt

SEQ ID NO: 144081 - DNA, 17 bp, Arabidopsis thaliana
tctctggacctgatgta

SEQ ID NO: 144082 - DNA, 17 bp, Arabidopsis thaliana
tctctggacttcggagg

SEQ ID NO: 144083 - DNA, 17 bp, Arabidopsis thaliana
tctctggataaactacg

SEQ ID NO: 144084 - DNA, 17 bp, Arabidopsis thaliana
tctctggcgggtttgat

SEQ ID NO: 144085 - DNA, 17 bp, Arabidopsis thaliana
tctctggctgcataggt

SEQ ID NO: 144086 - DNA, 17 bp, Arabidopsis thaliana
tctctggcttgcgtttg

SEQ ID NO: 144087 - DNA, 17 bp, Arabidopsis thaliana
tctctgggacgaaactc

SEQ ID NO: 144088 - DNA, 17 bp, Arabidopsis thaliana
tctctgggtattcttgt

SEQ ID NO: 144089 - DNA, 17 bp, Arabidopsis thaliana
tctctgggtccctaccg

SEQ ID NO: 144090 - DNA, 17 bp, Arabidopsis thaliana
tctctggtgcatttgta

SEQ ID NO: 144091 - DNA, 17 bp, Arabidopsis thaliana
tctctggttcgagtgac

SEQ ID NO: 144092 - DNA, 17 bp, Arabidopsis thaliana
tctctggttgtgtcttc

SEQ ID NO: 144093 - DNA, 17 bp, Arabidopsis thaliana
tctctggtttctcttca

SEQ ID NO: 144094 - DNA, 17 bp, Arabidopsis thaliana
tctctgtaactttgaca

SEQ ID NO: 144095 - DNA, 17 bp, Arabidopsis thaliana
tctctgtatgcataact

SEQ ID NO: 144096 - DNA, 17 bp, Arabidopsis thaliana
tctctgtatgcatagct

SEQ ID NO: 144097 - DNA, 17 bp, Arabidopsis thaliana
tctctgtcaaaggagct

SEQ ID NO: 144098 - DNA, 17 bp, Arabidopsis thaliana
tctctgtctcttgtgat

SEQ ID NO: 144099 - DNA, 17 bp, Arabidopsis thaliana
tctctgtctgtgatgtg

SEQ ID NO: 144100 - DNA, 17 bp, Arabidopsis thaliana
tctctgtggaaagattg

SEQ ID NO: 144101 - DNA, 17 bp, Arabidopsis thaliana
tctctgtggattgatgc

SEQ ID NO: 144102 - DNA, 17 bp, Arabidopsis thaliana
tctctgtggcaagaagg

SEQ ID NO: 144103 - DNA, 17 bp, Arabidopsis thaliana
tctctgttcttcgctat

SEQ ID NO: 144104 - DNA, 17 bp, Arabidopsis thaliana
tctctgtttcaatcttg

SEQ ID NO: 144105 - DNA, 17 bp, Arabidopsis thaliana
tctctgttttgctgctt

SEQ ID NO: 144106 - DNA, 17 bp, Arabidopsis thaliana
tctcttaaatgggtctg

SEQ ID NO: 144107 - DNA, 17 bp, Arabidopsis thaliana
tctcttaacccacgtct

SEQ ID NO: 144108 - DNA, 17 bp, Arabidopsis thaliana
tctcttaagacggaccc

SEQ ID NO: 144109 - DNA, 17 bp, Arabidopsis thaliana
tctcttaagggaagcac

SEQ ID NO: 144110 - DNA, 17 bp, Arabidopsis thaliana
tctcttaaggtagccaa

SEQ ID NO: 144111 - DNA, 17 bp, Arabidopsis thaliana
tctcttacccggggaga

SEQ ID NO: 144112 - DNA, 17 bp, Arabidopsis thaliana
tctcttacgactttgac

SEQ ID NO: 144113 - DNA, 17 bp, Arabidopsis thaliana
tctcttagacttgggaa

SEQ ID NO: 144114 - DNA, 17 bp, Arabidopsis thaliana
tctcttagggtcatcgg

SEQ ID NO: 144115 - DNA, 17 bp, Arabidopsis thaliana
tctcttaggtgttgatg

SEQ ID NO: 144116 - DNA, 17 bp, Arabidopsis thaliana
tctcttagtcgcaacct

SEQ ID NO: 144117 - DNA, 17 bp, Arabidopsis thaliana
tctcttagtcgcactgt

SEQ ID NO: 144118 - DNA, 17 bp, Arabidopsis thaliana
tctcttagtcgcattct

SEQ ID NO: 144119 - DNA, 17 bp, Arabidopsis thaliana
tctcttagtgaacgcag

SEQ ID NO: 144120 - DNA, 17 bp, Arabidopsis thaliana
tctcttatggctgagca

SEQ ID NO: 144121 - DNA, 17 bp, Arabidopsis thaliana
tctcttatgttttctgc

SEQ ID NO: 144122 - DNA, 17 bp, Arabidopsis thaliana
tctcttattacacagcg

SEQ ID NO: 144123 - DNA, 17 bp, Arabidopsis thaliana
tctcttcacagaggctc

SEQ ID NO: 144124 - DNA, 17 bp, Arabidopsis thaliana
tctcttcaccggcgttg

SEQ ID NO: 144125 - DNA, 17 bp, Arabidopsis thaliana
tctcttcacgtcattca

SEQ ID NO: 144126 - DNA, 17 bp, Arabidopsis thaliana
tctcttcagatctatcg

SEQ ID NO: 144127 - DNA, 17 bp, Arabidopsis thaliana
tctcttcagatctattg

SEQ ID NO: 144128 - DNA, 17 bp, Arabidopsis thaliana
tctcttccggcgagccg

SEQ ID NO: 144129 - DNA, 17 bp, Arabidopsis thaliana
tctcttcctcgcagacc

SEQ ID NO: 144130 - DNA, 17 bp, Arabidopsis thaliana
tctcttcgcagaagaca

SEQ ID NO: 144131 - DNA, 17 bp, Arabidopsis thaliana
tctcttcggtgtgatgg

SEQ ID NO: 144132 - DNA, 17 bp, Arabidopsis thaliana
tctcttcgtccctctct

SEQ ID NO: 144133 - DNA, 17 bp, Arabidopsis thaliana
tctcttctaacgaacgt

SEQ ID NO: 144134 - DNA, 17 bp, Arabidopsis thaliana
tctcttctccgcttgtc

SEQ ID NO: 144135 - DNA, 17 bp, Arabidopsis thaliana
tctcttctccggttctc

SEQ ID NO: 144136 - DNA, 17 bp, Arabidopsis thaliana
tctcttctccttttgtg

SEQ ID NO: 144137 - DNA, 17 bp, Arabidopsis thaliana
tctcttctgaatctgtc

SEQ ID NO: 144138 - DNA, 17 bp, Arabidopsis thaliana
tctcttctttttgtgat

SEQ ID NO: 144139 - DNA, 17 bp, Arabidopsis thaliana
tctcttgaatctcggct

SEQ ID NO: 144140 - DNA, 17 bp, Arabidopsis thaliana
tctcttgacatccggtc

SEQ ID NO: 144141 - DNA, 17 bp, Arabidopsis thaliana
tctcttgactctagtcc

SEQ ID NO: 144142 - DNA, 17 bp, Arabidopsis thaliana
tctcttgactttagtcc

SEQ ID NO: 144143 - DNA, 17 bp, Arabidopsis thaliana
tctcttgagtcacaata

SEQ ID NO: 144144 - DNA, 17 bp, Arabidopsis thaliana
tctcttgagtgtaggca

SEQ ID NO: 144145 - DNA, 17 bp, Arabidopsis thaliana
tctcttgatcggactca

SEQ ID NO: 144146 - DNA, 17 bp, Arabidopsis thaliana
tctcttgatgtttgtcc

SEQ ID NO: 144147 - DNA, 17 bp, Arabidopsis thaliana
tctcttgcagtggtagc

SEQ ID NO: 144148 - DNA, 17 bp, Arabidopsis thaliana
tctcttgcgtttcccag

SEQ ID NO: 144149 - DNA, 17 bp, Arabidopsis thaliana
tctcttgcttgcttcta

SEQ ID NO: 144150 - DNA, 17 bp, Arabidopsis thaliana
tctcttggaccatccca

SEQ ID NO: 144151 - DNA, 17 bp, Arabidopsis thaliana
tctcttggatattcggc

SEQ ID NO: 144152 - DNA, 17 bp, Arabidopsis thaliana
tctcttgggtgaacgac

SEQ ID NO: 144153 - DNA, 17 bp, Arabidopsis thaliana
tctcttggtcttcacgg

SEQ ID NO: 144154 - DNA, 17 bp, Arabidopsis thaliana
tctcttggtgcaggtcg

SEQ ID NO: 144155 - DNA, 17 bp, Arabidopsis thaliana
tctcttggttgtcggca

SEQ ID NO: 144156 - DNA, 17 bp, Arabidopsis thaliana
tctcttggttttggatg

SEQ ID NO: 144157 - DNA, 17 bp, Arabidopsis thaliana
tctcttgtcgattctta

SEQ ID NO: 144158 - DNA, 17 bp, Arabidopsis thaliana
tctcttgtcggctttgt

SEQ ID NO: 144159 - DNA, 17 bp, Arabidopsis thaliana
tctcttgtcttaggttg

SEQ ID NO: 144160 - DNA, 17 bp, Arabidopsis thaliana
tctcttgtggtgaatgc

SEQ ID NO: 144161 - DNA, 17 bp, Arabidopsis thaliana
tctcttgtgtgtgttag

SEQ ID NO: 144162 - DNA, 17 bp, Arabidopsis thaliana
tctcttgttaactccga

SEQ ID NO: 144163 - DNA, 17 bp, Arabidopsis thaliana
tctctttactgagttcc

SEQ ID NO: 144164 - DNA, 17 bp, Arabidopsis thaliana
tctctttactgccggtt

SEQ ID NO: 144165 - DNA, 17 bp, Arabidopsis thaliana
tctctttacttggcatg

SEQ ID NO: 144166 - DNA, 17 bp, Arabidopsis thaliana
tctctttagcgagctct

SEQ ID NO: 144167 - DNA, 17 bp, Arabidopsis thaliana
tctctttcatctctgcc

SEQ ID NO: 144168 - DNA, 17 bp, Arabidopsis thaliana
tctctttccatcactac

SEQ ID NO: 144169 - DNA, 17 bp, Arabidopsis thaliana
tctctttccgtctacct

SEQ ID NO: 144170 - DNA, 17 bp, Arabidopsis thaliana
tctctttctctctcttt

SEQ ID NO: 144171 - DNA, 17 bp, Arabidopsis thaliana
tctctttcttcaagacc

SEQ ID NO: 144172 - DNA, 17 bp, Arabidopsis thaliana
tctctttcttcacttgc

SEQ ID NO: 144173 - DNA, 17 bp, Arabidopsis thaliana
tctctttctttcatctc

SEQ ID NO: 144174 - DNA, 17 bp, Arabidopsis thaliana
tctctttgacagtcaaa

SEQ ID NO: 144175 - DNA, 17 bp, Arabidopsis thaliana
tctctttgacccctttt

SEQ ID NO: 144176 - DNA, 17 bp, Arabidopsis thaliana
tctctttgcatggctga

SEQ ID NO: 144177 - DNA, 17 bp, Arabidopsis thaliana
tctctttgggctttccg

SEQ ID NO: 144178 - DNA, 17 bp, Arabidopsis thaliana
tctctttggttccagtc

SEQ ID NO: 144179 - DNA, 17 bp, Arabidopsis thaliana
tctctttgtcctttctc

SEQ ID NO: 144180 - DNA, 17 bp, Arabidopsis thaliana
tctctttgtcttcaggg

SEQ ID NO: 144181 - DNA, 17 bp, Arabidopsis thaliana
tctctttgtgaacgacg

SEQ ID NO: 144182 - DNA, 17 bp, Arabidopsis thaliana
tctctttgtggaatcga

SEQ ID NO: 144183 - DNA, 17 bp, Arabidopsis thaliana
tctctttgtggttgcag

SEQ ID NO: 144184 - DNA, 17 bp, Arabidopsis thaliana
tctcttttacagccgcg

SEQ ID NO: 144185 - DNA, 17 bp, Arabidopsis thaliana
tctcttttagggttgca

SEQ ID NO: 144186 - DNA, 17 bp, Arabidopsis thaliana
tctcttttcagttggta

SEQ ID NO: 144187 - DNA, 17 bp, Arabidopsis thaliana
tctcttttctaattttt

SEQ ID NO: 144188 - DNA, 17 bp, Arabidopsis thaliana
tctcttttctgacgacg

SEQ ID NO: 144189 - DNA, 17 bp, Arabidopsis thaliana
tctcttttctgatgacg

SEQ ID NO: 144190 - DNA, 17 bp, Arabidopsis thaliana
tctcttttctttgttgc

SEQ ID NO: 144191 - DNA, 17 bp, Arabidopsis thaliana
tctcttttgcgtccaga

SEQ ID NO: 144192 - DNA, 17 bp, Arabidopsis thaliana
tctcttttggtgacaat

SEQ ID NO: 144193 - DNA, 17 bp, Arabidopsis thaliana
tctcttttggtgcgcat

SEQ ID NO: 144194 - DNA, 17 bp, Arabidopsis thaliana
tctctttttccgccagc

SEQ ID NO: 144195 - DNA, 17 bp, Arabidopsis thaliana
tctctttttcgataaat

SEQ ID NO: 144196 - DNA, 17 bp, Arabidopsis thaliana
tctctttttgcctgaat

SEQ ID NO: 144197 - DNA, 17 bp, Arabidopsis thaliana
tctctttttttggtgtg

SEQ ID NO: 144198 - DNA, 17 bp, Arabidopsis thaliana
tctgaaaaaaccgcggc

SEQ ID NO: 144199 - DNA, 17 bp, Arabidopsis thaliana
tctgaaaaaagcgctaa

SEQ ID NO: 144200 - DNA, 17 bp, Arabidopsis thaliana
tctgaaaacagagacga

SEQ ID NO: 144201 - DNA, 17 bp, Arabidopsis thaliana
tctgaaaacagggacga

SEQ ID NO: 144202 - DNA, 17 bp, Arabidopsis thaliana
tctgaaaataccgcagc

SEQ ID NO: 144203 - DNA, 17 bp, Arabidopsis thaliana
tctgaaaccaaatcgac

SEQ ID NO: 144204 - DNA, 17 bp, Arabidopsis thaliana
tctgaaaccacagcgtc

SEQ ID NO: 144205 - DNA, 17 bp, Arabidopsis thaliana
tctgaaacgacgtctgt

SEQ ID NO: 144206 - DNA, 17 bp, Arabidopsis thaliana
tctgaaacgctaaccaa

SEQ ID NO: 144207 - DNA, 17 bp, Arabidopsis thaliana
tctgaaaggaatgcctc

SEQ ID NO: 144208 - DNA, 17 bp, Arabidopsis thaliana
tctgaaagttttgcgct

SEQ ID NO: 144209 - DNA, 17 bp, Arabidopsis thaliana
tctgaaatacttcggtc

SEQ ID NO: 144210 - DNA, 17 bp, Arabidopsis thaliana
tctgaaccctcattttg

SEQ ID NO: 144211 - DNA, 17 bp, Arabidopsis thaliana
tctgaacgaaacccgta

SEQ ID NO: 144212 - DNA, 17 bp, Arabidopsis thaliana
tctgaacgactggttga

SEQ ID NO: 144213 - DNA, 17 bp, Arabidopsis thaliana
tctgaacgattagaaga

SEQ ID NO: 144214 - DNA, 17 bp, Arabidopsis thaliana
tctgaactacaacgctt

SEQ ID NO: 144215 - DNA, 17 bp, Arabidopsis thaliana
tctgaagatctttggct

SEQ ID NO: 144216 - DNA, 17 bp, Arabidopsis thaliana
tctgaagctgccagcat

SEQ ID NO: 144217 - DNA, 17 bp, Arabidopsis thaliana
tctgaaggtcgcgtgtt

SEQ ID NO: 144218 - DNA, 17 bp, Arabidopsis thaliana
tctgaagttgtgtgtct

SEQ ID NO: 144219 - DNA, 17 bp, Arabidopsis thaliana
tctgaatcaggagaaat

SEQ ID NO: 144220 - DNA, 17 bp, Arabidopsis thaliana
tctgaatccatgggcag

SEQ ID NO: 144221 - DNA, 17 bp, Arabidopsis thaliana
tctgaatccgagtttct

SEQ ID NO: 144222 - DNA, 17 bp, Arabidopsis thaliana
tctgaatcctacttggg

SEQ ID NO: 144223 - DNA, 17 bp, Arabidopsis thaliana
tctgaatccttcagcga

SEQ ID NO: 144224 - DNA, 17 bp, Arabidopsis thaliana
tctgaatctcaggcttt

SEQ ID NO: 144225 - DNA, 17 bp, Arabidopsis thaliana
tctgaatctgacaaatc

SEQ ID NO: 144226 - DNA, 17 bp, Arabidopsis thaliana
tctgaatctggctcgtc

SEQ ID NO: 144227 - DNA, 17 bp, Arabidopsis thaliana
tctgaatgaaccgtttt

SEQ ID NO: 144228 - DNA, 17 bp, Arabidopsis thaliana
tctgaatgcgttgagtt

SEQ ID NO: 144229 - DNA, 17 bp, Arabidopsis thaliana
tctgaatgctaccgaaa

SEQ ID NO: 144230 - DNA, 17 bp, Arabidopsis thaliana
tctgaatggagacgtgc

SEQ ID NO: 144231 - DNA, 17 bp, Arabidopsis thaliana
tctgaatggagatgtgc

SEQ ID NO: 144232 - DNA, 17 bp, Arabidopsis thaliana
tctgaatgtgcagcgcg

SEQ ID NO: 144233 - DNA, 17 bp, Arabidopsis thaliana
tctgaattctctcacgg

SEQ ID NO: 144234 - DNA, 17 bp, Arabidopsis thaliana
tctgaattggcagacat

SEQ ID NO: 144235 - DNA, 17 bp, Arabidopsis thaliana
tctgacaccatcgacaa

SEQ ID NO: 144236 - DNA, 17 bp, Arabidopsis thaliana
tctgacaccatggctat

SEQ ID NO: 144237 - DNA, 17 bp, Arabidopsis thaliana
tctgacacgcttactgt

SEQ ID NO: 144238 - DNA, 17 bp, Arabidopsis thaliana
tctgacagaatcgccac

SEQ ID NO: 144239 - DNA, 17 bp, Arabidopsis thaliana
tctgacagctatttgcc

SEQ ID NO: 144240 - DNA, 17 bp, Arabidopsis thaliana
tctgacagctatttgcg

SEQ ID NO: 144241 - DNA, 17 bp, Arabidopsis thaliana
tctgacagcttcagtct

SEQ ID NO: 144242 - DNA, 17 bp, Arabidopsis thaliana
tctgacatccgacgact

SEQ ID NO: 144243 - DNA, 17 bp, Arabidopsis thaliana
tctgacatctcaacgtg

SEQ ID NO: 144244 - DNA, 17 bp, Arabidopsis thaliana
tctgacatgtggcctgt

SEQ ID NO: 144245 - DNA, 17 bp, Arabidopsis thaliana
tctgacatgtgtgcgag

SEQ ID NO: 144246 - DNA, 17 bp, Arabidopsis thaliana
tctgacattgccgtatt

SEQ ID NO: 144247 - DNA, 17 bp, Arabidopsis thaliana
tctgaccaatggcagag

SEQ ID NO: 144248 - DNA, 17 bp, Arabidopsis thaliana
tctgaccacttaggagt

SEQ ID NO: 144249 - DNA, 17 bp, Arabidopsis thaliana
tctgaccaggcttcatc

SEQ ID NO: 144250 - DNA, 17 bp, Arabidopsis thaliana
tctgaccaggcttcatt

SEQ ID NO: 144251 - DNA, 17 bp, Arabidopsis thaliana
tctgacccgagcctgag

SEQ ID NO: 144252 - DNA, 17 bp, Arabidopsis thaliana
tctgacccgatccgtcc

SEQ ID NO: 144253 - DNA, 17 bp, Arabidopsis thaliana
tctgaccggcgcgtgat

SEQ ID NO: 144254 - DNA, 17 bp, Arabidopsis thaliana
tctgacgaaattgaacc

SEQ ID NO: 144255 - DNA, 17 bp, Arabidopsis thaliana
tctgacgataaatctgt

SEQ ID NO: 144256 - DNA, 17 bp, Arabidopsis thaliana
tctgacgccgcagattt

SEQ ID NO: 144257 - DNA, 17 bp, Arabidopsis thaliana
tctgacgcggcctggag

SEQ ID NO: 144258 - DNA, 17 bp, Arabidopsis thaliana
tctgacgctgctgatgt

SEQ ID NO: 144259 - DNA, 17 bp, Arabidopsis thaliana
tctgacggtccagatca

SEQ ID NO: 144260 - DNA, 17 bp, Arabidopsis thaliana
tctgacggtgcagacgg

SEQ ID NO: 144261 - DNA, 17 bp, Arabidopsis thaliana
tctgacggttccaaggg

SEQ ID NO: 144262 - DNA, 17 bp, Arabidopsis thaliana
tctgacgtgccggagtg

SEQ ID NO: 144263 - DNA, 17 bp, Arabidopsis thaliana
tctgacgtgctaccaac

SEQ ID NO: 144264 - DNA, 17 bp, Arabidopsis thaliana
tctgacgtggcttctga

SEQ ID NO: 144265 - DNA, 17 bp, Arabidopsis thaliana
tctgacgtggcttcttc

SEQ ID NO: 144266 - DNA, 17 bp, Arabidopsis thaliana
tctgacgtggtttctcc

SEQ ID NO: 144267 - DNA, 17 bp, Arabidopsis thaliana
tctgactaagtcagcac

SEQ ID NO: 144268 - DNA, 17 bp, Arabidopsis thaliana
tctgactaccaggtaaa

SEQ ID NO: 144269 - DNA, 17 bp, Arabidopsis thaliana
tctgactagacaactcg

SEQ ID NO: 144270 - DNA, 17 bp, Arabidopsis thaliana
tctgactagtccactgg

SEQ ID NO: 144271 - DNA, 17 bp, Arabidopsis thaliana
tctgactagtccattgg

SEQ ID NO: 144272 - DNA, 17 bp, Arabidopsis thaliana
tctgactatcaggtaaa

SEQ ID NO: 144273 - DNA, 17 bp, Arabidopsis thaliana
tctgactcaggttggta

SEQ ID NO: 144274 - DNA, 17 bp, Arabidopsis thaliana
tctgactccagatcaga

SEQ ID NO: 144275 - DNA, 17 bp, Arabidopsis thaliana
tctgactctgatgacaa

SEQ ID NO: 144276 - DNA, 17 bp, Arabidopsis thaliana
tctgactctgtcttctc

SEQ ID NO: 144277 - DNA, 17 bp, Arabidopsis thaliana
tctgactctgtttctgc

SEQ ID NO: 144278 - DNA, 17 bp, Arabidopsis thaliana
tctgactgagtttgatt

SEQ ID NO: 144279 - DNA, 17 bp, Arabidopsis thaliana
tctgactgtgactaaat

SEQ ID NO: 144280 - DNA, 17 bp, Arabidopsis thaliana
tctgacttacagcttta

SEQ ID NO: 144281 - DNA, 17 bp, Arabidopsis thaliana
tctgactttccatgact

SEQ ID NO: 144282 - DNA, 17 bp, Arabidopsis thaliana
tctgactttctctgaca

SEQ ID NO: 144283 - DNA, 17 bp, Arabidopsis thaliana
tctgagaagggttcgag

SEQ ID NO: 144284 - DNA, 17 bp, Arabidopsis thaliana
tctgagacataattccg

SEQ ID NO: 144285 - DNA, 17 bp, Arabidopsis thaliana
tctgagaccaactccaa

SEQ ID NO: 144286 - DNA, 17 bp, Arabidopsis thaliana
tctgagactgtccgttt

SEQ ID NO: 144287 - DNA, 17 bp, Arabidopsis thaliana
tctgagagactctagtt

SEQ ID NO: 144288 - DNA, 17 bp, Arabidopsis thaliana
tctgagaggactatcca

SEQ ID NO: 144289 - DNA, 17 bp, Arabidopsis thaliana
tctgagatcaggaagtg

SEQ ID NO: 144290 - DNA, 17 bp, Arabidopsis thaliana
tctgagatgaatccgtt

SEQ ID NO: 144291 - DNA, 17 bp, Arabidopsis thaliana
tctgagatggctgttgc

SEQ ID NO: 144292 - DNA, 17 bp, Arabidopsis thaliana
tctgagattcagatttt

SEQ ID NO: 144293 - DNA, 17 bp, Arabidopsis thaliana
tctgagattcagccctt

SEQ ID NO: 144294 - DNA, 17 bp, Arabidopsis thaliana
tctgagattgtttgcgg

SEQ ID NO: 144295 - DNA, 17 bp, Arabidopsis thaliana
tctgagccaactgctgc

SEQ ID NO: 144296 - DNA, 17 bp, Arabidopsis thaliana
tctgagccgaaagttga

SEQ ID NO: 144297 - DNA, 17 bp, Arabidopsis thaliana
tctgagccgaagcctgt

SEQ ID NO: 144298 - DNA, 17 bp, Arabidopsis thaliana
tctgagccggccaatat

SEQ ID NO: 144299 - DNA, 17 bp, Arabidopsis thaliana
tctgagcctctgactgg

SEQ ID NO: 144300 - DNA, 17 bp, Arabidopsis thaliana
tctgagctactttttac

SEQ ID NO: 144301 - DNA, 17 bp, Arabidopsis thaliana
tctgagctttgttccag

SEQ ID NO: 144302 - DNA, 17 bp, Arabidopsis thaliana
tctgaggattacggttt

SEQ ID NO: 144303 - DNA, 17 bp, Arabidopsis thaliana
tctgaggcacagaaact

SEQ ID NO: 144304 - DNA, 17 bp, Arabidopsis thaliana
tctgaggcaggaatcgc

SEQ ID NO: 144305 - DNA, 17 bp, Arabidopsis thaliana
tctgaggcgctagagca

SEQ ID NO: 144306 - DNA, 17 bp, Arabidopsis thaliana
tctgaggcgtgatgaca

SEQ ID NO: 144307 - DNA, 17 bp, Arabidopsis thaliana
tctgaggctccgaatgg

SEQ ID NO: 144308 - DNA, 17 bp, Arabidopsis thaliana
tctgagggcacgtctgc

SEQ ID NO: 144309 - DNA, 17 bp, Arabidopsis thaliana
tctgagggctggctcgg

SEQ ID NO: 144310 - DNA, 17 bp, Arabidopsis thaliana
tctgagggctgggctca

SEQ ID NO: 144311 - DNA, 17 bp, Arabidopsis thaliana
tctgagggctgggctcg

SEQ ID NO: 144312 - DNA, 17 bp, Arabidopsis thaliana
tctgagggctgggctct

SEQ ID NO: 144313 - DNA, 17 bp, Arabidopsis thaliana
tctgaggtctgaggtgc

SEQ ID NO: 144314 - DNA, 17 bp, Arabidopsis thaliana
tctgaggtctgggctcg

SEQ ID NO: 144315 - DNA, 17 bp, Arabidopsis thaliana
tctgagtaccactcgac

SEQ ID NO: 144316 - DNA, 17 bp, Arabidopsis thaliana
tctgagtagtcgtgtgt

SEQ ID NO: 144317 - DNA, 17 bp, Arabidopsis thaliana
tctgagtcactgggtca

SEQ ID NO: 144318 - DNA, 17 bp, Arabidopsis thaliana
tctgagtcttgcagttc

SEQ ID NO: 144319 - DNA, 17 bp, Arabidopsis thaliana
tctgagtgacagtactt

SEQ ID NO: 144320 - DNA, 17 bp, Arabidopsis thaliana
tctgagtggtgacttag

SEQ ID NO: 144321 - DNA, 17 bp, Arabidopsis thaliana
tctgagtggtgataggt

SEQ ID NO: 144322 - DNA, 17 bp, Arabidopsis thaliana
tctgagtgtaagggtct

SEQ ID NO: 144323 - DNA, 17 bp, Arabidopsis thaliana
tctgagtttctgaccaa

SEQ ID NO: 144324 - DNA, 17 bp, Arabidopsis thaliana
tctgagtttttcggttg

SEQ ID NO: 144325 - DNA, 17 bp, Arabidopsis thaliana
tctgataaccgccgtaa

SEQ ID NO: 144326 - DNA, 17 bp, Arabidopsis thaliana
tctgatagttgctccaa

SEQ ID NO: 144327 - DNA, 17 bp, Arabidopsis thaliana
tctgatcacagaccgat

SEQ ID NO: 144328 - DNA, 17 bp, Arabidopsis thaliana
tctgatccgttgacgtt

SEQ ID NO: 144329 - DNA, 17 bp, Arabidopsis thaliana
tctgatcgccaactgca

SEQ ID NO: 144330 - DNA, 17 bp, Arabidopsis thaliana
tctgatgaagtgattct

SEQ ID NO: 144331 - DNA, 17 bp, Arabidopsis thaliana
tctgatgacatggcggc

SEQ ID NO: 144332 - DNA, 17 bp, Arabidopsis thaliana
tctgatgacgtattgaa

SEQ ID NO: 144333 - DNA, 17 bp, Arabidopsis thaliana
tctgatgacttggtgga

SEQ ID NO: 144334 - DNA, 17 bp, Arabidopsis thaliana
tctgatgatcattgtct

SEQ ID NO: 144335 - DNA, 17 bp, Arabidopsis thaliana
tctgatgattcatgata

SEQ ID NO: 144336 - DNA, 17 bp, Arabidopsis thaliana
tctgatggagtgattct

SEQ ID NO: 144337 - DNA, 17 bp, Arabidopsis thaliana
tctgatggcgtgcctcc

SEQ ID NO: 144338 - DNA, 17 bp, Arabidopsis thaliana
tctgatgggatccggtg

SEQ ID NO: 144339 - DNA, 17 bp, Arabidopsis thaliana
tctgatgggctcctgga

SEQ ID NO: 144340 - DNA, 17 bp, Arabidopsis thaliana
tctgatggtgcaccgtc

SEQ ID NO: 144341 - DNA, 17 bp, Arabidopsis thaliana
tctgatggtgtgcatcc

SEQ ID NO: 144342 - DNA, 17 bp, Arabidopsis thaliana
tctgatgttcgccattc

SEQ ID NO: 144343 - DNA, 17 bp, Arabidopsis thaliana
tctgattacgaatgaac

SEQ ID NO: 144344 - DNA, 17 bp, Arabidopsis thaliana
tctgattacgaatgagc

SEQ ID NO: 144345 - DNA, 17 bp, Arabidopsis thaliana
tctgattatcagccctg

SEQ ID NO: 144346 - DNA, 17 bp, Arabidopsis thaliana
tctgattatcagggact

SEQ ID NO: 144347 - DNA, 17 bp, Arabidopsis thaliana
tctgattatcagggtct

SEQ ID NO: 144348 - DNA, 17 bp, Arabidopsis thaliana
tctgattatgctgcaga

SEQ ID NO: 144349 - DNA, 17 bp, Arabidopsis thaliana
tctgattccaattgtgc

SEQ ID NO: 144350 - DNA, 17 bp, Arabidopsis thaliana
tctgattctggcgatta

SEQ ID NO: 144351 - DNA, 17 bp, Arabidopsis thaliana
tctgattgcctgttgat

SEQ ID NO: 144352 - DNA, 17 bp, Arabidopsis thaliana
tctgatttatctggtgc

SEQ ID NO: 144353 - DNA, 17 bp, Arabidopsis thaliana
tctgatttgcgttcgat

SEQ ID NO: 144354 - DNA, 17 bp, Arabidopsis thaliana
tctgattttgctttgat

SEQ ID NO: 144355 - DNA, 17 bp, Arabidopsis thaliana
tctgatttttgcgtgtc

SEQ ID NO: 144356 - DNA, 17 bp, Arabidopsis thaliana
tctgcaaacgccttgga

SEQ ID NO: 144357 - DNA, 17 bp, Arabidopsis thaliana
tctgcaaagagctgtgt

SEQ ID NO: 144358 - DNA, 17 bp, Arabidopsis thaliana
tctgcaaagcaaagagg

SEQ ID NO: 144359 - DNA, 17 bp, Arabidopsis thaliana
tctgcaaaggattctac

SEQ ID NO: 144360 - DNA, 17 bp, Arabidopsis thaliana
tctgcaaaggtatgtgc

SEQ ID NO: 144361 - DNA, 17 bp, Arabidopsis thaliana
tctgcaaaggtttgctc

SEQ ID NO: 144362 - DNA, 17 bp, Arabidopsis thaliana
tctgcaacgataaacga

SEQ ID NO: 144363 - DNA, 17 bp, Arabidopsis thaliana
tctgcaactggctcgga

SEQ ID NO: 144364 - DNA, 17 bp, Arabidopsis thaliana
tctgcaagctgctgctc

SEQ ID NO: 144365 - DNA, 17 bp, Arabidopsis thaliana
tctgcaaggagtacctg

SEQ ID NO: 144366 - DNA, 17 bp, Arabidopsis thaliana
tctgcaagggggctttt

SEQ ID NO: 144367 - DNA, 17 bp, Arabidopsis thaliana
tctgcaattctttcttg

SEQ ID NO: 144368 - DNA, 17 bp, Arabidopsis thaliana
tctgcacataactgacc

SEQ ID NO: 144369 - DNA, 17 bp, Arabidopsis thaliana
tctgcaccagtttgttg

SEQ ID NO: 144370 - DNA, 17 bp, Arabidopsis thaliana
tctgcaccagttttgtt

SEQ ID NO: 144371 - DNA, 17 bp, Arabidopsis thaliana
tctgcaccgcttgatcc

SEQ ID NO: 144372 - DNA, 17 bp, Arabidopsis thaliana
tctgcacctttgtgtct

SEQ ID NO: 144373 - DNA, 17 bp, Arabidopsis thaliana
tctgcacgtctgcctgg

SEQ ID NO: 144374 - DNA, 17 bp, Arabidopsis thaliana
tctgcagagaaaccatg

SEQ ID NO: 144375 - DNA, 17 bp, Arabidopsis thaliana
tctgcagcacgcgccta

SEQ ID NO: 144376 - DNA, 17 bp, Arabidopsis thaliana
tctgcagcgttggaaac

SEQ ID NO: 144377 - DNA, 17 bp, Arabidopsis thaliana
tctgcagctattggatt

SEQ ID NO: 144378 - DNA, 17 bp, Arabidopsis thaliana
tctgcagctccagatcc

SEQ ID NO: 144379 - DNA, 17 bp, Arabidopsis thaliana
tctgcagcttctgttgg

SEQ ID NO: 144380 - DNA, 17 bp, Arabidopsis thaliana
tctgcagcttcttcgca

SEQ ID NO: 144381 - DNA, 17 bp, Arabidopsis thaliana
tctgcagctttctctgt

SEQ ID NO: 144382 - DNA, 17 bp, Arabidopsis thaliana
tctgcaggattgatgtc

SEQ ID NO: 144383 - DNA, 17 bp, Arabidopsis thaliana
tctgcaggctttctttg

SEQ ID NO: 144384 - DNA, 17 bp, Arabidopsis thaliana
tctgcaggttaattgtg

SEQ ID NO: 144385 - DNA, 17 bp, Arabidopsis thaliana
tctgcaggttgtgaccg

SEQ ID NO: 144386 - DNA, 17 bp, Arabidopsis thaliana
tctgcaggtttgtttgt

SEQ ID NO: 144387 - DNA, 17 bp, Arabidopsis thaliana
tctgcagttttgtttgt

SEQ ID NO: 144388 - DNA, 17 bp, Arabidopsis thaliana
tctgcataagcaagatg

SEQ ID NO: 144389 - DNA, 17 bp, Arabidopsis thaliana
tctgcatgaagcggtga

SEQ ID NO: 144390 - DNA, 17 bp, Arabidopsis thaliana
tctgcatgattagaaga

SEQ ID NO: 144391 - DNA, 17 bp, Arabidopsis thaliana
tctgcatgtccattgca

SEQ ID NO: 144392 - DNA, 17 bp, Arabidopsis thaliana
tctgcatgttgcaacat

SEQ ID NO: 144393 - DNA, 17 bp, Arabidopsis thaliana
tctgcattagtagatcc

SEQ ID NO: 144394 - DNA, 17 bp, Arabidopsis thaliana
tctgcattgtcagttgc

SEQ ID NO: 144395 - DNA, 17 bp, Arabidopsis thaliana
tctgccaaacccgttcc

SEQ ID NO: 144396 - DNA, 17 bp, Arabidopsis thaliana
tctgccaaaggagattt

SEQ ID NO: 144397 - DNA, 17 bp, Arabidopsis thaliana
tctgccaacagaagact

SEQ ID NO: 144398 - DNA, 17 bp, Arabidopsis thaliana
tctgccaacagacgact

SEQ ID NO: 144399 - DNA, 17 bp, Arabidopsis thaliana
tctgccaacgtttgtct

SEQ ID NO: 144400 - DNA, 17 bp, Arabidopsis thaliana
tctgccaatcagtttcc

SEQ ID NO: 144401 - DNA, 17 bp, Arabidopsis thaliana
tctgccactgagttgtt

SEQ ID NO: 144402 - DNA, 17 bp, Arabidopsis thaliana
tctgccagggctaacca

SEQ ID NO: 144403 - DNA, 17 bp, Arabidopsis thaliana
tctgccatagacattgt

SEQ ID NO: 144404 - DNA, 17 bp, Arabidopsis thaliana
tctgccatcatgtgtcc

SEQ ID NO: 144405 - DNA, 17 bp, Arabidopsis thaliana
tctgccatcctgtagat

SEQ ID NO: 144406 - DNA, 17 bp, Arabidopsis thaliana
tctgccatctctgctga

SEQ ID NO: 144407 - DNA, 17 bp, Arabidopsis thaliana
tctgccatctttgtgac

SEQ ID NO: 144408 - DNA, 17 bp, Arabidopsis thaliana
tctgccatgatcgagag

SEQ ID NO: 144409 - DNA, 17 bp, Arabidopsis thaliana
tctgccatgggaccaaa

SEQ ID NO: 144410 - DNA, 17 bp, Arabidopsis thaliana
tctgcccagtgctctga

SEQ ID NO: 144411 - DNA, 17 bp, Arabidopsis thaliana
tctgcccgggtgtcaca

SEQ ID NO: 144412 - DNA, 17 bp, Arabidopsis thaliana
tctgcccgttgctctga

SEQ ID NO: 144413 - DNA, 17 bp, Arabidopsis thaliana
tctgccctatcaacttt

SEQ ID NO: 144414 - DNA, 17 bp, Arabidopsis thaliana
tctgccgaagccgtggg

SEQ ID NO: 144415 - DNA, 17 bp, Arabidopsis thaliana
tctgccgaagctgtggg

SEQ ID NO: 144416 - DNA, 17 bp, Arabidopsis thaliana
tctgccgacttagtttc

SEQ ID NO: 144417 - DNA, 17 bp, Arabidopsis thaliana
tctgccgacttgagttt

SEQ ID NO: 144418 - DNA, 17 bp, Arabidopsis thaliana
tctgccgaggctgacca

SEQ ID NO: 144419 - DNA, 17 bp, Arabidopsis thaliana
tctgccgagggcacgtc

SEQ ID NO: 144420 - DNA, 17 bp, Arabidopsis thaliana
tctgccgcagtgactgt

SEQ ID NO: 144421 - DNA, 17 bp, Arabidopsis thaliana
tctgccgcatagagtaa

SEQ ID NO: 144422 - DNA, 17 bp, Arabidopsis thaliana
tctgccgcgaactggga

SEQ ID NO: 144423 - DNA, 17 bp, Arabidopsis thaliana
tctgccgctgaagaaga

SEQ ID NO: 144424 - DNA, 17 bp, Arabidopsis thaliana
tctgccgtctcgagtga

SEQ ID NO: 144425 - DNA, 17 bp, Arabidopsis thaliana
tctgccgtctgtaagct

SEQ ID NO: 144426 - DNA, 17 bp, Arabidopsis thaliana
tctgcctatgcggggga

SEQ ID NO: 144427 - DNA, 17 bp, Arabidopsis thaliana
tctgcctcacttcctga

SEQ ID NO: 144428 - DNA, 17 bp, Arabidopsis thaliana
tctgcctcaggttcagc

SEQ ID NO: 144429 - DNA, 17 bp, Arabidopsis thaliana
tctgcctccgctatcgg

SEQ ID NO: 144430 - DNA, 17 bp, Arabidopsis thaliana
tctgcctgggtgtcaca

SEQ ID NO: 144431 - DNA, 17 bp, Arabidopsis thaliana
tctgcctgttactcgac

SEQ ID NO: 144432 - DNA, 17 bp, Arabidopsis thaliana
tctgcctgttactcgtc

SEQ ID NO: 144433 - DNA, 17 bp, Arabidopsis thaliana
tctgccttgctatgttt

SEQ ID NO: 144434 - DNA, 17 bp, Arabidopsis thaliana
tctgccttggagattca

SEQ ID NO: 144435 - DNA, 17 bp, Arabidopsis thaliana
tctgcctttgttggaat

SEQ ID NO: 144436 - DNA, 17 bp, Arabidopsis thaliana
tctgccttttttgactc

SEQ ID NO: 144437 - DNA, 17 bp, Arabidopsis thaliana
tctgcgaacaacagtga

SEQ ID NO: 144438 - DNA, 17 bp, Arabidopsis thaliana
tctgcgaacttccattg

SEQ ID NO: 144439 - DNA, 17 bp, Arabidopsis thaliana
tctgcgaagaaggttct

SEQ ID NO: 144440 - DNA, 17 bp, Arabidopsis thaliana
tctgcgacatggttcgg

SEQ ID NO: 144441 - DNA, 17 bp, Arabidopsis thaliana
tctgcgacatgtatgga

SEQ ID NO: 144442 - DNA, 17 bp, Arabidopsis thaliana
tctgcgacctcttttga

SEQ ID NO: 144443 - DNA, 17 bp, Arabidopsis thaliana
tctgcgaccttctcctt

SEQ ID NO: 144444 - DNA, 17 bp, Arabidopsis thaliana
tctgcgactacaaagct

SEQ ID NO: 144445 - DNA, 17 bp, Arabidopsis thaliana
tctgcgactcagttgcg

SEQ ID NO: 144446 - DNA, 17 bp, Arabidopsis thaliana
tctgcgactctcgagaa

SEQ ID NO: 144447 - DNA, 17 bp, Arabidopsis thaliana
tctgcgactttccgtcc

SEQ ID NO: 144448 - DNA, 17 bp, Arabidopsis thaliana
tctgcgatatcatctcc

SEQ ID NO: 144449 - DNA, 17 bp, Arabidopsis thaliana
tctgcgattctgcgtta

SEQ ID NO: 144450 - DNA, 17 bp, Arabidopsis thaliana
tctgcgattcttctaca

SEQ ID NO: 144451 - DNA, 17 bp, Arabidopsis thaliana
tctgcgatttcttgctg

SEQ ID NO: 144452 - DNA, 17 bp, Arabidopsis thaliana
tctgcggaagatttgcg

SEQ ID NO: 144453 - DNA, 17 bp, Arabidopsis thaliana
tctgcggaccgttttta

SEQ ID NO: 144454 - DNA, 17 bp, Arabidopsis thaliana
tctgcggacgttgttga

SEQ ID NO: 144455 - DNA, 17 bp, Arabidopsis thaliana
tctgcgggacgggtttg

SEQ ID NO: 144456 - DNA, 17 bp, Arabidopsis thaliana
tctgcgggaggatttga

SEQ ID NO: 144457 - DNA, 17 bp, Arabidopsis thaliana
tctgcggtacacagcgg

SEQ ID NO: 144458 - DNA, 17 bp, Arabidopsis thaliana
tctgcgtaccaggacaa

SEQ ID NO: 144459 - DNA, 17 bp, Arabidopsis thaliana
tctgcgtagaatcctgg

SEQ ID NO: 144460 - DNA, 17 bp, Arabidopsis thaliana
tctgcgtagcctggtgt

SEQ ID NO: 144461 - DNA, 17 bp, Arabidopsis thaliana
tctgcgtcgatcatatg

SEQ ID NO: 144462 - DNA, 17 bp, Arabidopsis thaliana
tctgcgtcttcgaaaac

SEQ ID NO: 144463 - DNA, 17 bp, Arabidopsis thaliana
tctgcgtgacgtatgag

SEQ ID NO: 144464 - DNA, 17 bp, Arabidopsis thaliana
tctgcgtgatatatgca

SEQ ID NO: 144465 - DNA, 17 bp, Arabidopsis thaliana
tctgcgtttgcgggtga

SEQ ID NO: 144466 - DNA, 17 bp, Arabidopsis thaliana
tctgctaaaccgcttgt

SEQ ID NO: 144467 - DNA, 17 bp, Arabidopsis thaliana
tctgctaacggtgccaa

SEQ ID NO: 144468 - DNA, 17 bp, Arabidopsis thaliana
tctgctaaggtttgctc

SEQ ID NO: 144469 - DNA, 17 bp, Arabidopsis thaliana
tctgctacggccagcac

SEQ ID NO: 144470 - DNA, 17 bp, Arabidopsis thaliana
tctgctagaagatgacc

SEQ ID NO: 144471 - DNA, 17 bp, Arabidopsis thaliana
tctgctagccaaagcac

SEQ ID NO: 144472 - DNA, 17 bp, Arabidopsis thaliana
tctgctagccaaagctc

SEQ ID NO: 144473 - DNA, 17 bp, Arabidopsis thaliana
tctgctatcgtagatcg

SEQ ID NO: 144474 - DNA, 17 bp, Arabidopsis thaliana
tctgctcaggtcgttgg

SEQ ID NO: 144475 - DNA, 17 bp, Arabidopsis thaliana
tctgctccactcaaaag

SEQ ID NO: 144476 - DNA, 17 bp, Arabidopsis thaliana
tctgctccgcctgatac

SEQ ID NO: 144477 - DNA, 17 bp, Arabidopsis thaliana
tctgctccgtcgctgtt

SEQ ID NO: 144478 - DNA, 17 bp, Arabidopsis thaliana
tctgctcgaacattgaa

SEQ ID NO: 144479 - DNA, 17 bp, Arabidopsis thaliana
tctgctcgagcagtggc

SEQ ID NO: 144480 - DNA, 17 bp, Arabidopsis thaliana
tctgctcgggattggcc

SEQ ID NO: 144481 - DNA, 17 bp, Arabidopsis thaliana
tctgctcggtgttctga

SEQ ID NO: 144482 - DNA, 17 bp, Arabidopsis thaliana
tctgctcgttcttgtct

SEQ ID NO: 144483 - DNA, 17 bp, Arabidopsis thaliana
tctgctctaatacaatt

SEQ ID NO: 144484 - DNA, 17 bp, Arabidopsis thaliana
tctgctctcttcttcta

SEQ ID NO: 144485 - DNA, 17 bp, Arabidopsis thaliana
tctgctctgtgcccata

SEQ ID NO: 144486 - DNA, 17 bp, Arabidopsis thaliana
tctgctctgtgttgttt

SEQ ID NO: 144487 - DNA, 17 bp, Arabidopsis thaliana
tctgctgcctctgtgat

SEQ ID NO: 144488 - DNA, 17 bp, Arabidopsis thaliana
tctgctgcgaatgtcgg

SEQ ID NO: 144489 - DNA, 17 bp, Arabidopsis thaliana
tctgctgcgccgatttt

SEQ ID NO: 144490 - DNA, 17 bp, Arabidopsis thaliana
tctgctgcggttgctga

SEQ ID NO: 144491 - DNA, 17 bp, Arabidopsis thaliana
tctgctgctcaagatta

SEQ ID NO: 144492 - DNA, 17 bp, Arabidopsis thaliana
tctgctgctcagccaag

SEQ ID NO: 144493 - DNA, 17 bp, Arabidopsis thaliana
tctgctgcttcatctga

SEQ ID NO: 144494 - DNA, 17 bp, Arabidopsis thaliana
tctgctggactcgagcc

SEQ ID NO: 144495 - DNA, 17 bp, Arabidopsis thaliana
tctgctgggccgaaact

SEQ ID NO: 144496 - DNA, 17 bp, Arabidopsis thaliana
tctgctgggcctcatct

SEQ ID NO: 144497 - DNA, 17 bp, Arabidopsis thaliana
tctgctgggtttagacc

SEQ ID NO: 144498 - DNA, 17 bp, Arabidopsis thaliana
tctgctggtcattgctc

SEQ ID NO: 144499 - DNA, 17 bp, Arabidopsis thaliana
tctgctggttgtgtttg

SEQ ID NO: 144500 - DNA, 17 bp, Arabidopsis thaliana
tctgctgtagaccatgc

SEQ ID NO: 144501 - DNA, 17 bp, Arabidopsis thaliana
tctgctgtccaagagcc

SEQ ID NO: 144502 - DNA, 17 bp, Arabidopsis thaliana
tctgctgtcgtcgttta

SEQ ID NO: 144503 - DNA, 17 bp, Arabidopsis thaliana
tctgctgtgaagcgcag

SEQ ID NO: 144504 - DNA, 17 bp, Arabidopsis thaliana
tctgctgttaaggcgaa

SEQ ID NO: 144505 - DNA, 17 bp, Arabidopsis thaliana
tctgcttaaaccgccta

SEQ ID NO: 144506 - DNA, 17 bp, Arabidopsis thaliana
tctgcttacggcggtta

SEQ ID NO: 144507 - DNA, 17 bp, Arabidopsis thaliana
tctgcttcacttttgct

SEQ ID NO: 144508 - DNA, 17 bp, Arabidopsis thaliana
tctgcttccgtctttcg

SEQ ID NO: 144509 - DNA, 17 bp, Arabidopsis thaliana
tctgcttcgtgccctgg

SEQ ID NO: 144510 - DNA, 17 bp, Arabidopsis thaliana
tctgcttctaattcagg

SEQ ID NO: 144511 - DNA, 17 bp, Arabidopsis thaliana
tctgcttctgcctcggt

SEQ ID NO: 144512 - DNA, 17 bp, Arabidopsis thaliana
tctgcttcttcgccaac

SEQ ID NO: 144513 - DNA, 17 bp, Arabidopsis thaliana
tctgcttcttctgctga

SEQ ID NO: 144514 - DNA, 17 bp, Arabidopsis thaliana
tctgcttcttgggatga

SEQ ID NO: 144515 - DNA, 17 bp, Arabidopsis thaliana
tctgcttctttggctta

SEQ ID NO: 144516 - DNA, 17 bp, Arabidopsis thaliana
tctgcttgaagactgct

SEQ ID NO: 144517 - DNA, 17 bp, Arabidopsis thaliana
tctgcttgaagttgttg

SEQ ID NO: 144518 - DNA, 17 bp, Arabidopsis thaliana
tctgcttgatacacttt

SEQ ID NO: 144519 - DNA, 17 bp, Arabidopsis thaliana
tctgcttgatacgcttt

SEQ ID NO: 144520 - DNA, 17 bp, Arabidopsis thaliana
tctgcttgatgtgcttg

SEQ ID NO: 144521 - DNA, 17 bp, Arabidopsis thaliana
tctgcttgcagagagaa

SEQ ID NO: 144522 - DNA, 17 bp, Arabidopsis thaliana
tctgcttgccggcgtca

SEQ ID NO: 144523 - DNA, 17 bp, Arabidopsis thaliana
tctgcttgtgagtgaga

SEQ ID NO: 144524 - DNA, 17 bp, Arabidopsis thaliana
tctgcttgttaatacga

SEQ ID NO: 144525 - DNA, 17 bp, Arabidopsis thaliana
tctgcttgttagggtta

SEQ ID NO: 144526 - DNA, 17 bp, Arabidopsis thaliana
tctgctttatccgcttg

SEQ ID NO: 144527 - DNA, 17 bp, Arabidopsis thaliana
tctgctttctacggttg

SEQ ID NO: 144528 - DNA, 17 bp, Arabidopsis thaliana
tctgctttgacatttgc

SEQ ID NO: 144529 - DNA, 17 bp, Arabidopsis thaliana
tctgctttgctgatggt

SEQ ID NO: 144530 - DNA, 17 bp, Arabidopsis thaliana
tctgctttgtctgctgt

SEQ ID NO: 144531 - DNA, 17 bp, Arabidopsis thaliana
tctgcttttgtcttgag

SEQ ID NO: 144532 - DNA, 17 bp, Arabidopsis thaliana
tctggaaaacacggatg

SEQ ID NO: 144533 - DNA, 17 bp, Arabidopsis thaliana
tctggaaagaccagctc

SEQ ID NO: 144534 - DNA, 17 bp, Arabidopsis thaliana
tctggaaagcaggcttt

SEQ ID NO: 144535 - DNA, 17 bp, Arabidopsis thaliana
tctggaacaaagtcttt

SEQ ID NO: 144536 - DNA, 17 bp, Arabidopsis thaliana
tctggaaccactaacct

SEQ ID NO: 144537 - DNA, 17 bp, Arabidopsis thaliana
tctggaacgattacggg

SEQ ID NO: 144538 - DNA, 17 bp, Arabidopsis thaliana
tctggaagtcgaaatcc

SEQ ID NO: 144539 - DNA, 17 bp, Arabidopsis thaliana
tctggacattcggattt

SEQ ID NO: 144540 - DNA, 17 bp, Arabidopsis thaliana
tctggaccgaatctcct

SEQ ID NO: 144541 - DNA, 17 bp, Arabidopsis thaliana
tctggaccgaatctcgt

SEQ ID NO: 144542 - DNA, 17 bp, Arabidopsis thaliana
tctggacctaggactgg

SEQ ID NO: 144543 - DNA, 17 bp, Arabidopsis thaliana
tctggacgaaggctatt

SEQ ID NO: 144544 - DNA, 17 bp, Arabidopsis thaliana
tctggacgaatctcgta

SEQ ID NO: 144545 - DNA, 17 bp, Arabidopsis thaliana
tctggacgggtttggca

SEQ ID NO: 144546 - DNA, 17 bp, Arabidopsis thaliana
tctggactgccatcagt

SEQ ID NO: 144547 - DNA, 17 bp, Arabidopsis thaliana
tctggactttgaatcca

SEQ ID NO: 144548 - DNA, 17 bp, Arabidopsis thaliana
tctggagaccaaaccct

SEQ ID NO: 144549 - DNA, 17 bp, Arabidopsis thaliana
tctggagacgaacttgg

SEQ ID NO: 144550 - DNA, 17 bp, Arabidopsis thaliana
tctggagggattatggg

SEQ ID NO: 144551 - DNA, 17 bp, Arabidopsis thaliana
tctggaggtttgggtgt

SEQ ID NO: 144552 - DNA, 17 bp, Arabidopsis thaliana
tctggaggtttgggttt

SEQ ID NO: 144553 - DNA, 17 bp, Arabidopsis thaliana
tctggatatcatacggc

SEQ ID NO: 144554 - DNA, 17 bp, Arabidopsis thaliana
tctggatattaagatgt

SEQ ID NO: 144555 - DNA, 17 bp, Arabidopsis thaliana
tctggatccgtaaacct

SEQ ID NO: 144556 - DNA, 17 bp, Arabidopsis thaliana
tctggatgaggacatga

SEQ ID NO: 144557 - DNA, 17 bp, Arabidopsis thaliana
tctggattgaagtttga

SEQ ID NO: 144558 - DNA, 17 bp, Arabidopsis thaliana
tctggattggttctcga

SEQ ID NO: 144559 - DNA, 17 bp, Arabidopsis thaliana
tctggattgtggtcatt

SEQ ID NO: 144560 - DNA, 17 bp, Arabidopsis thaliana
tctggcaaaagactgtg

SEQ ID NO: 144561 - DNA, 17 bp, Arabidopsis thaliana
tctggcaaacgcgggat

SEQ ID NO: 144562 - DNA, 17 bp, Arabidopsis thaliana
tctggcaagttgtcctt

SEQ ID NO: 144563 - DNA, 17 bp, Arabidopsis thaliana
tctggcaatgggatgaa

SEQ ID NO: 144564 - DNA, 17 bp, Arabidopsis thaliana
tctggcatgatgcggta

SEQ ID NO: 144565 - DNA, 17 bp, Arabidopsis thaliana
tctggcattttcgtgat

SEQ ID NO: 144566 - DNA, 17 bp, Arabidopsis thaliana
tctggccattcgctaag

SEQ ID NO: 144567 - DNA, 17 bp, Arabidopsis thaliana
tctggccgaagcccgta

SEQ ID NO: 144568 - DNA, 17 bp, Arabidopsis thaliana
tctggccgagggcacgt

SEQ ID NO: 144569 - DNA, 17 bp, Arabidopsis thaliana
tctggccgatccgtctt

SEQ ID NO: 144570 - DNA, 17 bp, Arabidopsis thaliana
tctggcgatttcgaacg

SEQ ID NO: 144571 - DNA, 17 bp, Arabidopsis thaliana
tctggcgatttcgagcg

SEQ ID NO: 144572 - DNA, 17 bp, Arabidopsis thaliana
tctggcgatttcggttc

SEQ ID NO: 144573 - DNA, 17 bp, Arabidopsis thaliana
tctggcggttctggcgg

SEQ ID NO: 144574 - DNA, 17 bp, Arabidopsis thaliana
tctggcggttgagggtt

SEQ ID NO: 144575 - DNA, 17 bp, Arabidopsis thaliana
tctggctcaaggctgtc

SEQ ID NO: 144576 - DNA, 17 bp, Arabidopsis thaliana
tctggctcaggcacttg

SEQ ID NO: 144577 - DNA, 17 bp, Arabidopsis thaliana
tctggctcggctggata

SEQ ID NO: 144578 - DNA, 17 bp, Arabidopsis thaliana
tctggctcggggtccca

SEQ ID NO: 144579 - DNA, 17 bp, Arabidopsis thaliana
tctggctgcgtcagctt

SEQ ID NO: 144580 - DNA, 17 bp, Arabidopsis thaliana
tctggctggaccagtcc

SEQ ID NO: 144581 - DNA, 17 bp, Arabidopsis thaliana
tctggctggaccagtgc

SEQ ID NO: 144582 - DNA, 17 bp, Arabidopsis thaliana
tctggcttgcgtttgct

SEQ ID NO: 144583 - DNA, 17 bp, Arabidopsis thaliana
tctggcttgtctatgct

SEQ ID NO: 144584 - DNA, 17 bp, Arabidopsis thaliana
tctgggaatccggtgga

SEQ ID NO: 144585 - DNA, 17 bp, Arabidopsis thaliana
tctgggacaaagcccgt

SEQ ID NO: 144586 - DNA, 17 bp, Arabidopsis thaliana
tctgggacgaagcccgt

SEQ ID NO: 144587 - DNA, 17 bp, Arabidopsis thaliana
tctgggagattatgagt

SEQ ID NO: 144588 - DNA, 17 bp, Arabidopsis thaliana
tctgggatcgttctgtc

SEQ ID NO: 144589 - DNA, 17 bp, Arabidopsis thaliana
tctgggattcgcttttg

SEQ ID NO: 144590 - DNA, 17 bp, Arabidopsis thaliana
tctgggattcgcttttt

SEQ ID NO: 144591 - DNA, 17 bp, Arabidopsis thaliana
tctgggatttttagtcg

SEQ ID NO: 144592 - DNA, 17 bp, Arabidopsis thaliana
tctgggcacttgtatct

SEQ ID NO: 144593 - DNA, 17 bp, Arabidopsis thaliana
tctgggcagtccgtggg

SEQ ID NO: 144594 - DNA, 17 bp, Arabidopsis thaliana
tctgggccaaagcctgt

SEQ ID NO: 144595 - DNA, 17 bp, Arabidopsis thaliana
tctgggccgaaaccaca

SEQ ID NO: 144596 - DNA, 17 bp, Arabidopsis thaliana
tctgggccgaaacccgt

SEQ ID NO: 144597 - DNA, 17 bp, Arabidopsis thaliana
tctgggccgaaacctgt

SEQ ID NO: 144598 - DNA, 17 bp, Arabidopsis thaliana
tctgggccgaaactcgt

SEQ ID NO: 144599 - DNA, 17 bp, Arabidopsis thaliana
tctgggccgaaccccct

SEQ ID NO: 144600 - DNA, 17 bp, Arabidopsis thaliana
tctgggccgaaccccgt

SEQ ID NO: 144601 - DNA, 17 bp, Arabidopsis thaliana
tctgggccgaagcccgt

SEQ ID NO: 144602 - DNA, 17 bp, Arabidopsis thaliana
tctgggccgaagtccgt

SEQ ID NO: 144603 - DNA, 17 bp, Arabidopsis thaliana
tctgggccgaatcttgt

SEQ ID NO: 144604 - DNA, 17 bp, Arabidopsis thaliana
tctgggcctaccgaact

SEQ ID NO: 144605 - DNA, 17 bp, Arabidopsis thaliana
tctgggccttacaattc

SEQ ID NO: 144606 - DNA, 17 bp, Arabidopsis thaliana
tctgggcggaacaagtg

SEQ ID NO: 144607 - DNA, 17 bp, Arabidopsis thaliana
tctgggctgtaactgac

SEQ ID NO: 144608 - DNA, 17 bp, Arabidopsis thaliana
tctggggaacgaggtat

SEQ ID NO: 144609 - DNA, 17 bp, Arabidopsis thaliana
tctggggattgtttgcg

SEQ ID NO: 144610 - DNA, 17 bp, Arabidopsis thaliana
tctggggcctttgtttt

SEQ ID NO: 144611 - DNA, 17 bp, Arabidopsis thaliana
tctggggctggaccaga

SEQ ID NO: 144612 - DNA, 17 bp, Arabidopsis thaliana
tctgggggactacagga

SEQ ID NO: 144613 - DNA, 17 bp, Arabidopsis thaliana
tctgggtcaaagcccgt

SEQ ID NO: 144614 - DNA, 17 bp, Arabidopsis thaliana
tctgggtcacattgttt

SEQ ID NO: 144615 - DNA, 17 bp, Arabidopsis thaliana
tctgggtcactaggtca

SEQ ID NO: 144616 - DNA, 17 bp, Arabidopsis thaliana
tctgggtccctaccgac

SEQ ID NO: 144617 - DNA, 17 bp, Arabidopsis thaliana
tctgggtcgatcatatg

SEQ ID NO: 144618 - DNA, 17 bp, Arabidopsis thaliana
tctgggtcggcgtttaa

SEQ ID NO: 144619 - DNA, 17 bp, Arabidopsis thaliana
tctgggtctgtgttgca

SEQ ID NO: 144620 - DNA, 17 bp, Arabidopsis thaliana
tctgggtttggttctct

SEQ ID NO: 144621 - DNA, 17 bp, Arabidopsis thaliana
tctggtaacttttggag

SEQ ID NO: 144622 - DNA, 17 bp, Arabidopsis thaliana
tctggtacgtaggcaat

SEQ ID NO: 144623 - DNA, 17 bp, Arabidopsis thaliana
tctggtaggattacggg

SEQ ID NO: 144624 - DNA, 17 bp, Arabidopsis thaliana
tctggtatacggcaaat

SEQ ID NO: 144625 - DNA, 17 bp, Arabidopsis thaliana
tctggtattttcaggtt

SEQ ID NO: 144626 - DNA, 17 bp, Arabidopsis thaliana
tctggtcaacgattaag

SEQ ID NO: 144627 - DNA, 17 bp, Arabidopsis thaliana
tctggtcactaagcgat

SEQ ID NO: 144628 - DNA, 17 bp, Arabidopsis thaliana
tctggtcacttttgttt

SEQ ID NO: 144629 - DNA, 17 bp, Arabidopsis thaliana
tctggtcatcagacagc

SEQ ID NO: 144630 - DNA, 17 bp, Arabidopsis thaliana
tctggtccgttgacagt

SEQ ID NO: 144631 - DNA, 17 bp, Arabidopsis thaliana
tctggtcgatggaacaa

SEQ ID NO: 144632 - DNA, 17 bp, Arabidopsis thaliana
tctggtgacactgaaat

SEQ ID NO: 144633 - DNA, 17 bp, Arabidopsis thaliana
tctggtgactgagtttc

SEQ ID NO: 144634 - DNA, 17 bp, Arabidopsis thaliana
tctggtgatcgcactag

SEQ ID NO: 144635 - DNA, 17 bp, Arabidopsis thaliana
tctggtgccagcagccg

SEQ ID NO: 144636 - DNA, 17 bp, Arabidopsis thaliana
tctggtgccagcagcct

SEQ ID NO: 144637 - DNA, 17 bp, Arabidopsis thaliana
tctggtgctctacatag

SEQ ID NO: 144638 - DNA, 17 bp, Arabidopsis thaliana
tctggtgctgcgtgcta

SEQ ID NO: 144639 - DNA, 17 bp, Arabidopsis thaliana
tctggtgctttggctct

SEQ ID NO: 144640 - DNA, 17 bp, Arabidopsis thaliana
tctggtggtgcatggcc

SEQ ID NO: 144641 - DNA, 17 bp, Arabidopsis thaliana
tctggtgtgtgcgttta

SEQ ID NO: 144642 - DNA, 17 bp, Arabidopsis thaliana
tctggttcaaatccagg

SEQ ID NO: 144643 - DNA, 17 bp, Arabidopsis thaliana
tctggttgaaccgcttg

SEQ ID NO: 144644 - DNA, 17 bp, Arabidopsis thaliana
tctggttgacatcctct

SEQ ID NO: 144645 - DNA, 17 bp, Arabidopsis thaliana
tctggttgactcagtga

SEQ ID NO: 144646 - DNA, 17 bp, Arabidopsis thaliana
tctggttgagtgcggat

SEQ ID NO: 144647 - DNA, 17 bp, Arabidopsis thaliana
tctggttggttgccttc

SEQ ID NO: 144648 - DNA, 17 bp, Arabidopsis thaliana
tctggttttagcctctt

SEQ ID NO: 144649 - DNA, 17 bp, Arabidopsis thaliana
tctggttttctcttcct

SEQ ID NO: 144650 - DNA, 17 bp, Arabidopsis thaliana
tctggttttgctcgatg

SEQ ID NO: 144651 - DNA, 17 bp, Arabidopsis thaliana
tctggttttgctgtcgg

SEQ ID NO: 144652 - DNA, 17 bp, Arabidopsis thaliana
tctggtttttcctgtcc

SEQ ID NO: 144653 - DNA, 17 bp, Arabidopsis thaliana
tctggtttttgctgcaa

SEQ ID NO: 144654 - DNA, 17 bp, Arabidopsis thaliana
tctgtaacacttcagtg

SEQ ID NO: 144655 - DNA, 17 bp, Arabidopsis thaliana
tctgtaacgtccgttaa

SEQ ID NO: 144656 - DNA, 17 bp, Arabidopsis thaliana
tctgtaactttgacaca

SEQ ID NO: 144657 - DNA, 17 bp, Arabidopsis thaliana
tctgtaatcttgaggtc

SEQ ID NO: 144658 - DNA, 17 bp, Arabidopsis thaliana
tctgtaatgtaacgctt

SEQ ID NO: 144659 - DNA, 17 bp, Arabidopsis thaliana
tctgtagagtcctcttc

SEQ ID NO: 144660 - DNA, 17 bp, Arabidopsis thaliana
tctgtagatggatcctt

SEQ ID NO: 144661 - DNA, 17 bp, Arabidopsis thaliana
tctgtagatggatcgat

SEQ ID NO: 144662 - DNA, 17 bp, Arabidopsis thaliana
tctgtaggcggtctctt

SEQ ID NO: 144663 - DNA, 17 bp, Arabidopsis thaliana
tctgtaggttgcaggtt

SEQ ID NO: 144664 - DNA, 17 bp, Arabidopsis thaliana
tctgtagtccggtcgcc

SEQ ID NO: 144665 - DNA, 17 bp, Arabidopsis thaliana
tctgtatcgccggcaca

SEQ ID NO: 144666 - DNA, 17 bp, Arabidopsis thaliana
tctgtatctttggcgaa

SEQ ID NO: 144667 - DNA, 17 bp, Arabidopsis thaliana
tctgtatgctaagatgt

SEQ ID NO: 144668 - DNA, 17 bp, Arabidopsis thaliana
tctgtattttcaggttt

SEQ ID NO: 144669 - DNA, 17 bp, Arabidopsis thaliana
tctgtcaaatctgggta

SEQ ID NO: 144670 - DNA, 17 bp, Arabidopsis thaliana
tctgtcaaatctggtta

SEQ ID NO: 144671 - DNA, 17 bp, Arabidopsis thaliana
tctgtcaaccaaacgcg

SEQ ID NO: 144672 - DNA, 17 bp, Arabidopsis thaliana
tctgtcaatccgcacga

SEQ ID NO: 144673 - DNA, 17 bp, Arabidopsis thaliana
tctgtcaatctgcacga

SEQ ID NO: 144674 - DNA, 17 bp, Arabidopsis thaliana
tctgtcacggtgacgaa

SEQ ID NO: 144675 - DNA, 17 bp, Arabidopsis thaliana
tctgtcacggttcaagg

SEQ ID NO: 144676 - DNA, 17 bp, Arabidopsis thaliana
tctgtcagccgacgata

SEQ ID NO: 144677 - DNA, 17 bp, Arabidopsis thaliana
tctgtcagttgagcctt

SEQ ID NO: 144678 - DNA, 17 bp, Arabidopsis thaliana
tctgtcagttggatctc

SEQ ID NO: 144679 - DNA, 17 bp, Arabidopsis thaliana
tctgtcagttgggattt

SEQ ID NO: 144680 - DNA, 17 bp, Arabidopsis thaliana
tctgtcagttgggcatt

SEQ ID NO: 144681 - DNA, 17 bp, Arabidopsis thaliana
tctgtcagttgggtttt

SEQ ID NO: 144682 - DNA, 17 bp, Arabidopsis thaliana
tctgtcatcgccatcgc

SEQ ID NO: 144683 - DNA, 17 bp, Arabidopsis thaliana
tctgtcatctcgcgagc

SEQ ID NO: 144684 - DNA, 17 bp, Arabidopsis thaliana
tctgtcatgggtcagag

SEQ ID NO: 144685 - DNA, 17 bp, Arabidopsis thaliana
tctgtccagaattgttg

SEQ ID NO: 144686 - DNA, 17 bp, Arabidopsis thaliana
tctgtccatacggcgga

SEQ ID NO: 144687 - DNA, 17 bp, Arabidopsis thaliana
tctgtccatgactcata

SEQ ID NO: 144688 - DNA, 17 bp, Arabidopsis thaliana
tctgtcccttcgtcgcc

SEQ ID NO: 144689 - DNA, 17 bp, Arabidopsis thaliana
tctgtccgacccgttcc

SEQ ID NO: 144690 - DNA, 17 bp, Arabidopsis thaliana
tctgtccggcgatggct

SEQ ID NO: 144691 - DNA, 17 bp, Arabidopsis thaliana
tctgtccggtcagcggt

SEQ ID NO: 144692 - DNA, 17 bp, Arabidopsis thaliana
tctgtcctctctaatac

SEQ ID NO: 144693 - DNA, 17 bp, Arabidopsis thaliana
tctgtcctctgcacgtt

SEQ ID NO: 144694 - DNA, 17 bp, Arabidopsis thaliana
tctgtcctgagtttgga

SEQ ID NO: 144695 - DNA, 17 bp, Arabidopsis thaliana
tctgtcgatcagtgatg

SEQ ID NO: 144696 - DNA, 17 bp, Arabidopsis thaliana
tctgtcgatcttgggct

SEQ ID NO: 144697 - DNA, 17 bp, Arabidopsis thaliana
tctgtcgcaaaggatat

SEQ ID NO: 144698 - DNA, 17 bp, Arabidopsis thaliana
tctgtcgcatcctgtag

SEQ ID NO: 144699 - DNA, 17 bp, Arabidopsis thaliana
tctgtcgccgtcggaga

SEQ ID NO: 144700 - DNA, 17 bp, Arabidopsis thaliana
tctgtcgctgagacaat

SEQ ID NO: 144701 - DNA, 17 bp, Arabidopsis thaliana
tctgtcggacctgagca

SEQ ID NO: 144702 - DNA, 17 bp, Arabidopsis thaliana
tctgtcggcgaatttga

SEQ ID NO: 144703 - DNA, 17 bp, Arabidopsis thaliana
tctgtcgggttgtgaat

SEQ ID NO: 144704 - DNA, 17 bp, Arabidopsis thaliana
tctgtcgtcatcgtttt

SEQ ID NO: 144705 - DNA, 17 bp, Arabidopsis thaliana
tctgtcgtctttagtcc

SEQ ID NO: 144706 - DNA, 17 bp, Arabidopsis thaliana
tctgtctaagattccgg

SEQ ID NO: 144707 - DNA, 17 bp, Arabidopsis thaliana
tctgtctagcacagcta

SEQ ID NO: 144708 - DNA, 17 bp, Arabidopsis thaliana
tctgtctaggggtgaag

SEQ ID NO: 144709 - DNA, 17 bp, Arabidopsis thaliana
tctgtctcactagggcc

SEQ ID NO: 144710 - DNA, 17 bp, Arabidopsis thaliana
tctgtctcagagattat

SEQ ID NO: 144711 - DNA, 17 bp, Arabidopsis thaliana
tctgtctccagtttgga

SEQ ID NO: 144712 - DNA, 17 bp, Arabidopsis thaliana
tctgtctcctcaccggt

SEQ ID NO: 144713 - DNA, 17 bp, Arabidopsis thaliana
tctgtctgcctgggtgt

SEQ ID NO: 144714 - DNA, 17 bp, Arabidopsis thaliana
tctgtctggaccagtcc

SEQ ID NO: 144715 - DNA, 17 bp, Arabidopsis thaliana
tctgtctggctgctctg

SEQ ID NO: 144716 - DNA, 17 bp, Arabidopsis thaliana
tctgtctgttactcgac

SEQ ID NO: 144717 - DNA, 17 bp, Arabidopsis thaliana
tctgtctgttggtgcca

SEQ ID NO: 144718 - DNA, 17 bp, Arabidopsis thaliana
tctgtcttaatgtgcct

SEQ ID NO: 144719 - DNA, 17 bp, Arabidopsis thaliana
tctgtcttagtcgtgcg

SEQ ID NO: 144720 - DNA, 17 bp, Arabidopsis thaliana
tctgtcttcctagatag

SEQ ID NO: 144721 - DNA, 17 bp, Arabidopsis thaliana
tctgtcttcttcgatcg

SEQ ID NO: 144722 - DNA, 17 bp, Arabidopsis thaliana
tctgtcttttgcgtctc

SEQ ID NO: 144723 - DNA, 17 bp, Arabidopsis thaliana
tctgtgaaaggttggat

SEQ ID NO: 144724 - DNA, 17 bp, Arabidopsis thaliana
tctgtgaagttttgtac

SEQ ID NO: 144725 - DNA, 17 bp, Arabidopsis thaliana
tctgtgaatctgccaac

SEQ ID NO: 144726 - DNA, 17 bp, Arabidopsis thaliana
tctgtgaatctgcctac

SEQ ID NO: 144727 - DNA, 17 bp, Arabidopsis thaliana
tctgtgaatgtcgacgt

SEQ ID NO: 144728 - DNA, 17 bp, Arabidopsis thaliana
tctgtgacatctactgt

SEQ ID NO: 144729 - DNA, 17 bp, Arabidopsis thaliana
tctgtgacccaagaatt

SEQ ID NO: 144730 - DNA, 17 bp, Arabidopsis thaliana
tctgtgacggagtccca

SEQ ID NO: 144731 - DNA, 17 bp, Arabidopsis thaliana
tctgtgactcaaggtta

SEQ ID NO: 144732 - DNA, 17 bp, Arabidopsis thaliana
tctgtgactcagcttca

SEQ ID NO: 144733 - DNA, 17 bp, Arabidopsis thaliana
tctgtgacttgccgttt

SEQ ID NO: 144734 - DNA, 17 bp, Arabidopsis thaliana
tctgtgagctctgctat

SEQ ID NO: 144735 - DNA, 17 bp, Arabidopsis thaliana
tctgtgagtgaattgcg

SEQ ID NO: 144736 - DNA, 17 bp, Arabidopsis thaliana
tctgtgagtggtctggc

SEQ ID NO: 144737 - DNA, 17 bp, Arabidopsis thaliana
tctgtgataaatattcc

SEQ ID NO: 144738 - DNA, 17 bp, Arabidopsis thaliana
tctgtgatccatggatc

SEQ ID NO: 144739 - DNA, 17 bp, Arabidopsis thaliana
tctgtgatctgtcaatt

SEQ ID NO: 144740 - DNA, 17 bp, Arabidopsis thaliana
tctgtgatttgcttaac

SEQ ID NO: 144741 - DNA, 17 bp, Arabidopsis thaliana
tctgtgccaccgttgag

SEQ ID NO: 144742 - DNA, 17 bp, Arabidopsis thaliana
tctgtgccagcagccgc

SEQ ID NO: 144743 - DNA, 17 bp, Arabidopsis thaliana
tctgtgccatgactcag

SEQ ID NO: 144744 - DNA, 17 bp, Arabidopsis thaliana
tctgtgcctaccggcta

SEQ ID NO: 144745 - DNA, 17 bp, Arabidopsis thaliana
tctgtgcgatttccaat

SEQ ID NO: 144746 - DNA, 17 bp, Arabidopsis thaliana
tctgtgctgcggttatt

SEQ ID NO: 144747 - DNA, 17 bp, Arabidopsis thaliana
tctgtgctggcgacgca

SEQ ID NO: 144748 - DNA, 17 bp, Arabidopsis thaliana
tctgtggactatgaatg

SEQ ID NO: 144749 - DNA, 17 bp, Arabidopsis thaliana
tctgtggacttccggaa

SEQ ID NO: 144750 - DNA, 17 bp, Arabidopsis thaliana
tctgtggagattacggg

SEQ ID NO: 144751 - DNA, 17 bp, Arabidopsis thaliana
tctgtggcaaacttcca

SEQ ID NO: 144752 - DNA, 17 bp, Arabidopsis thaliana
tctgtggcagagaactt

SEQ ID NO: 144753 - DNA, 17 bp, Arabidopsis thaliana
tctgtggccctgcagga

SEQ ID NO: 144754 - DNA, 17 bp, Arabidopsis thaliana
tctgtggctcttgttgc

SEQ ID NO: 144755 - DNA, 17 bp, Arabidopsis thaliana
tctgtgggtcgttctgc

SEQ ID NO: 144756 - DNA, 17 bp, Arabidopsis thaliana
tctgtggttgaccaaca

SEQ ID NO: 144757 - DNA, 17 bp, Arabidopsis thaliana
tctgtgtaattgtgtgt

SEQ ID NO: 144758 - DNA, 17 bp, Arabidopsis thaliana
tctgtgtactcatcgga

SEQ ID NO: 144759 - DNA, 17 bp, Arabidopsis thaliana
tctgtgtcactatttcg

SEQ ID NO: 144760 - DNA, 17 bp, Arabidopsis thaliana
tctgtgtcatgactcag

SEQ ID NO: 144761 - DNA, 17 bp, Arabidopsis thaliana
tctgtgtcgttttcgac

SEQ ID NO: 144762 - DNA, 17 bp, Arabidopsis thaliana
tctgtgtgaagcgtgag

SEQ ID NO: 144763 - DNA, 17 bp, Arabidopsis thaliana
tctgtgtgaatcgtgag

SEQ ID NO: 144764 - DNA, 17 bp, Arabidopsis thaliana
tctgtgttttgctaacc

SEQ ID NO: 144765 - DNA, 17 bp, Arabidopsis thaliana
tctgttaaaagataacg

SEQ ID NO: 144766 - DNA, 17 bp, Arabidopsis thaliana
tctgttaaggttcctgc

SEQ ID NO: 144767 - DNA, 17 bp, Arabidopsis thaliana
tctgttactaattgtgt

SEQ ID NO: 144768 - DNA, 17 bp, Arabidopsis thaliana
tctgttactcgacctgt

SEQ ID NO: 144769 - DNA, 17 bp, Arabidopsis thaliana
tctgttacttggatctt

SEQ ID NO: 144770 - DNA, 17 bp, Arabidopsis thaliana
tctgttagcaatcagac

SEQ ID NO: 144771 - DNA, 17 bp, Arabidopsis thaliana
tctgttagtccttggat

SEQ ID NO: 144772 - DNA, 17 bp, Arabidopsis thaliana
tctgttagttggagcga

SEQ ID NO: 144773 - DNA, 17 bp, Arabidopsis thaliana
tctgttcaccatgtttg

SEQ ID NO: 144774 - DNA, 17 bp, Arabidopsis thaliana
tctgttcaccggcatcg

SEQ ID NO: 144775 - DNA, 17 bp, Arabidopsis thaliana
tctgttcacctactgcc

SEQ ID NO: 144776 - DNA, 17 bp, Arabidopsis thaliana
tctgttccgcactaact

SEQ ID NO: 144777 - DNA, 17 bp, Arabidopsis thaliana
tctgttcctctgttctg

SEQ ID NO: 144778 - DNA, 17 bp, Arabidopsis thaliana
tctgttcctctgttctt

SEQ ID NO: 144779 - DNA, 17 bp, Arabidopsis thaliana
tctgttcgctcagacgt

SEQ ID NO: 144780 - DNA, 17 bp, Arabidopsis thaliana
tctgttcggatcctgga

SEQ ID NO: 144781 - DNA, 17 bp, Arabidopsis thaliana
tctgttctagtggattg

SEQ ID NO: 144782 - DNA, 17 bp, Arabidopsis thaliana
tctgttgaacaggtgtt

SEQ ID NO: 144783 - DNA, 17 bp, Arabidopsis thaliana
tctgttgactggacttt

SEQ ID NO: 144784 - DNA, 17 bp, Arabidopsis thaliana
tctgttgccagacactg

SEQ ID NO: 144785 - DNA, 17 bp, Arabidopsis thaliana
tctgttgcgtctacgtc

SEQ ID NO: 144786 - DNA, 17 bp, Arabidopsis thaliana
tctgttgcgtctagatc

SEQ ID NO: 144787 - DNA, 17 bp, Arabidopsis thaliana
tctgttgcgttttctcc

SEQ ID NO: 144788 - DNA, 17 bp, Arabidopsis thaliana
tctgttgctatggtgcc

SEQ ID NO: 144789 - DNA, 17 bp, Arabidopsis thaliana
tctgttgctgctctgcc

SEQ ID NO: 144790 - DNA, 17 bp, Arabidopsis thaliana
tctgttgctggtaccgc

SEQ ID NO: 144791 - DNA, 17 bp, Arabidopsis thaliana
tctgttggactatcact

SEQ ID NO: 144792 - DNA, 17 bp, Arabidopsis thaliana
tctgttgggcttcgccc

SEQ ID NO: 144793 - DNA, 17 bp, Arabidopsis thaliana
tctgttggttagggact

SEQ ID NO: 144794 - DNA, 17 bp, Arabidopsis thaliana
tctgttgtcgtcctctg

SEQ ID NO: 144795 - DNA, 17 bp, Arabidopsis thaliana
tctgttgttctttgaga

SEQ ID NO: 144796 - DNA, 17 bp, Arabidopsis thaliana
tctgttgttgtttgatg

SEQ ID NO: 144797 - DNA, 17 bp, Arabidopsis thaliana
tctgtttaagtttacca

SEQ ID NO: 144798 - DNA, 17 bp, Arabidopsis thaliana
tctgtttaatcacggga

SEQ ID NO: 144799 - DNA, 17 bp, Arabidopsis thaliana
tctgtttaggattccgg

SEQ ID NO: 144800 - DNA, 17 bp, Arabidopsis thaliana
tctgtttaggcgggcct

SEQ ID NO: 144801 - DNA, 17 bp, Arabidopsis thaliana
tctgtttatgttacgct

SEQ ID NO: 144802 - DNA, 17 bp, Arabidopsis thaliana
tctgtttcacggtgtct

SEQ ID NO: 144803 - DNA, 17 bp, Arabidopsis thaliana
tctgtttcacgttggac

SEQ ID NO: 144804 - DNA, 17 bp, Arabidopsis thaliana
tctgtttccgtggcagt

SEQ ID NO: 144805 - DNA, 17 bp, Arabidopsis thaliana
tctgtttgagttggcgt

SEQ ID NO: 144806 - DNA, 17 bp, Arabidopsis thaliana
tctgtttgctgtcatgg

SEQ ID NO: 144807 - DNA, 17 bp, Arabidopsis thaliana
tctgtttggtggatggg

SEQ ID NO: 144808 - DNA, 17 bp, Arabidopsis thaliana
tctgttttaaaccttca

SEQ ID NO: 144809 - DNA, 17 bp, Arabidopsis thaliana
tctgttttcctgccaaa

SEQ ID NO: 144810 - DNA, 17 bp, Arabidopsis thaliana
tctgttttgcaggtttg

SEQ ID NO: 144811 - DNA, 17 bp, Arabidopsis thaliana
tctgttttgctccagaa

SEQ ID NO: 144812 - DNA, 17 bp, Arabidopsis thaliana
tctgtttttctgaccgt

SEQ ID NO: 144813 - DNA, 17 bp, Arabidopsis thaliana
tctgtttttggggtccg

SEQ ID NO: 144814 - DNA, 17 bp, Arabidopsis thaliana
tcttaaacttgtgttga

SEQ ID NO: 144815 - DNA, 17 bp, Arabidopsis thaliana
tcttaacctggctccga

SEQ ID NO: 144816 - DNA, 17 bp, Arabidopsis thaliana
tcttaactgagaaacta

SEQ ID NO: 144817 - DNA, 17 bp, Arabidopsis thaliana
tcttaactgtggtcatt

SEQ ID NO: 144818 - DNA, 17 bp, Arabidopsis thaliana
tcttaagaaactagccc

SEQ ID NO: 144819 - DNA, 17 bp, Arabidopsis thaliana
tcttaagtccaacatag

SEQ ID NO: 144820 - DNA, 17 bp, Arabidopsis thaliana
tcttaagtcgcctgtag

SEQ ID NO: 144821 - DNA, 17 bp, Arabidopsis thaliana
tcttaagtttttccctc

SEQ ID NO: 144822 - DNA, 17 bp, Arabidopsis thaliana
tcttaatcgcatcctgt

SEQ ID NO: 144823 - DNA, 17 bp, Arabidopsis thaliana
tcttaatcgtctcgcag

SEQ ID NO: 144824 - DNA, 17 bp, Arabidopsis thaliana
tcttaattggccgggtc

SEQ ID NO: 144825 - DNA, 17 bp, Arabidopsis thaliana
tcttaatttgtctgcgg

SEQ ID NO: 144826 - DNA, 17 bp, Arabidopsis thaliana
tcttacaaacttgatcg

SEQ ID NO: 144827 - DNA, 17 bp, Arabidopsis thaliana
tcttacagctgaggttt

SEQ ID NO: 144828 - DNA, 17 bp, Arabidopsis thaliana
tcttacatgctttcatt

SEQ ID NO: 144829 - DNA, 17 bp, Arabidopsis thaliana
tcttaccaaggttcaag

SEQ ID NO: 144830 - DNA, 17 bp, Arabidopsis thaliana
tcttaccgattcctgca

SEQ ID NO: 144831 - DNA, 17 bp, Arabidopsis thaliana
tcttaccgattgtgtcc

SEQ ID NO: 144832 - DNA, 17 bp, Arabidopsis thaliana
tcttacgccttaagatc

SEQ ID NO: 144833 - DNA, 17 bp, Arabidopsis thaliana
tcttacgccttagcacc

SEQ ID NO: 144834 - DNA, 17 bp, Arabidopsis thaliana
tcttacgcctttaagat

SEQ ID NO: 144835 - DNA, 17 bp, Arabidopsis thaliana
tcttacgcctttatgat

SEQ ID NO: 144836 - DNA, 17 bp, Arabidopsis thaliana
tcttacgcgaagcttag

SEQ ID NO: 144837 - DNA, 17 bp, Arabidopsis thaliana
tcttacgctcaacctta

SEQ ID NO: 144838 - DNA, 17 bp, Arabidopsis thaliana
tcttacgcttatgacca

SEQ ID NO: 144839 - DNA, 17 bp, Arabidopsis thaliana
tcttacggacccgtagg

SEQ ID NO: 144840 - DNA, 17 bp, Arabidopsis thaliana
tcttacggtgcccaact

SEQ ID NO: 144841 - DNA, 17 bp, Arabidopsis thaliana
tcttacggtggcggcct

SEQ ID NO: 144842 - DNA, 17 bp, Arabidopsis thaliana
tcttactatcttgggat

SEQ ID NO: 144843 - DNA, 17 bp, Arabidopsis thaliana
tcttactcgacagttcc

SEQ ID NO: 144844 - DNA, 17 bp, Arabidopsis thaliana
tcttactgagtattgga

SEQ ID NO: 144845 - DNA, 17 bp, Arabidopsis thaliana
tcttactgccgacgttg

SEQ ID NO: 144846 - DNA, 17 bp, Arabidopsis thaliana
tcttactgggtttctgg

SEQ ID NO: 144847 - DNA, 17 bp, Arabidopsis thaliana
tcttacttccatccatt

SEQ ID NO: 144848 - DNA, 17 bp, Arabidopsis thaliana
tcttactttggcctatg

SEQ ID NO: 144849 - DNA, 17 bp, Arabidopsis thaliana
tcttagatctgtcgccg

SEQ ID NO: 144850 - DNA, 17 bp, Arabidopsis thaliana
tcttagatgttgacacg

SEQ ID NO: 144851 - DNA, 17 bp, Arabidopsis thaliana
tcttagattttctggtg

SEQ ID NO: 144852 - DNA, 17 bp, Arabidopsis thaliana
tcttagcaagcgggttc

SEQ ID NO: 144853 - DNA, 17 bp, Arabidopsis thaliana
tcttagcccactcactc

SEQ ID NO: 144854 - DNA, 17 bp, Arabidopsis thaliana
tcttagccgattccttg

SEQ ID NO: 144855 - DNA, 17 bp, Arabidopsis thaliana
tcttagcggcttggccg

SEQ ID NO: 144856 - DNA, 17 bp, Arabidopsis thaliana
tcttagcgttcttagtg

SEQ ID NO: 144857 - DNA, 17 bp, Arabidopsis thaliana
tcttaggcgaagtttag

SEQ ID NO: 144858 - DNA, 17 bp, Arabidopsis thaliana
tcttaggctatgaatgg

SEQ ID NO: 144859 - DNA, 17 bp, Arabidopsis thaliana
tcttaggctgcgtttgt

SEQ ID NO: 144860 - DNA, 17 bp, Arabidopsis thaliana
tcttaggcttacaagat

SEQ ID NO: 144861 - DNA, 17 bp, Arabidopsis thaliana
tcttagggttaggcgct

SEQ ID NO: 144862 - DNA, 17 bp, Arabidopsis thaliana
tcttaggtcagattccc

SEQ ID NO: 144863 - DNA, 17 bp, Arabidopsis thaliana
tcttaggtcatttcggt

SEQ ID NO: 144864 - DNA, 17 bp, Arabidopsis thaliana
tcttaggttttctcagg

SEQ ID NO: 144865 - DNA, 17 bp, Arabidopsis thaliana
tcttagtcatcctgtag

SEQ ID NO: 144866 - DNA, 17 bp, Arabidopsis thaliana
tcttagtccatcctgta

SEQ ID NO: 144867 - DNA, 17 bp, Arabidopsis thaliana
tcttagtcccatcctgt

SEQ ID NO: 144868 - DNA, 17 bp, Arabidopsis thaliana
tcttagtcgacctgtag

SEQ ID NO: 144869 - DNA, 17 bp, Arabidopsis thaliana
tcttagtcgatcctgta

SEQ ID NO: 144870 - DNA, 17 bp, Arabidopsis thaliana
tcttagtcgatctgtag

SEQ ID NO: 144871 - DNA, 17 bp, Arabidopsis thaliana
tcttagtcgcaacctgt

SEQ ID NO: 144872 - DNA, 17 bp, Arabidopsis thaliana
tcttagtcgcaatcctg

SEQ ID NO: 144873 - DNA, 17 bp, Arabidopsis thaliana
tcttagtcgcaccctgt

SEQ ID NO: 144874 - DNA, 17 bp, Arabidopsis thaliana
tcttagtcgcaccgtag

SEQ ID NO: 144875 - DNA, 17 bp, Arabidopsis thaliana
tcttagtcgcacctgta

SEQ ID NO: 144876 - DNA, 17 bp, Arabidopsis thaliana
tcttagtcgcactgtag

SEQ ID NO: 144877 - DNA, 17 bp, Arabidopsis thaliana
tcttagtcgcagcctgt

SEQ ID NO: 144878 - DNA, 17 bp, Arabidopsis thaliana
tcttagtcgcagtagat

SEQ ID NO: 144879 - DNA, 17 bp, Arabidopsis thaliana
tcttagtcgcatccgta

SEQ ID NO: 144880 - DNA, 17 bp, Arabidopsis thaliana
tcttagtcgcatcctat

SEQ ID NO: 144881 - DNA, 17 bp, Arabidopsis thaliana
tcttagtcgcatcctga

SEQ ID NO: 144882 - DNA, 17 bp, Arabidopsis thaliana
tcttagtcgcatcctgg

SEQ ID NO: 144883 - DNA, 17 bp, Arabidopsis thaliana
tcttagtcgcatcctgt

SEQ ID NO: 144884 - DNA, 17 bp, Arabidopsis thaliana
tcttagtcgcatccttt

SEQ ID NO: 144885 - DNA, 17 bp, Arabidopsis thaliana
tcttagtcgcatgctgt

SEQ ID NO: 144886 - DNA, 17 bp, Arabidopsis thaliana
tcttagtcgcatggtag

SEQ ID NO: 144887 - DNA, 17 bp, Arabidopsis thaliana
tcttagtcgcatgtaga

SEQ ID NO: 144888 - DNA, 17 bp, Arabidopsis thaliana
tcttagtcgcattctgt

SEQ ID NO: 144889 - DNA, 17 bp, Arabidopsis thaliana
tcttagtcgcattgtag

SEQ ID NO: 144890 - DNA, 17 bp, Arabidopsis thaliana
tcttagtcgcattttgt

SEQ ID NO: 144891 - DNA, 17 bp, Arabidopsis thaliana
tcttagtcgcccctaga

SEQ ID NO: 144892 - DNA, 17 bp, Arabidopsis thaliana
tcttagtcgccctgtag

SEQ ID NO: 144893 - DNA, 17 bp, Arabidopsis thaliana
tcttagtcgcctgtaga

SEQ ID NO: 144894 - DNA, 17 bp, Arabidopsis thaliana
tcttagtcgctcctgta

SEQ ID NO: 144895 - DNA, 17 bp, Arabidopsis thaliana
tcttagtcgcttcctgt

SEQ ID NO: 144896 - DNA, 17 bp, Arabidopsis thaliana
tcttagtcggatcctgt

SEQ ID NO: 144897 - DNA, 17 bp, Arabidopsis thaliana
tcttagtcggtcctgta

SEQ ID NO: 144898 - DNA, 17 bp, Arabidopsis thaliana
tcttagtcgtatcctgt

SEQ ID NO: 144899 - DNA, 17 bp, Arabidopsis thaliana
tcttagtctcatcctgt

SEQ ID NO: 144900 - DNA, 17 bp, Arabidopsis thaliana
tcttagtctctcttgcg

SEQ ID NO: 144901 - DNA, 17 bp, Arabidopsis thaliana
tcttagtcttcagacat

SEQ ID NO: 144902 - DNA, 17 bp, Arabidopsis thaliana
tcttagtgatccgacgg

SEQ ID NO: 144903 - DNA, 17 bp, Arabidopsis thaliana
tcttagttgcggacatc

SEQ ID NO: 144904 - DNA, 17 bp, Arabidopsis thaliana
tcttagttggtggagcg

SEQ ID NO: 144905 - DNA, 17 bp, Arabidopsis thaliana
tcttatcccgttgcttc

SEQ ID NO: 144906 - DNA, 17 bp, Arabidopsis thaliana
tcttatccctactgtct

SEQ ID NO: 144907 - DNA, 17 bp, Arabidopsis thaliana
tcttatcgatcttcgcg

SEQ ID NO: 144908 - DNA, 17 bp, Arabidopsis thaliana
tcttatcgatgtgcaaa

SEQ ID NO: 144909 - DNA, 17 bp, Arabidopsis thaliana
tcttatcgattatggca

SEQ ID NO: 144910 - DNA, 17 bp, Arabidopsis thaliana
tcttatcgtgcgcctta

SEQ ID NO: 144911 - DNA, 17 bp, Arabidopsis thaliana
tcttatctgtcaccaac

SEQ ID NO: 144912 - DNA, 17 bp, Arabidopsis thaliana
tcttatgactccataac

SEQ ID NO: 144913 - DNA, 17 bp, Arabidopsis thaliana
tcttatgaggggcagct

SEQ ID NO: 144914 - DNA, 17 bp, Arabidopsis thaliana
tcttatgattcgcgtcg

SEQ ID NO: 144915 - DNA, 17 bp, Arabidopsis thaliana
tcttatgcaggaggttt

SEQ ID NO: 144916 - DNA, 17 bp, Arabidopsis thaliana
tcttatgcgtcctatct

SEQ ID NO: 144917 - DNA, 17 bp, Arabidopsis thaliana
tcttatgcgtgctcaat

SEQ ID NO: 144918 - DNA, 17 bp, Arabidopsis thaliana
tcttatggttgcagtca

SEQ ID NO: 144919 - DNA, 17 bp, Arabidopsis thaliana
tcttattcaccgcttgc

SEQ ID NO: 144920 - DNA, 17 bp, Arabidopsis thaliana
tcttattcctcatctcc

SEQ ID NO: 144921 - DNA, 17 bp, Arabidopsis thaliana
tcttattcgcagcctgt

SEQ ID NO: 144922 - DNA, 17 bp, Arabidopsis thaliana
tcttattcgcatcctgt

SEQ ID NO: 144923 - DNA, 17 bp, Arabidopsis thaliana
tcttattgactcacgtt

SEQ ID NO: 144924 - DNA, 17 bp, Arabidopsis thaliana
tcttattgggtcctaaa

SEQ ID NO: 144925 - DNA, 17 bp, Arabidopsis thaliana
tcttatttccgcagagt

SEQ ID NO: 144926 - DNA, 17 bp, Arabidopsis thaliana
tcttatttcgagatgtt

SEQ ID NO: 144927 - DNA, 17 bp, Arabidopsis thaliana
tcttatttctcgaccgc

SEQ ID NO: 144928 - DNA, 17 bp, Arabidopsis thaliana
tcttcaaacatccaatg

SEQ ID NO: 144929 - DNA, 17 bp, Arabidopsis thaliana
tcttcaaactgccgtct

SEQ ID NO: 144930 - DNA, 17 bp, Arabidopsis thaliana
tcttcaacgggagtttg

SEQ ID NO: 144931 - DNA, 17 bp, Arabidopsis thaliana
tcttcaacttgccgcag

SEQ ID NO: 144932 - DNA, 17 bp, Arabidopsis thaliana
tcttcaagctcctcagc

SEQ ID NO: 144933 - DNA, 17 bp, Arabidopsis thaliana
tcttcaaggaagtggta

SEQ ID NO: 144934 - DNA, 17 bp, Arabidopsis thaliana
tcttcaaggatttctcc

SEQ ID NO: 144935 - DNA, 17 bp, Arabidopsis thaliana
tcttcaagtgtgctccg

SEQ ID NO: 144936 - DNA, 17 bp, Arabidopsis thaliana
tcttcaagttgggactt

SEQ ID NO: 144937 - DNA, 17 bp, Arabidopsis thaliana
tcttcaatggccggcgc

SEQ ID NO: 144938 - DNA, 17 bp, Arabidopsis thaliana
tcttcacaagatttcgt

SEQ ID NO: 144939 - DNA, 17 bp, Arabidopsis thaliana
tcttcacacagttagtg

SEQ ID NO: 144940 - DNA, 17 bp, Arabidopsis thaliana
tcttcacactgcgtctt

SEQ ID NO: 144941 - DNA, 17 bp, Arabidopsis thaliana
tcttcacagaggctcag

SEQ ID NO: 144942 - DNA, 17 bp, Arabidopsis thaliana
tcttcacagcgagaagg

SEQ ID NO: 144943 - DNA, 17 bp, Arabidopsis thaliana
tcttcacagcgatttgt

SEQ ID NO: 144944 - DNA, 17 bp, Arabidopsis thaliana
tcttcaccaagtctgaa

SEQ ID NO: 144945 - DNA, 17 bp, Arabidopsis thaliana
tcttcaccaggtttgaa

SEQ ID NO: 144946 - DNA, 17 bp, Arabidopsis thaliana
tcttcaccagtcgccat

SEQ ID NO: 144947 - DNA, 17 bp, Arabidopsis thaliana
tcttcaccattctgtga

SEQ ID NO: 144948 - DNA, 17 bp, Arabidopsis thaliana
tcttcaccgccatagct

SEQ ID NO: 144949 - DNA, 17 bp, Arabidopsis thaliana
tcttcacgaatggtagc

SEQ ID NO: 144950 - DNA, 17 bp, Arabidopsis thaliana
tcttcacggttcggaaa

SEQ ID NO: 144951 - DNA, 17 bp, Arabidopsis thaliana
tcttcacgtcgggttca

SEQ ID NO: 144952 - DNA, 17 bp, Arabidopsis thaliana
tcttcagagtccacatt

SEQ ID NO: 144953 - DNA, 17 bp, Arabidopsis thaliana
tcttcagatctattgct

SEQ ID NO: 144954 - DNA, 17 bp, Arabidopsis thaliana
tcttcagcatgctttcc

SEQ ID NO: 144955 - DNA, 17 bp, Arabidopsis thaliana
tcttcagccaattgcgg

SEQ ID NO: 144956 - DNA, 17 bp, Arabidopsis thaliana
tcttcagccctttgtcg

SEQ ID NO: 144957 - DNA, 17 bp, Arabidopsis thaliana
tcttcagcctttgcgca

SEQ ID NO: 144958 - DNA, 17 bp, Arabidopsis thaliana
tcttcagctgagccaat

SEQ ID NO: 144959 - DNA, 17 bp, Arabidopsis thaliana
tcttcagcttccattgg

SEQ ID NO: 144960 - DNA, 17 bp, Arabidopsis thaliana
tcttcaggaatggctcc

SEQ ID NO: 144961 - DNA, 17 bp, Arabidopsis thaliana
tcttcaggaatggctct

SEQ ID NO: 144962 - DNA, 17 bp, Arabidopsis thaliana
tcttcaggataatcgca

SEQ ID NO: 144963 - DNA, 17 bp, Arabidopsis thaliana
tcttcaggattgactcg

SEQ ID NO: 144964 - DNA, 17 bp, Arabidopsis thaliana
tcttcaggattggctcg

SEQ ID NO: 144965 - DNA, 17 bp, Arabidopsis thaliana
tcttcaggcatagtgtc

SEQ ID NO: 144966 - DNA, 17 bp, Arabidopsis thaliana
tcttcagggtgctgttc

SEQ ID NO: 144967 - DNA, 17 bp, Arabidopsis thaliana
tcttcagggttttcttc

SEQ ID NO: 144968 - DNA, 17 bp, Arabidopsis thaliana
tcttcaggtagctgcct

SEQ ID NO: 144969 - DNA, 17 bp, Arabidopsis thaliana
tcttcaggtcgtctggt

SEQ ID NO: 144970 - DNA, 17 bp, Arabidopsis thaliana
tcttcagtagttgttgg

SEQ ID NO: 144971 - DNA, 17 bp, Arabidopsis thaliana
tcttcagtctgagatcg

SEQ ID NO: 144972 - DNA, 17 bp, Arabidopsis thaliana
tcttcagtgaattgcgt

SEQ ID NO: 144973 - DNA, 17 bp, Arabidopsis thaliana
tcttcagttattttttg

SEQ ID NO: 144974 - DNA, 17 bp, Arabidopsis thaliana
tcttcagttttgctaca

SEQ ID NO: 144975 - DNA, 17 bp, Arabidopsis thaliana
tcttcagttttgcttca

SEQ ID NO: 144976 - DNA, 17 bp, Arabidopsis thaliana
tcttcatagttacaggc

SEQ ID NO: 144977 - DNA, 17 bp, Arabidopsis thaliana
tcttcatcagaggaacg

SEQ ID NO: 144978 - DNA, 17 bp, Arabidopsis thaliana
tcttcatcaggtgactg

SEQ ID NO: 144979 - DNA, 17 bp, Arabidopsis thaliana
tcttcatcccattgcca

SEQ ID NO: 144980 - DNA, 17 bp, Arabidopsis thaliana
tcttcatcctcgggatc

SEQ ID NO: 144981 - DNA, 17 bp, Arabidopsis thaliana
tcttcatcctgttgtct

SEQ ID NO: 144982 - DNA, 17 bp, Arabidopsis thaliana
tcttcatccttttcccc

SEQ ID NO: 144983 - DNA, 17 bp, Arabidopsis thaliana
tcttcatctccattgtt

SEQ ID NO: 144984 - DNA, 17 bp, Arabidopsis thaliana
tcttcatctcctctgat

SEQ ID NO: 144985 - DNA, 17 bp, Arabidopsis thaliana
tcttcatctcgatgacc

SEQ ID NO: 144986 - DNA, 17 bp, Arabidopsis thaliana
tcttcatctctgggcac

SEQ ID NO: 144987 - DNA, 17 bp, Arabidopsis thaliana
tcttcatctgaggtctg

SEQ ID NO: 144988 - DNA, 17 bp, Arabidopsis thaliana
tcttcatctgcacatgg

SEQ ID NO: 144989 - DNA, 17 bp, Arabidopsis thaliana
tcttcatcttcaacaat

SEQ ID NO: 144990 - DNA, 17 bp, Arabidopsis thaliana
tcttcatcttcaactcg

SEQ ID NO: 144991 - DNA, 17 bp, Arabidopsis thaliana
tcttcatcttcaggttc

SEQ ID NO: 144992 - DNA, 17 bp, Arabidopsis thaliana
tcttcatggacgttgat

SEQ ID NO: 144993 - DNA, 17 bp, Arabidopsis thaliana
tcttcatgtctgcattc

SEQ ID NO: 144994 - DNA, 17 bp, Arabidopsis thaliana
tcttcatgtgatcaact

SEQ ID NO: 144995 - DNA, 17 bp, Arabidopsis thaliana
tcttcatgttgtccaca

SEQ ID NO: 144996 - DNA, 17 bp, Arabidopsis thaliana
tcttcattgaacgtgat

SEQ ID NO: 144997 - DNA, 17 bp, Arabidopsis thaliana
tcttcattgactttttg

SEQ ID NO: 144998 - DNA, 17 bp, Arabidopsis thaliana
tcttcattgtccggagc

SEQ ID NO: 144999 - DNA, 17 bp, Arabidopsis thaliana
tcttcatttcttccgac

SEQ ID NO: 145000 - DNA, 17 bp, Arabidopsis thaliana
tcttcattttcaatggt

SEQ ID NO: 145001 - DNA, 17 bp, Arabidopsis thaliana
tcttccacaagcggtag

SEQ ID NO: 145002 - DNA, 17 bp, Arabidopsis thaliana
tcttccacgatccttac

SEQ ID NO: 145003 - DNA, 17 bp, Arabidopsis thaliana
tcttccacgtcctatat

SEQ ID NO: 145004 - DNA, 17 bp, Arabidopsis thaliana
tcttccagccgctggac

SEQ ID NO: 145005 - DNA, 17 bp, Arabidopsis thaliana
tcttccagtgcatgcag

SEQ ID NO: 145006 - DNA, 17 bp, Arabidopsis thaliana
tcttccatcaatgctcg

SEQ ID NO: 145007 - DNA, 17 bp, Arabidopsis thaliana
tcttccatctgtgtccg

SEQ ID NO: 145008 - DNA, 17 bp, Arabidopsis thaliana
tcttccatcttctgctt

SEQ ID NO: 145009 - DNA, 17 bp, Arabidopsis thaliana
tcttccatgagaaacag

SEQ ID NO: 145010 - DNA, 17 bp, Arabidopsis thaliana
tcttccatggcctgaga

SEQ ID NO: 145011 - DNA, 17 bp, Arabidopsis thaliana
tcttccattgtgctgac

SEQ ID NO: 145012 - DNA, 17 bp, Arabidopsis thaliana
tcttccgaaggaccacc

SEQ ID NO: 145013 - DNA, 17 bp, Arabidopsis thaliana
tcttccgacaaaaaatg

SEQ ID NO: 145014 - DNA, 17 bp, Arabidopsis thaliana
tcttccgacaaaagatc

SEQ ID NO: 145015 - DNA, 17 bp, Arabidopsis thaliana
tcttccgacaacgtggg

SEQ ID NO: 145016 - DNA, 17 bp, Arabidopsis thaliana
tcttccgcctgattaat

SEQ ID NO: 145017 - DNA, 17 bp, Arabidopsis thaliana
tcttccgcgccaaatta

SEQ ID NO: 145018 - DNA, 17 bp, Arabidopsis thaliana
tcttccgctggattttg

SEQ ID NO: 145019 - DNA, 17 bp, Arabidopsis thaliana
tcttccggcttatgact

SEQ ID NO: 145020 - DNA, 17 bp, Arabidopsis thaliana
tcttccggttaggcgct

SEQ ID NO: 145021 - DNA, 17 bp, Arabidopsis thaliana
tcttccggttcgttaag

SEQ ID NO: 145022 - DNA, 17 bp, Arabidopsis thaliana
tcttccggtttgtgact

SEQ ID NO: 145023 - DNA, 17 bp, Arabidopsis thaliana
tcttccgtagttacaga

SEQ ID NO: 145024 - DNA, 17 bp, Arabidopsis thaliana
tcttcctatcattgtga

SEQ ID NO: 145025 - DNA, 17 bp, Arabidopsis thaliana
tcttcctatgttgggct

SEQ ID NO: 145026 - DNA, 17 bp, Arabidopsis thaliana
tcttcctcaccgacgct

SEQ ID NO: 145027 - DNA, 17 bp, Arabidopsis thaliana
tcttcctcccgtcgccg

SEQ ID NO: 145028 - DNA, 17 bp, Arabidopsis thaliana
tcttcctccgttaatgg

SEQ ID NO: 145029 - DNA, 17 bp, Arabidopsis thaliana
tcttcctccgttagtgg

SEQ ID NO: 145030 - DNA, 17 bp, Arabidopsis thaliana
tcttcctcgcagaccta

SEQ ID NO: 145031 - DNA, 17 bp, Arabidopsis thaliana
tcttcctctctccctgg

SEQ ID NO: 145032 - DNA, 17 bp, Arabidopsis thaliana
tcttcctctgctgcggc

SEQ ID NO: 145033 - DNA, 17 bp, Arabidopsis thaliana
tcttcctcttcgctgct

SEQ ID NO: 145034 - DNA, 17 bp, Arabidopsis thaliana
tcttcctgcaagctgca

SEQ ID NO: 145035 - DNA, 17 bp, Arabidopsis thaliana
tcttcctggacaaggac

SEQ ID NO: 145036 - DNA, 17 bp, Arabidopsis thaliana
tcttcctgtgatcaact

SEQ ID NO: 145037 - DNA, 17 bp, Arabidopsis thaliana
tcttccttcgcgcaggt

SEQ ID NO: 145038 - DNA, 17 bp, Arabidopsis thaliana
tcttccttcttggccgg

SEQ ID NO: 145039 - DNA, 17 bp, Arabidopsis thaliana
tcttccttgtcgctctg

SEQ ID NO: 145040 - DNA, 17 bp, Arabidopsis thaliana
tcttcgaagatcgtcga

SEQ ID NO: 145041 - DNA, 17 bp, Arabidopsis thaliana
tcttcgaccaggttttc

SEQ ID NO: 145042 - DNA, 17 bp, Arabidopsis thaliana
tcttcgagacatgtccc

SEQ ID NO: 145043 - DNA, 17 bp, Arabidopsis thaliana
tcttcgattaccaaacc

SEQ ID NO: 145044 - DNA, 17 bp, Arabidopsis thaliana
tcttcgcaacagttttt

SEQ ID NO: 145045 - DNA, 17 bp, Arabidopsis thaliana
tcttcgcacggtttagg

SEQ ID NO: 145046 - DNA, 17 bp, Arabidopsis thaliana
tcttcgcactgaaccga

SEQ ID NO: 145047 - DNA, 17 bp, Arabidopsis thaliana
tcttcgcaggtgagaga

SEQ ID NO: 145048 - DNA, 17 bp, Arabidopsis thaliana
tcttcgcatcctgtaga

SEQ ID NO: 145049 - DNA, 17 bp, Arabidopsis thaliana
tcttcgccgacgaattc

SEQ ID NO: 145050 - DNA, 17 bp, Arabidopsis thaliana
tcttcgcgagttcgaga

SEQ ID NO: 145051 - DNA, 17 bp, Arabidopsis thaliana
tcttcgcgggttaggtg

SEQ ID NO: 145052 - DNA, 17 bp, Arabidopsis thaliana
tcttcgctataggggat

SEQ ID NO: 145053 - DNA, 17 bp, Arabidopsis thaliana
tcttcgcttcaacgacc

SEQ ID NO: 145054 - DNA, 17 bp, Arabidopsis thaliana
tcttcggaaaaccggcg

SEQ ID NO: 145055 - DNA, 17 bp, Arabidopsis thaliana
tcttcggaaaggtgcaa

SEQ ID NO: 145056 - DNA, 17 bp, Arabidopsis thaliana
tcttcggatcgtctaca

SEQ ID NO: 145057 - DNA, 17 bp, Arabidopsis thaliana
tcttcggcttgtccctt

SEQ ID NO: 145058 - DNA, 17 bp, Arabidopsis thaliana
tcttcggggacaaggtg

SEQ ID NO: 145059 - DNA, 17 bp, Arabidopsis thaliana
tcttcgggtatccaagc

SEQ ID NO: 145060 - DNA, 17 bp, Arabidopsis thaliana
tcttcgggtcccaccgg

SEQ ID NO: 145061 - DNA, 17 bp, Arabidopsis thaliana
tcttcggtgtgatggca

SEQ ID NO: 145062 - DNA, 17 bp, Arabidopsis thaliana
tcttcggttctgtggca

SEQ ID NO: 145063 - DNA, 17 bp, Arabidopsis thaliana
tcttcggttctgttgca

SEQ ID NO: 145064 - DNA, 17 bp, Arabidopsis thaliana
tcttcggttttgtggca

SEQ ID NO: 145065 - DNA, 17 bp, Arabidopsis thaliana
tcttcgtaaggaatgtc

SEQ ID NO: 145066 - DNA, 17 bp, Arabidopsis thaliana
tcttcgtcaatgtccgc

SEQ ID NO: 145067 - DNA, 17 bp, Arabidopsis thaliana
tcttcgtcagggtccag

SEQ ID NO: 145068 - DNA, 17 bp, Arabidopsis thaliana
tcttcgtccagtgtcac

SEQ ID NO: 145069 - DNA, 17 bp, Arabidopsis thaliana
tcttcgtcggatttggc

SEQ ID NO: 145070 - DNA, 17 bp, Arabidopsis thaliana
tcttcgtctccggtgag

SEQ ID NO: 145071 - DNA, 17 bp, Arabidopsis thaliana
tcttcgtctgtcaggta

SEQ ID NO: 145072 - DNA, 17 bp, Arabidopsis thaliana
tcttcgtctgttgctat

SEQ ID NO: 145073 - DNA, 17 bp, Arabidopsis thaliana
tcttcgtcttcgctggc

SEQ ID NO: 145074 - DNA, 17 bp, Arabidopsis thaliana
tcttcgtgagctcagag

SEQ ID NO: 145075 - DNA, 17 bp, Arabidopsis thaliana
tcttcgtggtccaggtc

SEQ ID NO: 145076 - DNA, 17 bp, Arabidopsis thaliana
tcttcgttttgcaatta

SEQ ID NO: 145077 - DNA, 17 bp, Arabidopsis thaliana
tcttctaaagtctgaca

SEQ ID NO: 145078 - DNA, 17 bp, Arabidopsis thaliana
tcttctaaatgaaaccc

SEQ ID NO: 145079 - DNA, 17 bp, Arabidopsis thaliana
tcttctaactgccaagc

SEQ ID NO: 145080 - DNA, 17 bp, Arabidopsis thaliana
tcttctaagaagtattt

SEQ ID NO: 145081 - DNA, 17 bp, Arabidopsis thaliana
tcttctaagaagtctgt

SEQ ID NO: 145082 - DNA, 17 bp, Arabidopsis thaliana
tcttctaagggattgag

SEQ ID NO: 145083 - DNA, 17 bp, Arabidopsis thaliana
tcttctacaggctttcc

SEQ ID NO: 145084 - DNA, 17 bp, Arabidopsis thaliana
tcttctacctcagcagg

SEQ ID NO: 145085 - DNA, 17 bp, Arabidopsis thaliana
tcttctacctccgtggc

SEQ ID NO: 145086 - DNA, 17 bp, Arabidopsis thaliana
tcttctacgatccgcgt

SEQ ID NO: 145087 - DNA, 17 bp, Arabidopsis thaliana
tcttctacggttgtgtc

SEQ ID NO: 145088 - DNA, 17 bp, Arabidopsis thaliana
tcttctagcctctgtaa

SEQ ID NO: 145089 - DNA, 17 bp, Arabidopsis thaliana
tcttctaggtcctccct

SEQ ID NO: 145090 - DNA, 17 bp, Arabidopsis thaliana
tcttctaggtttgccaa

SEQ ID NO: 145091 - DNA, 17 bp, Arabidopsis thaliana
tcttctattgatgttct

SEQ ID NO: 145092 - DNA, 17 bp, Arabidopsis thaliana
tcttctattgatgtttt

SEQ ID NO: 145093 - DNA, 17 bp, Arabidopsis thaliana
tcttctattgggttctt

SEQ ID NO: 145094 - DNA, 17 bp, Arabidopsis thaliana
tcttctattgttgtgca

SEQ ID NO: 145095 - DNA, 17 bp, Arabidopsis thaliana
tcttctatttcttttgg

SEQ ID NO: 145096 - DNA, 17 bp, Arabidopsis thaliana
tcttctatttcttttgt

SEQ ID NO: 145097 - DNA, 17 bp, Arabidopsis thaliana
tcttctatttggtcatt

SEQ ID NO: 145098 - DNA, 17 bp, Arabidopsis thaliana
tcttctcactgccgcat

SEQ ID NO: 145099 - DNA, 17 bp, Arabidopsis thaliana
tcttctcagctctttga

SEQ ID NO: 145100 - DNA, 17 bp, Arabidopsis thaliana
tcttctcagtttttttt

SEQ ID NO: 145101 - DNA, 17 bp, Arabidopsis thaliana
tcttctcattgcggcat

SEQ ID NO: 145102 - DNA, 17 bp, Arabidopsis thaliana
tcttctcattgcggcgt

SEQ ID NO: 145103 - DNA, 17 bp, Arabidopsis thaliana
tcttctcatttcatcga

SEQ ID NO: 145104 - DNA, 17 bp, Arabidopsis thaliana
tcttctccatgctcttg

SEQ ID NO: 145105 - DNA, 17 bp, Arabidopsis thaliana
tcttctccgagatgtgg

SEQ ID NO: 145106 - DNA, 17 bp, Arabidopsis thaliana
tcttctccgattagact

SEQ ID NO: 145107 - DNA, 17 bp, Arabidopsis thaliana
tcttctccgttcgaatt

SEQ ID NO: 145108 - DNA, 17 bp, Arabidopsis thaliana
tcttctccgttgctatg

SEQ ID NO: 145109 - DNA, 17 bp, Arabidopsis thaliana
tcttctccttaacttgg

SEQ ID NO: 145110 - DNA, 17 bp, Arabidopsis thaliana
tcttctccttcaagttt

SEQ ID NO: 145111 - DNA, 17 bp, Arabidopsis thaliana
tcttctccttctccatg

SEQ ID NO: 145112 - DNA, 17 bp, Arabidopsis thaliana
tcttctccttcttgctt

SEQ ID NO: 145113 - DNA, 17 bp, Arabidopsis thaliana
tcttctcgatgatagcg

SEQ ID NO: 145114 - DNA, 17 bp, Arabidopsis thaliana
tcttctcgcctggaacc

SEQ ID NO: 145115 - DNA, 17 bp, Arabidopsis thaliana
tcttctcggctacgtaa

SEQ ID NO: 145116 - DNA, 17 bp, Arabidopsis thaliana
tcttctcgtcgaccgtt

SEQ ID NO: 145117 - DNA, 17 bp, Arabidopsis thaliana
tcttctctccgctcggc

SEQ ID NO: 145118 - DNA, 17 bp, Arabidopsis thaliana
tcttctctgacagaatc

SEQ ID NO: 145119 - DNA, 17 bp, Arabidopsis thaliana
tcttctctgatcaagga

SEQ ID NO: 145120 - DNA, 17 bp, Arabidopsis thaliana
tcttctctgattacgtc

SEQ ID NO: 145121 - DNA, 17 bp, Arabidopsis thaliana
tcttctctgtagtcttg

SEQ ID NO: 145122 - DNA, 17 bp, Arabidopsis thaliana
tcttctctttctccatg

SEQ ID NO: 145123 - DNA, 17 bp, Arabidopsis thaliana
tcttctgaaaggtgcaa

SEQ ID NO: 145124 - DNA, 17 bp, Arabidopsis thaliana
tcttctgaaattacggc

SEQ ID NO: 145125 - DNA, 17 bp, Arabidopsis thaliana
tcttctgaatcggtgtg

SEQ ID NO: 145126 - DNA, 17 bp, Arabidopsis thaliana
tcttctgacttaggctc

SEQ ID NO: 145127 - DNA, 17 bp, Arabidopsis thaliana
tcttctgagaagggttc

SEQ ID NO: 145128 - DNA, 17 bp, Arabidopsis thaliana
tcttctgagctatcgct

SEQ ID NO: 145129 - DNA, 17 bp, Arabidopsis thaliana
tcttctgcaaaccgggg

SEQ ID NO: 145130 - DNA, 17 bp, Arabidopsis thaliana
tcttctgcaactggctc

SEQ ID NO: 145131 - DNA, 17 bp, Arabidopsis thaliana
tcttctgcaactgttga

SEQ ID NO: 145132 - DNA, 17 bp, Arabidopsis thaliana
tcttctgcaagaccacg

SEQ ID NO: 145133 - DNA, 17 bp, Arabidopsis thaliana
tcttctgcagttttggg

SEQ ID NO: 145134 - DNA, 17 bp, Arabidopsis thaliana
tcttctgcgccgctttt

SEQ ID NO: 145135 - DNA, 17 bp, Arabidopsis thaliana
tcttctgcgttcgaatt

SEQ ID NO: 145136 - DNA, 17 bp, Arabidopsis thaliana
tcttctgctaaggtttg

SEQ ID NO: 145137 - DNA, 17 bp, Arabidopsis thaliana
tcttctgctttgctagt

SEQ ID NO: 145138 - DNA, 17 bp, Arabidopsis thaliana
tcttctggccattcatc

SEQ ID NO: 145139 - DNA, 17 bp, Arabidopsis thaliana
tcttctggctcactcaa

SEQ ID NO: 145140 - DNA, 17 bp, Arabidopsis thaliana
tcttctggttcgttctt

SEQ ID NO: 145141 - DNA, 17 bp, Arabidopsis thaliana
tcttctgtgtaccaaga

SEQ ID NO: 145142 - DNA, 17 bp, Arabidopsis thaliana
tcttctgttatcagtga

SEQ ID NO: 145143 - DNA, 17 bp, Arabidopsis thaliana
tcttctgttctgtctgc

SEQ ID NO: 145144 - DNA, 17 bp, Arabidopsis thaliana
tcttcttagccgagtac

SEQ ID NO: 145145 - DNA, 17 bp, Arabidopsis thaliana
tcttcttaggagcaacc

SEQ ID NO: 145146 - DNA, 17 bp, Arabidopsis thaliana
tcttcttatcaagggac

SEQ ID NO: 145147 - DNA, 17 bp, Arabidopsis thaliana
tcttcttcagatctatt

SEQ ID NO: 145148 - DNA, 17 bp, Arabidopsis thaliana
tcttcttccagcgtttc

SEQ ID NO: 145149 - DNA, 17 bp, Arabidopsis thaliana
tcttcttcctcagtttc

SEQ ID NO: 145150 - DNA, 17 bp, Arabidopsis thaliana
tcttcttcctcttcgct

SEQ ID NO: 145151 - DNA, 17 bp, Arabidopsis thaliana
tcttcttccttttcgct

SEQ ID NO: 145152 - DNA, 17 bp, Arabidopsis thaliana
tcttcttcgggtatcca

SEQ ID NO: 145153 - DNA, 17 bp, Arabidopsis thaliana
tcttcttcggttgtact

SEQ ID NO: 145154 - DNA, 17 bp, Arabidopsis thaliana
tcttcttctcacttgtg

SEQ ID NO: 145155 - DNA, 17 bp, Arabidopsis thaliana
tcttcttctccatgcgc

SEQ ID NO: 145156 - DNA, 17 bp, Arabidopsis thaliana
tcttcttctgaggggca

SEQ ID NO: 145157 - DNA, 17 bp, Arabidopsis thaliana
tcttcttctgcaactgg

SEQ ID NO: 145158 - DNA, 17 bp, Arabidopsis thaliana
tcttcttctggcgattt

SEQ ID NO: 145159 - DNA, 17 bp, Arabidopsis thaliana
tcttcttcttcgggtat

SEQ ID NO: 145160 - DNA, 17 bp, Arabidopsis thaliana
tcttcttcttctcttgc

SEQ ID NO: 145161 - DNA, 17 bp, Arabidopsis thaliana
tcttcttcttcttcatg

SEQ ID NO: 145162 - DNA, 17 bp, Arabidopsis thaliana
tcttcttcttgcagtct

SEQ ID NO: 145163 - DNA, 17 bp, Arabidopsis thaliana
tcttcttcttgcgtcga

SEQ ID NO: 145164 - DNA, 17 bp, Arabidopsis thaliana
tcttcttctttcagtct

SEQ ID NO: 145165 - DNA, 17 bp, Arabidopsis thaliana
tcttcttctttggcttg

SEQ ID NO: 145166 - DNA, 17 bp, Arabidopsis thaliana
tcttcttctttggtcga

SEQ ID NO: 145167 - DNA, 17 bp, Arabidopsis thaliana
tcttcttctttggttga

SEQ ID NO: 145168 - DNA, 17 bp, Arabidopsis thaliana
tcttcttgcttctcaaa

SEQ ID NO: 145169 - DNA, 17 bp, Arabidopsis thaliana
tcttcttggaaaactgt

SEQ ID NO: 145170 - DNA, 17 bp, Arabidopsis thaliana
tcttcttggcagatttg

SEQ ID NO: 145171 - DNA, 17 bp, Arabidopsis thaliana
tcttcttggggttgtag

SEQ ID NO: 145172 - DNA, 17 bp, Arabidopsis thaliana
tcttcttggttgaactc

SEQ ID NO: 145173 - DNA, 17 bp, Arabidopsis thaliana
tcttcttggtttccctg

SEQ ID NO: 145174 - DNA, 17 bp, Arabidopsis thaliana
tcttcttgtctctggac

SEQ ID NO: 145175 - DNA, 17 bp, Arabidopsis thaliana
tcttcttgtggcctttt

SEQ ID NO: 145176 - DNA, 17 bp, Arabidopsis thaliana
tcttctttaatctcgac

SEQ ID NO: 145177 - DNA, 17 bp, Arabidopsis thaliana
tcttctttctgggagat

SEQ ID NO: 145178 - DNA, 17 bp, Arabidopsis thaliana
tcttctttgactctatc

SEQ ID NO: 145179 - DNA, 17 bp, Arabidopsis thaliana
tcttctttgctttcttg

SEQ ID NO: 145180 - DNA, 17 bp, Arabidopsis thaliana
tcttctttgggcgatga

SEQ ID NO: 145181 - DNA, 17 bp, Arabidopsis thaliana
tcttctttgggtctgcc

SEQ ID NO: 145182 - DNA, 17 bp, Arabidopsis thaliana
tcttctttgtcgctttg

SEQ ID NO: 145183 - DNA, 17 bp, Arabidopsis thaliana
tcttctttgtgataggc

SEQ ID NO: 145184 - DNA, 17 bp, Arabidopsis thaliana
tcttctttgtgtctgcc

SEQ ID NO: 145185 - DNA, 17 bp, Arabidopsis thaliana
tcttctttgttgtcgct

SEQ ID NO: 145186 - DNA, 17 bp, Arabidopsis thaliana
tcttcttttgcaggttt

SEQ ID NO: 145187 - DNA, 17 bp, Arabidopsis thaliana
tcttcttttgttgttga

SEQ ID NO: 145188 - DNA, 17 bp, Arabidopsis thaliana
tcttctttttgaggttg

SEQ ID NO: 145189 - DNA, 17 bp, Arabidopsis thaliana
tcttgaaaacgaaggcc

SEQ ID NO: 145190 - DNA, 17 bp, Arabidopsis thaliana
tcttgaaaacgcaggcc

SEQ ID NO: 145191 - DNA, 17 bp, Arabidopsis thaliana
tcttgaaaatccggagg

SEQ ID NO: 145192 - DNA, 17 bp, Arabidopsis thaliana
tcttgaaacacggacca

SEQ ID NO: 145193 - DNA, 17 bp, Arabidopsis thaliana
tcttgaaaccgtttgct

SEQ ID NO: 145194 - DNA, 17 bp, Arabidopsis thaliana
tcttgaaacttatttac

SEQ ID NO: 145195 - DNA, 17 bp, Arabidopsis thaliana
tcttgaaactttgatcg

SEQ ID NO: 145196 - DNA, 17 bp, Arabidopsis thaliana
tcttgaacgggcttgat

SEQ ID NO: 145197 - DNA, 17 bp, Arabidopsis thaliana
tcttgaacggtccagat

SEQ ID NO: 145198 - DNA, 17 bp, Arabidopsis thaliana
tcttgaacttggttgat

SEQ ID NO: 145199 - DNA, 17 bp, Arabidopsis thaliana
tcttgaatcaactcttc

SEQ ID NO: 145200 - DNA, 17 bp, Arabidopsis thaliana
tcttgaatccgtggtgc

SEQ ID NO: 145201 - DNA, 17 bp, Arabidopsis thaliana
tcttgaatctcggctat

SEQ ID NO: 145202 - DNA, 17 bp, Arabidopsis thaliana
tcttgaatgctggggct

SEQ ID NO: 145203 - DNA, 17 bp, Arabidopsis thaliana
tcttgaattgatcatct

SEQ ID NO: 145204 - DNA, 17 bp, Arabidopsis thaliana
tcttgaatttgaaccaa

SEQ ID NO: 145205 - DNA, 17 bp, Arabidopsis thaliana
tcttgacaagtctcaaa

SEQ ID NO: 145206 - DNA, 17 bp, Arabidopsis thaliana
tcttgacagttggtgca

SEQ ID NO: 145207 - DNA, 17 bp, Arabidopsis thaliana
tcttgacgtcattgacc

SEQ ID NO: 145208 - DNA, 17 bp, Arabidopsis thaliana
tcttgactgtagaatga

SEQ ID NO: 145209 - DNA, 17 bp, Arabidopsis thaliana
tcttgactgtgatgttg

SEQ ID NO: 145210 - DNA, 17 bp, Arabidopsis thaliana
tcttgagaccatcttga

SEQ ID NO: 145211 - DNA, 17 bp, Arabidopsis thaliana
tcttgagcagccgcaga

SEQ ID NO: 145212 - DNA, 17 bp, Arabidopsis thaliana
tcttgagccgtgccaat

SEQ ID NO: 145213 - DNA, 17 bp, Arabidopsis thaliana
tcttgagctttccgaca

SEQ ID NO: 145214 - DNA, 17 bp, Arabidopsis thaliana
tcttgaggtccctactg

SEQ ID NO: 145215 - DNA, 17 bp, Arabidopsis thaliana
tcttgatatcggcttga

SEQ ID NO: 145216 - DNA, 17 bp, Arabidopsis thaliana
tcttgatatttgcttga

SEQ ID NO: 145217 - DNA, 17 bp, Arabidopsis thaliana
tcttgatcacgagttga

SEQ ID NO: 145218 - DNA, 17 bp, Arabidopsis thaliana
tcttgatcccttgctag

SEQ ID NO: 145219 - DNA, 17 bp, Arabidopsis thaliana
tcttgatcctgcaagat

SEQ ID NO: 145220 - DNA, 17 bp, Arabidopsis thaliana
tcttgatccttcgatgt

SEQ ID NO: 145221 - DNA, 17 bp, Arabidopsis thaliana
tcttgatcgaggatgtt

SEQ ID NO: 145222 - DNA, 17 bp, Arabidopsis thaliana
tcttgatcgctaagtca

SEQ ID NO: 145223 - DNA, 17 bp, Arabidopsis thaliana
tcttgatcgtttgggtg

SEQ ID NO: 145224 - DNA, 17 bp, Arabidopsis thaliana
tcttgatcgtttggttg

SEQ ID NO: 145225 - DNA, 17 bp, Arabidopsis thaliana
tcttgatctgtcgcatt

SEQ ID NO: 145226 - DNA, 17 bp, Arabidopsis thaliana
tcttgatgatgaacagg

SEQ ID NO: 145227 - DNA, 17 bp, Arabidopsis thaliana
tcttgatgatttgcctt

SEQ ID NO: 145228 - DNA, 17 bp, Arabidopsis thaliana
tcttgattctatgggtg

SEQ ID NO: 145229 - DNA, 17 bp, Arabidopsis thaliana
tcttgattgtcgacacc

SEQ ID NO: 145230 - DNA, 17 bp, Arabidopsis thaliana
tcttgattgtcgactcc

SEQ ID NO: 145231 - DNA, 17 bp, Arabidopsis thaliana
tcttgatttaccgctcc

SEQ ID NO: 145232 - DNA, 17 bp, Arabidopsis thaliana
tcttgatttaccgctct

SEQ ID NO: 145233 - DNA, 17 bp, Arabidopsis thaliana
tcttgatttccgacagc

SEQ ID NO: 145234 - DNA, 17 bp, Arabidopsis thaliana
tcttgcaaaggttttgc

SEQ ID NO: 145235 - DNA, 17 bp, Arabidopsis thaliana
tcttgcaaatcaagtaa

SEQ ID NO: 145236 - DNA, 17 bp, Arabidopsis thaliana
tcttgcaggagcaggtt

SEQ ID NO: 145237 - DNA, 17 bp, Arabidopsis thaliana
tcttgccaccaacagac

SEQ ID NO: 145238 - DNA, 17 bp, Arabidopsis thaliana
tcttgccagtccagcgg

SEQ ID NO: 145239 - DNA, 17 bp, Arabidopsis thaliana
tcttgccccgatgttgt

SEQ ID NO: 145240 - DNA, 17 bp, Arabidopsis thaliana
tcttgccgaacaggggg

SEQ ID NO: 145241 - DNA, 17 bp, Arabidopsis thaliana
tcttgccggaagacaga

SEQ ID NO: 145242 - DNA, 17 bp, Arabidopsis thaliana
tcttgccggcgttgtta

SEQ ID NO: 145243 - DNA, 17 bp, Arabidopsis thaliana
tcttgccggtggccgat

SEQ ID NO: 145244 - DNA, 17 bp, Arabidopsis thaliana
tcttgccgtcatgacct

SEQ ID NO: 145245 - DNA, 17 bp, Arabidopsis thaliana
tcttgcctcttgctatt

SEQ ID NO: 145246 - DNA, 17 bp, Arabidopsis thaliana
tcttgcgccatatgtac

SEQ ID NO: 145247 - DNA, 17 bp, Arabidopsis thaliana
tcttgcggcggttgcga

SEQ ID NO: 145248 - DNA, 17 bp, Arabidopsis thaliana
tcttgcgggaatgagct

SEQ ID NO: 145249 - DNA, 17 bp, Arabidopsis thaliana
tcttgcgggagaagcca

SEQ ID NO: 145250 - DNA, 17 bp, Arabidopsis thaliana
tcttgcggttgcgggcg

SEQ ID NO: 145251 - DNA, 17 bp, Arabidopsis thaliana
tcttgctcaagacgctt

SEQ ID NO: 145252 - DNA, 17 bp, Arabidopsis thaliana
tcttgctcaggcgttcc

SEQ ID NO: 145253 - DNA, 17 bp, Arabidopsis thaliana
tcttgctcatcttcagc

SEQ ID NO: 145254 - DNA, 17 bp, Arabidopsis thaliana
tcttgctccaggtcatc

SEQ ID NO: 145255 - DNA, 17 bp, Arabidopsis thaliana
tcttgctcctcatcact

SEQ ID NO: 145256 - DNA, 17 bp, Arabidopsis thaliana
tcttgctctgatctcca

SEQ ID NO: 145257 - DNA, 17 bp, Arabidopsis thaliana
tcttgctgagccgcgaa

SEQ ID NO: 145258 - DNA, 17 bp, Arabidopsis thaliana
tcttgctgcagtagtgt

SEQ ID NO: 145259 - DNA, 17 bp, Arabidopsis thaliana
tcttgctgtggctgtca

SEQ ID NO: 145260 - DNA, 17 bp, Arabidopsis thaliana
tcttgcttccatcttgg

SEQ ID NO: 145261 - DNA, 17 bp, Arabidopsis thaliana
tcttgcttctcactgtt

SEQ ID NO: 145262 - DNA, 17 bp, Arabidopsis thaliana
tcttgcttctttcgtcg

SEQ ID NO: 145263 - DNA, 17 bp, Arabidopsis thaliana
tcttgcttgagccatcg

SEQ ID NO: 145264 - DNA, 17 bp, Arabidopsis thaliana
tcttgctttctctcatg

SEQ ID NO: 145265 - DNA, 17 bp, Arabidopsis thaliana
tcttgcttttggcaaat

SEQ ID NO: 145266 - DNA, 17 bp, Arabidopsis thaliana
tcttggaaacttgtgtt

SEQ ID NO: 145267 - DNA, 17 bp, Arabidopsis thaliana
tcttggaacacggacca

SEQ ID NO: 145268 - DNA, 17 bp, Arabidopsis thaliana
tcttggaacgaaactaa

SEQ ID NO: 145269 - DNA, 17 bp, Arabidopsis thaliana
tcttggaacgctcttgc

SEQ ID NO: 145270 - DNA, 17 bp, Arabidopsis thaliana
tcttggaactgactgct

SEQ ID NO: 145271 - DNA, 17 bp, Arabidopsis thaliana
tcttggaaggattacgg

SEQ ID NO: 145272 - DNA, 17 bp, Arabidopsis thaliana
tcttggaatctccgtcg

SEQ ID NO: 145273 - DNA, 17 bp, Arabidopsis thaliana
tcttggaattgggttgt

SEQ ID NO: 145274 - DNA, 17 bp, Arabidopsis thaliana
tcttggacatattgtag

SEQ ID NO: 145275 - DNA, 17 bp, Arabidopsis thaliana
tcttggacatttcctcg

SEQ ID NO: 145276 - DNA, 17 bp, Arabidopsis thaliana
tcttggaccaggcttca

SEQ ID NO: 145277 - DNA, 17 bp, Arabidopsis thaliana
tcttggaccatataggc

SEQ ID NO: 145278 - DNA, 17 bp, Arabidopsis thaliana
tcttggaccggttggta

SEQ ID NO: 145279 - DNA, 17 bp, Arabidopsis thaliana
tcttggaccgtaagttg

SEQ ID NO: 145280 - DNA, 17 bp, Arabidopsis thaliana
tcttggacctaggactt

SEQ ID NO: 145281 - DNA, 17 bp, Arabidopsis thaliana
tcttggactacttgatg

SEQ ID NO: 145282 - DNA, 17 bp, Arabidopsis thaliana
tcttggactgaagggag

SEQ ID NO: 145283 - DNA, 17 bp, Arabidopsis thaliana
tcttggactggtatcac

SEQ ID NO: 145284 - DNA, 17 bp, Arabidopsis thaliana
tcttggatccgccactg

SEQ ID NO: 145285 - DNA, 17 bp, Arabidopsis thaliana
tcttggatccgccattg

SEQ ID NO: 145286 - DNA, 17 bp, Arabidopsis thaliana
tcttggattccagcttc

SEQ ID NO: 145287 - DNA, 17 bp, Arabidopsis thaliana
tcttggattgcaggaat

SEQ ID NO: 145288 - DNA, 17 bp, Arabidopsis thaliana
tcttggatttccgtcgg

SEQ ID NO: 145289 - DNA, 17 bp, Arabidopsis thaliana
tcttggcactatggccc

SEQ ID NO: 145290 - DNA, 17 bp, Arabidopsis thaliana
tcttggcactgacatct

SEQ ID NO: 145291 - DNA, 17 bp, Arabidopsis thaliana
tcttggccgagggcacg

SEQ ID NO: 145292 - DNA, 17 bp, Arabidopsis thaliana
tcttggcgtatgcgggt

SEQ ID NO: 145293 - DNA, 17 bp, Arabidopsis thaliana
tcttggcgtgcagtgac

SEQ ID NO: 145294 - DNA, 17 bp, Arabidopsis thaliana
tcttggctttggctgag

SEQ ID NO: 145295 - DNA, 17 bp, Arabidopsis thaliana
tcttgggattggctttg

SEQ ID NO: 145296 - DNA, 17 bp, Arabidopsis thaliana
tcttgggcactgcaagt

SEQ ID NO: 145297 - DNA, 17 bp, Arabidopsis thaliana
tcttgggccgatgatgt

SEQ ID NO: 145298 - DNA, 17 bp, Arabidopsis thaliana
tcttgggcttcctttaa

SEQ ID NO: 145299 - DNA, 17 bp, Arabidopsis thaliana
tcttgggcttcctttgg

SEQ ID NO: 145300 - DNA, 17 bp, Arabidopsis thaliana
tcttgggtatgccaatc

SEQ ID NO: 145301 - DNA, 17 bp, Arabidopsis thaliana
tcttgggtcaactatgg

SEQ ID NO: 145302 - DNA, 17 bp, Arabidopsis thaliana
tcttgggtggttttggc

SEQ ID NO: 145303 - DNA, 17 bp, Arabidopsis thaliana
tcttggtccatcttagc

SEQ ID NO: 145304 - DNA, 17 bp, Arabidopsis thaliana
tcttggtccattacatt

SEQ ID NO: 145305 - DNA, 17 bp, Arabidopsis thaliana
tcttggtcggtgttgcg

SEQ ID NO: 145306 - DNA, 17 bp, Arabidopsis thaliana
tcttggtctcatattgc

SEQ ID NO: 145307 - DNA, 17 bp, Arabidopsis thaliana
tcttggtctgcaaagag

SEQ ID NO: 145308 - DNA, 17 bp, Arabidopsis thaliana
tcttggtctgtgttgcg

SEQ ID NO: 145309 - DNA, 17 bp, Arabidopsis thaliana
tcttggtcttggctgag

SEQ ID NO: 145310 - DNA, 17 bp, Arabidopsis thaliana
tcttggtgatgaaatta

SEQ ID NO: 145311 - DNA, 17 bp, Arabidopsis thaliana
tcttggttagttgctgc

SEQ ID NO: 145312 - DNA, 17 bp, Arabidopsis thaliana
tcttggttcaacttgca

SEQ ID NO: 145313 - DNA, 17 bp, Arabidopsis thaliana
tcttggttcaagcatct

SEQ ID NO: 145314 - DNA, 17 bp, Arabidopsis thaliana
tcttggttggagctgcg

SEQ ID NO: 145315 - DNA, 17 bp, Arabidopsis thaliana
tcttggttgtcggcacc

SEQ ID NO: 145316 - DNA, 17 bp, Arabidopsis thaliana
tcttggtttttggaccg

SEQ ID NO: 145317 - DNA, 17 bp, Arabidopsis thaliana
tcttgtaaagccctgtt

SEQ ID NO: 145318 - DNA, 17 bp, Arabidopsis thaliana
tcttgtaacacggacca

SEQ ID NO: 145319 - DNA, 17 bp, Arabidopsis thaliana
tcttgtaaccgagcaac

SEQ ID NO: 145320 - DNA, 17 bp, Arabidopsis thaliana
tcttgtacacaccgccc

SEQ ID NO: 145321 - DNA, 17 bp, Arabidopsis thaliana
tcttgtacaggtctcga

SEQ ID NO: 145322 - DNA, 17 bp, Arabidopsis thaliana
tcttgtactaacgtgct

SEQ ID NO: 145323 - DNA, 17 bp, Arabidopsis thaliana
tcttgtcacaggattac

SEQ ID NO: 145324 - DNA, 17 bp, Arabidopsis thaliana
tcttgtcaccatttacg

SEQ ID NO: 145325 - DNA, 17 bp, Arabidopsis thaliana
tcttgtcatctgctgct

SEQ ID NO: 145326 - DNA, 17 bp, Arabidopsis thaliana
tcttgtcccttcggtcg

SEQ ID NO: 145327 - DNA, 17 bp, Arabidopsis thaliana
tcttgtccgactttgtg

SEQ ID NO: 145328 - DNA, 17 bp, Arabidopsis thaliana
tcttgtccgctgcctcc

SEQ ID NO: 145329 - DNA, 17 bp, Arabidopsis thaliana
tcttgtcctggaccatt

SEQ ID NO: 145330 - DNA, 17 bp, Arabidopsis thaliana
tcttgtcgatgagttgg

SEQ ID NO: 145331 - DNA, 17 bp, Arabidopsis thaliana
tcttgtcgatggacgtt

SEQ ID NO: 145332 - DNA, 17 bp, Arabidopsis thaliana
tcttgtcgccggtagtg

SEQ ID NO: 145333 - DNA, 17 bp, Arabidopsis thaliana
tcttgtcgctgagtgac

SEQ ID NO: 145334 - DNA, 17 bp, Arabidopsis thaliana
tcttgtcgctgcgactg

SEQ ID NO: 145335 - DNA, 17 bp, Arabidopsis thaliana
tcttgtcgtctgcccgg

SEQ ID NO: 145336 - DNA, 17 bp, Arabidopsis thaliana
tcttgtcgtgacttggt

SEQ ID NO: 145337 - DNA, 17 bp, Arabidopsis thaliana
tcttgtcgtgcgcgttg

SEQ ID NO: 145338 - DNA, 17 bp, Arabidopsis thaliana
tcttgtctaatccctga

SEQ ID NO: 145339 - DNA, 17 bp, Arabidopsis thaliana
tcttgtctctggacttc

SEQ ID NO: 145340 - DNA, 17 bp, Arabidopsis thaliana
tcttgtctgccactgag

SEQ ID NO: 145341 - DNA, 17 bp, Arabidopsis thaliana
tcttgtcttaggcgcaa

SEQ ID NO: 145342 - DNA, 17 bp, Arabidopsis thaliana
tcttgtcttcaagggcc

SEQ ID NO: 145343 - DNA, 17 bp, Arabidopsis thaliana
tcttgtgaatgtctgcc

SEQ ID NO: 145344 - DNA, 17 bp, Arabidopsis thaliana
tcttgtgactagccgct

SEQ ID NO: 145345 - DNA, 17 bp, Arabidopsis thaliana
tcttgtgagttagatct

SEQ ID NO: 145346 - DNA, 17 bp, Arabidopsis thaliana
tcttgtgataggagttc

SEQ ID NO: 145347 - DNA, 17 bp, Arabidopsis thaliana
tcttgtgatcgctttgg

SEQ ID NO: 145348 - DNA, 17 bp, Arabidopsis thaliana
tcttgtgatgtggcaga

SEQ ID NO: 145349 - DNA, 17 bp, Arabidopsis thaliana
tcttgtgatttcaggct

SEQ ID NO: 145350 - DNA, 17 bp, Arabidopsis thaliana
tcttgtgctatcaatgc

SEQ ID NO: 145351 - DNA, 17 bp, Arabidopsis thaliana
tcttgtgctcagaagat

SEQ ID NO: 145352 - DNA, 17 bp, Arabidopsis thaliana
tcttgtgctcatccacc

SEQ ID NO: 145353 - DNA, 17 bp, Arabidopsis thaliana
tcttgtgctctcaccga

SEQ ID NO: 145354 - DNA, 17 bp, Arabidopsis thaliana
tcttgtgctgaagtgtg

SEQ ID NO: 145355 - DNA, 17 bp, Arabidopsis thaliana
tcttgtggactgagttg

SEQ ID NO: 145356 - DNA, 17 bp, Arabidopsis thaliana
tcttgtggagtggaacc

SEQ ID NO: 145357 - DNA, 17 bp, Arabidopsis thaliana
tcttgtggcctttttca

SEQ ID NO: 145358 - DNA, 17 bp, Arabidopsis thaliana
tcttgtgggatacgggc

SEQ ID NO: 145359 - DNA, 17 bp, Arabidopsis thaliana
tcttgtggtttgacttg

SEQ ID NO: 145360 - DNA, 17 bp, Arabidopsis thaliana
tcttgtgtccgacaatg

SEQ ID NO: 145361 - DNA, 17 bp, Arabidopsis thaliana
tcttgtgttgaactccg

SEQ ID NO: 145362 - DNA, 17 bp, Arabidopsis thaliana
tcttgtgttgctcagac

SEQ ID NO: 145363 - DNA, 17 bp, Arabidopsis thaliana
tcttgttagcagcggga

SEQ ID NO: 145364 - DNA, 17 bp, Arabidopsis thaliana
tcttgttatcagaagac

SEQ ID NO: 145365 - DNA, 17 bp, Arabidopsis thaliana
tcttgttcagactttga

SEQ ID NO: 145366 - DNA, 17 bp, Arabidopsis thaliana
tcttgttccacaaagat

SEQ ID NO: 145367 - DNA, 17 bp, Arabidopsis thaliana
tcttgttcccattcgga

SEQ ID NO: 145368 - DNA, 17 bp, Arabidopsis thaliana
tcttgttcctcgaagca

SEQ ID NO: 145369 - DNA, 17 bp, Arabidopsis thaliana
tcttgttcgcttctagt

SEQ ID NO: 145370 - DNA, 17 bp, Arabidopsis thaliana
tcttgttcttgttgcag

SEQ ID NO: 145371 - DNA, 17 bp, Arabidopsis thaliana
tcttgttgacactgtaa

SEQ ID NO: 145372 - DNA, 17 bp, Arabidopsis thaliana
tcttgttgatttcggat

SEQ ID NO: 145373 - DNA, 17 bp, Arabidopsis thaliana
tcttgttgccacgatct

SEQ ID NO: 145374 - DNA, 17 bp, Arabidopsis thaliana
tcttgttgccgtttaag

SEQ ID NO: 145375 - DNA, 17 bp, Arabidopsis thaliana
tcttgttgcggaggggt

SEQ ID NO: 145376 - DNA, 17 bp, Arabidopsis thaliana
tcttgttgcgtctgata

SEQ ID NO: 145377 - DNA, 17 bp, Arabidopsis thaliana
tcttgttgtcctctttg

SEQ ID NO: 145378 - DNA, 17 bp, Arabidopsis thaliana
tcttgtttctctggaat

SEQ ID NO: 145379 - DNA, 17 bp, Arabidopsis thaliana
tcttgtttctggagtga

SEQ ID NO: 145380 - DNA, 17 bp, Arabidopsis thaliana
tcttgtttgactttggc

SEQ ID NO: 145381 - DNA, 17 bp, Arabidopsis thaliana
tcttgtttgggaatgca

SEQ ID NO: 145382 - DNA, 17 bp, Arabidopsis thaliana
tcttgttttcgatggac

SEQ ID NO: 145383 - DNA, 17 bp, Arabidopsis thaliana
tcttgttttctggggtc

SEQ ID NO: 145384 - DNA, 17 bp, Arabidopsis thaliana
tcttgttttgagtatcg

SEQ ID NO: 145385 - DNA, 17 bp, Arabidopsis thaliana
tctttacccgaaatcga

SEQ ID NO: 145386 - DNA, 17 bp, Arabidopsis thaliana
tctttaccgtctaagcg

SEQ ID NO: 145387 - DNA, 17 bp, Arabidopsis thaliana
tctttacgagactttat

SEQ ID NO: 145388 - DNA, 17 bp, Arabidopsis thaliana
tctttactttccttggt

SEQ ID NO: 145389 - DNA, 17 bp, Arabidopsis thaliana
tctttagcgcagagtct

SEQ ID NO: 145390 - DNA, 17 bp, Arabidopsis thaliana
tctttagctctcgaacc

SEQ ID NO: 145391 - DNA, 17 bp, Arabidopsis thaliana
tctttagtctgtcctct

SEQ ID NO: 145392 - DNA, 17 bp, Arabidopsis thaliana
tctttatccgtcccgtg

SEQ ID NO: 145393 - DNA, 17 bp, Arabidopsis thaliana
tctttatcttgtcgctg

SEQ ID NO: 145394 - DNA, 17 bp, Arabidopsis thaliana
tctttatgttccaacgg

SEQ ID NO: 145395 - DNA, 17 bp, Arabidopsis thaliana
tctttcaaccgcctgaa

SEQ ID NO: 145396 - DNA, 17 bp, Arabidopsis thaliana
tctttcaacgcctcagt

SEQ ID NO: 145397 - DNA, 17 bp, Arabidopsis thaliana
tctttcaacgggaatcg

SEQ ID NO: 145398 - DNA, 17 bp, Arabidopsis thaliana
tctttcaacgggaatgg

SEQ ID NO: 145399 - DNA, 17 bp, Arabidopsis thaliana
tctttcaactgcagtgt

SEQ ID NO: 145400 - DNA, 17 bp, Arabidopsis thaliana
tctttcaatgtgtttcg

SEQ ID NO: 145401 - DNA, 17 bp, Arabidopsis thaliana
tctttcacaaccgacgt

SEQ ID NO: 145402 - DNA, 17 bp, Arabidopsis thaliana
tctttcacggaaggatc

SEQ ID NO: 145403 - DNA, 17 bp, Arabidopsis thaliana
tctttcactcagcgaaa

SEQ ID NO: 145404 - DNA, 17 bp, Arabidopsis thaliana
tctttcactgtgacggc

SEQ ID NO: 145405 - DNA, 17 bp, Arabidopsis thaliana
tctttcagcctacggta

SEQ ID NO: 145406 - DNA, 17 bp, Arabidopsis thaliana
tctttcagtatttggga

SEQ ID NO: 145407 - DNA, 17 bp, Arabidopsis thaliana
tctttcagttgttttcg

SEQ ID NO: 145408 - DNA, 17 bp, Arabidopsis thaliana
tctttcagtttgcagag

SEQ ID NO: 145409 - DNA, 17 bp, Arabidopsis thaliana
tctttcatctccactgt

SEQ ID NO: 145410 - DNA, 17 bp, Arabidopsis thaliana
tctttcatctctgccgc

SEQ ID NO: 145411 - DNA, 17 bp, Arabidopsis thaliana
tctttcattcgagtgct

SEQ ID NO: 145412 - DNA, 17 bp, Arabidopsis thaliana
tctttcattgacttttt

SEQ ID NO: 145413 - DNA, 17 bp, Arabidopsis thaliana
tctttcattggttggtg

SEQ ID NO: 145414 - DNA, 17 bp, Arabidopsis thaliana
tctttccacagagattt

SEQ ID NO: 145415 - DNA, 17 bp, Arabidopsis thaliana
tctttccaccatggtac

SEQ ID NO: 145416 - DNA, 17 bp, Arabidopsis thaliana
tctttccacctattgcc

SEQ ID NO: 145417 - DNA, 17 bp, Arabidopsis thaliana
tctttccactaagcaga

SEQ ID NO: 145418 - DNA, 17 bp, Arabidopsis thaliana
tctttccatacctcttt

SEQ ID NO: 145419 - DNA, 17 bp, Arabidopsis thaliana
tctttccatcgccggat

SEQ ID NO: 145420 - DNA, 17 bp, Arabidopsis thaliana
tctttccatctttgacg

SEQ ID NO: 145421 - DNA, 17 bp, Arabidopsis thaliana
tctttccatctttgttt

SEQ ID NO: 145422 - DNA, 17 bp, Arabidopsis thaliana
tctttcccgagactttc

SEQ ID NO: 145423 - DNA, 17 bp, Arabidopsis thaliana
tctttcccggctggtgc

SEQ ID NO: 145424 - DNA, 17 bp, Arabidopsis thaliana
tctttccctatcgggct

SEQ ID NO: 145425 - DNA, 17 bp, Arabidopsis thaliana
tctttccgacaatagct

SEQ ID NO: 145426 - DNA, 17 bp, Arabidopsis thaliana
tctttccgacctttatt

SEQ ID NO: 145427 - DNA, 17 bp, Arabidopsis thaliana
tctttccgactaatacc

SEQ ID NO: 145428 - DNA, 17 bp, Arabidopsis thaliana
tctttccgcagtgcgtt

SEQ ID NO: 145429 - DNA, 17 bp, Arabidopsis thaliana
tctttccgctgcagaat

SEQ ID NO: 145430 - DNA, 17 bp, Arabidopsis thaliana
tctttccgctgctccgg

SEQ ID NO: 145431 - DNA, 17 bp, Arabidopsis thaliana
tctttccgtctacctct

SEQ ID NO: 145432 - DNA, 17 bp, Arabidopsis thaliana
tctttccgttggcgtat

SEQ ID NO: 145433 - DNA, 17 bp, Arabidopsis thaliana
tctttccgttggtgtgc

SEQ ID NO: 145434 - DNA, 17 bp, Arabidopsis thaliana
tctttcctcatagtagg

SEQ ID NO: 145435 - DNA, 17 bp, Arabidopsis thaliana
tctttcctcctccggcc

SEQ ID NO: 145436 - DNA, 17 bp, Arabidopsis thaliana
tctttcctcctgtcagt

SEQ ID NO: 145437 - DNA, 17 bp, Arabidopsis thaliana
tctttcctctagcgatt

SEQ ID NO: 145438 - DNA, 17 bp, Arabidopsis thaliana
tctttcctctggcgatt

SEQ ID NO: 145439 - DNA, 17 bp, Arabidopsis thaliana
tctttcctggtgtgtgc

SEQ ID NO: 145440 - DNA, 17 bp, Arabidopsis thaliana
tctttcctgtatggatt

SEQ ID NO: 145441 - DNA, 17 bp, Arabidopsis thaliana
tctttcgaaagttggtg

SEQ ID NO: 145442 - DNA, 17 bp, Arabidopsis thaliana
tctttcgactagccgat

SEQ ID NO: 145443 - DNA, 17 bp, Arabidopsis thaliana
tctttcgatgtcggctc

SEQ ID NO: 145444 - DNA, 17 bp, Arabidopsis thaliana
tctttcgcataccaagt

SEQ ID NO: 145445 - DNA, 17 bp, Arabidopsis thaliana
tctttcgctacagttgc

SEQ ID NO: 145446 - DNA, 17 bp, Arabidopsis thaliana
tctttcgcttaagagga

SEQ ID NO: 145447 - DNA, 17 bp, Arabidopsis thaliana
tctttcggcttagtggt

SEQ ID NO: 145448 - DNA, 17 bp, Arabidopsis thaliana
tctttcgtcggagggct

SEQ ID NO: 145449 - DNA, 17 bp, Arabidopsis thaliana
tctttcgtctcaggaat

SEQ ID NO: 145450 - DNA, 17 bp, Arabidopsis thaliana
tctttcgttttgtgtca

SEQ ID NO: 145451 - DNA, 17 bp, Arabidopsis thaliana
tctttctacaatctctc

SEQ ID NO: 145452 - DNA, 17 bp, Arabidopsis thaliana
tctttctcaacatctct

SEQ ID NO: 145453 - DNA, 17 bp, Arabidopsis thaliana
tctttctcagcacactc

SEQ ID NO: 145454 - DNA, 17 bp, Arabidopsis thaliana
tctttctcaggcgttgt

SEQ ID NO: 145455 - DNA, 17 bp, Arabidopsis thaliana
tctttctccataggtac

SEQ ID NO: 145456 - DNA, 17 bp, Arabidopsis thaliana
tctttctccctggatct

SEQ ID NO: 145457 - DNA, 17 bp, Arabidopsis thaliana
tctttctcgtcctactt

SEQ ID NO: 145458 - DNA, 17 bp, Arabidopsis thaliana
tctttctctcgatcgct

SEQ ID NO: 145459 - DNA, 17 bp, Arabidopsis thaliana
tctttctctctctcatc

SEQ ID NO: 145460 - DNA, 17 bp, Arabidopsis thaliana
tctttctctctctttgt

SEQ ID NO: 145461 - DNA, 17 bp, Arabidopsis thaliana
tctttctctctgcaagc

SEQ ID NO: 145462 - DNA, 17 bp, Arabidopsis thaliana
tctttctctgtgggtgc

SEQ ID NO: 145463 - DNA, 17 bp, Arabidopsis thaliana
tctttctgaacgggatt

SEQ ID NO: 145464 - DNA, 17 bp, Arabidopsis thaliana
tctttctgcaaacgcct

SEQ ID NO: 145465 - DNA, 17 bp, Arabidopsis thaliana
tctttctgcaccgaacg

SEQ ID NO: 145466 - DNA, 17 bp, Arabidopsis thaliana
tctttctgcatgcatca

SEQ ID NO: 145467 - DNA, 17 bp, Arabidopsis thaliana
tctttctgggtcaagct

SEQ ID NO: 145468 - DNA, 17 bp, Arabidopsis thaliana
tctttctggtttgctcg

SEQ ID NO: 145469 - DNA, 17 bp, Arabidopsis thaliana
tctttctgtaatagggt

SEQ ID NO: 145470 - DNA, 17 bp, Arabidopsis thaliana
tctttctgtcgcaaagg

SEQ ID NO: 145471 - DNA, 17 bp, Arabidopsis thaliana
tctttctgtcgtcctcc

SEQ ID NO: 145472 - DNA, 17 bp, Arabidopsis thaliana
tctttctgtgctgcggt

SEQ ID NO: 145473 - DNA, 17 bp, Arabidopsis thaliana
tctttctttctgtgctg

SEQ ID NO: 145474 - DNA, 17 bp, Arabidopsis thaliana
tctttgaaatttcatca

SEQ ID NO: 145475 - DNA, 17 bp, Arabidopsis thaliana
tctttgaaatttcatcg

SEQ ID NO: 145476 - DNA, 17 bp, Arabidopsis thaliana
tctttgaagttttgtac

SEQ ID NO: 145477 - DNA, 17 bp, Arabidopsis thaliana
tctttgacactgaggac

SEQ ID NO: 145478 - DNA, 17 bp, Arabidopsis thaliana
tctttgaccaaattcac

SEQ ID NO: 145479 - DNA, 17 bp, Arabidopsis thaliana
tctttgacccggatgat

SEQ ID NO: 145480 - DNA, 17 bp, Arabidopsis thaliana
tctttgaccgtctcctt

SEQ ID NO: 145481 - DNA, 17 bp, Arabidopsis thaliana
tctttgaccttgggtga

SEQ ID NO: 145482 - DNA, 17 bp, Arabidopsis thaliana
tctttgacgagatcgtt

SEQ ID NO: 145483 - DNA, 17 bp, Arabidopsis thaliana
tctttgactttaaccgg

SEQ ID NO: 145484 - DNA, 17 bp, Arabidopsis thaliana
tctttgagacatctcgc

SEQ ID NO: 145485 - DNA, 17 bp, Arabidopsis thaliana
tctttgagtctgagagt

SEQ ID NO: 145486 - DNA, 17 bp, Arabidopsis thaliana
tctttgatccgccagca

SEQ ID NO: 145487 - DNA, 17 bp, Arabidopsis thaliana
tctttgatctaaggcca

SEQ ID NO: 145488 - DNA, 17 bp, Arabidopsis thaliana
tctttgatgaaataatc

SEQ ID NO: 145489 - DNA, 17 bp, Arabidopsis thaliana
tctttgatgaaatagtc

SEQ ID NO: 145490 - DNA, 17 bp, Arabidopsis thaliana
tctttgatgacccgtct

SEQ ID NO: 145491 - DNA, 17 bp, Arabidopsis thaliana
tctttgatgacccgttt

SEQ ID NO: 145492 - DNA, 17 bp, Arabidopsis thaliana
tctttgattgatcgcta

SEQ ID NO: 145493 - DNA, 17 bp, Arabidopsis thaliana
tctttgattgtgagaag

SEQ ID NO: 145494 - DNA, 17 bp, Arabidopsis thaliana
tctttgcaataacgctg

SEQ ID NO: 145495 - DNA, 17 bp, Arabidopsis thaliana
tctttgccagatcatcc

SEQ ID NO: 145496 - DNA, 17 bp, Arabidopsis thaliana
tctttgcccaatggtcg

SEQ ID NO: 145497 - DNA, 17 bp, Arabidopsis thaliana
tctttgcccgttgtgta

SEQ ID NO: 145498 - DNA, 17 bp, Arabidopsis thaliana
tctttgccctacttgtg

SEQ ID NO: 145499 - DNA, 17 bp, Arabidopsis thaliana
tctttgcgaattggttg

SEQ ID NO: 145500 - DNA, 17 bp, Arabidopsis thaliana
tctttgcgatttactgg

SEQ ID NO: 145501 - DNA, 17 bp, Arabidopsis thaliana
tctttgcgccgaaccaa

SEQ ID NO: 145502 - DNA, 17 bp, Arabidopsis thaliana
tctttgctattgttgtg

SEQ ID NO: 145503 - DNA, 17 bp, Arabidopsis thaliana
tctttgctctctctctc

SEQ ID NO: 145504 - DNA, 17 bp, Arabidopsis thaliana
tctttgctgaggtgttg

SEQ ID NO: 145505 - DNA, 17 bp, Arabidopsis thaliana
tctttgctttggatctg

SEQ ID NO: 145506 - DNA, 17 bp, Arabidopsis thaliana
tctttggaaaaccggcg

SEQ ID NO: 145507 - DNA, 17 bp, Arabidopsis thaliana
tctttggacctgcggtg

SEQ ID NO: 145508 - DNA, 17 bp, Arabidopsis thaliana
tctttggatccacaatg

SEQ ID NO: 145509 - DNA, 17 bp, Arabidopsis thaliana
tctttggattactgtgc

SEQ ID NO: 145510 - DNA, 17 bp, Arabidopsis thaliana
tctttggattgaaggaa

SEQ ID NO: 145511 - DNA, 17 bp, Arabidopsis thaliana
tctttggattgaaggga

SEQ ID NO: 145512 - DNA, 17 bp, Arabidopsis thaliana
tctttggatttccatga

SEQ ID NO: 145513 - DNA, 17 bp, Arabidopsis thaliana
tctttggatttcggagg

SEQ ID NO: 145514 - DNA, 17 bp, Arabidopsis thaliana
tctttggcccaatggtt

SEQ ID NO: 145515 - DNA, 17 bp, Arabidopsis thaliana
tctttggcccagtggta

SEQ ID NO: 145516 - DNA, 17 bp, Arabidopsis thaliana
tctttggccctgctgtg

SEQ ID NO: 145517 - DNA, 17 bp, Arabidopsis thaliana
tctttggccttcctctt

SEQ ID NO: 145518 - DNA, 17 bp, Arabidopsis thaliana
tctttggctcgtaatca

SEQ ID NO: 145519 - DNA, 17 bp, Arabidopsis thaliana
tctttggctttctgatg

SEQ ID NO: 145520 - DNA, 17 bp, Arabidopsis thaliana
tctttgggagacaaggc

SEQ ID NO: 145521 - DNA, 17 bp, Arabidopsis thaliana
tctttgggctagtggtt

SEQ ID NO: 145522 - DNA, 17 bp, Arabidopsis thaliana
tctttgggctttccgaa

SEQ ID NO: 145523 - DNA, 17 bp, Arabidopsis thaliana
tctttgggctttccgga

SEQ ID NO: 145524 - DNA, 17 bp, Arabidopsis thaliana
tctttgggctttctgaa

SEQ ID NO: 145525 - DNA, 17 bp, Arabidopsis thaliana
tctttgggtctacatgt

SEQ ID NO: 145526 - DNA, 17 bp, Arabidopsis thaliana
tctttgggtctcggggt

SEQ ID NO: 145527 - DNA, 17 bp, Arabidopsis thaliana
tctttgggtgttgagag

SEQ ID NO: 145528 - DNA, 17 bp, Arabidopsis thaliana
tctttggtatcaggggt

SEQ ID NO: 145529 - DNA, 17 bp, Arabidopsis thaliana
tctttggtcccaaggct

SEQ ID NO: 145530 - DNA, 17 bp, Arabidopsis thaliana
tctttggtgtagctggg

SEQ ID NO: 145531 - DNA, 17 bp, Arabidopsis thaliana
tctttggttttgctttc

SEQ ID NO: 145532 - DNA, 17 bp, Arabidopsis thaliana
tctttgtaacttggctt

SEQ ID NO: 145533 - DNA, 17 bp, Arabidopsis thaliana
tctttgtccaactggtt

SEQ ID NO: 145534 - DNA, 17 bp, Arabidopsis thaliana
tctttgtccagtgacac

SEQ ID NO: 145535 - DNA, 17 bp, Arabidopsis thaliana
tctttgtccgttgctat

SEQ ID NO: 145536 - DNA, 17 bp, Arabidopsis thaliana
tctttgtcgcatcctgt

SEQ ID NO: 145537 - DNA, 17 bp, Arabidopsis thaliana
tctttgtcggatctggc

SEQ ID NO: 145538 - DNA, 17 bp, Arabidopsis thaliana
tctttgtcgttagccaa

SEQ ID NO: 145539 - DNA, 17 bp, Arabidopsis thaliana
tctttgtctgttgctat

SEQ ID NO: 145540 - DNA, 17 bp, Arabidopsis thaliana
tctttgtgaaaatggca

SEQ ID NO: 145541 - DNA, 17 bp, Arabidopsis thaliana
tctttgtgactttttcc

SEQ ID NO: 145542 - DNA, 17 bp, Arabidopsis thaliana
tctttgtgatcgtcctc

SEQ ID NO: 145543 - DNA, 17 bp, Arabidopsis thaliana
tctttgtgtcggcagta

SEQ ID NO: 145544 - DNA, 17 bp, Arabidopsis thaliana
tctttgtgtctcgggaa

SEQ ID NO: 145545 - DNA, 17 bp, Arabidopsis thaliana
tctttgttaggtgtgaa

SEQ ID NO: 145546 - DNA, 17 bp, Arabidopsis thaliana
tctttgttcttggagac

SEQ ID NO: 145547 - DNA, 17 bp, Arabidopsis thaliana
tctttgttgatgactag

SEQ ID NO: 145548 - DNA, 17 bp, Arabidopsis thaliana
tctttgtttggaccata

SEQ ID NO: 145549 - DNA, 17 bp, Arabidopsis thaliana
tcttttacagccgcggt

SEQ ID NO: 145550 - DNA, 17 bp, Arabidopsis thaliana
tcttttatatttgtgcc

SEQ ID NO: 145551 - DNA, 17 bp, Arabidopsis thaliana
tcttttcagcagacgcg

SEQ ID NO: 145552 - DNA, 17 bp, Arabidopsis thaliana
tcttttcagttgcatgt

SEQ ID NO: 145553 - DNA, 17 bp, Arabidopsis thaliana
tcttttcagttgctttc

SEQ ID NO: 145554 - DNA, 17 bp, Arabidopsis thaliana
tcttttcccaaggcgac

SEQ ID NO: 145555 - DNA, 17 bp, Arabidopsis thaliana
tcttttcccacctcctc

SEQ ID NO: 145556 - DNA, 17 bp, Arabidopsis thaliana
tcttttccgacggctta

SEQ ID NO: 145557 - DNA, 17 bp, Arabidopsis thaliana
tcttttcctcgagggtg

SEQ ID NO: 145558 - DNA, 17 bp, Arabidopsis thaliana
tcttttcctgtgctttg

SEQ ID NO: 145559 - DNA, 17 bp, Arabidopsis thaliana
tcttttccttgccatga

SEQ ID NO: 145560 - DNA, 17 bp, Arabidopsis thaliana
tcttttcgacgcgacct

SEQ ID NO: 145561 - DNA, 17 bp, Arabidopsis thaliana
tcttttcgaggcgtctt

SEQ ID NO: 145562 - DNA, 17 bp, Arabidopsis thaliana
tcttttctcaggcgttg

SEQ ID NO: 145563 - DNA, 17 bp, Arabidopsis thaliana
tcttttctcagggatac

SEQ ID NO: 145564 - DNA, 17 bp, Arabidopsis thaliana
tcttttctcttgtctca

SEQ ID NO: 145565 - DNA, 17 bp, Arabidopsis thaliana
tcttttcttcctcggcg

SEQ ID NO: 145566 - DNA, 17 bp, Arabidopsis thaliana
tcttttcttccttgtgc

SEQ ID NO: 145567 - DNA, 17 bp, Arabidopsis thaliana
tcttttcttcgccgctc

SEQ ID NO: 145568 - DNA, 17 bp, Arabidopsis thaliana
tcttttctttgttgcga

SEQ ID NO: 145569 - DNA, 17 bp, Arabidopsis thaliana
tcttttgaacttttgcc

SEQ ID NO: 145570 - DNA, 17 bp, Arabidopsis thaliana
tcttttgacatccggtc

SEQ ID NO: 145571 - DNA, 17 bp, Arabidopsis thaliana
tcttttgacattcttct

SEQ ID NO: 145572 - DNA, 17 bp, Arabidopsis thaliana
tcttttgacgaattgac

SEQ ID NO: 145573 - DNA, 17 bp, Arabidopsis thaliana
tcttttgactagcattt

SEQ ID NO: 145574 - DNA, 17 bp, Arabidopsis thaliana
tcttttgagaattcctg

SEQ ID NO: 145575 - DNA, 17 bp, Arabidopsis thaliana
tcttttgatatccagtc

SEQ ID NO: 145576 - DNA, 17 bp, Arabidopsis thaliana
tcttttgatctgcatgc

SEQ ID NO: 145577 - DNA, 17 bp, Arabidopsis thaliana
tcttttgatgagcttgt

SEQ ID NO: 145578 - DNA, 17 bp, Arabidopsis thaliana
tcttttgcaagcactca

SEQ ID NO: 145579 - DNA, 17 bp, Arabidopsis thaliana
tcttttgcaagcactcg

SEQ ID NO: 145580 - DNA, 17 bp, Arabidopsis thaliana
tcttttgcgagggaaga

SEQ ID NO: 145581 - DNA, 17 bp, Arabidopsis thaliana
tcttttgcggtcgctgt

SEQ ID NO: 145582 - DNA, 17 bp, Arabidopsis thaliana
tcttttgcttccacaca

SEQ ID NO: 145583 - DNA, 17 bp, Arabidopsis thaliana
tcttttgctttgtctgc

SEQ ID NO: 145584 - DNA, 17 bp, Arabidopsis thaliana
tcttttggaatgtccgt

SEQ ID NO: 145585 - DNA, 17 bp, Arabidopsis thaliana
tcttttggattcggagt

SEQ ID NO: 145586 - DNA, 17 bp, Arabidopsis thaliana
tcttttgggtctcttca

SEQ ID NO: 145587 - DNA, 17 bp, Arabidopsis thaliana
tcttttgtaagccagca

SEQ ID NO: 145588 - DNA, 17 bp, Arabidopsis thaliana
tcttttgtcttgaggca

SEQ ID NO: 145589 - DNA, 17 bp, Arabidopsis thaliana
tcttttgtcttgagtca

SEQ ID NO: 145590 - DNA, 17 bp, Arabidopsis thaliana
tcttttgtgaggcacgg

SEQ ID NO: 145591 - DNA, 17 bp, Arabidopsis thaliana
tcttttgtgagtttagg

SEQ ID NO: 145592 - DNA, 17 bp, Arabidopsis thaliana
tcttttgttcgagttgg

SEQ ID NO: 145593 - DNA, 17 bp, Arabidopsis thaliana
tcttttgttggtctgcc

SEQ ID NO: 145594 - DNA, 17 bp, Arabidopsis thaliana
tcttttgttggtgtcgg

SEQ ID NO: 145595 - DNA, 17 bp, Arabidopsis thaliana
tcttttgttggtgtctg

SEQ ID NO: 145596 - DNA, 17 bp, Arabidopsis thaliana
tcttttgtttccgctct

SEQ ID NO: 145597 - DNA, 17 bp, Arabidopsis thaliana
tctttttacctgaattt

SEQ ID NO: 145598 - DNA, 17 bp, Arabidopsis thaliana
tctttttagaccatccc

SEQ ID NO: 145599 - DNA, 17 bp, Arabidopsis thaliana
tctttttcaaagcccaa

SEQ ID NO: 145600 - DNA, 17 bp, Arabidopsis thaliana
tctttttcagttgatgt

SEQ ID NO: 145601 - DNA, 17 bp, Arabidopsis thaliana
tctttttccagacgctg

SEQ ID NO: 145602 - DNA, 17 bp, Arabidopsis thaliana
tctttttcccatcgccg

SEQ ID NO: 145603 - DNA, 17 bp, Arabidopsis thaliana
tctttttgcaggatttt

SEQ ID NO: 145604 - DNA, 17 bp, Arabidopsis thaliana
tctttttgccaccttcc

SEQ ID NO: 145605 - DNA, 17 bp, Arabidopsis thaliana
tctttttgccctgaagt

SEQ ID NO: 145606 - DNA, 17 bp, Arabidopsis thaliana
tctttttgccttggtcg

SEQ ID NO: 145607 - DNA, 17 bp, Arabidopsis thaliana
tctttttgcgcggatga

SEQ ID NO: 145608 - DNA, 17 bp, Arabidopsis thaliana
tcttttttcattgaggc

SEQ ID NO: 145609 - DNA, 17 bp, Arabidopsis thaliana
tcttttttgaagacttg

SEQ ID NO: 145610 - DNA, 17 bp, Arabidopsis thaliana
tcttttttgctgaagac

SEQ ID NO: 145611 - DNA, 17 bp, Arabidopsis thaliana
tgaaaaaaacctttaac

SEQ ID NO: 145612 - DNA, 17 bp, Arabidopsis thaliana
tgaaaaaatcgaagagg

SEQ ID NO: 145613 - DNA, 17 bp, Arabidopsis thaliana
tgaaaaacactgacgga

SEQ ID NO: 145614 - DNA, 17 bp, Arabidopsis thaliana
tgaaaaacccggacccg

SEQ ID NO: 145615 - DNA, 17 bp, Arabidopsis thaliana
tgaaaaacctgtgattt

SEQ ID NO: 145616 - DNA, 17 bp, Arabidopsis thaliana
tgaaaaacgaatgtgct

SEQ ID NO: 145617 - DNA, 17 bp, Arabidopsis thaliana
tgaaaaacgtttatggc

SEQ ID NO: 145618 - DNA, 17 bp, Arabidopsis thaliana
tgaaaaactactgccat

SEQ ID NO: 145619 - DNA, 17 bp, Arabidopsis thaliana
tgaaaaactcgtgttac

SEQ ID NO: 145620 - DNA, 17 bp, Arabidopsis thaliana
tgaaaaactcgtgttgc

SEQ ID NO: 145621 - DNA, 17 bp, Arabidopsis thaliana
tgaaaaactggtcatat

SEQ ID NO: 145622 - DNA, 17 bp, Arabidopsis thaliana
tgaaaaagtaattttgg

SEQ ID NO: 145623 - DNA, 17 bp, Arabidopsis thaliana
tgaaaaatctactttgt

SEQ ID NO: 145624 - DNA, 17 bp, Arabidopsis thaliana
tgaaaaatctattttcg

SEQ ID NO: 145625 - DNA, 17 bp, Arabidopsis thaliana
tgaaaaattcgttggcc

SEQ ID NO: 145626 - DNA, 17 bp, Arabidopsis thaliana
tgaaaacactggccatt

SEQ ID NO: 145627 - DNA, 17 bp, Arabidopsis thaliana
tgaaaacagagacgatt

SEQ ID NO: 145628 - DNA, 17 bp, Arabidopsis thaliana
tgaaaacaggtgcgttt

SEQ ID NO: 145629 - DNA, 17 bp, Arabidopsis thaliana
tgaaaaccacagcatgg

SEQ ID NO: 145630 - DNA, 17 bp, Arabidopsis thaliana
tgaaaaccagttctcac

SEQ ID NO: 145631 - DNA, 17 bp, Arabidopsis thaliana
tgaaaaccctaatcgag

SEQ ID NO: 145632 - DNA, 17 bp, Arabidopsis thaliana
tgaaaacctcatttcta

SEQ ID NO: 145633 - DNA, 17 bp, Arabidopsis thaliana
tgaaaacgctggccatt

SEQ ID NO: 145634 - DNA, 17 bp, Arabidopsis thaliana
tgaaaacgctggtcatt

SEQ ID NO: 145635 - DNA, 17 bp, Arabidopsis thaliana
tgaaaacgggccgcaac

SEQ ID NO: 145636 - DNA, 17 bp, Arabidopsis thaliana
tgaaaactaaccggact

SEQ ID NO: 145637 - DNA, 17 bp, Arabidopsis thaliana
tgaaaactaaccggatt

SEQ ID NO: 145638 - DNA, 17 bp, Arabidopsis thaliana
tgaaaactatgactaag

SEQ ID NO: 145639 - DNA, 17 bp, Arabidopsis thaliana
tgaaaactcagattcat

SEQ ID NO: 145640 - DNA, 17 bp, Arabidopsis thaliana
tgaaaactcgccattgg

SEQ ID NO: 145641 - DNA, 17 bp, Arabidopsis thaliana
tgaaaactcgctctcgg

SEQ ID NO: 145642 - DNA, 17 bp, Arabidopsis thaliana
tgaaaactctattttcg

SEQ ID NO: 145643 - DNA, 17 bp, Arabidopsis thaliana
tgaaaactcttttctcc

SEQ ID NO: 145644 - DNA, 17 bp, Arabidopsis thaliana
tgaaaactgaacttttc

SEQ ID NO: 145645 - DNA, 17 bp, Arabidopsis thaliana
tgaaaactgagggtcaa

SEQ ID NO: 145646 - DNA, 17 bp, Arabidopsis thaliana
tgaaaactgtaatccct

SEQ ID NO: 145647 - DNA, 17 bp, Arabidopsis thaliana
tgaaaacttcggttcgg

SEQ ID NO: 145648 - DNA, 17 bp, Arabidopsis thaliana
tgaaaactttatcgact

SEQ ID NO: 145649 - DNA, 17 bp, Arabidopsis thaliana
tgaaaactttcttgact

SEQ ID NO: 145650 - DNA, 17 bp, Arabidopsis thaliana
tgaaaactttgctcagt

SEQ ID NO: 145651 - DNA, 17 bp, Arabidopsis thaliana
tgaaaactttttcgact

SEQ ID NO: 145652 - DNA, 17 bp, Arabidopsis thaliana
tgaaaagagtgcttgaa

SEQ ID NO: 145653 - DNA, 17 bp, Arabidopsis thaliana
tgaaaagcattgcgatg

SEQ ID NO: 145654 - DNA, 17 bp, Arabidopsis thaliana
tgaaaagcggattgtgt

SEQ ID NO: 145655 - DNA, 17 bp, Arabidopsis thaliana
tgaaaaggcatggacca

SEQ ID NO: 145656 - DNA, 17 bp, Arabidopsis thaliana
tgaaaaggccggtgcag

SEQ ID NO: 145657 - DNA, 17 bp, Arabidopsis thaliana
tgaaaagtctgtcagtt

SEQ ID NO: 145658 - DNA, 17 bp, Arabidopsis thaliana
tgaaaatagatcataaa

SEQ ID NO: 145659 - DNA, 17 bp, Arabidopsis thaliana
tgaaaatccagcggaag

SEQ ID NO: 145660 - DNA, 17 bp, Arabidopsis thaliana
tgaaaatccggaggacc

SEQ ID NO: 145661 - DNA, 17 bp, Arabidopsis thaliana
tgaaaatccggaggact

SEQ ID NO: 145662 - DNA, 17 bp, Arabidopsis thaliana
tgaaaatcggacgtctt

SEQ ID NO: 145663 - DNA, 17 bp, Arabidopsis thaliana
tgaaaatctctggtttt

SEQ ID NO: 145664 - DNA, 17 bp, Arabidopsis thaliana
tgaaaatgactacatcg

SEQ ID NO: 145665 - DNA, 17 bp, Arabidopsis thaliana
tgaaaatgcatgcggtc

SEQ ID NO: 145666 - DNA, 17 bp, Arabidopsis thaliana
tgaaaatgctaagcgaa

SEQ ID NO: 145667 - DNA, 17 bp, Arabidopsis thaliana
tgaaaatgctgaccatt

SEQ ID NO: 145668 - DNA, 17 bp, Arabidopsis thaliana
tgaaaatgctgatgtgg

SEQ ID NO: 145669 - DNA, 17 bp, Arabidopsis thaliana
tgaaaatgctggccatt

SEQ ID NO: 145670 - DNA, 17 bp, Arabidopsis thaliana
tgaaaatgctggtcatt

SEQ ID NO: 145671 - DNA, 17 bp, Arabidopsis thaliana
tgaaaatggcaagacac

SEQ ID NO: 145672 - DNA, 17 bp, Arabidopsis thaliana
tgaaaatggcgcagcgg

SEQ ID NO: 145673 - DNA, 17 bp, Arabidopsis thaliana
tgaaaatgtaagtgacc

SEQ ID NO: 145674 - DNA, 17 bp, Arabidopsis thaliana
tgaaaatgtatggattt

SEQ ID NO: 145675 - DNA, 17 bp, Arabidopsis thaliana
tgaaaattacgggtttt

SEQ ID NO: 145676 - DNA, 17 bp, Arabidopsis thaliana
tgaaaattcagacaacc

SEQ ID NO: 145677 - DNA, 17 bp, Arabidopsis thaliana
tgaaaattcaggcagcc

SEQ ID NO: 145678 - DNA, 17 bp, Arabidopsis thaliana
tgaaaattcatccgctt

SEQ ID NO: 145679 - DNA, 17 bp, Arabidopsis thaliana
tgaaaattccaacgtct

SEQ ID NO: 145680 - DNA, 17 bp, Arabidopsis thaliana
tgaaaattccagcgtct

SEQ ID NO: 145681 - DNA, 17 bp, Arabidopsis thaliana
tgaaaattctgggcttt

SEQ ID NO: 145682 - DNA, 17 bp, Arabidopsis thaliana
tgaaaattggccaactc

SEQ ID NO: 145683 - DNA, 17 bp, Arabidopsis thaliana
tgaaaatttcagcgtca

SEQ ID NO: 145684 - DNA, 17 bp, Arabidopsis thaliana
tgaaaatttcggataca

SEQ ID NO: 145685 - DNA, 17 bp, Arabidopsis thaliana
tgaaaatttggggttgt

SEQ ID NO: 145686 - DNA, 17 bp, Arabidopsis thaliana
tgaaaatttgtggaagt

SEQ ID NO: 145687 - DNA, 17 bp, Arabidopsis thaliana
tgaaacaaagcaccaat

SEQ ID NO: 145688 - DNA, 17 bp, Arabidopsis thaliana
tgaaacaattgtgacag

SEQ ID NO: 145689 - DNA, 17 bp, Arabidopsis thaliana
tgaaacaccgagtctaa

SEQ ID NO: 145690 - DNA, 17 bp, Arabidopsis thaliana
tgaaacactttgattga

SEQ ID NO: 145691 - DNA, 17 bp, Arabidopsis thaliana
tgaaacagagaccattg

SEQ ID NO: 145692 - DNA, 17 bp, Arabidopsis thaliana
tgaaacagctaagtctc

SEQ ID NO: 145693 - DNA, 17 bp, Arabidopsis thaliana
tgaaacaggcggttgcg

SEQ ID NO: 145694 - DNA, 17 bp, Arabidopsis thaliana
tgaaacagggtggtagg

SEQ ID NO: 145695 - DNA, 17 bp, Arabidopsis thaliana
tgaaacagtttcatctg

SEQ ID NO: 145696 - DNA, 17 bp, Arabidopsis thaliana
tgaaacatctttggcta

SEQ ID NO: 145697 - DNA, 17 bp, Arabidopsis thaliana
tgaaaccaaatctgtca

SEQ ID NO: 145698 - DNA, 17 bp, Arabidopsis thaliana
tgaaaccagcgaaagcg

SEQ ID NO: 145699 - DNA, 17 bp, Arabidopsis thaliana
tgaaaccccgtaatccc

SEQ ID NO: 145700 - DNA, 17 bp, Arabidopsis thaliana
tgaaacccgtgggtgtc

SEQ ID NO: 145701 - DNA, 17 bp, Arabidopsis thaliana
tgaaaccggatcttaaa

SEQ ID NO: 145702 - DNA, 17 bp, Arabidopsis thaliana
tgaaaccgtgtacttgg

SEQ ID NO: 145703 - DNA, 17 bp, Arabidopsis thaliana
tgaaaccttccgttttt

SEQ ID NO: 145704 - DNA, 17 bp, Arabidopsis thaliana
tgaaaccttttgacggc

SEQ ID NO: 145705 - DNA, 17 bp, Arabidopsis thaliana
tgaaacgaccggtcaac

SEQ ID NO: 145706 - DNA, 17 bp, Arabidopsis thaliana
tgaaacgactctcggca

SEQ ID NO: 145707 - DNA, 17 bp, Arabidopsis thaliana
tgaaacgactggttgaa

SEQ ID NO: 145708 - DNA, 17 bp, Arabidopsis thaliana
tgaaacgcaccgcactg

SEQ ID NO: 145709 - DNA, 17 bp, Arabidopsis thaliana
tgaaacgctctttgatc

SEQ ID NO: 145710 - DNA, 17 bp, Arabidopsis thaliana
tgaaacggaccgcgagt

SEQ ID NO: 145711 - DNA, 17 bp, Arabidopsis thaliana
tgaaacggacggttgtg

SEQ ID NO: 145712 - DNA, 17 bp, Arabidopsis thaliana
tgaaacggagctcgctt

SEQ ID NO: 145713 - DNA, 17 bp, Arabidopsis thaliana
tgaaacggccacatacg

SEQ ID NO: 145714 - DNA, 17 bp, Arabidopsis thaliana
tgaaacggcctaggaga

SEQ ID NO: 145715 - DNA, 17 bp, Arabidopsis thaliana
tgaaacggctctctcgg

SEQ ID NO: 145716 - DNA, 17 bp, Arabidopsis thaliana
tgaaacggttccggata

SEQ ID NO: 145717 - DNA, 17 bp, Arabidopsis thaliana
tgaaacgtctgcctggg

SEQ ID NO: 145718 - DNA, 17 bp, Arabidopsis thaliana
tgaaacgtgacatagca

SEQ ID NO: 145719 - DNA, 17 bp, Arabidopsis thaliana
tgaaactaaactgctaa

SEQ ID NO: 145720 - DNA, 17 bp, Arabidopsis thaliana
tgaaactaatacacgtt

SEQ ID NO: 145721 - DNA, 17 bp, Arabidopsis thaliana
tgaaactatcttcgtgc

SEQ ID NO: 145722 - DNA, 17 bp, Arabidopsis thaliana
tgaaactatgcctgagc

SEQ ID NO: 145723 - DNA, 17 bp, Arabidopsis thaliana
tgaaactattggctctg

SEQ ID NO: 145724 - DNA, 17 bp, Arabidopsis thaliana
tgaaactcatgttttac

SEQ ID NO: 145725 - DNA, 17 bp, Arabidopsis thaliana
tgaaactcatttggatg

SEQ ID NO: 145726 - DNA, 17 bp, Arabidopsis thaliana
tgaaactcgacggatcg

SEQ ID NO: 145727 - DNA, 17 bp, Arabidopsis thaliana
tgaaactctaaggttgt

SEQ ID NO: 145728 - DNA, 17 bp, Arabidopsis thaliana
tgaaactctcatgtgct

SEQ ID NO: 145729 - DNA, 17 bp, Arabidopsis thaliana
tgaaactctcccagacg

SEQ ID NO: 145730 - DNA, 17 bp, Arabidopsis thaliana
tgaaactctgtataact

SEQ ID NO: 145731 - DNA, 17 bp, Arabidopsis thaliana
tgaaactcttagacccg

SEQ ID NO: 145732 - DNA, 17 bp, Arabidopsis thaliana
tgaaactgaatcggaga

SEQ ID NO: 145733 - DNA, 17 bp, Arabidopsis thaliana
tgaaactgactacatcg

SEQ ID NO: 145734 - DNA, 17 bp, Arabidopsis thaliana
tgaaactgagatcgtgg

SEQ ID NO: 145735 - DNA, 17 bp, Arabidopsis thaliana
tgaaactgagttacaat

SEQ ID NO: 145736 - DNA, 17 bp, Arabidopsis thaliana
tgaaactgccagcataa

SEQ ID NO: 145737 - DNA, 17 bp, Arabidopsis thaliana
tgaaactgccagcatat

SEQ ID NO: 145738 - DNA, 17 bp, Arabidopsis thaliana
tgaaactgccagcatga

SEQ ID NO: 145739 - DNA, 17 bp, Arabidopsis thaliana
tgaaactgccagcatgc

SEQ ID NO: 145740 - DNA, 17 bp, Arabidopsis thaliana
tgaaactgcgaatggct

SEQ ID NO: 145741 - DNA, 17 bp, Arabidopsis thaliana
tgaaactggtttgctct

SEQ ID NO: 145742 - DNA, 17 bp, Arabidopsis thaliana
tgaaactgttgatgttc

SEQ ID NO: 145743 - DNA, 17 bp, Arabidopsis thaliana
tgaaacttatttacaat

SEQ ID NO: 145744 - DNA, 17 bp, Arabidopsis thaliana
tgaaacttcataagatt

SEQ ID NO: 145745 - DNA, 17 bp, Arabidopsis thaliana
tgaaacttccagacctg

SEQ ID NO: 145746 - DNA, 17 bp, Arabidopsis thaliana
tgaaacttcctaagttc

SEQ ID NO: 145747 - DNA, 17 bp, Arabidopsis thaliana
tgaaacttctatggcgg

SEQ ID NO: 145748 - DNA, 17 bp, Arabidopsis thaliana
tgaaacttggtccacaa

SEQ ID NO: 145749 - DNA, 17 bp, Arabidopsis thaliana
tgaaactttgacagtta

SEQ ID NO: 145750 - DNA, 17 bp, Arabidopsis thaliana
tgaaactttgccatact

SEQ ID NO: 145751 - DNA, 17 bp, Arabidopsis thaliana
tgaaactttgctttgtc

SEQ ID NO: 145752 - DNA, 17 bp, Arabidopsis thaliana
tgaaactttggccacaa

SEQ ID NO: 145753 - DNA, 17 bp, Arabidopsis thaliana
tgaaacttttgcttctg

SEQ ID NO: 145754 - DNA, 17 bp, Arabidopsis thaliana
tgaaacttttgttgact

SEQ ID NO: 145755 - DNA, 17 bp, Arabidopsis thaliana
tgaaagaaaaatccgag

SEQ ID NO: 145756 - DNA, 17 bp, Arabidopsis thaliana
tgaaagaatctcaactt

SEQ ID NO: 145757 - DNA, 17 bp, Arabidopsis thaliana
tgaaagaatctcagctt

SEQ ID NO: 145758 - DNA, 17 bp, Arabidopsis thaliana
tgaaagacacaggtctc

SEQ ID NO: 145759 - DNA, 17 bp, Arabidopsis thaliana
tgaaagacactggatct

SEQ ID NO: 145760 - DNA, 17 bp, Arabidopsis thaliana
tgaaagacatcttgaaa

SEQ ID NO: 145761 - DNA, 17 bp, Arabidopsis thaliana
tgaaagaccgttcgtcc

SEQ ID NO: 145762 - DNA, 17 bp, Arabidopsis thaliana
tgaaagactggtcttgt

SEQ ID NO: 145763 - DNA, 17 bp, Arabidopsis thaliana
tgaaagactttctgctt

SEQ ID NO: 145764 - DNA, 17 bp, Arabidopsis thaliana
tgaaagagagttccatc

SEQ ID NO: 145765 - DNA, 17 bp, Arabidopsis thaliana
tgaaagagctctttgac

SEQ ID NO: 145766 - DNA, 17 bp, Arabidopsis thaliana
tgaaagagtcgcagcga

SEQ ID NO: 145767 - DNA, 17 bp, Arabidopsis thaliana
tgaaagagtgtctcatg

SEQ ID NO: 145768 - DNA, 17 bp, Arabidopsis thaliana
tgaaagagttctgaaga

SEQ ID NO: 145769 - DNA, 17 bp, Arabidopsis thaliana
tgaaagagttgcagcga

SEQ ID NO: 145770 - DNA, 17 bp, Arabidopsis thaliana
tgaaagattgcaaaatt

SEQ ID NO: 145771 - DNA, 17 bp, Arabidopsis thaliana
tgaaagattttcgtcgg

SEQ ID NO: 145772 - DNA, 17 bp, Arabidopsis thaliana
tgaaagcaccgacagat

SEQ ID NO: 145773 - DNA, 17 bp, Arabidopsis thaliana
tgaaagcaccggcagat

SEQ ID NO: 145774 - DNA, 17 bp, Arabidopsis thaliana
tgaaagcagacgatttc

SEQ ID NO: 145775 - DNA, 17 bp, Arabidopsis thaliana
tgaaagccaaggagttg

SEQ ID NO: 145776 - DNA, 17 bp, Arabidopsis thaliana
tgaaagcccagcgacgt

SEQ ID NO: 145777 - DNA, 17 bp, Arabidopsis thaliana
tgaaagccgtcaggtcg

SEQ ID NO: 145778 - DNA, 17 bp, Arabidopsis thaliana
tgaaagccgttgagtcg

SEQ ID NO: 145779 - DNA, 17 bp, Arabidopsis thaliana
tgaaagcgactacatcg

SEQ ID NO: 145780 - DNA, 17 bp, Arabidopsis thaliana
tgaaagcgtggcctatc

SEQ ID NO: 145781 - DNA, 17 bp, Arabidopsis thaliana
tgaaagctatcaggtcg

SEQ ID NO: 145782 - DNA, 17 bp, Arabidopsis thaliana
tgaaaggagctgcttcc

SEQ ID NO: 145783 - DNA, 17 bp, Arabidopsis thaliana
tgaaaggaggcggttca

SEQ ID NO: 145784 - DNA, 17 bp, Arabidopsis thaliana
tgaaaggattacgggtt

SEQ ID NO: 145785 - DNA, 17 bp, Arabidopsis thaliana
tgaaaggcccaacccac

SEQ ID NO: 145786 - DNA, 17 bp, Arabidopsis thaliana
tgaaaggcctaagtgtg

SEQ ID NO: 145787 - DNA, 17 bp, Arabidopsis thaliana
tgaaaggctaagaattg

SEQ ID NO: 145788 - DNA, 17 bp, Arabidopsis thaliana
tgaaagggactacatcg

SEQ ID NO: 145789 - DNA, 17 bp, Arabidopsis thaliana
tgaaagggcggtattga

SEQ ID NO: 145790 - DNA, 17 bp, Arabidopsis thaliana
tgaaagtaactacatcg

SEQ ID NO: 145791 - DNA, 17 bp, Arabidopsis thaliana
tgaaagtaattacgtac

SEQ ID NO: 145792 - DNA, 17 bp, Arabidopsis thaliana
tgaaagtactacttagc

SEQ ID NO: 145793 - DNA, 17 bp, Arabidopsis thaliana
tgaaagtcactccaccc

SEQ ID NO: 145794 - DNA, 17 bp, Arabidopsis thaliana
tgaaagtccaaactttt

SEQ ID NO: 145795 - DNA, 17 bp, Arabidopsis thaliana
tgaaagtccctaaacgt

SEQ ID NO: 145796 - DNA, 17 bp, Arabidopsis thaliana
tgaaagtccgacatggt

SEQ ID NO: 145797 - DNA, 17 bp, Arabidopsis thaliana
tgaaagtcgatcgtgga

SEQ ID NO: 145798 - DNA, 17 bp, Arabidopsis thaliana
tgaaagtcgccagtatc

SEQ ID NO: 145799 - DNA, 17 bp, Arabidopsis thaliana
tgaaagtctcagaagtg

SEQ ID NO: 145800 - DNA, 17 bp, Arabidopsis thaliana
tgaaagtctttcctgtg

SEQ ID NO: 145801 - DNA, 17 bp, Arabidopsis thaliana
tgaaagtgaatggtctg

SEQ ID NO: 145802 - DNA, 17 bp, Arabidopsis thaliana
tgaaagtgacaacatcg

SEQ ID NO: 145803 - DNA, 17 bp, Arabidopsis thaliana
tgaaagtgaccacatcg

SEQ ID NO: 145804 - DNA, 17 bp, Arabidopsis thaliana
tgaaagtgacgacatcg

SEQ ID NO: 145805 - DNA, 17 bp, Arabidopsis thaliana
tgaaagtgactacaacg

SEQ ID NO: 145806 - DNA, 17 bp, Arabidopsis thaliana
tgaaagtgactacaccc

SEQ ID NO: 145807 - DNA, 17 bp, Arabidopsis thaliana
tgaaagtgactacaccg

SEQ ID NO: 145808 - DNA, 17 bp, Arabidopsis thaliana
tgaaagtgactacataa

SEQ ID NO: 145809 - DNA, 17 bp, Arabidopsis thaliana
tgaaagtgactacatac

SEQ ID NO: 145810 - DNA, 17 bp, Arabidopsis thaliana
tgaaagtgactacatag

SEQ ID NO: 145811 - DNA, 17 bp, Arabidopsis thaliana
tgaaagtgactacatca

SEQ ID NO: 145812 - DNA, 17 bp, Arabidopsis thaliana
tgaaagtgactacatcc

SEQ ID NO: 145813 - DNA, 17 bp, Arabidopsis thaliana
tgaaagtgactacatcg

SEQ ID NO: 145814 - DNA, 17 bp, Arabidopsis thaliana
tgaaagtgactacatct

SEQ ID NO: 145815 - DNA, 17 bp, Arabidopsis thaliana
tgaaagtgactacatgg

SEQ ID NO: 145816 - DNA, 17 bp, Arabidopsis thaliana
tgaaagtgactacttcg

SEQ ID NO: 145817 - DNA, 17 bp, Arabidopsis thaliana
tgaaagtgatcactgaa

SEQ ID NO: 145818 - DNA, 17 bp, Arabidopsis thaliana
tgaaagtgatgagcgag

SEQ ID NO: 145819 - DNA, 17 bp, Arabidopsis thaliana
tgaaagtgattcagttg

SEQ ID NO: 145820 - DNA, 17 bp, Arabidopsis thaliana
tgaaagtgcctacatcc

SEQ ID NO: 145821 - DNA, 17 bp, Arabidopsis thaliana
tgaaagtgcctacatcg

SEQ ID NO: 145822 - DNA, 17 bp, Arabidopsis thaliana
tgaaagtgcctgttttc

SEQ ID NO: 145823 - DNA, 17 bp, Arabidopsis thaliana
tgaaagtggagtgggac

SEQ ID NO: 145824 - DNA, 17 bp, Arabidopsis thaliana
tgaaagtggctacatcg

SEQ ID NO: 145825 - DNA, 17 bp, Arabidopsis thaliana
tgaaagtgttcgaaccg

SEQ ID NO: 145826 - DNA, 17 bp, Arabidopsis thaliana
tgaaagttactaactca

SEQ ID NO: 145827 - DNA, 17 bp, Arabidopsis thaliana
tgaaagttagtaactca

SEQ ID NO: 145828 - DNA, 17 bp, Arabidopsis thaliana
tgaaagttcccgcattt

SEQ ID NO: 145829 - DNA, 17 bp, Arabidopsis thaliana
tgaaagttcggcttttt

SEQ ID NO: 145830 - DNA, 17 bp, Arabidopsis thaliana
tgaaagttcgtgatttt

SEQ ID NO: 145831 - DNA, 17 bp, Arabidopsis thaliana
tgaaagttgagtctcgt

SEQ ID NO: 145832 - DNA, 17 bp, Arabidopsis thaliana
tgaaagttggccaactc

SEQ ID NO: 145833 - DNA, 17 bp, Arabidopsis thaliana
tgaaagttggttaggcc

SEQ ID NO: 145834 - DNA, 17 bp, Arabidopsis thaliana
tgaaagttgtccttggc

SEQ ID NO: 145835 - DNA, 17 bp, Arabidopsis thaliana
tgaaagtttatctgtga

SEQ ID NO: 145836 - DNA, 17 bp, Arabidopsis thaliana
tgaaagtttcccgccaa

SEQ ID NO: 145837 - DNA, 17 bp, Arabidopsis thaliana
tgaaagtttccgccttg

SEQ ID NO: 145838 - DNA, 17 bp, Arabidopsis thaliana
tgaaagtttgttttttg

SEQ ID NO: 145839 - DNA, 17 bp, Arabidopsis thaliana
tgaaagttttttttctt

SEQ ID NO: 145840 - DNA, 17 bp, Arabidopsis thaliana
tgaaatacattttgtgc

SEQ ID NO: 145841 - DNA, 17 bp, Arabidopsis thaliana
tgaaatactgcaactga

SEQ ID NO: 145842 - DNA, 17 bp, Arabidopsis thaliana
tgaaatagccgggctta

SEQ ID NO: 145843 - DNA, 17 bp, Arabidopsis thaliana
tgaaataggcatacgac

SEQ ID NO: 145844 - DNA, 17 bp, Arabidopsis thaliana
tgaaatcaaaagcgttg

SEQ ID NO: 145845 - DNA, 17 bp, Arabidopsis thaliana
tgaaatcacctgtgaca

SEQ ID NO: 145846 - DNA, 17 bp, Arabidopsis thaliana
tgaaatcagggacaaga

SEQ ID NO: 145847 - DNA, 17 bp, Arabidopsis thaliana
tgaaatccaggaggttt

SEQ ID NO: 145848 - DNA, 17 bp, Arabidopsis thaliana
tgaaatccaggatggcc

SEQ ID NO: 145849 - DNA, 17 bp, Arabidopsis thaliana
tgaaatcctggcccacg

SEQ ID NO: 145850 - DNA, 17 bp, Arabidopsis thaliana
tgaaatcctggtccgcc

SEQ ID NO: 145851 - DNA, 17 bp, Arabidopsis thaliana
tgaaatcgagtcaagaa

SEQ ID NO: 145852 - DNA, 17 bp, Arabidopsis thaliana
tgaaatcgatgttgtaa

SEQ ID NO: 145853 - DNA, 17 bp, Arabidopsis thaliana
tgaaatcgcaatgacca

SEQ ID NO: 145854 - DNA, 17 bp, Arabidopsis thaliana
tgaaatcgggagacaag

SEQ ID NO: 145855 - DNA, 17 bp, Arabidopsis thaliana
tgaaatcggtgcgttgt

SEQ ID NO: 145856 - DNA, 17 bp, Arabidopsis thaliana
tgaaatcgtcaatcggc

SEQ ID NO: 145857 - DNA, 17 bp, Arabidopsis thaliana
tgaaatcgtccatcgct

SEQ ID NO: 145858 - DNA, 17 bp, Arabidopsis thaliana
tgaaatcgtcgaccagg

SEQ ID NO: 145859 - DNA, 17 bp, Arabidopsis thaliana
tgaaatcgttcttcaag

SEQ ID NO: 145860 - DNA, 17 bp, Arabidopsis thaliana
tgaaatcgttcttgaag

SEQ ID NO: 145861 - DNA, 17 bp, Arabidopsis thaliana
tgaaatcgtttggtccg

SEQ ID NO: 145862 - DNA, 17 bp, Arabidopsis thaliana
tgaaatctaaccggatt

SEQ ID NO: 145863 - DNA, 17 bp, Arabidopsis thaliana
tgaaatctatgaggttc

SEQ ID NO: 145864 - DNA, 17 bp, Arabidopsis thaliana
tgaaatctcctcctacg

SEQ ID NO: 145865 - DNA, 17 bp, Arabidopsis thaliana
tgaaatctctgatgaac

SEQ ID NO: 145866 - DNA, 17 bp, Arabidopsis thaliana
tgaaatctcttggatct

SEQ ID NO: 145867 - DNA, 17 bp, Arabidopsis thaliana
tgaaatcttagaattga

SEQ ID NO: 145868 - DNA, 17 bp, Arabidopsis thaliana
tgaaatctttatggaac

SEQ ID NO: 145869 - DNA, 17 bp, Arabidopsis thaliana
tgaaatgaccatttaac

SEQ ID NO: 145870 - DNA, 17 bp, Arabidopsis thaliana
tgaaatgacgaaaagtg

SEQ ID NO: 145871 - DNA, 17 bp, Arabidopsis thaliana
tgaaatgacttgagagg

SEQ ID NO: 145872 - DNA, 17 bp, Arabidopsis thaliana
tgaaatgcattaccgta

SEQ ID NO: 145873 - DNA, 17 bp, Arabidopsis thaliana
tgaaatgccactcgaac

SEQ ID NO: 145874 - DNA, 17 bp, Arabidopsis thaliana
tgaaatgcccgtgctgt

SEQ ID NO: 145875 - DNA, 17 bp, Arabidopsis thaliana
tgaaatgcgatacttgg

SEQ ID NO: 145876 - DNA, 17 bp, Arabidopsis thaliana
tgaaatgcggtccatgc

SEQ ID NO: 145877 - DNA, 17 bp, Arabidopsis thaliana
tgaaatgcgtttcattg

SEQ ID NO: 145878 - DNA, 17 bp, Arabidopsis thaliana
tgaaatgcttcagctgc

SEQ ID NO: 145879 - DNA, 17 bp, Arabidopsis thaliana
tgaaatggactaaaccg

SEQ ID NO: 145880 - DNA, 17 bp, Arabidopsis thaliana
tgaaatggagaaagcgg

SEQ ID NO: 145881 - DNA, 17 bp, Arabidopsis thaliana
tgaaatggagttgatca

SEQ ID NO: 145882 - DNA, 17 bp, Arabidopsis thaliana
tgaaatgggctgaccac

SEQ ID NO: 145883 - DNA, 17 bp, Arabidopsis thaliana
tgaaatgggttgttcag

SEQ ID NO: 145884 - DNA, 17 bp, Arabidopsis thaliana
tgaaatgggtttcggtt

SEQ ID NO: 145885 - DNA, 17 bp, Arabidopsis thaliana
tgaaatggtcgcaggct

SEQ ID NO: 145886 - DNA, 17 bp, Arabidopsis thaliana
tgaaatgtccagtccat

SEQ ID NO: 145887 - DNA, 17 bp, Arabidopsis thaliana
tgaaatgtctgaggaga

SEQ ID NO: 145888 - DNA, 17 bp, Arabidopsis thaliana
tgaaatgtgtgacaaat

SEQ ID NO: 145889 - DNA, 17 bp, Arabidopsis thaliana
tgaaattaacagatcga

SEQ ID NO: 145890 - DNA, 17 bp, Arabidopsis thaliana
tgaaattaatcgccgcc

SEQ ID NO: 145891 - DNA, 17 bp, Arabidopsis thaliana
tgaaattcaggaggttc

SEQ ID NO: 145892 - DNA, 17 bp, Arabidopsis thaliana
tgaaattcaggaggttt

SEQ ID NO: 145893 - DNA, 17 bp, Arabidopsis thaliana
tgaaattctttgaattg

SEQ ID NO: 145894 - DNA, 17 bp, Arabidopsis thaliana
tgaaattgatgttgcgc

SEQ ID NO: 145895 - DNA, 17 bp, Arabidopsis thaliana
tgaaattgatgttgtgc

SEQ ID NO: 145896 - DNA, 17 bp, Arabidopsis thaliana
tgaaattgctctcgtag

SEQ ID NO: 145897 - DNA, 17 bp, Arabidopsis thaliana
tgaaattgctcttgtag

SEQ ID NO: 145898 - DNA, 17 bp, Arabidopsis thaliana
tgaaattgctgcttggg

SEQ ID NO: 145899 - DNA, 17 bp, Arabidopsis thaliana
tgaaattggaagcgaat

SEQ ID NO: 145900 - DNA, 17 bp, Arabidopsis thaliana
tgaaatttcatcgtgat

SEQ ID NO: 145901 - DNA, 17 bp, Arabidopsis thaliana
tgaaattttacctttgt

SEQ ID NO: 145902 - DNA, 17 bp, Arabidopsis thaliana
tgaaattttgtctaatt

SEQ ID NO: 145903 - DNA, 17 bp, Arabidopsis thaliana
tgaacaacatgtggcat

SEQ ID NO: 145904 - DNA, 17 bp, Arabidopsis thaliana
tgaacaacggtatcggc

SEQ ID NO: 145905 - DNA, 17 bp, Arabidopsis thaliana
tgaacaagcccgtgact

SEQ ID NO: 145906 - DNA, 17 bp, Arabidopsis thaliana
tgaacaagccggtgatc

SEQ ID NO: 145907 - DNA, 17 bp, Arabidopsis thaliana
tgaacaagcggaggtgg

SEQ ID NO: 145908 - DNA, 17 bp, Arabidopsis thaliana
tgaacaagcggatgaat

SEQ ID NO: 145909 - DNA, 17 bp, Arabidopsis thaliana
tgaacaaggatggtgct

SEQ ID NO: 145910 - DNA, 17 bp, Arabidopsis thaliana
tgaacaaggcccatttc

SEQ ID NO: 145911 - DNA, 17 bp, Arabidopsis thaliana
tgaacaagtaattttga

SEQ ID NO: 145912 - DNA, 17 bp, Arabidopsis thaliana
tgaacaagtaattttgg

SEQ ID NO: 145913 - DNA, 17 bp, Arabidopsis thaliana
tgaacaagtcatcactc

SEQ ID NO: 145914 - DNA, 17 bp, Arabidopsis thaliana
tgaacaatgggctgccc

SEQ ID NO: 145915 - DNA, 17 bp, Arabidopsis thaliana
tgaacaattgaagccgc

SEQ ID NO: 145916 - DNA, 17 bp, Arabidopsis thaliana
tgaacaattggtgcgct

SEQ ID NO: 145917 - DNA, 17 bp, Arabidopsis thaliana
tgaacaatttggcagaa

SEQ ID NO: 145918 - DNA, 17 bp, Arabidopsis thaliana
tgaacacggatgtgttt

SEQ ID NO: 145919 - DNA, 17 bp, Arabidopsis thaliana
tgaacacttagactagt

SEQ ID NO: 145920 - DNA, 17 bp, Arabidopsis thaliana
tgaacagaaagctaggg

SEQ ID NO: 145921 - DNA, 17 bp, Arabidopsis thaliana
tgaacagaaaggtgcaa

SEQ ID NO: 145922 - DNA, 17 bp, Arabidopsis thaliana
tgaacagacccgggttc

SEQ ID NO: 145923 - DNA, 17 bp, Arabidopsis thaliana
tgaacagacccgggttg

SEQ ID NO: 145924 - DNA, 17 bp, Arabidopsis thaliana
tgaacagacccgggttt

SEQ ID NO: 145925 - DNA, 17 bp, Arabidopsis thaliana
tgaacagactgccggtg

SEQ ID NO: 145926 - DNA, 17 bp, Arabidopsis thaliana
tgaacagattgagtgca

SEQ ID NO: 145927 - DNA, 17 bp, Arabidopsis thaliana
tgaacagcctctggtcg

SEQ ID NO: 145928 - DNA, 17 bp, Arabidopsis thaliana
tgaacagcttgcgatat

SEQ ID NO: 145929 - DNA, 17 bp, Arabidopsis thaliana
tgaacaggcccgggtaa

SEQ ID NO: 145930 - DNA, 17 bp, Arabidopsis thaliana
tgaacaggccgatcgtc

SEQ ID NO: 145931 - DNA, 17 bp, Arabidopsis thaliana
tgaacaggccgttttgg

SEQ ID NO: 145932 - DNA, 17 bp, Arabidopsis thaliana
tgaacaggctcttgctg

SEQ ID NO: 145933 - DNA, 17 bp, Arabidopsis thaliana
tgaacaggtgcggaaac

SEQ ID NO: 145934 - DNA, 17 bp, Arabidopsis thaliana
tgaacaggtggcctaac

SEQ ID NO: 145935 - DNA, 17 bp, Arabidopsis thaliana
tgaacaggtttggcagg

SEQ ID NO: 145936 - DNA, 17 bp, Arabidopsis thaliana
tgaacagtagcggaacg

SEQ ID NO: 145937 - DNA, 17 bp, Arabidopsis thaliana
tgaacagtgatggaccg

SEQ ID NO: 145938 - DNA, 17 bp, Arabidopsis thaliana
tgaacagtttcatctgc

SEQ ID NO: 145939 - DNA, 17 bp, Arabidopsis thaliana
tgaacatccggcttccc

SEQ ID NO: 145940 - DNA, 17 bp, Arabidopsis thaliana
tgaacatcgttgtagat

SEQ ID NO: 145941 - DNA, 17 bp, Arabidopsis thaliana
tgaacatctccaatcgg

SEQ ID NO: 145942 - DNA, 17 bp, Arabidopsis thaliana
tgaacatctgtctgggc

SEQ ID NO: 145943 - DNA, 17 bp, Arabidopsis thaliana
tgaacatcttgttgacc

SEQ ID NO: 145944 - DNA, 17 bp, Arabidopsis thaliana
tgaacatgacgcagttt

SEQ ID NO: 145945 - DNA, 17 bp, Arabidopsis thaliana
tgaacatgcaggagctg

SEQ ID NO: 145946 - DNA, 17 bp, Arabidopsis thaliana
tgaacatgccgttttgg

SEQ ID NO: 145947 - DNA, 17 bp, Arabidopsis thaliana
tgaacatgctgtgaccg

SEQ ID NO: 145948 - DNA, 17 bp, Arabidopsis thaliana
tgaacatgctgtggttt

SEQ ID NO: 145949 - DNA, 17 bp, Arabidopsis thaliana
tgaacatggagcaactt

SEQ ID NO: 145950 - DNA, 17 bp, Arabidopsis thaliana
tgaacatgtccgttttt

SEQ ID NO: 145951 - DNA, 17 bp, Arabidopsis thaliana
tgaacattaggctgagg

SEQ ID NO: 145952 - DNA, 17 bp, Arabidopsis thaliana
tgaacattggttttaag

SEQ ID NO: 145953 - DNA, 17 bp, Arabidopsis thaliana
tgaacatttggtcaact

SEQ ID NO: 145954 - DNA, 17 bp, Arabidopsis thaliana
tgaacatttggtccgtc

SEQ ID NO: 145955 - DNA, 17 bp, Arabidopsis thaliana
tgaaccaaaagcaggct

SEQ ID NO: 145956 - DNA, 17 bp, Arabidopsis thaliana
tgaaccaaaccgaggta

SEQ ID NO: 145957 - DNA, 17 bp, Arabidopsis thaliana
tgaaccaaagaacatcc

SEQ ID NO: 145958 - DNA, 17 bp, Arabidopsis thaliana
tgaaccaactgggaatg

SEQ ID NO: 145959 - DNA, 17 bp, Arabidopsis thaliana
tgaaccaagggctcccc

SEQ ID NO: 145960 - DNA, 17 bp, Arabidopsis thaliana
tgaaccaatgatgtgat

SEQ ID NO: 145961 - DNA, 17 bp, Arabidopsis thaliana
tgaaccaatggtgtgat

SEQ ID NO: 145962 - DNA, 17 bp, Arabidopsis thaliana
tgaaccaattggaccaa

SEQ ID NO: 145963 - DNA, 17 bp, Arabidopsis thaliana
tgaaccacaccgcactt

SEQ ID NO: 145964 - DNA, 17 bp, Arabidopsis thaliana
tgaaccacatcagggct

SEQ ID NO: 145965 - DNA, 17 bp, Arabidopsis thaliana
tgaaccacgtggaccaa

SEQ ID NO: 145966 - DNA, 17 bp, Arabidopsis thaliana
tgaaccacgttgagatg

SEQ ID NO: 145967 - DNA, 17 bp, Arabidopsis thaliana
tgaaccagaaatgagtc

SEQ ID NO: 145968 - DNA, 17 bp, Arabidopsis thaliana
tgaaccagcgacaggca

SEQ ID NO: 145969 - DNA, 17 bp, Arabidopsis thaliana
tgaaccaggcttcattc

SEQ ID NO: 145970 - DNA, 17 bp, Arabidopsis thaliana
tgaaccaggttctaagg

SEQ ID NO: 145971 - DNA, 17 bp, Arabidopsis thaliana
tgaaccaggttggacta

SEQ ID NO: 145972 - DNA, 17 bp, Arabidopsis thaliana
tgaaccagttgaactgg

SEQ ID NO: 145973 - DNA, 17 bp, Arabidopsis thaliana
tgaaccataggtgcgat

SEQ ID NO: 145974 - DNA, 17 bp, Arabidopsis thaliana
tgaaccatcaaatggcg

SEQ ID NO: 145975 - DNA, 17 bp, Arabidopsis thaliana
tgaaccatgcccagcgg

SEQ ID NO: 145976 - DNA, 17 bp, Arabidopsis thaliana
tgaaccatgtcgattgt

SEQ ID NO: 145977 - DNA, 17 bp, Arabidopsis thaliana
tgaaccattccccgtgg

SEQ ID NO: 145978 - DNA, 17 bp, Arabidopsis thaliana
tgaaccattcgccgtgg

SEQ ID NO: 145979 - DNA, 17 bp, Arabidopsis thaliana
tgaaccattgcaacttt

SEQ ID NO: 145980 - DNA, 17 bp, Arabidopsis thaliana
tgaaccattggagatgt

SEQ ID NO: 145981 - DNA, 17 bp, Arabidopsis thaliana
tgaaccattttctaaca

SEQ ID NO: 145982 - DNA, 17 bp, Arabidopsis thaliana
tgaacccaaatccgaat

SEQ ID NO: 145983 - DNA, 17 bp, Arabidopsis thaliana
tgaacccaacgatcgga

SEQ ID NO: 145984 - DNA, 17 bp, Arabidopsis thaliana
tgaacccaactgcatct

SEQ ID NO: 145985 - DNA, 17 bp, Arabidopsis thaliana
tgaacccacacattttt

SEQ ID NO: 145986 - DNA, 17 bp, Arabidopsis thaliana
tgaacccacttgtgact

SEQ ID NO: 145987 - DNA, 17 bp, Arabidopsis thaliana
tgaaccccaagatgagt

SEQ ID NO: 145988 - DNA, 17 bp, Arabidopsis thaliana
tgaacccggattacgct

SEQ ID NO: 145989 - DNA, 17 bp, Arabidopsis thaliana
tgaacccgggatcagac

SEQ ID NO: 145990 - DNA, 17 bp, Arabidopsis thaliana
tgaacccgggctcagac

SEQ ID NO: 145991 - DNA, 17 bp, Arabidopsis thaliana
tgaacccgggcttagac

SEQ ID NO: 145992 - DNA, 17 bp, Arabidopsis thaliana
tgaacccgtgttctgct

SEQ ID NO: 145993 - DNA, 17 bp, Arabidopsis thaliana
tgaacccgttggatggg

SEQ ID NO: 145994 - DNA, 17 bp, Arabidopsis thaliana
tgaaccctcattttgcg

SEQ ID NO: 145995 - DNA, 17 bp, Arabidopsis thaliana
tgaaccctggtggtgga

SEQ ID NO: 145996 - DNA, 17 bp, Arabidopsis thaliana
tgaaccctgtagatgga

SEQ ID NO: 145997 - DNA, 17 bp, Arabidopsis thaliana
tgaaccctttctacagt

SEQ ID NO: 145998 - DNA, 17 bp, Arabidopsis thaliana
tgaaccctttctgcagt

SEQ ID NO: 145999 - DNA, 17 bp, Arabidopsis thaliana
tgaaccgaacccggccc

SEQ ID NO: 146000 - DNA, 17 bp, Arabidopsis thaliana
tgaaccgaagtctgtaa

SEQ ID NO: 146001 - DNA, 17 bp, Arabidopsis thaliana
tgaaccgaccagttaac

SEQ ID NO: 146002 - DNA, 17 bp, Arabidopsis thaliana
tgaaccgacgacctcta

SEQ ID NO: 146003 - DNA, 17 bp, Arabidopsis thaliana
tgaaccgacgcggatta

SEQ ID NO: 146004 - DNA, 17 bp, Arabidopsis thaliana
tgaaccgacgcggattg

SEQ ID NO: 146005 - DNA, 17 bp, Arabidopsis thaliana
tgaaccgactagtttag

SEQ ID NO: 146006 - DNA, 17 bp, Arabidopsis thaliana
tgaaccgactctgagat

SEQ ID NO: 146007 - DNA, 17 bp, Arabidopsis thaliana
tgaaccgagtgccgctc

SEQ ID NO: 146008 - DNA, 17 bp, Arabidopsis thaliana
tgaaccgatgacgcctc

SEQ ID NO: 146009 - DNA, 17 bp, Arabidopsis thaliana
tgaaccgattaggaggg

SEQ ID NO: 146010 - DNA, 17 bp, Arabidopsis thaliana
tgaaccgattgaaccgg

SEQ ID NO: 146011 - DNA, 17 bp, Arabidopsis thaliana
tgaaccgcaaccgtccg

SEQ ID NO: 146012 - DNA, 17 bp, Arabidopsis thaliana
tgaaccgcaccgcactt

SEQ ID NO: 146013 - DNA, 17 bp, Arabidopsis thaliana
tgaaccgcaccgcattt

SEQ ID NO: 146014 - DNA, 17 bp, Arabidopsis thaliana
tgaaccgcacgtctcca

SEQ ID NO: 146015 - DNA, 17 bp, Arabidopsis thaliana
tgaaccgcactgtcctt

SEQ ID NO: 146016 - DNA, 17 bp, Arabidopsis thaliana
tgaaccgcatttgtacc

SEQ ID NO: 146017 - DNA, 17 bp, Arabidopsis thaliana
tgaaccgcccgtttccg

SEQ ID NO: 146018 - DNA, 17 bp, Arabidopsis thaliana
tgaaccgcgaaatcttg

SEQ ID NO: 146019 - DNA, 17 bp, Arabidopsis thaliana
tgaaccgctggctcgtt

SEQ ID NO: 146020 - DNA, 17 bp, Arabidopsis thaliana
tgaaccgctggctctct

SEQ ID NO: 146021 - DNA, 17 bp, Arabidopsis thaliana
tgaaccgctggctcttt

SEQ ID NO: 146022 - DNA, 17 bp, Arabidopsis thaliana
tgaaccgcttgatctgc

SEQ ID NO: 146023 - DNA, 17 bp, Arabidopsis thaliana
tgaaccggaagccgggt

SEQ ID NO: 146024 - DNA, 17 bp, Arabidopsis thaliana
tgaaccggactaccttt

SEQ ID NO: 146025 - DNA, 17 bp, Arabidopsis thaliana
tgaaccggagcagcgga

SEQ ID NO: 146026 - DNA, 17 bp, Arabidopsis thaliana
tgaaccggatgtatgca

SEQ ID NO: 146027 - DNA, 17 bp, Arabidopsis thaliana
tgaaccggctgggtgtg

SEQ ID NO: 146028 - DNA, 17 bp, Arabidopsis thaliana
tgaaccgggagaaagca

SEQ ID NO: 146029 - DNA, 17 bp, Arabidopsis thaliana
tgaaccggtccttctta

SEQ ID NO: 146030 - DNA, 17 bp, Arabidopsis thaliana
tgaaccggtgacctatt

SEQ ID NO: 146031 - DNA, 17 bp, Arabidopsis thaliana
tgaaccgtatcgcactt

SEQ ID NO: 146032 - DNA, 17 bp, Arabidopsis thaliana
tgaaccgtccctgccag

SEQ ID NO: 146033 - DNA, 17 bp, Arabidopsis thaliana
tgaaccgtcctctaggt

SEQ ID NO: 146034 - DNA, 17 bp, Arabidopsis thaliana
tgaaccgtgactgattt

SEQ ID NO: 146035 - DNA, 17 bp, Arabidopsis thaliana
tgaaccgtgctatcgtg

SEQ ID NO: 146036 - DNA, 17 bp, Arabidopsis thaliana
tgaaccgttcgccctgg

SEQ ID NO: 146037 - DNA, 17 bp, Arabidopsis thaliana
tgaaccgttcgccgtgg

SEQ ID NO: 146038 - DNA, 17 bp, Arabidopsis thaliana
tgaaccgttcgctttgg

SEQ ID NO: 146039 - DNA, 17 bp, Arabidopsis thaliana
tgaaccgtttggttaac

SEQ ID NO: 146040 - DNA, 17 bp, Arabidopsis thaliana
tgaacctaacacttgga

SEQ ID NO: 146041 - DNA, 17 bp, Arabidopsis thaliana
tgaacctaagactatgg

SEQ ID NO: 146042 - DNA, 17 bp, Arabidopsis thaliana
tgaacctaaggacttgg

SEQ ID NO: 146043 - DNA, 17 bp, Arabidopsis thaliana
tgaacctacacattttt

SEQ ID NO: 146044 - DNA, 17 bp, Arabidopsis thaliana
tgaacctagaacaccgc

SEQ ID NO: 146045 - DNA, 17 bp, Arabidopsis thaliana
tgaacctctcatgctga

SEQ ID NO: 146046 - DNA, 17 bp, Arabidopsis thaliana
tgaacctgagctcagtt

SEQ ID NO: 146047 - DNA, 17 bp, Arabidopsis thaliana
tgaacctgatgtgggtc

SEQ ID NO: 146048 - DNA, 17 bp, Arabidopsis thaliana
tgaacctgcaatcatga

SEQ ID NO: 146049 - DNA, 17 bp, Arabidopsis thaliana
tgaacctgccagcatga

SEQ ID NO: 146050 - DNA, 17 bp, Arabidopsis thaliana
tgaacctgccagcatgc

SEQ ID NO: 146051 - DNA, 17 bp, Arabidopsis thaliana
tgaacctgcggaaggac

SEQ ID NO: 146052 - DNA, 17 bp, Arabidopsis thaliana
tgaacctgcggaaggat

SEQ ID NO: 146053 - DNA, 17 bp, Arabidopsis thaliana
tgaacctgcggggatca

SEQ ID NO: 146054 - DNA, 17 bp, Arabidopsis thaliana
tgaacctgctgttgaag

SEQ ID NO: 146055 - DNA, 17 bp, Arabidopsis thaliana
tgaaccttagctcagtt

SEQ ID NO: 146056 - DNA, 17 bp, Arabidopsis thaliana
tgaaccttgcgatgggt

SEQ ID NO: 146057 - DNA, 17 bp, Arabidopsis thaliana
tgaaccttgggatggat

SEQ ID NO: 146058 - DNA, 17 bp, Arabidopsis thaliana
tgaaccttgggatgggt

SEQ ID NO: 146059 - DNA, 17 bp, Arabidopsis thaliana
tgaaccttgggatggtt

SEQ ID NO: 146060 - DNA, 17 bp, Arabidopsis thaliana
tgaaccttgtgatgggt

SEQ ID NO: 146061 - DNA, 17 bp, Arabidopsis thaliana
tgaaccttttgcacgaa

SEQ ID NO: 146062 - DNA, 17 bp, Arabidopsis thaliana
tgaacgaattcagactg

SEQ ID NO: 146063 - DNA, 17 bp, Arabidopsis thaliana
tgaacgaattcagattg

SEQ ID NO: 146064 - DNA, 17 bp, Arabidopsis thaliana
tgaacgacagatctttg

SEQ ID NO: 146065 - DNA, 17 bp, Arabidopsis thaliana
tgaacgacatgtggccc

SEQ ID NO: 146066 - DNA, 17 bp, Arabidopsis thaliana
tgaacgacatgtgtccc

SEQ ID NO: 146067 - DNA, 17 bp, Arabidopsis thaliana
tgaacgacctgtgtccc

SEQ ID NO: 146068 - DNA, 17 bp, Arabidopsis thaliana
tgaacgacctgtgtcct

SEQ ID NO: 146069 - DNA, 17 bp, Arabidopsis thaliana
tgaacgacctgtgtgcc

SEQ ID NO: 146070 - DNA, 17 bp, Arabidopsis thaliana
tgaacgactctcggcaa

SEQ ID NO: 146071 - DNA, 17 bp, Arabidopsis thaliana
tgaacgactggttgagc

SEQ ID NO: 146072 - DNA, 17 bp, Arabidopsis thaliana
tgaacgagaatcggtcg

SEQ ID NO: 146073 - DNA, 17 bp, Arabidopsis thaliana
tgaacgagacctcagcc

SEQ ID NO: 146074 - DNA, 17 bp, Arabidopsis thaliana
tgaacgagatgatgatt

SEQ ID NO: 146075 - DNA, 17 bp, Arabidopsis thaliana
tgaacgagctgaaactg

SEQ ID NO: 146076 - DNA, 17 bp, Arabidopsis thaliana
tgaacgagttcagactg

SEQ ID NO: 146077 - DNA, 17 bp, Arabidopsis thaliana
tgaacgatagacttgac

SEQ ID NO: 146078 - DNA, 17 bp, Arabidopsis thaliana
tgaacgatgtgcgactt

SEQ ID NO: 146079 - DNA, 17 bp, Arabidopsis thaliana
tgaacgattgacttgtt

SEQ ID NO: 146080 - DNA, 17 bp, Arabidopsis thaliana
tgaacgcaagttgcgcc

SEQ ID NO: 146081 - DNA, 17 bp, Arabidopsis thaliana
tgaacgcacgttggctc

SEQ ID NO: 146082 - DNA, 17 bp, Arabidopsis thaliana
tgaacgcagcgtcagcg

SEQ ID NO: 146083 - DNA, 17 bp, Arabidopsis thaliana
tgaacgccacttgcaca

SEQ ID NO: 146084 - DNA, 17 bp, Arabidopsis thaliana
tgaacgccaggctatca

SEQ ID NO: 146085 - DNA, 17 bp, Arabidopsis thaliana
tgaacgcctatgcaacc

SEQ ID NO: 146086 - DNA, 17 bp, Arabidopsis thaliana
tgaacgcctctaagtca

SEQ ID NO: 146087 - DNA, 17 bp, Arabidopsis thaliana
tgaacgcctgagttagt

SEQ ID NO: 146088 - DNA, 17 bp, Arabidopsis thaliana
tgaacgcctttaagatc

SEQ ID NO: 146089 - DNA, 17 bp, Arabidopsis thaliana
tgaacgcgacttcgtgg

SEQ ID NO: 146090 - DNA, 17 bp, Arabidopsis thaliana
tgaacgcgacttgtctg

SEQ ID NO: 146091 - DNA, 17 bp, Arabidopsis thaliana
tgaacgcgcgtctattg

SEQ ID NO: 146092 - DNA, 17 bp, Arabidopsis thaliana
tgaacgcggattacggg

SEQ ID NO: 146093 - DNA, 17 bp, Arabidopsis thaliana
tgaacgcggattacggt

SEQ ID NO: 146094 - DNA, 17 bp, Arabidopsis thaliana
tgaacgcggattccctt

SEQ ID NO: 146095 - DNA, 17 bp, Arabidopsis thaliana
tgaacgctattagtttg

SEQ ID NO: 146096 - DNA, 17 bp, Arabidopsis thaliana
tgaacgctccgcagctc

SEQ ID NO: 146097 - DNA, 17 bp, Arabidopsis thaliana
tgaacgctgattacggt

SEQ ID NO: 146098 - DNA, 17 bp, Arabidopsis thaliana
tgaacgctgcaggtgca

SEQ ID NO: 146099 - DNA, 17 bp, Arabidopsis thaliana
tgaacggaggcaataat

SEQ ID NO: 146100 - DNA, 17 bp, Arabidopsis thaliana
tgaacggattgggaacg

SEQ ID NO: 146101 - DNA, 17 bp, Arabidopsis thaliana
tgaacggcccatcagaa

SEQ ID NO: 146102 - DNA, 17 bp, Arabidopsis thaliana
tgaacggcctatgtttg

SEQ ID NO: 146103 - DNA, 17 bp, Arabidopsis thaliana
tgaacggcggccgtaac

SEQ ID NO: 146104 - DNA, 17 bp, Arabidopsis thaliana
tgaacggctgtagttgg

SEQ ID NO: 146105 - DNA, 17 bp, Arabidopsis thaliana
tgaacgggattagatgg

SEQ ID NO: 146106 - DNA, 17 bp, Arabidopsis thaliana
tgaacgggcttgattat

SEQ ID NO: 146107 - DNA, 17 bp, Arabidopsis thaliana
tgaacggggctaagcga

SEQ ID NO: 146108 - DNA, 17 bp, Arabidopsis thaliana
tgaacgggttcgcttga

SEQ ID NO: 146109 - DNA, 17 bp, Arabidopsis thaliana
tgaacgggttggcggga

SEQ ID NO: 146110 - DNA, 17 bp, Arabidopsis thaliana
tgaacgggtttgacagg

SEQ ID NO: 146111 - DNA, 17 bp, Arabidopsis thaliana
tgaacgggtttggcagg

SEQ ID NO: 146112 - DNA, 17 bp, Arabidopsis thaliana
tgaacgggttttgcgag

SEQ ID NO: 146113 - DNA, 17 bp, Arabidopsis thaliana
tgaacgggttttgcggg

SEQ ID NO: 146114 - DNA, 17 bp, Arabidopsis thaliana
tgaacggtttagattga

SEQ ID NO: 146115 - DNA, 17 bp, Arabidopsis thaliana
tgaacgtcatcgttttg

SEQ ID NO: 146116 - DNA, 17 bp, Arabidopsis thaliana
tgaacgtgattttgcga

SEQ ID NO: 146117 - DNA, 17 bp, Arabidopsis thaliana
tgaactaaattggatca

SEQ ID NO: 146118 - DNA, 17 bp, Arabidopsis thaliana
tgaactaccggggcaag

SEQ ID NO: 146119 - DNA, 17 bp, Arabidopsis thaliana
tgaactacgagaagctt

SEQ ID NO: 146120 - DNA, 17 bp, Arabidopsis thaliana
tgaactacgctatcctg

SEQ ID NO: 146121 - DNA, 17 bp, Arabidopsis thaliana
tgaactacgggttggtt

SEQ ID NO: 146122 - DNA, 17 bp, Arabidopsis thaliana
tgaactagaataggtgc

SEQ ID NO: 146123 - DNA, 17 bp, Arabidopsis thaliana
tgaactaggatgggtga

SEQ ID NO: 146124 - DNA, 17 bp, Arabidopsis thaliana
tgaactaggattacggt

SEQ ID NO: 146125 - DNA, 17 bp, Arabidopsis thaliana
tgaactagtccactggc

SEQ ID NO: 146126 - DNA, 17 bp, Arabidopsis thaliana
tgaactagttgacaact

SEQ ID NO: 146127 - DNA, 17 bp, Arabidopsis thaliana
tgaactagttggagttg

SEQ ID NO: 146128 - DNA, 17 bp, Arabidopsis thaliana
tgaactataggctcgta

SEQ ID NO: 146129 - DNA, 17 bp, Arabidopsis thaliana
tgaactatgcctgaccg

SEQ ID NO: 146130 - DNA, 17 bp, Arabidopsis thaliana
tgaactatgcctgacgg

SEQ ID NO: 146131 - DNA, 17 bp, Arabidopsis thaliana
tgaactatgcctgactg

SEQ ID NO: 146132 - DNA, 17 bp, Arabidopsis thaliana
tgaactatgcctgagca

SEQ ID NO: 146133 - DNA, 17 bp, Arabidopsis thaliana
tgaactatgcctgagcg

SEQ ID NO: 146134 - DNA, 17 bp, Arabidopsis thaliana
tgaactatgcttgagcg

SEQ ID NO: 146135 - DNA, 17 bp, Arabidopsis thaliana
tgaactatggacggaat

SEQ ID NO: 146136 - DNA, 17 bp, Arabidopsis thaliana
tgaactattccacatca

SEQ ID NO: 146137 - DNA, 17 bp, Arabidopsis thaliana
tgaactattgtgttcaa

SEQ ID NO: 146138 - DNA, 17 bp, Arabidopsis thaliana
tgaactcaaggctccaa

SEQ ID NO: 146139 - DNA, 17 bp, Arabidopsis thaliana
tgaactcactatttccg

SEQ ID NO: 146140 - DNA, 17 bp, Arabidopsis thaliana
tgaactcagcttgctca

SEQ ID NO: 146141 - DNA, 17 bp, Arabidopsis thaliana
tgaactcatcttcacca

SEQ ID NO: 146142 - DNA, 17 bp, Arabidopsis thaliana
tgaactcatttggctaa

SEQ ID NO: 146143 - DNA, 17 bp, Arabidopsis thaliana
tgaactccaggattgga

SEQ ID NO: 146144 - DNA, 17 bp, Arabidopsis thaliana
tgaactccggtgtatcg

SEQ ID NO: 146145 - DNA, 17 bp, Arabidopsis thaliana
tgaactcgacctcactc

SEQ ID NO: 146146 - DNA, 17 bp, Arabidopsis thaliana
tgaactcggattacggt

SEQ ID NO: 146147 - DNA, 17 bp, Arabidopsis thaliana
tgaactcgtaaaactct

SEQ ID NO: 146148 - DNA, 17 bp, Arabidopsis thaliana
tgaactcgtctgggtac

SEQ ID NO: 146149 - DNA, 17 bp, Arabidopsis thaliana
tgaactcgtggaccatc

SEQ ID NO: 146150 - DNA, 17 bp, Arabidopsis thaliana
tgaactcgttcagccaa

SEQ ID NO: 146151 - DNA, 17 bp, Arabidopsis thaliana
tgaactctacgcagcga

SEQ ID NO: 146152 - DNA, 17 bp, Arabidopsis thaliana
tgaactctatactgcaa

SEQ ID NO: 146153 - DNA, 17 bp, Arabidopsis thaliana
tgaactctcacataatc

SEQ ID NO: 146154 - DNA, 17 bp, Arabidopsis thaliana
tgaactctcgatctggt

SEQ ID NO: 146155 - DNA, 17 bp, Arabidopsis thaliana
tgaactctcggcaacgc

SEQ ID NO: 146156 - DNA, 17 bp, Arabidopsis thaliana
tgaactctcggcaacgg

SEQ ID NO: 146157 - DNA, 17 bp, Arabidopsis thaliana
tgaactctctgcagatt

SEQ ID NO: 146158 - DNA, 17 bp, Arabidopsis thaliana
tgaactctgacgtcggc

SEQ ID NO: 146159 - DNA, 17 bp, Arabidopsis thaliana
tgaactctgtcatccaa

SEQ ID NO: 146160 - DNA, 17 bp, Arabidopsis thaliana
tgaactcttcccgaggc

SEQ ID NO: 146161 - DNA, 17 bp, Arabidopsis thaliana
tgaactcttcgtcgcga

SEQ ID NO: 146162 - DNA, 17 bp, Arabidopsis thaliana
tgaactgaaactgagat

SEQ ID NO: 146163 - DNA, 17 bp, Arabidopsis thaliana
tgaactgaccggtttgg

SEQ ID NO: 146164 - DNA, 17 bp, Arabidopsis thaliana
tgaactgacgggttagc

SEQ ID NO: 146165 - DNA, 17 bp, Arabidopsis thaliana
tgaactgagatccgttg

SEQ ID NO: 146166 - DNA, 17 bp, Arabidopsis thaliana
tgaactgcaccgcactt

SEQ ID NO: 146167 - DNA, 17 bp, Arabidopsis thaliana
tgaactgcagaatcccg

SEQ ID NO: 146168 - DNA, 17 bp, Arabidopsis thaliana
tgaactgcctcttccct

SEQ ID NO: 146169 - DNA, 17 bp, Arabidopsis thaliana
tgaactgcgacggaaca

SEQ ID NO: 146170 - DNA, 17 bp, Arabidopsis thaliana
tgaactgcgaggactgc

SEQ ID NO: 146171 - DNA, 17 bp, Arabidopsis thaliana
tgaactgcgttttattt

SEQ ID NO: 146172 - DNA, 17 bp, Arabidopsis thaliana
tgaactgctccggtcgg

SEQ ID NO: 146173 - DNA, 17 bp, Arabidopsis thaliana
tgaactgctgctgaatc

SEQ ID NO: 146174 - DNA, 17 bp, Arabidopsis thaliana
tgaactgcttcaacgac

SEQ ID NO: 146175 - DNA, 17 bp, Arabidopsis thaliana
tgaactgcttgatttgc

SEQ ID NO: 146176 - DNA, 17 bp, Arabidopsis thaliana
tgaactgcttgtggatg

SEQ ID NO: 146177 - DNA, 17 bp, Arabidopsis thaliana
tgaactggccggatgtg

SEQ ID NO: 146178 - DNA, 17 bp, Arabidopsis thaliana
tgaactggttgagcgtt

SEQ ID NO: 146179 - DNA, 17 bp, Arabidopsis thaliana
tgaactggttgttgacc

SEQ ID NO: 146180 - DNA, 17 bp, Arabidopsis thaliana
tgaactgtaccgcactt

SEQ ID NO: 146181 - DNA, 17 bp, Arabidopsis thaliana
tgaactgtcctggtgag

SEQ ID NO: 146182 - DNA, 17 bp, Arabidopsis thaliana
tgaactgtctttgactt

SEQ ID NO: 146183 - DNA, 17 bp, Arabidopsis thaliana
tgaactgtgaaactgcg

SEQ ID NO: 146184 - DNA, 17 bp, Arabidopsis thaliana
tgaactgtgtctttggg

SEQ ID NO: 146185 - DNA, 17 bp, Arabidopsis thaliana
tgaactgtgtctttgtg

SEQ ID NO: 146186 - DNA, 17 bp, Arabidopsis thaliana
tgaactgttcaatgact

SEQ ID NO: 146187 - DNA, 17 bp, Arabidopsis thaliana
tgaactgttgtctactg

SEQ ID NO: 146188 - DNA, 17 bp, Arabidopsis thaliana
tgaacttaaaccgcaac

SEQ ID NO: 146189 - DNA, 17 bp, Arabidopsis thaliana
tgaacttacctgacaga

SEQ ID NO: 146190 - DNA, 17 bp, Arabidopsis thaliana
tgaacttagaccatctc

SEQ ID NO: 146191 - DNA, 17 bp, Arabidopsis thaliana
tgaacttattggccttt

SEQ ID NO: 146192 - DNA, 17 bp, Arabidopsis thaliana
tgaacttatttacaatg

SEQ ID NO: 146193 - DNA, 17 bp, Arabidopsis thaliana
tgaacttcaatggctga

SEQ ID NO: 146194 - DNA, 17 bp, Arabidopsis thaliana
tgaacttcccctggggg

SEQ ID NO: 146195 - DNA, 17 bp, Arabidopsis thaliana
tgaacttcccgggaggt

SEQ ID NO: 146196 - DNA, 17 bp, Arabidopsis thaliana
tgaacttcgctctccgg

SEQ ID NO: 146197 - DNA, 17 bp, Arabidopsis thaliana
tgaacttctataccgtg

SEQ ID NO: 146198 - DNA, 17 bp, Arabidopsis thaliana
tgaacttctatctttgt

SEQ ID NO: 146199 - DNA, 17 bp, Arabidopsis thaliana
tgaacttctctcctacc

SEQ ID NO: 146200 - DNA, 17 bp, Arabidopsis thaliana
tgaacttctgccgacag

SEQ ID NO: 146201 - DNA, 17 bp, Arabidopsis thaliana
tgaacttctggctcatt

SEQ ID NO: 146202 - DNA, 17 bp, Arabidopsis thaliana
tgaacttcttggttgtc

SEQ ID NO: 146203 - DNA, 17 bp, Arabidopsis thaliana
tgaacttctttcagttt

SEQ ID NO: 146204 - DNA, 17 bp, Arabidopsis thaliana
tgaacttgactgctgac

SEQ ID NO: 146205 - DNA, 17 bp, Arabidopsis thaliana
tgaacttgctatcagac

SEQ ID NO: 146206 - DNA, 17 bp, Arabidopsis thaliana
tgaacttggagtctacg

SEQ ID NO: 146207 - DNA, 17 bp, Arabidopsis thaliana
tgaacttggcatgtgat

SEQ ID NO: 146208 - DNA, 17 bp, Arabidopsis thaliana
tgaacttggttgatggc

SEQ ID NO: 146209 - DNA, 17 bp, Arabidopsis thaliana
tgaacttgtttgccctc

SEQ ID NO: 146210 - DNA, 17 bp, Arabidopsis thaliana
tgaactttatcatcacc

SEQ ID NO: 146211 - DNA, 17 bp, Arabidopsis thaliana
tgaactttcaccttttg

SEQ ID NO: 146212 - DNA, 17 bp, Arabidopsis thaliana
tgaactttcagacttag

SEQ ID NO: 146213 - DNA, 17 bp, Arabidopsis thaliana
tgaactttgcaggctgt

SEQ ID NO: 146214 - DNA, 17 bp, Arabidopsis thaliana
tgaactttgcctgagcg

SEQ ID NO: 146215 - DNA, 17 bp, Arabidopsis thaliana
tgaactttgcggttgcg

SEQ ID NO: 146216 - DNA, 17 bp, Arabidopsis thaliana
tgaactttggccagatc

SEQ ID NO: 146217 - DNA, 17 bp, Arabidopsis thaliana
tgaactttgtatcgcgc

SEQ ID NO: 146218 - DNA, 17 bp, Arabidopsis thaliana
tgaactttgttgcggga

SEQ ID NO: 146219 - DNA, 17 bp, Arabidopsis thaliana
tgaacttttgatttagg

SEQ ID NO: 146220 - DNA, 17 bp, Arabidopsis thaliana
tgaacttttggcttttg

SEQ ID NO: 146221 - DNA, 17 bp, Arabidopsis thaliana
tgaacttttgtcgctaa

SEQ ID NO: 146222 - DNA, 17 bp, Arabidopsis thaliana
tgaactttttaaggctc

SEQ ID NO: 146223 - DNA, 17 bp, Arabidopsis thaliana
tgaactttttcgggcat

SEQ ID NO: 146224 - DNA, 17 bp, Arabidopsis thaliana
tgaactttttgctgcct

SEQ ID NO: 146225 - DNA, 17 bp, Arabidopsis thaliana
tgaagaaagtgttgcgc

SEQ ID NO: 146226 - DNA, 17 bp, Arabidopsis thaliana
tgaagaaattcaaccaa

SEQ ID NO: 146227 - DNA, 17 bp, Arabidopsis thaliana
tgaagaaattgtgatgt

SEQ ID NO: 146228 - DNA, 17 bp, Arabidopsis thaliana
tgaagaacttccttgct

SEQ ID NO: 146229 - DNA, 17 bp, Arabidopsis thaliana
tgaagaacttggatttg

SEQ ID NO: 146230 - DNA, 17 bp, Arabidopsis thaliana
tgaagaagaatgagacc

SEQ ID NO: 146231 - DNA, 17 bp, Arabidopsis thaliana
tgaagaagcagggcacg

SEQ ID NO: 146232 - DNA, 17 bp, Arabidopsis thaliana
tgaagaagcttaaggtc

SEQ ID NO: 146233 - DNA, 17 bp, Arabidopsis thaliana
tgaagaaggctgggaat

SEQ ID NO: 146234 - DNA, 17 bp, Arabidopsis thaliana
tgaagaagttgttgaag

SEQ ID NO: 146235 - DNA, 17 bp, Arabidopsis thaliana
tgaagaatgactcgctt

SEQ ID NO: 146236 - DNA, 17 bp, Arabidopsis thaliana
tgaagaatgagccggcg

SEQ ID NO: 146237 - DNA, 17 bp, Arabidopsis thaliana
tgaagaatggcccgctt

SEQ ID NO: 146238 - DNA, 17 bp, Arabidopsis thaliana
tgaagaatggtgattag

SEQ ID NO: 146239 - DNA, 17 bp, Arabidopsis thaliana
tgaagaattctgctcgt

SEQ ID NO: 146240 - DNA, 17 bp, Arabidopsis thaliana
tgaagacactcgacctc

SEQ ID NO: 146241 - DNA, 17 bp, Arabidopsis thaliana
tgaagacactgtcggca

SEQ ID NO: 146242 - DNA, 17 bp, Arabidopsis thaliana
tgaagacatcctaagag

SEQ ID NO: 146243 - DNA, 17 bp, Arabidopsis thaliana
tgaagacatgccatcca

SEQ ID NO: 146244 - DNA, 17 bp, Arabidopsis thaliana
tgaagacattcctcctc

SEQ ID NO: 146245 - DNA, 17 bp, Arabidopsis thaliana
tgaagaccacatctcac

SEQ ID NO: 146246 - DNA, 17 bp, Arabidopsis thaliana
tgaagacctgattcctc

SEQ ID NO: 146247 - DNA, 17 bp, Arabidopsis thaliana
tgaagacgacggcggcg

SEQ ID NO: 146248 - DNA, 17 bp, Arabidopsis thaliana
tgaagacgagaaacgcg

SEQ ID NO: 146249 - DNA, 17 bp, Arabidopsis thaliana
tgaagacgatccagatg

SEQ ID NO: 146250 - DNA, 17 bp, Arabidopsis thaliana
tgaagacgatttttggt

SEQ ID NO: 146251 - DNA, 17 bp, Arabidopsis thaliana
tgaagacgcaagcacgc

SEQ ID NO: 146252 - DNA, 17 bp, Arabidopsis thaliana
tgaagacgctcctcgtc

SEQ ID NO: 146253 - DNA, 17 bp, Arabidopsis thaliana
tgaagacggatccaacc

SEQ ID NO: 146254 - DNA, 17 bp, Arabidopsis thaliana
tgaagacggtgatgatg

SEQ ID NO: 146255 - DNA, 17 bp, Arabidopsis thaliana
tgaagacgtccaaagtc

SEQ ID NO: 146256 - DNA, 17 bp, Arabidopsis thaliana
tgaagacgtgatcgagt

SEQ ID NO: 146257 - DNA, 17 bp, Arabidopsis thaliana
tgaagactacccgtggg

SEQ ID NO: 146258 - DNA, 17 bp, Arabidopsis thaliana
tgaagactatgcagttt

SEQ ID NO: 146259 - DNA, 17 bp, Arabidopsis thaliana
tgaagactccataaggt

SEQ ID NO: 146260 - DNA, 17 bp, Arabidopsis thaliana
tgaagactctaaagtgg

SEQ ID NO: 146261 - DNA, 17 bp, Arabidopsis thaliana
tgaagactctagatatg

SEQ ID NO: 146262 - DNA, 17 bp, Arabidopsis thaliana
tgaagactcttttgctc

SEQ ID NO: 146263 - DNA, 17 bp, Arabidopsis thaliana
tgaagactgtagccgac

SEQ ID NO: 146264 - DNA, 17 bp, Arabidopsis thaliana
tgaagactgtgctcgag

SEQ ID NO: 146265 - DNA, 17 bp, Arabidopsis thaliana
tgaagacttaggtggat

SEQ ID NO: 146266 - DNA, 17 bp, Arabidopsis thaliana
tgaagacttcacaatcc

SEQ ID NO: 146267 - DNA, 17 bp, Arabidopsis thaliana
tgaagacttgatgaacc

SEQ ID NO: 146268 - DNA, 17 bp, Arabidopsis thaliana
tgaagactttatgatct

SEQ ID NO: 146269 - DNA, 17 bp, Arabidopsis thaliana
tgaagagagatgaccaa

SEQ ID NO: 146270 - DNA, 17 bp, Arabidopsis thaliana
tgaagagagttagcctt

SEQ ID NO: 146271 - DNA, 17 bp, Arabidopsis thaliana
tgaagagagttggccaa

SEQ ID NO: 146272 - DNA, 17 bp, Arabidopsis thaliana
tgaagagattacgggtt

SEQ ID NO: 146273 - DNA, 17 bp, Arabidopsis thaliana
tgaagagcccaccaacc

SEQ ID NO: 146274 - DNA, 17 bp, Arabidopsis thaliana
tgaagagctctgatttc

SEQ ID NO: 146275 - DNA, 17 bp, Arabidopsis thaliana
tgaagagctcttggaag

SEQ ID NO: 146276 - DNA, 17 bp, Arabidopsis thaliana
tgaagaggacctccaga

SEQ ID NO: 146277 - DNA, 17 bp, Arabidopsis thaliana
tgaagaggacttggaac

SEQ ID NO: 146278 - DNA, 17 bp, Arabidopsis thaliana
tgaagaggatagttgtt

SEQ ID NO: 146279 - DNA, 17 bp, Arabidopsis thaliana
tgaagaggcatagacgg

SEQ ID NO: 146280 - DNA, 17 bp, Arabidopsis thaliana
tgaagaggccagagaaa

SEQ ID NO: 146281 - DNA, 17 bp, Arabidopsis thaliana
tgaagagggcacgtctg

SEQ ID NO: 146282 - DNA, 17 bp, Arabidopsis thaliana
tgaagagggcgtgggtt

SEQ ID NO: 146283 - DNA, 17 bp, Arabidopsis thaliana
tgaagaggtcttcatcc

SEQ ID NO: 146284 - DNA, 17 bp, Arabidopsis thaliana
tgaagaggtgtcctccg

SEQ ID NO: 146285 - DNA, 17 bp, Arabidopsis thaliana
tgaagagtcatcacagc

SEQ ID NO: 146286 - DNA, 17 bp, Arabidopsis thaliana
tgaagataatggcctac

SEQ ID NO: 146287 - DNA, 17 bp, Arabidopsis thaliana
tgaagatacagattgct

SEQ ID NO: 146288 - DNA, 17 bp, Arabidopsis thaliana
tgaagataccaactgct

SEQ ID NO: 146289 - DNA, 17 bp, Arabidopsis thaliana
tgaagatacccttgtgg

SEQ ID NO: 146290 - DNA, 17 bp, Arabidopsis thaliana
tgaagatccgcaccgaa

SEQ ID NO: 146291 - DNA, 17 bp, Arabidopsis thaliana
tgaagatccgttcttga

SEQ ID NO: 146292 - DNA, 17 bp, Arabidopsis thaliana
tgaagatccgtttgcgg

SEQ ID NO: 146293 - DNA, 17 bp, Arabidopsis thaliana
tgaagatcctctggaat

SEQ ID NO: 146294 - DNA, 17 bp, Arabidopsis thaliana
tgaagatcggtgttctc

SEQ ID NO: 146295 - DNA, 17 bp, Arabidopsis thaliana
tgaagatcgtacatggg

SEQ ID NO: 146296 - DNA, 17 bp, Arabidopsis thaliana
tgaagatctgaatctat

SEQ ID NO: 146297 - DNA, 17 bp, Arabidopsis thaliana
tgaagatctgcaggttt

SEQ ID NO: 146298 - DNA, 17 bp, Arabidopsis thaliana
tgaagatctggttgcgg

SEQ ID NO: 146299 - DNA, 17 bp, Arabidopsis thaliana
tgaagatcttgttcatg

SEQ ID NO: 146300 - DNA, 17 bp, Arabidopsis thaliana
tgaagatcttttgtttc

SEQ ID NO: 146301 - DNA, 17 bp, Arabidopsis thaliana
tgaagatgagcaagagc

SEQ ID NO: 146302 - DNA, 17 bp, Arabidopsis thaliana
tgaagatgatcatcaca

SEQ ID NO: 146303 - DNA, 17 bp, Arabidopsis thaliana
tgaagatgccgaggccg

SEQ ID NO: 146304 - DNA, 17 bp, Arabidopsis thaliana
tgaagatgggatctggt

SEQ ID NO: 146305 - DNA, 17 bp, Arabidopsis thaliana
tgaagatggtgtcttct

SEQ ID NO: 146306 - DNA, 17 bp, Arabidopsis thaliana
tgaagatggttaagatt

SEQ ID NO: 146307 - DNA, 17 bp, Arabidopsis thaliana
tgaagatgtcagcagcc

SEQ ID NO: 146308 - DNA, 17 bp, Arabidopsis thaliana
tgaagatgtcgtggaac

SEQ ID NO: 146309 - DNA, 17 bp, Arabidopsis thaliana
tgaagattatcttggcc

SEQ ID NO: 146310 - DNA, 17 bp, Arabidopsis thaliana
tgaagattgcgccggta

SEQ ID NO: 146311 - DNA, 17 bp, Arabidopsis thaliana
tgaagattgttgtagtt

SEQ ID NO: 146312 - DNA, 17 bp, Arabidopsis thaliana
tgaagatttgaaatgtg

SEQ ID NO: 146313 - DNA, 17 bp, Arabidopsis thaliana
tgaagatttgcagattc

SEQ ID NO: 146314 - DNA, 17 bp, Arabidopsis thaliana
tgaagattttccagacg

SEQ ID NO: 146315 - DNA, 17 bp, Arabidopsis thaliana
tgaagcaaacaataacg

SEQ ID NO: 146316 - DNA, 17 bp, Arabidopsis thaliana
tgaagcaaacaccagaa

SEQ ID NO: 146317 - DNA, 17 bp, Arabidopsis thaliana
tgaagcaacaagcatga

SEQ ID NO: 146318 - DNA, 17 bp, Arabidopsis thaliana
tgaagcaaccagcaagc

SEQ ID NO: 146319 - DNA, 17 bp, Arabidopsis thaliana
tgaagcaaccagcatga

SEQ ID NO: 146320 - DNA, 17 bp, Arabidopsis thaliana
tgaagcaaccagccaga

SEQ ID NO: 146321 - DNA, 17 bp, Arabidopsis thaliana
tgaagcaaccagcctga

SEQ ID NO: 146322 - DNA, 17 bp, Arabidopsis thaliana
tgaagcaaccagcctgc

SEQ ID NO: 146323 - DNA, 17 bp, Arabidopsis thaliana
tgaagcaactagcatga

SEQ ID NO: 146324 - DNA, 17 bp, Arabidopsis thaliana
tgaagcaactgtatcca

SEQ ID NO: 146325 - DNA, 17 bp, Arabidopsis thaliana
tgaagcaagcaaccaca

SEQ ID NO: 146326 - DNA, 17 bp, Arabidopsis thaliana
tgaagcaagcagcaaga

SEQ ID NO: 146327 - DNA, 17 bp, Arabidopsis thaliana
tgaagcaagcagcaagc

SEQ ID NO: 146328 - DNA, 17 bp, Arabidopsis thaliana
tgaagcaagcagcatga

SEQ ID NO: 146329 - DNA, 17 bp, Arabidopsis thaliana
tgaagcaagcagccaga

SEQ ID NO: 146330 - DNA, 17 bp, Arabidopsis thaliana
tgaagcaagctgccaga

SEQ ID NO: 146331 - DNA, 17 bp, Arabidopsis thaliana
tgaagcaagctgcctga

SEQ ID NO: 146332 - DNA, 17 bp, Arabidopsis thaliana
tgaagcacagacagatt

SEQ ID NO: 146333 - DNA, 17 bp, Arabidopsis thaliana
tgaagcacccaccatcc

SEQ ID NO: 146334 - DNA, 17 bp, Arabidopsis thaliana
tgaagcacccacccacc

SEQ ID NO: 146335 - DNA, 17 bp, Arabidopsis thaliana
tgaagcacccaccccca

SEQ ID NO: 146336 - DNA, 17 bp, Arabidopsis thaliana
tgaagcactaacaacct

SEQ ID NO: 146337 - DNA, 17 bp, Arabidopsis thaliana
tgaagcagacactcaca

SEQ ID NO: 146338 - DNA, 17 bp, Arabidopsis thaliana
tgaagcagccagcaaga

SEQ ID NO: 146339 - DNA, 17 bp, Arabidopsis thaliana
tgaagcagccagcatga

SEQ ID NO: 146340 - DNA, 17 bp, Arabidopsis thaliana
tgaagcagccagcatgc

SEQ ID NO: 146341 - DNA, 17 bp, Arabidopsis thaliana
tgaagcagccagccaga

SEQ ID NO: 146342 - DNA, 17 bp, Arabidopsis thaliana
tgaagcagcctgcaaga

SEQ ID NO: 146343 - DNA, 17 bp, Arabidopsis thaliana
tgaagcagcctgcaagc

SEQ ID NO: 146344 - DNA, 17 bp, Arabidopsis thaliana
tgaagcagcctgcatga

SEQ ID NO: 146345 - DNA, 17 bp, Arabidopsis thaliana
tgaagcagcctgcctga

SEQ ID NO: 146346 - DNA, 17 bp, Arabidopsis thaliana
tgaagcagctgtgtacc

SEQ ID NO: 146347 - DNA, 17 bp, Arabidopsis thaliana
tgaagcaggaagcacgc

SEQ ID NO: 146348 - DNA, 17 bp, Arabidopsis thaliana
tgaagcaggaagcatga

SEQ ID NO: 146349 - DNA, 17 bp, Arabidopsis thaliana
tgaagcaggcagcaaga

SEQ ID NO: 146350 - DNA, 17 bp, Arabidopsis thaliana
tgaagcaggcagcatga

SEQ ID NO: 146351 - DNA, 17 bp, Arabidopsis thaliana
tgaagcagtaggtagcg

SEQ ID NO: 146352 - DNA, 17 bp, Arabidopsis thaliana
tgaagcagttcagtgcg

SEQ ID NO: 146353 - DNA, 17 bp, Arabidopsis thaliana
tgaagcagttgactgga

SEQ ID NO: 146354 - DNA, 17 bp, Arabidopsis thaliana
tgaagcatattgatgtg

SEQ ID NO: 146355 - DNA, 17 bp, Arabidopsis thaliana
tgaagcatgcggttcta

SEQ ID NO: 146356 - DNA, 17 bp, Arabidopsis thaliana
tgaagcattgttccctg

SEQ ID NO: 146357 - DNA, 17 bp, Arabidopsis thaliana
tgaagccaaggatgact

SEQ ID NO: 146358 - DNA, 17 bp, Arabidopsis thaliana
tgaagccacggcttaat

SEQ ID NO: 146359 - DNA, 17 bp, Arabidopsis thaliana
tgaagccacggcttagg

SEQ ID NO: 146360 - DNA, 17 bp, Arabidopsis thaliana
tgaagccagcatgatct

SEQ ID NO: 146361 - DNA, 17 bp, Arabidopsis thaliana
tgaagccccaaccaccc

SEQ ID NO: 146362 - DNA, 17 bp, Arabidopsis thaliana
tgaagccgccagcatga

SEQ ID NO: 146363 - DNA, 17 bp, Arabidopsis thaliana
tgaagccgccagcatgc

SEQ ID NO: 146364 - DNA, 17 bp, Arabidopsis thaliana
tgaagccggcggcgacc

SEQ ID NO: 146365 - DNA, 17 bp, Arabidopsis thaliana
tgaagcctaggtatcac

SEQ ID NO: 146366 - DNA, 17 bp, Arabidopsis thaliana
tgaagcctctgaccatt

SEQ ID NO: 146367 - DNA, 17 bp, Arabidopsis thaliana
tgaagcctgaaacttga

SEQ ID NO: 146368 - DNA, 17 bp, Arabidopsis thaliana
tgaagcctgagatcgcg

SEQ ID NO: 146369 - DNA, 17 bp, Arabidopsis thaliana
tgaagcctggtccgaga

SEQ ID NO: 146370 - DNA, 17 bp, Arabidopsis thaliana
tgaagccttggctgcct

SEQ ID NO: 146371 - DNA, 17 bp, Arabidopsis thaliana
tgaagcctttgctttag

SEQ ID NO: 146372 - DNA, 17 bp, Arabidopsis thaliana
tgaagccttttttcatg

SEQ ID NO: 146373 - DNA, 17 bp, Arabidopsis thaliana
tgaagcgaagaccggag

SEQ ID NO: 146374 - DNA, 17 bp, Arabidopsis thaliana
tgaagcgacatgcgtag

SEQ ID NO: 146375 - DNA, 17 bp, Arabidopsis thaliana
tgaagcgacggagacaa

SEQ ID NO: 146376 - DNA, 17 bp, Arabidopsis thaliana
tgaagcgagcatgatct

SEQ ID NO: 146377 - DNA, 17 bp, Arabidopsis thaliana
tgaagcgatttgtctgg

SEQ ID NO: 146378 - DNA, 17 bp, Arabidopsis thaliana
tgaagcgcagttgggca

SEQ ID NO: 146379 - DNA, 17 bp, Arabidopsis thaliana
tgaagcgcccaccaccc

SEQ ID NO: 146380 - DNA, 17 bp, Arabidopsis thaliana
tgaagcgcctatcagat

SEQ ID NO: 146381 - DNA, 17 bp, Arabidopsis thaliana
tgaagcgcggtgccacg

SEQ ID NO: 146382 - DNA, 17 bp, Arabidopsis thaliana
tgaagcgcgtaattccc

SEQ ID NO: 146383 - DNA, 17 bp, Arabidopsis thaliana
tgaagcggcaagcatga

SEQ ID NO: 146384 - DNA, 17 bp, Arabidopsis thaliana
tgaagcggccagcatga

SEQ ID NO: 146385 - DNA, 17 bp, Arabidopsis thaliana
tgaagcggctcaacatc

SEQ ID NO: 146386 - DNA, 17 bp, Arabidopsis thaliana
tgaagcggctttggacg

SEQ ID NO: 146387 - DNA, 17 bp, Arabidopsis thaliana
tgaagcggtcaatgcca

SEQ ID NO: 146388 - DNA, 17 bp, Arabidopsis thaliana
tgaagcggtgataaaca

SEQ ID NO: 146389 - DNA, 17 bp, Arabidopsis thaliana
tgaagcggttcagtgca

SEQ ID NO: 146390 - DNA, 17 bp, Arabidopsis thaliana
tgaagcggttcagtgcg

SEQ ID NO: 146391 - DNA, 17 bp, Arabidopsis thaliana
tgaagcggtttcaagat

SEQ ID NO: 146392 - DNA, 17 bp, Arabidopsis thaliana
tgaagcgtctactcgac

SEQ ID NO: 146393 - DNA, 17 bp, Arabidopsis thaliana
tgaagcgtgtgcaatga

SEQ ID NO: 146394 - DNA, 17 bp, Arabidopsis thaliana
tgaagcgtttgcggttg

SEQ ID NO: 146395 - DNA, 17 bp, Arabidopsis thaliana
tgaagctaccaacatga

SEQ ID NO: 146396 - DNA, 17 bp, Arabidopsis thaliana
tgaagctaccaccatca

SEQ ID NO: 146397 - DNA, 17 bp, Arabidopsis thaliana
tgaagctaccaccatga

SEQ ID NO: 146398 - DNA, 17 bp, Arabidopsis thaliana
tgaagctaccacccacc

SEQ ID NO: 146399 - DNA, 17 bp, Arabidopsis thaliana
tgaagctaccagcaaga

SEQ ID NO: 146400 - DNA, 17 bp, Arabidopsis thaliana
tgaagctaccagcaccc

SEQ ID NO: 146401 - DNA, 17 bp, Arabidopsis thaliana
tgaagctaccagcacgc

SEQ ID NO: 146402 - DNA, 17 bp, Arabidopsis thaliana
tgaagctaccagcatcc

SEQ ID NO: 146403 - DNA, 17 bp, Arabidopsis thaliana
tgaagctaccagcatga

SEQ ID NO: 146404 - DNA, 17 bp, Arabidopsis thaliana
tgaagctaccagcatgc

SEQ ID NO: 146405 - DNA, 17 bp, Arabidopsis thaliana
tgaagctaccagccaga

SEQ ID NO: 146406 - DNA, 17 bp, Arabidopsis thaliana
tgaagctaccagccagc

SEQ ID NO: 146407 - DNA, 17 bp, Arabidopsis thaliana
tgaagctaccagcctga

SEQ ID NO: 146408 - DNA, 17 bp, Arabidopsis thaliana
tgaagctaccagcctgc

SEQ ID NO: 146409 - DNA, 17 bp, Arabidopsis thaliana
tgaagctaccgtgcgct

SEQ ID NO: 146410 - DNA, 17 bp, Arabidopsis thaliana
tgaagctacctgcatga

SEQ ID NO: 146411 - DNA, 17 bp, Arabidopsis thaliana
tgaagctacctgcctga

SEQ ID NO: 146412 - DNA, 17 bp, Arabidopsis thaliana
tgaagctacctgcctgc

SEQ ID NO: 146413 - DNA, 17 bp, Arabidopsis thaliana
tgaagctacgagcatga

SEQ ID NO: 146414 - DNA, 17 bp, Arabidopsis thaliana
tgaagctagaagcacgc

SEQ ID NO: 146415 - DNA, 17 bp, Arabidopsis thaliana
tgaagctagcagcaaga

SEQ ID NO: 146416 - DNA, 17 bp, Arabidopsis thaliana
tgaagctagcagcatga

SEQ ID NO: 146417 - DNA, 17 bp, Arabidopsis thaliana
tgaagctagcagcatgc

SEQ ID NO: 146418 - DNA, 17 bp, Arabidopsis thaliana
tgaagctagcagccaga

SEQ ID NO: 146419 - DNA, 17 bp, Arabidopsis thaliana
tgaagctagcagcctga

SEQ ID NO: 146420 - DNA, 17 bp, Arabidopsis thaliana
tgaagctagcagcctgc

SEQ ID NO: 146421 - DNA, 17 bp, Arabidopsis thaliana
tgaagctatttgggtcg

SEQ ID NO: 146422 - DNA, 17 bp, Arabidopsis thaliana
tgaagctcacagcatga

SEQ ID NO: 146423 - DNA, 17 bp, Arabidopsis thaliana
tgaagctcagaaaaagt

SEQ ID NO: 146424 - DNA, 17 bp, Arabidopsis thaliana
tgaagctccaaccatca

SEQ ID NO: 146425 - DNA, 17 bp, Arabidopsis thaliana
tgaagctccaagcatga

SEQ ID NO: 146426 - DNA, 17 bp, Arabidopsis thaliana
tgaagctccagcatgat

SEQ ID NO: 146427 - DNA, 17 bp, Arabidopsis thaliana
tgaagctcccaccacca

SEQ ID NO: 146428 - DNA, 17 bp, Arabidopsis thaliana
tgaagctcccaccaccc

SEQ ID NO: 146429 - DNA, 17 bp, Arabidopsis thaliana
tgaagctcccaccatca

SEQ ID NO: 146430 - DNA, 17 bp, Arabidopsis thaliana
tgaagctcccaccatcc

SEQ ID NO: 146431 - DNA, 17 bp, Arabidopsis thaliana
tgaagctcccaccatga

SEQ ID NO: 146432 - DNA, 17 bp, Arabidopsis thaliana
tgaagctcccaccatgc

SEQ ID NO: 146433 - DNA, 17 bp, Arabidopsis thaliana
tgaagctcccaccctcc

SEQ ID NO: 146434 - DNA, 17 bp, Arabidopsis thaliana
tgaagctcccagcatca

SEQ ID NO: 146435 - DNA, 17 bp, Arabidopsis thaliana
tgaagctcccagcatcc

SEQ ID NO: 146436 - DNA, 17 bp, Arabidopsis thaliana
tgaagctcccagcatga

SEQ ID NO: 146437 - DNA, 17 bp, Arabidopsis thaliana
tgaagctcccagcatgg

SEQ ID NO: 146438 - DNA, 17 bp, Arabidopsis thaliana
tgaagctcccagcctgc

SEQ ID NO: 146439 - DNA, 17 bp, Arabidopsis thaliana
tgaagctcccagcgaga

SEQ ID NO: 146440 - DNA, 17 bp, Arabidopsis thaliana
tgaagctcccgccatca

SEQ ID NO: 146441 - DNA, 17 bp, Arabidopsis thaliana
tgaagctgacagcatga

SEQ ID NO: 146442 - DNA, 17 bp, Arabidopsis thaliana
tgaagctgagtcctggt

SEQ ID NO: 146443 - DNA, 17 bp, Arabidopsis thaliana
tgaagctgagtccttgt

SEQ ID NO: 146444 - DNA, 17 bp, Arabidopsis thaliana
tgaagctgatggtgcaa

SEQ ID NO: 146445 - DNA, 17 bp, Arabidopsis thaliana
tgaagctgattggcggg

SEQ ID NO: 146446 - DNA, 17 bp, Arabidopsis thaliana
tgaagctgcaagcatga

SEQ ID NO: 146447 - DNA, 17 bp, Arabidopsis thaliana
tgaagctgccaacatga

SEQ ID NO: 146448 - DNA, 17 bp, Arabidopsis thaliana
tgaagctgccaccagga

SEQ ID NO: 146449 - DNA, 17 bp, Arabidopsis thaliana
tgaagctgccaccatca

SEQ ID NO: 146450 - DNA, 17 bp, Arabidopsis thaliana
tgaagctgccaccatcg

SEQ ID NO: 146451 - DNA, 17 bp, Arabidopsis thaliana
tgaagctgccaccatga

SEQ ID NO: 146452 - DNA, 17 bp, Arabidopsis thaliana
tgaagctgccacccagc

SEQ ID NO: 146453 - DNA, 17 bp, Arabidopsis thaliana
tgaagctgccaccctga

SEQ ID NO: 146454 - DNA, 17 bp, Arabidopsis thaliana
tgaagctgccagaataa

SEQ ID NO: 146455 - DNA, 17 bp, Arabidopsis thaliana
tgaagctgccagaatga

SEQ ID NO: 146456 - DNA, 17 bp, Arabidopsis thaliana
tgaagctgccagaatgc

SEQ ID NO: 146457 - DNA, 17 bp, Arabidopsis thaliana
tgaagctgccagcaaaa

SEQ ID NO: 146458 - DNA, 17 bp, Arabidopsis thaliana
tgaagctgccagcaaga

SEQ ID NO: 146459 - DNA, 17 bp, Arabidopsis thaliana
tgaagctgccagcaagc

SEQ ID NO: 146460 - DNA, 17 bp, Arabidopsis thaliana
tgaagctgccagcacct

SEQ ID NO: 146461 - DNA, 17 bp, Arabidopsis thaliana
tgaagctgccagcacga

SEQ ID NO: 146462 - DNA, 17 bp, Arabidopsis thaliana
tgaagctgccagcacgc

SEQ ID NO: 146463 - DNA, 17 bp, Arabidopsis thaliana
tgaagctgccagcagat

SEQ ID NO: 146464 - DNA, 17 bp, Arabidopsis thaliana
tgaagctgccagcagga

SEQ ID NO: 146465 - DNA, 17 bp, Arabidopsis thaliana
tgaagctgccagcataa

SEQ ID NO: 146466 - DNA, 17 bp, Arabidopsis thaliana
tgaagctgccagcatat

SEQ ID NO: 146467 - DNA, 17 bp, Arabidopsis thaliana
tgaagctgccagcatca

SEQ ID NO: 146468 - DNA, 17 bp, Arabidopsis thaliana
tgaagctgccagcatcc

SEQ ID NO: 146469 - DNA, 17 bp, Arabidopsis thaliana
tgaagctgccagcatct

SEQ ID NO: 146470 - DNA, 17 bp, Arabidopsis thaliana
tgaagctgccagcatga

SEQ ID NO: 146471 - DNA, 17 bp, Arabidopsis thaliana
tgaagctgccagcatgc

SEQ ID NO: 146472 - DNA, 17 bp, Arabidopsis thaliana
tgaagctgccagcatgg

SEQ ID NO: 146473 - DNA, 17 bp, Arabidopsis thaliana
tgaagctgccagcatgt

SEQ ID NO: 146474 - DNA, 17 bp, Arabidopsis thaliana
tgaagctgccagcatta

SEQ ID NO: 146475 - DNA, 17 bp, Arabidopsis thaliana
tgaagctgccagcattc

SEQ ID NO: 146476 - DNA, 17 bp, Arabidopsis thaliana
tgaagctgccagcattt

SEQ ID NO: 146477 - DNA, 17 bp, Arabidopsis thaliana
tgaagctgccagcctga

SEQ ID NO: 146478 - DNA, 17 bp, Arabidopsis thaliana
tgaagctgccagcctgc

SEQ ID NO: 146479 - DNA, 17 bp, Arabidopsis thaliana
tgaagctgccagcgatc

SEQ ID NO: 146480 - DNA, 17 bp, Arabidopsis thaliana
tgaagctgccagcgatg

SEQ ID NO: 146481 - DNA, 17 bp, Arabidopsis thaliana
tgaagctgccagcggtc

SEQ ID NO: 146482 - DNA, 17 bp, Arabidopsis thaliana
tgaagctgccagcgtga

SEQ ID NO: 146483 - DNA, 17 bp, Arabidopsis thaliana
tgaagctgccagcttga

SEQ ID NO: 146484 - DNA, 17 bp, Arabidopsis thaliana
tgaagctgccaggaaga

SEQ ID NO: 146485 - DNA, 17 bp, Arabidopsis thaliana
tgaagctgccaggatga

SEQ ID NO: 146486 - DNA, 17 bp, Arabidopsis thaliana
tgaagctgccagtatga

SEQ ID NO: 146487 - DNA, 17 bp, Arabidopsis thaliana
tgaagctgccagtatgg

SEQ ID NO: 146488 - DNA, 17 bp, Arabidopsis thaliana
tgaagctgccatcatga

SEQ ID NO: 146489 - DNA, 17 bp, Arabidopsis thaliana
tgaagctgcccgcatga

SEQ ID NO: 146490 - DNA, 17 bp, Arabidopsis thaliana
tgaagctgccggcaaga

SEQ ID NO: 146491 - DNA, 17 bp, Arabidopsis thaliana
tgaagctgccggcatga

SEQ ID NO: 146492 - DNA, 17 bp, Arabidopsis thaliana
tgaagctgccgttgatc

SEQ ID NO: 146493 - DNA, 17 bp, Arabidopsis thaliana
tgaagctgcctgcatga

SEQ ID NO: 146494 - DNA, 17 bp, Arabidopsis thaliana
tgaagctgcctgcatgc

SEQ ID NO: 146495 - DNA, 17 bp, Arabidopsis thaliana
tgaagctgcctgccgga

SEQ ID NO: 146496 - DNA, 17 bp, Arabidopsis thaliana
tgaagctgcgagcatga

SEQ ID NO: 146497 - DNA, 17 bp, Arabidopsis thaliana
tgaagctgctaccatga

SEQ ID NO: 146498 - DNA, 17 bp, Arabidopsis thaliana
tgaagctgctagcatga

SEQ ID NO: 146499 - DNA, 17 bp, Arabidopsis thaliana
tgaagctgctagcatgc

SEQ ID NO: 146500 - DNA, 17 bp, Arabidopsis thaliana
tgaagctgctttgctct

SEQ ID NO: 146501 - DNA, 17 bp, Arabidopsis thaliana
tgaagctggcagcatga

SEQ ID NO: 146502 - DNA, 17 bp, Arabidopsis thaliana
tgaagctggcagcatgc

SEQ ID NO: 146503 - DNA, 17 bp, Arabidopsis thaliana
tgaagctggcagcctga

SEQ ID NO: 146504 - DNA, 17 bp, Arabidopsis thaliana
tgaagctggctgcatga

SEQ ID NO: 146505 - DNA, 17 bp, Arabidopsis thaliana
tgaagctgggagcatga

SEQ ID NO: 146506 - DNA, 17 bp, Arabidopsis thaliana
tgaagctggttctcggg

SEQ ID NO: 146507 - DNA, 17 bp, Arabidopsis thaliana
tgaagctggttggcagg

SEQ ID NO: 146508 - DNA, 17 bp, Arabidopsis thaliana
tgaagctgtcagcacga

SEQ ID NO: 146509 - DNA, 17 bp, Arabidopsis thaliana
tgaagctgtcagcatga

SEQ ID NO: 146510 - DNA, 17 bp, Arabidopsis thaliana
tgaagctgtgttgcttc

SEQ ID NO: 146511 - DNA, 17 bp, Arabidopsis thaliana
tgaagctgttagcatga

SEQ ID NO: 146512 - DNA, 17 bp, Arabidopsis thaliana
tgaagcttcaaagtggc

SEQ ID NO: 146513 - DNA, 17 bp, Arabidopsis thaliana
tgaagcttccagcatga

SEQ ID NO: 146514 - DNA, 17 bp, Arabidopsis thaliana
tgaaggaaaccctcgag

SEQ ID NO: 146515 - DNA, 17 bp, Arabidopsis thaliana
tgaaggaacgcctatct

SEQ ID NO: 146516 - DNA, 17 bp, Arabidopsis thaliana
tgaaggaatgttacaca

SEQ ID NO: 146517 - DNA, 17 bp, Arabidopsis thaliana
tgaaggaccactaccac

SEQ ID NO: 146518 - DNA, 17 bp, Arabidopsis thaliana
tgaaggaccctgttccc

SEQ ID NO: 146519 - DNA, 17 bp, Arabidopsis thaliana
tgaaggacgattctgaa

SEQ ID NO: 146520 - DNA, 17 bp, Arabidopsis thaliana
tgaaggactctctggcc

SEQ ID NO: 146521 - DNA, 17 bp, Arabidopsis thaliana
tgaaggactttcgacca

SEQ ID NO: 146522 - DNA, 17 bp, Arabidopsis thaliana
tgaaggagaaggttctg

SEQ ID NO: 146523 - DNA, 17 bp, Arabidopsis thaliana
tgaaggagatcactgtg

SEQ ID NO: 146524 - DNA, 17 bp, Arabidopsis thaliana
tgaaggagatcagagta

SEQ ID NO: 146525 - DNA, 17 bp, Arabidopsis thaliana
tgaaggaggatactctt

SEQ ID NO: 146526 - DNA, 17 bp, Arabidopsis thaliana
tgaaggagttgggacag

SEQ ID NO: 146527 - DNA, 17 bp, Arabidopsis thaliana
tgaaggatcaactatca

SEQ ID NO: 146528 - DNA, 17 bp, Arabidopsis thaliana
tgaaggatcgagatcga

SEQ ID NO: 146529 - DNA, 17 bp, Arabidopsis thaliana
tgaaggatcgaggtcga

SEQ ID NO: 146530 - DNA, 17 bp, Arabidopsis thaliana
tgaaggatggccgagtg

SEQ ID NO: 146531 - DNA, 17 bp, Arabidopsis thaliana
tgaaggattcagatcat

SEQ ID NO: 146532 - DNA, 17 bp, Arabidopsis thaliana
tgaaggattgtgggatt

SEQ ID NO: 146533 - DNA, 17 bp, Arabidopsis thaliana
tgaaggatttgtggtta

SEQ ID NO: 146534 - DNA, 17 bp, Arabidopsis thaliana
tgaaggcagaacgtgct

SEQ ID NO: 146535 - DNA, 17 bp, Arabidopsis thaliana
tgaaggcagcatatcgg

SEQ ID NO: 146536 - DNA, 17 bp, Arabidopsis thaliana
tgaaggccgaagagggg

SEQ ID NO: 146537 - DNA, 17 bp, Arabidopsis thaliana
tgaaggcgaaggcgcgt

SEQ ID NO: 146538 - DNA, 17 bp, Arabidopsis thaliana
tgaaggcgagataggct

SEQ ID NO: 146539 - DNA, 17 bp, Arabidopsis thaliana
tgaaggcgattaccctc

SEQ ID NO: 146540 - DNA, 17 bp, Arabidopsis thaliana
tgaaggcgattatcttc

SEQ ID NO: 146541 - DNA, 17 bp, Arabidopsis thaliana
tgaaggcgcaacttatt

SEQ ID NO: 146542 - DNA, 17 bp, Arabidopsis thaliana
tgaaggctgattttgga

SEQ ID NO: 146543 - DNA, 17 bp, Arabidopsis thaliana
tgaaggctgctagtgca

SEQ ID NO: 146544 - DNA, 17 bp, Arabidopsis thaliana
tgaaggctgggctcggg

SEQ ID NO: 146545 - DNA, 17 bp, Arabidopsis thaliana
tgaaggctggttcactc

SEQ ID NO: 146546 - DNA, 17 bp, Arabidopsis thaliana
tgaaggcttgggtcata

SEQ ID NO: 146547 - DNA, 17 bp, Arabidopsis thaliana
tgaaggctttgacaaag

SEQ ID NO: 146548 - DNA, 17 bp, Arabidopsis thaliana
tgaagggagtcgtctgc

SEQ ID NO: 146549 - DNA, 17 bp, Arabidopsis thaliana
tgaagggattacgagtt

SEQ ID NO: 146550 - DNA, 17 bp, Arabidopsis thaliana
tgaagggattacgggtc

SEQ ID NO: 146551 - DNA, 17 bp, Arabidopsis thaliana
tgaagggattacgggtt

SEQ ID NO: 146552 - DNA, 17 bp, Arabidopsis thaliana
tgaagggcacgtctacc

SEQ ID NO: 146553 - DNA, 17 bp, Arabidopsis thaliana
tgaagggcacgtctgcc

SEQ ID NO: 146554 - DNA, 17 bp, Arabidopsis thaliana
tgaaggggaatccgact

SEQ ID NO: 146555 - DNA, 17 bp, Arabidopsis thaliana
tgaaggggccgaagtcg

SEQ ID NO: 146556 - DNA, 17 bp, Arabidopsis thaliana
tgaaggggcgagatctg

SEQ ID NO: 146557 - DNA, 17 bp, Arabidopsis thaliana
tgaaggggttacgggtt

SEQ ID NO: 146558 - DNA, 17 bp, Arabidopsis thaliana
tgaagggtcgatgatcc

SEQ ID NO: 146559 - DNA, 17 bp, Arabidopsis thaliana
tgaaggtcaacgattgc

SEQ ID NO: 146560 - DNA, 17 bp, Arabidopsis thaliana
tgaaggtcagtgtgtta

SEQ ID NO: 146561 - DNA, 17 bp, Arabidopsis thaliana
tgaaggtccactcgttg

SEQ ID NO: 146562 - DNA, 17 bp, Arabidopsis thaliana
tgaaggtcgcgtgtttg

SEQ ID NO: 146563 - DNA, 17 bp, Arabidopsis thaliana
tgaaggtctccggttga

SEQ ID NO: 146564 - DNA, 17 bp, Arabidopsis thaliana
tgaaggtctttgcccgt

SEQ ID NO: 146565 - DNA, 17 bp, Arabidopsis thaliana
tgaaggtgacagtgact

SEQ ID NO: 146566 - DNA, 17 bp, Arabidopsis thaliana
tgaaggtgactacatcg

SEQ ID NO: 146567 - DNA, 17 bp, Arabidopsis thaliana
tgaaggtgccagcatga

SEQ ID NO: 146568 - DNA, 17 bp, Arabidopsis thaliana
tgaaggtggaccaagtg

SEQ ID NO: 146569 - DNA, 17 bp, Arabidopsis thaliana
tgaaggtggactgttga

SEQ ID NO: 146570 - DNA, 17 bp, Arabidopsis thaliana
tgaaggtgtggcacagt

SEQ ID NO: 146571 - DNA, 17 bp, Arabidopsis thaliana
tgaaggtgttgcgttta

SEQ ID NO: 146572 - DNA, 17 bp, Arabidopsis thaliana
tgaaggttctgagccga

SEQ ID NO: 146573 - DNA, 17 bp, Arabidopsis thaliana
tgaaggttgcaaaatgt

SEQ ID NO: 146574 - DNA, 17 bp, Arabidopsis thaliana
tgaaggtttttgcccgt

SEQ ID NO: 146575 - DNA, 17 bp, Arabidopsis thaliana
tgaaggttttttggagc

SEQ ID NO: 146576 - DNA, 17 bp, Arabidopsis thaliana
tgaagtaaatccgcaag

SEQ ID NO: 146577 - DNA, 17 bp, Arabidopsis thaliana
tgaagtaaccgctaagg

SEQ ID NO: 146578 - DNA, 17 bp, Arabidopsis thaliana
tgaagtaatgcccgctg

SEQ ID NO: 146579 - DNA, 17 bp, Arabidopsis thaliana
tgaagtacttcggtgcg

SEQ ID NO: 146580 - DNA, 17 bp, Arabidopsis thaliana
tgaagtagagattgggt

SEQ ID NO: 146581 - DNA, 17 bp, Arabidopsis thaliana
tgaagtagtttcaggat

SEQ ID NO: 146582 - DNA, 17 bp, Arabidopsis thaliana
tgaagtagtttcagggt

SEQ ID NO: 146583 - DNA, 17 bp, Arabidopsis thaliana
tgaagtataccgcagga

SEQ ID NO: 146584 - DNA, 17 bp, Arabidopsis thaliana
tgaagtataccgcaggt

SEQ ID NO: 146585 - DNA, 17 bp, Arabidopsis thaliana
tgaagtatggttgttgg

SEQ ID NO: 146586 - DNA, 17 bp, Arabidopsis thaliana
tgaagtatttcggtgca

SEQ ID NO: 146587 - DNA, 17 bp, Arabidopsis thaliana
tgaagtatttcggtgcg

SEQ ID NO: 146588 - DNA, 17 bp, Arabidopsis thaliana
tgaagtatttcggtgct

SEQ ID NO: 146589 - DNA, 17 bp, Arabidopsis thaliana
tgaagtcactgcagctg

SEQ ID NO: 146590 - DNA, 17 bp, Arabidopsis thaliana
tgaagtcacttatacca

SEQ ID NO: 146591 - DNA, 17 bp, Arabidopsis thaliana
tgaagtcagaaagtggg

SEQ ID NO: 146592 - DNA, 17 bp, Arabidopsis thaliana
tgaagtcaggtgcttac

SEQ ID NO: 146593 - DNA, 17 bp, Arabidopsis thaliana
tgaagtccgaggtgttt

SEQ ID NO: 146594 - DNA, 17 bp, Arabidopsis thaliana
tgaagtcctcgtgttgc

SEQ ID NO: 146595 - DNA, 17 bp, Arabidopsis thaliana
tgaagtccttttgacca

SEQ ID NO: 146596 - DNA, 17 bp, Arabidopsis thaliana
tgaagtcgcaggattga

SEQ ID NO: 146597 - DNA, 17 bp, Arabidopsis thaliana
tgaagtcgcatcctgag

SEQ ID NO: 146598 - DNA, 17 bp, Arabidopsis thaliana
tgaagtcgccagcatca

SEQ ID NO: 146599 - DNA, 17 bp, Arabidopsis thaliana
tgaagtcgccagcatga

SEQ ID NO: 146600 - DNA, 17 bp, Arabidopsis thaliana
tgaagtcgctcctgtag

SEQ ID NO: 146601 - DNA, 17 bp, Arabidopsis thaliana
tgaagtcggctaggaca

SEQ ID NO: 146602 - DNA, 17 bp, Arabidopsis thaliana
tgaagtcggtctccggc

SEQ ID NO: 146603 - DNA, 17 bp, Arabidopsis thaliana
tgaagtctaggttgcaa

SEQ ID NO: 146604 - DNA, 17 bp, Arabidopsis thaliana
tgaagtctcggacctgg

SEQ ID NO: 146605 - DNA, 17 bp, Arabidopsis thaliana
tgaagtctctgacaatg

SEQ ID NO: 146606 - DNA, 17 bp, Arabidopsis thaliana
tgaagtctgtcagttgg

SEQ ID NO: 146607 - DNA, 17 bp, Arabidopsis thaliana
tgaagtcttcccatccg

SEQ ID NO: 146608 - DNA, 17 bp, Arabidopsis thaliana
tgaagtctttggatcgc

SEQ ID NO: 146609 - DNA, 17 bp, Arabidopsis thaliana
tgaagtgacgggtcatt

SEQ ID NO: 146610 - DNA, 17 bp, Arabidopsis thaliana
tgaagtgaggaagatct

SEQ ID NO: 146611 - DNA, 17 bp, Arabidopsis thaliana
tgaagtgcaccgcattt

SEQ ID NO: 146612 - DNA, 17 bp, Arabidopsis thaliana
tgaagtgcatgattggc

SEQ ID NO: 146613 - DNA, 17 bp, Arabidopsis thaliana
tgaagtgccagcatgat

SEQ ID NO: 146614 - DNA, 17 bp, Arabidopsis thaliana
tgaagtggatgggcaag

SEQ ID NO: 146615 - DNA, 17 bp, Arabidopsis thaliana
tgaagtggtccatggac

SEQ ID NO: 146616 - DNA, 17 bp, Arabidopsis thaliana
tgaagtgtatgattggt

SEQ ID NO: 146617 - DNA, 17 bp, Arabidopsis thaliana
tgaagtgtccgaatgta

SEQ ID NO: 146618 - DNA, 17 bp, Arabidopsis thaliana
tgaagtgtctcaggaat

SEQ ID NO: 146619 - DNA, 17 bp, Arabidopsis thaliana
tgaagtgttcggatccc

SEQ ID NO: 146620 - DNA, 17 bp, Arabidopsis thaliana
tgaagttaagcagtcca

SEQ ID NO: 146621 - DNA, 17 bp, Arabidopsis thaliana
tgaagttaagtgtgctt

SEQ ID NO: 146622 - DNA, 17 bp, Arabidopsis thaliana
tgaagttaccagcatga

SEQ ID NO: 146623 - DNA, 17 bp, Arabidopsis thaliana
tgaagttatcatgggaa

SEQ ID NO: 146624 - DNA, 17 bp, Arabidopsis thaliana
tgaagttcaagattaaa

SEQ ID NO: 146625 - DNA, 17 bp, Arabidopsis thaliana
tgaagttcgaccgcgaa

SEQ ID NO: 146626 - DNA, 17 bp, Arabidopsis thaliana
tgaagttcggatcgcgg

SEQ ID NO: 146627 - DNA, 17 bp, Arabidopsis thaliana
tgaagttctcatgtcat

SEQ ID NO: 146628 - DNA, 17 bp, Arabidopsis thaliana
tgaagttgaaccttggg

SEQ ID NO: 146629 - DNA, 17 bp, Arabidopsis thaliana
tgaagttgacactggaa

SEQ ID NO: 146630 - DNA, 17 bp, Arabidopsis thaliana
tgaagttgaccttggct

SEQ ID NO: 146631 - DNA, 17 bp, Arabidopsis thaliana
tgaagttgactttggct

SEQ ID NO: 146632 - DNA, 17 bp, Arabidopsis thaliana
tgaagttgatgttgcga

SEQ ID NO: 146633 - DNA, 17 bp, Arabidopsis thaliana
tgaagttgatgttgcgc

SEQ ID NO: 146634 - DNA, 17 bp, Arabidopsis thaliana
tgaagttgccagcataa

SEQ ID NO: 146635 - DNA, 17 bp, Arabidopsis thaliana
tgaagttgccagcatac

SEQ ID NO: 146636 - DNA, 17 bp, Arabidopsis thaliana
tgaagttgccagcatag

SEQ ID NO: 146637 - DNA, 17 bp, Arabidopsis thaliana
tgaagttgccagcatga

SEQ ID NO: 146638 - DNA, 17 bp, Arabidopsis thaliana
tgaagttgccagcatgc

SEQ ID NO: 146639 - DNA, 17 bp, Arabidopsis thaliana
tgaagttgccagcatgt

SEQ ID NO: 146640 - DNA, 17 bp, Arabidopsis thaliana
tgaagttgccagcattg

SEQ ID NO: 146641 - DNA, 17 bp, Arabidopsis thaliana
tgaagttgccatgtggc

SEQ ID NO: 146642 - DNA, 17 bp, Arabidopsis thaliana
tgaagttgccctgtgtt

SEQ ID NO: 146643 - DNA, 17 bp, Arabidopsis thaliana
tgaagttggcgaaaact

SEQ ID NO: 146644 - DNA, 17 bp, Arabidopsis thaliana
tgaagttgtctacgcga

SEQ ID NO: 146645 - DNA, 17 bp, Arabidopsis thaliana
tgaagttgtgaaacgtc

SEQ ID NO: 146646 - DNA, 17 bp, Arabidopsis thaliana
tgaagtttaccatattt

SEQ ID NO: 146647 - DNA, 17 bp, Arabidopsis thaliana
tgaagtttactgcagct

SEQ ID NO: 146648 - DNA, 17 bp, Arabidopsis thaliana
tgaagtttagacccgtt

SEQ ID NO: 146649 - DNA, 17 bp, Arabidopsis thaliana
tgaagtttgcaggctgt

SEQ ID NO: 146650 - DNA, 17 bp, Arabidopsis thaliana
tgaagtttgccagaccg

SEQ ID NO: 146651 - DNA, 17 bp, Arabidopsis thaliana
tgaagtttggattcagg

SEQ ID NO: 146652 - DNA, 17 bp, Arabidopsis thaliana
tgaagtttggccgagtg

SEQ ID NO: 146653 - DNA, 17 bp, Arabidopsis thaliana
tgaagtttgtgacgcac

SEQ ID NO: 146654 - DNA, 17 bp, Arabidopsis thaliana
tgaagttttccaaagtt

SEQ ID NO: 146655 - DNA, 17 bp, Arabidopsis thaliana
tgaagttttgaagattt

SEQ ID NO: 146656 - DNA, 17 bp, Arabidopsis thaliana
tgaataaacttggtccg

SEQ ID NO: 146657 - DNA, 17 bp, Arabidopsis thaliana
tgaataacatgccgtct

SEQ ID NO: 146658 - DNA, 17 bp, Arabidopsis thaliana
tgaataactagtggcac

SEQ ID NO: 146659 - DNA, 17 bp, Arabidopsis thaliana
tgaataagccagtggca

SEQ ID NO: 146660 - DNA, 17 bp, Arabidopsis thaliana
tgaataagcttatgttc

SEQ ID NO: 146661 - DNA, 17 bp, Arabidopsis thaliana
tgaataatgacaaggcc

SEQ ID NO: 146662 - DNA, 17 bp, Arabidopsis thaliana
tgaataccaaaaggttc

SEQ ID NO: 146663 - DNA, 17 bp, Arabidopsis thaliana
tgaataccaagattttt

SEQ ID NO: 146664 - DNA, 17 bp, Arabidopsis thaliana
tgaataccacgggtgag

SEQ ID NO: 146665 - DNA, 17 bp, Arabidopsis thaliana
tgaataccaggaggttc

SEQ ID NO: 146666 - DNA, 17 bp, Arabidopsis thaliana
tgaataccagtaggttc

SEQ ID NO: 146667 - DNA, 17 bp, Arabidopsis thaliana
tgaatacggctgggtta

SEQ ID NO: 146668 - DNA, 17 bp, Arabidopsis thaliana
tgaatacgttcccgggt

SEQ ID NO: 146669 - DNA, 17 bp, Arabidopsis thaliana
tgaatactcttgagatc

SEQ ID NO: 146670 - DNA, 17 bp, Arabidopsis thaliana
tgaatacttttggcctg

SEQ ID NO: 146671 - DNA, 17 bp, Arabidopsis thaliana
tgaatagacagccatgg

SEQ ID NO: 146672 - DNA, 17 bp, Arabidopsis thaliana
tgaatagccggtccatt

SEQ ID NO: 146673 - DNA, 17 bp, Arabidopsis thaliana
tgaataggttgccgttg

SEQ ID NO: 146674 - DNA, 17 bp, Arabidopsis thaliana
tgaatagttgacccaac

SEQ ID NO: 146675 - DNA, 17 bp, Arabidopsis thaliana
tgaatagtttgtggatt

SEQ ID NO: 146676 - DNA, 17 bp, Arabidopsis thaliana
tgaatatcagaaggttc

SEQ ID NO: 146677 - DNA, 17 bp, Arabidopsis thaliana
tgaatatcaggaggttc

SEQ ID NO: 146678 - DNA, 17 bp, Arabidopsis thaliana
tgaatatctcgtcggtg

SEQ ID NO: 146679 - DNA, 17 bp, Arabidopsis thaliana
tgaatatctggctgttc

SEQ ID NO: 146680 - DNA, 17 bp, Arabidopsis thaliana
tgaatatgaccacttgg

SEQ ID NO: 146681 - DNA, 17 bp, Arabidopsis thaliana
tgaatatttcgaagttc

SEQ ID NO: 146682 - DNA, 17 bp, Arabidopsis thaliana
tgaatatttggaatcgc

SEQ ID NO: 146683 - DNA, 17 bp, Arabidopsis thaliana
tgaatcaacttcacatg

SEQ ID NO: 146684 - DNA, 17 bp, Arabidopsis thaliana
tgaatcacggcgatggc

SEQ ID NO: 146685 - DNA, 17 bp, Arabidopsis thaliana
tgaatcagacaatgctg

SEQ ID NO: 146686 - DNA, 17 bp, Arabidopsis thaliana
tgaatcagccattgtcg

SEQ ID NO: 146687 - DNA, 17 bp, Arabidopsis thaliana
tgaatcaggcagtgtgg

SEQ ID NO: 146688 - DNA, 17 bp, Arabidopsis thaliana
tgaatcaggtatgtcaa

SEQ ID NO: 146689 - DNA, 17 bp, Arabidopsis thaliana
tgaatcagttggatgga

SEQ ID NO: 146690 - DNA, 17 bp, Arabidopsis thaliana
tgaatcagttggcaaga

SEQ ID NO: 146691 - DNA, 17 bp, Arabidopsis thaliana
tgaatcatcgtagatgt

SEQ ID NO: 146692 - DNA, 17 bp, Arabidopsis thaliana
tgaatcatttggatggt

SEQ ID NO: 146693 - DNA, 17 bp, Arabidopsis thaliana
tgaatccaattctcaat

SEQ ID NO: 146694 - DNA, 17 bp, Arabidopsis thaliana
tgaatccactgagattc

SEQ ID NO: 146695 - DNA, 17 bp, Arabidopsis thaliana
tgaatccaggaggttct

SEQ ID NO: 146696 - DNA, 17 bp, Arabidopsis thaliana
tgaatccagtgatccgc

SEQ ID NO: 146697 - DNA, 17 bp, Arabidopsis thaliana
tgaatccatgggcaggc

SEQ ID NO: 146698 - DNA, 17 bp, Arabidopsis thaliana
tgaatcccagctactgc

SEQ ID NO: 146699 - DNA, 17 bp, Arabidopsis thaliana
tgaatcccgtaattcct

SEQ ID NO: 146700 - DNA, 17 bp, Arabidopsis thaliana
tgaatccgaggcggaga

SEQ ID NO: 146701 - DNA, 17 bp, Arabidopsis thaliana
tgaatcctcgatttggc

SEQ ID NO: 146702 - DNA, 17 bp, Arabidopsis thaliana
tgaatccttggttcaac

SEQ ID NO: 146703 - DNA, 17 bp, Arabidopsis thaliana
tgaatcctttgcagacg

SEQ ID NO: 146704 - DNA, 17 bp, Arabidopsis thaliana
tgaatcgaaacctggct

SEQ ID NO: 146705 - DNA, 17 bp, Arabidopsis thaliana
tgaatcgaaccatctag

SEQ ID NO: 146706 - DNA, 17 bp, Arabidopsis thaliana
tgaatcgagaatcagca

SEQ ID NO: 146707 - DNA, 17 bp, Arabidopsis thaliana
tgaatcgaggcagattc

SEQ ID NO: 146708 - DNA, 17 bp, Arabidopsis thaliana
tgaatcgagggttgcgc

SEQ ID NO: 146709 - DNA, 17 bp, Arabidopsis thaliana
tgaatcgagtggagcag

SEQ ID NO: 146710 - DNA, 17 bp, Arabidopsis thaliana
tgaatcgatttggccgg

SEQ ID NO: 146711 - DNA, 17 bp, Arabidopsis thaliana
tgaatcgcctcggataa

SEQ ID NO: 146712 - DNA, 17 bp, Arabidopsis thaliana
tgaatcgcggcatgccg

SEQ ID NO: 146713 - DNA, 17 bp, Arabidopsis thaliana
tgaatcggaggcggggt

SEQ ID NO: 146714 - DNA, 17 bp, Arabidopsis thaliana
tgaatcggtggattaac

SEQ ID NO: 146715 - DNA, 17 bp, Arabidopsis thaliana
tgaatcggtgtggatcg

SEQ ID NO: 146716 - DNA, 17 bp, Arabidopsis thaliana
tgaatcgtaacctggct

SEQ ID NO: 146717 - DNA, 17 bp, Arabidopsis thaliana
tgaatctaacctggtgt

SEQ ID NO: 146718 - DNA, 17 bp, Arabidopsis thaliana
tgaatctacagataagc

SEQ ID NO: 146719 - DNA, 17 bp, Arabidopsis thaliana
tgaatctacatacgcca

SEQ ID NO: 146720 - DNA, 17 bp, Arabidopsis thaliana
tgaatctacgacaacgg

SEQ ID NO: 146721 - DNA, 17 bp, Arabidopsis thaliana
tgaatctactgttgctc

SEQ ID NO: 146722 - DNA, 17 bp, Arabidopsis thaliana
tgaatctagccttctgt

SEQ ID NO: 146723 - DNA, 17 bp, Arabidopsis thaliana
tgaatctagttttcaat

SEQ ID NO: 146724 - DNA, 17 bp, Arabidopsis thaliana
tgaatctatcgtccacg

SEQ ID NO: 146725 - DNA, 17 bp, Arabidopsis thaliana
tgaatctcagtggatcg

SEQ ID NO: 146726 - DNA, 17 bp, Arabidopsis thaliana
tgaatctccacattgca

SEQ ID NO: 146727 - DNA, 17 bp, Arabidopsis thaliana
tgaatctccagccatgt

SEQ ID NO: 146728 - DNA, 17 bp, Arabidopsis thaliana
tgaatctccatcgcctg

SEQ ID NO: 146729 - DNA, 17 bp, Arabidopsis thaliana
tgaatctccgtcgttat

SEQ ID NO: 146730 - DNA, 17 bp, Arabidopsis thaliana
tgaatctcgatgtgaaa

SEQ ID NO: 146731 - DNA, 17 bp, Arabidopsis thaliana
tgaatctcggctattct

SEQ ID NO: 146732 - DNA, 17 bp, Arabidopsis thaliana
tgaatctctgtgctagc

SEQ ID NO: 146733 - DNA, 17 bp, Arabidopsis thaliana
tgaatctctgtgtccgt

SEQ ID NO: 146734 - DNA, 17 bp, Arabidopsis thaliana
tgaatctgaacaggctt

SEQ ID NO: 146735 - DNA, 17 bp, Arabidopsis thaliana
tgaatctgaagctgcca

SEQ ID NO: 146736 - DNA, 17 bp, Arabidopsis thaliana
tgaatctgacggctttg

SEQ ID NO: 146737 - DNA, 17 bp, Arabidopsis thaliana
tgaatctgacgtgctat

SEQ ID NO: 146738 - DNA, 17 bp, Arabidopsis thaliana
tgaatctgactatcagg

SEQ ID NO: 146739 - DNA, 17 bp, Arabidopsis thaliana
tgaatctgccagcatga

SEQ ID NO: 146740 - DNA, 17 bp, Arabidopsis thaliana
tgaatctgccatctttg

SEQ ID NO: 146741 - DNA, 17 bp, Arabidopsis thaliana
tgaatctgccttcgctt

SEQ ID NO: 146742 - DNA, 17 bp, Arabidopsis thaliana
tgaatctgctaccaagc

SEQ ID NO: 146743 - DNA, 17 bp, Arabidopsis thaliana
tgaatctggaacgtcat

SEQ ID NO: 146744 - DNA, 17 bp, Arabidopsis thaliana
tgaatcttcatcgcctg

SEQ ID NO: 146745 - DNA, 17 bp, Arabidopsis thaliana
tgaatcttccgacaaaa

SEQ ID NO: 146746 - DNA, 17 bp, Arabidopsis thaliana
tgaatcttctgtggacc

SEQ ID NO: 146747 - DNA, 17 bp, Arabidopsis thaliana
tgaatcttctgtggact

SEQ ID NO: 146748 - DNA, 17 bp, Arabidopsis thaliana
tgaatcttcttggcgtg

SEQ ID NO: 146749 - DNA, 17 bp, Arabidopsis thaliana
tgaatcttgatgatgct

SEQ ID NO: 146750 - DNA, 17 bp, Arabidopsis thaliana
tgaatcttgtgggatac

SEQ ID NO: 146751 - DNA, 17 bp, Arabidopsis thaliana
tgaatgaaagagtcgca

SEQ ID NO: 146752 - DNA, 17 bp, Arabidopsis thaliana
tgaatgaaccgtttttg

SEQ ID NO: 146753 - DNA, 17 bp, Arabidopsis thaliana
tgaatgaacctgcaagc

SEQ ID NO: 146754 - DNA, 17 bp, Arabidopsis thaliana
tgaatgaacgaattcag

SEQ ID NO: 146755 - DNA, 17 bp, Arabidopsis thaliana
tgaatgaaggttgtggc

SEQ ID NO: 146756 - DNA, 17 bp, Arabidopsis thaliana
tgaatgaatccgagatc

SEQ ID NO: 146757 - DNA, 17 bp, Arabidopsis thaliana
tgaatgaatggattcac

SEQ ID NO: 146758 - DNA, 17 bp, Arabidopsis thaliana
tgaatgaccattttacc

SEQ ID NO: 146759 - DNA, 17 bp, Arabidopsis thaliana
tgaatgacccgttagat

SEQ ID NO: 146760 - DNA, 17 bp, Arabidopsis thaliana
tgaatgacgaccgtgtg

SEQ ID NO: 146761 - DNA, 17 bp, Arabidopsis thaliana
tgaatgacgtttatgga

SEQ ID NO: 146762 - DNA, 17 bp, Arabidopsis thaliana
tgaatgactaaaatctg

SEQ ID NO: 146763 - DNA, 17 bp, Arabidopsis thaliana
tgaatgagagctctttc

SEQ ID NO: 146764 - DNA, 17 bp, Arabidopsis thaliana
tgaatgagtttgcggga

SEQ ID NO: 146765 - DNA, 17 bp, Arabidopsis thaliana
tgaatgatccagagcag

SEQ ID NO: 146766 - DNA, 17 bp, Arabidopsis thaliana
tgaatgatccggtgaag

SEQ ID NO: 146767 - DNA, 17 bp, Arabidopsis thaliana
tgaatgatgactaaaac

SEQ ID NO: 146768 - DNA, 17 bp, Arabidopsis thaliana
tgaatgattaaccagcc

SEQ ID NO: 146769 - DNA, 17 bp, Arabidopsis thaliana
tgaatgcaaaacttgcc

SEQ ID NO: 146770 - DNA, 17 bp, Arabidopsis thaliana
tgaatgcaagcttcagc

SEQ ID NO: 146771 - DNA, 17 bp, Arabidopsis thaliana
tgaatgcagacttgaag

SEQ ID NO: 146772 - DNA, 17 bp, Arabidopsis thaliana
tgaatgcaggcggtttg

SEQ ID NO: 146773 - DNA, 17 bp, Arabidopsis thaliana
tgaatgccaggggcgta

SEQ ID NO: 146774 - DNA, 17 bp, Arabidopsis thaliana
tgaatgcgctttgaatc

SEQ ID NO: 146775 - DNA, 17 bp, Arabidopsis thaliana
tgaatgctacgcctgga

SEQ ID NO: 146776 - DNA, 17 bp, Arabidopsis thaliana
tgaatgcttcgatgtcc

SEQ ID NO: 146777 - DNA, 17 bp, Arabidopsis thaliana
tgaatggagacgtgcgg

SEQ ID NO: 146778 - DNA, 17 bp, Arabidopsis thaliana
tgaatggatcactcatg

SEQ ID NO: 146779 - DNA, 17 bp, Arabidopsis thaliana
tgaatggatgttgtggt

SEQ ID NO: 146780 - DNA, 17 bp, Arabidopsis thaliana
tgaatggattaacgaga

SEQ ID NO: 146781 - DNA, 17 bp, Arabidopsis thaliana
tgaatggctctatgcgc

SEQ ID NO: 146782 - DNA, 17 bp, Arabidopsis thaliana
tgaatggctgtatgcca

SEQ ID NO: 146783 - DNA, 17 bp, Arabidopsis thaliana
tgaatgggctgaccacg

SEQ ID NO: 146784 - DNA, 17 bp, Arabidopsis thaliana
tgaatggggagcccacc

SEQ ID NO: 146785 - DNA, 17 bp, Arabidopsis thaliana
tgaatggggtcggtgaa

SEQ ID NO: 146786 - DNA, 17 bp, Arabidopsis thaliana
tgaatgggtcggccggt

SEQ ID NO: 146787 - DNA, 17 bp, Arabidopsis thaliana
tgaatggtaggcacaat

SEQ ID NO: 146788 - DNA, 17 bp, Arabidopsis thaliana
tgaatggtcaaacaaag

SEQ ID NO: 146789 - DNA, 17 bp, Arabidopsis thaliana
tgaatggtgaactatgc

SEQ ID NO: 146790 - DNA, 17 bp, Arabidopsis thaliana
tgaatggtgactgagtt

SEQ ID NO: 146791 - DNA, 17 bp, Arabidopsis thaliana
tgaatggtgactgcgtt

SEQ ID NO: 146792 - DNA, 17 bp, Arabidopsis thaliana
tgaatggtgagtgaaac

SEQ ID NO: 146793 - DNA, 17 bp, Arabidopsis thaliana
tgaatggttacagcggt

SEQ ID NO: 146794 - DNA, 17 bp, Arabidopsis thaliana
tgaatggttacggaccg

SEQ ID NO: 146795 - DNA, 17 bp, Arabidopsis thaliana
tgaatggttactgcgct

SEQ ID NO: 146796 - DNA, 17 bp, Arabidopsis thaliana
tgaatggttactgcggt

SEQ ID NO: 146797 - DNA, 17 bp, Arabidopsis thaliana
tgaatggttatagcggt

SEQ ID NO: 146798 - DNA, 17 bp, Arabidopsis thaliana
tgaatggttttggaacc

SEQ ID NO: 146799 - DNA, 17 bp, Arabidopsis thaliana
tgaatgtaattcttgaa

SEQ ID NO: 146800 - DNA, 17 bp, Arabidopsis thaliana
tgaatgtccgtgctgtc

SEQ ID NO: 146801 - DNA, 17 bp, Arabidopsis thaliana
tgaatgtcgcgaatatt

SEQ ID NO: 146802 - DNA, 17 bp, Arabidopsis thaliana
tgaatgtcggattcgca

SEQ ID NO: 146803 - DNA, 17 bp, Arabidopsis thaliana
tgaatgtcgtccagcgt

SEQ ID NO: 146804 - DNA, 17 bp, Arabidopsis thaliana
tgaatgtcgtggaagta

SEQ ID NO: 146805 - DNA, 17 bp, Arabidopsis thaliana
tgaatgtcgttttggcg

SEQ ID NO: 146806 - DNA, 17 bp, Arabidopsis thaliana
tgaatgtctgcctgcgc

SEQ ID NO: 146807 - DNA, 17 bp, Arabidopsis thaliana
tgaatgtgacacgttta

SEQ ID NO: 146808 - DNA, 17 bp, Arabidopsis thaliana
tgaatgtgactacatcg

SEQ ID NO: 146809 - DNA, 17 bp, Arabidopsis thaliana
tgaatgtgccagcatga

SEQ ID NO: 146810 - DNA, 17 bp, Arabidopsis thaliana
tgaatgtgctttcgatg

SEQ ID NO: 146811 - DNA, 17 bp, Arabidopsis thaliana
tgaatgttctgcgagac

SEQ ID NO: 146812 - DNA, 17 bp, Arabidopsis thaliana
tgaatgttgcaagattg

SEQ ID NO: 146813 - DNA, 17 bp, Arabidopsis thaliana
tgaatgttgcttcatgc

SEQ ID NO: 146814 - DNA, 17 bp, Arabidopsis thaliana
tgaatgtttgagattcg

SEQ ID NO: 146815 - DNA, 17 bp, Arabidopsis thaliana
tgaatgtttggaatcgc

SEQ ID NO: 146816 - DNA, 17 bp, Arabidopsis thaliana
tgaatgttttaccgttg

SEQ ID NO: 146817 - DNA, 17 bp, Arabidopsis thaliana
tgaattacggattgttg

SEQ ID NO: 146818 - DNA, 17 bp, Arabidopsis thaliana
tgaattaggtctgtggg

SEQ ID NO: 146819 - DNA, 17 bp, Arabidopsis thaliana
tgaattcaacttgatgt

SEQ ID NO: 146820 - DNA, 17 bp, Arabidopsis thaliana
tgaattcaacttggtgg

SEQ ID NO: 146821 - DNA, 17 bp, Arabidopsis thaliana
tgaattcaacttggtgt

SEQ ID NO: 146822 - DNA, 17 bp, Arabidopsis thaliana
tgaattcaagcatgcat

SEQ ID NO: 146823 - DNA, 17 bp, Arabidopsis thaliana
tgaattcacatggctca

SEQ ID NO: 146824 - DNA, 17 bp, Arabidopsis thaliana
tgaattcaccatcgcgg

SEQ ID NO: 146825 - DNA, 17 bp, Arabidopsis thaliana
tgaattcagccctttgt

SEQ ID NO: 146826 - DNA, 17 bp, Arabidopsis thaliana
tgaattcatcatctcga

SEQ ID NO: 146827 - DNA, 17 bp, Arabidopsis thaliana
tgaattcatttgtagca

SEQ ID NO: 146828 - DNA, 17 bp, Arabidopsis thaliana
tgaattccaaactcggg

SEQ ID NO: 146829 - DNA, 17 bp, Arabidopsis thaliana
tgaattccccgatttgt

SEQ ID NO: 146830 - DNA, 17 bp, Arabidopsis thaliana
tgaattcctcaggattg

SEQ ID NO: 146831 - DNA, 17 bp, Arabidopsis thaliana
tgaattcgatttaaccg

SEQ ID NO: 146832 - DNA, 17 bp, Arabidopsis thaliana
tgaattcgccttgcgca

SEQ ID NO: 146833 - DNA, 17 bp, Arabidopsis thaliana
tgaattcgtcgagtcct

SEQ ID NO: 146834 - DNA, 17 bp, Arabidopsis thaliana
tgaattcgtgcgtttcg

SEQ ID NO: 146835 - DNA, 17 bp, Arabidopsis thaliana
tgaattctactcttggc

SEQ ID NO: 146836 - DNA, 17 bp, Arabidopsis thaliana
tgaattctgagtagccg

SEQ ID NO: 146837 - DNA, 17 bp, Arabidopsis thaliana
tgaattgaccattttgg

SEQ ID NO: 146838 - DNA, 17 bp, Arabidopsis thaliana
tgaattgacgggttttt

SEQ ID NO: 146839 - DNA, 17 bp, Arabidopsis thaliana
tgaattgcagaatcccg

SEQ ID NO: 146840 - DNA, 17 bp, Arabidopsis thaliana
tgaattgcaggttttga

SEQ ID NO: 146841 - DNA, 17 bp, Arabidopsis thaliana
tgaattgccatcaacgc

SEQ ID NO: 146842 - DNA, 17 bp, Arabidopsis thaliana
tgaattgccttctttgc

SEQ ID NO: 146843 - DNA, 17 bp, Arabidopsis thaliana
tgaattgctggatctga

SEQ ID NO: 146844 - DNA, 17 bp, Arabidopsis thaliana
tgaattgcttagaatcc

SEQ ID NO: 146845 - DNA, 17 bp, Arabidopsis thaliana
tgaattggcagacattt

SEQ ID NO: 146846 - DNA, 17 bp, Arabidopsis thaliana
tgaattggccccggctt

SEQ ID NO: 146847 - DNA, 17 bp, Arabidopsis thaliana
tgaattggccgggtgtg

SEQ ID NO: 146848 - DNA, 17 bp, Arabidopsis thaliana
tgaattggtgcaggtcg

SEQ ID NO: 146849 - DNA, 17 bp, Arabidopsis thaliana
tgaattggttgattcga

SEQ ID NO: 146850 - DNA, 17 bp, Arabidopsis thaliana
tgaattgtttgctactg

SEQ ID NO: 146851 - DNA, 17 bp, Arabidopsis thaliana
tgaatttaacatggtgt

SEQ ID NO: 146852 - DNA, 17 bp, Arabidopsis thaliana
tgaatttaacctggtgt

SEQ ID NO: 146853 - DNA, 17 bp, Arabidopsis thaliana
tgaatttaacttggtgt

SEQ ID NO: 146854 - DNA, 17 bp, Arabidopsis thaliana
tgaatttaggctgtgaa

SEQ ID NO: 146855 - DNA, 17 bp, Arabidopsis thaliana
tgaatttcctgactggt

SEQ ID NO: 146856 - DNA, 17 bp, Arabidopsis thaliana
tgaatttcgctcgtggt

SEQ ID NO: 146857 - DNA, 17 bp, Arabidopsis thaliana
tgaatttcggaacctca

SEQ ID NO: 146858 - DNA, 17 bp, Arabidopsis thaliana
tgaatttcggcagcctc

SEQ ID NO: 146859 - DNA, 17 bp, Arabidopsis thaliana
tgaatttcggtgcgttt

SEQ ID NO: 146860 - DNA, 17 bp, Arabidopsis thaliana
tgaatttcgtagcctct

SEQ ID NO: 146861 - DNA, 17 bp, Arabidopsis thaliana
tgaatttcgtaggaggc

SEQ ID NO: 146862 - DNA, 17 bp, Arabidopsis thaliana
tgaatttctaccggtgc

SEQ ID NO: 146863 - DNA, 17 bp, Arabidopsis thaliana
tgaatttctgcaatcag

SEQ ID NO: 146864 - DNA, 17 bp, Arabidopsis thaliana
tgaatttcttcatgagg

SEQ ID NO: 146865 - DNA, 17 bp, Arabidopsis thaliana
tgaatttgaaccaaatg

SEQ ID NO: 146866 - DNA, 17 bp, Arabidopsis thaliana
tgaatttgaggttcggc

SEQ ID NO: 146867 - DNA, 17 bp, Arabidopsis thaliana
tgaatttgcaggtaatt

SEQ ID NO: 146868 - DNA, 17 bp, Arabidopsis thaliana
tgaatttgccgctggat

SEQ ID NO: 146869 - DNA, 17 bp, Arabidopsis thaliana
tgaatttggcaggaatt

SEQ ID NO: 146870 - DNA, 17 bp, Arabidopsis thaliana
tgaatttggctccaagg

SEQ ID NO: 146871 - DNA, 17 bp, Arabidopsis thaliana
tgaatttggctgagggt

SEQ ID NO: 146872 - DNA, 17 bp, Arabidopsis thaliana
tgaatttgtcgaccagg

SEQ ID NO: 146873 - DNA, 17 bp, Arabidopsis thaliana
tgaatttgtgtgtctat

SEQ ID NO: 146874 - DNA, 17 bp, Arabidopsis thaliana
tgaatttgttaacgggg

SEQ ID NO: 146875 - DNA, 17 bp, Arabidopsis thaliana
tgaattttcagccctat

SEQ ID NO: 146876 - DNA, 17 bp, Arabidopsis thaliana
tgaattttcgtgatttg

SEQ ID NO: 146877 - DNA, 17 bp, Arabidopsis thaliana
tgaattttctttggacg

SEQ ID NO: 146878 - DNA, 17 bp, Arabidopsis thaliana
tgaattttgacccattt

SEQ ID NO: 146879 - DNA, 17 bp, Arabidopsis thaliana
tgaattttgcttctatt

SEQ ID NO: 146880 - DNA, 17 bp, Arabidopsis thaliana
tgaattttgtgctgcct

SEQ ID NO: 146881 - DNA, 17 bp, Arabidopsis thaliana
tgaattttttgctgact

SEQ ID NO: 146882 - DNA, 17 bp, Arabidopsis thaliana
tgacaaaactgcttata

SEQ ID NO: 146883 - DNA, 17 bp, Arabidopsis thaliana
tgacaaaatttggggtc

SEQ ID NO: 146884 - DNA, 17 bp, Arabidopsis thaliana
tgacaaaccctgagttg

SEQ ID NO: 146885 - DNA, 17 bp, Arabidopsis thaliana
tgacaaaccgattggtg

SEQ ID NO: 146886 - DNA, 17 bp, Arabidopsis thaliana
tgacaaagaagcaagcc

SEQ ID NO: 146887 - DNA, 17 bp, Arabidopsis thaliana
tgacaaagccacctgtt

SEQ ID NO: 146888 - DNA, 17 bp, Arabidopsis thaliana
tgacaaagccccgggac

SEQ ID NO: 146889 - DNA, 17 bp, Arabidopsis thaliana
tgacaaagtgggctggg

SEQ ID NO: 146890 - DNA, 17 bp, Arabidopsis thaliana
tgacaaagtggtagacg

SEQ ID NO: 146891 - DNA, 17 bp, Arabidopsis thaliana
tgacaaatcctgtctcc

SEQ ID NO: 146892 - DNA, 17 bp, Arabidopsis thaliana
tgacaaatgcttagcct

SEQ ID NO: 146893 - DNA, 17 bp, Arabidopsis thaliana
tgacaaatggagagagt

SEQ ID NO: 146894 - DNA, 17 bp, Arabidopsis thaliana
tgacaaattcagggtcc

SEQ ID NO: 146895 - DNA, 17 bp, Arabidopsis thaliana
tgacaacaacttcatgc

SEQ ID NO: 146896 - DNA, 17 bp, Arabidopsis thaliana
tgacaaccaccggggag

SEQ ID NO: 146897 - DNA, 17 bp, Arabidopsis thaliana
tgacaacgaccctttgg

SEQ ID NO: 146898 - DNA, 17 bp, Arabidopsis thaliana
tgacaacgactgtgtgc

SEQ ID NO: 146899 - DNA, 17 bp, Arabidopsis thaliana
tgacaacggattagttt

SEQ ID NO: 146900 - DNA, 17 bp, Arabidopsis thaliana
tgacaactctgcctggg

SEQ ID NO: 146901 - DNA, 17 bp, Arabidopsis thaliana
tgacaactgcggcgaaa

SEQ ID NO: 146902 - DNA, 17 bp, Arabidopsis thaliana
tgacaactgtttgtgat

SEQ ID NO: 146903 - DNA, 17 bp, Arabidopsis thaliana
tgacaacttcgtatgcg

SEQ ID NO: 146904 - DNA, 17 bp, Arabidopsis thaliana
tgacaagaaaccacagg

SEQ ID NO: 146905 - DNA, 17 bp, Arabidopsis thaliana
tgacaagaaacccacag

SEQ ID NO: 146906 - DNA, 17 bp, Arabidopsis thaliana
tgacaagccttcaacac

SEQ ID NO: 146907 - DNA, 17 bp, Arabidopsis thaliana
tgacaagctggacagga

SEQ ID NO: 146908 - DNA, 17 bp, Arabidopsis thaliana
tgacaaggatgacttgc

SEQ ID NO: 146909 - DNA, 17 bp, Arabidopsis thaliana
tgacaaggccccgggtc

SEQ ID NO: 146910 - DNA, 17 bp, Arabidopsis thaliana
tgacaaggcctagatga

SEQ ID NO: 146911 - DNA, 17 bp, Arabidopsis thaliana
tgacaaggctcgaacct

SEQ ID NO: 146912 - DNA, 17 bp, Arabidopsis thaliana
tgacaaggtcttgcgtt

SEQ ID NO: 146913 - DNA, 17 bp, Arabidopsis thaliana
tgacaagttgggtctaa

SEQ ID NO: 146914 - DNA, 17 bp, Arabidopsis thaliana
tgacaagtttttggctg

SEQ ID NO: 146915 - DNA, 17 bp, Arabidopsis thaliana
tgacaatacaattttac

SEQ ID NO: 146916 - DNA, 17 bp, Arabidopsis thaliana
tgacaataggtggagag

SEQ ID NO: 146917 - DNA, 17 bp, Arabidopsis thaliana
tgacaataggtggagtg

SEQ ID NO: 146918 - DNA, 17 bp, Arabidopsis thaliana
tgacaatcctaaccgtg

SEQ ID NO: 146919 - DNA, 17 bp, Arabidopsis thaliana
tgacaatccttgaagat

SEQ ID NO: 146920 - DNA, 17 bp, Arabidopsis thaliana
tgacaatgaagggtcca

SEQ ID NO: 146921 - DNA, 17 bp, Arabidopsis thaliana
tgacaatgccactttgc

SEQ ID NO: 146922 - DNA, 17 bp, Arabidopsis thaliana
tgacaatggttcgctga

SEQ ID NO: 146923 - DNA, 17 bp, Arabidopsis thaliana
tgacaatgttcgagtac

SEQ ID NO: 146924 - DNA, 17 bp, Arabidopsis thaliana
tgacaattgaaaatcgc

SEQ ID NO: 146925 - DNA, 17 bp, Arabidopsis thaliana
tgacaattggacaaggg

SEQ ID NO: 146926 - DNA, 17 bp, Arabidopsis thaliana
tgacaatttggatgaac

SEQ ID NO: 146927 - DNA, 17 bp, Arabidopsis thaliana
tgacacagctccgccgc

SEQ ID NO: 146928 - DNA, 17 bp, Arabidopsis thaliana
tgacacagctttcttga

SEQ ID NO: 146929 - DNA, 17 bp, Arabidopsis thaliana
tgacacaggtggtgcat

SEQ ID NO: 146930 - DNA, 17 bp, Arabidopsis thaliana
tgacacatcatcacacc

SEQ ID NO: 146931 - DNA, 17 bp, Arabidopsis thaliana
tgacacatggcgagact

SEQ ID NO: 146932 - DNA, 17 bp, Arabidopsis thaliana
tgacacatgggttgctg

SEQ ID NO: 146933 - DNA, 17 bp, Arabidopsis thaliana
tgacacatgtccggttc

SEQ ID NO: 146934 - DNA, 17 bp, Arabidopsis thaliana
tgacacattcggtcgcg

SEQ ID NO: 146935 - DNA, 17 bp, Arabidopsis thaliana
tgacacatttcaaagct

SEQ ID NO: 146936 - DNA, 17 bp, Arabidopsis thaliana
tgacaccaacggttgca

SEQ ID NO: 146937 - DNA, 17 bp, Arabidopsis thaliana
tgacaccaagaaccgtg

SEQ ID NO: 146938 - DNA, 17 bp, Arabidopsis thaliana
tgacaccaggtttgaac

SEQ ID NO: 146939 - DNA, 17 bp, Arabidopsis thaliana
tgacaccagtgctgcaa

SEQ ID NO: 146940 - DNA, 17 bp, Arabidopsis thaliana
tgacaccatcacttctc

SEQ ID NO: 146941 - DNA, 17 bp, Arabidopsis thaliana
tgacaccatggctattt

SEQ ID NO: 146942 - DNA, 17 bp, Arabidopsis thaliana
tgacacccaggcagacg

SEQ ID NO: 146943 - DNA, 17 bp, Arabidopsis thaliana
tgacacccctttgtcgc

SEQ ID NO: 146944 - DNA, 17 bp, Arabidopsis thaliana
tgacaccggttcgaacc

SEQ ID NO: 146945 - DNA, 17 bp, Arabidopsis thaliana
tgacaccggttcggacc

SEQ ID NO: 146946 - DNA, 17 bp, Arabidopsis thaliana
tgacaccgttagatgat

SEQ ID NO: 146947 - DNA, 17 bp, Arabidopsis thaliana
tgacacctcagcttttt

SEQ ID NO: 146948 - DNA, 17 bp, Arabidopsis thaliana
tgacacctcttacagac

SEQ ID NO: 146949 - DNA, 17 bp, Arabidopsis thaliana
tgacacctgcaccaaca

SEQ ID NO: 146950 - DNA, 17 bp, Arabidopsis thaliana
tgacacctgcgatggac

SEQ ID NO: 146951 - DNA, 17 bp, Arabidopsis thaliana
tgacacctgcgatggat

SEQ ID NO: 146952 - DNA, 17 bp, Arabidopsis thaliana
tgacacgagcatgtatc

SEQ ID NO: 146953 - DNA, 17 bp, Arabidopsis thaliana
tgacacgataagaaggt

SEQ ID NO: 146954 - DNA, 17 bp, Arabidopsis thaliana
tgacacgcaaatttccg

SEQ ID NO: 146955 - DNA, 17 bp, Arabidopsis thaliana
tgacacggctcaatcag

SEQ ID NO: 146956 - DNA, 17 bp, Arabidopsis thaliana
tgacacgtcagatgata

SEQ ID NO: 146957 - DNA, 17 bp, Arabidopsis thaliana
tgacacgtcggatctct

SEQ ID NO: 146958 - DNA, 17 bp, Arabidopsis thaliana
tgacacgtctgcctggg

SEQ ID NO: 146959 - DNA, 17 bp, Arabidopsis thaliana
tgacacgtctgggtgtc

SEQ ID NO: 146960 - DNA, 17 bp, Arabidopsis thaliana
tgacacgtctgtctggg

SEQ ID NO: 146961 - DNA, 17 bp, Arabidopsis thaliana
tgacacgtgacacgatc

SEQ ID NO: 146962 - DNA, 17 bp, Arabidopsis thaliana
tgacacgtgccacgatc

SEQ ID NO: 146963 - DNA, 17 bp, Arabidopsis thaliana
tgacacgtggagttgga

SEQ ID NO: 146964 - DNA, 17 bp, Arabidopsis thaliana
tgacacgtggcacggtc

SEQ ID NO: 146965 - DNA, 17 bp, Arabidopsis thaliana
tgacacgtgtcgttggc

SEQ ID NO: 146966 - DNA, 17 bp, Arabidopsis thaliana
tgacacgtgttttctat

SEQ ID NO: 146967 - DNA, 17 bp, Arabidopsis thaliana
tgacacgtttaggcact

SEQ ID NO: 146968 - DNA, 17 bp, Arabidopsis thaliana
tgacactagtaattctg

SEQ ID NO: 146969 - DNA, 17 bp, Arabidopsis thaliana
tgacactcactggtgtg

SEQ ID NO: 146970 - DNA, 17 bp, Arabidopsis thaliana
tgacactcaggctccct

SEQ ID NO: 146971 - DNA, 17 bp, Arabidopsis thaliana
tgacactcatactcgac

SEQ ID NO: 146972 - DNA, 17 bp, Arabidopsis thaliana
tgacactcattggtgtg

SEQ ID NO: 146973 - DNA, 17 bp, Arabidopsis thaliana
tgacactccttggtgtg

SEQ ID NO: 146974 - DNA, 17 bp, Arabidopsis thaliana
tgacactcgagctggtg

SEQ ID NO: 146975 - DNA, 17 bp, Arabidopsis thaliana
tgacactcggtccgcta

SEQ ID NO: 146976 - DNA, 17 bp, Arabidopsis thaliana
tgacactctccggtgtg

SEQ ID NO: 146977 - DNA, 17 bp, Arabidopsis thaliana
tgacactctctctttgt

SEQ ID NO: 146978 - DNA, 17 bp, Arabidopsis thaliana
tgacactgactggtgtg

SEQ ID NO: 146979 - DNA, 17 bp, Arabidopsis thaliana
tgacactgagtgtccag

SEQ ID NO: 146980 - DNA, 17 bp, Arabidopsis thaliana
tgacactgctctatctg

SEQ ID NO: 146981 - DNA, 17 bp, Arabidopsis thaliana
tgacactgctctttctg

SEQ ID NO: 146982 - DNA, 17 bp, Arabidopsis thaliana
tgacactgcttcaacac

SEQ ID NO: 146983 - DNA, 17 bp, Arabidopsis thaliana
tgacactgtgggctgag

SEQ ID NO: 146984 - DNA, 17 bp, Arabidopsis thaliana
tgacactgtgggctggg

SEQ ID NO: 146985 - DNA, 17 bp, Arabidopsis thaliana
tgacactgttgcggtgc

SEQ ID NO: 146986 - DNA, 17 bp, Arabidopsis thaliana
tgacacttaagctctgg

SEQ ID NO: 146987 - DNA, 17 bp, Arabidopsis thaliana
tgacacttttcgtgccg

SEQ ID NO: 146988 - DNA, 17 bp, Arabidopsis thaliana
tgacagaaaaagtttac

SEQ ID NO: 146989 - DNA, 17 bp, Arabidopsis thaliana
tgacagaaacgtcctac

SEQ ID NO: 146990 - DNA, 17 bp, Arabidopsis thaliana
tgacagaacagagtgag

SEQ ID NO: 146991 - DNA, 17 bp, Arabidopsis thaliana
tgacagaagagagtgac

SEQ ID NO: 146992 - DNA, 17 bp, Arabidopsis thaliana
tgacagaagagagtgag

SEQ ID NO: 146993 - DNA, 17 bp, Arabidopsis thaliana
tgacagaagagattgag

SEQ ID NO: 146994 - DNA, 17 bp, Arabidopsis thaliana
tgacagaagatccagaa

SEQ ID NO: 146995 - DNA, 17 bp, Arabidopsis thaliana
tgacagaagtcgagtga

SEQ ID NO: 146996 - DNA, 17 bp, Arabidopsis thaliana
tgacagacggtgttgat

SEQ ID NO: 146997 - DNA, 17 bp, Arabidopsis thaliana
tgacagacgtggctttg

SEQ ID NO: 146998 - DNA, 17 bp, Arabidopsis thaliana
tgacagactcctcgttg

SEQ ID NO: 146999 - DNA, 17 bp, Arabidopsis thaliana
tgacagactgagagctc

SEQ ID NO: 147000 - DNA, 17 bp, Arabidopsis thaliana
tgacagactgagagctg

SEQ ID NO: 147001 - DNA, 17 bp, Arabidopsis thaliana
tgacagactttccaaac

SEQ ID NO: 147002 - DNA, 17 bp, Arabidopsis thaliana
tgacagaggcagacagc

SEQ ID NO: 147003 - DNA, 17 bp, Arabidopsis thaliana
tgacagatctgcaggat

SEQ ID NO: 147004 - DNA, 17 bp, Arabidopsis thaliana
tgacagatctgtaatta

SEQ ID NO: 147005 - DNA, 17 bp, Arabidopsis thaliana
tgacagattagtccgca

SEQ ID NO: 147006 - DNA, 17 bp, Arabidopsis thaliana
tgacagcatacggttgg

SEQ ID NO: 147007 - DNA, 17 bp, Arabidopsis thaliana
tgacagccctagctcag

SEQ ID NO: 147008 - DNA, 17 bp, Arabidopsis thaliana
tgacagccctttgtcgc

SEQ ID NO: 147009 - DNA, 17 bp, Arabidopsis thaliana
tgacagcgacgggattg

SEQ ID NO: 147010 - DNA, 17 bp, Arabidopsis thaliana
tgacagcgattcagaca

SEQ ID NO: 147011 - DNA, 17 bp, Arabidopsis thaliana
tgacagctcaccacctt

SEQ ID NO: 147012 - DNA, 17 bp, Arabidopsis thaliana
tgacagctctatctcta

SEQ ID NO: 147013 - DNA, 17 bp, Arabidopsis thaliana
tgacaggaaatttgttt

SEQ ID NO: 147014 - DNA, 17 bp, Arabidopsis thaliana
tgacaggaactcgtgcc

SEQ ID NO: 147015 - DNA, 17 bp, Arabidopsis thaliana
tgacaggaccaacctgg

SEQ ID NO: 147016 - DNA, 17 bp, Arabidopsis thaliana
tgacaggcccgcataat

SEQ ID NO: 147017 - DNA, 17 bp, Arabidopsis thaliana
tgacaggcctgtgctaa

SEQ ID NO: 147018 - DNA, 17 bp, Arabidopsis thaliana
tgacagggacagtcggg

SEQ ID NO: 147019 - DNA, 17 bp, Arabidopsis thaliana
tgacagggataactggc

SEQ ID NO: 147020 - DNA, 17 bp, Arabidopsis thaliana
tgacagggtccgtgcgt

SEQ ID NO: 147021 - DNA, 17 bp, Arabidopsis thaliana
tgacaggtcgagaatca

SEQ ID NO: 147022 - DNA, 17 bp, Arabidopsis thaliana
tgacaggtcgagtggct

SEQ ID NO: 147023 - DNA, 17 bp, Arabidopsis thaliana
tgacaggtctccaaggt

SEQ ID NO: 147024 - DNA, 17 bp, Arabidopsis thaliana
tgacaggtctcggtggg

SEQ ID NO: 147025 - DNA, 17 bp, Arabidopsis thaliana
tgacaggtggattctga

SEQ ID NO: 147026 - DNA, 17 bp, Arabidopsis thaliana
tgacaggttcggttcgg

SEQ ID NO: 147027 - DNA, 17 bp, Arabidopsis thaliana
tgacaggtttgattttc

SEQ ID NO: 147028 - DNA, 17 bp, Arabidopsis thaliana
tgacaggtttgggcatt

SEQ ID NO: 147029 - DNA, 17 bp, Arabidopsis thaliana
tgacagtatcgatcggg

SEQ ID NO: 147030 - DNA, 17 bp, Arabidopsis thaliana
tgacagtctcaccgttg

SEQ ID NO: 147031 - DNA, 17 bp, Arabidopsis thaliana
tgacagtctccttggct

SEQ ID NO: 147032 - DNA, 17 bp, Arabidopsis thaliana
tgacagtctggatcggg

SEQ ID NO: 147033 - DNA, 17 bp, Arabidopsis thaliana
tgacagtgataaaggag

SEQ ID NO: 147034 - DNA, 17 bp, Arabidopsis thaliana
tgacagtgggccggatg

SEQ ID NO: 147035 - DNA, 17 bp, Arabidopsis thaliana
tgacagtgtcttgagct

SEQ ID NO: 147036 - DNA, 17 bp, Arabidopsis thaliana
tgacagttgagcaggtt

SEQ ID NO: 147037 - DNA, 17 bp, Arabidopsis thaliana
tgacagttgctgcaagt

SEQ ID NO: 147038 - DNA, 17 bp, Arabidopsis thaliana
tgacagtttgttaacct

SEQ ID NO: 147039 - DNA, 17 bp, Arabidopsis thaliana
tgacagttttggaacac

SEQ ID NO: 147040 - DNA, 17 bp, Arabidopsis thaliana
tgacataacatgtgccg

SEQ ID NO: 147041 - DNA, 17 bp, Arabidopsis thaliana
tgacataactttgatct

SEQ ID NO: 147042 - DNA, 17 bp, Arabidopsis thaliana
tgacataccaggaatcg

SEQ ID NO: 147043 - DNA, 17 bp, Arabidopsis thaliana
tgacatactccgcatag

SEQ ID NO: 147044 - DNA, 17 bp, Arabidopsis thaliana
tgacatacttagcattc

SEQ ID NO: 147045 - DNA, 17 bp, Arabidopsis thaliana
tgacatatccaaaattg

SEQ ID NO: 147046 - DNA, 17 bp, Arabidopsis thaliana
tgacatatctcaggatc

SEQ ID NO: 147047 - DNA, 17 bp, Arabidopsis thaliana
tgacatatctccggttg

SEQ ID NO: 147048 - DNA, 17 bp, Arabidopsis thaliana
tgacatatctgaggtgt

SEQ ID NO: 147049 - DNA, 17 bp, Arabidopsis thaliana
tgacatatgaccagttt

SEQ ID NO: 147050 - DNA, 17 bp, Arabidopsis thaliana
tgacatcaagtcatatt

SEQ ID NO: 147051 - DNA, 17 bp, Arabidopsis thaliana
tgacatcatcgcacttt

SEQ ID NO: 147052 - DNA, 17 bp, Arabidopsis thaliana
tgacatccactttgttc

SEQ ID NO: 147053 - DNA, 17 bp, Arabidopsis thaliana
tgacatcctcagattgg

SEQ ID NO: 147054 - DNA, 17 bp, Arabidopsis thaliana
tgacatcggatctggcg

SEQ ID NO: 147055 - DNA, 17 bp, Arabidopsis thaliana
tgacatcggctggcgga

SEQ ID NO: 147056 - DNA, 17 bp, Arabidopsis thaliana
tgacatctcagcgtggt

SEQ ID NO: 147057 - DNA, 17 bp, Arabidopsis thaliana
tgacatctcataggggt

SEQ ID NO: 147058 - DNA, 17 bp, Arabidopsis thaliana
tgacatcttcaccgaat

SEQ ID NO: 147059 - DNA, 17 bp, Arabidopsis thaliana
tgacatcttcagcatgc

SEQ ID NO: 147060 - DNA, 17 bp, Arabidopsis thaliana
tgacatgacgcagtttc

SEQ ID NO: 147061 - DNA, 17 bp, Arabidopsis thaliana
tgacatgcctagggagt

SEQ ID NO: 147062 - DNA, 17 bp, Arabidopsis thaliana
tgacatgcgggataacc

SEQ ID NO: 147063 - DNA, 17 bp, Arabidopsis thaliana
tgacatgcttgaagcta

SEQ ID NO: 147064 - DNA, 17 bp, Arabidopsis thaliana
tgacatggcggattatg

SEQ ID NO: 147065 - DNA, 17 bp, Arabidopsis thaliana
tgacatggcggcttgtg

SEQ ID NO: 147066 - DNA, 17 bp, Arabidopsis thaliana
tgacatggcttggtgtt

SEQ ID NO: 147067 - DNA, 17 bp, Arabidopsis thaliana
tgacatggctttcccta

SEQ ID NO: 147068 - DNA, 17 bp, Arabidopsis thaliana
tgacatgtcccatacac

SEQ ID NO: 147069 - DNA, 17 bp, Arabidopsis thaliana
tgacatgtctcgaagca

SEQ ID NO: 147070 - DNA, 17 bp, Arabidopsis thaliana
tgacatgtgtgcgagtc

SEQ ID NO: 147071 - DNA, 17 bp, Arabidopsis thaliana
tgacattatcttggacg

SEQ ID NO: 147072 - DNA, 17 bp, Arabidopsis thaliana
tgacattcactggtgtg

SEQ ID NO: 147073 - DNA, 17 bp, Arabidopsis thaliana
tgacattcgttccttcc

SEQ ID NO: 147074 - DNA, 17 bp, Arabidopsis thaliana
tgacattcgttccttgc

SEQ ID NO: 147075 - DNA, 17 bp, Arabidopsis thaliana
tgacattctccactgtg

SEQ ID NO: 147076 - DNA, 17 bp, Arabidopsis thaliana
tgacattctcgtgcttg

SEQ ID NO: 147077 - DNA, 17 bp, Arabidopsis thaliana
tgacattctgacttcct

SEQ ID NO: 147078 - DNA, 17 bp, Arabidopsis thaliana
tgacattgagccaaaac

SEQ ID NO: 147079 - DNA, 17 bp, Arabidopsis thaliana
tgacattgccgtattgg

SEQ ID NO: 147080 - DNA, 17 bp, Arabidopsis thaliana
tgacattgctctggtgt

SEQ ID NO: 147081 - DNA, 17 bp, Arabidopsis thaliana
tgacatttaagtacttt

SEQ ID NO: 147082 - DNA, 17 bp, Arabidopsis thaliana
tgacatttagccaaaac

SEQ ID NO: 147083 - DNA, 17 bp, Arabidopsis thaliana
tgacatttcttcagatg

SEQ ID NO: 147084 - DNA, 17 bp, Arabidopsis thaliana
tgacatttgggcgtttg

SEQ ID NO: 147085 - DNA, 17 bp, Arabidopsis thaliana
tgacatttgtcccacat

SEQ ID NO: 147086 - DNA, 17 bp, Arabidopsis thaliana
tgacattttcagttccg

SEQ ID NO: 147087 - DNA, 17 bp, Arabidopsis thaliana
tgacattttcgtgattg

SEQ ID NO: 147088 - DNA, 17 bp, Arabidopsis thaliana
tgacattttcgtgattt

SEQ ID NO: 147089 - DNA, 17 bp, Arabidopsis thaliana
tgacattttctcaaggg

SEQ ID NO: 147090 - DNA, 17 bp, Arabidopsis thaliana
tgacattttctttgaaa

SEQ ID NO: 147091 - DNA, 17 bp, Arabidopsis thaliana
tgacattttctttgaca

SEQ ID NO: 147092 - DNA, 17 bp, Arabidopsis thaliana
tgacattttgtcctcga

SEQ ID NO: 147093 - DNA, 17 bp, Arabidopsis thaliana
tgaccaaaatggcctag

SEQ ID NO: 147094 - DNA, 17 bp, Arabidopsis thaliana
tgaccaaaccacctctg

SEQ ID NO: 147095 - DNA, 17 bp, Arabidopsis thaliana
tgaccaaacggagttac

SEQ ID NO: 147096 - DNA, 17 bp, Arabidopsis thaliana
tgaccaaacttctacga

SEQ ID NO: 147097 - DNA, 17 bp, Arabidopsis thaliana
tgaccaaaggttcatta

SEQ ID NO: 147098 - DNA, 17 bp, Arabidopsis thaliana
tgaccaaatagtacttg

SEQ ID NO: 147099 - DNA, 17 bp, Arabidopsis thaliana
tgaccaaatcagccgat

SEQ ID NO: 147100 - DNA, 17 bp, Arabidopsis thaliana
tgaccaaatcgttggct

SEQ ID NO: 147101 - DNA, 17 bp, Arabidopsis thaliana
tgaccaaattacccatc

SEQ ID NO: 147102 - DNA, 17 bp, Arabidopsis thaliana
tgaccaacacagctctt

SEQ ID NO: 147103 - DNA, 17 bp, Arabidopsis thaliana
tgaccaacagtctcatt

SEQ ID NO: 147104 - DNA, 17 bp, Arabidopsis thaliana
tgaccaaccattctccg

SEQ ID NO: 147105 - DNA, 17 bp, Arabidopsis thaliana
tgaccaaccgtatgctg

SEQ ID NO: 147106 - DNA, 17 bp, Arabidopsis thaliana
tgaccaaccgtatgtcg

SEQ ID NO: 147107 - DNA, 17 bp, Arabidopsis thaliana
tgaccaaccgtatgttc

SEQ ID NO: 147108 - DNA, 17 bp, Arabidopsis thaliana
tgaccaaccgtatgttg

SEQ ID NO: 147109 - DNA, 17 bp, Arabidopsis thaliana
tgaccaaccgtgtgctg

SEQ ID NO: 147110 - DNA, 17 bp, Arabidopsis thaliana
tgaccaacgtcaagaag

SEQ ID NO: 147111 - DNA, 17 bp, Arabidopsis thaliana
tgaccaactctctccat

SEQ ID NO: 147112 - DNA, 17 bp, Arabidopsis thaliana
tgaccaactctctccct

SEQ ID NO: 147113 - DNA, 17 bp, Arabidopsis thaliana
tgaccaactctctccgt

SEQ ID NO: 147114 - DNA, 17 bp, Arabidopsis thaliana
tgaccaactctcttcaa

SEQ ID NO: 147115 - DNA, 17 bp, Arabidopsis thaliana
tgaccaacttgtgatcc

SEQ ID NO: 147116 - DNA, 17 bp, Arabidopsis thaliana
tgaccaacttgtgattc

SEQ ID NO: 147117 - DNA, 17 bp, Arabidopsis thaliana
tgaccaacttgtgattt

SEQ ID NO: 147118 - DNA, 17 bp, Arabidopsis thaliana
tgaccaactttcgttga

SEQ ID NO: 147119 - DNA, 17 bp, Arabidopsis thaliana
tgaccaactttctccat

SEQ ID NO: 147120 - DNA, 17 bp, Arabidopsis thaliana
tgaccaactttctccct

SEQ ID NO: 147121 - DNA, 17 bp, Arabidopsis thaliana
tgaccaagccgttttga

SEQ ID NO: 147122 - DNA, 17 bp, Arabidopsis thaliana
tgaccaaggatgacgtg

SEQ ID NO: 147123 - DNA, 17 bp, Arabidopsis thaliana
tgaccaaggatgactgc

SEQ ID NO: 147124 - DNA, 17 bp, Arabidopsis thaliana
tgaccaaggatgacttg

SEQ ID NO: 147125 - DNA, 17 bp, Arabidopsis thaliana
tgaccaagggtgacttg

SEQ ID NO: 147126 - DNA, 17 bp, Arabidopsis thaliana
tgaccaagggttcatta

SEQ ID NO: 147127 - DNA, 17 bp, Arabidopsis thaliana
tgaccaaggttaaatgg

SEQ ID NO: 147128 - DNA, 17 bp, Arabidopsis thaliana
tgaccaagtaattttgg

SEQ ID NO: 147129 - DNA, 17 bp, Arabidopsis thaliana
tgaccaagttccagagt

SEQ ID NO: 147130 - DNA, 17 bp, Arabidopsis thaliana
tgaccaatagatccctg

SEQ ID NO: 147131 - DNA, 17 bp, Arabidopsis thaliana
tgaccaatcaattgtct

SEQ ID NO: 147132 - DNA, 17 bp, Arabidopsis thaliana
tgaccaatcgaccacgc

SEQ ID NO: 147133 - DNA, 17 bp, Arabidopsis thaliana
tgaccaatcgtgtgctg

SEQ ID NO: 147134 - DNA, 17 bp, Arabidopsis thaliana
tgaccaatggctctcgt

SEQ ID NO: 147135 - DNA, 17 bp, Arabidopsis thaliana
tgaccaattctacggat

SEQ ID NO: 147136 - DNA, 17 bp, Arabidopsis thaliana
tgaccaattttgtctgc

SEQ ID NO: 147137 - DNA, 17 bp, Arabidopsis thaliana
tgaccacaaccggcaca

SEQ ID NO: 147138 - DNA, 17 bp, Arabidopsis thaliana
tgaccacaaggtagcgg

SEQ ID NO: 147139 - DNA, 17 bp, Arabidopsis thaliana
tgaccacaagttagcgt

SEQ ID NO: 147140 - DNA, 17 bp, Arabidopsis thaliana
tgaccacacctactgca

SEQ ID NO: 147141 - DNA, 17 bp, Arabidopsis thaliana
tgaccacagaactgtag

SEQ ID NO: 147142 - DNA, 17 bp, Arabidopsis thaliana
tgaccacaggttcataa

SEQ ID NO: 147143 - DNA, 17 bp, Arabidopsis thaliana
tgaccacaggttcatta

SEQ ID NO: 147144 - DNA, 17 bp, Arabidopsis thaliana
tgaccaccaaaaccgaa

SEQ ID NO: 147145 - DNA, 17 bp, Arabidopsis thaliana
tgaccaccatatgcaga

SEQ ID NO: 147146 - DNA, 17 bp, Arabidopsis thaliana
tgaccaccgtaccggtt

SEQ ID NO: 147147 - DNA, 17 bp, Arabidopsis thaliana
tgaccaccgtacgggtt

SEQ ID NO: 147148 - DNA, 17 bp, Arabidopsis thaliana
tgaccacgggttgccca

SEQ ID NO: 147149 - DNA, 17 bp, Arabidopsis thaliana
tgaccacggttaaatgg

SEQ ID NO: 147150 - DNA, 17 bp, Arabidopsis thaliana
tgaccacggttgcggtt

SEQ ID NO: 147151 - DNA, 17 bp, Arabidopsis thaliana
tgaccacgttcacatat

SEQ ID NO: 147152 - DNA, 17 bp, Arabidopsis thaliana
tgaccactctgtccgcc

SEQ ID NO: 147153 - DNA, 17 bp, Arabidopsis thaliana
tgaccactctgtccgct

SEQ ID NO: 147154 - DNA, 17 bp, Arabidopsis thaliana
tgaccactggagcacaa

SEQ ID NO: 147155 - DNA, 17 bp, Arabidopsis thaliana
tgaccacttgccatttg

SEQ ID NO: 147156 - DNA, 17 bp, Arabidopsis thaliana
tgaccagaatatggtgt

SEQ ID NO: 147157 - DNA, 17 bp, Arabidopsis thaliana
tgaccagaatcgttgcc

SEQ ID NO: 147158 - DNA, 17 bp, Arabidopsis thaliana
tgaccagatacgacgtc

SEQ ID NO: 147159 - DNA, 17 bp, Arabidopsis thaliana
tgaccagatccatcatt

SEQ ID NO: 147160 - DNA, 17 bp, Arabidopsis thaliana
tgaccagattttgttca

SEQ ID NO: 147161 - DNA, 17 bp, Arabidopsis thaliana
tgaccagattttgttcc

SEQ ID NO: 147162 - DNA, 17 bp, Arabidopsis thaliana
tgaccagcaattgtgaa

SEQ ID NO: 147163 - DNA, 17 bp, Arabidopsis thaliana
tgaccagcctgtcgact

SEQ ID NO: 147164 - DNA, 17 bp, Arabidopsis thaliana
tgaccagctttcgttga

SEQ ID NO: 147165 - DNA, 17 bp, Arabidopsis thaliana
tgaccagctttttcagc

SEQ ID NO: 147166 - DNA, 17 bp, Arabidopsis thaliana
tgaccaggatgaagctt

SEQ ID NO: 147167 - DNA, 17 bp, Arabidopsis thaliana
tgaccaggatgacccac

SEQ ID NO: 147168 - DNA, 17 bp, Arabidopsis thaliana
tgaccaggccaaaattc

SEQ ID NO: 147169 - DNA, 17 bp, Arabidopsis thaliana
tgaccaggcccgggcga

SEQ ID NO: 147170 - DNA, 17 bp, Arabidopsis thaliana
tgaccaggccggattga

SEQ ID NO: 147171 - DNA, 17 bp, Arabidopsis thaliana
tgaccaggggattccct

SEQ ID NO: 147172 - DNA, 17 bp, Arabidopsis thaliana
tgaccagtcagggttta

SEQ ID NO: 147173 - DNA, 17 bp, Arabidopsis thaliana
tgaccagtccgccagcc

SEQ ID NO: 147174 - DNA, 17 bp, Arabidopsis thaliana
tgaccagtcgtggacca

SEQ ID NO: 147175 - DNA, 17 bp, Arabidopsis thaliana
tgaccagtctcttttgc

SEQ ID NO: 147176 - DNA, 17 bp, Arabidopsis thaliana
tgaccagtgttgatcga

SEQ ID NO: 147177 - DNA, 17 bp, Arabidopsis thaliana
tgaccagttttgtccgc

SEQ ID NO: 147178 - DNA, 17 bp, Arabidopsis thaliana
tgaccatagatcgcatc

SEQ ID NO: 147179 - DNA, 17 bp, Arabidopsis thaliana
tgaccatagatcgcatg

SEQ ID NO: 147180 - DNA, 17 bp, Arabidopsis thaliana
tgaccataggtgcgatg

SEQ ID NO: 147181 - DNA, 17 bp, Arabidopsis thaliana
tgaccatatcgacaatg

SEQ ID NO: 147182 - DNA, 17 bp, Arabidopsis thaliana
tgaccatatggacaacg

SEQ ID NO: 147183 - DNA, 17 bp, Arabidopsis thaliana
tgaccatatggacaagg

SEQ ID NO: 147184 - DNA, 17 bp, Arabidopsis thaliana
tgaccatatggacaatg

SEQ ID NO: 147185 - DNA, 17 bp, Arabidopsis thaliana
tgaccatcggagcgtgc

SEQ ID NO: 147186 - DNA, 17 bp, Arabidopsis thaliana
tgaccatctaaatcaaa

SEQ ID NO: 147187 - DNA, 17 bp, Arabidopsis thaliana
tgaccatcttgatttga

SEQ ID NO: 147188 - DNA, 17 bp, Arabidopsis thaliana
tgaccatgactcatcgg

SEQ ID NO: 147189 - DNA, 17 bp, Arabidopsis thaliana
tgaccatgcattctcgt

SEQ ID NO: 147190 - DNA, 17 bp, Arabidopsis thaliana
tgaccatgggatgtcca

SEQ ID NO: 147191 - DNA, 17 bp, Arabidopsis thaliana
tgaccatggtctagttt

SEQ ID NO: 147192 - DNA, 17 bp, Arabidopsis thaliana
tgaccatgttgcagata

SEQ ID NO: 147193 - DNA, 17 bp, Arabidopsis thaliana
tgaccatgttttgtaac

SEQ ID NO: 147194 - DNA, 17 bp, Arabidopsis thaliana
tgaccattccatccatt

SEQ ID NO: 147195 - DNA, 17 bp, Arabidopsis thaliana
tgaccattctctacaca

SEQ ID NO: 147196 - DNA, 17 bp, Arabidopsis thaliana
tgaccattgctgtggac

SEQ ID NO: 147197 - DNA, 17 bp, Arabidopsis thaliana
tgaccattggagcagcc

SEQ ID NO: 147198 - DNA, 17 bp, Arabidopsis thaliana
tgaccattggagcatcg

SEQ ID NO: 147199 - DNA, 17 bp, Arabidopsis thaliana
tgaccatttaccgttat

SEQ ID NO: 147200 - DNA, 17 bp, Arabidopsis thaliana
tgaccatttgcggttgc

SEQ ID NO: 147201 - DNA, 17 bp, Arabidopsis thaliana
tgaccatttggccgatc

SEQ ID NO: 147202 - DNA, 17 bp, Arabidopsis thaliana
tgaccatttggttcaac

SEQ ID NO: 147203 - DNA, 17 bp, Arabidopsis thaliana
tgaccatttgttttttg

SEQ ID NO: 147204 - DNA, 17 bp, Arabidopsis thaliana
tgaccattttacccttg

SEQ ID NO: 147205 - DNA, 17 bp, Arabidopsis thaliana
tgaccattttgaacata

SEQ ID NO: 147206 - DNA, 17 bp, Arabidopsis thaliana
tgaccattttgacaccc

SEQ ID NO: 147207 - DNA, 17 bp, Arabidopsis thaliana
tgaccattttgcccttg

SEQ ID NO: 147208 - DNA, 17 bp, Arabidopsis thaliana
tgaccattttgggcacg

SEQ ID NO: 147209 - DNA, 17 bp, Arabidopsis thaliana
tgaccattttttccttg

SEQ ID NO: 147210 - DNA, 17 bp, Arabidopsis thaliana
tgacccaaacccaactg

SEQ ID NO: 147211 - DNA, 17 bp, Arabidopsis thaliana
tgacccaacacggggaa

SEQ ID NO: 147212 - DNA, 17 bp, Arabidopsis thaliana
tgacccaactcattgtt

SEQ ID NO: 147213 - DNA, 17 bp, Arabidopsis thaliana
tgacccaataagccgct

SEQ ID NO: 147214 - DNA, 17 bp, Arabidopsis thaliana
tgacccaatctctatcg

SEQ ID NO: 147215 - DNA, 17 bp, Arabidopsis thaliana
tgacccaatgtccgcac

SEQ ID NO: 147216 - DNA, 17 bp, Arabidopsis thaliana
tgacccaattggtctac

SEQ ID NO: 147217 - DNA, 17 bp, Arabidopsis thaliana
tgacccacccacccacc

SEQ ID NO: 147218 - DNA, 17 bp, Arabidopsis thaliana
tgacccacctgacccac

SEQ ID NO: 147219 - DNA, 17 bp, Arabidopsis thaliana
tgacccacctgtcgctt

SEQ ID NO: 147220 - DNA, 17 bp, Arabidopsis thaliana
tgacccagaagcttatc

SEQ ID NO: 147221 - DNA, 17 bp, Arabidopsis thaliana
tgacccagaatctctgg

SEQ ID NO: 147222 - DNA, 17 bp, Arabidopsis thaliana
tgacccagactcgccgg

SEQ ID NO: 147223 - DNA, 17 bp, Arabidopsis thaliana
tgacccaggatgacttg

SEQ ID NO: 147224 - DNA, 17 bp, Arabidopsis thaliana
tgacccagtatgttagc

SEQ ID NO: 147225 - DNA, 17 bp, Arabidopsis thaliana
tgacccagtgactcaga

SEQ ID NO: 147226 - DNA, 17 bp, Arabidopsis thaliana
tgacccatagctcagtg

SEQ ID NO: 147227 - DNA, 17 bp, Arabidopsis thaliana
tgacccatcatcgagat

SEQ ID NO: 147228 - DNA, 17 bp, Arabidopsis thaliana
tgacccatgaatcttaa

SEQ ID NO: 147229 - DNA, 17 bp, Arabidopsis thaliana
tgacccatgaatttaca

SEQ ID NO: 147230 - DNA, 17 bp, Arabidopsis thaliana
tgacccatgaattttga

SEQ ID NO: 147231 - DNA, 17 bp, Arabidopsis thaliana
tgacccattcacccacc

SEQ ID NO: 147232 - DNA, 17 bp, Arabidopsis thaliana
tgacccattgtccagcg

SEQ ID NO: 147233 - DNA, 17 bp, Arabidopsis thaliana
tgacccattttgacacc

SEQ ID NO: 147234 - DNA, 17 bp, Arabidopsis thaliana
tgacccattttgacact

SEQ ID NO: 147235 - DNA, 17 bp, Arabidopsis thaliana
tgaccccaggtcaggcg

SEQ ID NO: 147236 - DNA, 17 bp, Arabidopsis thaliana
tgaccccatgacctggt

SEQ ID NO: 147237 - DNA, 17 bp, Arabidopsis thaliana
tgaccccgaggccgagt

SEQ ID NO: 147238 - DNA, 17 bp, Arabidopsis thaliana
tgaccccgatcgttcca

SEQ ID NO: 147239 - DNA, 17 bp, Arabidopsis thaliana
tgaccccggatgtagtg

SEQ ID NO: 147240 - DNA, 17 bp, Arabidopsis thaliana
tgaccccttttggttga

SEQ ID NO: 147241 - DNA, 17 bp, Arabidopsis thaliana
tgacccgataacccagt

SEQ ID NO: 147242 - DNA, 17 bp, Arabidopsis thaliana
tgacccgatgacccagt

SEQ ID NO: 147243 - DNA, 17 bp, Arabidopsis thaliana
tgacccgatgacccggt

SEQ ID NO: 147244 - DNA, 17 bp, Arabidopsis thaliana
tgacccgatgacctagt

SEQ ID NO: 147245 - DNA, 17 bp, Arabidopsis thaliana
tgacccgatgacctgat

SEQ ID NO: 147246 - DNA, 17 bp, Arabidopsis thaliana
tgacccgcctattatga

SEQ ID NO: 147247 - DNA, 17 bp, Arabidopsis thaliana
tgacccgcctcacatgt

SEQ ID NO: 147248 - DNA, 17 bp, Arabidopsis thaliana
tgacccgcgggacacct

SEQ ID NO: 147249 - DNA, 17 bp, Arabidopsis thaliana
tgacccgcgttgttgct

SEQ ID NO: 147250 - DNA, 17 bp, Arabidopsis thaliana
tgacccgcttgatctgc

SEQ ID NO: 147251 - DNA, 17 bp, Arabidopsis thaliana
tgacccggaccctgtcg

SEQ ID NO: 147252 - DNA, 17 bp, Arabidopsis thaliana
tgacccggccaaatcga

SEQ ID NO: 147253 - DNA, 17 bp, Arabidopsis thaliana
tgacccggtgaaccggt

SEQ ID NO: 147254 - DNA, 17 bp, Arabidopsis thaliana
tgacccggtgacccaga

SEQ ID NO: 147255 - DNA, 17 bp, Arabidopsis thaliana
tgacccgtccgttggcg

SEQ ID NO: 147256 - DNA, 17 bp, Arabidopsis thaliana
tgacccgtcgagcatgt

SEQ ID NO: 147257 - DNA, 17 bp, Arabidopsis thaliana
tgacccgttactcagta

SEQ ID NO: 147258 - DNA, 17 bp, Arabidopsis thaliana
tgacccgttagattcgt

SEQ ID NO: 147259 - DNA, 17 bp, Arabidopsis thaliana
tgacccgtttgctgttc

SEQ ID NO: 147260 - DNA, 17 bp, Arabidopsis thaliana
tgaccctaattcggtga

SEQ ID NO: 147261 - DNA, 17 bp, Arabidopsis thaliana
tgaccctacatggcggg

SEQ ID NO: 147262 - DNA, 17 bp, Arabidopsis thaliana
tgaccctactggttatg

SEQ ID NO: 147263 - DNA, 17 bp, Arabidopsis thaliana
tgaccctatcggctaat

SEQ ID NO: 147264 - DNA, 17 bp, Arabidopsis thaliana
tgaccctcggtactccg

SEQ ID NO: 147265 - DNA, 17 bp, Arabidopsis thaliana
tgaccctcttagaacct

SEQ ID NO: 147266 - DNA, 17 bp, Arabidopsis thaliana
tgacccttattagatcc

SEQ ID NO: 147267 - DNA, 17 bp, Arabidopsis thaliana
tgaccctttctctctct

SEQ ID NO: 147268 - DNA, 17 bp, Arabidopsis thaliana
tgaccctttgtcgctaa

SEQ ID NO: 147269 - DNA, 17 bp, Arabidopsis thaliana
tgacccttttggattgg

SEQ ID NO: 147270 - DNA, 17 bp, Arabidopsis thaliana
tgaccgaaccgcagtgc

SEQ ID NO: 147271 - DNA, 17 bp, Arabidopsis thaliana
tgaccgaacggtacaat

SEQ ID NO: 147272 - DNA, 17 bp, Arabidopsis thaliana
tgaccgaactgtacaat

SEQ ID NO: 147273 - DNA, 17 bp, Arabidopsis thaliana
tgaccgaactgtataat

SEQ ID NO: 147274 - DNA, 17 bp, Arabidopsis thaliana
tgaccgaagtcagttat

SEQ ID NO: 147275 - DNA, 17 bp, Arabidopsis thaliana
tgaccgaatcacacagt

SEQ ID NO: 147276 - DNA, 17 bp, Arabidopsis thaliana
tgaccgaatcgcacagt

SEQ ID NO: 147277 - DNA, 17 bp, Arabidopsis thaliana
tgaccgaattacagtcg

SEQ ID NO: 147278 - DNA, 17 bp, Arabidopsis thaliana
tgaccgaattttggtga

SEQ ID NO: 147279 - DNA, 17 bp, Arabidopsis thaliana
tgaccgacagtgtgctg

SEQ ID NO: 147280 - DNA, 17 bp, Arabidopsis thaliana
tgaccgaccattaattc

SEQ ID NO: 147281 - DNA, 17 bp, Arabidopsis thaliana
tgaccgaccgtccggcc

SEQ ID NO: 147282 - DNA, 17 bp, Arabidopsis thaliana
tgaccgacgccggcgct

SEQ ID NO: 147283 - DNA, 17 bp, Arabidopsis thaliana
tgaccgacgcggattac

SEQ ID NO: 147284 - DNA, 17 bp, Arabidopsis thaliana
tgaccgacgcgtattac

SEQ ID NO: 147285 - DNA, 17 bp, Arabidopsis thaliana
tgaccgactaatggcag

SEQ ID NO: 147286 - DNA, 17 bp, Arabidopsis thaliana
tgaccgactgggaacgg

SEQ ID NO: 147287 - DNA, 17 bp, Arabidopsis thaliana
tgaccgacttatccgga

SEQ ID NO: 147288 - DNA, 17 bp, Arabidopsis thaliana
tgaccgacttgagcatt

SEQ ID NO: 147289 - DNA, 17 bp, Arabidopsis thaliana
tgaccgagaacttccat

SEQ ID NO: 147290 - DNA, 17 bp, Arabidopsis thaliana
tgaccgagatctttgga

SEQ ID NO: 147291 - DNA, 17 bp, Arabidopsis thaliana
tgaccgagccgcttttt

SEQ ID NO: 147292 - DNA, 17 bp, Arabidopsis thaliana
tgaccgagccgttaaag

SEQ ID NO: 147293 - DNA, 17 bp, Arabidopsis thaliana
tgaccgaggaaggcatt

SEQ ID NO: 147294 - DNA, 17 bp, Arabidopsis thaliana
tgaccgaggcgaggggg

SEQ ID NO: 147295 - DNA, 17 bp, Arabidopsis thaliana
tgaccgagtctttatta

SEQ ID NO: 147296 - DNA, 17 bp, Arabidopsis thaliana
tgaccgagtgccgctca

SEQ ID NO: 147297 - DNA, 17 bp, Arabidopsis thaliana
tgaccgatagcgaagta

SEQ ID NO: 147298 - DNA, 17 bp, Arabidopsis thaliana
tgaccgatcaattttaa

SEQ ID NO: 147299 - DNA, 17 bp, Arabidopsis thaliana
tgaccgatccgaggtgg

SEQ ID NO: 147300 - DNA, 17 bp, Arabidopsis thaliana
tgaccgatgttgaccgg

SEQ ID NO: 147301 - DNA, 17 bp, Arabidopsis thaliana
tgaccgattctaaagct

SEQ ID NO: 147302 - DNA, 17 bp, Arabidopsis thaliana
tgaccgattgccgaccc

SEQ ID NO: 147303 - DNA, 17 bp, Arabidopsis thaliana
tgaccgcaacgagcgca

SEQ ID NO: 147304 - DNA, 17 bp, Arabidopsis thaliana
tgaccgcaacttctgtt

SEQ ID NO: 147305 - DNA, 17 bp, Arabidopsis thaliana
tgaccgcaatttgattt

SEQ ID NO: 147306 - DNA, 17 bp, Arabidopsis thaliana
tgaccgcactagtggat

SEQ ID NO: 147307 - DNA, 17 bp, Arabidopsis thaliana
tgaccgcactcaaaact

SEQ ID NO: 147308 - DNA, 17 bp, Arabidopsis thaliana
tgaccgcactggtattt

SEQ ID NO: 147309 - DNA, 17 bp, Arabidopsis thaliana
tgaccgcagttaagcgt

SEQ ID NO: 147310 - DNA, 17 bp, Arabidopsis thaliana
tgaccgccatcatcttc

SEQ ID NO: 147311 - DNA, 17 bp, Arabidopsis thaliana
tgaccgccgactgtcaa

SEQ ID NO: 147312 - DNA, 17 bp, Arabidopsis thaliana
tgaccgcctcgggacga

SEQ ID NO: 147313 - DNA, 17 bp, Arabidopsis thaliana
tgaccgcctgtcgaccg

SEQ ID NO: 147314 - DNA, 17 bp, Arabidopsis thaliana
tgaccgcgccattttag

SEQ ID NO: 147315 - DNA, 17 bp, Arabidopsis thaliana
tgaccgcgtgcctgttg

SEQ ID NO: 147316 - DNA, 17 bp, Arabidopsis thaliana
tgaccgcgtttatttca

SEQ ID NO: 147317 - DNA, 17 bp, Arabidopsis thaliana
tgaccgcgttttatttc

SEQ ID NO: 147318 - DNA, 17 bp, Arabidopsis thaliana
tgaccgctacactactt

SEQ ID NO: 147319 - DNA, 17 bp, Arabidopsis thaliana
tgaccgctacactgctt

SEQ ID NO: 147320 - DNA, 17 bp, Arabidopsis thaliana
tgaccgctcagtgataa

SEQ ID NO: 147321 - DNA, 17 bp, Arabidopsis thaliana
tgaccgctcgtttgtgg

SEQ ID NO: 147322 - DNA, 17 bp, Arabidopsis thaliana
tgaccgctgagatttcc

SEQ ID NO: 147323 - DNA, 17 bp, Arabidopsis thaliana
tgaccgcttacaagggc

SEQ ID NO: 147324 - DNA, 17 bp, Arabidopsis thaliana
tgaccgcttctaagcaa

SEQ ID NO: 147325 - DNA, 17 bp, Arabidopsis thaliana
tgaccgcttgatctgct

SEQ ID NO: 147326 - DNA, 17 bp, Arabidopsis thaliana
tgaccggatggttgtga

SEQ ID NO: 147327 - DNA, 17 bp, Arabidopsis thaliana
tgaccggatttagattt

SEQ ID NO: 147328 - DNA, 17 bp, Arabidopsis thaliana
tgaccggatttgagggt

SEQ ID NO: 147329 - DNA, 17 bp, Arabidopsis thaliana
tgaccggcgtcggagct

SEQ ID NO: 147330 - DNA, 17 bp, Arabidopsis thaliana
tgaccggcgttgatcga

SEQ ID NO: 147331 - DNA, 17 bp, Arabidopsis thaliana
tgaccggctaagtgttt

SEQ ID NO: 147332 - DNA, 17 bp, Arabidopsis thaliana
tgaccgggaggcttgtg

SEQ ID NO: 147333 - DNA, 17 bp, Arabidopsis thaliana
tgaccgggtttatttca

SEQ ID NO: 147334 - DNA, 17 bp, Arabidopsis thaliana
tgaccggtcccgagccc

SEQ ID NO: 147335 - DNA, 17 bp, Arabidopsis thaliana
tgaccggtcgagcatgt

SEQ ID NO: 147336 - DNA, 17 bp, Arabidopsis thaliana
tgaccgtatgcacaatg

SEQ ID NO: 147337 - DNA, 17 bp, Arabidopsis thaliana
tgaccgtatggacaatg

SEQ ID NO: 147338 - DNA, 17 bp, Arabidopsis thaliana
tgaccgtcagatagggg

SEQ ID NO: 147339 - DNA, 17 bp, Arabidopsis thaliana
tgaccgtcagcggttta

SEQ ID NO: 147340 - DNA, 17 bp, Arabidopsis thaliana
tgaccgtcagcgtgtaa

SEQ ID NO: 147341 - DNA, 17 bp, Arabidopsis thaliana
tgaccgtcggaaagatc

SEQ ID NO: 147342 - DNA, 17 bp, Arabidopsis thaliana
tgaccgtcgtcggttgt

SEQ ID NO: 147343 - DNA, 17 bp, Arabidopsis thaliana
tgaccgtctgctagcaa

SEQ ID NO: 147344 - DNA, 17 bp, Arabidopsis thaliana
tgaccgtgaggccaaac

SEQ ID NO: 147345 - DNA, 17 bp, Arabidopsis thaliana
tgaccgtgaggccaacc

SEQ ID NO: 147346 - DNA, 17 bp, Arabidopsis thaliana
tgaccgtgatgttgaga

SEQ ID NO: 147347 - DNA, 17 bp, Arabidopsis thaliana
tgaccgtgccatagacg

SEQ ID NO: 147348 - DNA, 17 bp, Arabidopsis thaliana
tgaccgtgtgtttgata

SEQ ID NO: 147349 - DNA, 17 bp, Arabidopsis thaliana
tgaccgtgttatctcaa

SEQ ID NO: 147350 - DNA, 17 bp, Arabidopsis thaliana
tgaccgtgttgactcgt

SEQ ID NO: 147351 - DNA, 17 bp, Arabidopsis thaliana
tgaccgtgtttatttca

SEQ ID NO: 147352 - DNA, 17 bp, Arabidopsis thaliana
tgaccgttctgccatta

SEQ ID NO: 147353 - DNA, 17 bp, Arabidopsis thaliana
tgaccgttgggtttcat

SEQ ID NO: 147354 - DNA, 17 bp, Arabidopsis thaliana
tgaccgtttgcggttta

SEQ ID NO: 147355 - DNA, 17 bp, Arabidopsis thaliana
tgaccgttttcccgcat

SEQ ID NO: 147356 - DNA, 17 bp, Arabidopsis thaliana
tgacctaacctgccaag

SEQ ID NO: 147357 - DNA, 17 bp, Arabidopsis thaliana
tgacctaccgggaagtc

SEQ ID NO: 147358 - DNA, 17 bp, Arabidopsis thaliana
tgacctacgatgacggg

SEQ ID NO: 147359 - DNA, 17 bp, Arabidopsis thaliana
tgacctagccgaatggg

SEQ ID NO: 147360 - DNA, 17 bp, Arabidopsis thaliana
tgacctagctagaggtg

SEQ ID NO: 147361 - DNA, 17 bp, Arabidopsis thaliana
tgacctagctgctgttg

SEQ ID NO: 147362 - DNA, 17 bp, Arabidopsis thaliana
tgacctagtcatttgat

SEQ ID NO: 147363 - DNA, 17 bp, Arabidopsis thaliana
tgacctatacaaagcca

SEQ ID NO: 147364 - DNA, 17 bp, Arabidopsis thaliana
tgacctattgtgttggc

SEQ ID NO: 147365 - DNA, 17 bp, Arabidopsis thaliana
tgacctcaaattgatct

SEQ ID NO: 147366 - DNA, 17 bp, Arabidopsis thaliana
tgacctcaacttgacag

SEQ ID NO: 147367 - DNA, 17 bp, Arabidopsis thaliana
tgacctcatttggtttc

SEQ ID NO: 147368 - DNA, 17 bp, Arabidopsis thaliana
tgacctcccatcgtttg

SEQ ID NO: 147369 - DNA, 17 bp, Arabidopsis thaliana
tgacctcccggaaagtc

SEQ ID NO: 147370 - DNA, 17 bp, Arabidopsis thaliana
tgacctcccggaagtcc

SEQ ID NO: 147371 - DNA, 17 bp, Arabidopsis thaliana
tgacctcccgggaagcc

SEQ ID NO: 147372 - DNA, 17 bp, Arabidopsis thaliana
tgacctcccgggaagta

SEQ ID NO: 147373 - DNA, 17 bp, Arabidopsis thaliana
tgacctcccgggaagtc

SEQ ID NO: 147374 - DNA, 17 bp, Arabidopsis thaliana
tgacctccgcagctagt

SEQ ID NO: 147375 - DNA, 17 bp, Arabidopsis thaliana
tgacctcctaaacaccc

SEQ ID NO: 147376 - DNA, 17 bp, Arabidopsis thaliana
tgacctcctgtcatgtg

SEQ ID NO: 147377 - DNA, 17 bp, Arabidopsis thaliana
tgacctccttaaccaaa

SEQ ID NO: 147378 - DNA, 17 bp, Arabidopsis thaliana
tgacctcgcacgtgtga

SEQ ID NO: 147379 - DNA, 17 bp, Arabidopsis thaliana
tgacctcgcagttcgac

SEQ ID NO: 147380 - DNA, 17 bp, Arabidopsis thaliana
tgacctctaaacaatta

SEQ ID NO: 147381 - DNA, 17 bp, Arabidopsis thaliana
tgacctctaaacacttc

SEQ ID NO: 147382 - DNA, 17 bp, Arabidopsis thaliana
tgacctctaagcttcaa

SEQ ID NO: 147383 - DNA, 17 bp, Arabidopsis thaliana
tgacctctaagcttcgc

SEQ ID NO: 147384 - DNA, 17 bp, Arabidopsis thaliana
tgacctctccttctgct

SEQ ID NO: 147385 - DNA, 17 bp, Arabidopsis thaliana
tgacctcttcgaaatgt

SEQ ID NO: 147386 - DNA, 17 bp, Arabidopsis thaliana
tgacctcttctaggtga

SEQ ID NO: 147387 - DNA, 17 bp, Arabidopsis thaliana
tgacctctttggttagt

SEQ ID NO: 147388 - DNA, 17 bp, Arabidopsis thaliana
tgacctgacatgtatgc

SEQ ID NO: 147389 - DNA, 17 bp, Arabidopsis thaliana
tgacctgacccacctga

SEQ ID NO: 147390 - DNA, 17 bp, Arabidopsis thaliana
tgacctgactttgatcc

SEQ ID NO: 147391 - DNA, 17 bp, Arabidopsis thaliana
tgacctgagtttgtgaa

SEQ ID NO: 147392 - DNA, 17 bp, Arabidopsis thaliana
tgacctgatctcggaat

SEQ ID NO: 147393 - DNA, 17 bp, Arabidopsis thaliana
tgacctgatgacccggt

SEQ ID NO: 147394 - DNA, 17 bp, Arabidopsis thaliana
tgacctgccgagaatcg

SEQ ID NO: 147395 - DNA, 17 bp, Arabidopsis thaliana
tgacctgcggaaggatc

SEQ ID NO: 147396 - DNA, 17 bp, Arabidopsis thaliana
tgacctgcggtacaccg

SEQ ID NO: 147397 - DNA, 17 bp, Arabidopsis thaliana
tgacctgctcctttcct

SEQ ID NO: 147398 - DNA, 17 bp, Arabidopsis thaliana
tgacctggaagcattca

SEQ ID NO: 147399 - DNA, 17 bp, Arabidopsis thaliana
tgacctggaccgaattc

SEQ ID NO: 147400 - DNA, 17 bp, Arabidopsis thaliana
tgacctggcacctacta

SEQ ID NO: 147401 - DNA, 17 bp, Arabidopsis thaliana
tgacctggccaattagg

SEQ ID NO: 147402 - DNA, 17 bp, Arabidopsis thaliana
tgacctgggctctgacc

SEQ ID NO: 147403 - DNA, 17 bp, Arabidopsis thaliana
tgacctggtagccattc

SEQ ID NO: 147404 - DNA, 17 bp, Arabidopsis thaliana
tgacctggtctacggca

SEQ ID NO: 147405 - DNA, 17 bp, Arabidopsis thaliana
tgacctgtactttcggt

SEQ ID NO: 147406 - DNA, 17 bp, Arabidopsis thaliana
tgacctgtcatctcggt

SEQ ID NO: 147407 - DNA, 17 bp, Arabidopsis thaliana
tgacctgtgctagatct

SEQ ID NO: 147408 - DNA, 17 bp, Arabidopsis thaliana
tgacctgtgggctgttg

SEQ ID NO: 147409 - DNA, 17 bp, Arabidopsis thaliana
tgacctgttcgtttctt

SEQ ID NO: 147410 - DNA, 17 bp, Arabidopsis thaliana
tgacctgttctcgcttt

SEQ ID NO: 147411 - DNA, 17 bp, Arabidopsis thaliana
tgacctgtttttggtcc

SEQ ID NO: 147412 - DNA, 17 bp, Arabidopsis thaliana
tgaccttacctcagcta

SEQ ID NO: 147413 - DNA, 17 bp, Arabidopsis thaliana
tgaccttcatagtgaac

SEQ ID NO: 147414 - DNA, 17 bp, Arabidopsis thaliana
tgaccttccaaactcgt

SEQ ID NO: 147415 - DNA, 17 bp, Arabidopsis thaliana
tgaccttcccagttaca

SEQ ID NO: 147416 - DNA, 17 bp, Arabidopsis thaliana
tgaccttccgataaatg

SEQ ID NO: 147417 - DNA, 17 bp, Arabidopsis thaliana
tgaccttccgggaacta

SEQ ID NO: 147418 - DNA, 17 bp, Arabidopsis thaliana
tgaccttccgggaagtc

SEQ ID NO: 147419 - DNA, 17 bp, Arabidopsis thaliana
tgaccttgagctgctgc

SEQ ID NO: 147420 - DNA, 17 bp, Arabidopsis thaliana
tgaccttgagttggatc

SEQ ID NO: 147421 - DNA, 17 bp, Arabidopsis thaliana
tgaccttgatccttgct

SEQ ID NO: 147422 - DNA, 17 bp, Arabidopsis thaliana
tgaccttgccgtatctt

SEQ ID NO: 147423 - DNA, 17 bp, Arabidopsis thaliana
tgaccttggctctgcat

SEQ ID NO: 147424 - DNA, 17 bp, Arabidopsis thaliana
tgaccttggctctgtat

SEQ ID NO: 147425 - DNA, 17 bp, Arabidopsis thaliana
tgaccttgggatgggtc

SEQ ID NO: 147426 - DNA, 17 bp, Arabidopsis thaliana
tgaccttgtcatctcaa

SEQ ID NO: 147427 - DNA, 17 bp, Arabidopsis thaliana
tgaccttgtcctgccac

SEQ ID NO: 147428 - DNA, 17 bp, Arabidopsis thaliana
tgaccttgtcgctctgt

SEQ ID NO: 147429 - DNA, 17 bp, Arabidopsis thaliana
tgaccttgtggcacatt

SEQ ID NO: 147430 - DNA, 17 bp, Arabidopsis thaliana
tgacctttaagactttt

SEQ ID NO: 147431 - DNA, 17 bp, Arabidopsis thaliana
tgacctttaagattcgt

SEQ ID NO: 147432 - DNA, 17 bp, Arabidopsis thaliana
tgacctttaagtacttt

SEQ ID NO: 147433 - DNA, 17 bp, Arabidopsis thaliana
tgacctttaagtttttt

SEQ ID NO: 147434 - DNA, 17 bp, Arabidopsis thaliana
tgacctttaatatccgg

SEQ ID NO: 147435 - DNA, 17 bp, Arabidopsis thaliana
tgacctttagggtgaag

SEQ ID NO: 147436 - DNA, 17 bp, Arabidopsis thaliana
tgacctttaggtacttt

SEQ ID NO: 147437 - DNA, 17 bp, Arabidopsis thaliana
tgacctttcagatccgg

SEQ ID NO: 147438 - DNA, 17 bp, Arabidopsis thaliana
tgacctttccggaagtg

SEQ ID NO: 147439 - DNA, 17 bp, Arabidopsis thaliana
tgacctttggtaacaga

SEQ ID NO: 147440 - DNA, 17 bp, Arabidopsis thaliana
tgacctttgtcgctaag

SEQ ID NO: 147441 - DNA, 17 bp, Arabidopsis thaliana
tgaccttttgacttgac

SEQ ID NO: 147442 - DNA, 17 bp, Arabidopsis thaliana
tgaccttttggcccatg

SEQ ID NO: 147443 - DNA, 17 bp, Arabidopsis thaliana
tgacctttttttttttg

SEQ ID NO: 147444 - DNA, 17 bp, Arabidopsis thaliana
tgacgaacccgggcgaa

SEQ ID NO: 147445 - DNA, 17 bp, Arabidopsis thaliana
tgacgaacccgggctca

SEQ ID NO: 147446 - DNA, 17 bp, Arabidopsis thaliana
tgacgaacggctcccgg

SEQ ID NO: 147447 - DNA, 17 bp, Arabidopsis thaliana
tgacgaagacgatcaga

SEQ ID NO: 147448 - DNA, 17 bp, Arabidopsis thaliana
tgacgaagaggtggtgg

SEQ ID NO: 147449 - DNA, 17 bp, Arabidopsis thaliana
tgacgaagatattacgc

SEQ ID NO: 147450 - DNA, 17 bp, Arabidopsis thaliana
tgacgaagatggcgaca

SEQ ID NO: 147451 - DNA, 17 bp, Arabidopsis thaliana
tgacgaagatgtgcgtt

SEQ ID NO: 147452 - DNA, 17 bp, Arabidopsis thaliana
tgacgaagattacccat

SEQ ID NO: 147453 - DNA, 17 bp, Arabidopsis thaliana
tgacgaagccaagcagt

SEQ ID NO: 147454 - DNA, 17 bp, Arabidopsis thaliana
tgacgaagcgtaacacc

SEQ ID NO: 147455 - DNA, 17 bp, Arabidopsis thaliana
tgacgaagttgctttga

SEQ ID NO: 147456 - DNA, 17 bp, Arabidopsis thaliana
tgacgaattacagtcgc

SEQ ID NO: 147457 - DNA, 17 bp, Arabidopsis thaliana
tgacgaattatcgacca

SEQ ID NO: 147458 - DNA, 17 bp, Arabidopsis thaliana
tgacgaattccaaaggg

SEQ ID NO: 147459 - DNA, 17 bp, Arabidopsis thaliana
tgacgaattgaccaggt

SEQ ID NO: 147460 - DNA, 17 bp, Arabidopsis thaliana
tgacgacatagatccgg

SEQ ID NO: 147461 - DNA, 17 bp, Arabidopsis thaliana
tgacgaccgtgtgattc

SEQ ID NO: 147462 - DNA, 17 bp, Arabidopsis thaliana
tgacgacgcggattacg

SEQ ID NO: 147463 - DNA, 17 bp, Arabidopsis thaliana
tgacgacggatcgcatg

SEQ ID NO: 147464 - DNA, 17 bp, Arabidopsis thaliana
tgacgactcccgaggcg

SEQ ID NO: 147465 - DNA, 17 bp, Arabidopsis thaliana
tgacgactcccggtagg

SEQ ID NO: 147466 - DNA, 17 bp, Arabidopsis thaliana
tgacgactccggctggc

SEQ ID NO: 147467 - DNA, 17 bp, Arabidopsis thaliana
tgacgactccggctggt

SEQ ID NO: 147468 - DNA, 17 bp, Arabidopsis thaliana
tgacgactctgttttgc

SEQ ID NO: 147469 - DNA, 17 bp, Arabidopsis thaliana
tgacgagatccattgct

SEQ ID NO: 147470 - DNA, 17 bp, Arabidopsis thaliana
tgacgagatcgttgcaa

SEQ ID NO: 147471 - DNA, 17 bp, Arabidopsis thaliana
tgacgagattgcattgt

SEQ ID NO: 147472 - DNA, 17 bp, Arabidopsis thaliana
tgacgagccaccatcac

SEQ ID NO: 147473 - DNA, 17 bp, Arabidopsis thaliana
tgacgagcccgggatgg

SEQ ID NO: 147474 - DNA, 17 bp, Arabidopsis thaliana
tgacgagccggcaaatg

SEQ ID NO: 147475 - DNA, 17 bp, Arabidopsis thaliana
tgacgagctccggtctc

SEQ ID NO: 147476 - DNA, 17 bp, Arabidopsis thaliana
tgacgagctgcttgaga

SEQ ID NO: 147477 - DNA, 17 bp, Arabidopsis thaliana
tgacgagctgtttgaga

SEQ ID NO: 147478 - DNA, 17 bp, Arabidopsis thaliana
tgacgagctttcgtggg

SEQ ID NO: 147479 - DNA, 17 bp, Arabidopsis thaliana
tgacgaggacacgtctg

SEQ ID NO: 147480 - DNA, 17 bp, Arabidopsis thaliana
tgacgaggcgagttgtt

SEQ ID NO: 147481 - DNA, 17 bp, Arabidopsis thaliana
tgacgaggctcgaaacc

SEQ ID NO: 147482 - DNA, 17 bp, Arabidopsis thaliana
tgacgagggcacgtcta

SEQ ID NO: 147483 - DNA, 17 bp, Arabidopsis thaliana
tgacgagggcacgtctg

SEQ ID NO: 147484 - DNA, 17 bp, Arabidopsis thaliana
tgacgagggcaggtctg

SEQ ID NO: 147485 - DNA, 17 bp, Arabidopsis thaliana
tgacgagggtacgtctg

SEQ ID NO: 147486 - DNA, 17 bp, Arabidopsis thaliana
tgacgagtccagtcgaa

SEQ ID NO: 147487 - DNA, 17 bp, Arabidopsis thaliana
tgacgagtggtgctccg

SEQ ID NO: 147488 - DNA, 17 bp, Arabidopsis thaliana
tgacgagttcacacgtg

SEQ ID NO: 147489 - DNA, 17 bp, Arabidopsis thaliana
tgacgagttcgggtcga

SEQ ID NO: 147490 - DNA, 17 bp, Arabidopsis thaliana
tgacgataacagtggtg

SEQ ID NO: 147491 - DNA, 17 bp, Arabidopsis thaliana
tgacgatactgtagggg

SEQ ID NO: 147492 - DNA, 17 bp, Arabidopsis thaliana
tgacgatattacaggct

SEQ ID NO: 147493 - DNA, 17 bp, Arabidopsis thaliana
tgacgatccgaatgcac

SEQ ID NO: 147494 - DNA, 17 bp, Arabidopsis thaliana
tgacgatcctaaagttg

SEQ ID NO: 147495 - DNA, 17 bp, Arabidopsis thaliana
tgacgatcctgggcagc

SEQ ID NO: 147496 - DNA, 17 bp, Arabidopsis thaliana
tgacgatcgcagcctcg

SEQ ID NO: 147497 - DNA, 17 bp, Arabidopsis thaliana
tgacgatctctttattt

SEQ ID NO: 147498 - DNA, 17 bp, Arabidopsis thaliana
tgacgatctgaaagcac

SEQ ID NO: 147499 - DNA, 17 bp, Arabidopsis thaliana
tgacgatgaaaatctat

SEQ ID NO: 147500 - DNA, 17 bp, Arabidopsis thaliana
tgacgatgaagggtctg

SEQ ID NO: 147501 - DNA, 17 bp, Arabidopsis thaliana
tgacgatgagtgagccg

SEQ ID NO: 147502 - DNA, 17 bp, Arabidopsis thaliana
tgacgatgggtcccttg

SEQ ID NO: 147503 - DNA, 17 bp, Arabidopsis thaliana
tgacgatgtcggctctt

SEQ ID NO: 147504 - DNA, 17 bp, Arabidopsis thaliana
tgacgatgtgggataaa

SEQ ID NO: 147505 - DNA, 17 bp, Arabidopsis thaliana
tgacgatgtgttgttcg

SEQ ID NO: 147506 - DNA, 17 bp, Arabidopsis thaliana
tgacgatgttgcccctg

SEQ ID NO: 147507 - DNA, 17 bp, Arabidopsis thaliana
tgacgatgttgcccttg

SEQ ID NO: 147508 - DNA, 17 bp, Arabidopsis thaliana
tgacgattacttcctgg

SEQ ID NO: 147509 - DNA, 17 bp, Arabidopsis thaliana
tgacgattaggatcttg

SEQ ID NO: 147510 - DNA, 17 bp, Arabidopsis thaliana
tgacgattagggtttcg

SEQ ID NO: 147511 - DNA, 17 bp, Arabidopsis thaliana
tgacgattcggcgacta

SEQ ID NO: 147512 - DNA, 17 bp, Arabidopsis thaliana
tgacgattctacctttg

SEQ ID NO: 147513 - DNA, 17 bp, Arabidopsis thaliana
tgacgattggaccagag

SEQ ID NO: 147514 - DNA, 17 bp, Arabidopsis thaliana
tgacgatttccacaggt

SEQ ID NO: 147515 - DNA, 17 bp, Arabidopsis thaliana
tgacgcactgtagatgg

SEQ ID NO: 147516 - DNA, 17 bp, Arabidopsis thaliana
tgacgcagctaatgagg

SEQ ID NO: 147517 - DNA, 17 bp, Arabidopsis thaliana
tgacgcatcctgtagat

SEQ ID NO: 147518 - DNA, 17 bp, Arabidopsis thaliana
tgacgcatggttccgac

SEQ ID NO: 147519 - DNA, 17 bp, Arabidopsis thaliana
tgacgccataagaatct

SEQ ID NO: 147520 - DNA, 17 bp, Arabidopsis thaliana
tgacgcccgaagtagga

SEQ ID NO: 147521 - DNA, 17 bp, Arabidopsis thaliana
tgacgccctcgttcgac

SEQ ID NO: 147522 - DNA, 17 bp, Arabidopsis thaliana
tgacgccgccgacttgg

SEQ ID NO: 147523 - DNA, 17 bp, Arabidopsis thaliana
tgacgcctgcccagtgc

SEQ ID NO: 147524 - DNA, 17 bp, Arabidopsis thaliana
tgacgcgaggttggtgc

SEQ ID NO: 147525 - DNA, 17 bp, Arabidopsis thaliana
tgacgcgattcggttcc

SEQ ID NO: 147526 - DNA, 17 bp, Arabidopsis thaliana
tgacgcgattcggttct

SEQ ID NO: 147527 - DNA, 17 bp, Arabidopsis thaliana
tgacgcgcatgaatgga

SEQ ID NO: 147528 - DNA, 17 bp, Arabidopsis thaliana
tgacgcgccggtgcgag

SEQ ID NO: 147529 - DNA, 17 bp, Arabidopsis thaliana
tgacgcgctcacgaagt

SEQ ID NO: 147530 - DNA, 17 bp, Arabidopsis thaliana
tgacgcgtgagagactt

SEQ ID NO: 147531 - DNA, 17 bp, Arabidopsis thaliana
tgacgcgtgtgagtttg

SEQ ID NO: 147532 - DNA, 17 bp, Arabidopsis thaliana
tgacgctaacgactaat

SEQ ID NO: 147533 - DNA, 17 bp, Arabidopsis thaliana
tgacgctaatgatgttg

SEQ ID NO: 147534 - DNA, 17 bp, Arabidopsis thaliana
tgacgctaccgtcgccg

SEQ ID NO: 147535 - DNA, 17 bp, Arabidopsis thaliana
tgacgctcgggacaggt

SEQ ID NO: 147536 - DNA, 17 bp, Arabidopsis thaliana
tgacgctcttaacctcc

SEQ ID NO: 147537 - DNA, 17 bp, Arabidopsis thaliana
tgacgctcttttctggc

SEQ ID NO: 147538 - DNA, 17 bp, Arabidopsis thaliana
tgacgctgccagcatcg

SEQ ID NO: 147539 - DNA, 17 bp, Arabidopsis thaliana
tgacgctgccagcatga

SEQ ID NO: 147540 - DNA, 17 bp, Arabidopsis thaliana
tgacgctgctgatgttt

SEQ ID NO: 147541 - DNA, 17 bp, Arabidopsis thaliana
tgacgctgggagtgctg

SEQ ID NO: 147542 - DNA, 17 bp, Arabidopsis thaliana
tgacgcttaagccgagt

SEQ ID NO: 147543 - DNA, 17 bp, Arabidopsis thaliana
tgacgcttcaccctaac

SEQ ID NO: 147544 - DNA, 17 bp, Arabidopsis thaliana
tgacgcttcgacagcac

SEQ ID NO: 147545 - DNA, 17 bp, Arabidopsis thaliana
tgacgcttctgcccttg

SEQ ID NO: 147546 - DNA, 17 bp, Arabidopsis thaliana
tgacgcttgtgagatct

SEQ ID NO: 147547 - DNA, 17 bp, Arabidopsis thaliana
tgacgcttttgtccgct

SEQ ID NO: 147548 - DNA, 17 bp, Arabidopsis thaliana
tgacggaaactattttt

SEQ ID NO: 147549 - DNA, 17 bp, Arabidopsis thaliana
tgacggaagggcaccac

SEQ ID NO: 147550 - DNA, 17 bp, Arabidopsis thaliana
tgacggaatgccggcta

SEQ ID NO: 147551 - DNA, 17 bp, Arabidopsis thaliana
tgacggaattgtgcggg

SEQ ID NO: 147552 - DNA, 17 bp, Arabidopsis thaliana
tgacggaattgtggcgg

SEQ ID NO: 147553 - DNA, 17 bp, Arabidopsis thaliana
tgacggacccgggctca

SEQ ID NO: 147554 - DNA, 17 bp, Arabidopsis thaliana
tgacggacctaaatggg

SEQ ID NO: 147555 - DNA, 17 bp, Arabidopsis thaliana
tgacggactgggaacgg

SEQ ID NO: 147556 - DNA, 17 bp, Arabidopsis thaliana
tgacggagaacccaccc

SEQ ID NO: 147557 - DNA, 17 bp, Arabidopsis thaliana
tgacggagaagctaatc

SEQ ID NO: 147558 - DNA, 17 bp, Arabidopsis thaliana
tgacggagaattagggt

SEQ ID NO: 147559 - DNA, 17 bp, Arabidopsis thaliana
tgacggagacaaggctc

SEQ ID NO: 147560 - DNA, 17 bp, Arabidopsis thaliana
tgacggagcaatgccgc

SEQ ID NO: 147561 - DNA, 17 bp, Arabidopsis thaliana
tgacggagccagattat

SEQ ID NO: 147562 - DNA, 17 bp, Arabidopsis thaliana
tgacggatatctcctgc

SEQ ID NO: 147563 - DNA, 17 bp, Arabidopsis thaliana
tgacggatcgcatggcc

SEQ ID NO: 147564 - DNA, 17 bp, Arabidopsis thaliana
tgacggatgttgcttga

SEQ ID NO: 147565 - DNA, 17 bp, Arabidopsis thaliana
tgacggattattccgga

SEQ ID NO: 147566 - DNA, 17 bp, Arabidopsis thaliana
tgacggcaacgttaggg

SEQ ID NO: 147567 - DNA, 17 bp, Arabidopsis thaliana
tgacggcaatacgattg

SEQ ID NO: 147568 - DNA, 17 bp, Arabidopsis thaliana
tgacggcaggtaaggct

SEQ ID NO: 147569 - DNA, 17 bp, Arabidopsis thaliana
tgacggccagtgattat

SEQ ID NO: 147570 - DNA, 17 bp, Arabidopsis thaliana
tgacggccgtgttcaag

SEQ ID NO: 147571 - DNA, 17 bp, Arabidopsis thaliana
tgacggcgacgaattgt

SEQ ID NO: 147572 - DNA, 17 bp, Arabidopsis thaliana
tgacggcgactgtaagg

SEQ ID NO: 147573 - DNA, 17 bp, Arabidopsis thaliana
tgacggcggataaggtt

SEQ ID NO: 147574 - DNA, 17 bp, Arabidopsis thaliana
tgacggcgggtagaatc

SEQ ID NO: 147575 - DNA, 17 bp, Arabidopsis thaliana
tgacggcggttaagtac

SEQ ID NO: 147576 - DNA, 17 bp, Arabidopsis thaliana
tgacggctcacatggtt

SEQ ID NO: 147577 - DNA, 17 bp, Arabidopsis thaliana
tgacggctcagttttct

SEQ ID NO: 147578 - DNA, 17 bp, Arabidopsis thaliana
tgacggctgcaatctag

SEQ ID NO: 147579 - DNA, 17 bp, Arabidopsis thaliana
tgacggcttgtcccagc

SEQ ID NO: 147580 - DNA, 17 bp, Arabidopsis thaliana
tgacggcttgtgcggca

SEQ ID NO: 147581 - DNA, 17 bp, Arabidopsis thaliana
tgacggcttgtttcggt

SEQ ID NO: 147582 - DNA, 17 bp, Arabidopsis thaliana
tgacgggaaagcggttt

SEQ ID NO: 147583 - DNA, 17 bp, Arabidopsis thaliana
tgacgggaagcatttgc

SEQ ID NO: 147584 - DNA, 17 bp, Arabidopsis thaliana
tgacgggacgggtttgg

SEQ ID NO: 147585 - DNA, 17 bp, Arabidopsis thaliana
tgacgggagggccgtgg

SEQ ID NO: 147586 - DNA, 17 bp, Arabidopsis thaliana
tgacgggatgttgtgtc

SEQ ID NO: 147587 - DNA, 17 bp, Arabidopsis thaliana
tgacgggcctgctgagg

SEQ ID NO: 147588 - DNA, 17 bp, Arabidopsis thaliana
tgacgggcctgctgatg

SEQ ID NO: 147589 - DNA, 17 bp, Arabidopsis thaliana
tgacgggggtcccagtt

SEQ ID NO: 147590 - DNA, 17 bp, Arabidopsis thaliana
tgacgggtttaagggct

SEQ ID NO: 147591 - DNA, 17 bp, Arabidopsis thaliana
tgacgggtttggcagga

SEQ ID NO: 147592 - DNA, 17 bp, Arabidopsis thaliana
tgacggtaaaatcaatt

SEQ ID NO: 147593 - DNA, 17 bp, Arabidopsis thaliana
tgacggtactgtagacg

SEQ ID NO: 147594 - DNA, 17 bp, Arabidopsis thaliana
tgacggtccgcctttgg

SEQ ID NO: 147595 - DNA, 17 bp, Arabidopsis thaliana
tgacggtccttggctag

SEQ ID NO: 147596 - DNA, 17 bp, Arabidopsis thaliana
tgacggtggatcatcgg

SEQ ID NO: 147597 - DNA, 17 bp, Arabidopsis thaliana
tgacggtgttgctttct

SEQ ID NO: 147598 - DNA, 17 bp, Arabidopsis thaliana
tgacggttccacatgat

SEQ ID NO: 147599 - DNA, 17 bp, Arabidopsis thaliana
tgacggttccagagtat

SEQ ID NO: 147600 - DNA, 17 bp, Arabidopsis thaliana
tgacggttcgactccgt

SEQ ID NO: 147601 - DNA, 17 bp, Arabidopsis thaliana
tgacggttgcgggcggt

SEQ ID NO: 147602 - DNA, 17 bp, Arabidopsis thaliana
tgacggttgcggtttta

SEQ ID NO: 147603 - DNA, 17 bp, Arabidopsis thaliana
tgacggttgctcgcttt

SEQ ID NO: 147604 - DNA, 17 bp, Arabidopsis thaliana
tgacggtttctgttaaa

SEQ ID NO: 147605 - DNA, 17 bp, Arabidopsis thaliana
tgacgtaacctggctct

SEQ ID NO: 147606 - DNA, 17 bp, Arabidopsis thaliana
tgacgtacccgggctca

SEQ ID NO: 147607 - DNA, 17 bp, Arabidopsis thaliana
tgacgtagagtatcggc

SEQ ID NO: 147608 - DNA, 17 bp, Arabidopsis thaliana
tgacgtagcaactgctt

SEQ ID NO: 147609 - DNA, 17 bp, Arabidopsis thaliana
tgacgtagcgatcaatc

SEQ ID NO: 147610 - DNA, 17 bp, Arabidopsis thaliana
tgacgtagcgtaccgac

SEQ ID NO: 147611 - DNA, 17 bp, Arabidopsis thaliana
tgacgtagctgacttct

SEQ ID NO: 147612 - DNA, 17 bp, Arabidopsis thaliana
tgacgtatctctcaggc

SEQ ID NO: 147613 - DNA, 17 bp, Arabidopsis thaliana
tgacgtatgatgtcgat

SEQ ID NO: 147614 - DNA, 17 bp, Arabidopsis thaliana
tgacgtatgtgtctggg

SEQ ID NO: 147615 - DNA, 17 bp, Arabidopsis thaliana
tgacgtcaagtcatcat

SEQ ID NO: 147616 - DNA, 17 bp, Arabidopsis thaliana
tgacgtcaagtccgcat

SEQ ID NO: 147617 - DNA, 17 bp, Arabidopsis thaliana
tgacgtcattcgaactg

SEQ ID NO: 147618 - DNA, 17 bp, Arabidopsis thaliana
tgacgtcgttgtgcctg

SEQ ID NO: 147619 - DNA, 17 bp, Arabidopsis thaliana
tgacgtctactcgacca

SEQ ID NO: 147620 - DNA, 17 bp, Arabidopsis thaliana
tgacgtctagctcagtt

SEQ ID NO: 147621 - DNA, 17 bp, Arabidopsis thaliana
tgacgtctgcctgggtg

SEQ ID NO: 147622 - DNA, 17 bp, Arabidopsis thaliana
tgacgtctgcttgggtg

SEQ ID NO: 147623 - DNA, 17 bp, Arabidopsis thaliana
tgacgtgaaggctcctg

SEQ ID NO: 147624 - DNA, 17 bp, Arabidopsis thaliana
tgacgtgacaacatacg

SEQ ID NO: 147625 - DNA, 17 bp, Arabidopsis thaliana
tgacgtgacagtggcat

SEQ ID NO: 147626 - DNA, 17 bp, Arabidopsis thaliana
tgacgtgacatcacacc

SEQ ID NO: 147627 - DNA, 17 bp, Arabidopsis thaliana
tgacgtgacatcctcag

SEQ ID NO: 147628 - DNA, 17 bp, Arabidopsis thaliana
tgacgtgatcgtggtct

SEQ ID NO: 147629 - DNA, 17 bp, Arabidopsis thaliana
tgacgtgccagacctag

SEQ ID NO: 147630 - DNA, 17 bp, Arabidopsis thaliana
tgacgtgcgttgaccga

SEQ ID NO: 147631 - DNA, 17 bp, Arabidopsis thaliana
tgacgtgctaccaacgg

SEQ ID NO: 147632 - DNA, 17 bp, Arabidopsis thaliana
tgacgtgctccgggcgt

SEQ ID NO: 147633 - DNA, 17 bp, Arabidopsis thaliana
tgacgtgctgccacatg

SEQ ID NO: 147634 - DNA, 17 bp, Arabidopsis thaliana
tgacgtggattacggtg

SEQ ID NO: 147635 - DNA, 17 bp, Arabidopsis thaliana
tgacgtggcagtgacat

SEQ ID NO: 147636 - DNA, 17 bp, Arabidopsis thaliana
tgacgtggcagtggcat

SEQ ID NO: 147637 - DNA, 17 bp, Arabidopsis thaliana
tgacgtggcggcttgta

SEQ ID NO: 147638 - DNA, 17 bp, Arabidopsis thaliana
tgacgtggctgatgtgg

SEQ ID NO: 147639 - DNA, 17 bp, Arabidopsis thaliana
tgacgtggcttcttctg

SEQ ID NO: 147640 - DNA, 17 bp, Arabidopsis thaliana
tgacgtgtcaccgtcaa

SEQ ID NO: 147641 - DNA, 17 bp, Arabidopsis thaliana
tgacgtgtcccaccggg

SEQ ID NO: 147642 - DNA, 17 bp, Arabidopsis thaliana
tgacgtgtgcctgggtg

SEQ ID NO: 147643 - DNA, 17 bp, Arabidopsis thaliana
tgacgtgttgcccaagt

SEQ ID NO: 147644 - DNA, 17 bp, Arabidopsis thaliana
tgacgtgtttccaggtg

SEQ ID NO: 147645 - DNA, 17 bp, Arabidopsis thaliana
tgacgttaagtgctata

SEQ ID NO: 147646 - DNA, 17 bp, Arabidopsis thaliana
tgacgttattcgaaccg

SEQ ID NO: 147647 - DNA, 17 bp, Arabidopsis thaliana
tgacgttatttcactcc

SEQ ID NO: 147648 - DNA, 17 bp, Arabidopsis thaliana
tgacgttcagcggatcc

SEQ ID NO: 147649 - DNA, 17 bp, Arabidopsis thaliana
tgacgttccagattcag

SEQ ID NO: 147650 - DNA, 17 bp, Arabidopsis thaliana
tgacgttccttggctag

SEQ ID NO: 147651 - DNA, 17 bp, Arabidopsis thaliana
tgacgttcggttatcca

SEQ ID NO: 147652 - DNA, 17 bp, Arabidopsis thaliana
tgacgttctatccactg

SEQ ID NO: 147653 - DNA, 17 bp, Arabidopsis thaliana
tgacgttgagattgcac

SEQ ID NO: 147654 - DNA, 17 bp, Arabidopsis thaliana
tgacgttgcttcaggat

SEQ ID NO: 147655 - DNA, 17 bp, Arabidopsis thaliana
tgacgttggctaagtcc

SEQ ID NO: 147656 - DNA, 17 bp, Arabidopsis thaliana
tgacgttgtctgttcga

SEQ ID NO: 147657 - DNA, 17 bp, Arabidopsis thaliana
tgacgtttccggcaggt

SEQ ID NO: 147658 - DNA, 17 bp, Arabidopsis thaliana
tgacgtttgcggttgcg

SEQ ID NO: 147659 - DNA, 17 bp, Arabidopsis thaliana
tgacgttttgaccagct

SEQ ID NO: 147660 - DNA, 17 bp, Arabidopsis thaliana
tgactaaaaaacgctga

SEQ ID NO: 147661 - DNA, 17 bp, Arabidopsis thaliana
tgactaaaacgtggttg

SEQ ID NO: 147662 - DNA, 17 bp, Arabidopsis thaliana
tgactaaaacttggttg

SEQ ID NO: 147663 - DNA, 17 bp, Arabidopsis thaliana
tgactaaaagcccatct

SEQ ID NO: 147664 - DNA, 17 bp, Arabidopsis thaliana
tgactaaaatccaggtg

SEQ ID NO: 147665 - DNA, 17 bp, Arabidopsis thaliana
tgactaaaatctggttg

SEQ ID NO: 147666 - DNA, 17 bp, Arabidopsis thaliana
tgactaaacacgaatgc

SEQ ID NO: 147667 - DNA, 17 bp, Arabidopsis thaliana
tgactaaacgcccctac

SEQ ID NO: 147668 - DNA, 17 bp, Arabidopsis thaliana
tgactaaacgcctcgaa

SEQ ID NO: 147669 - DNA, 17 bp, Arabidopsis thaliana
tgactaaacgcctctaa

SEQ ID NO: 147670 - DNA, 17 bp, Arabidopsis thaliana
tgactaaactcctctgt

SEQ ID NO: 147671 - DNA, 17 bp, Arabidopsis thaliana
tgactaaatacgggcga

SEQ ID NO: 147672 - DNA, 17 bp, Arabidopsis thaliana
tgactaaatccaggccc

SEQ ID NO: 147673 - DNA, 17 bp, Arabidopsis thaliana
tgactaaattggctctg

SEQ ID NO: 147674 - DNA, 17 bp, Arabidopsis thaliana
tgactaacaaacctcct

SEQ ID NO: 147675 - DNA, 17 bp, Arabidopsis thaliana
tgactaaccgaattgac

SEQ ID NO: 147676 - DNA, 17 bp, Arabidopsis thaliana
tgactaaccttcaggtt

SEQ ID NO: 147677 - DNA, 17 bp, Arabidopsis thaliana
tgactaaccttcgtgtc

SEQ ID NO: 147678 - DNA, 17 bp, Arabidopsis thaliana
tgactaactgtttcatt

SEQ ID NO: 147679 - DNA, 17 bp, Arabidopsis thaliana
tgactaagatcgagtac

SEQ ID NO: 147680 - DNA, 17 bp, Arabidopsis thaliana
tgactaagccgtgtcaa

SEQ ID NO: 147681 - DNA, 17 bp, Arabidopsis thaliana
tgactaagctattttgt

SEQ ID NO: 147682 - DNA, 17 bp, Arabidopsis thaliana
tgactaagctcctcggt

SEQ ID NO: 147683 - DNA, 17 bp, Arabidopsis thaliana
tgactaagtcaagtgac

SEQ ID NO: 147684 - DNA, 17 bp, Arabidopsis thaliana
tgactaatcaaacgaac

SEQ ID NO: 147685 - DNA, 17 bp, Arabidopsis thaliana
tgactaatcataatccg

SEQ ID NO: 147686 - DNA, 17 bp, Arabidopsis thaliana
tgactaatctgacggga

SEQ ID NO: 147687 - DNA, 17 bp, Arabidopsis thaliana
tgactaatgcacttgca

SEQ ID NO: 147688 - DNA, 17 bp, Arabidopsis thaliana
tgactaattaccgggtt

SEQ ID NO: 147689 - DNA, 17 bp, Arabidopsis thaliana
tgactacaggtaaacca

SEQ ID NO: 147690 - DNA, 17 bp, Arabidopsis thaliana
tgactacattgcctcag

SEQ ID NO: 147691 - DNA, 17 bp, Arabidopsis thaliana
tgactaccaagtgattc

SEQ ID NO: 147692 - DNA, 17 bp, Arabidopsis thaliana
tgactacccctggcatt

SEQ ID NO: 147693 - DNA, 17 bp, Arabidopsis thaliana
tgactaccgtgcgctgg

SEQ ID NO: 147694 - DNA, 17 bp, Arabidopsis thaliana
tgactacctcatggaga

SEQ ID NO: 147695 - DNA, 17 bp, Arabidopsis thaliana
tgactacctttggtgtc

SEQ ID NO: 147696 - DNA, 17 bp, Arabidopsis thaliana
tgactacgcctttcatt

SEQ ID NO: 147697 - DNA, 17 bp, Arabidopsis thaliana
tgactacgggatttcat

SEQ ID NO: 147698 - DNA, 17 bp, Arabidopsis thaliana
tgactacgtcccagagg

SEQ ID NO: 147699 - DNA, 17 bp, Arabidopsis thaliana
tgactacgtccctgccc

SEQ ID NO: 147700 - DNA, 17 bp, Arabidopsis thaliana
tgactacgtccctgctt

SEQ ID NO: 147701 - DNA, 17 bp, Arabidopsis thaliana
tgactacgttttgcggt

SEQ ID NO: 147702 - DNA, 17 bp, Arabidopsis thaliana
tgactactcgaggcttt

SEQ ID NO: 147703 - DNA, 17 bp, Arabidopsis thaliana
tgactacttctaagcaa

SEQ ID NO: 147704 - DNA, 17 bp, Arabidopsis thaliana
tgactacttcttggttg

SEQ ID NO: 147705 - DNA, 17 bp, Arabidopsis thaliana
tgactagacaaccaagc

SEQ ID NO: 147706 - DNA, 17 bp, Arabidopsis thaliana
tgactagacacacaatg

SEQ ID NO: 147707 - DNA, 17 bp, Arabidopsis thaliana
tgactagatattgaccc

SEQ ID NO: 147708 - DNA, 17 bp, Arabidopsis thaliana
tgactagatcagttgcg

SEQ ID NO: 147709 - DNA, 17 bp, Arabidopsis thaliana
tgactagatttgaccgg

SEQ ID NO: 147710 - DNA, 17 bp, Arabidopsis thaliana
tgactagcaggattcgc

SEQ ID NO: 147711 - DNA, 17 bp, Arabidopsis thaliana
tgactagccaaagtctg

SEQ ID NO: 147712 - DNA, 17 bp, Arabidopsis thaliana
tgactagcttctaatcg

SEQ ID NO: 147713 - DNA, 17 bp, Arabidopsis thaliana
tgactagggttcaaggt

SEQ ID NO: 147714 - DNA, 17 bp, Arabidopsis thaliana
tgactaggtgagtgccc

SEQ ID NO: 147715 - DNA, 17 bp, Arabidopsis thaliana
tgactaggtttctgagg

SEQ ID NO: 147716 - DNA, 17 bp, Arabidopsis thaliana
tgactagtccactgggt

SEQ ID NO: 147717 - DNA, 17 bp, Arabidopsis thaliana
tgactataggcatactc

SEQ ID NO: 147718 - DNA, 17 bp, Arabidopsis thaliana
tgactatatcgcgggtg

SEQ ID NO: 147719 - DNA, 17 bp, Arabidopsis thaliana
tgactatcactgtgctc

SEQ ID NO: 147720 - DNA, 17 bp, Arabidopsis thaliana
tgactatcagataaacc

SEQ ID NO: 147721 - DNA, 17 bp, Arabidopsis thaliana
tgactatcaggtaaacc

SEQ ID NO: 147722 - DNA, 17 bp, Arabidopsis thaliana
tgactatcagttaaacc

SEQ ID NO: 147723 - DNA, 17 bp, Arabidopsis thaliana
tgactatccctggcatt

SEQ ID NO: 147724 - DNA, 17 bp, Arabidopsis thaliana
tgactatcctctggcat

SEQ ID NO: 147725 - DNA, 17 bp, Arabidopsis thaliana
tgactatcgggactttc

SEQ ID NO: 147726 - DNA, 17 bp, Arabidopsis thaliana
tgactatgaatcggact

SEQ ID NO: 147727 - DNA, 17 bp, Arabidopsis thaliana
tgactatgccactccac

SEQ ID NO: 147728 - DNA, 17 bp, Arabidopsis thaliana
tgactatgccgaaaacc

SEQ ID NO: 147729 - DNA, 17 bp, Arabidopsis thaliana
tgactatgctacacaac

SEQ ID NO: 147730 - DNA, 17 bp, Arabidopsis thaliana
tgactatggatcggact

SEQ ID NO: 147731 - DNA, 17 bp, Arabidopsis thaliana
tgactatgtctccatct

SEQ ID NO: 147732 - DNA, 17 bp, Arabidopsis thaliana
tgactatgtgtagccct

SEQ ID NO: 147733 - DNA, 17 bp, Arabidopsis thaliana
tgactatgttccacccg

SEQ ID NO: 147734 - DNA, 17 bp, Arabidopsis thaliana
tgactattagctcagtg

SEQ ID NO: 147735 - DNA, 17 bp, Arabidopsis thaliana
tgactattagctcagtt

SEQ ID NO: 147736 - DNA, 17 bp, Arabidopsis thaliana
tgactattccaagttgg

SEQ ID NO: 147737 - DNA, 17 bp, Arabidopsis thaliana
tgactattggcgtgaga

SEQ ID NO: 147738 - DNA, 17 bp, Arabidopsis thaliana
tgactattggtgcacaa

SEQ ID NO: 147739 - DNA, 17 bp, Arabidopsis thaliana
tgactatttcaccattc

SEQ ID NO: 147740 - DNA, 17 bp, Arabidopsis thaliana
tgactattttgccgaca

SEQ ID NO: 147741 - DNA, 17 bp, Arabidopsis thaliana
tgactattttgtgatcg

SEQ ID NO: 147742 - DNA, 17 bp, Arabidopsis thaliana
tgactcaaatgagttga

SEQ ID NO: 147743 - DNA, 17 bp, Arabidopsis thaliana
tgactcaacatgaccgg

SEQ ID NO: 147744 - DNA, 17 bp, Arabidopsis thaliana
tgactcaacattccatg

SEQ ID NO: 147745 - DNA, 17 bp, Arabidopsis thaliana
tgactcaactaccctag

SEQ ID NO: 147746 - DNA, 17 bp, Arabidopsis thaliana
tgactcaacttccgatg

SEQ ID NO: 147747 - DNA, 17 bp, Arabidopsis thaliana
tgactcaagcccgcaag

SEQ ID NO: 147748 - DNA, 17 bp, Arabidopsis thaliana
tgactcaaggttagttt

SEQ ID NO: 147749 - DNA, 17 bp, Arabidopsis thaliana
tgactcaatcaccacct

SEQ ID NO: 147750 - DNA, 17 bp, Arabidopsis thaliana
tgactcacacttctacc

SEQ ID NO: 147751 - DNA, 17 bp, Arabidopsis thaliana
tgactcacgctccttta

SEQ ID NO: 147752 - DNA, 17 bp, Arabidopsis thaliana
tgactcacggccgggtg

SEQ ID NO: 147753 - DNA, 17 bp, Arabidopsis thaliana
tgactcactctttctct

SEQ ID NO: 147754 - DNA, 17 bp, Arabidopsis thaliana
tgactcaggagggatag

SEQ ID NO: 147755 - DNA, 17 bp, Arabidopsis thaliana
tgactcaggagggatat

SEQ ID NO: 147756 - DNA, 17 bp, Arabidopsis thaliana
tgactcaggctcatact

SEQ ID NO: 147757 - DNA, 17 bp, Arabidopsis thaliana
tgactcagggccggctg

SEQ ID NO: 147758 - DNA, 17 bp, Arabidopsis thaliana
tgactcagtgattcggt

SEQ ID NO: 147759 - DNA, 17 bp, Arabidopsis thaliana
tgactcagttttccaag

SEQ ID NO: 147760 - DNA, 17 bp, Arabidopsis thaliana
tgactcatcaactcatt

SEQ ID NO: 147761 - DNA, 17 bp, Arabidopsis thaliana
tgactcatcaccaattt

SEQ ID NO: 147762 - DNA, 17 bp, Arabidopsis thaliana
tgactcatcatcagctt

SEQ ID NO: 147763 - DNA, 17 bp, Arabidopsis thaliana
tgactcatcgccgtaag

SEQ ID NO: 147764 - DNA, 17 bp, Arabidopsis thaliana
tgactcatcttttggac

SEQ ID NO: 147765 - DNA, 17 bp, Arabidopsis thaliana
tgactcatgctccttta

SEQ ID NO: 147766 - DNA, 17 bp, Arabidopsis thaliana
tgactcattcctcagcc

SEQ ID NO: 147767 - DNA, 17 bp, Arabidopsis thaliana
tgactccaaggtgaaca

SEQ ID NO: 147768 - DNA, 17 bp, Arabidopsis thaliana
tgactccaaggtgctct

SEQ ID NO: 147769 - DNA, 17 bp, Arabidopsis thaliana
tgactccacaacggtaa

SEQ ID NO: 147770 - DNA, 17 bp, Arabidopsis thaliana
tgactccactaagtttc

SEQ ID NO: 147771 - DNA, 17 bp, Arabidopsis thaliana
tgactccagatcagaag

SEQ ID NO: 147772 - DNA, 17 bp, Arabidopsis thaliana
tgactccataactttta

SEQ ID NO: 147773 - DNA, 17 bp, Arabidopsis thaliana
tgactccgaatggtgac

SEQ ID NO: 147774 - DNA, 17 bp, Arabidopsis thaliana
tgactccgacagcagct

SEQ ID NO: 147775 - DNA, 17 bp, Arabidopsis thaliana
tgactccgatttcagtt

SEQ ID NO: 147776 - DNA, 17 bp, Arabidopsis thaliana
tgactccggagcttgtg

SEQ ID NO: 147777 - DNA, 17 bp, Arabidopsis thaliana
tgactccggccaatttt

SEQ ID NO: 147778 - DNA, 17 bp, Arabidopsis thaliana
tgactccggtgtgatga

SEQ ID NO: 147779 - DNA, 17 bp, Arabidopsis thaliana
tgactcctgggcagcac

SEQ ID NO: 147780 - DNA, 17 bp, Arabidopsis thaliana
tgactcgaacgaatacc

SEQ ID NO: 147781 - DNA, 17 bp, Arabidopsis thaliana
tgactcgaacgaatcag

SEQ ID NO: 147782 - DNA, 17 bp, Arabidopsis thaliana
tgactcgaacgaatccc

SEQ ID NO: 147783 - DNA, 17 bp, Arabidopsis thaliana
tgactcgaacgaatgaa

SEQ ID NO: 147784 - DNA, 17 bp, Arabidopsis thaliana
tgactcgaacgaattaa

SEQ ID NO: 147785 - DNA, 17 bp, Arabidopsis thaliana
tgactcgaacgaattgg

SEQ ID NO: 147786 - DNA, 17 bp, Arabidopsis thaliana
tgactcgaacggcttag

SEQ ID NO: 147787 - DNA, 17 bp, Arabidopsis thaliana
tgactcgacaaagtgaa

SEQ ID NO: 147788 - DNA, 17 bp, Arabidopsis thaliana
tgactcgaccattttgg

SEQ ID NO: 147789 - DNA, 17 bp, Arabidopsis thaliana
tgactcgaccattttgt

SEQ ID NO: 147790 - DNA, 17 bp, Arabidopsis thaliana
tgactcgatctgtggct

SEQ ID NO: 147791 - DNA, 17 bp, Arabidopsis thaliana
tgactcgatgacccggt

SEQ ID NO: 147792 - DNA, 17 bp, Arabidopsis thaliana
tgactcgatgtttgggt

SEQ ID NO: 147793 - DNA, 17 bp, Arabidopsis thaliana
tgactcgccataacaaa

SEQ ID NO: 147794 - DNA, 17 bp, Arabidopsis thaliana
tgactcgcgcttactag

SEQ ID NO: 147795 - DNA, 17 bp, Arabidopsis thaliana
tgactcgcgtatggaaa

SEQ ID NO: 147796 - DNA, 17 bp, Arabidopsis thaliana
tgactcgctttcggttc

SEQ ID NO: 147797 - DNA, 17 bp, Arabidopsis thaliana
tgactcggaccaggtag

SEQ ID NO: 147798 - DNA, 17 bp, Arabidopsis thaliana
tgactcggcaacggata

SEQ ID NO: 147799 - DNA, 17 bp, Arabidopsis thaliana
tgactcggctcactgat

SEQ ID NO: 147800 - DNA, 17 bp, Arabidopsis thaliana
tgactcgggaaccggta

SEQ ID NO: 147801 - DNA, 17 bp, Arabidopsis thaliana
tgactcgggacctggcg

SEQ ID NO: 147802 - DNA, 17 bp, Arabidopsis thaliana
tgactcggtaacttggc

SEQ ID NO: 147803 - DNA, 17 bp, Arabidopsis thaliana
tgactcggttaaaccgg

SEQ ID NO: 147804 - DNA, 17 bp, Arabidopsis thaliana
tgactcggttatctgca

SEQ ID NO: 147805 - DNA, 17 bp, Arabidopsis thaliana
tgactcggttgaccggt

SEQ ID NO: 147806 - DNA, 17 bp, Arabidopsis thaliana
tgactctaggaatctct

SEQ ID NO: 147807 - DNA, 17 bp, Arabidopsis thaliana
tgactctagtccgactt

SEQ ID NO: 147808 - DNA, 17 bp, Arabidopsis thaliana
tgactctagttcgactt

SEQ ID NO: 147809 - DNA, 17 bp, Arabidopsis thaliana
tgactctatagccgaca

SEQ ID NO: 147810 - DNA, 17 bp, Arabidopsis thaliana
tgactctatccggcatg

SEQ ID NO: 147811 - DNA, 17 bp, Arabidopsis thaliana
tgactctatctggcatg

SEQ ID NO: 147812 - DNA, 17 bp, Arabidopsis thaliana
tgactctatctgttatg

SEQ ID NO: 147813 - DNA, 17 bp, Arabidopsis thaliana
tgactctattcggaacc

SEQ ID NO: 147814 - DNA, 17 bp, Arabidopsis thaliana
tgactctcattaggtgg

SEQ ID NO: 147815 - DNA, 17 bp, Arabidopsis thaliana
tgactctcctcttgcct

SEQ ID NO: 147816 - DNA, 17 bp, Arabidopsis thaliana
tgactctcctcttgcgt

SEQ ID NO: 147817 - DNA, 17 bp, Arabidopsis thaliana
tgactctcggcaacgga

SEQ ID NO: 147818 - DNA, 17 bp, Arabidopsis thaliana
tgactctctgccagaaa

SEQ ID NO: 147819 - DNA, 17 bp, Arabidopsis thaliana
tgactctcttaaggtag

SEQ ID NO: 147820 - DNA, 17 bp, Arabidopsis thaliana
tgactctcttgcgatat

SEQ ID NO: 147821 - DNA, 17 bp, Arabidopsis thaliana
tgactctcttttcaaag

SEQ ID NO: 147822 - DNA, 17 bp, Arabidopsis thaliana
tgactctgaccgcctgc

SEQ ID NO: 147823 - DNA, 17 bp, Arabidopsis thaliana
tgactctgattggcgct

SEQ ID NO: 147824 - DNA, 17 bp, Arabidopsis thaliana
tgactctgcgatacacc

SEQ ID NO: 147825 - DNA, 17 bp, Arabidopsis thaliana
tgactctggaaccggtc

SEQ ID NO: 147826 - DNA, 17 bp, Arabidopsis thaliana
tgactctggctcatact

SEQ ID NO: 147827 - DNA, 17 bp, Arabidopsis thaliana
tgactctggctcatagt

SEQ ID NO: 147828 - DNA, 17 bp, Arabidopsis thaliana
tgactctgggactagct

SEQ ID NO: 147829 - DNA, 17 bp, Arabidopsis thaliana
tgactctgggactaggt

SEQ ID NO: 147830 - DNA, 17 bp, Arabidopsis thaliana
tgactctggtccagccc

SEQ ID NO: 147831 - DNA, 17 bp, Arabidopsis thaliana
tgactctggtgttgtag

SEQ ID NO: 147832 - DNA, 17 bp, Arabidopsis thaliana
tgactctgtcagccatt

SEQ ID NO: 147833 - DNA, 17 bp, Arabidopsis thaliana
tgactctgtgcctcgct

SEQ ID NO: 147834 - DNA, 17 bp, Arabidopsis thaliana
tgactcttgagaatctg

SEQ ID NO: 147835 - DNA, 17 bp, Arabidopsis thaliana
tgactcttgatggcggg

SEQ ID NO: 147836 - DNA, 17 bp, Arabidopsis thaliana
tgactcttggaaagata

SEQ ID NO: 147837 - DNA, 17 bp, Arabidopsis thaliana
tgactcttggcaagaat

SEQ ID NO: 147838 - DNA, 17 bp, Arabidopsis thaliana
tgactcttggtgatttt

SEQ ID NO: 147839 - DNA, 17 bp, Arabidopsis thaliana
tgactctttccgctgct

SEQ ID NO: 147840 - DNA, 17 bp, Arabidopsis thaliana
tgactcttttgctctcc

SEQ ID NO: 147841 - DNA, 17 bp, Arabidopsis thaliana
tgactgaaaagatggtg

SEQ ID NO: 147842 - DNA, 17 bp, Arabidopsis thaliana
tgactgaaaatctatcg

SEQ ID NO: 147843 - DNA, 17 bp, Arabidopsis thaliana
tgactgaaacccttttg

SEQ ID NO: 147844 - DNA, 17 bp, Arabidopsis thaliana
tgactgaaacgaccggt

SEQ ID NO: 147845 - DNA, 17 bp, Arabidopsis thaliana
tgactgaaactaaccgg

SEQ ID NO: 147846 - DNA, 17 bp, Arabidopsis thaliana
tgactgaaactgccagc

SEQ ID NO: 147847 - DNA, 17 bp, Arabidopsis thaliana
tgactgaaacttccaga

SEQ ID NO: 147848 - DNA, 17 bp, Arabidopsis thaliana
tgactgaaagtgactac

SEQ ID NO: 147849 - DNA, 17 bp, Arabidopsis thaliana
tgactgaaatctaaccg

SEQ ID NO: 147850 - DNA, 17 bp, Arabidopsis thaliana
tgactgaaccattcgcc

SEQ ID NO: 147851 - DNA, 17 bp, Arabidopsis thaliana
tgactgaaccggatgta

SEQ ID NO: 147852 - DNA, 17 bp, Arabidopsis thaliana
tgactgaacctgcaagc

SEQ ID NO: 147853 - DNA, 17 bp, Arabidopsis thaliana
tgactgaacctgcatgc

SEQ ID NO: 147854 - DNA, 17 bp, Arabidopsis thaliana
tgactgaacctgcggaa

SEQ ID NO: 147855 - DNA, 17 bp, Arabidopsis thaliana
tgactgaacgcccttaa

SEQ ID NO: 147856 - DNA, 17 bp, Arabidopsis thaliana
tgactgaacgcctaagt

SEQ ID NO: 147857 - DNA, 17 bp, Arabidopsis thaliana
tgactgaacgcctctaa

SEQ ID NO: 147858 - DNA, 17 bp, Arabidopsis thaliana
tgactgaactaaactgg

SEQ ID NO: 147859 - DNA, 17 bp, Arabidopsis thaliana
tgactgaactcacagtg

SEQ ID NO: 147860 - DNA, 17 bp, Arabidopsis thaliana
tgactgaactgcacagt

SEQ ID NO: 147861 - DNA, 17 bp, Arabidopsis thaliana
tgactgaagattcctaa

SEQ ID NO: 147862 - DNA, 17 bp, Arabidopsis thaliana
tgactgaagctgcctgc

SEQ ID NO: 147863 - DNA, 17 bp, Arabidopsis thaliana
tgactgaagtcgccagc

SEQ ID NO: 147864 - DNA, 17 bp, Arabidopsis thaliana
tgactgaagtgcaccgc

SEQ ID NO: 147865 - DNA, 17 bp, Arabidopsis thaliana
tgactgaagttctcatg

SEQ ID NO: 147866 - DNA, 17 bp, Arabidopsis thaliana
tgactgaagttgccagc

SEQ ID NO: 147867 - DNA, 17 bp, Arabidopsis thaliana
tgactgaatcgcctcgg

SEQ ID NO: 147868 - DNA, 17 bp, Arabidopsis thaliana
tgactgaatgtcgtttt

SEQ ID NO: 147869 - DNA, 17 bp, Arabidopsis thaliana
tgactgacagaagagag

SEQ ID NO: 147870 - DNA, 17 bp, Arabidopsis thaliana
tgactgacagattagtc

SEQ ID NO: 147871 - DNA, 17 bp, Arabidopsis thaliana
tgactgaccaaccgtat

SEQ ID NO: 147872 - DNA, 17 bp, Arabidopsis thaliana
tgactgaccacaggttc

SEQ ID NO: 147873 - DNA, 17 bp, Arabidopsis thaliana
tgactgaccacatcttt

SEQ ID NO: 147874 - DNA, 17 bp, Arabidopsis thaliana
tgactgaccaccgtacg

SEQ ID NO: 147875 - DNA, 17 bp, Arabidopsis thaliana
tgactgaccattggagc

SEQ ID NO: 147876 - DNA, 17 bp, Arabidopsis thaliana
tgactgacccacccacc

SEQ ID NO: 147877 - DNA, 17 bp, Arabidopsis thaliana
tgactgacccacccccc

SEQ ID NO: 147878 - DNA, 17 bp, Arabidopsis thaliana
tgactgacccagtgact

SEQ ID NO: 147879 - DNA, 17 bp, Arabidopsis thaliana
tgactgacccatgaatt

SEQ ID NO: 147880 - DNA, 17 bp, Arabidopsis thaliana
tgactgacccccccccc

SEQ ID NO: 147881 - DNA, 17 bp, Arabidopsis thaliana
tgactgacccgatgacc

SEQ ID NO: 147882 - DNA, 17 bp, Arabidopsis thaliana
tgactgacccgttaaag

SEQ ID NO: 147883 - DNA, 17 bp, Arabidopsis thaliana
tgactgaccgaatcgca

SEQ ID NO: 147884 - DNA, 17 bp, Arabidopsis thaliana
tgactgaccgagtcttt

SEQ ID NO: 147885 - DNA, 17 bp, Arabidopsis thaliana
tgactgaccgatgttga

SEQ ID NO: 147886 - DNA, 17 bp, Arabidopsis thaliana
tgactgaccgtgtttat

SEQ ID NO: 147887 - DNA, 17 bp, Arabidopsis thaliana
tgactgacctttaagta

SEQ ID NO: 147888 - DNA, 17 bp, Arabidopsis thaliana
tgactgacctttaagtt

SEQ ID NO: 147889 - DNA, 17 bp, Arabidopsis thaliana
tgactgacggtggatca

SEQ ID NO: 147890 - DNA, 17 bp, Arabidopsis thaliana
tgactgacgtagagtat

SEQ ID NO: 147891 - DNA, 17 bp, Arabidopsis thaliana
tgactgacgtgacatcc

SEQ ID NO: 147892 - DNA, 17 bp, Arabidopsis thaliana
tgactgactaaacgcct

SEQ ID NO: 147893 - DNA, 17 bp, Arabidopsis thaliana
tgactgactcaacatga

SEQ ID NO: 147894 - DNA, 17 bp, Arabidopsis thaliana
tgactgactcgaacgaa

SEQ ID NO: 147895 - DNA, 17 bp, Arabidopsis thaliana
tgactgactctatagcc

SEQ ID NO: 147896 - DNA, 17 bp, Arabidopsis thaliana
tgactgactctggctca

SEQ ID NO: 147897 - DNA, 17 bp, Arabidopsis thaliana
tgactgactgaacgcct

SEQ ID NO: 147898 - DNA, 17 bp, Arabidopsis thaliana
tgactgactgagacttc

SEQ ID NO: 147899 - DNA, 17 bp, Arabidopsis thaliana
tgactgacttcgcacgt

SEQ ID NO: 147900 - DNA, 17 bp, Arabidopsis thaliana
tgactgagaaagtcagc

SEQ ID NO: 147901 - DNA, 17 bp, Arabidopsis thaliana
tgactgagaatcgtccc

SEQ ID NO: 147902 - DNA, 17 bp, Arabidopsis thaliana
tgactgagaccgagact

SEQ ID NO: 147903 - DNA, 17 bp, Arabidopsis thaliana
tgactgagacgctcttt

SEQ ID NO: 147904 - DNA, 17 bp, Arabidopsis thaliana
tgactgagacttattta

SEQ ID NO: 147905 - DNA, 17 bp, Arabidopsis thaliana
tgactgagagaactctg

SEQ ID NO: 147906 - DNA, 17 bp, Arabidopsis thaliana
tgactgagagacgtttc

SEQ ID NO: 147907 - DNA, 17 bp, Arabidopsis thaliana
tgactgagagccccgtc

SEQ ID NO: 147908 - DNA, 17 bp, Arabidopsis thaliana
tgactgagatcaaggct

SEQ ID NO: 147909 - DNA, 17 bp, Arabidopsis thaliana
tgactgagattcagccc

SEQ ID NO: 147910 - DNA, 17 bp, Arabidopsis thaliana
tgactgagattggtctt

SEQ ID NO: 147911 - DNA, 17 bp, Arabidopsis thaliana
tgactgagcacaaagcg

SEQ ID NO: 147912 - DNA, 17 bp, Arabidopsis thaliana
tgactgagccaaggatg

SEQ ID NO: 147913 - DNA, 17 bp, Arabidopsis thaliana
tgactgagcccagttaa

SEQ ID NO: 147914 - DNA, 17 bp, Arabidopsis thaliana
tgactgagccgcgccaa

SEQ ID NO: 147915 - DNA, 17 bp, Arabidopsis thaliana
tgactgagccgtgtcaa

SEQ ID NO: 147916 - DNA, 17 bp, Arabidopsis thaliana
tgactgagcctttcatt

SEQ ID NO: 147917 - DNA, 17 bp, Arabidopsis thaliana
tgactgagctagttccg

SEQ ID NO: 147918 - DNA, 17 bp, Arabidopsis thaliana
tgactgagcttgactct

SEQ ID NO: 147919 - DNA, 17 bp, Arabidopsis thaliana
tgactgagctttcagga

SEQ ID NO: 147920 - DNA, 17 bp, Arabidopsis thaliana
tgactgaggctcctaga

SEQ ID NO: 147921 - DNA, 17 bp, Arabidopsis thaliana
tgactgagggctgggct

SEQ ID NO: 147922 - DNA, 17 bp, Arabidopsis thaliana
tgactgagggttcaaat

SEQ ID NO: 147923 - DNA, 17 bp, Arabidopsis thaliana
tgactgaggtagtcacc

SEQ ID NO: 147924 - DNA, 17 bp, Arabidopsis thaliana
tgactgagtagtcgaga

SEQ ID NO: 147925 - DNA, 17 bp, Arabidopsis thaliana
tgactgagtctcagtcg

SEQ ID NO: 147926 - DNA, 17 bp, Arabidopsis thaliana
tgactgagtgtgctagt

SEQ ID NO: 147927 - DNA, 17 bp, Arabidopsis thaliana
tgactgagtgtgtgaat

SEQ ID NO: 147928 - DNA, 17 bp, Arabidopsis thaliana
tgactgagttaaggaat

SEQ ID NO: 147929 - DNA, 17 bp, Arabidopsis thaliana
tgactgagttacggtat

SEQ ID NO: 147930 - DNA, 17 bp, Arabidopsis thaliana
tgactgagttatcgtgt

SEQ ID NO: 147931 - DNA, 17 bp, Arabidopsis thaliana
tgactgagttgacccat

SEQ ID NO: 147932 - DNA, 17 bp, Arabidopsis thaliana
tgactgagttgagttga

SEQ ID NO: 147933 - DNA, 17 bp, Arabidopsis thaliana
tgactgataaaccagcc

SEQ ID NO: 147934 - DNA, 17 bp, Arabidopsis thaliana
tgactgatacgattttg

SEQ ID NO: 147935 - DNA, 17 bp, Arabidopsis thaliana
tgactgatagtctaaac

SEQ ID NO: 147936 - DNA, 17 bp, Arabidopsis thaliana
tgactgatcagttgact

SEQ ID NO: 147937 - DNA, 17 bp, Arabidopsis thaliana
tgactgatcatgcctgt

SEQ ID NO: 147938 - DNA, 17 bp, Arabidopsis thaliana
tgactgatccgtcagcg

SEQ ID NO: 147939 - DNA, 17 bp, Arabidopsis thaliana
tgactgatcgtttgact

SEQ ID NO: 147940 - DNA, 17 bp, Arabidopsis thaliana
tgactgatctccctgct

SEQ ID NO: 147941 - DNA, 17 bp, Arabidopsis thaliana
tgactgatctctgcttg

SEQ ID NO: 147942 - DNA, 17 bp, Arabidopsis thaliana
tgactgatctgagactg

SEQ ID NO: 147943 - DNA, 17 bp, Arabidopsis thaliana
tgactgatctgctgtga

SEQ ID NO: 147944 - DNA, 17 bp, Arabidopsis thaliana
tgactgatcttagatgt

SEQ ID NO: 147945 - DNA, 17 bp, Arabidopsis thaliana
tgactgatctttctgat

SEQ ID NO: 147946 - DNA, 17 bp, Arabidopsis thaliana
tgactgatgtgattcgg

SEQ ID NO: 147947 - DNA, 17 bp, Arabidopsis thaliana
tgactgattcatgataa

SEQ ID NO: 147948 - DNA, 17 bp, Arabidopsis thaliana
tgactgattctctaacc

SEQ ID NO: 147949 - DNA, 17 bp, Arabidopsis thaliana
tgactgattgagccgcg

SEQ ID NO: 147950 - DNA, 17 bp, Arabidopsis thaliana
tgactgattgtattcca

SEQ ID NO: 147951 - DNA, 17 bp, Arabidopsis thaliana
tgactgatttgtttcat

SEQ ID NO: 147952 - DNA, 17 bp, Arabidopsis thaliana
tgactgattttccaagc

SEQ ID NO: 147953 - DNA, 17 bp, Arabidopsis thaliana
tgactgattttggcttg

SEQ ID NO: 147954 - DNA, 17 bp, Arabidopsis thaliana
tgactgcaaacgaaggg

SEQ ID NO: 147955 - DNA, 17 bp, Arabidopsis thaliana
tgactgcaagacccacc

SEQ ID NO: 147956 - DNA, 17 bp, Arabidopsis thaliana
tgactgcatatgcccca

SEQ ID NO: 147957 - DNA, 17 bp, Arabidopsis thaliana
tgactgcatgaactgct

SEQ ID NO: 147958 - DNA, 17 bp, Arabidopsis thaliana
tgactgcccaagctgct

SEQ ID NO: 147959 - DNA, 17 bp, Arabidopsis thaliana
tgactgcgagtgtggtt

SEQ ID NO: 147960 - DNA, 17 bp, Arabidopsis thaliana
tgactgcgctgtgggtt

SEQ ID NO: 147961 - DNA, 17 bp, Arabidopsis thaliana
tgactgcgttttgcgct

SEQ ID NO: 147962 - DNA, 17 bp, Arabidopsis thaliana
tgactgcgttttgcggt

SEQ ID NO: 147963 - DNA, 17 bp, Arabidopsis thaliana
tgactgcgttttgtggt

SEQ ID NO: 147964 - DNA, 17 bp, Arabidopsis thaliana
tgactgcttccatcggg

SEQ ID NO: 147965 - DNA, 17 bp, Arabidopsis thaliana
tgactgcttctaagcaa

SEQ ID NO: 147966 - DNA, 17 bp, Arabidopsis thaliana
tgactgcttgtagtcgg

SEQ ID NO: 147967 - DNA, 17 bp, Arabidopsis thaliana
tgactggaacttgatac

SEQ ID NO: 147968 - DNA, 17 bp, Arabidopsis thaliana
tgactggaatgccaagg

SEQ ID NO: 147969 - DNA, 17 bp, Arabidopsis thaliana
tgactggatcagattgc

SEQ ID NO: 147970 - DNA, 17 bp, Arabidopsis thaliana
tgactggattcatcaca

SEQ ID NO: 147971 - DNA, 17 bp, Arabidopsis thaliana
tgactggcagtcaggcc

SEQ ID NO: 147972 - DNA, 17 bp, Arabidopsis thaliana
tgactggcccgttaaag

SEQ ID NO: 147973 - DNA, 17 bp, Arabidopsis thaliana
tgactggcgggtccgtt

SEQ ID NO: 147974 - DNA, 17 bp, Arabidopsis thaliana
tgactggctccctgtat

SEQ ID NO: 147975 - DNA, 17 bp, Arabidopsis thaliana
tgactgggccaattcgg

SEQ ID NO: 147976 - DNA, 17 bp, Arabidopsis thaliana
tgactggtaaacatgcg

SEQ ID NO: 147977 - DNA, 17 bp, Arabidopsis thaliana
tgactggtaaaccagcg

SEQ ID NO: 147978 - DNA, 17 bp, Arabidopsis thaliana
tgactggtcgagtggct

SEQ ID NO: 147979 - DNA, 17 bp, Arabidopsis thaliana
tgactggtcgtgtgaat

SEQ ID NO: 147980 - DNA, 17 bp, Arabidopsis thaliana
tgactggtgtgatgatg

SEQ ID NO: 147981 - DNA, 17 bp, Arabidopsis thaliana
tgactggttaaccagcg

SEQ ID NO: 147982 - DNA, 17 bp, Arabidopsis thaliana
tgactggttgatcctgc

SEQ ID NO: 147983 - DNA, 17 bp, Arabidopsis thaliana
tgactggttgatcgtga

SEQ ID NO: 147984 - DNA, 17 bp, Arabidopsis thaliana
tgactggttttggaaaa

SEQ ID NO: 147985 - DNA, 17 bp, Arabidopsis thaliana
tgactgtaattcggcca

SEQ ID NO: 147986 - DNA, 17 bp, Arabidopsis thaliana
tgactgtaccatttcgg

SEQ ID NO: 147987 - DNA, 17 bp, Arabidopsis thaliana
tgactgtacgcctctaa

SEQ ID NO: 147988 - DNA, 17 bp, Arabidopsis thaliana
tgactgtagaaactttg

SEQ ID NO: 147989 - DNA, 17 bp, Arabidopsis thaliana
tgactgtagaatgacca

SEQ ID NO: 147990 - DNA, 17 bp, Arabidopsis thaliana
tgactgtcaagtcgtgg

SEQ ID NO: 147991 - DNA, 17 bp, Arabidopsis thaliana
tgactgtcagttgggaa

SEQ ID NO: 147992 - DNA, 17 bp, Arabidopsis thaliana
tgactgtcgctggtgac

SEQ ID NO: 147993 - DNA, 17 bp, Arabidopsis thaliana
tgactgtgatgccctta

SEQ ID NO: 147994 - DNA, 17 bp, Arabidopsis thaliana
tgactgtgccatttcgg

SEQ ID NO: 147995 - DNA, 17 bp, Arabidopsis thaliana
tgactgtgccatttctg

SEQ ID NO: 147996 - DNA, 17 bp, Arabidopsis thaliana
tgactgtgctgtagagc

SEQ ID NO: 147997 - DNA, 17 bp, Arabidopsis thaliana
tgactgtgctgtagatc

SEQ ID NO: 147998 - DNA, 17 bp, Arabidopsis thaliana
tgactgtgggacagttt

SEQ ID NO: 147999 - DNA, 17 bp, Arabidopsis thaliana
tgactgtgttgttcgtt

SEQ ID NO: 148000 - DNA, 17 bp, Arabidopsis thaliana
tgactgttcacggtaag

SEQ ID NO: 148001 - DNA, 17 bp, Arabidopsis thaliana
tgactgttcgagtggct

SEQ ID NO: 148002 - DNA, 17 bp, Arabidopsis thaliana
tgactgttctgtcgggt

SEQ ID NO: 148003 - DNA, 17 bp, Arabidopsis thaliana
tgactgttgagacccgg

SEQ ID NO: 148004 - DNA, 17 bp, Arabidopsis thaliana
tgactgttgcgtttcag

SEQ ID NO: 148005 - DNA, 17 bp, Arabidopsis thaliana
tgactgttgtccgcgct

SEQ ID NO: 148006 - DNA, 17 bp, Arabidopsis thaliana
tgactgtttggaccgct

SEQ ID NO: 148007 - DNA, 17 bp, Arabidopsis thaliana
tgactgttttccttgct

SEQ ID NO: 148008 - DNA, 17 bp, Arabidopsis thaliana
tgacttaaactgaccag

SEQ ID NO: 148009 - DNA, 17 bp, Arabidopsis thaliana
tgacttaatccacatcg

SEQ ID NO: 148010 - DNA, 17 bp, Arabidopsis thaliana
tgacttacattgaccag

SEQ ID NO: 148011 - DNA, 17 bp, Arabidopsis thaliana
tgacttaccgtcgttta

SEQ ID NO: 148012 - DNA, 17 bp, Arabidopsis thaliana
tgacttacgccttacca

SEQ ID NO: 148013 - DNA, 17 bp, Arabidopsis thaliana
tgacttacgccttacct

SEQ ID NO: 148014 - DNA, 17 bp, Arabidopsis thaliana
tgacttacggtatgttg

SEQ ID NO: 148015 - DNA, 17 bp, Arabidopsis thaliana
tgacttacttgtcgacc

SEQ ID NO: 148016 - DNA, 17 bp, Arabidopsis thaliana
tgacttagaaatcgtgt

SEQ ID NO: 148017 - DNA, 17 bp, Arabidopsis thaliana
tgacttagacggcgaac

SEQ ID NO: 148018 - DNA, 17 bp, Arabidopsis thaliana
tgacttagaggcgttca

SEQ ID NO: 148019 - DNA, 17 bp, Arabidopsis thaliana
tgacttagcaacttctg

SEQ ID NO: 148020 - DNA, 17 bp, Arabidopsis thaliana
tgacttaggtgttgatg

SEQ ID NO: 148021 - DNA, 17 bp, Arabidopsis thaliana
tgacttagtcagacgat

SEQ ID NO: 148022 - DNA, 17 bp, Arabidopsis thaliana
tgacttagtcagacggt

SEQ ID NO: 148023 - DNA, 17 bp, Arabidopsis thaliana
tgacttagtctttgctt

SEQ ID NO: 148024 - DNA, 17 bp, Arabidopsis thaliana
tgacttatcggctgcct

SEQ ID NO: 148025 - DNA, 17 bp, Arabidopsis thaliana
tgacttatggtccaacc

SEQ ID NO: 148026 - DNA, 17 bp, Arabidopsis thaliana
tgacttattcacaatgg

SEQ ID NO: 148027 - DNA, 17 bp, Arabidopsis thaliana
tgacttatttacaatgg

SEQ ID NO: 148028 - DNA, 17 bp, Arabidopsis thaliana
tgacttcaccatgttct

SEQ ID NO: 148029 - DNA, 17 bp, Arabidopsis thaliana
tgacttcaccgctgttg

SEQ ID NO: 148030 - DNA, 17 bp, Arabidopsis thaliana
tgacttcacggccaacc

SEQ ID NO: 148031 - DNA, 17 bp, Arabidopsis thaliana
tgacttcagggctggct

SEQ ID NO: 148032 - DNA, 17 bp, Arabidopsis thaliana
tgacttcatgggtccgt

SEQ ID NO: 148033 - DNA, 17 bp, Arabidopsis thaliana
tgacttccaagctatta

SEQ ID NO: 148034 - DNA, 17 bp, Arabidopsis thaliana
tgacttccagcctcgcg

SEQ ID NO: 148035 - DNA, 17 bp, Arabidopsis thaliana
tgacttccgatgtggga

SEQ ID NO: 148036 - DNA, 17 bp, Arabidopsis thaliana
tgacttcgactcacatt

SEQ ID NO: 148037 - DNA, 17 bp, Arabidopsis thaliana
tgacttcgaggatgtta

SEQ ID NO: 148038 - DNA, 17 bp, Arabidopsis thaliana
tgacttcgcacgtgcga

SEQ ID NO: 148039 - DNA, 17 bp, Arabidopsis thaliana
tgacttcggatttagcg

SEQ ID NO: 148040 - DNA, 17 bp, Arabidopsis thaliana
tgacttcggctccaagg

SEQ ID NO: 148041 - DNA, 17 bp, Arabidopsis thaliana
tgacttcggtgatgagg

SEQ ID NO: 148042 - DNA, 17 bp, Arabidopsis thaliana
tgacttctaagtttcgc

SEQ ID NO: 148043 - DNA, 17 bp, Arabidopsis thaliana
tgacttctccttgacga

SEQ ID NO: 148044 - DNA, 17 bp, Arabidopsis thaliana
tgacttctgaactcagg

SEQ ID NO: 148045 - DNA, 17 bp, Arabidopsis thaliana
tgacttctgggttttct

SEQ ID NO: 148046 - DNA, 17 bp, Arabidopsis thaliana
tgacttctgtgtaccac

SEQ ID NO: 148047 - DNA, 17 bp, Arabidopsis thaliana
tgacttctgtttcgctt

SEQ ID NO: 148048 - DNA, 17 bp, Arabidopsis thaliana
tgacttcttcctcgatg

SEQ ID NO: 148049 - DNA, 17 bp, Arabidopsis thaliana
tgacttcttggcatcgt

SEQ ID NO: 148050 - DNA, 17 bp, Arabidopsis thaliana
tgacttcttttctgact

SEQ ID NO: 148051 - DNA, 17 bp, Arabidopsis thaliana
tgacttgaaacttcgcg

SEQ ID NO: 148052 - DNA, 17 bp, Arabidopsis thaliana
tgacttgacacgtgaca

SEQ ID NO: 148053 - DNA, 17 bp, Arabidopsis thaliana
tgacttgacacgtggca

SEQ ID NO: 148054 - DNA, 17 bp, Arabidopsis thaliana
tgacttgacacgtggta

SEQ ID NO: 148055 - DNA, 17 bp, Arabidopsis thaliana
tgacttgacacgttgca

SEQ ID NO: 148056 - DNA, 17 bp, Arabidopsis thaliana
tgacttgacactgtgcc

SEQ ID NO: 148057 - DNA, 17 bp, Arabidopsis thaliana
tgacttgaccatttagg

SEQ ID NO: 148058 - DNA, 17 bp, Arabidopsis thaliana
tgacttgaccattttgg

SEQ ID NO: 148059 - DNA, 17 bp, Arabidopsis thaliana
tgacttgacgacgcggt

SEQ ID NO: 148060 - DNA, 17 bp, Arabidopsis thaliana
tgacttgacgacgtgcc

SEQ ID NO: 148061 - DNA, 17 bp, Arabidopsis thaliana
tgacttgactctagtcc

SEQ ID NO: 148062 - DNA, 17 bp, Arabidopsis thaliana
tgacttgagaggtgtag

SEQ ID NO: 148063 - DNA, 17 bp, Arabidopsis thaliana
tgacttgagaggtgtat

SEQ ID NO: 148064 - DNA, 17 bp, Arabidopsis thaliana
tgacttgagccatgaat

SEQ ID NO: 148065 - DNA, 17 bp, Arabidopsis thaliana
tgacttgagttgaccgg

SEQ ID NO: 148066 - DNA, 17 bp, Arabidopsis thaliana
tgacttgatgtgatgtg

SEQ ID NO: 148067 - DNA, 17 bp, Arabidopsis thaliana
tgacttgcaagtccttg

SEQ ID NO: 148068 - DNA, 17 bp, Arabidopsis thaliana
tgacttgccgtaaaagt

SEQ ID NO: 148069 - DNA, 17 bp, Arabidopsis thaliana
tgacttgccgtttcggg

SEQ ID NO: 148070 - DNA, 17 bp, Arabidopsis thaliana
tgacttgcggatgttag

SEQ ID NO: 148071 - DNA, 17 bp, Arabidopsis thaliana
tgacttgctccgtgcta

SEQ ID NO: 148072 - DNA, 17 bp, Arabidopsis thaliana
tgacttgcttcagccac

SEQ ID NO: 148073 - DNA, 17 bp, Arabidopsis thaliana
tgacttgctttcagcca

SEQ ID NO: 148074 - DNA, 17 bp, Arabidopsis thaliana
tgacttggaggcgttca

SEQ ID NO: 148075 - DNA, 17 bp, Arabidopsis thaliana
tgacttggccattttga

SEQ ID NO: 148076 - DNA, 17 bp, Arabidopsis thaliana
tgacttggccctggcgc

SEQ ID NO: 148077 - DNA, 17 bp, Arabidopsis thaliana
tgacttggccgtacttg

SEQ ID NO: 148078 - DNA, 17 bp, Arabidopsis thaliana
tgacttggctcgggcgc

SEQ ID NO: 148079 - DNA, 17 bp, Arabidopsis thaliana
tgacttggctgaagcct

SEQ ID NO: 148080 - DNA, 17 bp, Arabidopsis thaliana
tgacttgggtatagggg

SEQ ID NO: 148081 - DNA, 17 bp, Arabidopsis thaliana
tgacttggtcattttgg

SEQ ID NO: 148082 - DNA, 17 bp, Arabidopsis thaliana
tgacttggtccgcagcg

SEQ ID NO: 148083 - DNA, 17 bp, Arabidopsis thaliana
tgacttggtgaaattca

SEQ ID NO: 148084 - DNA, 17 bp, Arabidopsis thaliana
tgacttggtgcaggtcg

SEQ ID NO: 148085 - DNA, 17 bp, Arabidopsis thaliana
tgacttggtgcaggtga

SEQ ID NO: 148086 - DNA, 17 bp, Arabidopsis thaliana
tgacttgtcgaccccaa

SEQ ID NO: 148087 - DNA, 17 bp, Arabidopsis thaliana
tgacttgtcttgacgag

SEQ ID NO: 148088 - DNA, 17 bp, Arabidopsis thaliana
tgacttgtgcatgctct

SEQ ID NO: 148089 - DNA, 17 bp, Arabidopsis thaliana
tgactttaacctccgct

SEQ ID NO: 148090 - DNA, 17 bp, Arabidopsis thaliana
tgactttactgagaagg

SEQ ID NO: 148091 - DNA, 17 bp, Arabidopsis thaliana
tgactttagaccgtgag

SEQ ID NO: 148092 - DNA, 17 bp, Arabidopsis thaliana
tgactttagggtttgtt

SEQ ID NO: 148093 - DNA, 17 bp, Arabidopsis thaliana
tgactttatccttctgt

SEQ ID NO: 148094 - DNA, 17 bp, Arabidopsis thaliana
tgactttcaagaacggg

SEQ ID NO: 148095 - DNA, 17 bp, Arabidopsis thaliana
tgactttccaggaagtg

SEQ ID NO: 148096 - DNA, 17 bp, Arabidopsis thaliana
tgactttccgtgtggtg

SEQ ID NO: 148097 - DNA, 17 bp, Arabidopsis thaliana
tgactttcctcttgggt

SEQ ID NO: 148098 - DNA, 17 bp, Arabidopsis thaliana
tgactttcgatcttcag

SEQ ID NO: 148099 - DNA, 17 bp, Arabidopsis thaliana
tgactttcgccttacca

SEQ ID NO: 148100 - DNA, 17 bp, Arabidopsis thaliana
tgactttgaaccattgc

SEQ ID NO: 148101 - DNA, 17 bp, Arabidopsis thaliana
tgactttgagctcctgc

SEQ ID NO: 148102 - DNA, 17 bp, Arabidopsis thaliana
tgactttgatccttgcg

SEQ ID NO: 148103 - DNA, 17 bp, Arabidopsis thaliana
tgactttgccatttcga

SEQ ID NO: 148104 - DNA, 17 bp, Arabidopsis thaliana
tgactttgccattttgg

SEQ ID NO: 148105 - DNA, 17 bp, Arabidopsis thaliana
tgactttgctgccactt

SEQ ID NO: 148106 - DNA, 17 bp, Arabidopsis thaliana
tgactttgctggagttc

SEQ ID NO: 148107 - DNA, 17 bp, Arabidopsis thaliana
tgactttggacgtcttc

SEQ ID NO: 148108 - DNA, 17 bp, Arabidopsis thaliana
tgactttggctcatact

SEQ ID NO: 148109 - DNA, 17 bp, Arabidopsis thaliana
tgactttggctccaagg

SEQ ID NO: 148110 - DNA, 17 bp, Arabidopsis thaliana
tgactttgggttggcgg

SEQ ID NO: 148111 - DNA, 17 bp, Arabidopsis thaliana
tgactttgtcgctaaga

SEQ ID NO: 148112 - DNA, 17 bp, Arabidopsis thaliana
tgactttgtgggtgatt

SEQ ID NO: 148113 - DNA, 17 bp, Arabidopsis thaliana
tgactttgtggttgcag

SEQ ID NO: 148114 - DNA, 17 bp, Arabidopsis thaliana
tgactttgtgtaaatcc

SEQ ID NO: 148115 - DNA, 17 bp, Arabidopsis thaliana
tgactttgttgtattcg

SEQ ID NO: 148116 - DNA, 17 bp, Arabidopsis thaliana
tgacttttacggcgttc

SEQ ID NO: 148117 - DNA, 17 bp, Arabidopsis thaliana
tgacttttccaggtttc

SEQ ID NO: 148118 - DNA, 17 bp, Arabidopsis thaliana
tgacttttccgggtttc

SEQ ID NO: 148119 - DNA, 17 bp, Arabidopsis thaliana
tgacttttcctaaactt

SEQ ID NO: 148120 - DNA, 17 bp, Arabidopsis thaliana
tgacttttcggttgata

SEQ ID NO: 148121 - DNA, 17 bp, Arabidopsis thaliana
tgacttttgaagacttt

SEQ ID NO: 148122 - DNA, 17 bp, Arabidopsis thaliana
tgacttttggcgatttg

SEQ ID NO: 148123 - DNA, 17 bp, Arabidopsis thaliana
tgacttttgttgacggg

SEQ ID NO: 148124 - DNA, 17 bp, Arabidopsis thaliana
tgactttttgggtctga

SEQ ID NO: 148125 - DNA, 17 bp, Arabidopsis thaliana
tgactttttggtgtcag

SEQ ID NO: 148126 - DNA, 17 bp, Arabidopsis thaliana
tgactttttgtcgaccc

SEQ ID NO: 148127 - DNA, 17 bp, Arabidopsis thaliana
tgactttttgtcgactc

SEQ ID NO: 148128 - DNA, 17 bp, Arabidopsis thaliana
tgactttttttcgcgtg

SEQ ID NO: 148129 - DNA, 17 bp, Arabidopsis thaliana
tgagaaaacctagaact

SEQ ID NO: 148130 - DNA, 17 bp, Arabidopsis thaliana
tgagaaaactttggctt

SEQ ID NO: 148131 - DNA, 17 bp, Arabidopsis thaliana
tgagaaaccatctccgt

SEQ ID NO: 148132 - DNA, 17 bp, Arabidopsis thaliana
tgagaaaccattacgtg

SEQ ID NO: 148133 - DNA, 17 bp, Arabidopsis thaliana
tgagaaacctccctccg

SEQ ID NO: 148134 - DNA, 17 bp, Arabidopsis thaliana
tgagaaacggctaccac

SEQ ID NO: 148135 - DNA, 17 bp, Arabidopsis thaliana
tgagaaactcgagtggt

SEQ ID NO: 148136 - DNA, 17 bp, Arabidopsis thaliana
tgagaaactgagcctcg

SEQ ID NO: 148137 - DNA, 17 bp, Arabidopsis thaliana
tgagaaacttaccaggt

SEQ ID NO: 148138 - DNA, 17 bp, Arabidopsis thaliana
tgagaaactttctacct

SEQ ID NO: 148139 - DNA, 17 bp, Arabidopsis thaliana
tgagaaactttgtgggt

SEQ ID NO: 148140 - DNA, 17 bp, Arabidopsis thaliana
tgagaaagacacgtggg

SEQ ID NO: 148141 - DNA, 17 bp, Arabidopsis thaliana
tgagaaagatcaaacat

SEQ ID NO: 148142 - DNA, 17 bp, Arabidopsis thaliana
tgagaaaggaaatcttc

SEQ ID NO: 148143 - DNA, 17 bp, Arabidopsis thaliana
tgagaaaggagcaggtc

SEQ ID NO: 148144 - DNA, 17 bp, Arabidopsis thaliana
tgagaaagtcagccatt

SEQ ID NO: 148145 - DNA, 17 bp, Arabidopsis thaliana
tgagaaagtcggccatt

SEQ ID NO: 148146 - DNA, 17 bp, Arabidopsis thaliana
tgagaaagttgctgcga

SEQ ID NO: 148147 - DNA, 17 bp, Arabidopsis thaliana
tgagaaatcctcacata

SEQ ID NO: 148148 - DNA, 17 bp, Arabidopsis thaliana
tgagaaatctctggagg

SEQ ID NO: 148149 - DNA, 17 bp, Arabidopsis thaliana
tgagaaatgagggctag

SEQ ID NO: 148150 - DNA, 17 bp, Arabidopsis thaliana
tgagaacaaagtggcga

SEQ ID NO: 148151 - DNA, 17 bp, Arabidopsis thaliana
tgagaacaagaaacggc

SEQ ID NO: 148152 - DNA, 17 bp, Arabidopsis thaliana
tgagaacatatagtttt

SEQ ID NO: 148153 - DNA, 17 bp, Arabidopsis thaliana
tgagaaccaagcggcgt

SEQ ID NO: 148154 - DNA, 17 bp, Arabidopsis thaliana
tgagaaccgccataagc

SEQ ID NO: 148155 - DNA, 17 bp, Arabidopsis thaliana
tgagaaccgtgcggtta

SEQ ID NO: 148156 - DNA, 17 bp, Arabidopsis thaliana
tgagaaccttatggagt

SEQ ID NO: 148157 - DNA, 17 bp, Arabidopsis thaliana
tgagaaccttgggatgg

SEQ ID NO: 148158 - DNA, 17 bp, Arabidopsis thaliana
tgagaactggttttcac

SEQ ID NO: 148159 - DNA, 17 bp, Arabidopsis thaliana
tgagaacttgccaccta

SEQ ID NO: 148160 - DNA, 17 bp, Arabidopsis thaliana
tgagaagacagttccca

SEQ ID NO: 148161 - DNA, 17 bp, Arabidopsis thaliana
tgagaagacccacagtg

SEQ ID NO: 148162 - DNA, 17 bp, Arabidopsis thaliana
tgagaagagagcagcgg

SEQ ID NO: 148163 - DNA, 17 bp, Arabidopsis thaliana
tgagaagattatgggtt

SEQ ID NO: 148164 - DNA, 17 bp, Arabidopsis thaliana
tgagaagccaagatttc

SEQ ID NO: 148165 - DNA, 17 bp, Arabidopsis thaliana
tgagaagccgaagtgat

SEQ ID NO: 148166 - DNA, 17 bp, Arabidopsis thaliana
tgagaagcttactgtga

SEQ ID NO: 148167 - DNA, 17 bp, Arabidopsis thaliana
tgagaaggaaggactca

SEQ ID NO: 148168 - DNA, 17 bp, Arabidopsis thaliana
tgagaagggccaaccat

SEQ ID NO: 148169 - DNA, 17 bp, Arabidopsis thaliana
tgagaaggtagtccggt

SEQ ID NO: 148170 - DNA, 17 bp, Arabidopsis thaliana
tgagaaggtccgccatt

SEQ ID NO: 148171 - DNA, 17 bp, Arabidopsis thaliana
tgagaaggtcggccatt

SEQ ID NO: 148172 - DNA, 17 bp, Arabidopsis thaliana
tgagaaggtgcggctgg

SEQ ID NO: 148173 - DNA, 17 bp, Arabidopsis thaliana
tgagaagtccctgaggc

SEQ ID NO: 148174 - DNA, 17 bp, Arabidopsis thaliana
tgagaagtccttgaggc

SEQ ID NO: 148175 - DNA, 17 bp, Arabidopsis thaliana
tgagaagtctcctcacc

SEQ ID NO: 148176 - DNA, 17 bp, Arabidopsis thaliana
tgagaagtgcaatattc

SEQ ID NO: 148177 - DNA, 17 bp, Arabidopsis thaliana
tgagaagtgttcggatc

SEQ ID NO: 148178 - DNA, 17 bp, Arabidopsis thaliana
tgagaagttgactccac

SEQ ID NO: 148179 - DNA, 17 bp, Arabidopsis thaliana
tgagaagtttgcaggtg

SEQ ID NO: 148180 - DNA, 17 bp, Arabidopsis thaliana
tgagaagttttgcctcg

SEQ ID NO: 148181 - DNA, 17 bp, Arabidopsis thaliana
tgagaagttttttcgga

SEQ ID NO: 148182 - DNA, 17 bp, Arabidopsis thaliana
tgagaataacaagaccg

SEQ ID NO: 148183 - DNA, 17 bp, Arabidopsis thaliana
tgagaataagtctgcca

SEQ ID NO: 148184 - DNA, 17 bp, Arabidopsis thaliana
tgagaatacaggccgtt

SEQ ID NO: 148185 - DNA, 17 bp, Arabidopsis thaliana
tgagaatagagagtgag

SEQ ID NO: 148186 - DNA, 17 bp, Arabidopsis thaliana
tgagaatcaggttgttg

SEQ ID NO: 148187 - DNA, 17 bp, Arabidopsis thaliana
tgagaatcgtccctgtt

SEQ ID NO: 148188 - DNA, 17 bp, Arabidopsis thaliana
tgagaatcgttgtttcg

SEQ ID NO: 148189 - DNA, 17 bp, Arabidopsis thaliana
tgagaatcgtttctcct

SEQ ID NO: 148190 - DNA, 17 bp, Arabidopsis thaliana
tgagaatcgtttctgcc

SEQ ID NO: 148191 - DNA, 17 bp, Arabidopsis thaliana
tgagaatctaccaaagc

SEQ ID NO: 148192 - DNA, 17 bp, Arabidopsis thaliana
tgagaatctttagacca

SEQ ID NO: 148193 - DNA, 17 bp, Arabidopsis thaliana
tgagaatgatgtgcatg

SEQ ID NO: 148194 - DNA, 17 bp, Arabidopsis thaliana
tgagaatgcaaatcctt

SEQ ID NO: 148195 - DNA, 17 bp, Arabidopsis thaliana
tgagaatgccctttgca

SEQ ID NO: 148196 - DNA, 17 bp, Arabidopsis thaliana
tgagaatgggcttcgct

SEQ ID NO: 148197 - DNA, 17 bp, Arabidopsis thaliana
tgagaatgtcggctatt

SEQ ID NO: 148198 - DNA, 17 bp, Arabidopsis thaliana
tgagaatgtgaatgatc

SEQ ID NO: 148199 - DNA, 17 bp, Arabidopsis thaliana
tgagaatgtggaatgtg

SEQ ID NO: 148200 - DNA, 17 bp, Arabidopsis thaliana
tgagaattacaggcttc

SEQ ID NO: 148201 - DNA, 17 bp, Arabidopsis thaliana
tgagaattacttgttca

SEQ ID NO: 148202 - DNA, 17 bp, Arabidopsis thaliana
tgagaattcgcaaagtt

SEQ ID NO: 148203 - DNA, 17 bp, Arabidopsis thaliana
tgagaattcgtgggact

SEQ ID NO: 148204 - DNA, 17 bp, Arabidopsis thaliana
tgagaattgtctccgcg

SEQ ID NO: 148205 - DNA, 17 bp, Arabidopsis thaliana
tgagaattgtttggcca

SEQ ID NO: 148206 - DNA, 17 bp, Arabidopsis thaliana
tgagacaaggcttgttg

SEQ ID NO: 148207 - DNA, 17 bp, Arabidopsis thaliana
tgagacaaggtaatgcc

SEQ ID NO: 148208 - DNA, 17 bp, Arabidopsis thaliana
tgagacaaggtcctaac

SEQ ID NO: 148209 - DNA, 17 bp, Arabidopsis thaliana
tgagacaatccgtttgc

SEQ ID NO: 148210 - DNA, 17 bp, Arabidopsis thaliana
tgagacaatcgctggcg

SEQ ID NO: 148211 - DNA, 17 bp, Arabidopsis thaliana
tgagacaatggtgaagc

SEQ ID NO: 148212 - DNA, 17 bp, Arabidopsis thaliana
tgagacacaatttggat

SEQ ID NO: 148213 - DNA, 17 bp, Arabidopsis thaliana
tgagacacagcgtattc

SEQ ID NO: 148214 - DNA, 17 bp, Arabidopsis thaliana
tgagacacagtacctga

SEQ ID NO: 148215 - DNA, 17 bp, Arabidopsis thaliana
tgagacacggcccagac

SEQ ID NO: 148216 - DNA, 17 bp, Arabidopsis thaliana
tgagacacggcccagcc

SEQ ID NO: 148217 - DNA, 17 bp, Arabidopsis thaliana
tgagacacttgaggttg

SEQ ID NO: 148218 - DNA, 17 bp, Arabidopsis thaliana
tgagacagccttgatct

SEQ ID NO: 148219 - DNA, 17 bp, Arabidopsis thaliana
tgagacagctgaacgtc

SEQ ID NO: 148220 - DNA, 17 bp, Arabidopsis thaliana
tgagacagggtgagcag

SEQ ID NO: 148221 - DNA, 17 bp, Arabidopsis thaliana
tgagacagtctcagctt

SEQ ID NO: 148222 - DNA, 17 bp, Arabidopsis thaliana
tgagacagttcggtcca

SEQ ID NO: 148223 - DNA, 17 bp, Arabidopsis thaliana
tgagacagttggcgacg

SEQ ID NO: 148224 - DNA, 17 bp, Arabidopsis thaliana
tgagacagtttgccgag

SEQ ID NO: 148225 - DNA, 17 bp, Arabidopsis thaliana
tgagacatcaaatttgg

SEQ ID NO: 148226 - DNA, 17 bp, Arabidopsis thaliana
tgagacatgagcctctt

SEQ ID NO: 148227 - DNA, 17 bp, Arabidopsis thaliana
tgagacatgctcgagta

SEQ ID NO: 148228 - DNA, 17 bp, Arabidopsis thaliana
tgagacatgtctccgtt

SEQ ID NO: 148229 - DNA, 17 bp, Arabidopsis thaliana
tgagacatgtgtaagtt

SEQ ID NO: 148230 - DNA, 17 bp, Arabidopsis thaliana
tgagacatgttcctccg

SEQ ID NO: 148231 - DNA, 17 bp, Arabidopsis thaliana
tgagacatgttcctctg

SEQ ID NO: 148232 - DNA, 17 bp, Arabidopsis thaliana
tgagacattgtcaggtg

SEQ ID NO: 148233 - DNA, 17 bp, Arabidopsis thaliana
tgagacattttgggaaa

SEQ ID NO: 148234 - DNA, 17 bp, Arabidopsis thaliana
tgagaccaaccactcga

SEQ ID NO: 148235 - DNA, 17 bp, Arabidopsis thaliana
tgagaccaagtccatca

SEQ ID NO: 148236 - DNA, 17 bp, Arabidopsis thaliana
tgagaccaatgtggtgt

SEQ ID NO: 148237 - DNA, 17 bp, Arabidopsis thaliana
tgagaccagcgacagca

SEQ ID NO: 148238 - DNA, 17 bp, Arabidopsis thaliana
tgagaccaggattcatt

SEQ ID NO: 148239 - DNA, 17 bp, Arabidopsis thaliana
tgagaccaggctacatt

SEQ ID NO: 148240 - DNA, 17 bp, Arabidopsis thaliana
tgagaccaggcttcatt

SEQ ID NO: 148241 - DNA, 17 bp, Arabidopsis thaliana
tgagaccagtgccgtgc

SEQ ID NO: 148242 - DNA, 17 bp, Arabidopsis thaliana
tgagaccagttctgtag

SEQ ID NO: 148243 - DNA, 17 bp, Arabidopsis thaliana
tgagaccatctacatcg

SEQ ID NO: 148244 - DNA, 17 bp, Arabidopsis thaliana
tgagaccatctccattg

SEQ ID NO: 148245 - DNA, 17 bp, Arabidopsis thaliana
tgagaccattgtgcgtg

SEQ ID NO: 148246 - DNA, 17 bp, Arabidopsis thaliana
tgagacccaacgctcag

SEQ ID NO: 148247 - DNA, 17 bp, Arabidopsis thaliana
tgagacccacggcgaat

SEQ ID NO: 148248 - DNA, 17 bp, Arabidopsis thaliana
tgagacccccgtcgtgc

SEQ ID NO: 148249 - DNA, 17 bp, Arabidopsis thaliana
tgagaccgaaactgagg

SEQ ID NO: 148250 - DNA, 17 bp, Arabidopsis thaliana
tgagaccgaacagggcg

SEQ ID NO: 148251 - DNA, 17 bp, Arabidopsis thaliana
tgagaccgagactgacc

SEQ ID NO: 148252 - DNA, 17 bp, Arabidopsis thaliana
tgagaccgctagttcta

SEQ ID NO: 148253 - DNA, 17 bp, Arabidopsis thaliana
tgagacctcagtctcct

SEQ ID NO: 148254 - DNA, 17 bp, Arabidopsis thaliana
tgagacctccaacaatg

SEQ ID NO: 148255 - DNA, 17 bp, Arabidopsis thaliana
tgagacctggtgaagat

SEQ ID NO: 148256 - DNA, 17 bp, Arabidopsis thaliana
tgagacgaataaggatg

SEQ ID NO: 148257 - DNA, 17 bp, Arabidopsis thaliana
tgagacgacttctcatc

SEQ ID NO: 148258 - DNA, 17 bp, Arabidopsis thaliana
tgagacgagagagttgt

SEQ ID NO: 148259 - DNA, 17 bp, Arabidopsis thaliana
tgagacgagcaccaagc

SEQ ID NO: 148260 - DNA, 17 bp, Arabidopsis thaliana
tgagacgagccgtttca

SEQ ID NO: 148261 - DNA, 17 bp, Arabidopsis thaliana
tgagacgagcggaacca

SEQ ID NO: 148262 - DNA, 17 bp, Arabidopsis thaliana
tgagacgagcggagcca

SEQ ID NO: 148263 - DNA, 17 bp, Arabidopsis thaliana
tgagacgaggcgtgggt

SEQ ID NO: 148264 - DNA, 17 bp, Arabidopsis thaliana
tgagacgaggctaataa

SEQ ID NO: 148265 - DNA, 17 bp, Arabidopsis thaliana
tgagacgagggagtgcg

SEQ ID NO: 148266 - DNA, 17 bp, Arabidopsis thaliana
tgagacgagggagtgct

SEQ ID NO: 148267 - DNA, 17 bp, Arabidopsis thaliana
tgagacgagggagtgtt

SEQ ID NO: 148268 - DNA, 17 bp, Arabidopsis thaliana
tgagacgagtttatttg

SEQ ID NO: 148269 - DNA, 17 bp, Arabidopsis thaliana
tgagacgatggcggtgg

SEQ ID NO: 148270 - DNA, 17 bp, Arabidopsis thaliana
tgagacgattttgaggt

SEQ ID NO: 148271 - DNA, 17 bp, Arabidopsis thaliana
tgagacgcatagccatt

SEQ ID NO: 148272 - DNA, 17 bp, Arabidopsis thaliana
tgagacgcgtcaatggg

SEQ ID NO: 148273 - DNA, 17 bp, Arabidopsis thaliana
tgagacgctataactca

SEQ ID NO: 148274 - DNA, 17 bp, Arabidopsis thaliana
tgagacgctctttgatc

SEQ ID NO: 148275 - DNA, 17 bp, Arabidopsis thaliana
tgagacggactgggaac

SEQ ID NO: 148276 - DNA, 17 bp, Arabidopsis thaliana
tgagacggcctgagtac

SEQ ID NO: 148277 - DNA, 17 bp, Arabidopsis thaliana
tgagacggctagtgtgg

SEQ ID NO: 148278 - DNA, 17 bp, Arabidopsis thaliana
tgagacgggaagtggtg

SEQ ID NO: 148279 - DNA, 17 bp, Arabidopsis thaliana
tgagacggtgggggata

SEQ ID NO: 148280 - DNA, 17 bp, Arabidopsis thaliana
tgagacgtaaaccaaaa

SEQ ID NO: 148281 - DNA, 17 bp, Arabidopsis thaliana
tgagacgtctgcctggg

SEQ ID NO: 148282 - DNA, 17 bp, Arabidopsis thaliana
tgagacgtgccggagtg

SEQ ID NO: 148283 - DNA, 17 bp, Arabidopsis thaliana
tgagactaaagccaagg

SEQ ID NO: 148284 - DNA, 17 bp, Arabidopsis thaliana
tgagactaaggggaacc

SEQ ID NO: 148285 - DNA, 17 bp, Arabidopsis thaliana
tgagactacccgtggat

SEQ ID NO: 148286 - DNA, 17 bp, Arabidopsis thaliana
tgagactacccgtgggt

SEQ ID NO: 148287 - DNA, 17 bp, Arabidopsis thaliana
tgagactatccatattg

SEQ ID NO: 148288 - DNA, 17 bp, Arabidopsis thaliana
tgagactcacttcctat

SEQ ID NO: 148289 - DNA, 17 bp, Arabidopsis thaliana
tgagactcaggtaaatt

SEQ ID NO: 148290 - DNA, 17 bp, Arabidopsis thaliana
tgagactcattgccctg

SEQ ID NO: 148291 - DNA, 17 bp, Arabidopsis thaliana
tgagactcccggcaacg

SEQ ID NO: 148292 - DNA, 17 bp, Arabidopsis thaliana
tgagactcgaactgggc

SEQ ID NO: 148293 - DNA, 17 bp, Arabidopsis thaliana
tgagactcgggctcata

SEQ ID NO: 148294 - DNA, 17 bp, Arabidopsis thaliana
tgagactctcggcaacg

SEQ ID NO: 148295 - DNA, 17 bp, Arabidopsis thaliana
tgagactcttacggacg

SEQ ID NO: 148296 - DNA, 17 bp, Arabidopsis thaliana
tgagactcttcaatggc

SEQ ID NO: 148297 - DNA, 17 bp, Arabidopsis thaliana
tgagactgaagggagct

SEQ ID NO: 148298 - DNA, 17 bp, Arabidopsis thaliana
tgagactgaccgtgatc

SEQ ID NO: 148299 - DNA, 17 bp, Arabidopsis thaliana
tgagactgattgggttt

SEQ ID NO: 148300 - DNA, 17 bp, Arabidopsis thaliana
tgagactgcgttttgcg

SEQ ID NO: 148301 - DNA, 17 bp, Arabidopsis thaliana
tgagactggatagtgca

SEQ ID NO: 148302 - DNA, 17 bp, Arabidopsis thaliana
tgagactggtaaaccag

SEQ ID NO: 148303 - DNA, 17 bp, Arabidopsis thaliana
tgagactggtgtttcga

SEQ ID NO: 148304 - DNA, 17 bp, Arabidopsis thaliana
tgagactgtcacgctgt

SEQ ID NO: 148305 - DNA, 17 bp, Arabidopsis thaliana
tgagactgtcccattgg

SEQ ID NO: 148306 - DNA, 17 bp, Arabidopsis thaliana
tgagactgtccgttttg

SEQ ID NO: 148307 - DNA, 17 bp, Arabidopsis thaliana
tgagactgttgctaagg

SEQ ID NO: 148308 - DNA, 17 bp, Arabidopsis thaliana
tgagactgtttcaacca

SEQ ID NO: 148309 - DNA, 17 bp, Arabidopsis thaliana
tgagacttatgccacat

SEQ ID NO: 148310 - DNA, 17 bp, Arabidopsis thaliana
tgagacttatttacaag

SEQ ID NO: 148311 - DNA, 17 bp, Arabidopsis thaliana
tgagacttatttacaat

SEQ ID NO: 148312 - DNA, 17 bp, Arabidopsis thaliana
tgagacttatttacagt

SEQ ID NO: 148313 - DNA, 17 bp, Arabidopsis thaliana
tgagacttatttacatg

SEQ ID NO: 148314 - DNA, 17 bp, Arabidopsis thaliana
tgagacttatttaccat

SEQ ID NO: 148315 - DNA, 17 bp, Arabidopsis thaliana
tgagacttatttacgat

SEQ ID NO: 148316 - DNA, 17 bp, Arabidopsis thaliana
tgagacttatttactta

SEQ ID NO: 148317 - DNA, 17 bp, Arabidopsis thaliana
tgagacttcagacttgt

SEQ ID NO: 148318 - DNA, 17 bp, Arabidopsis thaliana
tgagacttcatcgaccg

SEQ ID NO: 148319 - DNA, 17 bp, Arabidopsis thaliana
tgagacttcctctgggg

SEQ ID NO: 148320 - DNA, 17 bp, Arabidopsis thaliana
tgagacttctccttatt

SEQ ID NO: 148321 - DNA, 17 bp, Arabidopsis thaliana
tgagacttctgctaagg

SEQ ID NO: 148322 - DNA, 17 bp, Arabidopsis thaliana
tgagacttgcttgtaac

SEQ ID NO: 148323 - DNA, 17 bp, Arabidopsis thaliana
tgagacttggtggtggt

SEQ ID NO: 148324 - DNA, 17 bp, Arabidopsis thaliana
tgagactttagcccagc

SEQ ID NO: 148325 - DNA, 17 bp, Arabidopsis thaliana
tgagactttctgagctg

SEQ ID NO: 148326 - DNA, 17 bp, Arabidopsis thaliana
tgagactttctgtgaag

SEQ ID NO: 148327 - DNA, 17 bp, Arabidopsis thaliana
tgagagaaatgtggtgc

SEQ ID NO: 148328 - DNA, 17 bp, Arabidopsis thaliana
tgagagaactctgctga

SEQ ID NO: 148329 - DNA, 17 bp, Arabidopsis thaliana
tgagagaactttacagt

SEQ ID NO: 148330 - DNA, 17 bp, Arabidopsis thaliana
tgagagaaggataccga

SEQ ID NO: 148331 - DNA, 17 bp, Arabidopsis thaliana
tgagagaagtggtctat

SEQ ID NO: 148332 - DNA, 17 bp, Arabidopsis thaliana
tgagagacatttggtgc

SEQ ID NO: 148333 - DNA, 17 bp, Arabidopsis thaliana
tgagagacgtttctggc

SEQ ID NO: 148334 - DNA, 17 bp, Arabidopsis thaliana
tgagagactctttcacg

SEQ ID NO: 148335 - DNA, 17 bp, Arabidopsis thaliana
tgagagagacccctact

SEQ ID NO: 148336 - DNA, 17 bp, Arabidopsis thaliana
tgagagagagcgtggct

SEQ ID NO: 148337 - DNA, 17 bp, Arabidopsis thaliana
tgagagagagcgtgggt

SEQ ID NO: 148338 - DNA, 17 bp, Arabidopsis thaliana
tgagagagtgagcactt

SEQ ID NO: 148339 - DNA, 17 bp, Arabidopsis thaliana
tgagagatacagtgcgt

SEQ ID NO: 148340 - DNA, 17 bp, Arabidopsis thaliana
tgagagatccagtgcgt

SEQ ID NO: 148341 - DNA, 17 bp, Arabidopsis thaliana
tgagagatcccttgtga

SEQ ID NO: 148342 - DNA, 17 bp, Arabidopsis thaliana
tgagagatccggcgtat

SEQ ID NO: 148343 - DNA, 17 bp, Arabidopsis thaliana
tgagagatgaaacagga

SEQ ID NO: 148344 - DNA, 17 bp, Arabidopsis thaliana
tgagagatggtcttagc

SEQ ID NO: 148345 - DNA, 17 bp, Arabidopsis thaliana
tgagagatgtagggcct

SEQ ID NO: 148346 - DNA, 17 bp, Arabidopsis thaliana
tgagagatgtgctttta

SEQ ID NO: 148347 - DNA, 17 bp, Arabidopsis thaliana
tgagagatgtttgatgt

SEQ ID NO: 148348 - DNA, 17 bp, Arabidopsis thaliana
tgagagatttaccattg

SEQ ID NO: 148349 - DNA, 17 bp, Arabidopsis thaliana
tgagagatttcctggtg

SEQ ID NO: 148350 - DNA, 17 bp, Arabidopsis thaliana
tgagagatttgcagttg

SEQ ID NO: 148351 - DNA, 17 bp, Arabidopsis thaliana
tgagagattttaccacc

SEQ ID NO: 148352 - DNA, 17 bp, Arabidopsis thaliana
tgagagattttaccact

SEQ ID NO: 148353 - DNA, 17 bp, Arabidopsis thaliana
tgagagcaccgcagtcg

SEQ ID NO: 148354 - DNA, 17 bp, Arabidopsis thaliana
tgagagccacctatcta

SEQ ID NO: 148355 - DNA, 17 bp, Arabidopsis thaliana
tgagagccacctattga

SEQ ID NO: 148356 - DNA, 17 bp, Arabidopsis thaliana
tgagagccacctattta

SEQ ID NO: 148357 - DNA, 17 bp, Arabidopsis thaliana
tgagagccaggcctcga

SEQ ID NO: 148358 - DNA, 17 bp, Arabidopsis thaliana
tgagagccccgccgtgc

SEQ ID NO: 148359 - DNA, 17 bp, Arabidopsis thaliana
tgagagccccgtcgtgc

SEQ ID NO: 148360 - DNA, 17 bp, Arabidopsis thaliana
tgagagccgcattgttt

SEQ ID NO: 148361 - DNA, 17 bp, Arabidopsis thaliana
tgagagcgaccgagtga

SEQ ID NO: 148362 - DNA, 17 bp, Arabidopsis thaliana
tgagagcgtcgtgcccg

SEQ ID NO: 148363 - DNA, 17 bp, Arabidopsis thaliana
tgagagctcgtatcaga

SEQ ID NO: 148364 - DNA, 17 bp, Arabidopsis thaliana
tgagagctctttcttga

SEQ ID NO: 148365 - DNA, 17 bp, Arabidopsis thaliana
tgagagcttcagagcta

SEQ ID NO: 148366 - DNA, 17 bp, Arabidopsis thaliana
tgagagcttcagagctg

SEQ ID NO: 148367 - DNA, 17 bp, Arabidopsis thaliana
tgagagctttctaaggg

SEQ ID NO: 148368 - DNA, 17 bp, Arabidopsis thaliana
tgagagctttgtggaat

SEQ ID NO: 148369 - DNA, 17 bp, Arabidopsis thaliana
tgagaggaactgtcagg

SEQ ID NO: 148370 - DNA, 17 bp, Arabidopsis thaliana
tgagaggaatgtggtgc

SEQ ID NO: 148371 - DNA, 17 bp, Arabidopsis thaliana
tgagaggaccgagtgcc

SEQ ID NO: 148372 - DNA, 17 bp, Arabidopsis thaliana
tgagaggacctttccct

SEQ ID NO: 148373 - DNA, 17 bp, Arabidopsis thaliana
tgagaggactattcaga

SEQ ID NO: 148374 - DNA, 17 bp, Arabidopsis thaliana
tgagaggactgcataac

SEQ ID NO: 148375 - DNA, 17 bp, Arabidopsis thaliana
tgagaggatcttttccg

SEQ ID NO: 148376 - DNA, 17 bp, Arabidopsis thaliana
tgagaggattacggaat

SEQ ID NO: 148377 - DNA, 17 bp, Arabidopsis thaliana
tgagaggattacgggct

SEQ ID NO: 148378 - DNA, 17 bp, Arabidopsis thaliana
tgagaggcagcgagaag

SEQ ID NO: 148379 - DNA, 17 bp, Arabidopsis thaliana
tgagaggcgagaccgac

SEQ ID NO: 148380 - DNA, 17 bp, Arabidopsis thaliana
tgagaggcttctcttcc

SEQ ID NO: 148381 - DNA, 17 bp, Arabidopsis thaliana
tgagaggctttaaaaac

SEQ ID NO: 148382 - DNA, 17 bp, Arabidopsis thaliana
tgagagggcacgtctgc

SEQ ID NO: 148383 - DNA, 17 bp, Arabidopsis thaliana
tgagagggcacgtcttg

SEQ ID NO: 148384 - DNA, 17 bp, Arabidopsis thaliana
tgagagggctgggctcg

SEQ ID NO: 148385 - DNA, 17 bp, Arabidopsis thaliana
tgagaggtgagattttt

SEQ ID NO: 148386 - DNA, 17 bp, Arabidopsis thaliana
tgagaggtgtgcgacag

SEQ ID NO: 148387 - DNA, 17 bp, Arabidopsis thaliana
tgagagtagcggcttga

SEQ ID NO: 148388 - DNA, 17 bp, Arabidopsis thaliana
tgagagtaggacgttgc

SEQ ID NO: 148389 - DNA, 17 bp, Arabidopsis thaliana
tgagagtccaagttctg

SEQ ID NO: 148390 - DNA, 17 bp, Arabidopsis thaliana
tgagagtcccgggcaac

SEQ ID NO: 148391 - DNA, 17 bp, Arabidopsis thaliana
tgagagtcgaaaggaat

SEQ ID NO: 148392 - DNA, 17 bp, Arabidopsis thaliana
tgagagtcgtatcagtt

SEQ ID NO: 148393 - DNA, 17 bp, Arabidopsis thaliana
tgagagtctctgttgcg

SEQ ID NO: 148394 - DNA, 17 bp, Arabidopsis thaliana
tgagagtgactacatcg

SEQ ID NO: 148395 - DNA, 17 bp, Arabidopsis thaliana
tgagagtgactactgca

SEQ ID NO: 148396 - DNA, 17 bp, Arabidopsis thaliana
tgagagtgcgccaggtc

SEQ ID NO: 148397 - DNA, 17 bp, Arabidopsis thaliana
tgagagtgctattggac

SEQ ID NO: 148398 - DNA, 17 bp, Arabidopsis thaliana
tgagagtggctgggtac

SEQ ID NO: 148399 - DNA, 17 bp, Arabidopsis thaliana
tgagagtgtgcgaatcc

SEQ ID NO: 148400 - DNA, 17 bp, Arabidopsis thaliana
tgagagttgataggcgt

SEQ ID NO: 148401 - DNA, 17 bp, Arabidopsis thaliana
tgagagttggaatgggc

SEQ ID NO: 148402 - DNA, 17 bp, Arabidopsis thaliana
tgagagttgttaacgct

SEQ ID NO: 148403 - DNA, 17 bp, Arabidopsis thaliana
tgagagtttgccaccta

SEQ ID NO: 148404 - DNA, 17 bp, Arabidopsis thaliana
tgagagtttgtcaagat

SEQ ID NO: 148405 - DNA, 17 bp, Arabidopsis thaliana
tgagagttttctgagga

SEQ ID NO: 148406 - DNA, 17 bp, Arabidopsis thaliana
tgagatactactcttgt

SEQ ID NO: 148407 - DNA, 17 bp, Arabidopsis thaliana
tgagatactctctaaaa

SEQ ID NO: 148408 - DNA, 17 bp, Arabidopsis thaliana
tgagatactctctacaa

SEQ ID NO: 148409 - DNA, 17 bp, Arabidopsis thaliana
tgagatagacctgttcg

SEQ ID NO: 148410 - DNA, 17 bp, Arabidopsis thaliana
tgagatagagatgtggg

SEQ ID NO: 148411 - DNA, 17 bp, Arabidopsis thaliana
tgagatatgtccgagtg

SEQ ID NO: 148412 - DNA, 17 bp, Arabidopsis thaliana
tgagatcactgcagctg

SEQ ID NO: 148413 - DNA, 17 bp, Arabidopsis thaliana
tgagatcagaaaccgcc

SEQ ID NO: 148414 - DNA, 17 bp, Arabidopsis thaliana
tgagatccagttcagct

SEQ ID NO: 148415 - DNA, 17 bp, Arabidopsis thaliana
tgagatccgccattatg

SEQ ID NO: 148416 - DNA, 17 bp, Arabidopsis thaliana
tgagatcctgttgcggt

SEQ ID NO: 148417 - DNA, 17 bp, Arabidopsis thaliana
tgagatccttccgtttc

SEQ ID NO: 148418 - DNA, 17 bp, Arabidopsis thaliana
tgagatcgacttgggtg

SEQ ID NO: 148419 - DNA, 17 bp, Arabidopsis thaliana
tgagatcgcagtgaaca

SEQ ID NO: 148420 - DNA, 17 bp, Arabidopsis thaliana
tgagatcgcccagccga

SEQ ID NO: 148421 - DNA, 17 bp, Arabidopsis thaliana
tgagatcgccgtggacg

SEQ ID NO: 148422 - DNA, 17 bp, Arabidopsis thaliana
tgagatcgcctctaaag

SEQ ID NO: 148423 - DNA, 17 bp, Arabidopsis thaliana
tgagatcgcctctcaag

SEQ ID NO: 148424 - DNA, 17 bp, Arabidopsis thaliana
tgagatcgtgtagggcg

SEQ ID NO: 148425 - DNA, 17 bp, Arabidopsis thaliana
tgagatcgtgtgggtga

SEQ ID NO: 148426 - DNA, 17 bp, Arabidopsis thaliana
tgagatctacttgcaaa

SEQ ID NO: 148427 - DNA, 17 bp, Arabidopsis thaliana
tgagatctcacaagcgt

SEQ ID NO: 148428 - DNA, 17 bp, Arabidopsis thaliana
tgagatctccaggttca

SEQ ID NO: 148429 - DNA, 17 bp, Arabidopsis thaliana
tgagatctctctctctc

SEQ ID NO: 148430 - DNA, 17 bp, Arabidopsis thaliana
tgagatctcttcattgt

SEQ ID NO: 148431 - DNA, 17 bp, Arabidopsis thaliana
tgagatctcttttgcgg

SEQ ID NO: 148432 - DNA, 17 bp, Arabidopsis thaliana
tgagatctgcgacatgt

SEQ ID NO: 148433 - DNA, 17 bp, Arabidopsis thaliana
tgagatcttcagggcac

SEQ ID NO: 148434 - DNA, 17 bp, Arabidopsis thaliana
tgagatcttgaaagcag

SEQ ID NO: 148435 - DNA, 17 bp, Arabidopsis thaliana
tgagatgacggagactc

SEQ ID NO: 148436 - DNA, 17 bp, Arabidopsis thaliana
tgagatgccttatccac

SEQ ID NO: 148437 - DNA, 17 bp, Arabidopsis thaliana
tgagatggactaaaccg

SEQ ID NO: 148438 - DNA, 17 bp, Arabidopsis thaliana
tgagatgggccttttgt

SEQ ID NO: 148439 - DNA, 17 bp, Arabidopsis thaliana
tgagatggtacgggatt

SEQ ID NO: 148440 - DNA, 17 bp, Arabidopsis thaliana
tgagatggtttacccga

SEQ ID NO: 148441 - DNA, 17 bp, Arabidopsis thaliana
tgagatgtagcgcagct

SEQ ID NO: 148442 - DNA, 17 bp, Arabidopsis thaliana
tgagatgtagtcttcac

SEQ ID NO: 148443 - DNA, 17 bp, Arabidopsis thaliana
tgagatgtgatgtggtt

SEQ ID NO: 148444 - DNA, 17 bp, Arabidopsis thaliana
tgagatgtggttttcac

SEQ ID NO: 148445 - DNA, 17 bp, Arabidopsis thaliana
tgagatgtgtgactgga

SEQ ID NO: 148446 - DNA, 17 bp, Arabidopsis thaliana
tgagatgtgtgcttaag

SEQ ID NO: 148447 - DNA, 17 bp, Arabidopsis thaliana
tgagatgttttcagctt

SEQ ID NO: 148448 - DNA, 17 bp, Arabidopsis thaliana
tgagatgttttttcgga

SEQ ID NO: 148449 - DNA, 17 bp, Arabidopsis thaliana
tgagattacaggcttcg

SEQ ID NO: 148450 - DNA, 17 bp, Arabidopsis thaliana
tgagattacggggttcg

SEQ ID NO: 148451 - DNA, 17 bp, Arabidopsis thaliana
tgagattactttggcga

SEQ ID NO: 148452 - DNA, 17 bp, Arabidopsis thaliana
tgagattatcgttgtgg

SEQ ID NO: 148453 - DNA, 17 bp, Arabidopsis thaliana
tgagattcaaccctttg

SEQ ID NO: 148454 - DNA, 17 bp, Arabidopsis thaliana
tgagattcaagaaccaa

SEQ ID NO: 148455 - DNA, 17 bp, Arabidopsis thaliana
tgagattcagcccctta

SEQ ID NO: 148456 - DNA, 17 bp, Arabidopsis thaliana
tgagattcagccccttg

SEQ ID NO: 148457 - DNA, 17 bp, Arabidopsis thaliana
tgagattcagccctttc

SEQ ID NO: 148458 - DNA, 17 bp, Arabidopsis thaliana
tgagattcagccctttg

SEQ ID NO: 148459 - DNA, 17 bp, Arabidopsis thaliana
tgagattcagccttttg

SEQ ID NO: 148460 - DNA, 17 bp, Arabidopsis thaliana
tgagattcagcttttgt

SEQ ID NO: 148461 - DNA, 17 bp, Arabidopsis thaliana
tgagattccaactagta

SEQ ID NO: 148462 - DNA, 17 bp, Arabidopsis thaliana
tgagattccagttttca

SEQ ID NO: 148463 - DNA, 17 bp, Arabidopsis thaliana
tgagattctggaccgtc

SEQ ID NO: 148464 - DNA, 17 bp, Arabidopsis thaliana
tgagattgatggaatcg

SEQ ID NO: 148465 - DNA, 17 bp, Arabidopsis thaliana
tgagattgcaagggtgt

SEQ ID NO: 148466 - DNA, 17 bp, Arabidopsis thaliana
tgagattgcacagatga

SEQ ID NO: 148467 - DNA, 17 bp, Arabidopsis thaliana
tgagattgcacggattc

SEQ ID NO: 148468 - DNA, 17 bp, Arabidopsis thaliana
tgagattgcattttgca

SEQ ID NO: 148469 - DNA, 17 bp, Arabidopsis thaliana
tgagattgctaagtgtt

SEQ ID NO: 148470 - DNA, 17 bp, Arabidopsis thaliana
tgagattggacatcttc

SEQ ID NO: 148471 - DNA, 17 bp, Arabidopsis thaliana
tgagattggtggctttg

SEQ ID NO: 148472 - DNA, 17 bp, Arabidopsis thaliana
tgagattgtcccgtcga

SEQ ID NO: 148473 - DNA, 17 bp, Arabidopsis thaliana
tgagattgttgggatga

SEQ ID NO: 148474 - DNA, 17 bp, Arabidopsis thaliana
tgagatttacgtttttg

SEQ ID NO: 148475 - DNA, 17 bp, Arabidopsis thaliana
tgagatttattagctag

SEQ ID NO: 148476 - DNA, 17 bp, Arabidopsis thaliana
tgagatttatttacagt

SEQ ID NO: 148477 - DNA, 17 bp, Arabidopsis thaliana
tgagatttatttacatc

SEQ ID NO: 148478 - DNA, 17 bp, Arabidopsis thaliana
tgagatttcaatcaaac

SEQ ID NO: 148479 - DNA, 17 bp, Arabidopsis thaliana
tgagatttccctgcggt

SEQ ID NO: 148480 - DNA, 17 bp, Arabidopsis thaliana
tgagatttcctggtgtt

SEQ ID NO: 148481 - DNA, 17 bp, Arabidopsis thaliana
tgagatttgacgattat

SEQ ID NO: 148482 - DNA, 17 bp, Arabidopsis thaliana
tgagatttgatttgggg

SEQ ID NO: 148483 - DNA, 17 bp, Arabidopsis thaliana
tgagatttgcaaggggc

SEQ ID NO: 148484 - DNA, 17 bp, Arabidopsis thaliana
tgagatttgggatgtgc

SEQ ID NO: 148485 - DNA, 17 bp, Arabidopsis thaliana
tgagatttgggccagaa

SEQ ID NO: 148486 - DNA, 17 bp, Arabidopsis thaliana
tgagatttgtcggctat

SEQ ID NO: 148487 - DNA, 17 bp, Arabidopsis thaliana
tgagatttgtgccgaaa

SEQ ID NO: 148488 - DNA, 17 bp, Arabidopsis thaliana
tgagattttcgagaacg

SEQ ID NO: 148489 - DNA, 17 bp, Arabidopsis thaliana
tgagattttcgtgattt

SEQ ID NO: 148490 - DNA, 17 bp, Arabidopsis thaliana
tgagcaaacgccttgga

SEQ ID NO: 148491 - DNA, 17 bp, Arabidopsis thaliana
tgagcaaaggcccataa

SEQ ID NO: 148492 - DNA, 17 bp, Arabidopsis thaliana
tgagcaacaccaggctg

SEQ ID NO: 148493 - DNA, 17 bp, Arabidopsis thaliana
tgagcaacggtaggaca

SEQ ID NO: 148494 - DNA, 17 bp, Arabidopsis thaliana
tgagcaactactgtagc

SEQ ID NO: 148495 - DNA, 17 bp, Arabidopsis thaliana
tgagcaactggcaggat

SEQ ID NO: 148496 - DNA, 17 bp, Arabidopsis thaliana
tgagcaaggctggtatt

SEQ ID NO: 148497 - DNA, 17 bp, Arabidopsis thaliana
tgagcaagttggccgag

SEQ ID NO: 148498 - DNA, 17 bp, Arabidopsis thaliana
tgagcaatccacttttg

SEQ ID NO: 148499 - DNA, 17 bp, Arabidopsis thaliana
tgagcaattaaggagca

SEQ ID NO: 148500 - DNA, 17 bp, Arabidopsis thaliana
tgagcaattcatgacat

SEQ ID NO: 148501 - DNA, 17 bp, Arabidopsis thaliana
tgagcacaaagcgaact

SEQ ID NO: 148502 - DNA, 17 bp, Arabidopsis thaliana
tgagcacaagtccacac

SEQ ID NO: 148503 - DNA, 17 bp, Arabidopsis thaliana
tgagcacacccctgtcc

SEQ ID NO: 148504 - DNA, 17 bp, Arabidopsis thaliana
tgagcaccaagagtatt

SEQ ID NO: 148505 - DNA, 17 bp, Arabidopsis thaliana
tgagcaccagttccggg

SEQ ID NO: 148506 - DNA, 17 bp, Arabidopsis thaliana
tgagcacggcggtctga

SEQ ID NO: 148507 - DNA, 17 bp, Arabidopsis thaliana
tgagcacgtctccctgg

SEQ ID NO: 148508 - DNA, 17 bp, Arabidopsis thaliana
tgagcacgtctctgggt

SEQ ID NO: 148509 - DNA, 17 bp, Arabidopsis thaliana
tgagcacgtctgcctgg

SEQ ID NO: 148510 - DNA, 17 bp, Arabidopsis thaliana
tgagcactccacgctag

SEQ ID NO: 148511 - DNA, 17 bp, Arabidopsis thaliana
tgagcacttttgggatc

SEQ ID NO: 148512 - DNA, 17 bp, Arabidopsis thaliana
tgagcagattcacattg

SEQ ID NO: 148513 - DNA, 17 bp, Arabidopsis thaliana
tgagcagcagttcaaga

SEQ ID NO: 148514 - DNA, 17 bp, Arabidopsis thaliana
tgagcagccgcagaacg

SEQ ID NO: 148515 - DNA, 17 bp, Arabidopsis thaliana
tgagcaggaagcttata

SEQ ID NO: 148516 - DNA, 17 bp, Arabidopsis thaliana
tgagcaggagctgttca

SEQ ID NO: 148517 - DNA, 17 bp, Arabidopsis thaliana
tgagcaggcgacctgat

SEQ ID NO: 148518 - DNA, 17 bp, Arabidopsis thaliana
tgagcaggctatgaatt

SEQ ID NO: 148519 - DNA, 17 bp, Arabidopsis thaliana
tgagcagggccggccct

SEQ ID NO: 148520 - DNA, 17 bp, Arabidopsis thaliana
tgagcagtgcgagaact

SEQ ID NO: 148521 - DNA, 17 bp, Arabidopsis thaliana
tgagcagttgatcgtgc

SEQ ID NO: 148522 - DNA, 17 bp, Arabidopsis thaliana
tgagcataaaccaacaa

SEQ ID NO: 148523 - DNA, 17 bp, Arabidopsis thaliana
tgagcatacctgtcggg

SEQ ID NO: 148524 - DNA, 17 bp, Arabidopsis thaliana
tgagcatactcgcagag

SEQ ID NO: 148525 - DNA, 17 bp, Arabidopsis thaliana
tgagcatcatcaagatg

SEQ ID NO: 148526 - DNA, 17 bp, Arabidopsis thaliana
tgagcatgaccgagttt

SEQ ID NO: 148527 - DNA, 17 bp, Arabidopsis thaliana
tgagcatgcctgtcggc

SEQ ID NO: 148528 - DNA, 17 bp, Arabidopsis thaliana
tgagcatgcctgtcggg

SEQ ID NO: 148529 - DNA, 17 bp, Arabidopsis thaliana
tgagcatgctgtctgag

SEQ ID NO: 148530 - DNA, 17 bp, Arabidopsis thaliana
tgagcatggatgacttg

SEQ ID NO: 148531 - DNA, 17 bp, Arabidopsis thaliana
tgagcatgtccaatggt

SEQ ID NO: 148532 - DNA, 17 bp, Arabidopsis thaliana
tgagcatgtcgctggat

SEQ ID NO: 148533 - DNA, 17 bp, Arabidopsis thaliana
tgagcatgtgtttcaaa

SEQ ID NO: 148534 - DNA, 17 bp, Arabidopsis thaliana
tgagcattaagccaccg

SEQ ID NO: 148535 - DNA, 17 bp, Arabidopsis thaliana
tgagcattcccggcaag

SEQ ID NO: 148536 - DNA, 17 bp, Arabidopsis thaliana
tgagcattcttctacaa

SEQ ID NO: 148537 - DNA, 17 bp, Arabidopsis thaliana
tgagcattgtgaacatc

SEQ ID NO: 148538 - DNA, 17 bp, Arabidopsis thaliana
tgagcattgtgctctaa

SEQ ID NO: 148539 - DNA, 17 bp, Arabidopsis thaliana
tgagcattttcgtgatt

SEQ ID NO: 148540 - DNA, 17 bp, Arabidopsis thaliana
tgagccaacagttgcga

SEQ ID NO: 148541 - DNA, 17 bp, Arabidopsis thaliana
tgagccaaccaacttag

SEQ ID NO: 148542 - DNA, 17 bp, Arabidopsis thaliana
tgagccaaccttgcttt

SEQ ID NO: 148543 - DNA, 17 bp, Arabidopsis thaliana
tgagccaagaatgactt

SEQ ID NO: 148544 - DNA, 17 bp, Arabidopsis thaliana
tgagccaaggagacttg

SEQ ID NO: 148545 - DNA, 17 bp, Arabidopsis thaliana
tgagccaaggataactt

SEQ ID NO: 148546 - DNA, 17 bp, Arabidopsis thaliana
tgagccaaggataatct

SEQ ID NO: 148547 - DNA, 17 bp, Arabidopsis thaliana
tgagccaaggatgaatg

SEQ ID NO: 148548 - DNA, 17 bp, Arabidopsis thaliana
tgagccaaggatgaatt

SEQ ID NO: 148549 - DNA, 17 bp, Arabidopsis thaliana
tgagccaaggatgacgt

SEQ ID NO: 148550 - DNA, 17 bp, Arabidopsis thaliana
tgagccaaggatgactt

SEQ ID NO: 148551 - DNA, 17 bp, Arabidopsis thaliana
tgagccaaggatgcctt

SEQ ID NO: 148552 - DNA, 17 bp, Arabidopsis thaliana
tgagccaagtatgactt

SEQ ID NO: 148553 - DNA, 17 bp, Arabidopsis thaliana
tgagccaagtcaccaca

SEQ ID NO: 148554 - DNA, 17 bp, Arabidopsis thaliana
tgagccaagtcagcaca

SEQ ID NO: 148555 - DNA, 17 bp, Arabidopsis thaliana
tgagccacttgtcagga

SEQ ID NO: 148556 - DNA, 17 bp, Arabidopsis thaliana
tgagccacttgtcaggg

SEQ ID NO: 148557 - DNA, 17 bp, Arabidopsis thaliana
tgagccagactcgagtg

SEQ ID NO: 148558 - DNA, 17 bp, Arabidopsis thaliana
tgagccagtcttcgatg

SEQ ID NO: 148559 - DNA, 17 bp, Arabidopsis thaliana
tgagccatgaatcctgt

SEQ ID NO: 148560 - DNA, 17 bp, Arabidopsis thaliana
tgagccatgaatcttgt

SEQ ID NO: 148561 - DNA, 17 bp, Arabidopsis thaliana
tgagccatgatcgcaaa

SEQ ID NO: 148562 - DNA, 17 bp, Arabidopsis thaliana
tgagcccaaacttggcc

SEQ ID NO: 148563 - DNA, 17 bp, Arabidopsis thaliana
tgagcccaaagacagcc

SEQ ID NO: 148564 - DNA, 17 bp, Arabidopsis thaliana
tgagcccagacatttcc

SEQ ID NO: 148565 - DNA, 17 bp, Arabidopsis thaliana
tgagcccagttaaatcc

SEQ ID NO: 148566 - DNA, 17 bp, Arabidopsis thaliana
tgagcccagttaaggcc

SEQ ID NO: 148567 - DNA, 17 bp, Arabidopsis thaliana
tgagcccattgtgaaga

SEQ ID NO: 148568 - DNA, 17 bp, Arabidopsis thaliana
tgagcccccttggtcca

SEQ ID NO: 148569 - DNA, 17 bp, Arabidopsis thaliana
tgagccctgggctcggg

SEQ ID NO: 148570 - DNA, 17 bp, Arabidopsis thaliana
tgagccctttgtcgcta

SEQ ID NO: 148571 - DNA, 17 bp, Arabidopsis thaliana
tgagccgaaatgacaac

SEQ ID NO: 148572 - DNA, 17 bp, Arabidopsis thaliana
tgagccgactgtccgga

SEQ ID NO: 148573 - DNA, 17 bp, Arabidopsis thaliana
tgagccgagggcacgtc

SEQ ID NO: 148574 - DNA, 17 bp, Arabidopsis thaliana
tgagccgagtgcacgtc

SEQ ID NO: 148575 - DNA, 17 bp, Arabidopsis thaliana
tgagccgcaccacgagg

SEQ ID NO: 148576 - DNA, 17 bp, Arabidopsis thaliana
tgagccgcgaacgatgt

SEQ ID NO: 148577 - DNA, 17 bp, Arabidopsis thaliana
tgagccgcgaggtgtac

SEQ ID NO: 148578 - DNA, 17 bp, Arabidopsis thaliana
tgagccgctaacagagc

SEQ ID NO: 148579 - DNA, 17 bp, Arabidopsis thaliana
tgagccgctattacgtt

SEQ ID NO: 148580 - DNA, 17 bp, Arabidopsis thaliana
tgagccgctgttaattt

SEQ ID NO: 148581 - DNA, 17 bp, Arabidopsis thaliana
tgagccggcgactcata

SEQ ID NO: 148582 - DNA, 17 bp, Arabidopsis thaliana
tgagccgggggacggac

SEQ ID NO: 148583 - DNA, 17 bp, Arabidopsis thaliana
tgagccgggtgagactg

SEQ ID NO: 148584 - DNA, 17 bp, Arabidopsis thaliana
tgagccggtggtttcgg

SEQ ID NO: 148585 - DNA, 17 bp, Arabidopsis thaliana
tgagccggttgaggtgt

SEQ ID NO: 148586 - DNA, 17 bp, Arabidopsis thaliana
tgagccggttgtgaggt

SEQ ID NO: 148587 - DNA, 17 bp, Arabidopsis thaliana
tgagccgtcagctcccg

SEQ ID NO: 148588 - DNA, 17 bp, Arabidopsis thaliana
tgagcctagggaaatta

SEQ ID NO: 148589 - DNA, 17 bp, Arabidopsis thaliana
tgagcctatttgtggcc

SEQ ID NO: 148590 - DNA, 17 bp, Arabidopsis thaliana
tgagcctcaccggatga

SEQ ID NO: 148591 - DNA, 17 bp, Arabidopsis thaliana
tgagcctcctccttatg

SEQ ID NO: 148592 - DNA, 17 bp, Arabidopsis thaliana
tgagcctctgacgctgc

SEQ ID NO: 148593 - DNA, 17 bp, Arabidopsis thaliana
tgagcctctgtagtagc

SEQ ID NO: 148594 - DNA, 17 bp, Arabidopsis thaliana
tgagcctctgtgatagc

SEQ ID NO: 148595 - DNA, 17 bp, Arabidopsis thaliana
tgagcctctgtggtagc

SEQ ID NO: 148596 - DNA, 17 bp, Arabidopsis thaliana
tgagcctgagtttttcc

SEQ ID NO: 148597 - DNA, 17 bp, Arabidopsis thaliana
tgagcctgatagaaaga

SEQ ID NO: 148598 - DNA, 17 bp, Arabidopsis thaliana
tgagcctgcaaattacc

SEQ ID NO: 148599 - DNA, 17 bp, Arabidopsis thaliana
tgagcctgcgacttgtt

SEQ ID NO: 148600 - DNA, 17 bp, Arabidopsis thaliana
tgagccttccaagcaat

SEQ ID NO: 148601 - DNA, 17 bp, Arabidopsis thaliana
tgagcctttcatttctt

SEQ ID NO: 148602 - DNA, 17 bp, Arabidopsis thaliana
tgagcctttgtggtagc

SEQ ID NO: 148603 - DNA, 17 bp, Arabidopsis thaliana
tgagcctttgtttttgc

SEQ ID NO: 148604 - DNA, 17 bp, Arabidopsis thaliana
tgagcgaagcgaactaa

SEQ ID NO: 148605 - DNA, 17 bp, Arabidopsis thaliana
tgagcgaagtcctcgtg

SEQ ID NO: 148606 - DNA, 17 bp, Arabidopsis thaliana
tgagcgaagtgagaacc

SEQ ID NO: 148607 - DNA, 17 bp, Arabidopsis thaliana
tgagcgacagtcgccag

SEQ ID NO: 148608 - DNA, 17 bp, Arabidopsis thaliana
tgagcgacatgttcgag

SEQ ID NO: 148609 - DNA, 17 bp, Arabidopsis thaliana
tgagcgacctatacccg

SEQ ID NO: 148610 - DNA, 17 bp, Arabidopsis thaliana
tgagcgacgcatgcgcc

SEQ ID NO: 148611 - DNA, 17 bp, Arabidopsis thaliana
tgagcgacggagacgac

SEQ ID NO: 148612 - DNA, 17 bp, Arabidopsis thaliana
tgagcgactctagtccg

SEQ ID NO: 148613 - DNA, 17 bp, Arabidopsis thaliana
tgagcgagaccaaatct

SEQ ID NO: 148614 - DNA, 17 bp, Arabidopsis thaliana
tgagcgagtcaatcaca

SEQ ID NO: 148615 - DNA, 17 bp, Arabidopsis thaliana
tgagcgagtgacctaga

SEQ ID NO: 148616 - DNA, 17 bp, Arabidopsis thaliana
tgagcgatcagtccctg

SEQ ID NO: 148617 - DNA, 17 bp, Arabidopsis thaliana
tgagcgatgtgttggct

SEQ ID NO: 148618 - DNA, 17 bp, Arabidopsis thaliana
tgagcgatttgtctggt

SEQ ID NO: 148619 - DNA, 17 bp, Arabidopsis thaliana
tgagcgattttgttctc

SEQ ID NO: 148620 - DNA, 17 bp, Arabidopsis thaliana
tgagcgcacgtctgcct

SEQ ID NO: 148621 - DNA, 17 bp, Arabidopsis thaliana
tgagcggatgggggccg

SEQ ID NO: 148622 - DNA, 17 bp, Arabidopsis thaliana
tgagcggattacggtgg

SEQ ID NO: 148623 - DNA, 17 bp, Arabidopsis thaliana
tgagcggccagagggga

SEQ ID NO: 148624 - DNA, 17 bp, Arabidopsis thaliana
tgagcggcggatccaac

SEQ ID NO: 148625 - DNA, 17 bp, Arabidopsis thaliana
tgagcggcggatcctac

SEQ ID NO: 148626 - DNA, 17 bp, Arabidopsis thaliana
tgagcggggtaaagcca

SEQ ID NO: 148627 - DNA, 17 bp, Arabidopsis thaliana
tgagcggggttagatgg

SEQ ID NO: 148628 - DNA, 17 bp, Arabidopsis thaliana
tgagcggtccaaagcga

SEQ ID NO: 148629 - DNA, 17 bp, Arabidopsis thaliana
tgagcggtcttgccccg

SEQ ID NO: 148630 - DNA, 17 bp, Arabidopsis thaliana
tgagcggtgataccaac

SEQ ID NO: 148631 - DNA, 17 bp, Arabidopsis thaliana
tgagcggtggacggctt

SEQ ID NO: 148632 - DNA, 17 bp, Arabidopsis thaliana
tgagcggtgtaaggtaa

SEQ ID NO: 148633 - DNA, 17 bp, Arabidopsis thaliana
tgagcggttgtgtgact

SEQ ID NO: 148634 - DNA, 17 bp, Arabidopsis thaliana
tgagcgtaagcctgtac

SEQ ID NO: 148635 - DNA, 17 bp, Arabidopsis thaliana
tgagcgtagcgcgggta

SEQ ID NO: 148636 - DNA, 17 bp, Arabidopsis thaliana
tgagcgtccccccaagc

SEQ ID NO: 148637 - DNA, 17 bp, Arabidopsis thaliana
tgagcgtcctaagatga

SEQ ID NO: 148638 - DNA, 17 bp, Arabidopsis thaliana
tgagcgtctagttatcg

SEQ ID NO: 148639 - DNA, 17 bp, Arabidopsis thaliana
tgagcgtctatactgag

SEQ ID NO: 148640 - DNA, 17 bp, Arabidopsis thaliana
tgagcgtctggcaactt

SEQ ID NO: 148641 - DNA, 17 bp, Arabidopsis thaliana
tgagcgtgaattttggc

SEQ ID NO: 148642 - DNA, 17 bp, Arabidopsis thaliana
tgagcgtgcgaaaactc

SEQ ID NO: 148643 - DNA, 17 bp, Arabidopsis thaliana
tgagcgtgcgaaaactt

SEQ ID NO: 148644 - DNA, 17 bp, Arabidopsis thaliana
tgagcgtggaccgacgc

SEQ ID NO: 148645 - DNA, 17 bp, Arabidopsis thaliana
tgagcgtggatctgaag

SEQ ID NO: 148646 - DNA, 17 bp, Arabidopsis thaliana
tgagcgtgtttaccggg

SEQ ID NO: 148647 - DNA, 17 bp, Arabidopsis thaliana
tgagcgttcttaaacat

SEQ ID NO: 148648 - DNA, 17 bp, Arabidopsis thaliana
tgagcgttgccggagac

SEQ ID NO: 148649 - DNA, 17 bp, Arabidopsis thaliana
tgagcgttgggtctcgg

SEQ ID NO: 148650 - DNA, 17 bp, Arabidopsis thaliana
tgagcgtttctaccggg

SEQ ID NO: 148651 - DNA, 17 bp, Arabidopsis thaliana
tgagcgtttgaaaagtt

SEQ ID NO: 148652 - DNA, 17 bp, Arabidopsis thaliana
tgagcgtttgcggttgc

SEQ ID NO: 148653 - DNA, 17 bp, Arabidopsis thaliana
tgagcgtttggtaatgg

SEQ ID NO: 148654 - DNA, 17 bp, Arabidopsis thaliana
tgagcgttttgtcgcta

SEQ ID NO: 148655 - DNA, 17 bp, Arabidopsis thaliana
tgagctaaaacctggca

SEQ ID NO: 148656 - DNA, 17 bp, Arabidopsis thaliana
tgagctaacaactgaag

SEQ ID NO: 148657 - DNA, 17 bp, Arabidopsis thaliana
tgagctaacccgtcagt

SEQ ID NO: 148658 - DNA, 17 bp, Arabidopsis thaliana
tgagctaacgacacttg

SEQ ID NO: 148659 - DNA, 17 bp, Arabidopsis thaliana
tgagctaacgacttggt

SEQ ID NO: 148660 - DNA, 17 bp, Arabidopsis thaliana
tgagctaactagctacg

SEQ ID NO: 148661 - DNA, 17 bp, Arabidopsis thaliana
tgagctaactcaggtga

SEQ ID NO: 148662 - DNA, 17 bp, Arabidopsis thaliana
tgagctaagaacggaag

SEQ ID NO: 148663 - DNA, 17 bp, Arabidopsis thaliana
tgagctaaggtgagcga

SEQ ID NO: 148664 - DNA, 17 bp, Arabidopsis thaliana
tgagctacatcttgctt

SEQ ID NO: 148665 - DNA, 17 bp, Arabidopsis thaliana
tgagctaccccgctgga

SEQ ID NO: 148666 - DNA, 17 bp, Arabidopsis thaliana
tgagctacggttttgga

SEQ ID NO: 148667 - DNA, 17 bp, Arabidopsis thaliana
tgagctagactgtggtg

SEQ ID NO: 148668 - DNA, 17 bp, Arabidopsis thaliana
tgagctagctctttgta

SEQ ID NO: 148669 - DNA, 17 bp, Arabidopsis thaliana
tgagctaggaacgtttg

SEQ ID NO: 148670 - DNA, 17 bp, Arabidopsis thaliana
tgagctagggagaattc

SEQ ID NO: 148671 - DNA, 17 bp, Arabidopsis thaliana
tgagctagggtgttagc

SEQ ID NO: 148672 - DNA, 17 bp, Arabidopsis thaliana
tgagctagttccggttt

SEQ ID NO: 148673 - DNA, 17 bp, Arabidopsis thaliana
tgagctatccaacaagg

SEQ ID NO: 148674 - DNA, 17 bp, Arabidopsis thaliana
tgagctatggtgaaatt

SEQ ID NO: 148675 - DNA, 17 bp, Arabidopsis thaliana
tgagctcagaaacggtc

SEQ ID NO: 148676 - DNA, 17 bp, Arabidopsis thaliana
tgagctcagaagacaag

SEQ ID NO: 148677 - DNA, 17 bp, Arabidopsis thaliana
tgagctcaggccgaaga

SEQ ID NO: 148678 - DNA, 17 bp, Arabidopsis thaliana
tgagctcagggccagtc

SEQ ID NO: 148679 - DNA, 17 bp, Arabidopsis thaliana
tgagctcagtgaaacgc

SEQ ID NO: 148680 - DNA, 17 bp, Arabidopsis thaliana
tgagctcatctctcaat

SEQ ID NO: 148681 - DNA, 17 bp, Arabidopsis thaliana
tgagctccgtactggac

SEQ ID NO: 148682 - DNA, 17 bp, Arabidopsis thaliana
tgagctcctaccgattg

SEQ ID NO: 148683 - DNA, 17 bp, Arabidopsis thaliana
tgagctcgactctagtc

SEQ ID NO: 148684 - DNA, 17 bp, Arabidopsis thaliana
tgagctcgactttagtc

SEQ ID NO: 148685 - DNA, 17 bp, Arabidopsis thaliana
tgagctcgattaacgcc

SEQ ID NO: 148686 - DNA, 17 bp, Arabidopsis thaliana
tgagctcgcgaatgatg

SEQ ID NO: 148687 - DNA, 17 bp, Arabidopsis thaliana
tgagctcgtggccttca

SEQ ID NO: 148688 - DNA, 17 bp, Arabidopsis thaliana
tgagctcgtgtgatacg

SEQ ID NO: 148689 - DNA, 17 bp, Arabidopsis thaliana
tgagctctactctggct

SEQ ID NO: 148690 - DNA, 17 bp, Arabidopsis thaliana
tgagctctcagtctgcc

SEQ ID NO: 148691 - DNA, 17 bp, Arabidopsis thaliana
tgagctctcggatgtgt

SEQ ID NO: 148692 - DNA, 17 bp, Arabidopsis thaliana
tgagctctgcgatggta

SEQ ID NO: 148693 - DNA, 17 bp, Arabidopsis thaliana
tgagctctgtgctgcac

SEQ ID NO: 148694 - DNA, 17 bp, Arabidopsis thaliana
tgagctctgttcgtttc

SEQ ID NO: 148695 - DNA, 17 bp, Arabidopsis thaliana
tgagctgaaactgttgt

SEQ ID NO: 148696 - DNA, 17 bp, Arabidopsis thaliana
tgagctgaagcatggct

SEQ ID NO: 148697 - DNA, 17 bp, Arabidopsis thaliana
tgagctgaaggacaatg

SEQ ID NO: 148698 - DNA, 17 bp, Arabidopsis thaliana
tgagctgaagtctaaag

SEQ ID NO: 148699 - DNA, 17 bp, Arabidopsis thaliana
tgagctgacacagggtg

SEQ ID NO: 148700 - DNA, 17 bp, Arabidopsis thaliana
tgagctgactatgtgta

SEQ ID NO: 148701 - DNA, 17 bp, Arabidopsis thaliana
tgagctgactctagtcc

SEQ ID NO: 148702 - DNA, 17 bp, Arabidopsis thaliana
tgagctgactgaaacat

SEQ ID NO: 148703 - DNA, 17 bp, Arabidopsis thaliana
tgagctgactgttcgac

SEQ ID NO: 148704 - DNA, 17 bp, Arabidopsis thaliana
tgagctgagattttgca

SEQ ID NO: 148705 - DNA, 17 bp, Arabidopsis thaliana
tgagctgagccaggtga

SEQ ID NO: 148706 - DNA, 17 bp, Arabidopsis thaliana
tgagctgagttacggta

SEQ ID NO: 148707 - DNA, 17 bp, Arabidopsis thaliana
tgagctgagttgagttg

SEQ ID NO: 148708 - DNA, 17 bp, Arabidopsis thaliana
tgagctgagttgattgt

SEQ ID NO: 148709 - DNA, 17 bp, Arabidopsis thaliana
tgagctgcccttgctag

SEQ ID NO: 148710 - DNA, 17 bp, Arabidopsis thaliana
tgagctgcttttagtga

SEQ ID NO: 148711 - DNA, 17 bp, Arabidopsis thaliana
tgagctggaaatcacgg

SEQ ID NO: 148712 - DNA, 17 bp, Arabidopsis thaliana
tgagctgggattagacc

SEQ ID NO: 148713 - DNA, 17 bp, Arabidopsis thaliana
tgagctgggctcggggg

SEQ ID NO: 148714 - DNA, 17 bp, Arabidopsis thaliana
tgagctggggttagacc

SEQ ID NO: 148715 - DNA, 17 bp, Arabidopsis thaliana
tgagctgggtttagacc

SEQ ID NO: 148716 - DNA, 17 bp, Arabidopsis thaliana
tgagctgtcattctttt

SEQ ID NO: 148717 - DNA, 17 bp, Arabidopsis thaliana
tgagctgtctacgagtc

SEQ ID NO: 148718 - DNA, 17 bp, Arabidopsis thaliana
tgagctgtgaagaaatt

SEQ ID NO: 148719 - DNA, 17 bp, Arabidopsis thaliana
tgagctgtgatgaaatt

SEQ ID NO: 148720 - DNA, 17 bp, Arabidopsis thaliana
tgagcttagagatcgtc

SEQ ID NO: 148721 - DNA, 17 bp, Arabidopsis thaliana
tgagcttatctgcctcg

SEQ ID NO: 148722 - DNA, 17 bp, Arabidopsis thaliana
tgagcttcagcctttcc

SEQ ID NO: 148723 - DNA, 17 bp, Arabidopsis thaliana
tgagcttccgtcatagt

SEQ ID NO: 148724 - DNA, 17 bp, Arabidopsis thaliana
tgagcttccttgagtcc

SEQ ID NO: 148725 - DNA, 17 bp, Arabidopsis thaliana
tgagcttcgacccattg

SEQ ID NO: 148726 - DNA, 17 bp, Arabidopsis thaliana
tgagcttcgcatgtgac

SEQ ID NO: 148727 - DNA, 17 bp, Arabidopsis thaliana
tgagcttcggagcaacg

SEQ ID NO: 148728 - DNA, 17 bp, Arabidopsis thaliana
tgagcttcgggcgagct

SEQ ID NO: 148729 - DNA, 17 bp, Arabidopsis thaliana
tgagcttctaagcaatt

SEQ ID NO: 148730 - DNA, 17 bp, Arabidopsis thaliana
tgagcttctaccgcaag

SEQ ID NO: 148731 - DNA, 17 bp, Arabidopsis thaliana
tgagcttctgcagataa

SEQ ID NO: 148732 - DNA, 17 bp, Arabidopsis thaliana
tgagcttcttgcggcgg

SEQ ID NO: 148733 - DNA, 17 bp, Arabidopsis thaliana
tgagcttgaccattgtg

SEQ ID NO: 148734 - DNA, 17 bp, Arabidopsis thaliana
tgagcttgactagtccg

SEQ ID NO: 148735 - DNA, 17 bp, Arabidopsis thaliana
tgagcttgactctagtc

SEQ ID NO: 148736 - DNA, 17 bp, Arabidopsis thaliana
tgagcttgactctagtg

SEQ ID NO: 148737 - DNA, 17 bp, Arabidopsis thaliana
tgagcttgactctagtt

SEQ ID NO: 148738 - DNA, 17 bp, Arabidopsis thaliana
tgagcttgagacctggt

SEQ ID NO: 148739 - DNA, 17 bp, Arabidopsis thaliana
tgagcttgagacggtat

SEQ ID NO: 148740 - DNA, 17 bp, Arabidopsis thaliana
tgagcttgcagagagaa

SEQ ID NO: 148741 - DNA, 17 bp, Arabidopsis thaliana
tgagcttggctcaggcg

SEQ ID NO: 148742 - DNA, 17 bp, Arabidopsis thaliana
tgagcttggtggtcgcc

SEQ ID NO: 148743 - DNA, 17 bp, Arabidopsis thaliana
tgagcttggttcacact

SEQ ID NO: 148744 - DNA, 17 bp, Arabidopsis thaliana
tgagctttagccgagtg

SEQ ID NO: 148745 - DNA, 17 bp, Arabidopsis thaliana
tgagctttatgtctcag

SEQ ID NO: 148746 - DNA, 17 bp, Arabidopsis thaliana
tgagctttcaggaccga

SEQ ID NO: 148747 - DNA, 17 bp, Arabidopsis thaliana
tgagctttcgtttttgg

SEQ ID NO: 148748 - DNA, 17 bp, Arabidopsis thaliana
tgagctttcttcggtcc

SEQ ID NO: 148749 - DNA, 17 bp, Arabidopsis thaliana
tgagctttgccccaatt

SEQ ID NO: 148750 - DNA, 17 bp, Arabidopsis thaliana
tgagctttgcggttgtg

SEQ ID NO: 148751 - DNA, 17 bp, Arabidopsis thaliana
tgagctttggccgagtg

SEQ ID NO: 148752 - DNA, 17 bp, Arabidopsis thaliana
tgagctttgttccagcg

SEQ ID NO: 148753 - DNA, 17 bp, Arabidopsis thaliana
tgaggaacaaaatctgg

SEQ ID NO: 148754 - DNA, 17 bp, Arabidopsis thaliana
tgaggaacctgcggaag

SEQ ID NO: 148755 - DNA, 17 bp, Arabidopsis thaliana
tgaggaacctttttccg

SEQ ID NO: 148756 - DNA, 17 bp, Arabidopsis thaliana
tgaggaactgtgcgaat

SEQ ID NO: 148757 - DNA, 17 bp, Arabidopsis thaliana
tgaggaagaagatccat

SEQ ID NO: 148758 - DNA, 17 bp, Arabidopsis thaliana
tgaggaagatagtgcat

SEQ ID NO: 148759 - DNA, 17 bp, Arabidopsis thaliana
tgaggaagccaaccatt

SEQ ID NO: 148760 - DNA, 17 bp, Arabidopsis thaliana
tgaggaagcttctgagt

SEQ ID NO: 148761 - DNA, 17 bp, Arabidopsis thaliana
tgaggaaggctcgttca

SEQ ID NO: 148762 - DNA, 17 bp, Arabidopsis thaliana
tgaggaaggttcgtccg

SEQ ID NO: 148763 - DNA, 17 bp, Arabidopsis thaliana
tgaggaagtcctcgtgt

SEQ ID NO: 148764 - DNA, 17 bp, Arabidopsis thaliana
tgaggaagttgagtagg

SEQ ID NO: 148765 - DNA, 17 bp, Arabidopsis thaliana
tgaggaatagctcagtt

SEQ ID NO: 148766 - DNA, 17 bp, Arabidopsis thaliana
tgaggaatgagatctcg

SEQ ID NO: 148767 - DNA, 17 bp, Arabidopsis thaliana
tgaggaatgtaccatat

SEQ ID NO: 148768 - DNA, 17 bp, Arabidopsis thaliana
tgaggacaaagcactcg

SEQ ID NO: 148769 - DNA, 17 bp, Arabidopsis thaliana
tgaggacatccggacgg

SEQ ID NO: 148770 - DNA, 17 bp, Arabidopsis thaliana
tgaggacattcttagtt

SEQ ID NO: 148771 - DNA, 17 bp, Arabidopsis thaliana
tgaggaccgagaccgtt

SEQ ID NO: 148772 - DNA, 17 bp, Arabidopsis thaliana
tgaggacgcttctccag

SEQ ID NO: 148773 - DNA, 17 bp, Arabidopsis thaliana
tgaggacggacctctgc

SEQ ID NO: 148774 - DNA, 17 bp, Arabidopsis thaliana
tgaggacgggttggcgg

SEQ ID NO: 148775 - DNA, 17 bp, Arabidopsis thaliana
tgaggacgggtttgggg

SEQ ID NO: 148776 - DNA, 17 bp, Arabidopsis thaliana
tgaggacgtacagatca

SEQ ID NO: 148777 - DNA, 17 bp, Arabidopsis thaliana
tgaggactccagttatt

SEQ ID NO: 148778 - DNA, 17 bp, Arabidopsis thaliana
tgaggactgggctcggg

SEQ ID NO: 148779 - DNA, 17 bp, Arabidopsis thaliana
tgaggactttcagagac

SEQ ID NO: 148780 - DNA, 17 bp, Arabidopsis thaliana
tgaggactttgcttctt

SEQ ID NO: 148781 - DNA, 17 bp, Arabidopsis thaliana
tgaggacttttagaacc

SEQ ID NO: 148782 - DNA, 17 bp, Arabidopsis thaliana
tgaggagaagatttggt

SEQ ID NO: 148783 - DNA, 17 bp, Arabidopsis thaliana
tgaggagacaacctttg

SEQ ID NO: 148784 - DNA, 17 bp, Arabidopsis thaliana
tgaggagactagatgtt

SEQ ID NO: 148785 - DNA, 17 bp, Arabidopsis thaliana
tgaggagagattacagg

SEQ ID NO: 148786 - DNA, 17 bp, Arabidopsis thaliana
tgaggagaggaggggca

SEQ ID NO: 148787 - DNA, 17 bp, Arabidopsis thaliana
tgaggagcaggcgccgg

SEQ ID NO: 148788 - DNA, 17 bp, Arabidopsis thaliana
tgaggagctctgatatg

SEQ ID NO: 148789 - DNA, 17 bp, Arabidopsis thaliana
tgaggagcttctgattc

SEQ ID NO: 148790 - DNA, 17 bp, Arabidopsis thaliana
tgaggaggaccttcaga

SEQ ID NO: 148791 - DNA, 17 bp, Arabidopsis thaliana
tgaggaggattaagagt

SEQ ID NO: 148792 - DNA, 17 bp, Arabidopsis thaliana
tgaggagggaagcggat

SEQ ID NO: 148793 - DNA, 17 bp, Arabidopsis thaliana
tgaggagggcacgtctg

SEQ ID NO: 148794 - DNA, 17 bp, Arabidopsis thaliana
tgaggagtctgacatgt

SEQ ID NO: 148795 - DNA, 17 bp, Arabidopsis thaliana
tgaggagtgcggctgta

SEQ ID NO: 148796 - DNA, 17 bp, Arabidopsis thaliana
tgaggagtgtggctgta

SEQ ID NO: 148797 - DNA, 17 bp, Arabidopsis thaliana
tgaggatactcgacacg

SEQ ID NO: 148798 - DNA, 17 bp, Arabidopsis thaliana
tgaggatagaccggatg

SEQ ID NO: 148799 - DNA, 17 bp, Arabidopsis thaliana
tgaggatagactggatg

SEQ ID NO: 148800 - DNA, 17 bp, Arabidopsis thaliana
tgaggatatgatttgcg

SEQ ID NO: 148801 - DNA, 17 bp, Arabidopsis thaliana
tgaggatcaagcattcc

SEQ ID NO: 148802 - DNA, 17 bp, Arabidopsis thaliana
tgaggatccaacggccc

SEQ ID NO: 148803 - DNA, 17 bp, Arabidopsis thaliana
tgaggatccgttcttga

SEQ ID NO: 148804 - DNA, 17 bp, Arabidopsis thaliana
tgaggatcgctttctct

SEQ ID NO: 148805 - DNA, 17 bp, Arabidopsis thaliana
tgaggatcgtaacctgg

SEQ ID NO: 148806 - DNA, 17 bp, Arabidopsis thaliana
tgaggatcgtgccacgt

SEQ ID NO: 148807 - DNA, 17 bp, Arabidopsis thaliana
tgaggatgatgttcttg

SEQ ID NO: 148808 - DNA, 17 bp, Arabidopsis thaliana
tgaggatgggtcggccg

SEQ ID NO: 148809 - DNA, 17 bp, Arabidopsis thaliana
tgaggatgggtgacctc

SEQ ID NO: 148810 - DNA, 17 bp, Arabidopsis thaliana
tgaggatgtagccaagt

SEQ ID NO: 148811 - DNA, 17 bp, Arabidopsis thaliana
tgaggatgtcaaaatgc

SEQ ID NO: 148812 - DNA, 17 bp, Arabidopsis thaliana
tgaggatgtcacgtcag

SEQ ID NO: 148813 - DNA, 17 bp, Arabidopsis thaliana
tgaggatgtgaatggtt

SEQ ID NO: 148814 - DNA, 17 bp, Arabidopsis thaliana
tgaggatgttctgtaac

SEQ ID NO: 148815 - DNA, 17 bp, Arabidopsis thaliana
tgaggatgttgcttata

SEQ ID NO: 148816 - DNA, 17 bp, Arabidopsis thaliana
tgaggattacggtggcg

SEQ ID NO: 148817 - DNA, 17 bp, Arabidopsis thaliana
tgaggattacggtttcg

SEQ ID NO: 148818 - DNA, 17 bp, Arabidopsis thaliana
tgaggattatgctgagt

SEQ ID NO: 148819 - DNA, 17 bp, Arabidopsis thaliana
tgaggattatggccttc

SEQ ID NO: 148820 - DNA, 17 bp, Arabidopsis thaliana
tgaggattccagtgttt

SEQ ID NO: 148821 - DNA, 17 bp, Arabidopsis thaliana
tgaggattggcgacatt

SEQ ID NO: 148822 - DNA, 17 bp, Arabidopsis thaliana
tgaggatttgtcccttc

SEQ ID NO: 148823 - DNA, 17 bp, Arabidopsis thaliana
tgaggcaaaatccacat

SEQ ID NO: 148824 - DNA, 17 bp, Arabidopsis thaliana
tgaggcaagtaaagatc

SEQ ID NO: 148825 - DNA, 17 bp, Arabidopsis thaliana
tgaggcaagtaacgagg

SEQ ID NO: 148826 - DNA, 17 bp, Arabidopsis thaliana
tgaggcaagtgtgcagg

SEQ ID NO: 148827 - DNA, 17 bp, Arabidopsis thaliana
tgaggcaataacaggtc

SEQ ID NO: 148828 - DNA, 17 bp, Arabidopsis thaliana
tgaggcaatcatgcaaa

SEQ ID NO: 148829 - DNA, 17 bp, Arabidopsis thaliana
tgaggcaattacggctg

SEQ ID NO: 148830 - DNA, 17 bp, Arabidopsis thaliana
tgaggcacagggtccac

SEQ ID NO: 148831 - DNA, 17 bp, Arabidopsis thaliana
tgaggcacggctctgcg

SEQ ID NO: 148832 - DNA, 17 bp, Arabidopsis thaliana
tgaggcacggctctgtg

SEQ ID NO: 148833 - DNA, 17 bp, Arabidopsis thaliana
tgaggcacgtctgcctg

SEQ ID NO: 148834 - DNA, 17 bp, Arabidopsis thaliana
tgaggcacttatgagag

SEQ ID NO: 148835 - DNA, 17 bp, Arabidopsis thaliana
tgaggcacttatgaggg

SEQ ID NO: 148836 - DNA, 17 bp, Arabidopsis thaliana
tgaggcacttgcacatg

SEQ ID NO: 148837 - DNA, 17 bp, Arabidopsis thaliana
tgaggcacttgtcacgg

SEQ ID NO: 148838 - DNA, 17 bp, Arabidopsis thaliana
tgaggcacttgtcaggg

SEQ ID NO: 148839 - DNA, 17 bp, Arabidopsis thaliana
tgaggcactttacagga

SEQ ID NO: 148840 - DNA, 17 bp, Arabidopsis thaliana
tgaggcactttctaagg

SEQ ID NO: 148841 - DNA, 17 bp, Arabidopsis thaliana
tgaggcactttctaagt

SEQ ID NO: 148842 - DNA, 17 bp, Arabidopsis thaliana
tgaggcactttgcagag

SEQ ID NO: 148843 - DNA, 17 bp, Arabidopsis thaliana
tgaggcagccgctgtaa

SEQ ID NO: 148844 - DNA, 17 bp, Arabidopsis thaliana
tgaggcaggaatcgctg

SEQ ID NO: 148845 - DNA, 17 bp, Arabidopsis thaliana
tgaggcaggctcggcgt

SEQ ID NO: 148846 - DNA, 17 bp, Arabidopsis thaliana
tgaggcagtgtcgagta

SEQ ID NO: 148847 - DNA, 17 bp, Arabidopsis thaliana
tgaggcatggccgagtg

SEQ ID NO: 148848 - DNA, 17 bp, Arabidopsis thaliana
tgaggcatgggcttcga

SEQ ID NO: 148849 - DNA, 17 bp, Arabidopsis thaliana
tgaggcatgtctatttt

SEQ ID NO: 148850 - DNA, 17 bp, Arabidopsis thaliana
tgaggccaaacttggca

SEQ ID NO: 148851 - DNA, 17 bp, Arabidopsis thaliana
tgaggccaaactttgca

SEQ ID NO: 148852 - DNA, 17 bp, Arabidopsis thaliana
tgaggcccctttaccat

SEQ ID NO: 148853 - DNA, 17 bp, Arabidopsis thaliana
tgaggccgcaaagagta

SEQ ID NO: 148854 - DNA, 17 bp, Arabidopsis thaliana
tgaggccttggtgaatg

SEQ ID NO: 148855 - DNA, 17 bp, Arabidopsis thaliana
tgaggcgaaacccgtaa

SEQ ID NO: 148856 - DNA, 17 bp, Arabidopsis thaliana
tgaggcgacacgtggca

SEQ ID NO: 148857 - DNA, 17 bp, Arabidopsis thaliana
tgaggcgaccaacactg

SEQ ID NO: 148858 - DNA, 17 bp, Arabidopsis thaliana
tgaggcgatcttgtgca

SEQ ID NO: 148859 - DNA, 17 bp, Arabidopsis thaliana
tgaggcgattcggtggg

SEQ ID NO: 148860 - DNA, 17 bp, Arabidopsis thaliana
tgaggcgcagcagttga

SEQ ID NO: 148861 - DNA, 17 bp, Arabidopsis thaliana
tgaggcgctagagcaaa

SEQ ID NO: 148862 - DNA, 17 bp, Arabidopsis thaliana
tgaggcgctagagcaag

SEQ ID NO: 148863 - DNA, 17 bp, Arabidopsis thaliana
tgaggcgctgtctacga

SEQ ID NO: 148864 - DNA, 17 bp, Arabidopsis thaliana
tgaggcggcgtcggtcg

SEQ ID NO: 148865 - DNA, 17 bp, Arabidopsis thaliana
tgaggcggctgtcgtag

SEQ ID NO: 148866 - DNA, 17 bp, Arabidopsis thaliana
tgaggcggttctcagtg

SEQ ID NO: 148867 - DNA, 17 bp, Arabidopsis thaliana
tgaggcggtttagatga

SEQ ID NO: 148868 - DNA, 17 bp, Arabidopsis thaliana
tgaggcggtttgggcgg

SEQ ID NO: 148869 - DNA, 17 bp, Arabidopsis thaliana
tgaggcgtagccaagcg

SEQ ID NO: 148870 - DNA, 17 bp, Arabidopsis thaliana
tgaggcgtcatgacatt

SEQ ID NO: 148871 - DNA, 17 bp, Arabidopsis thaliana
tgaggcgtcgtctgtcg

SEQ ID NO: 148872 - DNA, 17 bp, Arabidopsis thaliana
tgaggcgtgccggagtg

SEQ ID NO: 148873 - DNA, 17 bp, Arabidopsis thaliana
tgaggctatcagagact

SEQ ID NO: 148874 - DNA, 17 bp, Arabidopsis thaliana
tgaggctccaattcgac

SEQ ID NO: 148875 - DNA, 17 bp, Arabidopsis thaliana
tgaggctcttactatca

SEQ ID NO: 148876 - DNA, 17 bp, Arabidopsis thaliana
tgaggctgagcgacatg

SEQ ID NO: 148877 - DNA, 17 bp, Arabidopsis thaliana
tgaggctgatgtaccgg

SEQ ID NO: 148878 - DNA, 17 bp, Arabidopsis thaliana
tgaggctgccagcatga

SEQ ID NO: 148879 - DNA, 17 bp, Arabidopsis thaliana
tgaggctgcctgcgtgt

SEQ ID NO: 148880 - DNA, 17 bp, Arabidopsis thaliana
tgaggctgcctgggtgt

SEQ ID NO: 148881 - DNA, 17 bp, Arabidopsis thaliana
tgaggctggatcggctt

SEQ ID NO: 148882 - DNA, 17 bp, Arabidopsis thaliana
tgaggctggtttcacag

SEQ ID NO: 148883 - DNA, 17 bp, Arabidopsis thaliana
tgaggcttctcagacta

SEQ ID NO: 148884 - DNA, 17 bp, Arabidopsis thaliana
tgaggcttgtcccttct

SEQ ID NO: 148885 - DNA, 17 bp, Arabidopsis thaliana
tgaggcttgtccgccgt

SEQ ID NO: 148886 - DNA, 17 bp, Arabidopsis thaliana
tgaggctttgccggtgg

SEQ ID NO: 148887 - DNA, 17 bp, Arabidopsis thaliana
tgaggctttttttgaca

SEQ ID NO: 148888 - DNA, 17 bp, Arabidopsis thaliana
tgagggaagcatttgca

SEQ ID NO: 148889 - DNA, 17 bp, Arabidopsis thaliana
tgagggaatctgggcag

SEQ ID NO: 148890 - DNA, 17 bp, Arabidopsis thaliana
tgagggacagaggagag

SEQ ID NO: 148891 - DNA, 17 bp, Arabidopsis thaliana
tgagggacccatgctgc

SEQ ID NO: 148892 - DNA, 17 bp, Arabidopsis thaliana
tgagggacgtggcggtt

SEQ ID NO: 148893 - DNA, 17 bp, Arabidopsis thaliana
tgagggaggttgaatgg

SEQ ID NO: 148894 - DNA, 17 bp, Arabidopsis thaliana
tgagggagtcgactcag

SEQ ID NO: 148895 - DNA, 17 bp, Arabidopsis thaliana
tgagggagtctgggcag

SEQ ID NO: 148896 - DNA, 17 bp, Arabidopsis thaliana
tgagggagtgatcactt

SEQ ID NO: 148897 - DNA, 17 bp, Arabidopsis thaliana
tgagggatccctcgcgg

SEQ ID NO: 148898 - DNA, 17 bp, Arabidopsis thaliana
tgagggatgaaatctag

SEQ ID NO: 148899 - DNA, 17 bp, Arabidopsis thaliana
tgagggatgaaccggaa

SEQ ID NO: 148900 - DNA, 17 bp, Arabidopsis thaliana
tgagggattaccggttt

SEQ ID NO: 148901 - DNA, 17 bp, Arabidopsis thaliana
tgagggattacgagttt

SEQ ID NO: 148902 - DNA, 17 bp, Arabidopsis thaliana
tgagggattccaccaac

SEQ ID NO: 148903 - DNA, 17 bp, Arabidopsis thaliana
tgagggattctcgctct

SEQ ID NO: 148904 - DNA, 17 bp, Arabidopsis thaliana
tgagggatttgcgagga

SEQ ID NO: 148905 - DNA, 17 bp, Arabidopsis thaliana
tgagggcacgtctgcct

SEQ ID NO: 148906 - DNA, 17 bp, Arabidopsis thaliana
tgagggcagggctcggg

SEQ ID NO: 148907 - DNA, 17 bp, Arabidopsis thaliana
tgagggcatttggtttg

SEQ ID NO: 148908 - DNA, 17 bp, Arabidopsis thaliana
tgagggccaggtaccgt

SEQ ID NO: 148909 - DNA, 17 bp, Arabidopsis thaliana
tgagggcccaggagtga

SEQ ID NO: 148910 - DNA, 17 bp, Arabidopsis thaliana
tgagggcccgagtgatg

SEQ ID NO: 148911 - DNA, 17 bp, Arabidopsis thaliana
tgagggccgggctcccc

SEQ ID NO: 148912 - DNA, 17 bp, Arabidopsis thaliana
tgagggcgatcttaact

SEQ ID NO: 148913 - DNA, 17 bp, Arabidopsis thaliana
tgagggcggcgatacgg

SEQ ID NO: 148914 - DNA, 17 bp, Arabidopsis thaliana
tgagggcgggttcataa

SEQ ID NO: 148915 - DNA, 17 bp, Arabidopsis thaliana
tgagggctgagctcggg

SEQ ID NO: 148916 - DNA, 17 bp, Arabidopsis thaliana
tgagggctgggcgcggg

SEQ ID NO: 148917 - DNA, 17 bp, Arabidopsis thaliana
tgagggctgggctaggg

SEQ ID NO: 148918 - DNA, 17 bp, Arabidopsis thaliana
tgagggctgggctccgg

SEQ ID NO: 148919 - DNA, 17 bp, Arabidopsis thaliana
tgagggctgggctcgcg

SEQ ID NO: 148920 - DNA, 17 bp, Arabidopsis thaliana
tgagggctgggctcggg

SEQ ID NO: 148921 - DNA, 17 bp, Arabidopsis thaliana
tgagggctgggctcggt

SEQ ID NO: 148922 - DNA, 17 bp, Arabidopsis thaliana
tgagggctgggctctgg

SEQ ID NO: 148923 - DNA, 17 bp, Arabidopsis thaliana
tgagggctgggctgggg

SEQ ID NO: 148924 - DNA, 17 bp, Arabidopsis thaliana
tgagggctgggttcggc

SEQ ID NO: 148925 - DNA, 17 bp, Arabidopsis thaliana
tgagggctgggttcggg

SEQ ID NO: 148926 - DNA, 17 bp, Arabidopsis thaliana
tgaggggaaccatgcaa

SEQ ID NO: 148927 - DNA, 17 bp, Arabidopsis thaliana
tgaggggattacgggct

SEQ ID NO: 148928 - DNA, 17 bp, Arabidopsis thaliana
tgaggggccacaaggaa

SEQ ID NO: 148929 - DNA, 17 bp, Arabidopsis thaliana
tgaggggttcgatcccc

SEQ ID NO: 148930 - DNA, 17 bp, Arabidopsis thaliana
tgaggggttgtcagctg

SEQ ID NO: 148931 - DNA, 17 bp, Arabidopsis thaliana
tgagggtaagccacttc

SEQ ID NO: 148932 - DNA, 17 bp, Arabidopsis thaliana
tgagggtaatttggtca

SEQ ID NO: 148933 - DNA, 17 bp, Arabidopsis thaliana
tgagggtatccttaggc

SEQ ID NO: 148934 - DNA, 17 bp, Arabidopsis thaliana
tgagggtatgcctttca

SEQ ID NO: 148935 - DNA, 17 bp, Arabidopsis thaliana
tgagggtcggcaatcgg

SEQ ID NO: 148936 - DNA, 17 bp, Arabidopsis thaliana
tgagggtcgttctgcgg

SEQ ID NO: 148937 - DNA, 17 bp, Arabidopsis thaliana
tgagggtgatacgtaag

SEQ ID NO: 148938 - DNA, 17 bp, Arabidopsis thaliana
tgagggtggcatgctcc

SEQ ID NO: 148939 - DNA, 17 bp, Arabidopsis thaliana
tgagggtggcatgtccc

SEQ ID NO: 148940 - DNA, 17 bp, Arabidopsis thaliana
tgagggtggtggctgca

SEQ ID NO: 148941 - DNA, 17 bp, Arabidopsis thaliana
tgagggtgtcgcctgca

SEQ ID NO: 148942 - DNA, 17 bp, Arabidopsis thaliana
tgagggttagtcgatcc

SEQ ID NO: 148943 - DNA, 17 bp, Arabidopsis thaliana
tgagggttcaaatccct

SEQ ID NO: 148944 - DNA, 17 bp, Arabidopsis thaliana
tgagggttcaagtccct

SEQ ID NO: 148945 - DNA, 17 bp, Arabidopsis thaliana
tgagggttcgttccccc

SEQ ID NO: 148946 - DNA, 17 bp, Arabidopsis thaliana
tgagggttgggctcggg

SEQ ID NO: 148947 - DNA, 17 bp, Arabidopsis thaliana
tgaggtaacgacgcttg

SEQ ID NO: 148948 - DNA, 17 bp, Arabidopsis thaliana
tgaggtaatttcgatcg

SEQ ID NO: 148949 - DNA, 17 bp, Arabidopsis thaliana
tgaggtacggtttcggc

SEQ ID NO: 148950 - DNA, 17 bp, Arabidopsis thaliana
tgaggtactcattcttg

SEQ ID NO: 148951 - DNA, 17 bp, Arabidopsis thaliana
tgaggtagttgacaatg

SEQ ID NO: 148952 - DNA, 17 bp, Arabidopsis thaliana
tgaggtataaaacggcc

SEQ ID NO: 148953 - DNA, 17 bp, Arabidopsis thaliana
tgaggtatcatatgtcg

SEQ ID NO: 148954 - DNA, 17 bp, Arabidopsis thaliana
tgaggtatccaacttca

SEQ ID NO: 148955 - DNA, 17 bp, Arabidopsis thaliana
tgaggtcaaggtgagtc

SEQ ID NO: 148956 - DNA, 17 bp, Arabidopsis thaliana
tgaggtcaccggctcgc

SEQ ID NO: 148957 - DNA, 17 bp, Arabidopsis thaliana
tgaggtcacgtactaca

SEQ ID NO: 148958 - DNA, 17 bp, Arabidopsis thaliana
tgaggtcactaccttag

SEQ ID NO: 148959 - DNA, 17 bp, Arabidopsis thaliana
tgaggtcattgttttcg

SEQ ID NO: 148960 - DNA, 17 bp, Arabidopsis thaliana
tgaggtcatttagtggt

SEQ ID NO: 148961 - DNA, 17 bp, Arabidopsis thaliana
tgaggtccacgtcatcg

SEQ ID NO: 148962 - DNA, 17 bp, Arabidopsis thaliana
tgaggtccatggcggaa

SEQ ID NO: 148963 - DNA, 17 bp, Arabidopsis thaliana
tgaggtccctactgaag

SEQ ID NO: 148964 - DNA, 17 bp, Arabidopsis thaliana
tgaggtccctactgaat

SEQ ID NO: 148965 - DNA, 17 bp, Arabidopsis thaliana
tgaggtccgcctttggt

SEQ ID NO: 148966 - DNA, 17 bp, Arabidopsis thaliana
tgaggtccttaagcggt

SEQ ID NO: 148967 - DNA, 17 bp, Arabidopsis thaliana
tgaggtccttcagcggt

SEQ ID NO: 148968 - DNA, 17 bp, Arabidopsis thaliana
tgaggtcctttagcggt

SEQ ID NO: 148969 - DNA, 17 bp, Arabidopsis thaliana
tgaggtcctttagtggt

SEQ ID NO: 148970 - DNA, 17 bp, Arabidopsis thaliana
tgaggtcctttctctcg

SEQ ID NO: 148971 - DNA, 17 bp, Arabidopsis thaliana
tgaggtcgacggttcga

SEQ ID NO: 148972 - DNA, 17 bp, Arabidopsis thaliana
tgaggtcgagtacccac

SEQ ID NO: 148973 - DNA, 17 bp, Arabidopsis thaliana
tgaggtcgccggttcga

SEQ ID NO: 148974 - DNA, 17 bp, Arabidopsis thaliana
tgaggtcgccgtttcta

SEQ ID NO: 148975 - DNA, 17 bp, Arabidopsis thaliana
tgaggtcggtctctaag

SEQ ID NO: 148976 - DNA, 17 bp, Arabidopsis thaliana
tgaggtctaatgttcca

SEQ ID NO: 148977 - DNA, 17 bp, Arabidopsis thaliana
tgaggtctgaggtgctg

SEQ ID NO: 148978 - DNA, 17 bp, Arabidopsis thaliana
tgaggtctgtccgatca

SEQ ID NO: 148979 - DNA, 17 bp, Arabidopsis thaliana
tgaggtgaacgacctgt

SEQ ID NO: 148980 - DNA, 17 bp, Arabidopsis thaliana
tgaggtgaagtggtggt

SEQ ID NO: 148981 - DNA, 17 bp, Arabidopsis thaliana
tgaggtgaatcgctgcc

SEQ ID NO: 148982 - DNA, 17 bp, Arabidopsis thaliana
tgaggtgactgcatttt

SEQ ID NO: 148983 - DNA, 17 bp, Arabidopsis thaliana
tgaggtgactttgatgt

SEQ ID NO: 148984 - DNA, 17 bp, Arabidopsis thaliana
tgaggtgattcctccgg

SEQ ID NO: 148985 - DNA, 17 bp, Arabidopsis thaliana
tgaggtgcagtgggttc

SEQ ID NO: 148986 - DNA, 17 bp, Arabidopsis thaliana
tgaggtgccaagaggga

SEQ ID NO: 148987 - DNA, 17 bp, Arabidopsis thaliana
tgaggtgctatgcttaa

SEQ ID NO: 148988 - DNA, 17 bp, Arabidopsis thaliana
tgaggtggaagcgtgat

SEQ ID NO: 148989 - DNA, 17 bp, Arabidopsis thaliana
tgaggtggcggcctaag

SEQ ID NO: 148990 - DNA, 17 bp, Arabidopsis thaliana
tgaggtggctaaggagg

SEQ ID NO: 148991 - DNA, 17 bp, Arabidopsis thaliana
tgaggtggtcccatgcc

SEQ ID NO: 148992 - DNA, 17 bp, Arabidopsis thaliana
tgaggtggtgcatggct

SEQ ID NO: 148993 - DNA, 17 bp, Arabidopsis thaliana
tgaggtggtgtggcgaa

SEQ ID NO: 148994 - DNA, 17 bp, Arabidopsis thaliana
tgaggtgtcatcacatg

SEQ ID NO: 148995 - DNA, 17 bp, Arabidopsis thaliana
tgaggtgtcatgaagtc

SEQ ID NO: 148996 - DNA, 17 bp, Arabidopsis thaliana
tgaggtgtttggttaag

SEQ ID NO: 148997 - DNA, 17 bp, Arabidopsis thaliana
tgaggttatcgtacttc

SEQ ID NO: 148998 - DNA, 17 bp, Arabidopsis thaliana
tgaggttatcgtgcttc

SEQ ID NO: 148999 - DNA, 17 bp, Arabidopsis thaliana
tgaggttcatcatcaac

SEQ ID NO: 149000 - DNA, 17 bp, Arabidopsis thaliana
tgaggttccccggcaac

SEQ ID NO: 149001 - DNA, 17 bp, Arabidopsis thaliana
tgaggttccctgaacag

SEQ ID NO: 149002 - DNA, 17 bp, Arabidopsis thaliana
tgaggttcctgatctgg

SEQ ID NO: 149003 - DNA, 17 bp, Arabidopsis thaliana
tgaggttcgaaacatgt

SEQ ID NO: 149004 - DNA, 17 bp, Arabidopsis thaliana
tgaggttcgagtcccct

SEQ ID NO: 149005 - DNA, 17 bp, Arabidopsis thaliana
tgaggttcgagtcctct

SEQ ID NO: 149006 - DNA, 17 bp, Arabidopsis thaliana
tgaggttcggccaactc

SEQ ID NO: 149007 - DNA, 17 bp, Arabidopsis thaliana
tgaggttcgtttcccgg

SEQ ID NO: 149008 - DNA, 17 bp, Arabidopsis thaliana
tgaggttctagttgtca

SEQ ID NO: 149009 - DNA, 17 bp, Arabidopsis thaliana
tgaggttctggccgagg

SEQ ID NO: 149010 - DNA, 17 bp, Arabidopsis thaliana
tgaggttgaggttgacg

SEQ ID NO: 149011 - DNA, 17 bp, Arabidopsis thaliana
tgaggttgcaactgtgt

SEQ ID NO: 149012 - DNA, 17 bp, Arabidopsis thaliana
tgaggttgcctacttct

SEQ ID NO: 149013 - DNA, 17 bp, Arabidopsis thaliana
tgaggttgcttcggggc

SEQ ID NO: 149014 - DNA, 17 bp, Arabidopsis thaliana
tgaggttggcgggacgg

SEQ ID NO: 149015 - DNA, 17 bp, Arabidopsis thaliana
tgaggtttatgtcttcg

SEQ ID NO: 149016 - DNA, 17 bp, Arabidopsis thaliana
tgaggtttcttgggtgg

SEQ ID NO: 149017 - DNA, 17 bp, Arabidopsis thaliana
tgaggtttggtttcgga

SEQ ID NO: 149018 - DNA, 17 bp, Arabidopsis thaliana
tgaggtttgtgcacttc

SEQ ID NO: 149019 - DNA, 17 bp, Arabidopsis thaliana
tgaggttttgtggacgg

SEQ ID NO: 149020 - DNA, 17 bp, Arabidopsis thaliana
tgagtaacccccttttt

SEQ ID NO: 149021 - DNA, 17 bp, Arabidopsis thaliana
tgagtaactcggactat

SEQ ID NO: 149022 - DNA, 17 bp, Arabidopsis thaliana
tgagtaaggcgggatcg

SEQ ID NO: 149023 - DNA, 17 bp, Arabidopsis thaliana
tgagtaagtggcgtttt

SEQ ID NO: 149024 - DNA, 17 bp, Arabidopsis thaliana
tgagtaagttagtgctt

SEQ ID NO: 149025 - DNA, 17 bp, Arabidopsis thaliana
tgagtaatcaccttgtt

SEQ ID NO: 149026 - DNA, 17 bp, Arabidopsis thaliana
tgagtaatctggatccc

SEQ ID NO: 149027 - DNA, 17 bp, Arabidopsis thaliana
tgagtacagaggcgttt

SEQ ID NO: 149028 - DNA, 17 bp, Arabidopsis thaliana
tgagtacggacactacg

SEQ ID NO: 149029 - DNA, 17 bp, Arabidopsis thaliana
tgagtacgtgcggaccc

SEQ ID NO: 149030 - DNA, 17 bp, Arabidopsis thaliana
tgagtacgtgcggatcg

SEQ ID NO: 149031 - DNA, 17 bp, Arabidopsis thaliana
tgagtagactatgaaga

SEQ ID NO: 149032 - DNA, 17 bp, Arabidopsis thaliana
tgagtagactgtgaaga

SEQ ID NO: 149033 - DNA, 17 bp, Arabidopsis thaliana
tgagtagccaattgcag

SEQ ID NO: 149034 - DNA, 17 bp, Arabidopsis thaliana
tgagtagcgtgaccggt

SEQ ID NO: 149035 - DNA, 17 bp, Arabidopsis thaliana
tgagtaggagggcctgg

SEQ ID NO: 149036 - DNA, 17 bp, Arabidopsis thaliana
tgagtaggagggcgcgg

SEQ ID NO: 149037 - DNA, 17 bp, Arabidopsis thaliana
tgagtaggccatttcgt

SEQ ID NO: 149038 - DNA, 17 bp, Arabidopsis thaliana
tgagtaggccgagttat

SEQ ID NO: 149039 - DNA, 17 bp, Arabidopsis thaliana
tgagtaggtgggcgcgg

SEQ ID NO: 149040 - DNA, 17 bp, Arabidopsis thaliana
tgagtagtcgagaagca

SEQ ID NO: 149041 - DNA, 17 bp, Arabidopsis thaliana
tgagtagtcgtgtgtcg

SEQ ID NO: 149042 - DNA, 17 bp, Arabidopsis thaliana
tgagtagtgcggattaa

SEQ ID NO: 149043 - DNA, 17 bp, Arabidopsis thaliana
tgagtagttgattccgg

SEQ ID NO: 149044 - DNA, 17 bp, Arabidopsis thaliana
tgagtataactgtgacc

SEQ ID NO: 149045 - DNA, 17 bp, Arabidopsis thaliana
tgagtatcacatatctg

SEQ ID NO: 149046 - DNA, 17 bp, Arabidopsis thaliana
tgagtatcagactaaaa

SEQ ID NO: 149047 - DNA, 17 bp, Arabidopsis thaliana
tgagtatcagagcgatt

SEQ ID NO: 149048 - DNA, 17 bp, Arabidopsis thaliana
tgagtatcaggtgacgt

SEQ ID NO: 149049 - DNA, 17 bp, Arabidopsis thaliana
tgagtatcatgtgactt

SEQ ID NO: 149050 - DNA, 17 bp, Arabidopsis thaliana
tgagtatcatttcgaaa

SEQ ID NO: 149051 - DNA, 17 bp, Arabidopsis thaliana
tgagtatccagagcgta

SEQ ID NO: 149052 - DNA, 17 bp, Arabidopsis thaliana
tgagtatccctacatag

SEQ ID NO: 149053 - DNA, 17 bp, Arabidopsis thaliana
tgagtatgccgctatgg

SEQ ID NO: 149054 - DNA, 17 bp, Arabidopsis thaliana
tgagtatggtctgagag

SEQ ID NO: 149055 - DNA, 17 bp, Arabidopsis thaliana
tgagtatgtgcggatcg

SEQ ID NO: 149056 - DNA, 17 bp, Arabidopsis thaliana
tgagtatgtgtagatcg

SEQ ID NO: 149057 - DNA, 17 bp, Arabidopsis thaliana
tgagtattctgctgcag

SEQ ID NO: 149058 - DNA, 17 bp, Arabidopsis thaliana
tgagtatttctgactac

SEQ ID NO: 149059 - DNA, 17 bp, Arabidopsis thaliana
tgagtcaaattaagccg

SEQ ID NO: 149060 - DNA, 17 bp, Arabidopsis thaliana
tgagtcaacggctactg

SEQ ID NO: 149061 - DNA, 17 bp, Arabidopsis thaliana
tgagtcaacttatcagt

SEQ ID NO: 149062 - DNA, 17 bp, Arabidopsis thaliana
tgagtcaatgatcgttt

SEQ ID NO: 149063 - DNA, 17 bp, Arabidopsis thaliana
tgagtcactatgcaatt

SEQ ID NO: 149064 - DNA, 17 bp, Arabidopsis thaliana
tgagtcagagactaacc

SEQ ID NO: 149065 - DNA, 17 bp, Arabidopsis thaliana
tgagtcatcaattgtta

SEQ ID NO: 149066 - DNA, 17 bp, Arabidopsis thaliana
tgagtcattctagtcag

SEQ ID NO: 149067 - DNA, 17 bp, Arabidopsis thaliana
tgagtcatttggtttga

SEQ ID NO: 149068 - DNA, 17 bp, Arabidopsis thaliana
tgagtccaccaagatcg

SEQ ID NO: 149069 - DNA, 17 bp, Arabidopsis thaliana
tgagtccagcggtacaa

SEQ ID NO: 149070 - DNA, 17 bp, Arabidopsis thaliana
tgagtccaggtcttcag

SEQ ID NO: 149071 - DNA, 17 bp, Arabidopsis thaliana
tgagtcccaccgggtgt

SEQ ID NO: 149072 - DNA, 17 bp, Arabidopsis thaliana
tgagtcccgagttcttt

SEQ ID NO: 149073 - DNA, 17 bp, Arabidopsis thaliana
tgagtccctgttcgatt

SEQ ID NO: 149074 - DNA, 17 bp, Arabidopsis thaliana
tgagtccgcctttggtg

SEQ ID NO: 149075 - DNA, 17 bp, Arabidopsis thaliana
tgagtccgcttatctcc

SEQ ID NO: 149076 - DNA, 17 bp, Arabidopsis thaliana
tgagtcctcatgttgca

SEQ ID NO: 149077 - DNA, 17 bp, Arabidopsis thaliana
tgagtcctcgtgttgca

SEQ ID NO: 149078 - DNA, 17 bp, Arabidopsis thaliana
tgagtccttggctttgt

SEQ ID NO: 149079 - DNA, 17 bp, Arabidopsis thaliana
tgagtccttgggtcccc

SEQ ID NO: 149080 - DNA, 17 bp, Arabidopsis thaliana
tgagtcgaccggagatg

SEQ ID NO: 149081 - DNA, 17 bp, Arabidopsis thaliana
tgagtcgacgctactta

SEQ ID NO: 149082 - DNA, 17 bp, Arabidopsis thaliana
tgagtcgactttgaatt

SEQ ID NO: 149083 - DNA, 17 bp, Arabidopsis thaliana
tgagtcgataagtaaac

SEQ ID NO: 149084 - DNA, 17 bp, Arabidopsis thaliana
tgagtcgatttggccgg

SEQ ID NO: 149085 - DNA, 17 bp, Arabidopsis thaliana
tgagtcgcagtgaccag

SEQ ID NO: 149086 - DNA, 17 bp, Arabidopsis thaliana
tgagtcgcatcctgtag

SEQ ID NO: 149087 - DNA, 17 bp, Arabidopsis thaliana
tgagtcgccattgttag

SEQ ID NO: 149088 - DNA, 17 bp, Arabidopsis thaliana
tgagtcgctgcgattca

SEQ ID NO: 149089 - DNA, 17 bp, Arabidopsis thaliana
tgagtcgctttgaccgg

SEQ ID NO: 149090 - DNA, 17 bp, Arabidopsis thaliana
tgagtcggacttttcgg

SEQ ID NO: 149091 - DNA, 17 bp, Arabidopsis thaliana
tgagtcggacttttctg

SEQ ID NO: 149092 - DNA, 17 bp, Arabidopsis thaliana
tgagtcgtcgcattttt

SEQ ID NO: 149093 - DNA, 17 bp, Arabidopsis thaliana
tgagtcgtttgccagtt

SEQ ID NO: 149094 - DNA, 17 bp, Arabidopsis thaliana
tgagtctactcctgctc

SEQ ID NO: 149095 - DNA, 17 bp, Arabidopsis thaliana
tgagtctatcgatcaga

SEQ ID NO: 149096 - DNA, 17 bp, Arabidopsis thaliana
tgagtctatgatcaaat

SEQ ID NO: 149097 - DNA, 17 bp, Arabidopsis thaliana
tgagtctatgtgtcgtt

SEQ ID NO: 149098 - DNA, 17 bp, Arabidopsis thaliana
tgagtctatttcgttgc

SEQ ID NO: 149099 - DNA, 17 bp, Arabidopsis thaliana
tgagtctatttggccgg

SEQ ID NO: 149100 - DNA, 17 bp, Arabidopsis thaliana
tgagtctcacgtcctct

SEQ ID NO: 149101 - DNA, 17 bp, Arabidopsis thaliana
tgagtctcagctactgc

SEQ ID NO: 149102 - DNA, 17 bp, Arabidopsis thaliana
tgagtctcagtcgaaca

SEQ ID NO: 149103 - DNA, 17 bp, Arabidopsis thaliana
tgagtctccagtcgggt

SEQ ID NO: 149104 - DNA, 17 bp, Arabidopsis thaliana
tgagtctccgcccctgt

SEQ ID NO: 149105 - DNA, 17 bp, Arabidopsis thaliana
tgagtctcgcctgatgg

SEQ ID NO: 149106 - DNA, 17 bp, Arabidopsis thaliana
tgagtctcggagattca

SEQ ID NO: 149107 - DNA, 17 bp, Arabidopsis thaliana
tgagtctctccataggg

SEQ ID NO: 149108 - DNA, 17 bp, Arabidopsis thaliana
tgagtctgacatgtgtg

SEQ ID NO: 149109 - DNA, 17 bp, Arabidopsis thaliana
tgagtctgagggcgatc

SEQ ID NO: 149110 - DNA, 17 bp, Arabidopsis thaliana
tgagtctgcagcacgcg

SEQ ID NO: 149111 - DNA, 17 bp, Arabidopsis thaliana
tgagtctgcctgggtgt

SEQ ID NO: 149112 - DNA, 17 bp, Arabidopsis thaliana
tgagtctgccttggtgt

SEQ ID NO: 149113 - DNA, 17 bp, Arabidopsis thaliana
tgagtctggacggcaaa

SEQ ID NO: 149114 - DNA, 17 bp, Arabidopsis thaliana
tgagtctgtaggtggct

SEQ ID NO: 149115 - DNA, 17 bp, Arabidopsis thaliana
tgagtctgttggtgcca

SEQ ID NO: 149116 - DNA, 17 bp, Arabidopsis thaliana
tgagtcttacgctggcc

SEQ ID NO: 149117 - DNA, 17 bp, Arabidopsis thaliana
tgagtcttagctcagtg

SEQ ID NO: 149118 - DNA, 17 bp, Arabidopsis thaliana
tgagtcttctgtatcat

SEQ ID NO: 149119 - DNA, 17 bp, Arabidopsis thaliana
tgagtcttgctgctgtt

SEQ ID NO: 149120 - DNA, 17 bp, Arabidopsis thaliana
tgagtctttggctttgt

SEQ ID NO: 149121 - DNA, 17 bp, Arabidopsis thaliana
tgagtgaaacggcttgt

SEQ ID NO: 149122 - DNA, 17 bp, Arabidopsis thaliana
tgagtgaagaggaagca

SEQ ID NO: 149123 - DNA, 17 bp, Arabidopsis thaliana
tgagtgacccgcttttt

SEQ ID NO: 149124 - DNA, 17 bp, Arabidopsis thaliana
tgagtgacgtttgagat

SEQ ID NO: 149125 - DNA, 17 bp, Arabidopsis thaliana
tgagtgactgttggcag

SEQ ID NO: 149126 - DNA, 17 bp, Arabidopsis thaliana
tgagtgactgttggcgg

SEQ ID NO: 149127 - DNA, 17 bp, Arabidopsis thaliana
tgagtgagactccagag

SEQ ID NO: 149128 - DNA, 17 bp, Arabidopsis thaliana
tgagtgagccgcgccaa

SEQ ID NO: 149129 - DNA, 17 bp, Arabidopsis thaliana
tgagtgagccgtgtcaa

SEQ ID NO: 149130 - DNA, 17 bp, Arabidopsis thaliana
tgagtgaggattggtga

SEQ ID NO: 149131 - DNA, 17 bp, Arabidopsis thaliana
tgagtgagggctgggct

SEQ ID NO: 149132 - DNA, 17 bp, Arabidopsis thaliana
tgagtgatacctgggtt

SEQ ID NO: 149133 - DNA, 17 bp, Arabidopsis thaliana
tgagtgatgatactcaa

SEQ ID NO: 149134 - DNA, 17 bp, Arabidopsis thaliana
tgagtgatgatactcga

SEQ ID NO: 149135 - DNA, 17 bp, Arabidopsis thaliana
tgagtgattctggtcca

SEQ ID NO: 149136 - DNA, 17 bp, Arabidopsis thaliana
tgagtgcaactgagatt

SEQ ID NO: 149137 - DNA, 17 bp, Arabidopsis thaliana
tgagtgcattggtcggc

SEQ ID NO: 149138 - DNA, 17 bp, Arabidopsis thaliana
tgagtgccacagacaga

SEQ ID NO: 149139 - DNA, 17 bp, Arabidopsis thaliana
tgagtgccacgactcct

SEQ ID NO: 149140 - DNA, 17 bp, Arabidopsis thaliana
tgagtgccagcagccgc

SEQ ID NO: 149141 - DNA, 17 bp, Arabidopsis thaliana
tgagtgccgctcacgcc

SEQ ID NO: 149142 - DNA, 17 bp, Arabidopsis thaliana
tgagtgcggtgcggttc

SEQ ID NO: 149143 - DNA, 17 bp, Arabidopsis thaliana
tgagtgcggtgtatgtc

SEQ ID NO: 149144 - DNA, 17 bp, Arabidopsis thaliana
tgagtgcggtttatgtc

SEQ ID NO: 149145 - DNA, 17 bp, Arabidopsis thaliana
tgagtgcggttttggtc

SEQ ID NO: 149146 - DNA, 17 bp, Arabidopsis thaliana
tgagtgcggttttgttt

SEQ ID NO: 149147 - DNA, 17 bp, Arabidopsis thaliana
tgagtgcgtcacttagg

SEQ ID NO: 149148 - DNA, 17 bp, Arabidopsis thaliana
tgagtgcgtttgcggga

SEQ ID NO: 149149 - DNA, 17 bp, Arabidopsis thaliana
tgagtgctatagccgac

SEQ ID NO: 149150 - DNA, 17 bp, Arabidopsis thaliana
tgagtgctctcctattc

SEQ ID NO: 149151 - DNA, 17 bp, Arabidopsis thaliana
tgagtgctgggctcggg

SEQ ID NO: 149152 - DNA, 17 bp, Arabidopsis thaliana
tgagtggaccggcgatt

SEQ ID NO: 149153 - DNA, 17 bp, Arabidopsis thaliana
tgagtggaggctagccc

SEQ ID NO: 149154 - DNA, 17 bp, Arabidopsis thaliana
tgagtggatcaggtcct

SEQ ID NO: 149155 - DNA, 17 bp, Arabidopsis thaliana
tgagtgggctgatgatg

SEQ ID NO: 149156 - DNA, 17 bp, Arabidopsis thaliana
tgagtggtatgatcggt

SEQ ID NO: 149157 - DNA, 17 bp, Arabidopsis thaliana
tgagtggtgacttaggt

SEQ ID NO: 149158 - DNA, 17 bp, Arabidopsis thaliana
tgagtggtgatgtgata

SEQ ID NO: 149159 - DNA, 17 bp, Arabidopsis thaliana
tgagtggtggtgcatgg

SEQ ID NO: 149160 - DNA, 17 bp, Arabidopsis thaliana
tgagtgtacgaatccga

SEQ ID NO: 149161 - DNA, 17 bp, Arabidopsis thaliana
tgagtgtatgattggtg

SEQ ID NO: 149162 - DNA, 17 bp, Arabidopsis thaliana
tgagtgtccgatcactt

SEQ ID NO: 149163 - DNA, 17 bp, Arabidopsis thaliana
tgagtgtcttgcaaaga

SEQ ID NO: 149164 - DNA, 17 bp, Arabidopsis thaliana
tgagtgtgcattggtcg

SEQ ID NO: 149165 - DNA, 17 bp, Arabidopsis thaliana
tgagtgtgcgaatccga

SEQ ID NO: 149166 - DNA, 17 bp, Arabidopsis thaliana
tgagtgtgctagtacat

SEQ ID NO: 149167 - DNA, 17 bp, Arabidopsis thaliana
tgagtgtgctagtgcac

SEQ ID NO: 149168 - DNA, 17 bp, Arabidopsis thaliana
tgagtgtgctagtgcat

SEQ ID NO: 149169 - DNA, 17 bp, Arabidopsis thaliana
tgagtgtgctattgcac

SEQ ID NO: 149170 - DNA, 17 bp, Arabidopsis thaliana
tgagtgtggtcggcttg

SEQ ID NO: 149171 - DNA, 17 bp, Arabidopsis thaliana
tgagtgtgtaaggtgca

SEQ ID NO: 149172 - DNA, 17 bp, Arabidopsis thaliana
tgagtgtgtaaggtgcg

SEQ ID NO: 149173 - DNA, 17 bp, Arabidopsis thaliana
tgagtgtgtaccgttac

SEQ ID NO: 149174 - DNA, 17 bp, Arabidopsis thaliana
tgagtgtgtatgctcaa

SEQ ID NO: 149175 - DNA, 17 bp, Arabidopsis thaliana
tgagtgtgtgaatccga

SEQ ID NO: 149176 - DNA, 17 bp, Arabidopsis thaliana
tgagtgtgtgcggatcg

SEQ ID NO: 149177 - DNA, 17 bp, Arabidopsis thaliana
tgagtgtgttggatgtt

SEQ ID NO: 149178 - DNA, 17 bp, Arabidopsis thaliana
tgagtgttctgctgcag

SEQ ID NO: 149179 - DNA, 17 bp, Arabidopsis thaliana
tgagtgttgtaagtctg

SEQ ID NO: 149180 - DNA, 17 bp, Arabidopsis thaliana
tgagttaaaattatcat

SEQ ID NO: 149181 - DNA, 17 bp, Arabidopsis thaliana
tgagttaaactgaagtc

SEQ ID NO: 149182 - DNA, 17 bp, Arabidopsis thaliana
tgagttaacaatgcacc

SEQ ID NO: 149183 - DNA, 17 bp, Arabidopsis thaliana
tgagttaagatccgatt

SEQ ID NO: 149184 - DNA, 17 bp, Arabidopsis thaliana
tgagttaaggatgttcg

SEQ ID NO: 149185 - DNA, 17 bp, Arabidopsis thaliana
tgagttaagttgagttg

SEQ ID NO: 149186 - DNA, 17 bp, Arabidopsis thaliana
tgagttaatttggcgag

SEQ ID NO: 149187 - DNA, 17 bp, Arabidopsis thaliana
tgagttacatagacctc

SEQ ID NO: 149188 - DNA, 17 bp, Arabidopsis thaliana
tgagttacctaggtgga

SEQ ID NO: 149189 - DNA, 17 bp, Arabidopsis thaliana
tgagttacggtatgttg

SEQ ID NO: 149190 - DNA, 17 bp, Arabidopsis thaliana
tgagttactaactttga

SEQ ID NO: 149191 - DNA, 17 bp, Arabidopsis thaliana
tgagttactatttgttt

SEQ ID NO: 149192 - DNA, 17 bp, Arabidopsis thaliana
tgagttagaaagttatc

SEQ ID NO: 149193 - DNA, 17 bp, Arabidopsis thaliana
tgagttagcaactttga

SEQ ID NO: 149194 - DNA, 17 bp, Arabidopsis thaliana
tgagttagctgacttct

SEQ ID NO: 149195 - DNA, 17 bp, Arabidopsis thaliana
tgagttatagcgttgct

SEQ ID NO: 149196 - DNA, 17 bp, Arabidopsis thaliana
tgagttatcttagtgat

SEQ ID NO: 149197 - DNA, 17 bp, Arabidopsis thaliana
tgagttatgaatcggtg

SEQ ID NO: 149198 - DNA, 17 bp, Arabidopsis thaliana
tgagttatgggtaccaa

SEQ ID NO: 149199 - DNA, 17 bp, Arabidopsis thaliana
tgagttatgttatgtgt

SEQ ID NO: 149200 - DNA, 17 bp, Arabidopsis thaliana
tgagttcaaatccagga

SEQ ID NO: 149201 - DNA, 17 bp, Arabidopsis thaliana
tgagttcaactggcgtt

SEQ ID NO: 149202 - DNA, 17 bp, Arabidopsis thaliana
tgagttcaagccggatt

SEQ ID NO: 149203 - DNA, 17 bp, Arabidopsis thaliana
tgagttcacacgtgcga

SEQ ID NO: 149204 - DNA, 17 bp, Arabidopsis thaliana
tgagttcacgcctaggg

SEQ ID NO: 149205 - DNA, 17 bp, Arabidopsis thaliana
tgagttcacggttaatt

SEQ ID NO: 149206 - DNA, 17 bp, Arabidopsis thaliana
tgagttcactgtcttgc

SEQ ID NO: 149207 - DNA, 17 bp, Arabidopsis thaliana
tgagttcatttaatcca

SEQ ID NO: 149208 - DNA, 17 bp, Arabidopsis thaliana
tgagttccgaacccgtc

SEQ ID NO: 149209 - DNA, 17 bp, Arabidopsis thaliana
tgagttccgtaacattg

SEQ ID NO: 149210 - DNA, 17 bp, Arabidopsis thaliana
tgagttcctcccggtag

SEQ ID NO: 149211 - DNA, 17 bp, Arabidopsis thaliana
tgagttcgagtccccta

SEQ ID NO: 149212 - DNA, 17 bp, Arabidopsis thaliana
tgagttcggtcctcacc

SEQ ID NO: 149213 - DNA, 17 bp, Arabidopsis thaliana
tgagttcgtcccaccgg

SEQ ID NO: 149214 - DNA, 17 bp, Arabidopsis thaliana
tgagttcgttccccaca

SEQ ID NO: 149215 - DNA, 17 bp, Arabidopsis thaliana
tgagttcgttcctcacc

SEQ ID NO: 149216 - DNA, 17 bp, Arabidopsis thaliana
tgagttctctctttgct

SEQ ID NO: 149217 - DNA, 17 bp, Arabidopsis thaliana
tgagttctgggattagt

SEQ ID NO: 149218 - DNA, 17 bp, Arabidopsis thaliana
tgagttcttattagacc

SEQ ID NO: 149219 - DNA, 17 bp, Arabidopsis thaliana
tgagttcttcaaggcgt

SEQ ID NO: 149220 - DNA, 17 bp, Arabidopsis thaliana
tgagttcttctcggtag

SEQ ID NO: 149221 - DNA, 17 bp, Arabidopsis thaliana
tgagttgacccataaat

SEQ ID NO: 149222 - DNA, 17 bp, Arabidopsis thaliana
tgagttgacccatgaat

SEQ ID NO: 149223 - DNA, 17 bp, Arabidopsis thaliana
tgagttgactacacggc

SEQ ID NO: 149224 - DNA, 17 bp, Arabidopsis thaliana
tgagttgactcatgaat

SEQ ID NO: 149225 - DNA, 17 bp, Arabidopsis thaliana
tgagttgacttaaagga

SEQ ID NO: 149226 - DNA, 17 bp, Arabidopsis thaliana
tgagttgactttgaatt

SEQ ID NO: 149227 - DNA, 17 bp, Arabidopsis thaliana
tgagttgagaggtgtag

SEQ ID NO: 149228 - DNA, 17 bp, Arabidopsis thaliana
tgagttgagttgaccca

SEQ ID NO: 149229 - DNA, 17 bp, Arabidopsis thaliana
tgagttgagttgaggtg

SEQ ID NO: 149230 - DNA, 17 bp, Arabidopsis thaliana
tgagttgagttgagttg

SEQ ID NO: 149231 - DNA, 17 bp, Arabidopsis thaliana
tgagttgagttggatta

SEQ ID NO: 149232 - DNA, 17 bp, Arabidopsis thaliana
tgagttgagttgttaaa

SEQ ID NO: 149233 - DNA, 17 bp, Arabidopsis thaliana
tgagttgatccatgaat

SEQ ID NO: 149234 - DNA, 17 bp, Arabidopsis thaliana
tgagttgcaggtttggt

SEQ ID NO: 149235 - DNA, 17 bp, Arabidopsis thaliana
tgagttgcagtgattct

SEQ ID NO: 149236 - DNA, 17 bp, Arabidopsis thaliana
tgagttgcgggagtttg

SEQ ID NO: 149237 - DNA, 17 bp, Arabidopsis thaliana
tgagttgcggtttattt

SEQ ID NO: 149238 - DNA, 17 bp, Arabidopsis thaliana
tgagttggaaccaggga

SEQ ID NO: 149239 - DNA, 17 bp, Arabidopsis thaliana
tgagttggattcgaggc

SEQ ID NO: 149240 - DNA, 17 bp, Arabidopsis thaliana
tgagttggcaactctct

SEQ ID NO: 149241 - DNA, 17 bp, Arabidopsis thaliana
tgagttggcccatgaat

SEQ ID NO: 149242 - DNA, 17 bp, Arabidopsis thaliana
tgagttggccgaactct

SEQ ID NO: 149243 - DNA, 17 bp, Arabidopsis thaliana
tgagttgggtcaaccca

SEQ ID NO: 149244 - DNA, 17 bp, Arabidopsis thaliana
tgagttgggttacccat

SEQ ID NO: 149245 - DNA, 17 bp, Arabidopsis thaliana
tgagttgggttggctta

SEQ ID NO: 149246 - DNA, 17 bp, Arabidopsis thaliana
tgagttggtctacgcta

SEQ ID NO: 149247 - DNA, 17 bp, Arabidopsis thaliana
tgagttggtctgcgact

SEQ ID NO: 149248 - DNA, 17 bp, Arabidopsis thaliana
tgagttgtagaccgttc

SEQ ID NO: 149249 - DNA, 17 bp, Arabidopsis thaliana
tgagttgtctttgttcc

SEQ ID NO: 149250 - DNA, 17 bp, Arabidopsis thaliana
tgagttgtggttagggg

SEQ ID NO: 149251 - DNA, 17 bp, Arabidopsis thaliana
tgagttgttaaataggt

SEQ ID NO: 149252 - DNA, 17 bp, Arabidopsis thaliana
tgagtttagccaggttt

SEQ ID NO: 149253 - DNA, 17 bp, Arabidopsis thaliana
tgagtttagcgactgtg

SEQ ID NO: 149254 - DNA, 17 bp, Arabidopsis thaliana
tgagtttaggagcagtt

SEQ ID NO: 149255 - DNA, 17 bp, Arabidopsis thaliana
tgagtttatctttcgag

SEQ ID NO: 149256 - DNA, 17 bp, Arabidopsis thaliana
tgagtttattagagtgt

SEQ ID NO: 149257 - DNA, 17 bp, Arabidopsis thaliana
tgagtttcaccaacttt

SEQ ID NO: 149258 - DNA, 17 bp, Arabidopsis thaliana
tgagtttcagattcggc

SEQ ID NO: 149259 - DNA, 17 bp, Arabidopsis thaliana
tgagtttcatcgctatg

SEQ ID NO: 149260 - DNA, 17 bp, Arabidopsis thaliana
tgagtttctattgggtc

SEQ ID NO: 149261 - DNA, 17 bp, Arabidopsis thaliana
tgagtttcttcgcatac

SEQ ID NO: 149262 - DNA, 17 bp, Arabidopsis thaliana
tgagtttcttgcgcata

SEQ ID NO: 149263 - DNA, 17 bp, Arabidopsis thaliana
tgagtttgactttgaac

SEQ ID NO: 149264 - DNA, 17 bp, Arabidopsis thaliana
tgagtttgatgtgattt

SEQ ID NO: 149265 - DNA, 17 bp, Arabidopsis thaliana
tgagtttgattggttgg

SEQ ID NO: 149266 - DNA, 17 bp, Arabidopsis thaliana
tgagtttgcagttggta

SEQ ID NO: 149267 - DNA, 17 bp, Arabidopsis thaliana
tgagtttgcgggagttt

SEQ ID NO: 149268 - DNA, 17 bp, Arabidopsis thaliana
tgagtttgcggttgcgg

SEQ ID NO: 149269 - DNA, 17 bp, Arabidopsis thaliana
tgagtttggcaggacgt

SEQ ID NO: 149270 - DNA, 17 bp, Arabidopsis thaliana
tgagtttgtgcgctgcc

SEQ ID NO: 149271 - DNA, 17 bp, Arabidopsis thaliana
tgagttttacggaccta

SEQ ID NO: 149272 - DNA, 17 bp, Arabidopsis thaliana
tgagttttatctatcgg

SEQ ID NO: 149273 - DNA, 17 bp, Arabidopsis thaliana
tgagttttctcagtttg

SEQ ID NO: 149274 - DNA, 17 bp, Arabidopsis thaliana
tgagttttctgaccatg

SEQ ID NO: 149275 - DNA, 17 bp, Arabidopsis thaliana
tgagttttgacgggaaa

SEQ ID NO: 149276 - DNA, 17 bp, Arabidopsis thaliana
tgagttttgatgttagg

SEQ ID NO: 149277 - DNA, 17 bp, Arabidopsis thaliana
tgagttttgatgtttgt

SEQ ID NO: 149278 - DNA, 17 bp, Arabidopsis thaliana
tgagttttgcggtacgg

SEQ ID NO: 149279 - DNA, 17 bp, Arabidopsis thaliana
tgagttttggaccctat

SEQ ID NO: 149280 - DNA, 17 bp, Arabidopsis thaliana
tgagttttgggggcggg

SEQ ID NO: 149281 - DNA, 17 bp, Arabidopsis thaliana
tgagtttttttacggga

SEQ ID NO: 149282 - DNA, 17 bp, Arabidopsis thaliana
tgataaacagattccag

SEQ ID NO: 149283 - DNA, 17 bp, Arabidopsis thaliana
tgataaaccagccggtg

SEQ ID NO: 149284 - DNA, 17 bp, Arabidopsis thaliana
tgataaaccagcgggtg

SEQ ID NO: 149285 - DNA, 17 bp, Arabidopsis thaliana
tgataaactctttcggc

SEQ ID NO: 149286 - DNA, 17 bp, Arabidopsis thaliana
tgataaagttcatccgg

SEQ ID NO: 149287 - DNA, 17 bp, Arabidopsis thaliana
tgataacagtgaatttc

SEQ ID NO: 149288 - DNA, 17 bp, Arabidopsis thaliana
tgataaccgacggactg

SEQ ID NO: 149289 - DNA, 17 bp, Arabidopsis thaliana
tgataacggacgttaga

SEQ ID NO: 149290 - DNA, 17 bp, Arabidopsis thaliana
tgataacggcatgtcta

SEQ ID NO: 149291 - DNA, 17 bp, Arabidopsis thaliana
tgataactcacgatact

SEQ ID NO: 149292 - DNA, 17 bp, Arabidopsis thaliana
tgataactcagtgtcca

SEQ ID NO: 149293 - DNA, 17 bp, Arabidopsis thaliana
tgataactcgacggatc

SEQ ID NO: 149294 - DNA, 17 bp, Arabidopsis thaliana
tgataactcgacggatt

SEQ ID NO: 149295 - DNA, 17 bp, Arabidopsis thaliana
tgataactcgagggatc

SEQ ID NO: 149296 - DNA, 17 bp, Arabidopsis thaliana
tgataagaaactaacaa

SEQ ID NO: 149297 - DNA, 17 bp, Arabidopsis thaliana
tgataagcatttttcca

SEQ ID NO: 149298 - DNA, 17 bp, Arabidopsis thaliana
tgataagcgtgactaag

SEQ ID NO: 149299 - DNA, 17 bp, Arabidopsis thaliana
tgataagctctgcttca

SEQ ID NO: 149300 - DNA, 17 bp, Arabidopsis thaliana
tgataagttccggggcc

SEQ ID NO: 149301 - DNA, 17 bp, Arabidopsis thaliana
tgataatgatcacagtt

SEQ ID NO: 149302 - DNA, 17 bp, Arabidopsis thaliana
tgataatgggtgcgttt

SEQ ID NO: 149303 - DNA, 17 bp, Arabidopsis thaliana
tgataattcaggttgtc

SEQ ID NO: 149304 - DNA, 17 bp, Arabidopsis thaliana
tgataattcaggttgtg

SEQ ID NO: 149305 - DNA, 17 bp, Arabidopsis thaliana
tgataattgaggttgtg

SEQ ID NO: 149306 - DNA, 17 bp, Arabidopsis thaliana
tgataatttgatttctc

SEQ ID NO: 149307 - DNA, 17 bp, Arabidopsis thaliana
tgataatttggtcattc

SEQ ID NO: 149308 - DNA, 17 bp, Arabidopsis thaliana
tgataattttgtccgcg

SEQ ID NO: 149309 - DNA, 17 bp, Arabidopsis thaliana
tgatacaactacagctg

SEQ ID NO: 149310 - DNA, 17 bp, Arabidopsis thaliana
tgatacaacttgtttta

SEQ ID NO: 149311 - DNA, 17 bp, Arabidopsis thaliana
tgatacaacttttttta

SEQ ID NO: 149312 - DNA, 17 bp, Arabidopsis thaliana
tgatacaaggcttggtc

SEQ ID NO: 149313 - DNA, 17 bp, Arabidopsis thaliana
tgatacacatggaggat

SEQ ID NO: 149314 - DNA, 17 bp, Arabidopsis thaliana
tgatacacattgctgat

SEQ ID NO: 149315 - DNA, 17 bp, Arabidopsis thaliana
tgatacagaactggacg

SEQ ID NO: 149316 - DNA, 17 bp, Arabidopsis thaliana
tgatacagcggtccaag

SEQ ID NO: 149317 - DNA, 17 bp, Arabidopsis thaliana
tgatacagttgcgggcg

SEQ ID NO: 149318 - DNA, 17 bp, Arabidopsis thaliana
tgatacatagaaccgct

SEQ ID NO: 149319 - DNA, 17 bp, Arabidopsis thaliana
tgatacatcgccgctct

SEQ ID NO: 149320 - DNA, 17 bp, Arabidopsis thaliana
tgatacatcgtacgcat

SEQ ID NO: 149321 - DNA, 17 bp, Arabidopsis thaliana
tgatacatctgtgataa

SEQ ID NO: 149322 - DNA, 17 bp, Arabidopsis thaliana
tgatacatcttggttgt

SEQ ID NO: 149323 - DNA, 17 bp, Arabidopsis thaliana
tgataccccgtccaatc

SEQ ID NO: 149324 - DNA, 17 bp, Arabidopsis thaliana
tgataccgtgcgctgga

SEQ ID NO: 149325 - DNA, 17 bp, Arabidopsis thaliana
tgataccgttgccatta

SEQ ID NO: 149326 - DNA, 17 bp, Arabidopsis thaliana
tgataccttttcggaaa

SEQ ID NO: 149327 - DNA, 17 bp, Arabidopsis thaliana
tgataccttttcggaac

SEQ ID NO: 149328 - DNA, 17 bp, Arabidopsis thaliana
tgataccttttcggcaa

SEQ ID NO: 149329 - DNA, 17 bp, Arabidopsis thaliana
tgatacgattttgggcg

SEQ ID NO: 149330 - DNA, 17 bp, Arabidopsis thaliana
tgatacgattttggggg

SEQ ID NO: 149331 - DNA, 17 bp, Arabidopsis thaliana
tgatacgattttgggtc

SEQ ID NO: 149332 - DNA, 17 bp, Arabidopsis thaliana
tgatacgattttgggtg

SEQ ID NO: 149333 - DNA, 17 bp, Arabidopsis thaliana
tgatacgctaaatctgc

SEQ ID NO: 149334 - DNA, 17 bp, Arabidopsis thaliana
tgatacgcttgtggaga

SEQ ID NO: 149335 - DNA, 17 bp, Arabidopsis thaliana
tgatacgcttgtgtcat

SEQ ID NO: 149336 - DNA, 17 bp, Arabidopsis thaliana
tgatacgcttttgttcc

SEQ ID NO: 149337 - DNA, 17 bp, Arabidopsis thaliana
tgatacggaatcaggcc

SEQ ID NO: 149338 - DNA, 17 bp, Arabidopsis thaliana
tgatacggaggtgatct

SEQ ID NO: 149339 - DNA, 17 bp, Arabidopsis thaliana
tgatacggattgtggcc

SEQ ID NO: 149340 - DNA, 17 bp, Arabidopsis thaliana
tgatacggtggcggcct

SEQ ID NO: 149341 - DNA, 17 bp, Arabidopsis thaliana
tgatacgtccaggagcg

SEQ ID NO: 149342 - DNA, 17 bp, Arabidopsis thaliana
tgatacgtgctgctgtg

SEQ ID NO: 149343 - DNA, 17 bp, Arabidopsis thaliana
tgatacgttgccccggc

SEQ ID NO: 149344 - DNA, 17 bp, Arabidopsis thaliana
tgatacgttgccccgtc

SEQ ID NO: 149345 - DNA, 17 bp, Arabidopsis thaliana
tgatacgttttgagact

SEQ ID NO: 149346 - DNA, 17 bp, Arabidopsis thaliana
tgatactatcgcacccg

SEQ ID NO: 149347 - DNA, 17 bp, Arabidopsis thaliana
tgatactatcgcacctg

SEQ ID NO: 149348 - DNA, 17 bp, Arabidopsis thaliana
tgatactcattttcgac

SEQ ID NO: 149349 - DNA, 17 bp, Arabidopsis thaliana
tgatactcgaccaccca

SEQ ID NO: 149350 - DNA, 17 bp, Arabidopsis thaliana
tgatactcgaccactca

SEQ ID NO: 149351 - DNA, 17 bp, Arabidopsis thaliana
tgatactgagaagactg

SEQ ID NO: 149352 - DNA, 17 bp, Arabidopsis thaliana
tgatactgatgcccgcg

SEQ ID NO: 149353 - DNA, 17 bp, Arabidopsis thaliana
tgatactgatgtccgcg

SEQ ID NO: 149354 - DNA, 17 bp, Arabidopsis thaliana
tgatactgctctatctg

SEQ ID NO: 149355 - DNA, 17 bp, Arabidopsis thaliana
tgatactggttttgcct

SEQ ID NO: 149356 - DNA, 17 bp, Arabidopsis thaliana
tgatactgtgggctgga

SEQ ID NO: 149357 - DNA, 17 bp, Arabidopsis thaliana
tgatactgttacggcac

SEQ ID NO: 149358 - DNA, 17 bp, Arabidopsis thaliana
tgatacttatcgactca

SEQ ID NO: 149359 - DNA, 17 bp, Arabidopsis thaliana
tgatacttcagcccaca

SEQ ID NO: 149360 - DNA, 17 bp, Arabidopsis thaliana
tgatacttccacttggc

SEQ ID NO: 149361 - DNA, 17 bp, Arabidopsis thaliana
tgatacttctagcgggt

SEQ ID NO: 149362 - DNA, 17 bp, Arabidopsis thaliana
tgatacttcttggttgt

SEQ ID NO: 149363 - DNA, 17 bp, Arabidopsis thaliana
tgatacttgaaggtgtg

SEQ ID NO: 149364 - DNA, 17 bp, Arabidopsis thaliana
tgatacttgaccaccca

SEQ ID NO: 149365 - DNA, 17 bp, Arabidopsis thaliana
tgatactttcctttgcg

SEQ ID NO: 149366 - DNA, 17 bp, Arabidopsis thaliana
tgatactttcgcaactt

SEQ ID NO: 149367 - DNA, 17 bp, Arabidopsis thaliana
tgatactttttcgggca

SEQ ID NO: 149368 - DNA, 17 bp, Arabidopsis thaliana
tgatagaaaatcactaa

SEQ ID NO: 149369 - DNA, 17 bp, Arabidopsis thaliana
tgatagaaccggacatg

SEQ ID NO: 149370 - DNA, 17 bp, Arabidopsis thaliana
tgatagacctgacacgt

SEQ ID NO: 149371 - DNA, 17 bp, Arabidopsis thaliana
tgatagacgctgagacc

SEQ ID NO: 149372 - DNA, 17 bp, Arabidopsis thaliana
tgatagacgtttctgac

SEQ ID NO: 149373 - DNA, 17 bp, Arabidopsis thaliana
tgatagagcggacactt

SEQ ID NO: 149374 - DNA, 17 bp, Arabidopsis thaliana
tgatagaggctccgaga

SEQ ID NO: 149375 - DNA, 17 bp, Arabidopsis thaliana
tgatagattgggtttgc

SEQ ID NO: 149376 - DNA, 17 bp, Arabidopsis thaliana
tgatagcagacgagaat

SEQ ID NO: 149377 - DNA, 17 bp, Arabidopsis thaliana
tgatagccaccgatgtt

SEQ ID NO: 149378 - DNA, 17 bp, Arabidopsis thaliana
tgatagccctaaggcac

SEQ ID NO: 149379 - DNA, 17 bp, Arabidopsis thaliana
tgatagccgcagtgttc

SEQ ID NO: 149380 - DNA, 17 bp, Arabidopsis thaliana
tgatagccgcagtgttt

SEQ ID NO: 149381 - DNA, 17 bp, Arabidopsis thaliana
tgatagccgccggcgac

SEQ ID NO: 149382 - DNA, 17 bp, Arabidopsis thaliana
tgatagcgctcgtacga

SEQ ID NO: 149383 - DNA, 17 bp, Arabidopsis thaliana
tgatagcggcatgtcta

SEQ ID NO: 149384 - DNA, 17 bp, Arabidopsis thaliana
tgatagcggttgttagc

SEQ ID NO: 149385 - DNA, 17 bp, Arabidopsis thaliana
tgatagctttttgttga

SEQ ID NO: 149386 - DNA, 17 bp, Arabidopsis thaliana
tgatagctttttgttta

SEQ ID NO: 149387 - DNA, 17 bp, Arabidopsis thaliana
tgataggaataggaggt

SEQ ID NO: 149388 - DNA, 17 bp, Arabidopsis thaliana
tgataggaccatccgtt

SEQ ID NO: 149389 - DNA, 17 bp, Arabidopsis thaliana
tgataggccaccaatct

SEQ ID NO: 149390 - DNA, 17 bp, Arabidopsis thaliana
tgataggccaccaatgt

SEQ ID NO: 149391 - DNA, 17 bp, Arabidopsis thaliana
tgataggctgatagcta

SEQ ID NO: 149392 - DNA, 17 bp, Arabidopsis thaliana
tgatagggttcacacta

SEQ ID NO: 149393 - DNA, 17 bp, Arabidopsis thaliana
tgataggtcgtcaagtg

SEQ ID NO: 149394 - DNA, 17 bp, Arabidopsis thaliana
tgataggttgccccggc

SEQ ID NO: 149395 - DNA, 17 bp, Arabidopsis thaliana
tgataggttgtcggagt

SEQ ID NO: 149396 - DNA, 17 bp, Arabidopsis thaliana
tgatagtcagaaatgca

SEQ ID NO: 149397 - DNA, 17 bp, Arabidopsis thaliana
tgatagtcgcgggcctt

SEQ ID NO: 149398 - DNA, 17 bp, Arabidopsis thaliana
tgatagtctaaacgcgc

SEQ ID NO: 149399 - DNA, 17 bp, Arabidopsis thaliana
tgatagtcttactgccg

SEQ ID NO: 149400 - DNA, 17 bp, Arabidopsis thaliana
tgatagtgaagtgtacg

SEQ ID NO: 149401 - DNA, 17 bp, Arabidopsis thaliana
tgatagtggctccgaga

SEQ ID NO: 149402 - DNA, 17 bp, Arabidopsis thaliana
tgatagttaccaaggcg

SEQ ID NO: 149403 - DNA, 17 bp, Arabidopsis thaliana
tgatagttcaaccacgg

SEQ ID NO: 149404 - DNA, 17 bp, Arabidopsis thaliana
tgatagtttcgtgggcc

SEQ ID NO: 149405 - DNA, 17 bp, Arabidopsis thaliana
tgatagtttctcgttga

SEQ ID NO: 149406 - DNA, 17 bp, Arabidopsis thaliana
tgatatcactgtcccta

SEQ ID NO: 149407 - DNA, 17 bp, Arabidopsis thaliana
tgatatccatcctgagt

SEQ ID NO: 149408 - DNA, 17 bp, Arabidopsis thaliana
tgatatccggaagcaac

SEQ ID NO: 149409 - DNA, 17 bp, Arabidopsis thaliana
tgatatcctgctgttga

SEQ ID NO: 149410 - DNA, 17 bp, Arabidopsis thaliana
tgatatcgcatacatga

SEQ ID NO: 149411 - DNA, 17 bp, Arabidopsis thaliana
tgatatgaccagttttg

SEQ ID NO: 149412 - DNA, 17 bp, Arabidopsis thaliana
tgatatgcagaatccgc

SEQ ID NO: 149413 - DNA, 17 bp, Arabidopsis thaliana
tgatatgctctcgatgt

SEQ ID NO: 149414 - DNA, 17 bp, Arabidopsis thaliana
tgatatgcttgatctgt

SEQ ID NO: 149415 - DNA, 17 bp, Arabidopsis thaliana
tgatatggtttcgctat

SEQ ID NO: 149416 - DNA, 17 bp, Arabidopsis thaliana
tgatatgtacagttggc

SEQ ID NO: 149417 - DNA, 17 bp, Arabidopsis thaliana
tgatatgtctaatgtct

SEQ ID NO: 149418 - DNA, 17 bp, Arabidopsis thaliana
tgatatgttggctcagt

SEQ ID NO: 149419 - DNA, 17 bp, Arabidopsis thaliana
tgatattaaatgccagt

SEQ ID NO: 149420 - DNA, 17 bp, Arabidopsis thaliana
tgatattcagaaatgca

SEQ ID NO: 149421 - DNA, 17 bp, Arabidopsis thaliana
tgatattgatagtgcca

SEQ ID NO: 149422 - DNA, 17 bp, Arabidopsis thaliana
tgatattggtgcggttc

SEQ ID NO: 149423 - DNA, 17 bp, Arabidopsis thaliana
tgatattgttgtggctg

SEQ ID NO: 149424 - DNA, 17 bp, Arabidopsis thaliana
tgatattgttgttgact

SEQ ID NO: 149425 - DNA, 17 bp, Arabidopsis thaliana
tgatatttcctggattc

SEQ ID NO: 149426 - DNA, 17 bp, Arabidopsis thaliana
tgatatttgcggttgtt

SEQ ID NO: 149427 - DNA, 17 bp, Arabidopsis thaliana
tgatattttcgtgattt

SEQ ID NO: 149428 - DNA, 17 bp, Arabidopsis thaliana
tgatcaaacaaacaaag

SEQ ID NO: 149429 - DNA, 17 bp, Arabidopsis thaliana
tgatcaaactcgtctac

SEQ ID NO: 149430 - DNA, 17 bp, Arabidopsis thaliana
tgatcaaacttgaaagc

SEQ ID NO: 149431 - DNA, 17 bp, Arabidopsis thaliana
tgatcaacacatgctcg

SEQ ID NO: 149432 - DNA, 17 bp, Arabidopsis thaliana
tgatcaaccacgttatg

SEQ ID NO: 149433 - DNA, 17 bp, Arabidopsis thaliana
tgatcaactggaatttg

SEQ ID NO: 149434 - DNA, 17 bp, Arabidopsis thaliana
tgatcaacttccgatgt

SEQ ID NO: 149435 - DNA, 17 bp, Arabidopsis thaliana
tgatcaactttcgttga

SEQ ID NO: 149436 - DNA, 17 bp, Arabidopsis thaliana
tgatcaactttgccaca

SEQ ID NO: 149437 - DNA, 17 bp, Arabidopsis thaliana
tgatcaagatttggcat

SEQ ID NO: 149438 - DNA, 17 bp, Arabidopsis thaliana
tgatcaagccgccggtg

SEQ ID NO: 149439 - DNA, 17 bp, Arabidopsis thaliana
tgatcaagtcaatgaaa

SEQ ID NO: 149440 - DNA, 17 bp, Arabidopsis thaliana
tgatcaagtggaagcaa

SEQ ID NO: 149441 - DNA, 17 bp, Arabidopsis thaliana
tgatcaagtggaagcac

SEQ ID NO: 149442 - DNA, 17 bp, Arabidopsis thaliana
tgatcaatcgacgagat

SEQ ID NO: 149443 - DNA, 17 bp, Arabidopsis thaliana
tgatcaatggtcctcac

SEQ ID NO: 149444 - DNA, 17 bp, Arabidopsis thaliana
tgatcaattctacaaat

SEQ ID NO: 149445 - DNA, 17 bp, Arabidopsis thaliana
tgatcacaccgtccatg

SEQ ID NO: 149446 - DNA, 17 bp, Arabidopsis thaliana
tgatcacagaccgattc

SEQ ID NO: 149447 - DNA, 17 bp, Arabidopsis thaliana
tgatcacattgtggcac

SEQ ID NO: 149448 - DNA, 17 bp, Arabidopsis thaliana
tgatcaccaacagattt

SEQ ID NO: 149449 - DNA, 17 bp, Arabidopsis thaliana
tgatcacccgcgctacg

SEQ ID NO: 149450 - DNA, 17 bp, Arabidopsis thaliana
tgatcaccgtttgtgtc

SEQ ID NO: 149451 - DNA, 17 bp, Arabidopsis thaliana
tgatcacctttttcgta

SEQ ID NO: 149452 - DNA, 17 bp, Arabidopsis thaliana
tgatcacgaggtttggg

SEQ ID NO: 149453 - DNA, 17 bp, Arabidopsis thaliana
tgatcacgaggtttgtt

SEQ ID NO: 149454 - DNA, 17 bp, Arabidopsis thaliana
tgatcacgatgatcagt

SEQ ID NO: 149455 - DNA, 17 bp, Arabidopsis thaliana
tgatcacgtcgtctatg

SEQ ID NO: 149456 - DNA, 17 bp, Arabidopsis thaliana
tgatcacgtctgcctgg

SEQ ID NO: 149457 - DNA, 17 bp, Arabidopsis thaliana
tgatcactcctccagca

SEQ ID NO: 149458 - DNA, 17 bp, Arabidopsis thaliana
tgatcactgctctatct

SEQ ID NO: 149459 - DNA, 17 bp, Arabidopsis thaliana
tgatcactgtgcacatg

SEQ ID NO: 149460 - DNA, 17 bp, Arabidopsis thaliana
tgatcacttgcttctca

SEQ ID NO: 149461 - DNA, 17 bp, Arabidopsis thaliana
tgatcagacctcagacc

SEQ ID NO: 149462 - DNA, 17 bp, Arabidopsis thaliana
tgatcagacggtccaga

SEQ ID NO: 149463 - DNA, 17 bp, Arabidopsis thaliana
tgatcagactccggcga

SEQ ID NO: 149464 - DNA, 17 bp, Arabidopsis thaliana
tgatcagattgctcttc

SEQ ID NO: 149465 - DNA, 17 bp, Arabidopsis thaliana
tgatcagattgctcttg

SEQ ID NO: 149466 - DNA, 17 bp, Arabidopsis thaliana
tgatcagccaattgcgg

SEQ ID NO: 149467 - DNA, 17 bp, Arabidopsis thaliana
tgatcagccacactggg

SEQ ID NO: 149468 - DNA, 17 bp, Arabidopsis thaliana
tgatcagccctttgtcg

SEQ ID NO: 149469 - DNA, 17 bp, Arabidopsis thaliana
tgatcagccgcgccaat

SEQ ID NO: 149470 - DNA, 17 bp, Arabidopsis thaliana
tgatcagcggatgttgc

SEQ ID NO: 149471 - DNA, 17 bp, Arabidopsis thaliana
tgatcagcgtctgcgtt

SEQ ID NO: 149472 - DNA, 17 bp, Arabidopsis thaliana
tgatcagctcgtttggc

SEQ ID NO: 149473 - DNA, 17 bp, Arabidopsis thaliana
tgatcagcttcacatat

SEQ ID NO: 149474 - DNA, 17 bp, Arabidopsis thaliana
tgatcaggcaaggtctc

SEQ ID NO: 149475 - DNA, 17 bp, Arabidopsis thaliana
tgatcaggtattgatgt

SEQ ID NO: 149476 - DNA, 17 bp, Arabidopsis thaliana
tgatcaggtccgcttct

SEQ ID NO: 149477 - DNA, 17 bp, Arabidopsis thaliana
tgatcagtcgtcttcgt

SEQ ID NO: 149478 - DNA, 17 bp, Arabidopsis thaliana
tgatcagtggtccattt

SEQ ID NO: 149479 - DNA, 17 bp, Arabidopsis thaliana
tgatcagttgactgatc

SEQ ID NO: 149480 - DNA, 17 bp, Arabidopsis thaliana
tgatcagttgccgtaga

SEQ ID NO: 149481 - DNA, 17 bp, Arabidopsis thaliana
tgatcataagccataga

SEQ ID NO: 149482 - DNA, 17 bp, Arabidopsis thaliana
tgatcataatctgtctg

SEQ ID NO: 149483 - DNA, 17 bp, Arabidopsis thaliana
tgatcatacctcgacca

SEQ ID NO: 149484 - DNA, 17 bp, Arabidopsis thaliana
tgatcataggatccggg

SEQ ID NO: 149485 - DNA, 17 bp, Arabidopsis thaliana
tgatcataggatcgtga

SEQ ID NO: 149486 - DNA, 17 bp, Arabidopsis thaliana
tgatcatagtcttggcg

SEQ ID NO: 149487 - DNA, 17 bp, Arabidopsis thaliana
tgatcatatgggctctt

SEQ ID NO: 149488 - DNA, 17 bp, Arabidopsis thaliana
tgatcatcattgtcgcc

SEQ ID NO: 149489 - DNA, 17 bp, Arabidopsis thaliana
tgatcatccgcactatc

SEQ ID NO: 149490 - DNA, 17 bp, Arabidopsis thaliana
tgatcatccgcactatt

SEQ ID NO: 149491 - DNA, 17 bp, Arabidopsis thaliana
tgatcatccgcactgcg

SEQ ID NO: 149492 - DNA, 17 bp, Arabidopsis thaliana
tgatcatccgcgctacg

SEQ ID NO: 149493 - DNA, 17 bp, Arabidopsis thaliana
tgatcatccttccaggt

SEQ ID NO: 149494 - DNA, 17 bp, Arabidopsis thaliana
tgatcatcgaccgctta

SEQ ID NO: 149495 - DNA, 17 bp, Arabidopsis thaliana
tgatcatctaacgtgac

SEQ ID NO: 149496 - DNA, 17 bp, Arabidopsis thaliana
tgatcatctccggtctg

SEQ ID NO: 149497 - DNA, 17 bp, Arabidopsis thaliana
tgatcatctcgtgggta

SEQ ID NO: 149498 - DNA, 17 bp, Arabidopsis thaliana
tgatcatctctctggtt

SEQ ID NO: 149499 - DNA, 17 bp, Arabidopsis thaliana
tgatcatctcttgtgtc

SEQ ID NO: 149500 - DNA, 17 bp, Arabidopsis thaliana
tgatcatctgacgtggc

SEQ ID NO: 149501 - DNA, 17 bp, Arabidopsis thaliana
tgatcatcttagttgac

SEQ ID NO: 149502 - DNA, 17 bp, Arabidopsis thaliana
tgatcatgcctgtcggg

SEQ ID NO: 149503 - DNA, 17 bp, Arabidopsis thaliana
tgatcatggactggact

SEQ ID NO: 149504 - DNA, 17 bp, Arabidopsis thaliana
tgatcattcaaagcgtc

SEQ ID NO: 149505 - DNA, 17 bp, Arabidopsis thaliana
tgatcattcgccgacca

SEQ ID NO: 149506 - DNA, 17 bp, Arabidopsis thaliana
tgatcattcgtcgacca

SEQ ID NO: 149507 - DNA, 17 bp, Arabidopsis thaliana
tgatcattcgtgcaaaa

SEQ ID NO: 149508 - DNA, 17 bp, Arabidopsis thaliana
tgatcattgtcttaggc

SEQ ID NO: 149509 - DNA, 17 bp, Arabidopsis thaliana
tgatcatttgaagtcac

SEQ ID NO: 149510 - DNA, 17 bp, Arabidopsis thaliana
tgatcattttgcccttg

SEQ ID NO: 149511 - DNA, 17 bp, Arabidopsis thaliana
tgatccaaaggtctata

SEQ ID NO: 149512 - DNA, 17 bp, Arabidopsis thaliana
tgatccaaatagtgact

SEQ ID NO: 149513 - DNA, 17 bp, Arabidopsis thaliana
tgatccaacagctccat

SEQ ID NO: 149514 - DNA, 17 bp, Arabidopsis thaliana
tgatccaattgccgtgg

SEQ ID NO: 149515 - DNA, 17 bp, Arabidopsis thaliana
tgatccacatcggtccg

SEQ ID NO: 149516 - DNA, 17 bp, Arabidopsis thaliana
tgatccacggagattag

SEQ ID NO: 149517 - DNA, 17 bp, Arabidopsis thaliana
tgatccactcgaccacc

SEQ ID NO: 149518 - DNA, 17 bp, Arabidopsis thaliana
tgatccagagtgcttct

SEQ ID NO: 149519 - DNA, 17 bp, Arabidopsis thaliana
tgatccagccgattgac

SEQ ID NO: 149520 - DNA, 17 bp, Arabidopsis thaliana
tgatccaggaagttttg

SEQ ID NO: 149521 - DNA, 17 bp, Arabidopsis thaliana
tgatccaggacctttat

SEQ ID NO: 149522 - DNA, 17 bp, Arabidopsis thaliana
tgatccaggatcttcca

SEQ ID NO: 149523 - DNA, 17 bp, Arabidopsis thaliana
tgatccagtaacccagt

SEQ ID NO: 149524 - DNA, 17 bp, Arabidopsis thaliana
tgatccagtaacccatt

SEQ ID NO: 149525 - DNA, 17 bp, Arabidopsis thaliana
tgatccagtggcggacg

SEQ ID NO: 149526 - DNA, 17 bp, Arabidopsis thaliana
tgatccagtttcagttc

SEQ ID NO: 149527 - DNA, 17 bp, Arabidopsis thaliana
tgatccagtttgcttca

SEQ ID NO: 149528 - DNA, 17 bp, Arabidopsis thaliana
tgatccagtttgtgtgc

SEQ ID NO: 149529 - DNA, 17 bp, Arabidopsis thaliana
tgatccatccaaaactg

SEQ ID NO: 149530 - DNA, 17 bp, Arabidopsis thaliana
tgatccatcctcttcag

SEQ ID NO: 149531 - DNA, 17 bp, Arabidopsis thaliana
tgatccatcctctttca

SEQ ID NO: 149532 - DNA, 17 bp, Arabidopsis thaliana
tgatccatctacaggat

SEQ ID NO: 149533 - DNA, 17 bp, Arabidopsis thaliana
tgatccatgaattttga

SEQ ID NO: 149534 - DNA, 17 bp, Arabidopsis thaliana
tgatccatggtctagcg

SEQ ID NO: 149535 - DNA, 17 bp, Arabidopsis thaliana
tgatccatgtgtcctgc

SEQ ID NO: 149536 - DNA, 17 bp, Arabidopsis thaliana
tgatccatgtgtctact

SEQ ID NO: 149537 - DNA, 17 bp, Arabidopsis thaliana
tgatccattcaacatgt

SEQ ID NO: 149538 - DNA, 17 bp, Arabidopsis thaliana
tgatccattgacggttt

SEQ ID NO: 149539 - DNA, 17 bp, Arabidopsis thaliana
tgatccatttttggtct

SEQ ID NO: 149540 - DNA, 17 bp, Arabidopsis thaliana
tgatcccaaaacccagc

SEQ ID NO: 149541 - DNA, 17 bp, Arabidopsis thaliana
tgatcccacttcctctt

SEQ ID NO: 149542 - DNA, 17 bp, Arabidopsis thaliana
tgatcccatcaaccagg

SEQ ID NO: 149543 - DNA, 17 bp, Arabidopsis thaliana
tgatccccgtgatttgg

SEQ ID NO: 149544 - DNA, 17 bp, Arabidopsis thaliana
tgatccctggtcggcat

SEQ ID NO: 149545 - DNA, 17 bp, Arabidopsis thaliana
tgatccctgtataggcc

SEQ ID NO: 149546 - DNA, 17 bp, Arabidopsis thaliana
tgatcccttaacagagt

SEQ ID NO: 149547 - DNA, 17 bp, Arabidopsis thaliana
tgatccctttgccgtgg

SEQ ID NO: 149548 - DNA, 17 bp, Arabidopsis thaliana
tgatccgacccctcctt

SEQ ID NO: 149549 - DNA, 17 bp, Arabidopsis thaliana
tgatccgacggtgccgg

SEQ ID NO: 149550 - DNA, 17 bp, Arabidopsis thaliana
tgatccgacttaggatc

SEQ ID NO: 149551 - DNA, 17 bp, Arabidopsis thaliana
tgatccgatgtgcgacc

SEQ ID NO: 149552 - DNA, 17 bp, Arabidopsis thaliana
tgatccgattagagtgt

SEQ ID NO: 149553 - DNA, 17 bp, Arabidopsis thaliana
tgatccgattggaccat

SEQ ID NO: 149554 - DNA, 17 bp, Arabidopsis thaliana
tgatccgcaacggttta

SEQ ID NO: 149555 - DNA, 17 bp, Arabidopsis thaliana
tgatccgcatcctgtag

SEQ ID NO: 149556 - DNA, 17 bp, Arabidopsis thaliana
tgatccgcctgatacgt

SEQ ID NO: 149557 - DNA, 17 bp, Arabidopsis thaliana
tgatccgctactatcag

SEQ ID NO: 149558 - DNA, 17 bp, Arabidopsis thaliana
tgatccgctcttgttcc

SEQ ID NO: 149559 - DNA, 17 bp, Arabidopsis thaliana
tgatccgctggagcaga

SEQ ID NO: 149560 - DNA, 17 bp, Arabidopsis thaliana
tgatccgcttcgtgccc

SEQ ID NO: 149561 - DNA, 17 bp, Arabidopsis thaliana
tgatccgcttgatctgc

SEQ ID NO: 149562 - DNA, 17 bp, Arabidopsis thaliana
tgatccgctttagttct

SEQ ID NO: 149563 - DNA, 17 bp, Arabidopsis thaliana
tgatccggaagctgtag

SEQ ID NO: 149564 - DNA, 17 bp, Arabidopsis thaliana
tgatccggaggaccgag

SEQ ID NO: 149565 - DNA, 17 bp, Arabidopsis thaliana
tgatccggctaaccggc

SEQ ID NO: 149566 - DNA, 17 bp, Arabidopsis thaliana
tgatccggctggtgcac

SEQ ID NO: 149567 - DNA, 17 bp, Arabidopsis thaliana
tgatccgggtgccgcct

SEQ ID NO: 149568 - DNA, 17 bp, Arabidopsis thaliana
tgatccggtcagccccg

SEQ ID NO: 149569 - DNA, 17 bp, Arabidopsis thaliana
tgatccggtgaaccagt

SEQ ID NO: 149570 - DNA, 17 bp, Arabidopsis thaliana
tgatccggtgaagtgtt

SEQ ID NO: 149571 - DNA, 17 bp, Arabidopsis thaliana
tgatccgtaacatttgg

SEQ ID NO: 149572 - DNA, 17 bp, Arabidopsis thaliana
tgatccgtacggttgct

SEQ ID NO: 149573 - DNA, 17 bp, Arabidopsis thaliana
tgatccgtccactgctg

SEQ ID NO: 149574 - DNA, 17 bp, Arabidopsis thaliana
tgatccgtcctttctta

SEQ ID NO: 149575 - DNA, 17 bp, Arabidopsis thaliana
tgatccgtctgggtatg

SEQ ID NO: 149576 - DNA, 17 bp, Arabidopsis thaliana
tgatccgttgacggttt

SEQ ID NO: 149577 - DNA, 17 bp, Arabidopsis thaliana
tgatcctacttttgccg

SEQ ID NO: 149578 - DNA, 17 bp, Arabidopsis thaliana
tgatcctattggtgttg

SEQ ID NO: 149579 - DNA, 17 bp, Arabidopsis thaliana
tgatcctcaaaatggtc

SEQ ID NO: 149580 - DNA, 17 bp, Arabidopsis thaliana
tgatcctcaatgattat

SEQ ID NO: 149581 - DNA, 17 bp, Arabidopsis thaliana
tgatcctccgaagtcca

SEQ ID NO: 149582 - DNA, 17 bp, Arabidopsis thaliana
tgatcctcctccaatga

SEQ ID NO: 149583 - DNA, 17 bp, Arabidopsis thaliana
tgatcctctcccattgg

SEQ ID NO: 149584 - DNA, 17 bp, Arabidopsis thaliana
tgatcctctgatccttc

SEQ ID NO: 149585 - DNA, 17 bp, Arabidopsis thaliana
tgatcctctgcattggt

SEQ ID NO: 149586 - DNA, 17 bp, Arabidopsis thaliana
tgatcctcttcaagtta

SEQ ID NO: 149587 - DNA, 17 bp, Arabidopsis thaliana
tgatcctcttctccacg

SEQ ID NO: 149588 - DNA, 17 bp, Arabidopsis thaliana
tgatcctgagagacatt

SEQ ID NO: 149589 - DNA, 17 bp, Arabidopsis thaliana
tgatcctgccaaacccg

SEQ ID NO: 149590 - DNA, 17 bp, Arabidopsis thaliana
tgatcctgggatgataa

SEQ ID NO: 149591 - DNA, 17 bp, Arabidopsis thaliana
tgatcctggttatgaga

SEQ ID NO: 149592 - DNA, 17 bp, Arabidopsis thaliana
tgatcctgtagatggat

SEQ ID NO: 149593 - DNA, 17 bp, Arabidopsis thaliana
tgatcctgttcgtttgc

SEQ ID NO: 149594 - DNA, 17 bp, Arabidopsis thaliana
tgatcctgttgtgatct

SEQ ID NO: 149595 - DNA, 17 bp, Arabidopsis thaliana
tgatccttcaatgtcgg

SEQ ID NO: 149596 - DNA, 17 bp, Arabidopsis thaliana
tgatccttccccaggcg

SEQ ID NO: 149597 - DNA, 17 bp, Arabidopsis thaliana
tgatccttcgatgtcgg

SEQ ID NO: 149598 - DNA, 17 bp, Arabidopsis thaliana
tgatccttggggttgta

SEQ ID NO: 149599 - DNA, 17 bp, Arabidopsis thaliana
tgatcctttctcaggcg

SEQ ID NO: 149600 - DNA, 17 bp, Arabidopsis thaliana
tgatcgaaatgcgttta

SEQ ID NO: 149601 - DNA, 17 bp, Arabidopsis thaliana
tgatcgacaagacccca

SEQ ID NO: 149602 - DNA, 17 bp, Arabidopsis thaliana
tgatcgacaagacccga

SEQ ID NO: 149603 - DNA, 17 bp, Arabidopsis thaliana
tgatcgacagatctcta

SEQ ID NO: 149604 - DNA, 17 bp, Arabidopsis thaliana
tgatcgaccgcgagtat

SEQ ID NO: 149605 - DNA, 17 bp, Arabidopsis thaliana
tgatcgacgcggattac

SEQ ID NO: 149606 - DNA, 17 bp, Arabidopsis thaliana
tgatcgagccgtgtcaa

SEQ ID NO: 149607 - DNA, 17 bp, Arabidopsis thaliana
tgatcgagtatgcgtag

SEQ ID NO: 149608 - DNA, 17 bp, Arabidopsis thaliana
tgatcgagttgcgtctt

SEQ ID NO: 149609 - DNA, 17 bp, Arabidopsis thaliana
tgatcgatactatcagc

SEQ ID NO: 149610 - DNA, 17 bp, Arabidopsis thaliana
tgatcgatagacttgac

SEQ ID NO: 149611 - DNA, 17 bp, Arabidopsis thaliana
tgatcgatcctccattt

SEQ ID NO: 149612 - DNA, 17 bp, Arabidopsis thaliana
tgatcgatgaaccgcgg

SEQ ID NO: 149613 - DNA, 17 bp, Arabidopsis thaliana
tgatcgatgaaccgctg

SEQ ID NO: 149614 - DNA, 17 bp, Arabidopsis thaliana
tgatcgcacggcggtct

SEQ ID NO: 149615 - DNA, 17 bp, Arabidopsis thaliana
tgatcgcaggtaaaact

SEQ ID NO: 149616 - DNA, 17 bp, Arabidopsis thaliana
tgatcgccaactgcaaa

SEQ ID NO: 149617 - DNA, 17 bp, Arabidopsis thaliana
tgatcgccacattcttc

SEQ ID NO: 149618 - DNA, 17 bp, Arabidopsis thaliana
tgatcgccggtgaaatc

SEQ ID NO: 149619 - DNA, 17 bp, Arabidopsis thaliana
tgatcgcctaagtattt

SEQ ID NO: 149620 - DNA, 17 bp, Arabidopsis thaliana
tgatcgcctgccatgca

SEQ ID NO: 149621 - DNA, 17 bp, Arabidopsis thaliana
tgatcgcgaaatatggg

SEQ ID NO: 149622 - DNA, 17 bp, Arabidopsis thaliana
tgatcgcgacaggtgcc

SEQ ID NO: 149623 - DNA, 17 bp, Arabidopsis thaliana
tgatcgcgggtgcaccg

SEQ ID NO: 149624 - DNA, 17 bp, Arabidopsis thaliana
tgatcgcggtgtttttg

SEQ ID NO: 149625 - DNA, 17 bp, Arabidopsis thaliana
tgatcgcgttgactacg

SEQ ID NO: 149626 - DNA, 17 bp, Arabidopsis thaliana
tgatcgctctgttgctc

SEQ ID NO: 149627 - DNA, 17 bp, Arabidopsis thaliana
tgatcgctggatccggc

SEQ ID NO: 149628 - DNA, 17 bp, Arabidopsis thaliana
tgatcgctgggtcgagt

SEQ ID NO: 149629 - DNA, 17 bp, Arabidopsis thaliana
tgatcggcaagttgtcc

SEQ ID NO: 149630 - DNA, 17 bp, Arabidopsis thaliana
tgatcggccatattgca

SEQ ID NO: 149631 - DNA, 17 bp, Arabidopsis thaliana
tgatcggcttggtcttg

SEQ ID NO: 149632 - DNA, 17 bp, Arabidopsis thaliana
tgatcggcttgtccctt

SEQ ID NO: 149633 - DNA, 17 bp, Arabidopsis thaliana
tgatcggggtgaaggct

SEQ ID NO: 149634 - DNA, 17 bp, Arabidopsis thaliana
tgatcgggtctaattcc

SEQ ID NO: 149635 - DNA, 17 bp, Arabidopsis thaliana
tgatcgggtttagatgg

SEQ ID NO: 149636 - DNA, 17 bp, Arabidopsis thaliana
tgatcggtgcagataat

SEQ ID NO: 149637 - DNA, 17 bp, Arabidopsis thaliana
tgatcggtgccctgtga

SEQ ID NO: 149638 - DNA, 17 bp, Arabidopsis thaliana
tgatcggttcattctgc

SEQ ID NO: 149639 - DNA, 17 bp, Arabidopsis thaliana
tgatcgtacccgggctc

SEQ ID NO: 149640 - DNA, 17 bp, Arabidopsis thaliana
tgatcgtactccaagct

SEQ ID NO: 149641 - DNA, 17 bp, Arabidopsis thaliana
tgatcgtactctcggtg

SEQ ID NO: 149642 - DNA, 17 bp, Arabidopsis thaliana
tgatcgtatccggtagg

SEQ ID NO: 149643 - DNA, 17 bp, Arabidopsis thaliana
tgatcgtcaaatattat

SEQ ID NO: 149644 - DNA, 17 bp, Arabidopsis thaliana
tgatcgtccaactgatc

SEQ ID NO: 149645 - DNA, 17 bp, Arabidopsis thaliana
tgatcgtccttgaacat

SEQ ID NO: 149646 - DNA, 17 bp, Arabidopsis thaliana
tgatcgtctagatgagg

SEQ ID NO: 149647 - DNA, 17 bp, Arabidopsis thaliana
tgatcgtctcggtttct

SEQ ID NO: 149648 - DNA, 17 bp, Arabidopsis thaliana
tgatcgtcttagcaggc

SEQ ID NO: 149649 - DNA, 17 bp, Arabidopsis thaliana
tgatcgtctttcaagcg

SEQ ID NO: 149650 - DNA, 17 bp, Arabidopsis thaliana
tgatcgtgaaattcagc

SEQ ID NO: 149651 - DNA, 17 bp, Arabidopsis thaliana
tgatcgtgactgcaaac

SEQ ID NO: 149652 - DNA, 17 bp, Arabidopsis thaliana
tgatcgtgatggacctg

SEQ ID NO: 149653 - DNA, 17 bp, Arabidopsis thaliana
tgatcgtgccaagttat

SEQ ID NO: 149654 - DNA, 17 bp, Arabidopsis thaliana
tgatcgtgctctgcagc

SEQ ID NO: 149655 - DNA, 17 bp, Arabidopsis thaliana
tgatcgtggattggtcc

SEQ ID NO: 149656 - DNA, 17 bp, Arabidopsis thaliana
tgatcgtggatttggct

SEQ ID NO: 149657 - DNA, 17 bp, Arabidopsis thaliana
tgatcgtgggttgcacc

SEQ ID NO: 149658 - DNA, 17 bp, Arabidopsis thaliana
tgatcgtgggttgcagc

SEQ ID NO: 149659 - DNA, 17 bp, Arabidopsis thaliana
tgatcgtggtctacagc

SEQ ID NO: 149660 - DNA, 17 bp, Arabidopsis thaliana
tgatcgtggtctccagc

SEQ ID NO: 149661 - DNA, 17 bp, Arabidopsis thaliana
tgatcgtggtctgcagc

SEQ ID NO: 149662 - DNA, 17 bp, Arabidopsis thaliana
tgatcgtggtggtcgcg

SEQ ID NO: 149663 - DNA, 17 bp, Arabidopsis thaliana
tgatcgtggtggttgcg

SEQ ID NO: 149664 - DNA, 17 bp, Arabidopsis thaliana
tgatcgtgtctgcagca

SEQ ID NO: 149665 - DNA, 17 bp, Arabidopsis thaliana
tgatcgtgtgacttgac

SEQ ID NO: 149666 - DNA, 17 bp, Arabidopsis thaliana
tgatcgtgttctgcagc

SEQ ID NO: 149667 - DNA, 17 bp, Arabidopsis thaliana
tgatcgttccaaagtgt

SEQ ID NO: 149668 - DNA, 17 bp, Arabidopsis thaliana
tgatcgtttcccggctg

SEQ ID NO: 149669 - DNA, 17 bp, Arabidopsis thaliana
tgatcgtttcgactgag

SEQ ID NO: 149670 - DNA, 17 bp, Arabidopsis thaliana
tgatcgtttgacctgac

SEQ ID NO: 149671 - DNA, 17 bp, Arabidopsis thaliana
tgatcgtttgacttgac

SEQ ID NO: 149672 - DNA, 17 bp, Arabidopsis thaliana
tgatcgtttggacggtg

SEQ ID NO: 149673 - DNA, 17 bp, Arabidopsis thaliana
tgatcgtttttttgtcc

SEQ ID NO: 149674 - DNA, 17 bp, Arabidopsis thaliana
tgatctaacgacgttgt

SEQ ID NO: 149675 - DNA, 17 bp, Arabidopsis thaliana
tgatctaactaacctga

SEQ ID NO: 149676 - DNA, 17 bp, Arabidopsis thaliana
tgatctaacttgcggac

SEQ ID NO: 149677 - DNA, 17 bp, Arabidopsis thaliana
tgatctaagaactcgtt

SEQ ID NO: 149678 - DNA, 17 bp, Arabidopsis thaliana
tgatctaaggagagcaa

SEQ ID NO: 149679 - DNA, 17 bp, Arabidopsis thaliana
tgatctaaggccaaact

SEQ ID NO: 149680 - DNA, 17 bp, Arabidopsis thaliana
tgatctaaggtggtggt

SEQ ID NO: 149681 - DNA, 17 bp, Arabidopsis thaliana
tgatctaatggctactc

SEQ ID NO: 149682 - DNA, 17 bp, Arabidopsis thaliana
tgatctaccaagggtca

SEQ ID NO: 149683 - DNA, 17 bp, Arabidopsis thaliana
tgatctaccgatcagat

SEQ ID NO: 149684 - DNA, 17 bp, Arabidopsis thaliana
tgatctactgagaatcg

SEQ ID NO: 149685 - DNA, 17 bp, Arabidopsis thaliana
tgatctaggatcaggtt

SEQ ID NO: 149686 - DNA, 17 bp, Arabidopsis thaliana
tgatctatccaattggt

SEQ ID NO: 149687 - DNA, 17 bp, Arabidopsis thaliana
tgatctatgcctgagcg

SEQ ID NO: 149688 - DNA, 17 bp, Arabidopsis thaliana
tgatctatttatgacca

SEQ ID NO: 149689 - DNA, 17 bp, Arabidopsis thaliana
tgatctcaactcgctac

SEQ ID NO: 149690 - DNA, 17 bp, Arabidopsis thaliana
tgatctcaacttgctac

SEQ ID NO: 149691 - DNA, 17 bp, Arabidopsis thaliana
tgatctcaaggccggtg

SEQ ID NO: 149692 - DNA, 17 bp, Arabidopsis thaliana
tgatctcaatggtgatg

SEQ ID NO: 149693 - DNA, 17 bp, Arabidopsis thaliana
tgatctcacggtttgtc

SEQ ID NO: 149694 - DNA, 17 bp, Arabidopsis thaliana
tgatctcacttccgact

SEQ ID NO: 149695 - DNA, 17 bp, Arabidopsis thaliana
tgatctcatcgatggtc

SEQ ID NO: 149696 - DNA, 17 bp, Arabidopsis thaliana
tgatctccaagcggatc

SEQ ID NO: 149697 - DNA, 17 bp, Arabidopsis thaliana
tgatctccaatggttaa

SEQ ID NO: 149698 - DNA, 17 bp, Arabidopsis thaliana
tgatctccagagatgtg

SEQ ID NO: 149699 - DNA, 17 bp, Arabidopsis thaliana
tgatctccagattcgac

SEQ ID NO: 149700 - DNA, 17 bp, Arabidopsis thaliana
tgatctccatcgcgtga

SEQ ID NO: 149701 - DNA, 17 bp, Arabidopsis thaliana
tgatctccctgctggaa

SEQ ID NO: 149702 - DNA, 17 bp, Arabidopsis thaliana
tgatctccggtgtatcg

SEQ ID NO: 149703 - DNA, 17 bp, Arabidopsis thaliana
tgatctcctcagttggc

SEQ ID NO: 149704 - DNA, 17 bp, Arabidopsis thaliana
tgatctcgccgcttatc

SEQ ID NO: 149705 - DNA, 17 bp, Arabidopsis thaliana
tgatctcgccgtcccac

SEQ ID NO: 149706 - DNA, 17 bp, Arabidopsis thaliana
tgatctcgcgagttagt

SEQ ID NO: 149707 - DNA, 17 bp, Arabidopsis thaliana
tgatctcgcggatgggt

SEQ ID NO: 149708 - DNA, 17 bp, Arabidopsis thaliana
tgatctcggaccaggct

SEQ ID NO: 149709 - DNA, 17 bp, Arabidopsis thaliana
tgatctcgtgagttagt

SEQ ID NO: 149710 - DNA, 17 bp, Arabidopsis thaliana
tgatctctaagcttcgc

SEQ ID NO: 149711 - DNA, 17 bp, Arabidopsis thaliana
tgatctctccgcccccc

SEQ ID NO: 149712 - DNA, 17 bp, Arabidopsis thaliana
tgatctctcgatctctc

SEQ ID NO: 149713 - DNA, 17 bp, Arabidopsis thaliana
tgatctctcttttgggc

SEQ ID NO: 149714 - DNA, 17 bp, Arabidopsis thaliana
tgatctctgcttgttcc

SEQ ID NO: 149715 - DNA, 17 bp, Arabidopsis thaliana
tgatctctgcttgttgc

SEQ ID NO: 149716 - DNA, 17 bp, Arabidopsis thaliana
tgatctctggggtcctt

SEQ ID NO: 149717 - DNA, 17 bp, Arabidopsis thaliana
tgatctctggttttgca

SEQ ID NO: 149718 - DNA, 17 bp, Arabidopsis thaliana
tgatctcttccgacatt

SEQ ID NO: 149719 - DNA, 17 bp, Arabidopsis thaliana
tgatctcttgaccttga

SEQ ID NO: 149720 - DNA, 17 bp, Arabidopsis thaliana
tgatctgacatgtgtgc

SEQ ID NO: 149721 - DNA, 17 bp, Arabidopsis thaliana
tgatctgactagtccac

SEQ ID NO: 149722 - DNA, 17 bp, Arabidopsis thaliana
tgatctgactagtccat

SEQ ID NO: 149723 - DNA, 17 bp, Arabidopsis thaliana
tgatctgagactgtccg

SEQ ID NO: 149724 - DNA, 17 bp, Arabidopsis thaliana
tgatctgaggctaatta

SEQ ID NO: 149725 - DNA, 17 bp, Arabidopsis thaliana
tgatctgatctgctggg

SEQ ID NO: 149726 - DNA, 17 bp, Arabidopsis thaliana
tgatctgatgatccagt

SEQ ID NO: 149727 - DNA, 17 bp, Arabidopsis thaliana
tgatctgattcgtttac

SEQ ID NO: 149728 - DNA, 17 bp, Arabidopsis thaliana
tgatctgattgccattg

SEQ ID NO: 149729 - DNA, 17 bp, Arabidopsis thaliana
tgatctgcaaaacgtta

SEQ ID NO: 149730 - DNA, 17 bp, Arabidopsis thaliana
tgatctgcaactgttga

SEQ ID NO: 149731 - DNA, 17 bp, Arabidopsis thaliana
tgatctgcacatattga

SEQ ID NO: 149732 - DNA, 17 bp, Arabidopsis thaliana
tgatctgcacttgtacc

SEQ ID NO: 149733 - DNA, 17 bp, Arabidopsis thaliana
tgatctgcagtcaattg

SEQ ID NO: 149734 - DNA, 17 bp, Arabidopsis thaliana
tgatctgcatgccactc

SEQ ID NO: 149735 - DNA, 17 bp, Arabidopsis thaliana
tgatctgcattaggtga

SEQ ID NO: 149736 - DNA, 17 bp, Arabidopsis thaliana
tgatctgccaacacagt

SEQ ID NO: 149737 - DNA, 17 bp, Arabidopsis thaliana
tgatctgccctgttgct

SEQ ID NO: 149738 - DNA, 17 bp, Arabidopsis thaliana
tgatctgccgactcatc

SEQ ID NO: 149739 - DNA, 17 bp, Arabidopsis thaliana
tgatctgccgcagtgac

SEQ ID NO: 149740 - DNA, 17 bp, Arabidopsis thaliana
tgatctgcctgggtgtc

SEQ ID NO: 149741 - DNA, 17 bp, Arabidopsis thaliana
tgatctgcgctttgatg

SEQ ID NO: 149742 - DNA, 17 bp, Arabidopsis thaliana
tgatctgctcaggtcgt

SEQ ID NO: 149743 - DNA, 17 bp, Arabidopsis thaliana
tgatctgctgcttcttg

SEQ ID NO: 149744 - DNA, 17 bp, Arabidopsis thaliana
tgatctgctgtgacttt

SEQ ID NO: 149745 - DNA, 17 bp, Arabidopsis thaliana
tgatctgctgtggatca

SEQ ID NO: 149746 - DNA, 17 bp, Arabidopsis thaliana
tgatctggactgccatc

SEQ ID NO: 149747 - DNA, 17 bp, Arabidopsis thaliana
tgatctggactgccttc

SEQ ID NO: 149748 - DNA, 17 bp, Arabidopsis thaliana
tgatctggagagttaac

SEQ ID NO: 149749 - DNA, 17 bp, Arabidopsis thaliana
tgatctggccaaagttg

SEQ ID NO: 149750 - DNA, 17 bp, Arabidopsis thaliana
tgatctggccaactcgt

SEQ ID NO: 149751 - DNA, 17 bp, Arabidopsis thaliana
tgatctggtcacgggtt

SEQ ID NO: 149752 - DNA, 17 bp, Arabidopsis thaliana
tgatctggtgaaccggt

SEQ ID NO: 149753 - DNA, 17 bp, Arabidopsis thaliana
tgatctggtgccagcag

SEQ ID NO: 149754 - DNA, 17 bp, Arabidopsis thaliana
tgatctggtgtcctagg

SEQ ID NO: 149755 - DNA, 17 bp, Arabidopsis thaliana
tgatctggttaccgtcc

SEQ ID NO: 149756 - DNA, 17 bp, Arabidopsis thaliana
tgatctggttatccggc

SEQ ID NO: 149757 - DNA, 17 bp, Arabidopsis thaliana
tgatctggtttagatac

SEQ ID NO: 149758 - DNA, 17 bp, Arabidopsis thaliana
tgatctgtaatcttgag

SEQ ID NO: 149759 - DNA, 17 bp, Arabidopsis thaliana
tgatctgtagtccaacg

SEQ ID NO: 149760 - DNA, 17 bp, Arabidopsis thaliana
tgatctgtcagttggga

SEQ ID NO: 149761 - DNA, 17 bp, Arabidopsis thaliana
tgatctgtcagttgggc

SEQ ID NO: 149762 - DNA, 17 bp, Arabidopsis thaliana
tgatctgtgacagtgtg

SEQ ID NO: 149763 - DNA, 17 bp, Arabidopsis thaliana
tgatcttagatgttgac

SEQ ID NO: 149764 - DNA, 17 bp, Arabidopsis thaliana
tgatcttaggtggtgct

SEQ ID NO: 149765 - DNA, 17 bp, Arabidopsis thaliana
tgatcttagtcgcatcc

SEQ ID NO: 149766 - DNA, 17 bp, Arabidopsis thaliana
tgatcttcagcgttcga

SEQ ID NO: 149767 - DNA, 17 bp, Arabidopsis thaliana
tgatcttcagtttgagt

SEQ ID NO: 149768 - DNA, 17 bp, Arabidopsis thaliana
tgatcttcattgttggc

SEQ ID NO: 149769 - DNA, 17 bp, Arabidopsis thaliana
tgatcttcgaagcagca

SEQ ID NO: 149770 - DNA, 17 bp, Arabidopsis thaliana
tgatcttcgacacatct

SEQ ID NO: 149771 - DNA, 17 bp, Arabidopsis thaliana
tgatcttcgatgtcggc

SEQ ID NO: 149772 - DNA, 17 bp, Arabidopsis thaliana
tgatcttcgatgtgcgc

SEQ ID NO: 149773 - DNA, 17 bp, Arabidopsis thaliana
tgatcttcggcgttcga

SEQ ID NO: 149774 - DNA, 17 bp, Arabidopsis thaliana
tgatcttctaaaggcgg

SEQ ID NO: 149775 - DNA, 17 bp, Arabidopsis thaliana
tgatcttctacggtgta

SEQ ID NO: 149776 - DNA, 17 bp, Arabidopsis thaliana
tgatcttctgagaaggg

SEQ ID NO: 149777 - DNA, 17 bp, Arabidopsis thaliana
tgatcttcttcaccagt

SEQ ID NO: 149778 - DNA, 17 bp, Arabidopsis thaliana
tgatcttcttggatgat

SEQ ID NO: 149779 - DNA, 17 bp, Arabidopsis thaliana
tgatcttgaagttgagt

SEQ ID NO: 149780 - DNA, 17 bp, Arabidopsis thaliana
tgatcttgactccagtc

SEQ ID NO: 149781 - DNA, 17 bp, Arabidopsis thaliana
tgatcttgactctagtc

SEQ ID NO: 149782 - DNA, 17 bp, Arabidopsis thaliana
tgatcttgactgtaggt

SEQ ID NO: 149783 - DNA, 17 bp, Arabidopsis thaliana
tgatcttgactttgagc

SEQ ID NO: 149784 - DNA, 17 bp, Arabidopsis thaliana
tgatcttgatgaaccgt

SEQ ID NO: 149785 - DNA, 17 bp, Arabidopsis thaliana
tgatcttgatgagcaga

SEQ ID NO: 149786 - DNA, 17 bp, Arabidopsis thaliana
tgatcttgccatctcta

SEQ ID NO: 149787 - DNA, 17 bp, Arabidopsis thaliana
tgatcttgccatctctc

SEQ ID NO: 149788 - DNA, 17 bp, Arabidopsis thaliana
tgatcttgcctcgtggt

SEQ ID NO: 149789 - DNA, 17 bp, Arabidopsis thaliana
tgatcttgctaggcatc

SEQ ID NO: 149790 - DNA, 17 bp, Arabidopsis thaliana
tgatcttggaagcagca

SEQ ID NO: 149791 - DNA, 17 bp, Arabidopsis thaliana
tgatcttggactccaga

SEQ ID NO: 149792 - DNA, 17 bp, Arabidopsis thaliana
tgatcttggcaaatgcg

SEQ ID NO: 149793 - DNA, 17 bp, Arabidopsis thaliana
tgatcttggcctccatc

SEQ ID NO: 149794 - DNA, 17 bp, Arabidopsis thaliana
tgatcttggctaagatt

SEQ ID NO: 149795 - DNA, 17 bp, Arabidopsis thaliana
tgatcttggtaaggcca

SEQ ID NO: 149796 - DNA, 17 bp, Arabidopsis thaliana
tgatcttggtgaagtgg

SEQ ID NO: 149797 - DNA, 17 bp, Arabidopsis thaliana
tgatcttggtgagacta

SEQ ID NO: 149798 - DNA, 17 bp, Arabidopsis thaliana
tgatcttgtcggcccta

SEQ ID NO: 149799 - DNA, 17 bp, Arabidopsis thaliana
tgatcttgttgcgacag

SEQ ID NO: 149800 - DNA, 17 bp, Arabidopsis thaliana
tgatctttccaccatgg

SEQ ID NO: 149801 - DNA, 17 bp, Arabidopsis thaliana
tgatctttcgttgacca

SEQ ID NO: 149802 - DNA, 17 bp, Arabidopsis thaliana
tgatctttctcaacatc

SEQ ID NO: 149803 - DNA, 17 bp, Arabidopsis thaliana
tgatctttctgcggttc

SEQ ID NO: 149804 - DNA, 17 bp, Arabidopsis thaliana
tgatctttcttcgctag

SEQ ID NO: 149805 - DNA, 17 bp, Arabidopsis thaliana
tgatctttgaccttggt

SEQ ID NO: 149806 - DNA, 17 bp, Arabidopsis thaliana
tgatctttgcaggttgc

SEQ ID NO: 149807 - DNA, 17 bp, Arabidopsis thaliana
tgatctttgggcgatga

SEQ ID NO: 149808 - DNA, 17 bp, Arabidopsis thaliana
tgatctttggttcgcgg

SEQ ID NO: 149809 - DNA, 17 bp, Arabidopsis thaliana
tgatcttttccacgaat

SEQ ID NO: 149810 - DNA, 17 bp, Arabidopsis thaliana
tgatcttttgacttgac

SEQ ID NO: 149811 - DNA, 17 bp, Arabidopsis thaliana
tgatcttttgttgttga

SEQ ID NO: 149812 - DNA, 17 bp, Arabidopsis thaliana
tgatgaaaccgcatagt

SEQ ID NO: 149813 - DNA, 17 bp, Arabidopsis thaliana
tgatgaaacgaacagag

SEQ ID NO: 149814 - DNA, 17 bp, Arabidopsis thaliana
tgatgaaagcccgaagt

SEQ ID NO: 149815 - DNA, 17 bp, Arabidopsis thaliana
tgatgaaagtgcactac

SEQ ID NO: 149816 - DNA, 17 bp, Arabidopsis thaliana
tgatgaaccacaccgca

SEQ ID NO: 149817 - DNA, 17 bp, Arabidopsis thaliana
tgatgaaccatattgcg

SEQ ID NO: 149818 - DNA, 17 bp, Arabidopsis thaliana
tgatgaaccattcgccg

SEQ ID NO: 149819 - DNA, 17 bp, Arabidopsis thaliana
tgatgaaccattcgctg

SEQ ID NO: 149820 - DNA, 17 bp, Arabidopsis thaliana
tgatgaaccccactgcg

SEQ ID NO: 149821 - DNA, 17 bp, Arabidopsis thaliana
tgatgaaccggtggctc

SEQ ID NO: 149822 - DNA, 17 bp, Arabidopsis thaliana
tgatgaaccgtatcaat

SEQ ID NO: 149823 - DNA, 17 bp, Arabidopsis thaliana
tgatgaaccgttcaccg

SEQ ID NO: 149824 - DNA, 17 bp, Arabidopsis thaliana
tgatgaaccgttcgccc

SEQ ID NO: 149825 - DNA, 17 bp, Arabidopsis thaliana
tgatgaaccgttcgccg

SEQ ID NO: 149826 - DNA, 17 bp, Arabidopsis thaliana
tgatgaacctaattggg

SEQ ID NO: 149827 - DNA, 17 bp, Arabidopsis thaliana
tgatgaacctgcggaag

SEQ ID NO: 149828 - DNA, 17 bp, Arabidopsis thaliana
tgatgaaccttgggatg

SEQ ID NO: 149829 - DNA, 17 bp, Arabidopsis thaliana
tgatgaacgctacgtct

SEQ ID NO: 149830 - DNA, 17 bp, Arabidopsis thaliana
tgatgaagataatggga

SEQ ID NO: 149831 - DNA, 17 bp, Arabidopsis thaliana
tgatgaagatggtgtct

SEQ ID NO: 149832 - DNA, 17 bp, Arabidopsis thaliana
tgatgaagcagagaatg

SEQ ID NO: 149833 - DNA, 17 bp, Arabidopsis thaliana
tgatgaagcccttaatc

SEQ ID NO: 149834 - DNA, 17 bp, Arabidopsis thaliana
tgatgaatacctccgta

SEQ ID NO: 149835 - DNA, 17 bp, Arabidopsis thaliana
tgatgaatcatctggat

SEQ ID NO: 149836 - DNA, 17 bp, Arabidopsis thaliana
tgatgaatcatttggat

SEQ ID NO: 149837 - DNA, 17 bp, Arabidopsis thaliana
tgatgaatccgaccatg

SEQ ID NO: 149838 - DNA, 17 bp, Arabidopsis thaliana
tgatgaatggctataca

SEQ ID NO: 149839 - DNA, 17 bp, Arabidopsis thaliana
tgatgaatttggttcgt

SEQ ID NO: 149840 - DNA, 17 bp, Arabidopsis thaliana
tgatgacacctcagctt

SEQ ID NO: 149841 - DNA, 17 bp, Arabidopsis thaliana
tgatgacagatccatcc

SEQ ID NO: 149842 - DNA, 17 bp, Arabidopsis thaliana
tgatgacagggctgcgt

SEQ ID NO: 149843 - DNA, 17 bp, Arabidopsis thaliana
tgatgacatgacgcagt

SEQ ID NO: 149844 - DNA, 17 bp, Arabidopsis thaliana
tgatgaccaagattcac

SEQ ID NO: 149845 - DNA, 17 bp, Arabidopsis thaliana
tgatgacccggtgaccc

SEQ ID NO: 149846 - DNA, 17 bp, Arabidopsis thaliana
tgatgacccgtctttag

SEQ ID NO: 149847 - DNA, 17 bp, Arabidopsis thaliana
tgatgacctcggtgtct

SEQ ID NO: 149848 - DNA, 17 bp, Arabidopsis thaliana
tgatgacgatgaagggt

SEQ ID NO: 149849 - DNA, 17 bp, Arabidopsis thaliana
tgatgacgattcttcag

SEQ ID NO: 149850 - DNA, 17 bp, Arabidopsis thaliana
tgatgactcgcgcttac

SEQ ID NO: 149851 - DNA, 17 bp, Arabidopsis thaliana
tgatgactgtagtcgta

SEQ ID NO: 149852 - DNA, 17 bp, Arabidopsis thaliana
tgatgactgtgatgttg

SEQ ID NO: 149853 - DNA, 17 bp, Arabidopsis thaliana
tgatgactgtttggcca

SEQ ID NO: 149854 - DNA, 17 bp, Arabidopsis thaliana
tgatgactgtttgtttg

SEQ ID NO: 149855 - DNA, 17 bp, Arabidopsis thaliana
tgatgagactctgtccc

SEQ ID NO: 149856 - DNA, 17 bp, Arabidopsis thaliana
tgatgagagatacagtg

SEQ ID NO: 149857 - DNA, 17 bp, Arabidopsis thaliana
tgatgagagatccttgt

SEQ ID NO: 149858 - DNA, 17 bp, Arabidopsis thaliana
tgatgagatgatccaaa

SEQ ID NO: 149859 - DNA, 17 bp, Arabidopsis thaliana
tgatgagcaacttcagt

SEQ ID NO: 149860 - DNA, 17 bp, Arabidopsis thaliana
tgatgagccgcgccaat

SEQ ID NO: 149861 - DNA, 17 bp, Arabidopsis thaliana
tgatgagcctccaatgt

SEQ ID NO: 149862 - DNA, 17 bp, Arabidopsis thaliana
tgatgagcgtttgaaaa

SEQ ID NO: 149863 - DNA, 17 bp, Arabidopsis thaliana
tgatgagcgtttggtaa

SEQ ID NO: 149864 - DNA, 17 bp, Arabidopsis thaliana
tgatgagctgagttgag

SEQ ID NO: 149865 - DNA, 17 bp, Arabidopsis thaliana
tgatgagctttgcacga

SEQ ID NO: 149866 - DNA, 17 bp, Arabidopsis thaliana
tgatgaggacattgatt

SEQ ID NO: 149867 - DNA, 17 bp, Arabidopsis thaliana
tgatgaggatgggaatc

SEQ ID NO: 149868 - DNA, 17 bp, Arabidopsis thaliana
tgatgaggattctgaca

SEQ ID NO: 149869 - DNA, 17 bp, Arabidopsis thaliana
tgatgaggtcgagtagt

SEQ ID NO: 149870 - DNA, 17 bp, Arabidopsis thaliana
tgatgagtcttggtttc

SEQ ID NO: 149871 - DNA, 17 bp, Arabidopsis thaliana
tgatgagtgacccgctt

SEQ ID NO: 149872 - DNA, 17 bp, Arabidopsis thaliana
tgatgagtgacctcccg

SEQ ID NO: 149873 - DNA, 17 bp, Arabidopsis thaliana
tgatgagttgtctttag

SEQ ID NO: 149874 - DNA, 17 bp, Arabidopsis thaliana
tgatgagttgtcttttg

SEQ ID NO: 149875 - DNA, 17 bp, Arabidopsis thaliana
tgatgatacagattgct

SEQ ID NO: 149876 - DNA, 17 bp, Arabidopsis thaliana
tgatgatactcgaccag

SEQ ID NO: 149877 - DNA, 17 bp, Arabidopsis thaliana
tgatgatatgacaggtt

SEQ ID NO: 149878 - DNA, 17 bp, Arabidopsis thaliana
tgatgatcacagttgtg

SEQ ID NO: 149879 - DNA, 17 bp, Arabidopsis thaliana
tgatgatcatccgcact

SEQ ID NO: 149880 - DNA, 17 bp, Arabidopsis thaliana
tgatgatcattgtctta

SEQ ID NO: 149881 - DNA, 17 bp, Arabidopsis thaliana
tgatgatccccgccaac

SEQ ID NO: 149882 - DNA, 17 bp, Arabidopsis thaliana
tgatgatccgtctttag

SEQ ID NO: 149883 - DNA, 17 bp, Arabidopsis thaliana
tgatgatcgggcttcta

SEQ ID NO: 149884 - DNA, 17 bp, Arabidopsis thaliana
tgatgatcgtggtctgc

SEQ ID NO: 149885 - DNA, 17 bp, Arabidopsis thaliana
tgatgatctatctatga

SEQ ID NO: 149886 - DNA, 17 bp, Arabidopsis thaliana
tgatgatcttgttccca

SEQ ID NO: 149887 - DNA, 17 bp, Arabidopsis thaliana
tgatgatctttgtagcg

SEQ ID NO: 149888 - DNA, 17 bp, Arabidopsis thaliana
tgatgatgaacctcact

SEQ ID NO: 149889 - DNA, 17 bp, Arabidopsis thaliana
tgatgatgacatggcgg

SEQ ID NO: 149890 - DNA, 17 bp, Arabidopsis thaliana
tgatgatgaccgcaatt

SEQ ID NO: 149891 - DNA, 17 bp, Arabidopsis thaliana
tgatgatgactcggatt

SEQ ID NO: 149892 - DNA, 17 bp, Arabidopsis thaliana
tgatgatgctgaccgga

SEQ ID NO: 149893 - DNA, 17 bp, Arabidopsis thaliana
tgatgatgctgcacatg

SEQ ID NO: 149894 - DNA, 17 bp, Arabidopsis thaliana
tgatgatgctgcagatg

SEQ ID NO: 149895 - DNA, 17 bp, Arabidopsis thaliana
tgatgatgctgcatagg

SEQ ID NO: 149896 - DNA, 17 bp, Arabidopsis thaliana
tgatgatgctgcatata

SEQ ID NO: 149897 - DNA, 17 bp, Arabidopsis thaliana
tgatgatgctgcatatc

SEQ ID NO: 149898 - DNA, 17 bp, Arabidopsis thaliana
tgatgatgctgcatatg

SEQ ID NO: 149899 - DNA, 17 bp, Arabidopsis thaliana
tgatgatgctgcattat

SEQ ID NO: 149900 - DNA, 17 bp, Arabidopsis thaliana
tgatgatgctgcattta

SEQ ID NO: 149901 - DNA, 17 bp, Arabidopsis thaliana
tgatgatgctgcggatg

SEQ ID NO: 149902 - DNA, 17 bp, Arabidopsis thaliana
tgatgatggagctgcaa

SEQ ID NO: 149903 - DNA, 17 bp, Arabidopsis thaliana
tgatgatggatctcggt

SEQ ID NO: 149904 - DNA, 17 bp, Arabidopsis thaliana
tgatgatggctggtcga

SEQ ID NO: 149905 - DNA, 17 bp, Arabidopsis thaliana
tgatgatgggatccggt

SEQ ID NO: 149906 - DNA, 17 bp, Arabidopsis thaliana
tgatgatggtgattcac

SEQ ID NO: 149907 - DNA, 17 bp, Arabidopsis thaliana
tgatgatgtaatgcgtc

SEQ ID NO: 149908 - DNA, 17 bp, Arabidopsis thaliana
tgatgatgtcggaccag

SEQ ID NO: 149909 - DNA, 17 bp, Arabidopsis thaliana
tgatgatgtgcaatgtg

SEQ ID NO: 149910 - DNA, 17 bp, Arabidopsis thaliana
tgatgatgtgcagtgtg

SEQ ID NO: 149911 - DNA, 17 bp, Arabidopsis thaliana
tgatgatgtgcatgcat

SEQ ID NO: 149912 - DNA, 17 bp, Arabidopsis thaliana
tgatgatgtggcattga

SEQ ID NO: 149913 - DNA, 17 bp, Arabidopsis thaliana
tgatgatgttgaccgga

SEQ ID NO: 149914 - DNA, 17 bp, Arabidopsis thaliana
tgatgatgttggattcg

SEQ ID NO: 149915 - DNA, 17 bp, Arabidopsis thaliana
tgatgatgttgtggcta

SEQ ID NO: 149916 - DNA, 17 bp, Arabidopsis thaliana
tgatgatgtttgtcgaa

SEQ ID NO: 149917 - DNA, 17 bp, Arabidopsis thaliana
tgatgattaggtgagcg

SEQ ID NO: 149918 - DNA, 17 bp, Arabidopsis thaliana
tgatgattcagatggtt

SEQ ID NO: 149919 - DNA, 17 bp, Arabidopsis thaliana
tgatgattcagttgccg

SEQ ID NO: 149920 - DNA, 17 bp, Arabidopsis thaliana
tgatgattcatgataac

SEQ ID NO: 149921 - DNA, 17 bp, Arabidopsis thaliana
tgatgattcgacaaagt

SEQ ID NO: 149922 - DNA, 17 bp, Arabidopsis thaliana
tgatgattgtaagacca

SEQ ID NO: 149923 - DNA, 17 bp, Arabidopsis thaliana
tgatgatttcatggcga

SEQ ID NO: 149924 - DNA, 17 bp, Arabidopsis thaliana
tgatgatttgtttttgc

SEQ ID NO: 149925 - DNA, 17 bp, Arabidopsis thaliana
tgatgattttttttcgg

SEQ ID NO: 149926 - DNA, 17 bp, Arabidopsis thaliana
tgatgcaaaagttctcg

SEQ ID NO: 149927 - DNA, 17 bp, Arabidopsis thaliana
tgatgcaacttcttgat

SEQ ID NO: 149928 - DNA, 17 bp, Arabidopsis thaliana
tgatgcaccaattgaag

SEQ ID NO: 149929 - DNA, 17 bp, Arabidopsis thaliana
tgatgcagagctttgtg

SEQ ID NO: 149930 - DNA, 17 bp, Arabidopsis thaliana
tgatgcaggtgggttat

SEQ ID NO: 149931 - DNA, 17 bp, Arabidopsis thaliana
tgatgcagtgcggtttt

SEQ ID NO: 149932 - DNA, 17 bp, Arabidopsis thaliana
tgatgcagttgttggag

SEQ ID NO: 149933 - DNA, 17 bp, Arabidopsis thaliana
tgatgcatgttacgacc

SEQ ID NO: 149934 - DNA, 17 bp, Arabidopsis thaliana
tgatgccacggtgtcgc

SEQ ID NO: 149935 - DNA, 17 bp, Arabidopsis thaliana
tgatgccattagatgtt

SEQ ID NO: 149936 - DNA, 17 bp, Arabidopsis thaliana
tgatgccattgctcctt

SEQ ID NO: 149937 - DNA, 17 bp, Arabidopsis thaliana
tgatgcccagtttcggt

SEQ ID NO: 149938 - DNA, 17 bp, Arabidopsis thaliana
tgatgcccctttttaac

SEQ ID NO: 149939 - DNA, 17 bp, Arabidopsis thaliana
tgatgcccttagatgta

SEQ ID NO: 149940 - DNA, 17 bp, Arabidopsis thaliana
tgatgcccttagatgtt

SEQ ID NO: 149941 - DNA, 17 bp, Arabidopsis thaliana
tgatgcctatttggctg

SEQ ID NO: 149942 - DNA, 17 bp, Arabidopsis thaliana
tgatgcctgttatacgt

SEQ ID NO: 149943 - DNA, 17 bp, Arabidopsis thaliana
tgatgcctttagatgtt

SEQ ID NO: 149944 - DNA, 17 bp, Arabidopsis thaliana
tgatgcctttctcgctc

SEQ ID NO: 149945 - DNA, 17 bp, Arabidopsis thaliana
tgatgcgacaatgttga

SEQ ID NO: 149946 - DNA, 17 bp, Arabidopsis thaliana
tgatgcgacggtcgttt

SEQ ID NO: 149947 - DNA, 17 bp, Arabidopsis thaliana
tgatgcgagactgcttt

SEQ ID NO: 149948 - DNA, 17 bp, Arabidopsis thaliana
tgatgcgagatgtgttt

SEQ ID NO: 149949 - DNA, 17 bp, Arabidopsis thaliana
tgatgcgagtgggcgtg

SEQ ID NO: 149950 - DNA, 17 bp, Arabidopsis thaliana
tgatgcgatcataccag

SEQ ID NO: 149951 - DNA, 17 bp, Arabidopsis thaliana
tgatgcgcagagccgtg

SEQ ID NO: 149952 - DNA, 17 bp, Arabidopsis thaliana
tgatgcgcccgccgccc

SEQ ID NO: 149953 - DNA, 17 bp, Arabidopsis thaliana
tgatgcgctaaccatgg

SEQ ID NO: 149954 - DNA, 17 bp, Arabidopsis thaliana
tgatgcgcttgggagtc

SEQ ID NO: 149955 - DNA, 17 bp, Arabidopsis thaliana
tgatgcggaaggtgcga

SEQ ID NO: 149956 - DNA, 17 bp, Arabidopsis thaliana
tgatgcggactacctgc

SEQ ID NO: 149957 - DNA, 17 bp, Arabidopsis thaliana
tgatgcggtgcggttta

SEQ ID NO: 149958 - DNA, 17 bp, Arabidopsis thaliana
tgatgcggtgtacttgg

SEQ ID NO: 149959 - DNA, 17 bp, Arabidopsis thaliana
tgatgcggttacgtttt

SEQ ID NO: 149960 - DNA, 17 bp, Arabidopsis thaliana
tgatgcggttcgataca

SEQ ID NO: 149961 - DNA, 17 bp, Arabidopsis thaliana
tgatgcggttcggtaca

SEQ ID NO: 149962 - DNA, 17 bp, Arabidopsis thaliana
tgatgcggttcggtgcg

SEQ ID NO: 149963 - DNA, 17 bp, Arabidopsis thaliana
tgatgcggttggacacg

SEQ ID NO: 149964 - DNA, 17 bp, Arabidopsis thaliana
tgatgcgtcaagatcct

SEQ ID NO: 149965 - DNA, 17 bp, Arabidopsis thaliana
tgatgcgtgctcgagaa

SEQ ID NO: 149966 - DNA, 17 bp, Arabidopsis thaliana
tgatgcgtgggattcgg

SEQ ID NO: 149967 - DNA, 17 bp, Arabidopsis thaliana
tgatgctaacagtgtga

SEQ ID NO: 149968 - DNA, 17 bp, Arabidopsis thaliana
tgatgctacttgaacag

SEQ ID NO: 149969 - DNA, 17 bp, Arabidopsis thaliana
tgatgctcaaacgagcc

SEQ ID NO: 149970 - DNA, 17 bp, Arabidopsis thaliana
tgatgctcaagtagggt

SEQ ID NO: 149971 - DNA, 17 bp, Arabidopsis thaliana
tgatgctcagatcacgg

SEQ ID NO: 149972 - DNA, 17 bp, Arabidopsis thaliana
tgatgctcgtatgccgg

SEQ ID NO: 149973 - DNA, 17 bp, Arabidopsis thaliana
tgatgctcgttcggagg

SEQ ID NO: 149974 - DNA, 17 bp, Arabidopsis thaliana
tgatgctctcatcttct

SEQ ID NO: 149975 - DNA, 17 bp, Arabidopsis thaliana
tgatgctctcgtaccgt

SEQ ID NO: 149976 - DNA, 17 bp, Arabidopsis thaliana
tgatgctcttagttctt

SEQ ID NO: 149977 - DNA, 17 bp, Arabidopsis thaliana
tgatgctgaatgtcttg

SEQ ID NO: 149978 - DNA, 17 bp, Arabidopsis thaliana
tgatgctgacacctgca

SEQ ID NO: 149979 - DNA, 17 bp, Arabidopsis thaliana
tgatgctgacacctgcg

SEQ ID NO: 149980 - DNA, 17 bp, Arabidopsis thaliana
tgatgctgaccggatgt

SEQ ID NO: 149981 - DNA, 17 bp, Arabidopsis thaliana
tgatgctgatacggagg

SEQ ID NO: 149982 - DNA, 17 bp, Arabidopsis thaliana
tgatgctgatggcatta

SEQ ID NO: 149983 - DNA, 17 bp, Arabidopsis thaliana
tgatgctgattcttcgc

SEQ ID NO: 149984 - DNA, 17 bp, Arabidopsis thaliana
tgatgctgccagcatga

SEQ ID NO: 149985 - DNA, 17 bp, Arabidopsis thaliana
tgatgctgcgatgattc

SEQ ID NO: 149986 - DNA, 17 bp, Arabidopsis thaliana
tgatgctgcttaggaac

SEQ ID NO: 149987 - DNA, 17 bp, Arabidopsis thaliana
tgatgctgtcgctgtcg

SEQ ID NO: 149988 - DNA, 17 bp, Arabidopsis thaliana
tgatgctgtggtttcgg

SEQ ID NO: 149989 - DNA, 17 bp, Arabidopsis thaliana
tgatgcttctcgactac

SEQ ID NO: 149990 - DNA, 17 bp, Arabidopsis thaliana
tgatgcttctgattcat

SEQ ID NO: 149991 - DNA, 17 bp, Arabidopsis thaliana
tgatggaaactgctctg

SEQ ID NO: 149992 - DNA, 17 bp, Arabidopsis thaliana
tgatggaactccttacg

SEQ ID NO: 149993 - DNA, 17 bp, Arabidopsis thaliana
tgatggaccgttgttct

SEQ ID NO: 149994 - DNA, 17 bp, Arabidopsis thaliana
tgatggacctctccacc

SEQ ID NO: 149995 - DNA, 17 bp, Arabidopsis thaliana
tgatggacgtgatgata

SEQ ID NO: 149996 - DNA, 17 bp, Arabidopsis thaliana
tgatggacttagatcac

SEQ ID NO: 149997 - DNA, 17 bp, Arabidopsis thaliana
tgatggacttgagccac

SEQ ID NO: 149998 - DNA, 17 bp, Arabidopsis thaliana
tgatggagagatgtgcg

SEQ ID NO: 149999 - DNA, 17 bp, Arabidopsis thaliana
tgatggagccgcgccaa

SEQ ID NO: 150000 - DNA, 17 bp, Arabidopsis thaliana
tgatggagcgatttgtc

SEQ ID NO: 150001 - DNA, 17 bp, Arabidopsis thaliana
tgatggatcccgggaag

SEQ ID NO: 150002 - DNA, 17 bp, Arabidopsis thaliana
tgatggatctaaagacg

SEQ ID NO: 150003 - DNA, 17 bp, Arabidopsis thaliana
tgatggatgtcaccact

SEQ ID NO: 150004 - DNA, 17 bp, Arabidopsis thaliana
tgatggatttcaggacg

SEQ ID NO: 150005 - DNA, 17 bp, Arabidopsis thaliana
tgatggcactcgacctc

SEQ ID NO: 150006 - DNA, 17 bp, Arabidopsis thaliana
tgatggcccaattgagg

SEQ ID NO: 150007 - DNA, 17 bp, Arabidopsis thaliana
tgatggccgcaacgtcg

SEQ ID NO: 150008 - DNA, 17 bp, Arabidopsis thaliana
tgatggccgtgaatcga

SEQ ID NO: 150009 - DNA, 17 bp, Arabidopsis thaliana
tgatggcctggtcaacg

SEQ ID NO: 150010 - DNA, 17 bp, Arabidopsis thaliana
tgatggcctggttcact

SEQ ID NO: 150011 - DNA, 17 bp, Arabidopsis thaliana
tgatggcggttgagcaa

SEQ ID NO: 150012 - DNA, 17 bp, Arabidopsis thaliana
tgatggctctttctcag

SEQ ID NO: 150013 - DNA, 17 bp, Arabidopsis thaliana
tgatggcttcacgacgg

SEQ ID NO: 150014 - DNA, 17 bp, Arabidopsis thaliana
tgatgggacactggttc

SEQ ID NO: 150015 - DNA, 17 bp, Arabidopsis thaliana
tgatgggatccggtgca

SEQ ID NO: 150016 - DNA, 17 bp, Arabidopsis thaliana
tgatgggatcctgtgca

SEQ ID NO: 150017 - DNA, 17 bp, Arabidopsis thaliana
tgatgggatctggtgca

SEQ ID NO: 150018 - DNA, 17 bp, Arabidopsis thaliana
tgatgggatgggtcggc

SEQ ID NO: 150019 - DNA, 17 bp, Arabidopsis thaliana
tgatgggatgggtctgc

SEQ ID NO: 150020 - DNA, 17 bp, Arabidopsis thaliana
tgatgggattgcctcaa

SEQ ID NO: 150021 - DNA, 17 bp, Arabidopsis thaliana
tgatgggattggctttg

SEQ ID NO: 150022 - DNA, 17 bp, Arabidopsis thaliana
tgatgggcactgcaagt

SEQ ID NO: 150023 - DNA, 17 bp, Arabidopsis thaliana
tgatgggccgagcagtc

SEQ ID NO: 150024 - DNA, 17 bp, Arabidopsis thaliana
tgatgggccgttcatcc

SEQ ID NO: 150025 - DNA, 17 bp, Arabidopsis thaliana
tgatgggccgttcttct

SEQ ID NO: 150026 - DNA, 17 bp, Arabidopsis thaliana
tgatgggcttagaagat

SEQ ID NO: 150027 - DNA, 17 bp, Arabidopsis thaliana
tgatgggcttagatgat

SEQ ID NO: 150028 - DNA, 17 bp, Arabidopsis thaliana
tgatgggcttagcaggg

SEQ ID NO: 150029 - DNA, 17 bp, Arabidopsis thaliana
tgatggggatagatcat

SEQ ID NO: 150030 - DNA, 17 bp, Arabidopsis thaliana
tgatggggtccggtgca

SEQ ID NO: 150031 - DNA, 17 bp, Arabidopsis thaliana
tgatggggtttgctcta

SEQ ID NO: 150032 - DNA, 17 bp, Arabidopsis thaliana
tgatgggtccgaggatt

SEQ ID NO: 150033 - DNA, 17 bp, Arabidopsis thaliana
tgatgggttcgcaaaga

SEQ ID NO: 150034 - DNA, 17 bp, Arabidopsis thaliana
tgatgggttgccaagat

SEQ ID NO: 150035 - DNA, 17 bp, Arabidopsis thaliana
tgatgggtttctgcccc

SEQ ID NO: 150036 - DNA, 17 bp, Arabidopsis thaliana
tgatggtccacgtccgg

SEQ ID NO: 150037 - DNA, 17 bp, Arabidopsis thaliana
tgatggtctaatgggtt

SEQ ID NO: 150038 - DNA, 17 bp, Arabidopsis thaliana
tgatggtgaaaatttaa

SEQ ID NO: 150039 - DNA, 17 bp, Arabidopsis thaliana
tgatggtgacagactga

SEQ ID NO: 150040 - DNA, 17 bp, Arabidopsis thaliana
tgatggtgagactaatg

SEQ ID NO: 150041 - DNA, 17 bp, Arabidopsis thaliana
tgatggtgagactcgac

SEQ ID NO: 150042 - DNA, 17 bp, Arabidopsis thaliana
tgatggtgattgtctcc

SEQ ID NO: 150043 - DNA, 17 bp, Arabidopsis thaliana
tgatggtggaaatttaa

SEQ ID NO: 150044 - DNA, 17 bp, Arabidopsis thaliana
tgatggtggagcgattt

SEQ ID NO: 150045 - DNA, 17 bp, Arabidopsis thaliana
tgatggtgtaaaatcgc

SEQ ID NO: 150046 - DNA, 17 bp, Arabidopsis thaliana
tgatggttaagccgaat

SEQ ID NO: 150047 - DNA, 17 bp, Arabidopsis thaliana
tgatggttctatcgaga

SEQ ID NO: 150048 - DNA, 17 bp, Arabidopsis thaliana
tgatggttgctgtcgct

SEQ ID NO: 150049 - DNA, 17 bp, Arabidopsis thaliana
tgatggtttggaaactg

SEQ ID NO: 150050 - DNA, 17 bp, Arabidopsis thaliana
tgatgtaacactgctag

SEQ ID NO: 150051 - DNA, 17 bp, Arabidopsis thaliana
tgatgtaactctacgag

SEQ ID NO: 150052 - DNA, 17 bp, Arabidopsis thaliana
tgatgtaactgggaagg

SEQ ID NO: 150053 - DNA, 17 bp, Arabidopsis thaliana
tgatgtaatgcatttgg

SEQ ID NO: 150054 - DNA, 17 bp, Arabidopsis thaliana
tgatgtaatgcccgctg

SEQ ID NO: 150055 - DNA, 17 bp, Arabidopsis thaliana
tgatgtacaggtccacc

SEQ ID NO: 150056 - DNA, 17 bp, Arabidopsis thaliana
tgatgtaccactgccat

SEQ ID NO: 150057 - DNA, 17 bp, Arabidopsis thaliana
tgatgtaccatcgtctt

SEQ ID NO: 150058 - DNA, 17 bp, Arabidopsis thaliana
tgatgtacctgtgttgg

SEQ ID NO: 150059 - DNA, 17 bp, Arabidopsis thaliana
tgatgtactaacgtgct

SEQ ID NO: 150060 - DNA, 17 bp, Arabidopsis thaliana
tgatgtagaatgtcgaa

SEQ ID NO: 150061 - DNA, 17 bp, Arabidopsis thaliana
tgatgtagggaatctag

SEQ ID NO: 150062 - DNA, 17 bp, Arabidopsis thaliana
tgatgtaggtgggatga

SEQ ID NO: 150063 - DNA, 17 bp, Arabidopsis thaliana
tgatgtagtatgttcca

SEQ ID NO: 150064 - DNA, 17 bp, Arabidopsis thaliana
tgatgtagtttaggatt

SEQ ID NO: 150065 - DNA, 17 bp, Arabidopsis thaliana
tgatgtatcaactgctg

SEQ ID NO: 150066 - DNA, 17 bp, Arabidopsis thaliana
tgatgtatgtcctgacg

SEQ ID NO: 150067 - DNA, 17 bp, Arabidopsis thaliana
tgatgtattcatccacc

SEQ ID NO: 150068 - DNA, 17 bp, Arabidopsis thaliana
tgatgtattgacactcg

SEQ ID NO: 150069 - DNA, 17 bp, Arabidopsis thaliana
tgatgtcaacagctatg

SEQ ID NO: 150070 - DNA, 17 bp, Arabidopsis thaliana
tgatgtcacactacggg

SEQ ID NO: 150071 - DNA, 17 bp, Arabidopsis thaliana
tgatgtcaccgatgaag

SEQ ID NO: 150072 - DNA, 17 bp, Arabidopsis thaliana
tgatgtcagttgacctt

SEQ ID NO: 150073 - DNA, 17 bp, Arabidopsis thaliana
tgatgtcagttgggttt

SEQ ID NO: 150074 - DNA, 17 bp, Arabidopsis thaliana
tgatgtccaatgccaac

SEQ ID NO: 150075 - DNA, 17 bp, Arabidopsis thaliana
tgatgtccatttaagct

SEQ ID NO: 150076 - DNA, 17 bp, Arabidopsis thaliana
tgatgtccgtaattgtg

SEQ ID NO: 150077 - DNA, 17 bp, Arabidopsis thaliana
tgatgtcgaccgtttgc

SEQ ID NO: 150078 - DNA, 17 bp, Arabidopsis thaliana
tgatgtcgagcgtttac

SEQ ID NO: 150079 - DNA, 17 bp, Arabidopsis thaliana
tgatgtcgatagactga

SEQ ID NO: 150080 - DNA, 17 bp, Arabidopsis thaliana
tgatgtcgatcgtcggc

SEQ ID NO: 150081 - DNA, 17 bp, Arabidopsis thaliana
tgatgtcggagcgattc

SEQ ID NO: 150082 - DNA, 17 bp, Arabidopsis thaliana
tgatgtctaaggctagc

SEQ ID NO: 150083 - DNA, 17 bp, Arabidopsis thaliana
tgatgtctcagcgccgt

SEQ ID NO: 150084 - DNA, 17 bp, Arabidopsis thaliana
tgatgtctctcatgttg

SEQ ID NO: 150085 - DNA, 17 bp, Arabidopsis thaliana
tgatgtctctcggttct

SEQ ID NO: 150086 - DNA, 17 bp, Arabidopsis thaliana
tgatgtctgttggtgcc

SEQ ID NO: 150087 - DNA, 17 bp, Arabidopsis thaliana
tgatgtcttcttgtggc

SEQ ID NO: 150088 - DNA, 17 bp, Arabidopsis thaliana
tgatgtgaaactgcgaa

SEQ ID NO: 150089 - DNA, 17 bp, Arabidopsis thaliana
tgatgtgaagtttgttt

SEQ ID NO: 150090 - DNA, 17 bp, Arabidopsis thaliana
tgatgtgaccttgcgct

SEQ ID NO: 150091 - DNA, 17 bp, Arabidopsis thaliana
tgatgtgagaaccggga

SEQ ID NO: 150092 - DNA, 17 bp, Arabidopsis thaliana
tgatgtgattcggcttg

SEQ ID NO: 150093 - DNA, 17 bp, Arabidopsis thaliana
tgatgtgcaatgtggac

SEQ ID NO: 150094 - DNA, 17 bp, Arabidopsis thaliana
tgatgtgccattgttag

SEQ ID NO: 150095 - DNA, 17 bp, Arabidopsis thaliana
tgatgtgcctggatcaa

SEQ ID NO: 150096 - DNA, 17 bp, Arabidopsis thaliana
tgatgtgcgagggattt

SEQ ID NO: 150097 - DNA, 17 bp, Arabidopsis thaliana
tgatgtgcgattcagag

SEQ ID NO: 150098 - DNA, 17 bp, Arabidopsis thaliana
tgatgtgctatatgacg

SEQ ID NO: 150099 - DNA, 17 bp, Arabidopsis thaliana
tgatgtgctgatgtgtc

SEQ ID NO: 150100 - DNA, 17 bp, Arabidopsis thaliana
tgatgtggacggctgag

SEQ ID NO: 150101 - DNA, 17 bp, Arabidopsis thaliana
tgatgtggaggatggaa

SEQ ID NO: 150102 - DNA, 17 bp, Arabidopsis thaliana
tgatgtggattatgcac

SEQ ID NO: 150103 - DNA, 17 bp, Arabidopsis thaliana
tgatgtggattgggttg

SEQ ID NO: 150104 - DNA, 17 bp, Arabidopsis thaliana
tgatgtggcacgtgctg

SEQ ID NO: 150105 - DNA, 17 bp, Arabidopsis thaliana
tgatgtgggacctttgg

SEQ ID NO: 150106 - DNA, 17 bp, Arabidopsis thaliana
tgatgtggtggaagcgg

SEQ ID NO: 150107 - DNA, 17 bp, Arabidopsis thaliana
tgatgtggtttttgcgc

SEQ ID NO: 150108 - DNA, 17 bp, Arabidopsis thaliana
tgatgtgtatccttttc

SEQ ID NO: 150109 - DNA, 17 bp, Arabidopsis thaliana
tgatgtgtcaactgctg

SEQ ID NO: 150110 - DNA, 17 bp, Arabidopsis thaliana
tgatgtgtcaagttgtg

SEQ ID NO: 150111 - DNA, 17 bp, Arabidopsis thaliana
tgatgtgtcagcacagg

SEQ ID NO: 150112 - DNA, 17 bp, Arabidopsis thaliana
tgatgtgtgacgatgtg

SEQ ID NO: 150113 - DNA, 17 bp, Arabidopsis thaliana
tgatgtgtttgctagaa

SEQ ID NO: 150114 - DNA, 17 bp, Arabidopsis thaliana
tgatgttaaaccaagca

SEQ ID NO: 150115 - DNA, 17 bp, Arabidopsis thaliana
tgatgttaagaaccatt

SEQ ID NO: 150116 - DNA, 17 bp, Arabidopsis thaliana
tgatgttacagaggcgg

SEQ ID NO: 150117 - DNA, 17 bp, Arabidopsis thaliana
tgatgttatgaaccgcc

SEQ ID NO: 150118 - DNA, 17 bp, Arabidopsis thaliana
tgatgttcatccatttt

SEQ ID NO: 150119 - DNA, 17 bp, Arabidopsis thaliana
tgatgttcctgaacaag

SEQ ID NO: 150120 - DNA, 17 bp, Arabidopsis thaliana
tgatgttcggatcgcgt

SEQ ID NO: 150121 - DNA, 17 bp, Arabidopsis thaliana
tgatgttctgagactac

SEQ ID NO: 150122 - DNA, 17 bp, Arabidopsis thaliana
tgatgttgaatggctct

SEQ ID NO: 150123 - DNA, 17 bp, Arabidopsis thaliana
tgatgttgacaagtacc

SEQ ID NO: 150124 - DNA, 17 bp, Arabidopsis thaliana
tgatgttgacggcggca

SEQ ID NO: 150125 - DNA, 17 bp, Arabidopsis thaliana
tgatgttgccagcatga

SEQ ID NO: 150126 - DNA, 17 bp, Arabidopsis thaliana
tgatgttgtggctatcc

SEQ ID NO: 150127 - DNA, 17 bp, Arabidopsis thaliana
tgatgttgttcgaaggt

SEQ ID NO: 150128 - DNA, 17 bp, Arabidopsis thaliana
tgatgtttgagtagtga

SEQ ID NO: 150129 - DNA, 17 bp, Arabidopsis thaliana
tgatgtttgcagagctg

SEQ ID NO: 150130 - DNA, 17 bp, Arabidopsis thaliana
tgatgtttggatatcgg

SEQ ID NO: 150131 - DNA, 17 bp, Arabidopsis thaliana
tgatgtttgtgattccg

SEQ ID NO: 150132 - DNA, 17 bp, Arabidopsis thaliana
tgattaacagattctgc

SEQ ID NO: 150133 - DNA, 17 bp, Arabidopsis thaliana
tgattaacagggacaat

SEQ ID NO: 150134 - DNA, 17 bp, Arabidopsis thaliana
tgattaacagggacaga

SEQ ID NO: 150135 - DNA, 17 bp, Arabidopsis thaliana
tgattaacagggacagt

SEQ ID NO: 150136 - DNA, 17 bp, Arabidopsis thaliana
tgattaagccgtgtaat

SEQ ID NO: 150137 - DNA, 17 bp, Arabidopsis thaliana
tgattaagttggacaga

SEQ ID NO: 150138 - DNA, 17 bp, Arabidopsis thaliana
tgattaccagggaatcg

SEQ ID NO: 150139 - DNA, 17 bp, Arabidopsis thaliana
tgattaccgaccttgag

SEQ ID NO: 150140 - DNA, 17 bp, Arabidopsis thaliana
tgattaccgatggagat

SEQ ID NO: 150141 - DNA, 17 bp, Arabidopsis thaliana
tgattacctctactttg

SEQ ID NO: 150142 - DNA, 17 bp, Arabidopsis thaliana
tgattacctgtctgaga

SEQ ID NO: 150143 - DNA, 17 bp, Arabidopsis thaliana
tgattacggggttcggc

SEQ ID NO: 150144 - DNA, 17 bp, Arabidopsis thaliana
tgattacggggttcggt

SEQ ID NO: 150145 - DNA, 17 bp, Arabidopsis thaliana
tgattacggtggcggcc

SEQ ID NO: 150146 - DNA, 17 bp, Arabidopsis thaliana
tgattactctgaccttg

SEQ ID NO: 150147 - DNA, 17 bp, Arabidopsis thaliana
tgattactgcgccgttt

SEQ ID NO: 150148 - DNA, 17 bp, Arabidopsis thaliana
tgattactggcgtcctc

SEQ ID NO: 150149 - DNA, 17 bp, Arabidopsis thaliana
tgattactgtatcgcgc

SEQ ID NO: 150150 - DNA, 17 bp, Arabidopsis thaliana
tgattagactggttagc

SEQ ID NO: 150151 - DNA, 17 bp, Arabidopsis thaliana
tgattagagatcgcctg

SEQ ID NO: 150152 - DNA, 17 bp, Arabidopsis thaliana
tgattagccgcgccaat

SEQ ID NO: 150153 - DNA, 17 bp, Arabidopsis thaliana
tgattagcgatgtgccg

SEQ ID NO: 150154 - DNA, 17 bp, Arabidopsis thaliana
tgattagctagttggtg

SEQ ID NO: 150155 - DNA, 17 bp, Arabidopsis thaliana
tgattaggaaatcgttt

SEQ ID NO: 150156 - DNA, 17 bp, Arabidopsis thaliana
tgattaggatccgaaag

SEQ ID NO: 150157 - DNA, 17 bp, Arabidopsis thaliana
tgattaggtgagcgtga

SEQ ID NO: 150158 - DNA, 17 bp, Arabidopsis thaliana
tgattagtcgcatcctg

SEQ ID NO: 150159 - DNA, 17 bp, Arabidopsis thaliana
tgattagtgatgtttat

SEQ ID NO: 150160 - DNA, 17 bp, Arabidopsis thaliana
tgattagtgtacccgtt

SEQ ID NO: 150161 - DNA, 17 bp, Arabidopsis thaliana
tgattatactttgggtt

SEQ ID NO: 150162 - DNA, 17 bp, Arabidopsis thaliana
tgattatcacagcagtg

SEQ ID NO: 150163 - DNA, 17 bp, Arabidopsis thaliana
tgattatcattctatgg

SEQ ID NO: 150164 - DNA, 17 bp, Arabidopsis thaliana
tgattatccatgtcatc

SEQ ID NO: 150165 - DNA, 17 bp, Arabidopsis thaliana
tgattatcgctgccatc

SEQ ID NO: 150166 - DNA, 17 bp, Arabidopsis thaliana
tgattatcggccctgta

SEQ ID NO: 150167 - DNA, 17 bp, Arabidopsis thaliana
tgattatggaccgtcgg

SEQ ID NO: 150168 - DNA, 17 bp, Arabidopsis thaliana
tgattatggatcgggcc

SEQ ID NO: 150169 - DNA, 17 bp, Arabidopsis thaliana
tgattatggatcgggtc

SEQ ID NO: 150170 - DNA, 17 bp, Arabidopsis thaliana
tgattatgttcacgcgc

SEQ ID NO: 150171 - DNA, 17 bp, Arabidopsis thaliana
tgattatttccgtgatt

SEQ ID NO: 150172 - DNA, 17 bp, Arabidopsis thaliana
tgattattttcttgtgg

SEQ ID NO: 150173 - DNA, 17 bp, Arabidopsis thaliana
tgattcaaccatgagtg

SEQ ID NO: 150174 - DNA, 17 bp, Arabidopsis thaliana
tgattcaactccgtctt

SEQ ID NO: 150175 - DNA, 17 bp, Arabidopsis thaliana
tgattcaagccaaagag

SEQ ID NO: 150176 - DNA, 17 bp, Arabidopsis thaliana
tgattcaagcggtttaa

SEQ ID NO: 150177 - DNA, 17 bp, Arabidopsis thaliana
tgattcacaatggagca

SEQ ID NO: 150178 - DNA, 17 bp, Arabidopsis thaliana
tgattcacagagacaga

SEQ ID NO: 150179 - DNA, 17 bp, Arabidopsis thaliana
tgattcacatgaggcta

SEQ ID NO: 150180 - DNA, 17 bp, Arabidopsis thaliana
tgattcaccaggtctga

SEQ ID NO: 150181 - DNA, 17 bp, Arabidopsis thaliana
tgattcacgattctttg

SEQ ID NO: 150182 - DNA, 17 bp, Arabidopsis thaliana
tgattcacggtctgcgc

SEQ ID NO: 150183 - DNA, 17 bp, Arabidopsis thaliana
tgattcacgtcgggttc

SEQ ID NO: 150184 - DNA, 17 bp, Arabidopsis thaliana
tgattcacttggatgat

SEQ ID NO: 150185 - DNA, 17 bp, Arabidopsis thaliana
tgattcagactttcgta

SEQ ID NO: 150186 - DNA, 17 bp, Arabidopsis thaliana
tgattcagcccttgtcg

SEQ ID NO: 150187 - DNA, 17 bp, Arabidopsis thaliana
tgattcagccctttgtc

SEQ ID NO: 150188 - DNA, 17 bp, Arabidopsis thaliana
tgattcagccgcgccaa

SEQ ID NO: 150189 - DNA, 17 bp, Arabidopsis thaliana
tgattcagttgccgtag

SEQ ID NO: 150190 - DNA, 17 bp, Arabidopsis thaliana
tgattcatcataactcg

SEQ ID NO: 150191 - DNA, 17 bp, Arabidopsis thaliana
tgattcatccccggcgc

SEQ ID NO: 150192 - DNA, 17 bp, Arabidopsis thaliana
tgattcatctctgccgc

SEQ ID NO: 150193 - DNA, 17 bp, Arabidopsis thaliana
tgattcatcttagtggg

SEQ ID NO: 150194 - DNA, 17 bp, Arabidopsis thaliana
tgattcatgataactcg

SEQ ID NO: 150195 - DNA, 17 bp, Arabidopsis thaliana
tgattcatttggatgga

SEQ ID NO: 150196 - DNA, 17 bp, Arabidopsis thaliana
tgattccaactacaact

SEQ ID NO: 150197 - DNA, 17 bp, Arabidopsis thaliana
tgattccacgatcacac

SEQ ID NO: 150198 - DNA, 17 bp, Arabidopsis thaliana
tgattccaggtgtagtc

SEQ ID NO: 150199 - DNA, 17 bp, Arabidopsis thaliana
tgattcccaccctcacc

SEQ ID NO: 150200 - DNA, 17 bp, Arabidopsis thaliana
tgattcccagctggacc

SEQ ID NO: 150201 - DNA, 17 bp, Arabidopsis thaliana
tgattcccgatcagagt

SEQ ID NO: 150202 - DNA, 17 bp, Arabidopsis thaliana
tgattcccggctggtgc

SEQ ID NO: 150203 - DNA, 17 bp, Arabidopsis thaliana
tgattccctctagattg

SEQ ID NO: 150204 - DNA, 17 bp, Arabidopsis thaliana
tgattccgacagcagat

SEQ ID NO: 150205 - DNA, 17 bp, Arabidopsis thaliana
tgattccgacggaacag

SEQ ID NO: 150206 - DNA, 17 bp, Arabidopsis thaliana
tgattccggcgacggcg

SEQ ID NO: 150207 - DNA, 17 bp, Arabidopsis thaliana
tgattccgtgcagagag

SEQ ID NO: 150208 - DNA, 17 bp, Arabidopsis thaliana
tgattccgttacggcta

SEQ ID NO: 150209 - DNA, 17 bp, Arabidopsis thaliana
tgattccgttgctaaga

SEQ ID NO: 150210 - DNA, 17 bp, Arabidopsis thaliana
tgattcctcatcggact

SEQ ID NO: 150211 - DNA, 17 bp, Arabidopsis thaliana
tgattcctcgaccgaga

SEQ ID NO: 150212 - DNA, 17 bp, Arabidopsis thaliana
tgattcctctcaggtct

SEQ ID NO: 150213 - DNA, 17 bp, Arabidopsis thaliana
tgattcctctgacttac

SEQ ID NO: 150214 - DNA, 17 bp, Arabidopsis thaliana
tgattcgaaccctcctt

SEQ ID NO: 150215 - DNA, 17 bp, Arabidopsis thaliana
tgattcgatccccagca

SEQ ID NO: 150216 - DNA, 17 bp, Arabidopsis thaliana
tgattcgatgtgaatgg

SEQ ID NO: 150217 - DNA, 17 bp, Arabidopsis thaliana
tgattcgcccgagagcc

SEQ ID NO: 150218 - DNA, 17 bp, Arabidopsis thaliana
tgattcgcctgtcactg

SEQ ID NO: 150219 - DNA, 17 bp, Arabidopsis thaliana
tgattcggaccaaatgt

SEQ ID NO: 150220 - DNA, 17 bp, Arabidopsis thaliana
tgattcggcttggattt

SEQ ID NO: 150221 - DNA, 17 bp, Arabidopsis thaliana
tgattcgggatcggagt

SEQ ID NO: 150222 - DNA, 17 bp, Arabidopsis thaliana
tgattcggggcgtggac

SEQ ID NO: 150223 - DNA, 17 bp, Arabidopsis thaliana
tgattcggtcccaccgg

SEQ ID NO: 150224 - DNA, 17 bp, Arabidopsis thaliana
tgattcgtcccaccggg

SEQ ID NO: 150225 - DNA, 17 bp, Arabidopsis thaliana
tgattcgtccgttacga

SEQ ID NO: 150226 - DNA, 17 bp, Arabidopsis thaliana
tgattcgtctgtgaaac

SEQ ID NO: 150227 - DNA, 17 bp, Arabidopsis thaliana
tgattcgttgacggttt

SEQ ID NO: 150228 - DNA, 17 bp, Arabidopsis thaliana
tgattctaagatccacc

SEQ ID NO: 150229 - DNA, 17 bp, Arabidopsis thaliana
tgattctacatctccga

SEQ ID NO: 150230 - DNA, 17 bp, Arabidopsis thaliana
tgattctacggttttgg

SEQ ID NO: 150231 - DNA, 17 bp, Arabidopsis thaliana
tgattctactgagtact

SEQ ID NO: 150232 - DNA, 17 bp, Arabidopsis thaliana
tgattctagcgacgtag

SEQ ID NO: 150233 - DNA, 17 bp, Arabidopsis thaliana
tgattctatgggtggtg

SEQ ID NO: 150234 - DNA, 17 bp, Arabidopsis thaliana
tgattctatgtgtggtg

SEQ ID NO: 150235 - DNA, 17 bp, Arabidopsis thaliana
tgattctcaggtacata

SEQ ID NO: 150236 - DNA, 17 bp, Arabidopsis thaliana
tgattctcccttgcgtc

SEQ ID NO: 150237 - DNA, 17 bp, Arabidopsis thaliana
tgattctcggaatgccc

SEQ ID NO: 150238 - DNA, 17 bp, Arabidopsis thaliana
tgattctcggttaccca

SEQ ID NO: 150239 - DNA, 17 bp, Arabidopsis thaliana
tgattctctaaccgacc

SEQ ID NO: 150240 - DNA, 17 bp, Arabidopsis thaliana
tgattctctatctcgcc

SEQ ID NO: 150241 - DNA, 17 bp, Arabidopsis thaliana
tgattctcttcgttttc

SEQ ID NO: 150242 - DNA, 17 bp, Arabidopsis thaliana
tgattctcttcttatcg

SEQ ID NO: 150243 - DNA, 17 bp, Arabidopsis thaliana
tgattctcttttggggg

SEQ ID NO: 150244 - DNA, 17 bp, Arabidopsis thaliana
tgattctgaccgagtgt

SEQ ID NO: 150245 - DNA, 17 bp, Arabidopsis thaliana
tgattctgagatttggg

SEQ ID NO: 150246 - DNA, 17 bp, Arabidopsis thaliana
tgattctgattcctctc

SEQ ID NO: 150247 - DNA, 17 bp, Arabidopsis thaliana
tgattctgcaacgataa

SEQ ID NO: 150248 - DNA, 17 bp, Arabidopsis thaliana
tgattctgccgagccat

SEQ ID NO: 150249 - DNA, 17 bp, Arabidopsis thaliana
tgattctggaccgactg

SEQ ID NO: 150250 - DNA, 17 bp, Arabidopsis thaliana
tgattctggaccgtcgg

SEQ ID NO: 150251 - DNA, 17 bp, Arabidopsis thaliana
tgattctggaccgtctg

SEQ ID NO: 150252 - DNA, 17 bp, Arabidopsis thaliana
tgattctggaccgttgg

SEQ ID NO: 150253 - DNA, 17 bp, Arabidopsis thaliana
tgattctggatattcgg

SEQ ID NO: 150254 - DNA, 17 bp, Arabidopsis thaliana
tgattctggtccagccc

SEQ ID NO: 150255 - DNA, 17 bp, Arabidopsis thaliana
tgattctggtgcctttt

SEQ ID NO: 150256 - DNA, 17 bp, Arabidopsis thaliana
tgattctgtgttgctaa

SEQ ID NO: 150257 - DNA, 17 bp, Arabidopsis thaliana
tgattcttagttggtgg

SEQ ID NO: 150258 - DNA, 17 bp, Arabidopsis thaliana
tgattcttcgggattca

SEQ ID NO: 150259 - DNA, 17 bp, Arabidopsis thaliana
tgattcttctgctgcag

SEQ ID NO: 150260 - DNA, 17 bp, Arabidopsis thaliana
tgattcttctgtgttag

SEQ ID NO: 150261 - DNA, 17 bp, Arabidopsis thaliana
tgattcttcttgaccat

SEQ ID NO: 150262 - DNA, 17 bp, Arabidopsis thaliana
tgattcttgtaactagt

SEQ ID NO: 150263 - DNA, 17 bp, Arabidopsis thaliana
tgattctttctctatgg

SEQ ID NO: 150264 - DNA, 17 bp, Arabidopsis thaliana
tgattctttctctgtgg

SEQ ID NO: 150265 - DNA, 17 bp, Arabidopsis thaliana
tgattgaatagctcgag

SEQ ID NO: 150266 - DNA, 17 bp, Arabidopsis thaliana
tgattgacccacccccc

SEQ ID NO: 150267 - DNA, 17 bp, Arabidopsis thaliana
tgattgacccccccccc

SEQ ID NO: 150268 - DNA, 17 bp, Arabidopsis thaliana
tgattgacccgcgccaa

SEQ ID NO: 150269 - DNA, 17 bp, Arabidopsis thaliana
tgattgacccgtctccc

SEQ ID NO: 150270 - DNA, 17 bp, Arabidopsis thaliana
tgattgacccgtgtcaa

SEQ ID NO: 150271 - DNA, 17 bp, Arabidopsis thaliana
tgattgacgcaagacat

SEQ ID NO: 150272 - DNA, 17 bp, Arabidopsis thaliana
tgattgacgccagacat

SEQ ID NO: 150273 - DNA, 17 bp, Arabidopsis thaliana
tgattgactatgtgcgg

SEQ ID NO: 150274 - DNA, 17 bp, Arabidopsis thaliana
tgattgactctagtccg

SEQ ID NO: 150275 - DNA, 17 bp, Arabidopsis thaliana
tgattgagaaagtggcc

SEQ ID NO: 150276 - DNA, 17 bp, Arabidopsis thaliana
tgattgagcaaatgaat

SEQ ID NO: 150277 - DNA, 17 bp, Arabidopsis thaliana
tgattgagccaacgacc

SEQ ID NO: 150278 - DNA, 17 bp, Arabidopsis thaliana
tgattgagccaccaccc

SEQ ID NO: 150279 - DNA, 17 bp, Arabidopsis thaliana
tgattgagccaccccaa

SEQ ID NO: 150280 - DNA, 17 bp, Arabidopsis thaliana
tgattgagccaccccac

SEQ ID NO: 150281 - DNA, 17 bp, Arabidopsis thaliana
tgattgagccacccccc

SEQ ID NO: 150282 - DNA, 17 bp, Arabidopsis thaliana
tgattgagccacgaccc

SEQ ID NO: 150283 - DNA, 17 bp, Arabidopsis thaliana
tgattgagccacgccaa

SEQ ID NO: 150284 - DNA, 17 bp, Arabidopsis thaliana
tgattgagccacgccac

SEQ ID NO: 150285 - DNA, 17 bp, Arabidopsis thaliana
tgattgagccacgcccc

SEQ ID NO: 150286 - DNA, 17 bp, Arabidopsis thaliana
tgattgagccatgtcaa

SEQ ID NO: 150287 - DNA, 17 bp, Arabidopsis thaliana
tgattgagccatgtctc

SEQ ID NO: 150288 - DNA, 17 bp, Arabidopsis thaliana
tgattgagccatgtctg

SEQ ID NO: 150289 - DNA, 17 bp, Arabidopsis thaliana
tgattgagcccccaccc

SEQ ID NO: 150290 - DNA, 17 bp, Arabidopsis thaliana
tgattgagccccccccc

SEQ ID NO: 150291 - DNA, 17 bp, Arabidopsis thaliana
tgattgagccccgtttc

SEQ ID NO: 150292 - DNA, 17 bp, Arabidopsis thaliana
tgattgagcccgccaat

SEQ ID NO: 150293 - DNA, 17 bp, Arabidopsis thaliana
tgattgagcccttccct

SEQ ID NO: 150294 - DNA, 17 bp, Arabidopsis thaliana
tgattgagcccttggtc

SEQ ID NO: 150295 - DNA, 17 bp, Arabidopsis thaliana
tgattgagccgcaccaa

SEQ ID NO: 150296 - DNA, 17 bp, Arabidopsis thaliana
tgattgagccgcaccac

SEQ ID NO: 150297 - DNA, 17 bp, Arabidopsis thaliana
tgattgagccgcaccag

SEQ ID NO: 150298 - DNA, 17 bp, Arabidopsis thaliana
tgattgagccgcccaac

SEQ ID NO: 150299 - DNA, 17 bp, Arabidopsis thaliana
tgattgagccgcccaat

SEQ ID NO: 150300 - DNA, 17 bp, Arabidopsis thaliana
tgattgagccgccccaa

SEQ ID NO: 150301 - DNA, 17 bp, Arabidopsis thaliana
tgattgagccgccccac

SEQ ID NO: 150302 - DNA, 17 bp, Arabidopsis thaliana
tgattgagccgcccccc

SEQ ID NO: 150303 - DNA, 17 bp, Arabidopsis thaliana
tgattgagccgcgccaa

SEQ ID NO: 150304 - DNA, 17 bp, Arabidopsis thaliana
tgattgagccgcgccac

SEQ ID NO: 150305 - DNA, 17 bp, Arabidopsis thaliana
tgattgagccgcgccag

SEQ ID NO: 150306 - DNA, 17 bp, Arabidopsis thaliana
tgattgagccgcgccat

SEQ ID NO: 150307 - DNA, 17 bp, Arabidopsis thaliana
tgattgagccgcgcccc

SEQ ID NO: 150308 - DNA, 17 bp, Arabidopsis thaliana
tgattgagccgcgctaa

SEQ ID NO: 150309 - DNA, 17 bp, Arabidopsis thaliana
tgattgagccgcgtcaa

SEQ ID NO: 150310 - DNA, 17 bp, Arabidopsis thaliana
tgattgagccgcgtcag

SEQ ID NO: 150311 - DNA, 17 bp, Arabidopsis thaliana
tgattgagccgctccaa

SEQ ID NO: 150312 - DNA, 17 bp, Arabidopsis thaliana
tgattgagccgctcccc

SEQ ID NO: 150313 - DNA, 17 bp, Arabidopsis thaliana
tgattgagccgcttcat

SEQ ID NO: 150314 - DNA, 17 bp, Arabidopsis thaliana
tgattgagccgtctcaa

SEQ ID NO: 150315 - DNA, 17 bp, Arabidopsis thaliana
tgattgagccgtgacat

SEQ ID NO: 150316 - DNA, 17 bp, Arabidopsis thaliana
tgattgagccgtgccaa

SEQ ID NO: 150317 - DNA, 17 bp, Arabidopsis thaliana
tgattgagccgtgccac

SEQ ID NO: 150318 - DNA, 17 bp, Arabidopsis thaliana
tgattgagccgtgccag

SEQ ID NO: 150319 - DNA, 17 bp, Arabidopsis thaliana
tgattgagccgtgtatt

SEQ ID NO: 150320 - DNA, 17 bp, Arabidopsis thaliana
tgattgagccgtgtcaa

SEQ ID NO: 150321 - DNA, 17 bp, Arabidopsis thaliana
tgattgagccgtgtcac

SEQ ID NO: 150322 - DNA, 17 bp, Arabidopsis thaliana
tgattgagccgtgtcag

SEQ ID NO: 150323 - DNA, 17 bp, Arabidopsis thaliana
tgattgagccgtgtcat

SEQ ID NO: 150324 - DNA, 17 bp, Arabidopsis thaliana
tgattgagccgtgtcca

SEQ ID NO: 150325 - DNA, 17 bp, Arabidopsis thaliana
tgattgagccgtgtccc

SEQ ID NO: 150326 - DNA, 17 bp, Arabidopsis thaliana
tgattgagccgtgtccg

SEQ ID NO: 150327 - DNA, 17 bp, Arabidopsis thaliana
tgattgagccgtgtcga

SEQ ID NO: 150328 - DNA, 17 bp, Arabidopsis thaliana
tgattgagccgtgtcgt

SEQ ID NO: 150329 - DNA, 17 bp, Arabidopsis thaliana
tgattgagccgtgtcta

SEQ ID NO: 150330 - DNA, 17 bp, Arabidopsis thaliana
tgattgagccgtgtctc

SEQ ID NO: 150331 - DNA, 17 bp, Arabidopsis thaliana
tgattgagccgtgtctg

SEQ ID NO: 150332 - DNA, 17 bp, Arabidopsis thaliana
tgattgagccgtgtgaa

SEQ ID NO: 150333 - DNA, 17 bp, Arabidopsis thaliana
tgattgagccgtgtgat

SEQ ID NO: 150334 - DNA, 17 bp, Arabidopsis thaliana
tgattgagcctcgccaa

SEQ ID NO: 150335 - DNA, 17 bp, Arabidopsis thaliana
tgattgagccttcgtac

SEQ ID NO: 150336 - DNA, 17 bp, Arabidopsis thaliana
tgattgagccttgtcaa

SEQ ID NO: 150337 - DNA, 17 bp, Arabidopsis thaliana
tgattgagccttgtcta

SEQ ID NO: 150338 - DNA, 17 bp, Arabidopsis thaliana
tgattgagcggtgtcaa

SEQ ID NO: 150339 - DNA, 17 bp, Arabidopsis thaliana
tgattgaggcgtgtcat

SEQ ID NO: 150340 - DNA, 17 bp, Arabidopsis thaliana
tgattgagtcattttag

SEQ ID NO: 150341 - DNA, 17 bp, Arabidopsis thaliana
tgattgagtctgggact

SEQ ID NO: 150342 - DNA, 17 bp, Arabidopsis thaliana
tgattgatagacttgac

SEQ ID NO: 150343 - DNA, 17 bp, Arabidopsis thaliana
tgattgatctgagactg

SEQ ID NO: 150344 - DNA, 17 bp, Arabidopsis thaliana
tgattgatggctttccg

SEQ ID NO: 150345 - DNA, 17 bp, Arabidopsis thaliana
tgattgatggctttctt

SEQ ID NO: 150346 - DNA, 17 bp, Arabidopsis thaliana
tgattgatgtcttaccg

SEQ ID NO: 150347 - DNA, 17 bp, Arabidopsis thaliana
tgattgatgttttaccg

SEQ ID NO: 150348 - DNA, 17 bp, Arabidopsis thaliana
tgattgatgttttactg

SEQ ID NO: 150349 - DNA, 17 bp, Arabidopsis thaliana
tgattgattgatgcgtg

SEQ ID NO: 150350 - DNA, 17 bp, Arabidopsis thaliana
tgattgcacctagagga

SEQ ID NO: 150351 - DNA, 17 bp, Arabidopsis thaliana
tgattgcagttgtaagt

SEQ ID NO: 150352 - DNA, 17 bp, Arabidopsis thaliana
tgattgccgctgcaata

SEQ ID NO: 150353 - DNA, 17 bp, Arabidopsis thaliana
tgattgcctcatctcca

SEQ ID NO: 150354 - DNA, 17 bp, Arabidopsis thaliana
tgattgccttgcgagtt

SEQ ID NO: 150355 - DNA, 17 bp, Arabidopsis thaliana
tgattgcgagagataca

SEQ ID NO: 150356 - DNA, 17 bp, Arabidopsis thaliana
tgattgcgccgtgtcaa

SEQ ID NO: 150357 - DNA, 17 bp, Arabidopsis thaliana
tgattgcgcttgttaac

SEQ ID NO: 150358 - DNA, 17 bp, Arabidopsis thaliana
tgattgctcgaagtgaa

SEQ ID NO: 150359 - DNA, 17 bp, Arabidopsis thaliana
tgattgctcgagtaatt

SEQ ID NO: 150360 - DNA, 17 bp, Arabidopsis thaliana
tgattgctctttgacct

SEQ ID NO: 150361 - DNA, 17 bp, Arabidopsis thaliana
tgattgctgcgtcagtt

SEQ ID NO: 150362 - DNA, 17 bp, Arabidopsis thaliana
tgattgctgtagcgaca

SEQ ID NO: 150363 - DNA, 17 bp, Arabidopsis thaliana
tgattgcttgtgttggt

SEQ ID NO: 150364 - DNA, 17 bp, Arabidopsis thaliana
tgattgcttgttgagcc

SEQ ID NO: 150365 - DNA, 17 bp, Arabidopsis thaliana
tgattggaaatcatgtg

SEQ ID NO: 150366 - DNA, 17 bp, Arabidopsis thaliana
tgattggacccgcagat

SEQ ID NO: 150367 - DNA, 17 bp, Arabidopsis thaliana
tgattggagcagcgggt

SEQ ID NO: 150368 - DNA, 17 bp, Arabidopsis thaliana
tgattggaggatccgcg

SEQ ID NO: 150369 - DNA, 17 bp, Arabidopsis thaliana
tgattggagtgttgagg

SEQ ID NO: 150370 - DNA, 17 bp, Arabidopsis thaliana
tgattggatcacacttg

SEQ ID NO: 150371 - DNA, 17 bp, Arabidopsis thaliana
tgattggatgctgacac

SEQ ID NO: 150372 - DNA, 17 bp, Arabidopsis thaliana
tgattggattaaggttc

SEQ ID NO: 150373 - DNA, 17 bp, Arabidopsis thaliana
tgattggattgtgacac

SEQ ID NO: 150374 - DNA, 17 bp, Arabidopsis thaliana
tgattggcacatgactt

SEQ ID NO: 150375 - DNA, 17 bp, Arabidopsis thaliana
tgattggccgcgccaat

SEQ ID NO: 150376 - DNA, 17 bp, Arabidopsis thaliana
tgattggcgggatccct

SEQ ID NO: 150377 - DNA, 17 bp, Arabidopsis thaliana
tgattggcgggatctcg

SEQ ID NO: 150378 - DNA, 17 bp, Arabidopsis thaliana
tgattggcgttcacaac

SEQ ID NO: 150379 - DNA, 17 bp, Arabidopsis thaliana
tgattggctgctgacat

SEQ ID NO: 150380 - DNA, 17 bp, Arabidopsis thaliana
tgattggcttaacctca

SEQ ID NO: 150381 - DNA, 17 bp, Arabidopsis thaliana
tgattggcttacctatg

SEQ ID NO: 150382 - DNA, 17 bp, Arabidopsis thaliana
tgattgggccgcgccaa

SEQ ID NO: 150383 - DNA, 17 bp, Arabidopsis thaliana
tgattgggccgtgtcaa

SEQ ID NO: 150384 - DNA, 17 bp, Arabidopsis thaliana
tgattgggtctatcata

SEQ ID NO: 150385 - DNA, 17 bp, Arabidopsis thaliana
tgattgggttgttgcaa

SEQ ID NO: 150386 - DNA, 17 bp, Arabidopsis thaliana
tgattggtcctggacca

SEQ ID NO: 150387 - DNA, 17 bp, Arabidopsis thaliana
tgattggtcgagtgttg

SEQ ID NO: 150388 - DNA, 17 bp, Arabidopsis thaliana
tgattggtctgcagcgg

SEQ ID NO: 150389 - DNA, 17 bp, Arabidopsis thaliana
tgattggtgccgacaac

SEQ ID NO: 150390 - DNA, 17 bp, Arabidopsis thaliana
tgattggttcggctgta

SEQ ID NO: 150391 - DNA, 17 bp, Arabidopsis thaliana
tgattggttcgtctgta

SEQ ID NO: 150392 - DNA, 17 bp, Arabidopsis thaliana
tgattggttgggctgta

SEQ ID NO: 150393 - DNA, 17 bp, Arabidopsis thaliana
tgattggttttatctta

SEQ ID NO: 150394 - DNA, 17 bp, Arabidopsis thaliana
tgattgtaactatagta

SEQ ID NO: 150395 - DNA, 17 bp, Arabidopsis thaliana
tgattgtacgaactatg

SEQ ID NO: 150396 - DNA, 17 bp, Arabidopsis thaliana
tgattgtatcggctacc

SEQ ID NO: 150397 - DNA, 17 bp, Arabidopsis thaliana
tgattgtattccaggct

SEQ ID NO: 150398 - DNA, 17 bp, Arabidopsis thaliana
tgattgtcagatctaat

SEQ ID NO: 150399 - DNA, 17 bp, Arabidopsis thaliana
tgattgtccgagtagga

SEQ ID NO: 150400 - DNA, 17 bp, Arabidopsis thaliana
tgattgtcgagccactg

SEQ ID NO: 150401 - DNA, 17 bp, Arabidopsis thaliana
tgattgtcgctaagatt

SEQ ID NO: 150402 - DNA, 17 bp, Arabidopsis thaliana
tgattgtcggaaccatg

SEQ ID NO: 150403 - DNA, 17 bp, Arabidopsis thaliana
tgattgtcggaaccgtg

SEQ ID NO: 150404 - DNA, 17 bp, Arabidopsis thaliana
tgattgtctactaaaac

SEQ ID NO: 150405 - DNA, 17 bp, Arabidopsis thaliana
tgattgtctactgtggg

SEQ ID NO: 150406 - DNA, 17 bp, Arabidopsis thaliana
tgattgtctgtcggttc

SEQ ID NO: 150407 - DNA, 17 bp, Arabidopsis thaliana
tgattgtgccacaactt

SEQ ID NO: 150408 - DNA, 17 bp, Arabidopsis thaliana
tgattgtgccgtgtcaa

SEQ ID NO: 150409 - DNA, 17 bp, Arabidopsis thaliana
tgattgtgccgtgtcga

SEQ ID NO: 150410 - DNA, 17 bp, Arabidopsis thaliana
tgattgtgcgacgcgtt

SEQ ID NO: 150411 - DNA, 17 bp, Arabidopsis thaliana
tgattgtgctatatgac

SEQ ID NO: 150412 - DNA, 17 bp, Arabidopsis thaliana
tgattgtgctatattac

SEQ ID NO: 150413 - DNA, 17 bp, Arabidopsis thaliana
tgattgtgctggatgag

SEQ ID NO: 150414 - DNA, 17 bp, Arabidopsis thaliana
tgattgtggaccgtttg

SEQ ID NO: 150415 - DNA, 17 bp, Arabidopsis thaliana
tgattgtggatggtggt

SEQ ID NO: 150416 - DNA, 17 bp, Arabidopsis thaliana
tgattgtgtgaccattc

SEQ ID NO: 150417 - DNA, 17 bp, Arabidopsis thaliana
tgattgtgtgctactat

SEQ ID NO: 150418 - DNA, 17 bp, Arabidopsis thaliana
tgattgttctgagacta

SEQ ID NO: 150419 - DNA, 17 bp, Arabidopsis thaliana
tgattgttgctgctcga

SEQ ID NO: 150420 - DNA, 17 bp, Arabidopsis thaliana
tgattgttgctggtcga

SEQ ID NO: 150421 - DNA, 17 bp, Arabidopsis thaliana
tgattgttggcctgaag

SEQ ID NO: 150422 - DNA, 17 bp, Arabidopsis thaliana
tgattgttggtcagaaa

SEQ ID NO: 150423 - DNA, 17 bp, Arabidopsis thaliana
tgattgtttgtgctctt

SEQ ID NO: 150424 - DNA, 17 bp, Arabidopsis thaliana
tgatttacaacggatga

SEQ ID NO: 150425 - DNA, 17 bp, Arabidopsis thaliana
tgatttagaccagcgtg

SEQ ID NO: 150426 - DNA, 17 bp, Arabidopsis thaliana
tgatttagccgtgtcaa

SEQ ID NO: 150427 - DNA, 17 bp, Arabidopsis thaliana
tgatttagtcgggttgc

SEQ ID NO: 150428 - DNA, 17 bp, Arabidopsis thaliana
tgatttagttgccgtag

SEQ ID NO: 150429 - DNA, 17 bp, Arabidopsis thaliana
tgatttatctggtgctt

SEQ ID NO: 150430 - DNA, 17 bp, Arabidopsis thaliana
tgatttcaccggcgatc

SEQ ID NO: 150431 - DNA, 17 bp, Arabidopsis thaliana
tgatttcagacaaccta

SEQ ID NO: 150432 - DNA, 17 bp, Arabidopsis thaliana
tgatttcaggtctggta

SEQ ID NO: 150433 - DNA, 17 bp, Arabidopsis thaliana
tgatttcaggtgatttg

SEQ ID NO: 150434 - DNA, 17 bp, Arabidopsis thaliana
tgatttcatcgatctgt

SEQ ID NO: 150435 - DNA, 17 bp, Arabidopsis thaliana
tgatttccagccgattg

SEQ ID NO: 150436 - DNA, 17 bp, Arabidopsis thaliana
tgatttccggcaggtcg

SEQ ID NO: 150437 - DNA, 17 bp, Arabidopsis thaliana
tgatttccgtcggaggt

SEQ ID NO: 150438 - DNA, 17 bp, Arabidopsis thaliana
tgatttccgttggtcaa

SEQ ID NO: 150439 - DNA, 17 bp, Arabidopsis thaliana
tgatttccttatcttgg

SEQ ID NO: 150440 - DNA, 17 bp, Arabidopsis thaliana
tgatttccttatcttgt

SEQ ID NO: 150441 - DNA, 17 bp, Arabidopsis thaliana
tgatttccttcgtaaag

SEQ ID NO: 150442 - DNA, 17 bp, Arabidopsis thaliana
tgatttcctttctcagg

SEQ ID NO: 150443 - DNA, 17 bp, Arabidopsis thaliana
tgatttcggaatccgtt

SEQ ID NO: 150444 - DNA, 17 bp, Arabidopsis thaliana
tgatttcgggtctacta

SEQ ID NO: 150445 - DNA, 17 bp, Arabidopsis thaliana
tgatttcgggtctactc

SEQ ID NO: 150446 - DNA, 17 bp, Arabidopsis thaliana
tgatttcgggtctagta

SEQ ID NO: 150447 - DNA, 17 bp, Arabidopsis thaliana
tgatttcgggtctggta

SEQ ID NO: 150448 - DNA, 17 bp, Arabidopsis thaliana
tgatttcgttggaccgt

SEQ ID NO: 150449 - DNA, 17 bp, Arabidopsis thaliana
tgatttctaacttcgcc

SEQ ID NO: 150450 - DNA, 17 bp, Arabidopsis thaliana
tgatttctactaagtaa

SEQ ID NO: 150451 - DNA, 17 bp, Arabidopsis thaliana
tgatttctcaggcgttg

SEQ ID NO: 150452 - DNA, 17 bp, Arabidopsis thaliana
tgatttctcccggcaga

SEQ ID NO: 150453 - DNA, 17 bp, Arabidopsis thaliana
tgatttctccgaaagtg

SEQ ID NO: 150454 - DNA, 17 bp, Arabidopsis thaliana
tgatttctcctgtagac

SEQ ID NO: 150455 - DNA, 17 bp, Arabidopsis thaliana
tgatttctcgcggaaag

SEQ ID NO: 150456 - DNA, 17 bp, Arabidopsis thaliana
tgatttctgagactcag

SEQ ID NO: 150457 - DNA, 17 bp, Arabidopsis thaliana
tgatttctgcccagtgc

SEQ ID NO: 150458 - DNA, 17 bp, Arabidopsis thaliana
tgatttctgtcatcact

SEQ ID NO: 150459 - DNA, 17 bp, Arabidopsis thaliana
tgatttcttcaggggct

SEQ ID NO: 150460 - DNA, 17 bp, Arabidopsis thaliana
tgatttcttcaggggtt

SEQ ID NO: 150461 - DNA, 17 bp, Arabidopsis thaliana
tgatttcttcgtcgcag

SEQ ID NO: 150462 - DNA, 17 bp, Arabidopsis thaliana
tgatttcttgaccttgg

SEQ ID NO: 150463 - DNA, 17 bp, Arabidopsis thaliana
tgatttctttccagtcc

SEQ ID NO: 150464 - DNA, 17 bp, Arabidopsis thaliana
tgatttgacaagggtcc

SEQ ID NO: 150465 - DNA, 17 bp, Arabidopsis thaliana
tgatttgacaagggttc

SEQ ID NO: 150466 - DNA, 17 bp, Arabidopsis thaliana
tgatttgaccacctatg

SEQ ID NO: 150467 - DNA, 17 bp, Arabidopsis thaliana
tgatttgacccatgaat

SEQ ID NO: 150468 - DNA, 17 bp, Arabidopsis thaliana
tgatttgactcatttac

SEQ ID NO: 150469 - DNA, 17 bp, Arabidopsis thaliana
tgatttgagaatgacaa

SEQ ID NO: 150470 - DNA, 17 bp, Arabidopsis thaliana
tgatttgagatgagttc

SEQ ID NO: 150471 - DNA, 17 bp, Arabidopsis thaliana
tgatttgagttgaccca

SEQ ID NO: 150472 - DNA, 17 bp, Arabidopsis thaliana
tgatttgattgcgtatg

SEQ ID NO: 150473 - DNA, 17 bp, Arabidopsis thaliana
tgatttgcactcgtttg

SEQ ID NO: 150474 - DNA, 17 bp, Arabidopsis thaliana
tgatttgcagaaggagt

SEQ ID NO: 150475 - DNA, 17 bp, Arabidopsis thaliana
tgatttgccagaagttt

SEQ ID NO: 150476 - DNA, 17 bp, Arabidopsis thaliana
tgatttgcccagtgctg

SEQ ID NO: 150477 - DNA, 17 bp, Arabidopsis thaliana
tgatttgccgcgccaat

SEQ ID NO: 150478 - DNA, 17 bp, Arabidopsis thaliana
tgatttgccgcgccagc

SEQ ID NO: 150479 - DNA, 17 bp, Arabidopsis thaliana
tgatttgcctaatgttt

SEQ ID NO: 150480 - DNA, 17 bp, Arabidopsis thaliana
tgatttgcggctcgact

SEQ ID NO: 150481 - DNA, 17 bp, Arabidopsis thaliana
tgatttgcggttcgact

SEQ ID NO: 150482 - DNA, 17 bp, Arabidopsis thaliana
tgatttgcgtcggctgt

SEQ ID NO: 150483 - DNA, 17 bp, Arabidopsis thaliana
tgatttggctatctctg

SEQ ID NO: 150484 - DNA, 17 bp, Arabidopsis thaliana
tgatttggggcatatcc

SEQ ID NO: 150485 - DNA, 17 bp, Arabidopsis thaliana
tgatttggtatgcgttt

SEQ ID NO: 150486 - DNA, 17 bp, Arabidopsis thaliana
tgatttggtgagtatcc

SEQ ID NO: 150487 - DNA, 17 bp, Arabidopsis thaliana
tgatttggtgcaggtcg

SEQ ID NO: 150488 - DNA, 17 bp, Arabidopsis thaliana
tgatttgtacacaccgc

SEQ ID NO: 150489 - DNA, 17 bp, Arabidopsis thaliana
tgatttgtcatccgagt

SEQ ID NO: 150490 - DNA, 17 bp, Arabidopsis thaliana
tgatttgtcatgggcta

SEQ ID NO: 150491 - DNA, 17 bp, Arabidopsis thaliana
tgatttgtccgttgcta

SEQ ID NO: 150492 - DNA, 17 bp, Arabidopsis thaliana
tgatttgtcggctatag

SEQ ID NO: 150493 - DNA, 17 bp, Arabidopsis thaliana
tgatttgtctaccgatc

SEQ ID NO: 150494 - DNA, 17 bp, Arabidopsis thaliana
tgatttgtctgcggttt

SEQ ID NO: 150495 - DNA, 17 bp, Arabidopsis thaliana
tgatttgtgctatatga

SEQ ID NO: 150496 - DNA, 17 bp, Arabidopsis thaliana
tgatttgtggcgtggac

SEQ ID NO: 150497 - DNA, 17 bp, Arabidopsis thaliana
tgatttgtgtgaaatgg

SEQ ID NO: 150498 - DNA, 17 bp, Arabidopsis thaliana
tgatttgtgttaaatgg

SEQ ID NO: 150499 - DNA, 17 bp, Arabidopsis thaliana
tgatttgttgaccaggc

SEQ ID NO: 150500 - DNA, 17 bp, Arabidopsis thaliana
tgatttgttgttgcgca

SEQ ID NO: 150501 - DNA, 17 bp, Arabidopsis thaliana
tgatttgtttttgctgc

SEQ ID NO: 150502 - DNA, 17 bp, Arabidopsis thaliana
tgattttaaaaccagac

SEQ ID NO: 150503 - DNA, 17 bp, Arabidopsis thaliana
tgattttaagtcgtcgg

SEQ ID NO: 150504 - DNA, 17 bp, Arabidopsis thaliana
tgattttaccggcggtc

SEQ ID NO: 150505 - DNA, 17 bp, Arabidopsis thaliana
tgattttacgattttgg

SEQ ID NO: 150506 - DNA, 17 bp, Arabidopsis thaliana
tgattttacgccgggag

SEQ ID NO: 150507 - DNA, 17 bp, Arabidopsis thaliana
tgattttagattcaggc

SEQ ID NO: 150508 - DNA, 17 bp, Arabidopsis thaliana
tgattttagtcaccagc

SEQ ID NO: 150509 - DNA, 17 bp, Arabidopsis thaliana
tgattttcaccaacttt

SEQ ID NO: 150510 - DNA, 17 bp, Arabidopsis thaliana
tgattttcagctttcgg

SEQ ID NO: 150511 - DNA, 17 bp, Arabidopsis thaliana
tgattttcaggagtttt

SEQ ID NO: 150512 - DNA, 17 bp, Arabidopsis thaliana
tgattttcagggcaaat

SEQ ID NO: 150513 - DNA, 17 bp, Arabidopsis thaliana
tgattttccaagcagga

SEQ ID NO: 150514 - DNA, 17 bp, Arabidopsis thaliana
tgattttccagttgcgg

SEQ ID NO: 150515 - DNA, 17 bp, Arabidopsis thaliana
tgattttccgactacta

SEQ ID NO: 150516 - DNA, 17 bp, Arabidopsis thaliana
tgattttcctgatttgg

SEQ ID NO: 150517 - DNA, 17 bp, Arabidopsis thaliana
tgattttcgcagatagt

SEQ ID NO: 150518 - DNA, 17 bp, Arabidopsis thaliana
tgattttcggcttgagg

SEQ ID NO: 150519 - DNA, 17 bp, Arabidopsis thaliana
tgattttcgtgatcttt

SEQ ID NO: 150520 - DNA, 17 bp, Arabidopsis thaliana
tgattttcgtgatttag

SEQ ID NO: 150521 - DNA, 17 bp, Arabidopsis thaliana
tgattttcgtgatttgg

SEQ ID NO: 150522 - DNA, 17 bp, Arabidopsis thaliana
tgattttctgcagttta

SEQ ID NO: 150523 - DNA, 17 bp, Arabidopsis thaliana
tgattttgaacgcggaa

SEQ ID NO: 150524 - DNA, 17 bp, Arabidopsis thaliana
tgattttgccaaaccgg

SEQ ID NO: 150525 - DNA, 17 bp, Arabidopsis thaliana
tgattttgcggttttga

SEQ ID NO: 150526 - DNA, 17 bp, Arabidopsis thaliana
tgattttgctccatcgt

SEQ ID NO: 150527 - DNA, 17 bp, Arabidopsis thaliana
tgattttgcttcagctt

SEQ ID NO: 150528 - DNA, 17 bp, Arabidopsis thaliana
tgattttggcagaaaag

SEQ ID NO: 150529 - DNA, 17 bp, Arabidopsis thaliana
tgattttggcaggtgca

SEQ ID NO: 150530 - DNA, 17 bp, Arabidopsis thaliana
tgattttggcttggttg

SEQ ID NO: 150531 - DNA, 17 bp, Arabidopsis thaliana
tgattttggtctaactc

SEQ ID NO: 150532 - DNA, 17 bp, Arabidopsis thaliana
tgattttggttgaggcc

SEQ ID NO: 150533 - DNA, 17 bp, Arabidopsis thaliana
tgattttgtaaagtgcc

SEQ ID NO: 150534 - DNA, 17 bp, Arabidopsis thaliana
tgattttgtcgctaaga

SEQ ID NO: 150535 - DNA, 17 bp, Arabidopsis thaliana
tgattttgtgattcgct

SEQ ID NO: 150536 - DNA, 17 bp, Arabidopsis thaliana
tgattttgtgccatgaa

SEQ ID NO: 150537 - DNA, 17 bp, Arabidopsis thaliana
tgattttgttattgggc

SEQ ID NO: 150538 - DNA, 17 bp, Arabidopsis thaliana
tgattttgtttgtgcgc

SEQ ID NO: 150539 - DNA, 17 bp, Arabidopsis thaliana
tgatttttacgggacgg

SEQ ID NO: 150540 - DNA, 17 bp, Arabidopsis thaliana
tgatttttcttcggtta

SEQ ID NO: 150541 - DNA, 17 bp, Arabidopsis thaliana
tgatttttcttgcatgc

SEQ ID NO: 150542 - DNA, 17 bp, Arabidopsis thaliana
tgatttttgagcagaga

SEQ ID NO: 150543 - DNA, 17 bp, Arabidopsis thaliana
tgatttttgatccttcg

SEQ ID NO: 150544 - DNA, 17 bp, Arabidopsis thaliana
tgatttttgtttccaag

SEQ ID NO: 150545 - DNA, 17 bp, Arabidopsis thaliana
tgattttttctatcgac

SEQ ID NO: 150546 - DNA, 17 bp, Arabidopsis thaliana
tgattttttctcaggcg

SEQ ID NO: 150547 - DNA, 17 bp, Arabidopsis thaliana
tgattttttgggagaag

SEQ ID NO: 150548 - DNA, 17 bp, Arabidopsis thaliana
tgattttttggtccgga

SEQ ID NO: 150549 - DNA, 17 bp, Arabidopsis thaliana
tgatttttttcctcaag

SEQ ID NO: 150550 - DNA, 17 bp, Arabidopsis thaliana
tgatttttttgacaaca

SEQ ID NO: 150551 - DNA, 17 bp, Arabidopsis thaliana
tgatttttttgacattt

SEQ ID NO: 150552 - DNA, 17 bp, Arabidopsis thaliana
tgcaaaaactgcctatt

SEQ ID NO: 150553 - DNA, 17 bp, Arabidopsis thaliana
tgcaaaaatagggtttc

SEQ ID NO: 150554 - DNA, 17 bp, Arabidopsis thaliana
tgcaaaacacagaggga

SEQ ID NO: 150555 - DNA, 17 bp, Arabidopsis thaliana
tgcaaaaccgtgatagt

SEQ ID NO: 150556 - DNA, 17 bp, Arabidopsis thaliana
tgcaaaagcccaagtct

SEQ ID NO: 150557 - DNA, 17 bp, Arabidopsis thaliana
tgcaaaaggccaacaag

SEQ ID NO: 150558 - DNA, 17 bp, Arabidopsis thaliana
tgcaaaaggtgtctcgc

SEQ ID NO: 150559 - DNA, 17 bp, Arabidopsis thaliana
tgcaaaatctgccatat

SEQ ID NO: 150560 - DNA, 17 bp, Arabidopsis thaliana
tgcaaaatggttgacgg

SEQ ID NO: 150561 - DNA, 17 bp, Arabidopsis thaliana
tgcaaaattcactagcc

SEQ ID NO: 150562 - DNA, 17 bp, Arabidopsis thaliana
tgcaaaattgactatat

SEQ ID NO: 150563 - DNA, 17 bp, Arabidopsis thaliana
tgcaaaattggctgaat

SEQ ID NO: 150564 - DNA, 17 bp, Arabidopsis thaliana
tgcaaacattgcaaacc

SEQ ID NO: 150565 - DNA, 17 bp, Arabidopsis thaliana
tgcaaaccgttgcgaac

SEQ ID NO: 150566 - DNA, 17 bp, Arabidopsis thaliana
tgcaaacctaattttgc

SEQ ID NO: 150567 - DNA, 17 bp, Arabidopsis thaliana
tgcaaacgcaatcgttt

SEQ ID NO: 150568 - DNA, 17 bp, Arabidopsis thaliana
tgcaaacggctactaag

SEQ ID NO: 150569 - DNA, 17 bp, Arabidopsis thaliana
tgcaaacgggatgtcgt

SEQ ID NO: 150570 - DNA, 17 bp, Arabidopsis thaliana
tgcaaactctcttgtca

SEQ ID NO: 150571 - DNA, 17 bp, Arabidopsis thaliana
tgcaaactgaagccctt

SEQ ID NO: 150572 - DNA, 17 bp, Arabidopsis thaliana
tgcaaagagctgtgttg

SEQ ID NO: 150573 - DNA, 17 bp, Arabidopsis thaliana
tgcaaagatctgagcca

SEQ ID NO: 150574 - DNA, 17 bp, Arabidopsis thaliana
tgcaaagattataggtt

SEQ ID NO: 150575 - DNA, 17 bp, Arabidopsis thaliana
tgcaaagctatgtctca

SEQ ID NO: 150576 - DNA, 17 bp, Arabidopsis thaliana
tgcaaagcttagaggtc

SEQ ID NO: 150577 - DNA, 17 bp, Arabidopsis thaliana
tgcaaaggtttcctcgg

SEQ ID NO: 150578 - DNA, 17 bp, Arabidopsis thaliana
tgcaaaggttttgtgat

SEQ ID NO: 150579 - DNA, 17 bp, Arabidopsis thaliana
tgcaaagtccgattttg

SEQ ID NO: 150580 - DNA, 17 bp, Arabidopsis thaliana
tgcaaagtctacgcctt

SEQ ID NO: 150581 - DNA, 17 bp, Arabidopsis thaliana
tgcaaagtcttatgggc

SEQ ID NO: 150582 - DNA, 17 bp, Arabidopsis thaliana
tgcaaagttccgcacct

SEQ ID NO: 150583 - DNA, 17 bp, Arabidopsis thaliana
tgcaaagttgtgtctga

SEQ ID NO: 150584 - DNA, 17 bp, Arabidopsis thaliana
tgcaaagttttggaccg

SEQ ID NO: 150585 - DNA, 17 bp, Arabidopsis thaliana
tgcaaataaggatccag

SEQ ID NO: 150586 - DNA, 17 bp, Arabidopsis thaliana
tgcaaatagatcgcact

SEQ ID NO: 150587 - DNA, 17 bp, Arabidopsis thaliana
tgcaaatccagttcttg

SEQ ID NO: 150588 - DNA, 17 bp, Arabidopsis thaliana
tgcaaatccagttttgt

SEQ ID NO: 150589 - DNA, 17 bp, Arabidopsis thaliana
tgcaaatcgtgaatacc

SEQ ID NO: 150590 - DNA, 17 bp, Arabidopsis thaliana
tgcaaatcgttcgtctg

SEQ ID NO: 150591 - DNA, 17 bp, Arabidopsis thaliana
tgcaaatgcaaccgttt

SEQ ID NO: 150592 - DNA, 17 bp, Arabidopsis thaliana
tgcaaatgccttggagt

SEQ ID NO: 150593 - DNA, 17 bp, Arabidopsis thaliana
tgcaaattcagtgtggg

SEQ ID NO: 150594 - DNA, 17 bp, Arabidopsis thaliana
tgcaaattctacggttt

SEQ ID NO: 150595 - DNA, 17 bp, Arabidopsis thaliana
tgcaaatttcaataagt

SEQ ID NO: 150596 - DNA, 17 bp, Arabidopsis thaliana
tgcaacaaatagggcct

SEQ ID NO: 150597 - DNA, 17 bp, Arabidopsis thaliana
tgcaacaagataaagag

SEQ ID NO: 150598 - DNA, 17 bp, Arabidopsis thaliana
tgcaacaagcctttcag

SEQ ID NO: 150599 - DNA, 17 bp, Arabidopsis thaliana
tgcaacaatgccttttc

SEQ ID NO: 150600 - DNA, 17 bp, Arabidopsis thaliana
tgcaacaccaccggttg

SEQ ID NO: 150601 - DNA, 17 bp, Arabidopsis thaliana
tgcaacacgaggacttc

SEQ ID NO: 150602 - DNA, 17 bp, Arabidopsis thaliana
tgcaacagagtcgtttt

SEQ ID NO: 150603 - DNA, 17 bp, Arabidopsis thaliana
tgcaacagatttctatt

SEQ ID NO: 150604 - DNA, 17 bp, Arabidopsis thaliana
tgcaacaggtgcccggg

SEQ ID NO: 150605 - DNA, 17 bp, Arabidopsis thaliana
tgcaacagttttttgtc

SEQ ID NO: 150606 - DNA, 17 bp, Arabidopsis thaliana
tgcaacatctctggtga

SEQ ID NO: 150607 - DNA, 17 bp, Arabidopsis thaliana
tgcaaccagaccttaaa

SEQ ID NO: 150608 - DNA, 17 bp, Arabidopsis thaliana
tgcaaccagatcttaaa

SEQ ID NO: 150609 - DNA, 17 bp, Arabidopsis thaliana
tgcaaccagcgggtgcg

SEQ ID NO: 150610 - DNA, 17 bp, Arabidopsis thaliana
tgcaaccataagaaacc

SEQ ID NO: 150611 - DNA, 17 bp, Arabidopsis thaliana
tgcaaccatcgcctgcc

SEQ ID NO: 150612 - DNA, 17 bp, Arabidopsis thaliana
tgcaaccccattttgat

SEQ ID NO: 150613 - DNA, 17 bp, Arabidopsis thaliana
tgcaacccgagagtctg

SEQ ID NO: 150614 - DNA, 17 bp, Arabidopsis thaliana
tgcaacccgatcttaag

SEQ ID NO: 150615 - DNA, 17 bp, Arabidopsis thaliana
tgcaacccgatcttgta

SEQ ID NO: 150616 - DNA, 17 bp, Arabidopsis thaliana
tgcaaccctgcggtgcc

SEQ ID NO: 150617 - DNA, 17 bp, Arabidopsis thaliana
tgcaaccgcccgtttcc

SEQ ID NO: 150618 - DNA, 17 bp, Arabidopsis thaliana
tgcaaccggatcttaaa

SEQ ID NO: 150619 - DNA, 17 bp, Arabidopsis thaliana
tgcaacctcaatgtcca

SEQ ID NO: 150620 - DNA, 17 bp, Arabidopsis thaliana
tgcaacctggctacgcg

SEQ ID NO: 150621 - DNA, 17 bp, Arabidopsis thaliana
tgcaacctggtccgccg

SEQ ID NO: 150622 - DNA, 17 bp, Arabidopsis thaliana
tgcaacctgtagttcgc

SEQ ID NO: 150623 - DNA, 17 bp, Arabidopsis thaliana
tgcaacgactgaagatt

SEQ ID NO: 150624 - DNA, 17 bp, Arabidopsis thaliana
tgcaacgataaacgacc

SEQ ID NO: 150625 - DNA, 17 bp, Arabidopsis thaliana
tgcaacgcctacgctag

SEQ ID NO: 150626 - DNA, 17 bp, Arabidopsis thaliana
tgcaacgtgcgactgtg

SEQ ID NO: 150627 - DNA, 17 bp, Arabidopsis thaliana
tgcaacgtgcgattatg

SEQ ID NO: 150628 - DNA, 17 bp, Arabidopsis thaliana
tgcaacgtgtgactggt

SEQ ID NO: 150629 - DNA, 17 bp, Arabidopsis thaliana
tgcaacgttgttttatg

SEQ ID NO: 150630 - DNA, 17 bp, Arabidopsis thaliana
tgcaactaaacgtggtg

SEQ ID NO: 150631 - DNA, 17 bp, Arabidopsis thaliana
tgcaactatagctggct

SEQ ID NO: 150632 - DNA, 17 bp, Arabidopsis thaliana
tgcaactcattgctaga

SEQ ID NO: 150633 - DNA, 17 bp, Arabidopsis thaliana
tgcaactcattgtggac

SEQ ID NO: 150634 - DNA, 17 bp, Arabidopsis thaliana
tgcaactcttgcgggag

SEQ ID NO: 150635 - DNA, 17 bp, Arabidopsis thaliana
tgcaactgcttcgatag

SEQ ID NO: 150636 - DNA, 17 bp, Arabidopsis thaliana
tgcaactggaacctccc

SEQ ID NO: 150637 - DNA, 17 bp, Arabidopsis thaliana
tgcaactggatcttaaa

SEQ ID NO: 150638 - DNA, 17 bp, Arabidopsis thaliana
tgcaactggctcggact

SEQ ID NO: 150639 - DNA, 17 bp, Arabidopsis thaliana
tgcaactgtcgatggga

SEQ ID NO: 150640 - DNA, 17 bp, Arabidopsis thaliana
tgcaactgttgaagatc

SEQ ID NO: 150641 - DNA, 17 bp, Arabidopsis thaliana
tgcaacttcattatgca

SEQ ID NO: 150642 - DNA, 17 bp, Arabidopsis thaliana
tgcaacttctttgcgac

SEQ ID NO: 150643 - DNA, 17 bp, Arabidopsis thaliana
tgcaactttgtgaagat

SEQ ID NO: 150644 - DNA, 17 bp, Arabidopsis thaliana
tgcaactttttaagccg

SEQ ID NO: 150645 - DNA, 17 bp, Arabidopsis thaliana
tgcaagacgagttttgc

SEQ ID NO: 150646 - DNA, 17 bp, Arabidopsis thaliana
tgcaagactatcggtcc

SEQ ID NO: 150647 - DNA, 17 bp, Arabidopsis thaliana
tgcaagcactcgtttta

SEQ ID NO: 150648 - DNA, 17 bp, Arabidopsis thaliana
tgcaagcgcttatggcg

SEQ ID NO: 150649 - DNA, 17 bp, Arabidopsis thaliana
tgcaagctcaatgtcca

SEQ ID NO: 150650 - DNA, 17 bp, Arabidopsis thaliana
tgcaaggaagtgttacc

SEQ ID NO: 150651 - DNA, 17 bp, Arabidopsis thaliana
tgcaaggatggttggat

SEQ ID NO: 150652 - DNA, 17 bp, Arabidopsis thaliana
tgcaaggccaagccgcg

SEQ ID NO: 150653 - DNA, 17 bp, Arabidopsis thaliana
tgcaaggctaaatactc

SEQ ID NO: 150654 - DNA, 17 bp, Arabidopsis thaliana
tgcaaggcttgtaatgg

SEQ ID NO: 150655 - DNA, 17 bp, Arabidopsis thaliana
tgcaagggaagaattac

SEQ ID NO: 150656 - DNA, 17 bp, Arabidopsis thaliana
tgcaaggtctttgtcca

SEQ ID NO: 150657 - DNA, 17 bp, Arabidopsis thaliana
tgcaaggtgtgattcga

SEQ ID NO: 150658 - DNA, 17 bp, Arabidopsis thaliana
tgcaaggttcaaaaacg

SEQ ID NO: 150659 - DNA, 17 bp, Arabidopsis thaliana
tgcaaggttcaagaacg

SEQ ID NO: 150660 - DNA, 17 bp, Arabidopsis thaliana
tgcaagtagctctgacc

SEQ ID NO: 150661 - DNA, 17 bp, Arabidopsis thaliana
tgcaagtagttgcggct

SEQ ID NO: 150662 - DNA, 17 bp, Arabidopsis thaliana
tgcaagtccatctacat

SEQ ID NO: 150663 - DNA, 17 bp, Arabidopsis thaliana
tgcaagtccttctcctt

SEQ ID NO: 150664 - DNA, 17 bp, Arabidopsis thaliana
tgcaagtcggacgggaa

SEQ ID NO: 150665 - DNA, 17 bp, Arabidopsis thaliana
tgcaagtgactacatcg

SEQ ID NO: 150666 - DNA, 17 bp, Arabidopsis thaliana
tgcaagtgccgttcaca

SEQ ID NO: 150667 - DNA, 17 bp, Arabidopsis thaliana
tgcaagtgcgtaacaac

SEQ ID NO: 150668 - DNA, 17 bp, Arabidopsis thaliana
tgcaagttgatgaaggg

SEQ ID NO: 150669 - DNA, 17 bp, Arabidopsis thaliana
tgcaagttggccgagga

SEQ ID NO: 150670 - DNA, 17 bp, Arabidopsis thaliana
tgcaagttgtccttcgg

SEQ ID NO: 150671 - DNA, 17 bp, Arabidopsis thaliana
tgcaagttgtccttggc

SEQ ID NO: 150672 - DNA, 17 bp, Arabidopsis thaliana
tgcaagtttactcacca

SEQ ID NO: 150673 - DNA, 17 bp, Arabidopsis thaliana
tgcaagtttactcacta

SEQ ID NO: 150674 - DNA, 17 bp, Arabidopsis thaliana
tgcaataagtatctcaa

SEQ ID NO: 150675 - DNA, 17 bp, Arabidopsis thaliana
tgcaataatgcaccaac

SEQ ID NO: 150676 - DNA, 17 bp, Arabidopsis thaliana
tgcaataattacaggtt

SEQ ID NO: 150677 - DNA, 17 bp, Arabidopsis thaliana
tgcaatagtgcggataa

SEQ ID NO: 150678 - DNA, 17 bp, Arabidopsis thaliana
tgcaatagtgcggatga

SEQ ID NO: 150679 - DNA, 17 bp, Arabidopsis thaliana
tgcaatagtgcggatgt

SEQ ID NO: 150680 - DNA, 17 bp, Arabidopsis thaliana
tgcaatatagaccgggt

SEQ ID NO: 150681 - DNA, 17 bp, Arabidopsis thaliana
tgcaatatgtcctggat

SEQ ID NO: 150682 - DNA, 17 bp, Arabidopsis thaliana
tgcaatccacctctatt

SEQ ID NO: 150683 - DNA, 17 bp, Arabidopsis thaliana
tgcaatccaggtgttaa

SEQ ID NO: 150684 - DNA, 17 bp, Arabidopsis thaliana
tgcaatcccattctgct

SEQ ID NO: 150685 - DNA, 17 bp, Arabidopsis thaliana
tgcaatcctagtggctt

SEQ ID NO: 150686 - DNA, 17 bp, Arabidopsis thaliana
tgcaatcgttcccggat

SEQ ID NO: 150687 - DNA, 17 bp, Arabidopsis thaliana
tgcaatctgcatgttcc

SEQ ID NO: 150688 - DNA, 17 bp, Arabidopsis thaliana
tgcaatgattccagagc

SEQ ID NO: 150689 - DNA, 17 bp, Arabidopsis thaliana
tgcaatgcaacatgtcg

SEQ ID NO: 150690 - DNA, 17 bp, Arabidopsis thaliana
tgcaatgcagatggtct

SEQ ID NO: 150691 - DNA, 17 bp, Arabidopsis thaliana
tgcaatgccattcggga

SEQ ID NO: 150692 - DNA, 17 bp, Arabidopsis thaliana
tgcaatgcggttttgag

SEQ ID NO: 150693 - DNA, 17 bp, Arabidopsis thaliana
tgcaatggtggactctt

SEQ ID NO: 150694 - DNA, 17 bp, Arabidopsis thaliana
tgcaattaaaccgcccg

SEQ ID NO: 150695 - DNA, 17 bp, Arabidopsis thaliana
tgcaattaagtgctcag

SEQ ID NO: 150696 - DNA, 17 bp, Arabidopsis thaliana
tgcaattatttgaacat

SEQ ID NO: 150697 - DNA, 17 bp, Arabidopsis thaliana
tgcaattattttaccag

SEQ ID NO: 150698 - DNA, 17 bp, Arabidopsis thaliana
tgcaattcgtgcttgtg

SEQ ID NO: 150699 - DNA, 17 bp, Arabidopsis thaliana
tgcaattggtgctgagg

SEQ ID NO: 150700 - DNA, 17 bp, Arabidopsis thaliana
tgcaatttcataggctt

SEQ ID NO: 150701 - DNA, 17 bp, Arabidopsis thaliana
tgcaattttctcgcagt

SEQ ID NO: 150702 - DNA, 17 bp, Arabidopsis thaliana
tgcaattttgatcgtct

SEQ ID NO: 150703 - DNA, 17 bp, Arabidopsis thaliana
tgcacaaccgcaagaca

SEQ ID NO: 150704 - DNA, 17 bp, Arabidopsis thaliana
tgcacaagaatcggcat

SEQ ID NO: 150705 - DNA, 17 bp, Arabidopsis thaliana
tgcacaaggctttgaag

SEQ ID NO: 150706 - DNA, 17 bp, Arabidopsis thaliana
tgcacaaggctttgcgt

SEQ ID NO: 150707 - DNA, 17 bp, Arabidopsis thaliana
tgcacaagtgatatcgt

SEQ ID NO: 150708 - DNA, 17 bp, Arabidopsis thaliana
tgcacaagtttgatagc

SEQ ID NO: 150709 - DNA, 17 bp, Arabidopsis thaliana
tgcacaattatagccgt

SEQ ID NO: 150710 - DNA, 17 bp, Arabidopsis thaliana
tgcacacagtagccatt

SEQ ID NO: 150711 - DNA, 17 bp, Arabidopsis thaliana
tgcacaccaaaggcgga

SEQ ID NO: 150712 - DNA, 17 bp, Arabidopsis thaliana
tgcacacccacccaccc

SEQ ID NO: 150713 - DNA, 17 bp, Arabidopsis thaliana
tgcacacgactttctct

SEQ ID NO: 150714 - DNA, 17 bp, Arabidopsis thaliana
tgcacactgatgctgac

SEQ ID NO: 150715 - DNA, 17 bp, Arabidopsis thaliana
tgcacacttgtctccat

SEQ ID NO: 150716 - DNA, 17 bp, Arabidopsis thaliana
tgcacagactcatcacg

SEQ ID NO: 150717 - DNA, 17 bp, Arabidopsis thaliana
tgcacagatgatgtctc

SEQ ID NO: 150718 - DNA, 17 bp, Arabidopsis thaliana
tgcacagctcacggtcg

SEQ ID NO: 150719 - DNA, 17 bp, Arabidopsis thaliana
tgcacaggcttggctca

SEQ ID NO: 150720 - DNA, 17 bp, Arabidopsis thaliana
tgcacaggtgagaaatc

SEQ ID NO: 150721 - DNA, 17 bp, Arabidopsis thaliana
tgcacagtctgttgcca

SEQ ID NO: 150722 - DNA, 17 bp, Arabidopsis thaliana
tgcacagtggccttgct

SEQ ID NO: 150723 - DNA, 17 bp, Arabidopsis thaliana
tgcacatataatgtcac

SEQ ID NO: 150724 - DNA, 17 bp, Arabidopsis thaliana
tgcacatctcagagaga

SEQ ID NO: 150725 - DNA, 17 bp, Arabidopsis thaliana
tgcacatgggttagtcg

SEQ ID NO: 150726 - DNA, 17 bp, Arabidopsis thaliana
tgcacatgggttattcg

SEQ ID NO: 150727 - DNA, 17 bp, Arabidopsis thaliana
tgcacatgggttattgg

SEQ ID NO: 150728 - DNA, 17 bp, Arabidopsis thaliana
tgcacattccaatatga

SEQ ID NO: 150729 - DNA, 17 bp, Arabidopsis thaliana
tgcacattgcggtgatc

SEQ ID NO: 150730 - DNA, 17 bp, Arabidopsis thaliana
tgcacatttccgtttca

SEQ ID NO: 150731 - DNA, 17 bp, Arabidopsis thaliana
tgcaccaaaatctacga

SEQ ID NO: 150732 - DNA, 17 bp, Arabidopsis thaliana
tgcaccaaaatgtcatc

SEQ ID NO: 150733 - DNA, 17 bp, Arabidopsis thaliana
tgcaccaaccttctacc

SEQ ID NO: 150734 - DNA, 17 bp, Arabidopsis thaliana
tgcaccaatccgtactc

SEQ ID NO: 150735 - DNA, 17 bp, Arabidopsis thaliana
tgcaccagaaatctcct

SEQ ID NO: 150736 - DNA, 17 bp, Arabidopsis thaliana
tgcaccagtttgttgtc

SEQ ID NO: 150737 - DNA, 17 bp, Arabidopsis thaliana
tgcaccatcagagtgta

SEQ ID NO: 150738 - DNA, 17 bp, Arabidopsis thaliana
tgcaccatctatttatt

SEQ ID NO: 150739 - DNA, 17 bp, Arabidopsis thaliana
tgcaccatggtggtcaa

SEQ ID NO: 150740 - DNA, 17 bp, Arabidopsis thaliana
tgcacccctacacttga

SEQ ID NO: 150741 - DNA, 17 bp, Arabidopsis thaliana
tgcacccgctggtttac

SEQ ID NO: 150742 - DNA, 17 bp, Arabidopsis thaliana
tgcaccctcaggattga

SEQ ID NO: 150743 - DNA, 17 bp, Arabidopsis thaliana
tgcaccgacacggccga

SEQ ID NO: 150744 - DNA, 17 bp, Arabidopsis thaliana
tgcaccgacgcggatta

SEQ ID NO: 150745 - DNA, 17 bp, Arabidopsis thaliana
tgcaccgagcccaccga

SEQ ID NO: 150746 - DNA, 17 bp, Arabidopsis thaliana
tgcaccgagcccaccgc

SEQ ID NO: 150747 - DNA, 17 bp, Arabidopsis thaliana
tgcaccgagcccaccgt

SEQ ID NO: 150748 - DNA, 17 bp, Arabidopsis thaliana
tgcaccgatttattctc

SEQ ID NO: 150749 - DNA, 17 bp, Arabidopsis thaliana
tgcaccgatttattgtc

SEQ ID NO: 150750 - DNA, 17 bp, Arabidopsis thaliana
tgcaccgcactttatcc

SEQ ID NO: 150751 - DNA, 17 bp, Arabidopsis thaliana
tgcaccgcacttttccc

SEQ ID NO: 150752 - DNA, 17 bp, Arabidopsis thaliana
tgcaccgccggctgtac

SEQ ID NO: 150753 - DNA, 17 bp, Arabidopsis thaliana
tgcaccgctcgatccgc

SEQ ID NO: 150754 - DNA, 17 bp, Arabidopsis thaliana
tgcaccggatcccatca

SEQ ID NO: 150755 - DNA, 17 bp, Arabidopsis thaliana
tgcacctcctccgacag

SEQ ID NO: 150756 - DNA, 17 bp, Arabidopsis thaliana
tgcacctcgctgcctgt

SEQ ID NO: 150757 - DNA, 17 bp, Arabidopsis thaliana
tgcacctctgcccgtgt

SEQ ID NO: 150758 - DNA, 17 bp, Arabidopsis thaliana
tgcacctgctggtttac

SEQ ID NO: 150759 - DNA, 17 bp, Arabidopsis thaliana
tgcacctggacagaaag

SEQ ID NO: 150760 - DNA, 17 bp, Arabidopsis thaliana
tgcaccttcaccaggtg

SEQ ID NO: 150761 - DNA, 17 bp, Arabidopsis thaliana
tgcaccttcgtgagcgt

SEQ ID NO: 150762 - DNA, 17 bp, Arabidopsis thaliana
tgcaccttggatcttat

SEQ ID NO: 150763 - DNA, 17 bp, Arabidopsis thaliana
tgcaccttgtaagctgg

SEQ ID NO: 150764 - DNA, 17 bp, Arabidopsis thaliana
tgcaccttttgcacgaa

SEQ ID NO: 150765 - DNA, 17 bp, Arabidopsis thaliana
tgcacgaatgatcagca

SEQ ID NO: 150766 - DNA, 17 bp, Arabidopsis thaliana
tgcacgaccaccctgtc

SEQ ID NO: 150767 - DNA, 17 bp, Arabidopsis thaliana
tgcacgaccaccttgtc

SEQ ID NO: 150768 - DNA, 17 bp, Arabidopsis thaliana
tgcacgatgaatcatcc

SEQ ID NO: 150769 - DNA, 17 bp, Arabidopsis thaliana
tgcacgatgggttttgc

SEQ ID NO: 150770 - DNA, 17 bp, Arabidopsis thaliana
tgcacgattagcaggaa

SEQ ID NO: 150771 - DNA, 17 bp, Arabidopsis thaliana
tgcacgccaagaagatt

SEQ ID NO: 150772 - DNA, 17 bp, Arabidopsis thaliana
tgcacgcggattacggt

SEQ ID NO: 150773 - DNA, 17 bp, Arabidopsis thaliana
tgcacggaccttgcaag

SEQ ID NO: 150774 - DNA, 17 bp, Arabidopsis thaliana
tgcacggactttacaag

SEQ ID NO: 150775 - DNA, 17 bp, Arabidopsis thaliana
tgcacggccagaagatg

SEQ ID NO: 150776 - DNA, 17 bp, Arabidopsis thaliana
tgcacggctctgatttt

SEQ ID NO: 150777 - DNA, 17 bp, Arabidopsis thaliana
tgcacgggcctggctca

SEQ ID NO: 150778 - DNA, 17 bp, Arabidopsis thaliana
tgcacggggttcgtttc

SEQ ID NO: 150779 - DNA, 17 bp, Arabidopsis thaliana
tgcacggtcttggctca

SEQ ID NO: 150780 - DNA, 17 bp, Arabidopsis thaliana
tgcacgtctgactgggt

SEQ ID NO: 150781 - DNA, 17 bp, Arabidopsis thaliana
tgcacgtctgcctggat

SEQ ID NO: 150782 - DNA, 17 bp, Arabidopsis thaliana
tgcacgtctgcctgggt

SEQ ID NO: 150783 - DNA, 17 bp, Arabidopsis thaliana
tgcacgtctgcttgtgt

SEQ ID NO: 150784 - DNA, 17 bp, Arabidopsis thaliana
tgcacgtcttcattcgg

SEQ ID NO: 150785 - DNA, 17 bp, Arabidopsis thaliana
tgcactaacttttctag

SEQ ID NO: 150786 - DNA, 17 bp, Arabidopsis thaliana
tgcactaggtgatcacc

SEQ ID NO: 150787 - DNA, 17 bp, Arabidopsis thaliana
tgcactagttgtacaaa

SEQ ID NO: 150788 - DNA, 17 bp, Arabidopsis thaliana
tgcactagtttgctcgt

SEQ ID NO: 150789 - DNA, 17 bp, Arabidopsis thaliana
tgcactagtttgtggat

SEQ ID NO: 150790 - DNA, 17 bp, Arabidopsis thaliana
tgcactatcctcagtga

SEQ ID NO: 150791 - DNA, 17 bp, Arabidopsis thaliana
tgcactattcgaaacca

SEQ ID NO: 150792 - DNA, 17 bp, Arabidopsis thaliana
tgcactcaagcaggggc

SEQ ID NO: 150793 - DNA, 17 bp, Arabidopsis thaliana
tgcactcaagccggggc

SEQ ID NO: 150794 - DNA, 17 bp, Arabidopsis thaliana
tgcactcagagatggtt

SEQ ID NO: 150795 - DNA, 17 bp, Arabidopsis thaliana
tgcactcgaccgacgcc

SEQ ID NO: 150796 - DNA, 17 bp, Arabidopsis thaliana
tgcactcgagagtttga

SEQ ID NO: 150797 - DNA, 17 bp, Arabidopsis thaliana
tgcactcgcggctctgg

SEQ ID NO: 150798 - DNA, 17 bp, Arabidopsis thaliana
tgcactcggctaagtaa

SEQ ID NO: 150799 - DNA, 17 bp, Arabidopsis thaliana
tgcactcgttccgcata

SEQ ID NO: 150800 - DNA, 17 bp, Arabidopsis thaliana
tgcactctacgcagcga

SEQ ID NO: 150801 - DNA, 17 bp, Arabidopsis thaliana
tgcactctctgtcgctg

SEQ ID NO: 150802 - DNA, 17 bp, Arabidopsis thaliana
tgcactctctgtcgctt

SEQ ID NO: 150803 - DNA, 17 bp, Arabidopsis thaliana
tgcactctgaacggttg

SEQ ID NO: 150804 - DNA, 17 bp, Arabidopsis thaliana
tgcactcttcatcttaa

SEQ ID NO: 150805 - DNA, 17 bp, Arabidopsis thaliana
tgcactgaaccttatgg

SEQ ID NO: 150806 - DNA, 17 bp, Arabidopsis thaliana
tgcactgaaggagtgtg

SEQ ID NO: 150807 - DNA, 17 bp, Arabidopsis thaliana
tgcactgcccccctggc

SEQ ID NO: 150808 - DNA, 17 bp, Arabidopsis thaliana
tgcactgccctttccct

SEQ ID NO: 150809 - DNA, 17 bp, Arabidopsis thaliana
tgcactgcctccctggc

SEQ ID NO: 150810 - DNA, 17 bp, Arabidopsis thaliana
tgcactgcctctccctg

SEQ ID NO: 150811 - DNA, 17 bp, Arabidopsis thaliana
tgcactgcctcttcccc

SEQ ID NO: 150812 - DNA, 17 bp, Arabidopsis thaliana
tgcactgcctcttccct

SEQ ID NO: 150813 - DNA, 17 bp, Arabidopsis thaliana
tgcactgcctcttcctt

SEQ ID NO: 150814 - DNA, 17 bp, Arabidopsis thaliana
tgcactgcctcttctct

SEQ ID NO: 150815 - DNA, 17 bp, Arabidopsis thaliana
tgcactgcctcttcttg

SEQ ID NO: 150816 - DNA, 17 bp, Arabidopsis thaliana
tgcactgcctcttcttt

SEQ ID NO: 150817 - DNA, 17 bp, Arabidopsis thaliana
tgcactgcctctttcct

SEQ ID NO: 150818 - DNA, 17 bp, Arabidopsis thaliana
tgcactgcctcttttct

SEQ ID NO: 150819 - DNA, 17 bp, Arabidopsis thaliana
tgcactgcctttccctg

SEQ ID NO: 150820 - DNA, 17 bp, Arabidopsis thaliana
tgcactgccttttccct

SEQ ID NO: 150821 - DNA, 17 bp, Arabidopsis thaliana
tgcactgcggttcggtc

SEQ ID NO: 150822 - DNA, 17 bp, Arabidopsis thaliana
tgcactgctcacataat

SEQ ID NO: 150823 - DNA, 17 bp, Arabidopsis thaliana
tgcactgctccttccct

SEQ ID NO: 150824 - DNA, 17 bp, Arabidopsis thaliana
tgcactgcttccctggc

SEQ ID NO: 150825 - DNA, 17 bp, Arabidopsis thaliana
tgcactggctgacttgg

SEQ ID NO: 150826 - DNA, 17 bp, Arabidopsis thaliana
tgcactggtcggcttgt

SEQ ID NO: 150827 - DNA, 17 bp, Arabidopsis thaliana
tgcactgtagacggttt

SEQ ID NO: 150828 - DNA, 17 bp, Arabidopsis thaliana
tgcactgttccatgtct

SEQ ID NO: 150829 - DNA, 17 bp, Arabidopsis thaliana
tgcactgttgcggtgcg

SEQ ID NO: 150830 - DNA, 17 bp, Arabidopsis thaliana
tgcacttacgtccgggt

SEQ ID NO: 150831 - DNA, 17 bp, Arabidopsis thaliana
tgcacttattagctgga

SEQ ID NO: 150832 - DNA, 17 bp, Arabidopsis thaliana
tgcacttctacctgggt

SEQ ID NO: 150833 - DNA, 17 bp, Arabidopsis thaliana
tgcacttgatgacatag

SEQ ID NO: 150834 - DNA, 17 bp, Arabidopsis thaliana
tgcacttgatgtatcaa

SEQ ID NO: 150835 - DNA, 17 bp, Arabidopsis thaliana
tgcacttgatgtatcca

SEQ ID NO: 150836 - DNA, 17 bp, Arabidopsis thaliana
tgcacttgcttccaacg

SEQ ID NO: 150837 - DNA, 17 bp, Arabidopsis thaliana
tgcacttggaacgttta

SEQ ID NO: 150838 - DNA, 17 bp, Arabidopsis thaliana
tgcacttggagacgatg

SEQ ID NO: 150839 - DNA, 17 bp, Arabidopsis thaliana
tgcacttgtaccgctag

SEQ ID NO: 150840 - DNA, 17 bp, Arabidopsis thaliana
tgcacttgtaccgctcg

SEQ ID NO: 150841 - DNA, 17 bp, Arabidopsis thaliana
tgcactttatgcacagt

SEQ ID NO: 150842 - DNA, 17 bp, Arabidopsis thaliana
tgcactttcatcgacag

SEQ ID NO: 150843 - DNA, 17 bp, Arabidopsis thaliana
tgcactttccaaatttt

SEQ ID NO: 150844 - DNA, 17 bp, Arabidopsis thaliana
tgcactttgatgacata

SEQ ID NO: 150845 - DNA, 17 bp, Arabidopsis thaliana
tgcactttggtgatgta

SEQ ID NO: 150846 - DNA, 17 bp, Arabidopsis thaliana
tgcactttgtccgtatt

SEQ ID NO: 150847 - DNA, 17 bp, Arabidopsis thaliana
tgcactttgtctacctt

SEQ ID NO: 150848 - DNA, 17 bp, Arabidopsis thaliana
tgcacttttgaacggtt

SEQ ID NO: 150849 - DNA, 17 bp, Arabidopsis thaliana
tgcacttttggcgttat

SEQ ID NO: 150850 - DNA, 17 bp, Arabidopsis thaliana
tgcagaaaaattagacc

SEQ ID NO: 150851 - DNA, 17 bp, Arabidopsis thaliana
tgcagaacaataggtca

SEQ ID NO: 150852 - DNA, 17 bp, Arabidopsis thaliana
tgcagaagaagaagtgc

SEQ ID NO: 150853 - DNA, 17 bp, Arabidopsis thaliana
tgcagaagcaaaagcgg

SEQ ID NO: 150854 - DNA, 17 bp, Arabidopsis thaliana
tgcagaagggtgaaagc

SEQ ID NO: 150855 - DNA, 17 bp, Arabidopsis thaliana
tgcagaagtggccatag

SEQ ID NO: 150856 - DNA, 17 bp, Arabidopsis thaliana
tgcagacacccctttgt

SEQ ID NO: 150857 - DNA, 17 bp, Arabidopsis thaliana
tgcagacacctgagcag

SEQ ID NO: 150858 - DNA, 17 bp, Arabidopsis thaliana
tgcagacctctgttgtt

SEQ ID NO: 150859 - DNA, 17 bp, Arabidopsis thaliana
tgcagacggtatgatta

SEQ ID NO: 150860 - DNA, 17 bp, Arabidopsis thaliana
tgcagacgtagatgtga

SEQ ID NO: 150861 - DNA, 17 bp, Arabidopsis thaliana
tgcagactagaccaata

SEQ ID NO: 150862 - DNA, 17 bp, Arabidopsis thaliana
tgcagactgaagtccat

SEQ ID NO: 150863 - DNA, 17 bp, Arabidopsis thaliana
tgcagacttttaagtgc

SEQ ID NO: 150864 - DNA, 17 bp, Arabidopsis thaliana
tgcagagacagccagga

SEQ ID NO: 150865 - DNA, 17 bp, Arabidopsis thaliana
tgcagagacctccacct

SEQ ID NO: 150866 - DNA, 17 bp, Arabidopsis thaliana
tgcagagagccctggtc

SEQ ID NO: 150867 - DNA, 17 bp, Arabidopsis thaliana
tgcagagggagtttcag

SEQ ID NO: 150868 - DNA, 17 bp, Arabidopsis thaliana
tgcagaggtcttcatcc

SEQ ID NO: 150869 - DNA, 17 bp, Arabidopsis thaliana
tgcagaggtggtattga

SEQ ID NO: 150870 - DNA, 17 bp, Arabidopsis thaliana
tgcagagtaggtgcgtg

SEQ ID NO: 150871 - DNA, 17 bp, Arabidopsis thaliana
tgcagataaagtgcggt

SEQ ID NO: 150872 - DNA, 17 bp, Arabidopsis thaliana
tgcagatcggctcctgg

SEQ ID NO: 150873 - DNA, 17 bp, Arabidopsis thaliana
tgcagatctgctagcca

SEQ ID NO: 150874 - DNA, 17 bp, Arabidopsis thaliana
tgcagatctgtcccaga

SEQ ID NO: 150875 - DNA, 17 bp, Arabidopsis thaliana
tgcagatcttggtggta

SEQ ID NO: 150876 - DNA, 17 bp, Arabidopsis thaliana
tgcagatcttggttagt

SEQ ID NO: 150877 - DNA, 17 bp, Arabidopsis thaliana
tgcagatggtcttatgg

SEQ ID NO: 150878 - DNA, 17 bp, Arabidopsis thaliana
tgcagatttcgaaggtt

SEQ ID NO: 150879 - DNA, 17 bp, Arabidopsis thaliana
tgcagcaaacctaagcg

SEQ ID NO: 150880 - DNA, 17 bp, Arabidopsis thaliana
tgcagcacccgaattgc

SEQ ID NO: 150881 - DNA, 17 bp, Arabidopsis thaliana
tgcagcagcaccacagg

SEQ ID NO: 150882 - DNA, 17 bp, Arabidopsis thaliana
tgcagcagttagtccga

SEQ ID NO: 150883 - DNA, 17 bp, Arabidopsis thaliana
tgcagcagttggcacat

SEQ ID NO: 150884 - DNA, 17 bp, Arabidopsis thaliana
tgcagccaaaaccagaa

SEQ ID NO: 150885 - DNA, 17 bp, Arabidopsis thaliana
tgcagccaagcctccac

SEQ ID NO: 150886 - DNA, 17 bp, Arabidopsis thaliana
tgcagccaaggatgaat

SEQ ID NO: 150887 - DNA, 17 bp, Arabidopsis thaliana
tgcagccaaggatgact

SEQ ID NO: 150888 - DNA, 17 bp, Arabidopsis thaliana
tgcagccaaggctgact

SEQ ID NO: 150889 - DNA, 17 bp, Arabidopsis thaliana
tgcagccaatgatgact

SEQ ID NO: 150890 - DNA, 17 bp, Arabidopsis thaliana
tgcagccacatcttcca

SEQ ID NO: 150891 - DNA, 17 bp, Arabidopsis thaliana
tgcagccatatttcaag

SEQ ID NO: 150892 - DNA, 17 bp, Arabidopsis thaliana
tgcagccattggcacat

SEQ ID NO: 150893 - DNA, 17 bp, Arabidopsis thaliana
tgcagccattttgtgaa

SEQ ID NO: 150894 - DNA, 17 bp, Arabidopsis thaliana
tgcagcccgaggagtcc

SEQ ID NO: 150895 - DNA, 17 bp, Arabidopsis thaliana
tgcagccgcttgttaac

SEQ ID NO: 150896 - DNA, 17 bp, Arabidopsis thaliana
tgcagccggcccattct

SEQ ID NO: 150897 - DNA, 17 bp, Arabidopsis thaliana
tgcagccgtgacatgac

SEQ ID NO: 150898 - DNA, 17 bp, Arabidopsis thaliana
tgcagccgttgatttaa

SEQ ID NO: 150899 - DNA, 17 bp, Arabidopsis thaliana
tgcagcctgtagatgga

SEQ ID NO: 150900 - DNA, 17 bp, Arabidopsis thaliana
tgcagcgaacgatcagc

SEQ ID NO: 150901 - DNA, 17 bp, Arabidopsis thaliana
tgcagcgaccgccgcgc

SEQ ID NO: 150902 - DNA, 17 bp, Arabidopsis thaliana
tgcagcgatttattgtc

SEQ ID NO: 150903 - DNA, 17 bp, Arabidopsis thaliana
tgcagcggatgacagtg

SEQ ID NO: 150904 - DNA, 17 bp, Arabidopsis thaliana
tgcagcggcaattagca

SEQ ID NO: 150905 - DNA, 17 bp, Arabidopsis thaliana
tgcagcggcagcacctg

SEQ ID NO: 150906 - DNA, 17 bp, Arabidopsis thaliana
tgcagcggtcgcaatgt

SEQ ID NO: 150907 - DNA, 17 bp, Arabidopsis thaliana
tgcagcggtttattgtc

SEQ ID NO: 150908 - DNA, 17 bp, Arabidopsis thaliana
tgcagcggtttgttctc

SEQ ID NO: 150909 - DNA, 17 bp, Arabidopsis thaliana
tgcagcgttccaggagc

SEQ ID NO: 150910 - DNA, 17 bp, Arabidopsis thaliana
tgcagctactagcaatg

SEQ ID NO: 150911 - DNA, 17 bp, Arabidopsis thaliana
tgcagctgaggcagtct

SEQ ID NO: 150912 - DNA, 17 bp, Arabidopsis thaliana
tgcagctgccagcatga

SEQ ID NO: 150913 - DNA, 17 bp, Arabidopsis thaliana
tgcagctgcctgcatga

SEQ ID NO: 150914 - DNA, 17 bp, Arabidopsis thaliana
tgcagctggtcatcctt

SEQ ID NO: 150915 - DNA, 17 bp, Arabidopsis thaliana
tgcagcttcttgagatc

SEQ ID NO: 150916 - DNA, 17 bp, Arabidopsis thaliana
tgcagcttgatattgga

SEQ ID NO: 150917 - DNA, 17 bp, Arabidopsis thaliana
tgcagcttggcccaatt

SEQ ID NO: 150918 - DNA, 17 bp, Arabidopsis thaliana
tgcagcttttctggtat

SEQ ID NO: 150919 - DNA, 17 bp, Arabidopsis thaliana
tgcaggaaagccagcgt

SEQ ID NO: 150920 - DNA, 17 bp, Arabidopsis thaliana
tgcaggaacgtcggttt

SEQ ID NO: 150921 - DNA, 17 bp, Arabidopsis thaliana
tgcaggaagcatttgca

SEQ ID NO: 150922 - DNA, 17 bp, Arabidopsis thaliana
tgcaggacaccgttatg

SEQ ID NO: 150923 - DNA, 17 bp, Arabidopsis thaliana
tgcaggacgaattttgc

SEQ ID NO: 150924 - DNA, 17 bp, Arabidopsis thaliana
tgcaggacgggtttggc

SEQ ID NO: 150925 - DNA, 17 bp, Arabidopsis thaliana
tgcaggagcggttcaca

SEQ ID NO: 150926 - DNA, 17 bp, Arabidopsis thaliana
tgcaggagctgttcagc

SEQ ID NO: 150927 - DNA, 17 bp, Arabidopsis thaliana
tgcaggagttagtgatc

SEQ ID NO: 150928 - DNA, 17 bp, Arabidopsis thaliana
tgcaggatgggttttgc

SEQ ID NO: 150929 - DNA, 17 bp, Arabidopsis thaliana
tgcaggcacgaatggaa

SEQ ID NO: 150930 - DNA, 17 bp, Arabidopsis thaliana
tgcaggccaaaagtatt

SEQ ID NO: 150931 - DNA, 17 bp, Arabidopsis thaliana
tgcaggccacacccgtt

SEQ ID NO: 150932 - DNA, 17 bp, Arabidopsis thaliana
tgcaggcgaaaagacaa

SEQ ID NO: 150933 - DNA, 17 bp, Arabidopsis thaliana
tgcaggcggtctaacta

SEQ ID NO: 150934 - DNA, 17 bp, Arabidopsis thaliana
tgcaggctcaatgacgg

SEQ ID NO: 150935 - DNA, 17 bp, Arabidopsis thaliana
tgcaggctcttcgtgat

SEQ ID NO: 150936 - DNA, 17 bp, Arabidopsis thaliana
tgcaggctggcccgcgg

SEQ ID NO: 150937 - DNA, 17 bp, Arabidopsis thaliana
tgcagggaccttgcaag

SEQ ID NO: 150938 - DNA, 17 bp, Arabidopsis thaliana
tgcagggattaccacca

SEQ ID NO: 150939 - DNA, 17 bp, Arabidopsis thaliana
tgcaggttgaactcgag

SEQ ID NO: 150940 - DNA, 17 bp, Arabidopsis thaliana
tgcaggttgtcgtgtcg

SEQ ID NO: 150941 - DNA, 17 bp, Arabidopsis thaliana
tgcaggttgtttcctaa

SEQ ID NO: 150942 - DNA, 17 bp, Arabidopsis thaliana
tgcaggtttgtttgtca

SEQ ID NO: 150943 - DNA, 17 bp, Arabidopsis thaliana
tgcagtacatgtcctat

SEQ ID NO: 150944 - DNA, 17 bp, Arabidopsis thaliana
tgcagtacttaccgcgt

SEQ ID NO: 150945 - DNA, 17 bp, Arabidopsis thaliana
tgcagtagctaggaatg

SEQ ID NO: 150946 - DNA, 17 bp, Arabidopsis thaliana
tgcagtagtgggtccct

SEQ ID NO: 150947 - DNA, 17 bp, Arabidopsis thaliana
tgcagtataccgcaggt

SEQ ID NO: 150948 - DNA, 17 bp, Arabidopsis thaliana
tgcagtataccgtaggc

SEQ ID NO: 150949 - DNA, 17 bp, Arabidopsis thaliana
tgcagtatagcgcaggt

SEQ ID NO: 150950 - DNA, 17 bp, Arabidopsis thaliana
tgcagtattcaggttcg

SEQ ID NO: 150951 - DNA, 17 bp, Arabidopsis thaliana
tgcagtcacgatcaacc

SEQ ID NO: 150952 - DNA, 17 bp, Arabidopsis thaliana
tgcagtcgagtggtggt

SEQ ID NO: 150953 - DNA, 17 bp, Arabidopsis thaliana
tgcagtctttggcgatg

SEQ ID NO: 150954 - DNA, 17 bp, Arabidopsis thaliana
tgcagtgacctggtcta

SEQ ID NO: 150955 - DNA, 17 bp, Arabidopsis thaliana
tgcagtgataagactct

SEQ ID NO: 150956 - DNA, 17 bp, Arabidopsis thaliana
tgcagtgatcgttgatc

SEQ ID NO: 150957 - DNA, 17 bp, Arabidopsis thaliana
tgcagtgcaggaaaaag

SEQ ID NO: 150958 - DNA, 17 bp, Arabidopsis thaliana
tgcagtgcaggaaaaat

SEQ ID NO: 150959 - DNA, 17 bp, Arabidopsis thaliana
tgcagtggaattttggg

SEQ ID NO: 150960 - DNA, 17 bp, Arabidopsis thaliana
tgcagtggattgggttc

SEQ ID NO: 150961 - DNA, 17 bp, Arabidopsis thaliana
tgcagtggctttgatga

SEQ ID NO: 150962 - DNA, 17 bp, Arabidopsis thaliana
tgcagtgtcgtgtcgtg

SEQ ID NO: 150963 - DNA, 17 bp, Arabidopsis thaliana
tgcagtgttcttttcaa

SEQ ID NO: 150964 - DNA, 17 bp, Arabidopsis thaliana
tgcagttagcgattccg

SEQ ID NO: 150965 - DNA, 17 bp, Arabidopsis thaliana
tgcagttagtccgcaac

SEQ ID NO: 150966 - DNA, 17 bp, Arabidopsis thaliana
tgcagttatggccgagt

SEQ ID NO: 150967 - DNA, 17 bp, Arabidopsis thaliana
tgcagttattgattcag

SEQ ID NO: 150968 - DNA, 17 bp, Arabidopsis thaliana
tgcagttcgctctgtac

SEQ ID NO: 150969 - DNA, 17 bp, Arabidopsis thaliana
tgcagttgaccttggct

SEQ ID NO: 150970 - DNA, 17 bp, Arabidopsis thaliana
tgcagttgacgcaaatg

SEQ ID NO: 150971 - DNA, 17 bp, Arabidopsis thaliana
tgcagttgcggttgcgg

SEQ ID NO: 150972 - DNA, 17 bp, Arabidopsis thaliana
tgcagttggccaggttg

SEQ ID NO: 150973 - DNA, 17 bp, Arabidopsis thaliana
tgcagttgtggtttaag

SEQ ID NO: 150974 - DNA, 17 bp, Arabidopsis thaliana
tgcagttgttgatgagc

SEQ ID NO: 150975 - DNA, 17 bp, Arabidopsis thaliana
tgcagtttcagcttaat

SEQ ID NO: 150976 - DNA, 17 bp, Arabidopsis thaliana
tgcagtttggtcggcac

SEQ ID NO: 150977 - DNA, 17 bp, Arabidopsis thaliana
tgcagtttgttaacctt

SEQ ID NO: 150978 - DNA, 17 bp, Arabidopsis thaliana
tgcagttttcggttgga

SEQ ID NO: 150979 - DNA, 17 bp, Arabidopsis thaliana
tgcagttttgagtgcgg

SEQ ID NO: 150980 - DNA, 17 bp, Arabidopsis thaliana
tgcagttttgcggccac

SEQ ID NO: 150981 - DNA, 17 bp, Arabidopsis thaliana
tgcagttttgctctgtg

SEQ ID NO: 150982 - DNA, 17 bp, Arabidopsis thaliana
tgcagttttggatgtgg

SEQ ID NO: 150983 - DNA, 17 bp, Arabidopsis thaliana
tgcagttttgggctttg

SEQ ID NO: 150984 - DNA, 17 bp, Arabidopsis thaliana
tgcagttttgggtgcgg

SEQ ID NO: 150985 - DNA, 17 bp, Arabidopsis thaliana
tgcagttttttactgga

SEQ ID NO: 150986 - DNA, 17 bp, Arabidopsis thaliana
tgcataaagtgcagtgc

SEQ ID NO: 150987 - DNA, 17 bp, Arabidopsis thaliana
tgcataacagctacgag

SEQ ID NO: 150988 - DNA, 17 bp, Arabidopsis thaliana
tgcataagcttccgcgt

SEQ ID NO: 150989 - DNA, 17 bp, Arabidopsis thaliana
tgcataaggcgtctact

SEQ ID NO: 150990 - DNA, 17 bp, Arabidopsis thaliana
tgcataatttgattact

SEQ ID NO: 150991 - DNA, 17 bp, Arabidopsis thaliana
tgcatacactggagccg

SEQ ID NO: 150992 - DNA, 17 bp, Arabidopsis thaliana
tgcatacctactctggg

SEQ ID NO: 150993 - DNA, 17 bp, Arabidopsis thaliana
tgcatacggacctggtg

SEQ ID NO: 150994 - DNA, 17 bp, Arabidopsis thaliana
tgcatagaacatttatg

SEQ ID NO: 150995 - DNA, 17 bp, Arabidopsis thaliana
tgcatagatgtgcttca

SEQ ID NO: 150996 - DNA, 17 bp, Arabidopsis thaliana
tgcataggacatttatg

SEQ ID NO: 150997 - DNA, 17 bp, Arabidopsis thaliana
tgcataggctctcaagg

SEQ ID NO: 150998 - DNA, 17 bp, Arabidopsis thaliana
tgcataggtggtcttga

SEQ ID NO: 150999 - DNA, 17 bp, Arabidopsis thaliana
tgcatagtcggatgttg

SEQ ID NO: 151000 - DNA, 17 bp, Arabidopsis thaliana
tgcatagttctgcccgg

SEQ ID NO: 151001 - DNA, 17 bp, Arabidopsis thaliana
tgcatatccgtacagct

SEQ ID NO: 151002 - DNA, 17 bp, Arabidopsis thaliana
tgcatatcgccagagaa

SEQ ID NO: 151003 - DNA, 17 bp, Arabidopsis thaliana
tgcatatctatgggctg

SEQ ID NO: 151004 - DNA, 17 bp, Arabidopsis thaliana
tgcatatgaggtggcca

SEQ ID NO: 151005 - DNA, 17 bp, Arabidopsis thaliana
tgcatatgggcggacta

SEQ ID NO: 151006 - DNA, 17 bp, Arabidopsis thaliana
tgcatatgttgactagg

SEQ ID NO: 151007 - DNA, 17 bp, Arabidopsis thaliana
tgcatatgttgactggg

SEQ ID NO: 151008 - DNA, 17 bp, Arabidopsis thaliana
tgcatattttgggttac

SEQ ID NO: 151009 - DNA, 17 bp, Arabidopsis thaliana
tgcatcctgtagatgga

SEQ ID NO: 151010 - DNA, 17 bp, Arabidopsis thaliana
tgcatctgtttattgtc

SEQ ID NO: 151011 - DNA, 17 bp, Arabidopsis thaliana
tgcatgatctgctccgc

SEQ ID NO: 151012 - DNA, 17 bp, Arabidopsis thaliana
tgcatgcaaccatggct

SEQ ID NO: 151013 - DNA, 17 bp, Arabidopsis thaliana
tgcatgcaggagcggtt

SEQ ID NO: 151014 - DNA, 17 bp, Arabidopsis thaliana
tgcatgcgaatgagacc

SEQ ID NO: 151015 - DNA, 17 bp, Arabidopsis thaliana
tgcatggagtcgatatt

SEQ ID NO: 151016 - DNA, 17 bp, Arabidopsis thaliana
tgcatggccgattctga

SEQ ID NO: 151017 - DNA, 17 bp, Arabidopsis thaliana
tgcatggccgttcttag

SEQ ID NO: 151018 - DNA, 17 bp, Arabidopsis thaliana
tgcatggccttgtaatt

SEQ ID NO: 151019 - DNA, 17 bp, Arabidopsis thaliana
tgcatggttccgacaat

SEQ ID NO: 151020 - DNA, 17 bp, Arabidopsis thaliana
tgcatgtagttagtcca

SEQ ID NO: 151021 - DNA, 17 bp, Arabidopsis thaliana
tgcatgtatgttcctca

SEQ ID NO: 151022 - DNA, 17 bp, Arabidopsis thaliana
tgcatgtctgcggctat

SEQ ID NO: 151023 - DNA, 17 bp, Arabidopsis thaliana
tgcatgtggctgtcaac

SEQ ID NO: 151024 - DNA, 17 bp, Arabidopsis thaliana
tgcatgtgtgcgatgtg

SEQ ID NO: 151025 - DNA, 17 bp, Arabidopsis thaliana
tgcatgtgtggcgatat

SEQ ID NO: 151026 - DNA, 17 bp, Arabidopsis thaliana
tgcattaagggacatga

SEQ ID NO: 151027 - DNA, 17 bp, Arabidopsis thaliana
tgcattaccatatacag

SEQ ID NO: 151028 - DNA, 17 bp, Arabidopsis thaliana
tgcattaggcctaaaat

SEQ ID NO: 151029 - DNA, 17 bp, Arabidopsis thaliana
tgcattagtgctggtat

SEQ ID NO: 151030 - DNA, 17 bp, Arabidopsis thaliana
tgcattatgggcttaca

SEQ ID NO: 151031 - DNA, 17 bp, Arabidopsis thaliana
tgcattattcggcccaa

SEQ ID NO: 151032 - DNA, 17 bp, Arabidopsis thaliana
tgcattccgagcattgg

SEQ ID NO: 151033 - DNA, 17 bp, Arabidopsis thaliana
tgcattcgggtcatatg

SEQ ID NO: 151034 - DNA, 17 bp, Arabidopsis thaliana
tgcattctacaccgcca

SEQ ID NO: 151035 - DNA, 17 bp, Arabidopsis thaliana
tgcattctcagcttttc

SEQ ID NO: 151036 - DNA, 17 bp, Arabidopsis thaliana
tgcattctcgaggagtg

SEQ ID NO: 151037 - DNA, 17 bp, Arabidopsis thaliana
tgcattctctgcttttc

SEQ ID NO: 151038 - DNA, 17 bp, Arabidopsis thaliana
tgcattctgctcctgaa

SEQ ID NO: 151039 - DNA, 17 bp, Arabidopsis thaliana
tgcattgaaagtgacta

SEQ ID NO: 151040 - DNA, 17 bp, Arabidopsis thaliana
tgcattgatcggcttgt

SEQ ID NO: 151041 - DNA, 17 bp, Arabidopsis thaliana
tgcattgatgtatgcag

SEQ ID NO: 151042 - DNA, 17 bp, Arabidopsis thaliana
tgcattgcacttgggtg

SEQ ID NO: 151043 - DNA, 17 bp, Arabidopsis thaliana
tgcattgcatatactaa

SEQ ID NO: 151044 - DNA, 17 bp, Arabidopsis thaliana
tgcattgcctcttccct

SEQ ID NO: 151045 - DNA, 17 bp, Arabidopsis thaliana
tgcattgcggttttagg

SEQ ID NO: 151046 - DNA, 17 bp, Arabidopsis thaliana
tgcattgcggttttatg

SEQ ID NO: 151047 - DNA, 17 bp, Arabidopsis thaliana
tgcattgcgttaggtgc

SEQ ID NO: 151048 - DNA, 17 bp, Arabidopsis thaliana
tgcattgcttgattcac

SEQ ID NO: 151049 - DNA, 17 bp, Arabidopsis thaliana
tgcattggaaagcgtgg

SEQ ID NO: 151050 - DNA, 17 bp, Arabidopsis thaliana
tgcattggattgtgaca

SEQ ID NO: 151051 - DNA, 17 bp, Arabidopsis thaliana
tgcattggattgtggca

SEQ ID NO: 151052 - DNA, 17 bp, Arabidopsis thaliana
tgcattggccgaccggt

SEQ ID NO: 151053 - DNA, 17 bp, Arabidopsis thaliana
tgcattggtcaggttga

SEQ ID NO: 151054 - DNA, 17 bp, Arabidopsis thaliana
tgcattggtcgacttgt

SEQ ID NO: 151055 - DNA, 17 bp, Arabidopsis thaliana
tgcattggtcggcttct

SEQ ID NO: 151056 - DNA, 17 bp, Arabidopsis thaliana
tgcattggtcggcttgc

SEQ ID NO: 151057 - DNA, 17 bp, Arabidopsis thaliana
tgcattggtcggcttgt

SEQ ID NO: 151058 - DNA, 17 bp, Arabidopsis thaliana
tgcattggtcggctttt

SEQ ID NO: 151059 - DNA, 17 bp, Arabidopsis thaliana
tgcattggtcgtacggt

SEQ ID NO: 151060 - DNA, 17 bp, Arabidopsis thaliana
tgcattggttaaggcgg

SEQ ID NO: 151061 - DNA, 17 bp, Arabidopsis thaliana
tgcattgtcaggacgtt

SEQ ID NO: 151062 - DNA, 17 bp, Arabidopsis thaliana
tgcatttacacgagcta

SEQ ID NO: 151063 - DNA, 17 bp, Arabidopsis thaliana
tgcatttatggctcaag

SEQ ID NO: 151064 - DNA, 17 bp, Arabidopsis thaliana
tgcatttcatgaaacta

SEQ ID NO: 151065 - DNA, 17 bp, Arabidopsis thaliana
tgcatttccaggctgaa

SEQ ID NO: 151066 - DNA, 17 bp, Arabidopsis thaliana
tgcatttctaatgaggc

SEQ ID NO: 151067 - DNA, 17 bp, Arabidopsis thaliana
tgcatttctaccggtgc

SEQ ID NO: 151068 - DNA, 17 bp, Arabidopsis thaliana
tgcatttctgactacca

SEQ ID NO: 151069 - DNA, 17 bp, Arabidopsis thaliana
tgcatttctgactatca

SEQ ID NO: 151070 - DNA, 17 bp, Arabidopsis thaliana
tgcatttcttagccatt

SEQ ID NO: 151071 - DNA, 17 bp, Arabidopsis thaliana
tgcatttgaggttgctg

SEQ ID NO: 151072 - DNA, 17 bp, Arabidopsis thaliana
tgcatttgattttgacc

SEQ ID NO: 151073 - DNA, 17 bp, Arabidopsis thaliana
tgcatttgcaaacggct

SEQ ID NO: 151074 - DNA, 17 bp, Arabidopsis thaliana
tgcatttgccggctgct

SEQ ID NO: 151075 - DNA, 17 bp, Arabidopsis thaliana
tgcatttggactggcaa

SEQ ID NO: 151076 - DNA, 17 bp, Arabidopsis thaliana
tgcatttggactgggca

SEQ ID NO: 151077 - DNA, 17 bp, Arabidopsis thaliana
tgcatttggagtgctgc

SEQ ID NO: 151078 - DNA, 17 bp, Arabidopsis thaliana
tgcatttggccaagtgg

SEQ ID NO: 151079 - DNA, 17 bp, Arabidopsis thaliana
tgcatttgggatcttac

SEQ ID NO: 151080 - DNA, 17 bp, Arabidopsis thaliana
tgcatttgtgatcgtgg

SEQ ID NO: 151081 - DNA, 17 bp, Arabidopsis thaliana
tgcatttgttggatgtg

SEQ ID NO: 151082 - DNA, 17 bp, Arabidopsis thaliana
tgcattttcaaagccaa

SEQ ID NO: 151083 - DNA, 17 bp, Arabidopsis thaliana
tgcattttcagcttttc

SEQ ID NO: 151084 - DNA, 17 bp, Arabidopsis thaliana
tgcattttcagtttttc

SEQ ID NO: 151085 - DNA, 17 bp, Arabidopsis thaliana
tgcattttcgtgatttg

SEQ ID NO: 151086 - DNA, 17 bp, Arabidopsis thaliana
tgcattttcgtgtgcag

SEQ ID NO: 151087 - DNA, 17 bp, Arabidopsis thaliana
tgcattttgcggtgcgg

SEQ ID NO: 151088 - DNA, 17 bp, Arabidopsis thaliana
tgcattttggtggcata

SEQ ID NO: 151089 - DNA, 17 bp, Arabidopsis thaliana
tgcattttgttaccgtg

SEQ ID NO: 151090 - DNA, 17 bp, Arabidopsis thaliana
tgcattttgtttgtaac

SEQ ID NO: 151091 - DNA, 17 bp, Arabidopsis thaliana
tgcatttttccgacaaa

SEQ ID NO: 151092 - DNA, 17 bp, Arabidopsis thaliana
tgcattttttgcctctg

SEQ ID NO: 151093 - DNA, 17 bp, Arabidopsis thaliana
tgccaaaaataacttta

SEQ ID NO: 151094 - DNA, 17 bp, Arabidopsis thaliana
tgccaaaagtggtgaaa

SEQ ID NO: 151095 - DNA, 17 bp, Arabidopsis thaliana
tgccaaacaagggaaag

SEQ ID NO: 151096 - DNA, 17 bp, Arabidopsis thaliana
tgccaaaccccttccgc

SEQ ID NO: 151097 - DNA, 17 bp, Arabidopsis thaliana
tgccaaacccgggccaa

SEQ ID NO: 151098 - DNA, 17 bp, Arabidopsis thaliana
tgccaaacccgtcccgc

SEQ ID NO: 151099 - DNA, 17 bp, Arabidopsis thaliana
tgccaaacccgtctcgc

SEQ ID NO: 151100 - DNA, 17 bp, Arabidopsis thaliana
tgccaaactcggtcgtc

SEQ ID NO: 151101 - DNA, 17 bp, Arabidopsis thaliana
tgccaaactgtccggtt

SEQ ID NO: 151102 - DNA, 17 bp, Arabidopsis thaliana
tgccaaacttggcatgt

SEQ ID NO: 151103 - DNA, 17 bp, Arabidopsis thaliana
tgccaaaggagagttgc

SEQ ID NO: 151104 - DNA, 17 bp, Arabidopsis thaliana
tgccaaaggagatctgc

SEQ ID NO: 151105 - DNA, 17 bp, Arabidopsis thaliana
tgccaaaggagatttgc

SEQ ID NO: 151106 - DNA, 17 bp, Arabidopsis thaliana
tgccaaaggagttgccc

SEQ ID NO: 151107 - DNA, 17 bp, Arabidopsis thaliana
tgccaaaggatttctat

SEQ ID NO: 151108 - DNA, 17 bp, Arabidopsis thaliana
tgccaaaggatttgccc

SEQ ID NO: 151109 - DNA, 17 bp, Arabidopsis thaliana
tgccaaagggcctagca

SEQ ID NO: 151110 - DNA, 17 bp, Arabidopsis thaliana
tgccaaatgagatttgc

SEQ ID NO: 151111 - DNA, 17 bp, Arabidopsis thaliana
tgccaaatgttaaaacg

SEQ ID NO: 151112 - DNA, 17 bp, Arabidopsis thaliana
tgccaaattcgagataa

SEQ ID NO: 151113 - DNA, 17 bp, Arabidopsis thaliana
tgccaacaatgtgcatt

SEQ ID NO: 151114 - DNA, 17 bp, Arabidopsis thaliana
tgccaacatcctcgcag

SEQ ID NO: 151115 - DNA, 17 bp, Arabidopsis thaliana
tgccaacgaatctggga

SEQ ID NO: 151116 - DNA, 17 bp, Arabidopsis thaliana
tgccaacgggatctcag

SEQ ID NO: 151117 - DNA, 17 bp, Arabidopsis thaliana
tgccaactacgtgtttt

SEQ ID NO: 151118 - DNA, 17 bp, Arabidopsis thaliana
tgccaactcgacctgtc

SEQ ID NO: 151119 - DNA, 17 bp, Arabidopsis thaliana
tgccaacttgggttttc

SEQ ID NO: 151120 - DNA, 17 bp, Arabidopsis thaliana
tgccaactttgaaaaat

SEQ ID NO: 151121 - DNA, 17 bp, Arabidopsis thaliana
tgccaagagaaaaaggg

SEQ ID NO: 151122 - DNA, 17 bp, Arabidopsis thaliana
tgccaagagggaaaagg

SEQ ID NO: 151123 - DNA, 17 bp, Arabidopsis thaliana
tgccaagattgttcttt

SEQ ID NO: 151124 - DNA, 17 bp, Arabidopsis thaliana
tgccaagccgtttctct

SEQ ID NO: 151125 - DNA, 17 bp, Arabidopsis thaliana
tgccaaggacggtgcga

SEQ ID NO: 151126 - DNA, 17 bp, Arabidopsis thaliana
tgccaaggatgacttcc

SEQ ID NO: 151127 - DNA, 17 bp, Arabidopsis thaliana
tgccaaggatgatggat

SEQ ID NO: 151128 - DNA, 17 bp, Arabidopsis thaliana
tgccaaggatgttttca

SEQ ID NO: 151129 - DNA, 17 bp, Arabidopsis thaliana
tgccaaggcgtccgcag

SEQ ID NO: 151130 - DNA, 17 bp, Arabidopsis thaliana
tgccaaggttgctagca

SEQ ID NO: 151131 - DNA, 17 bp, Arabidopsis thaliana
tgccaagtaattgacgt

SEQ ID NO: 151132 - DNA, 17 bp, Arabidopsis thaliana
tgccaagtcacatgata

SEQ ID NO: 151133 - DNA, 17 bp, Arabidopsis thaliana
tgccaagtctgcatcgg

SEQ ID NO: 151134 - DNA, 17 bp, Arabidopsis thaliana
tgccaagtttggcctca

SEQ ID NO: 151135 - DNA, 17 bp, Arabidopsis thaliana
tgccaatatggatttgc

SEQ ID NO: 151136 - DNA, 17 bp, Arabidopsis thaliana
tgccaatcaggtgttca

SEQ ID NO: 151137 - DNA, 17 bp, Arabidopsis thaliana
tgccaatctctctacta

SEQ ID NO: 151138 - DNA, 17 bp, Arabidopsis thaliana
tgccaatgttgtatcta

SEQ ID NO: 151139 - DNA, 17 bp, Arabidopsis thaliana
tgccaattagcctttct

SEQ ID NO: 151140 - DNA, 17 bp, Arabidopsis thaliana
tgccaatttgtccgcct

SEQ ID NO: 151141 - DNA, 17 bp, Arabidopsis thaliana
tgccacaacaaccttga

SEQ ID NO: 151142 - DNA, 17 bp, Arabidopsis thaliana
tgccacaatccactgag

SEQ ID NO: 151143 - DNA, 17 bp, Arabidopsis thaliana
tgccacacatgtgtcta

SEQ ID NO: 151144 - DNA, 17 bp, Arabidopsis thaliana
tgccacatcaggatttc

SEQ ID NO: 151145 - DNA, 17 bp, Arabidopsis thaliana
tgccacatgtcattaac

SEQ ID NO: 151146 - DNA, 17 bp, Arabidopsis thaliana
tgccaccaagattagta

SEQ ID NO: 151147 - DNA, 17 bp, Arabidopsis thaliana
tgccaccgagattagga

SEQ ID NO: 151148 - DNA, 17 bp, Arabidopsis thaliana
tgccaccgagattaggt

SEQ ID NO: 151149 - DNA, 17 bp, Arabidopsis thaliana
tgccaccgcaacagaga

SEQ ID NO: 151150 - DNA, 17 bp, Arabidopsis thaliana
tgccacctgctgctgag

SEQ ID NO: 151151 - DNA, 17 bp, Arabidopsis thaliana
tgccacgacggagggtt

SEQ ID NO: 151152 - DNA, 17 bp, Arabidopsis thaliana
tgccacgatccactgag

SEQ ID NO: 151153 - DNA, 17 bp, Arabidopsis thaliana
tgccacgattgtgccta

SEQ ID NO: 151154 - DNA, 17 bp, Arabidopsis thaliana
tgccacggcttgccgct

SEQ ID NO: 151155 - DNA, 17 bp, Arabidopsis thaliana
tgccacggtacagaccc

SEQ ID NO: 151156 - DNA, 17 bp, Arabidopsis thaliana
tgccacgtcatttgtta

SEQ ID NO: 151157 - DNA, 17 bp, Arabidopsis thaliana
tgccacgtgtcaagtct

SEQ ID NO: 151158 - DNA, 17 bp, Arabidopsis thaliana
tgccactagaccacaga

SEQ ID NO: 151159 - DNA, 17 bp, Arabidopsis thaliana
tgccactcaccaggctg

SEQ ID NO: 151160 - DNA, 17 bp, Arabidopsis thaliana
tgccactctgtctgtct

SEQ ID NO: 151161 - DNA, 17 bp, Arabidopsis thaliana
tgccactgagacagtga

SEQ ID NO: 151162 - DNA, 17 bp, Arabidopsis thaliana
tgccactgagatcagga

SEQ ID NO: 151163 - DNA, 17 bp, Arabidopsis thaliana
tgccactgctctatctg

SEQ ID NO: 151164 - DNA, 17 bp, Arabidopsis thaliana
tgccactggattttgat

SEQ ID NO: 151165 - DNA, 17 bp, Arabidopsis thaliana
tgccactggggacagta

SEQ ID NO: 151166 - DNA, 17 bp, Arabidopsis thaliana
tgccacttgacagtcca

SEQ ID NO: 151167 - DNA, 17 bp, Arabidopsis thaliana
tgccactttgtgttgct

SEQ ID NO: 151168 - DNA, 17 bp, Arabidopsis thaliana
tgccagaaatgcaagat

SEQ ID NO: 151169 - DNA, 17 bp, Arabidopsis thaliana
tgccagaagacctaatt

SEQ ID NO: 151170 - DNA, 17 bp, Arabidopsis thaliana
tgccagacaacttggtg

SEQ ID NO: 151171 - DNA, 17 bp, Arabidopsis thaliana
tgccagacactgggtgt

SEQ ID NO: 151172 - DNA, 17 bp, Arabidopsis thaliana
tgccagaccactgagtg

SEQ ID NO: 151173 - DNA, 17 bp, Arabidopsis thaliana
tgccagaccggtgtcca

SEQ ID NO: 151174 - DNA, 17 bp, Arabidopsis thaliana
tgccagacctctactcg

SEQ ID NO: 151175 - DNA, 17 bp, Arabidopsis thaliana
tgccagacgcatttgct

SEQ ID NO: 151176 - DNA, 17 bp, Arabidopsis thaliana
tgccagagaaggtgcga

SEQ ID NO: 151177 - DNA, 17 bp, Arabidopsis thaliana
tgccagagggtagtcag

SEQ ID NO: 151178 - DNA, 17 bp, Arabidopsis thaliana
tgccagagtcaggccgc

SEQ ID NO: 151179 - DNA, 17 bp, Arabidopsis thaliana
tgccagattcctttgct

SEQ ID NO: 151180 - DNA, 17 bp, Arabidopsis thaliana
tgccagcagccgaggta

SEQ ID NO: 151181 - DNA, 17 bp, Arabidopsis thaliana
tgccagcagccgcggta

SEQ ID NO: 151182 - DNA, 17 bp, Arabidopsis thaliana
tgccagctgatagatca

SEQ ID NO: 151183 - DNA, 17 bp, Arabidopsis thaliana
tgccaggagcaggatgg

SEQ ID NO: 151184 - DNA, 17 bp, Arabidopsis thaliana
tgccaggcctgcttggg

SEQ ID NO: 151185 - DNA, 17 bp, Arabidopsis thaliana
tgccaggctccctgtat

SEQ ID NO: 151186 - DNA, 17 bp, Arabidopsis thaliana
tgccagggatagtcagg

SEQ ID NO: 151187 - DNA, 17 bp, Arabidopsis thaliana
tgccaggggcgtactgc

SEQ ID NO: 151188 - DNA, 17 bp, Arabidopsis thaliana
tgccagggggtaatcag

SEQ ID NO: 151189 - DNA, 17 bp, Arabidopsis thaliana
tgccagggggtagtcag

SEQ ID NO: 151190 - DNA, 17 bp, Arabidopsis thaliana
tgccaggtagtgtagtc

SEQ ID NO: 151191 - DNA, 17 bp, Arabidopsis thaliana
tgccaggtgcacgattt

SEQ ID NO: 151192 - DNA, 17 bp, Arabidopsis thaliana
tgccaggttgtgtgagg

SEQ ID NO: 151193 - DNA, 17 bp, Arabidopsis thaliana
tgccagtagctttgtgt

SEQ ID NO: 151194 - DNA, 17 bp, Arabidopsis thaliana
tgccagtagtgtgtggt

SEQ ID NO: 151195 - DNA, 17 bp, Arabidopsis thaliana
tgccagttccttgctac

SEQ ID NO: 151196 - DNA, 17 bp, Arabidopsis thaliana
tgccagttgtatgagcc

SEQ ID NO: 151197 - DNA, 17 bp, Arabidopsis thaliana
tgccataagttattcag

SEQ ID NO: 151198 - DNA, 17 bp, Arabidopsis thaliana
tgccatcaaactctgca

SEQ ID NO: 151199 - DNA, 17 bp, Arabidopsis thaliana
tgccatcactttgtgct

SEQ ID NO: 151200 - DNA, 17 bp, Arabidopsis thaliana
tgccatcatcgactaac

SEQ ID NO: 151201 - DNA, 17 bp, Arabidopsis thaliana
tgccatccacatgacct

SEQ ID NO: 151202 - DNA, 17 bp, Arabidopsis thaliana
tgccatccgctgcagct

SEQ ID NO: 151203 - DNA, 17 bp, Arabidopsis thaliana
tgccatctgacgtcgat

SEQ ID NO: 151204 - DNA, 17 bp, Arabidopsis thaliana
tgccatcttgagattgt

SEQ ID NO: 151205 - DNA, 17 bp, Arabidopsis thaliana
tgccatcttgtgacgcc

SEQ ID NO: 151206 - DNA, 17 bp, Arabidopsis thaliana
tgccatctttgtcatgg

SEQ ID NO: 151207 - DNA, 17 bp, Arabidopsis thaliana
tgccatctttgtgacgc

SEQ ID NO: 151208 - DNA, 17 bp, Arabidopsis thaliana
tgccatgacctgcttca

SEQ ID NO: 151209 - DNA, 17 bp, Arabidopsis thaliana
tgccatgatacagctgt

SEQ ID NO: 151210 - DNA, 17 bp, Arabidopsis thaliana
tgccatgctggacgtgt

SEQ ID NO: 151211 - DNA, 17 bp, Arabidopsis thaliana
tgccatggcttcatatt

SEQ ID NO: 151212 - DNA, 17 bp, Arabidopsis thaliana
tgccatggctttatctc

SEQ ID NO: 151213 - DNA, 17 bp, Arabidopsis thaliana
tgccatgggaccaaact

SEQ ID NO: 151214 - DNA, 17 bp, Arabidopsis thaliana
tgccatggtggaaagaa

SEQ ID NO: 151215 - DNA, 17 bp, Arabidopsis thaliana
tgccatggtggaaagat

SEQ ID NO: 151216 - DNA, 17 bp, Arabidopsis thaliana
tgccatggtggaaaggt

SEQ ID NO: 151217 - DNA, 17 bp, Arabidopsis thaliana
tgccatgtagatctctg

SEQ ID NO: 151218 - DNA, 17 bp, Arabidopsis thaliana
tgccatgtcgagtttga

SEQ ID NO: 151219 - DNA, 17 bp, Arabidopsis thaliana
tgccatgtgtcaagtct

SEQ ID NO: 151220 - DNA, 17 bp, Arabidopsis thaliana
tgccatgtttatgcttt

SEQ ID NO: 151221 - DNA, 17 bp, Arabidopsis thaliana
tgccattatgcgtgtta

SEQ ID NO: 151222 - DNA, 17 bp, Arabidopsis thaliana
tgccattgccacgtcag

SEQ ID NO: 151223 - DNA, 17 bp, Arabidopsis thaliana
tgccattggatgatttc

SEQ ID NO: 151224 - DNA, 17 bp, Arabidopsis thaliana
tgccattggtctccctg

SEQ ID NO: 151225 - DNA, 17 bp, Arabidopsis thaliana
tgccatttgccggttaa

SEQ ID NO: 151226 - DNA, 17 bp, Arabidopsis thaliana
tgcccaaaatggtcaag

SEQ ID NO: 151227 - DNA, 17 bp, Arabidopsis thaliana
tgcccaaacctagtttt

SEQ ID NO: 151228 - DNA, 17 bp, Arabidopsis thaliana
tgcccaaccaatgccgg

SEQ ID NO: 151229 - DNA, 17 bp, Arabidopsis thaliana
tgcccaactgctcgcta

SEQ ID NO: 151230 - DNA, 17 bp, Arabidopsis thaliana
tgcccaagacatatccg

SEQ ID NO: 151231 - DNA, 17 bp, Arabidopsis thaliana
tgcccaaggcccatcat

SEQ ID NO: 151232 - DNA, 17 bp, Arabidopsis thaliana
tgcccaagggatcttcg

SEQ ID NO: 151233 - DNA, 17 bp, Arabidopsis thaliana
tgcccaatcgactgtcg

SEQ ID NO: 151234 - DNA, 17 bp, Arabidopsis thaliana
tgcccaattctacggat

SEQ ID NO: 151235 - DNA, 17 bp, Arabidopsis thaliana
tgcccacccacccaccc

SEQ ID NO: 151236 - DNA, 17 bp, Arabidopsis thaliana
tgcccaccctggaaacg

SEQ ID NO: 151237 - DNA, 17 bp, Arabidopsis thaliana
tgcccacctctctttct

SEQ ID NO: 151238 - DNA, 17 bp, Arabidopsis thaliana
tgcccacgggtcggatc

SEQ ID NO: 151239 - DNA, 17 bp, Arabidopsis thaliana
tgcccactgctctttct

SEQ ID NO: 151240 - DNA, 17 bp, Arabidopsis thaliana
tgcccagaaaatgttta

SEQ ID NO: 151241 - DNA, 17 bp, Arabidopsis thaliana
tgcccagaccctgtcgc

SEQ ID NO: 151242 - DNA, 17 bp, Arabidopsis thaliana
tgcccagacgagtgctt

SEQ ID NO: 151243 - DNA, 17 bp, Arabidopsis thaliana
tgcccagactccctcaa

SEQ ID NO: 151244 - DNA, 17 bp, Arabidopsis thaliana
tgcccaggcctagtaac

SEQ ID NO: 151245 - DNA, 17 bp, Arabidopsis thaliana
tgcccaggttgttagtt

SEQ ID NO: 151246 - DNA, 17 bp, Arabidopsis thaliana
tgcccagtgctctgaat

SEQ ID NO: 151247 - DNA, 17 bp, Arabidopsis thaliana
tgcccatctgtctgtgg

SEQ ID NO: 151248 - DNA, 17 bp, Arabidopsis thaliana
tgcccattagctcagtt

SEQ ID NO: 151249 - DNA, 17 bp, Arabidopsis thaliana
tgcccattataaggccc

SEQ ID NO: 151250 - DNA, 17 bp, Arabidopsis thaliana
tgccccaatcctccccc

SEQ ID NO: 151251 - DNA, 17 bp, Arabidopsis thaliana
tgccccacccaagacta

SEQ ID NO: 151252 - DNA, 17 bp, Arabidopsis thaliana
tgccccatagctcagtg

SEQ ID NO: 151253 - DNA, 17 bp, Arabidopsis thaliana
tgccccatgactcaatc

SEQ ID NO: 151254 - DNA, 17 bp, Arabidopsis thaliana
tgccccattctgagctc

SEQ ID NO: 151255 - DNA, 17 bp, Arabidopsis thaliana
tgccccccccccccccc

SEQ ID NO: 151256 - DNA, 17 bp, Arabidopsis thaliana
tgccccgaaaatggatg

SEQ ID NO: 151257 - DNA, 17 bp, Arabidopsis thaliana
tgccccgaggctacgac

SEQ ID NO: 151258 - DNA, 17 bp, Arabidopsis thaliana
tgccccgatgttgtgtc

SEQ ID NO: 151259 - DNA, 17 bp, Arabidopsis thaliana
tgccccgcaggttcgta

SEQ ID NO: 151260 - DNA, 17 bp, Arabidopsis thaliana
tgccccgcgatagtgcc

SEQ ID NO: 151261 - DNA, 17 bp, Arabidopsis thaliana
tgccccgctgggttttc

SEQ ID NO: 151262 - DNA, 17 bp, Arabidopsis thaliana
tgccccggttatttatt

SEQ ID NO: 151263 - DNA, 17 bp, Arabidopsis thaliana
tgccccgttcggtgact

SEQ ID NO: 151264 - DNA, 17 bp, Arabidopsis thaliana
tgccccgttgacccgag

SEQ ID NO: 151265 - DNA, 17 bp, Arabidopsis thaliana
tgcccctgaagttttgc

SEQ ID NO: 151266 - DNA, 17 bp, Arabidopsis thaliana
tgcccctgtggttaaac

SEQ ID NO: 151267 - DNA, 17 bp, Arabidopsis thaliana
tgcccctgttatggtag

SEQ ID NO: 151268 - DNA, 17 bp, Arabidopsis thaliana
tgccccttatgccctgg

SEQ ID NO: 151269 - DNA, 17 bp, Arabidopsis thaliana
tgcccctttgtcgctaa

SEQ ID NO: 151270 - DNA, 17 bp, Arabidopsis thaliana
tgcccgaaaaagtactt

SEQ ID NO: 151271 - DNA, 17 bp, Arabidopsis thaliana
tgcccgaaactttgtgg

SEQ ID NO: 151272 - DNA, 17 bp, Arabidopsis thaliana
tgcccgagctggactgt

SEQ ID NO: 151273 - DNA, 17 bp, Arabidopsis thaliana
tgcccgccggatccgtg

SEQ ID NO: 151274 - DNA, 17 bp, Arabidopsis thaliana
tgcccgcgattgagaaa

SEQ ID NO: 151275 - DNA, 17 bp, Arabidopsis thaliana
tgcccgcgcaggttcgg

SEQ ID NO: 151276 - DNA, 17 bp, Arabidopsis thaliana
tgcccgcgtcgcgatag

SEQ ID NO: 151277 - DNA, 17 bp, Arabidopsis thaliana
tgcccgctcgtctgtgg

SEQ ID NO: 151278 - DNA, 17 bp, Arabidopsis thaliana
tgcccggaccctgtcgc

SEQ ID NO: 151279 - DNA, 17 bp, Arabidopsis thaliana
tgcccgtctggagcagc

SEQ ID NO: 151280 - DNA, 17 bp, Arabidopsis thaliana
tgcccgtggggacatct

SEQ ID NO: 151281 - DNA, 17 bp, Arabidopsis thaliana
tgcccgttgcgttgatg

SEQ ID NO: 151282 - DNA, 17 bp, Arabidopsis thaliana
tgcccgttgctctgatg

SEQ ID NO: 151283 - DNA, 17 bp, Arabidopsis thaliana
tgccctaagacagttag

SEQ ID NO: 151284 - DNA, 17 bp, Arabidopsis thaliana
tgccctaaggagaatgt

SEQ ID NO: 151285 - DNA, 17 bp, Arabidopsis thaliana
tgccctacatctctcag

SEQ ID NO: 151286 - DNA, 17 bp, Arabidopsis thaliana
tgccctactagtggatg

SEQ ID NO: 151287 - DNA, 17 bp, Arabidopsis thaliana
tgccctactttcataaa

SEQ ID NO: 151288 - DNA, 17 bp, Arabidopsis thaliana
tgccctattagtaggcc

SEQ ID NO: 151289 - DNA, 17 bp, Arabidopsis thaliana
tgccctccctccctccc

SEQ ID NO: 151290 - DNA, 17 bp, Arabidopsis thaliana
tgccctccttaggtgga

SEQ ID NO: 151291 - DNA, 17 bp, Arabidopsis thaliana
tgccctccttctagcgc

SEQ ID NO: 151292 - DNA, 17 bp, Arabidopsis thaliana
tgccctctatttcggta

SEQ ID NO: 151293 - DNA, 17 bp, Arabidopsis thaliana
tgccctctgctgtagac

SEQ ID NO: 151294 - DNA, 17 bp, Arabidopsis thaliana
tgccctctgctgtagat

SEQ ID NO: 151295 - DNA, 17 bp, Arabidopsis thaliana
tgccctcttcaaggact

SEQ ID NO: 151296 - DNA, 17 bp, Arabidopsis thaliana
tgccctcttgaccaccc

SEQ ID NO: 151297 - DNA, 17 bp, Arabidopsis thaliana
tgccctcttggcaccaa

SEQ ID NO: 151298 - DNA, 17 bp, Arabidopsis thaliana
tgccctgagaagatgga

SEQ ID NO: 151299 - DNA, 17 bp, Arabidopsis thaliana
tgccctggcagggctcc

SEQ ID NO: 151300 - DNA, 17 bp, Arabidopsis thaliana
tgccctgggcgacacac

SEQ ID NO: 151301 - DNA, 17 bp, Arabidopsis thaliana
tgccctgttcgtttcct

SEQ ID NO: 151302 - DNA, 17 bp, Arabidopsis thaliana
tgcccttagatgtactg

SEQ ID NO: 151303 - DNA, 17 bp, Arabidopsis thaliana
tgcccttagatgttccg

SEQ ID NO: 151304 - DNA, 17 bp, Arabidopsis thaliana
tgcccttagatgttctg

SEQ ID NO: 151305 - DNA, 17 bp, Arabidopsis thaliana
tgcccttagcaccgttg

SEQ ID NO: 151306 - DNA, 17 bp, Arabidopsis thaliana
tgcccttcatgcccagt

SEQ ID NO: 151307 - DNA, 17 bp, Arabidopsis thaliana
tgcccttgagtgcagaa

SEQ ID NO: 151308 - DNA, 17 bp, Arabidopsis thaliana
tgcccttgcagcgtgta

SEQ ID NO: 151309 - DNA, 17 bp, Arabidopsis thaliana
tgccctttcttatttgc

SEQ ID NO: 151310 - DNA, 17 bp, Arabidopsis thaliana
tgccctttgcacgaaat

SEQ ID NO: 151311 - DNA, 17 bp, Arabidopsis thaliana
tgccctttgtacacacc

SEQ ID NO: 151312 - DNA, 17 bp, Arabidopsis thaliana
tgccctttgtacacact

SEQ ID NO: 151313 - DNA, 17 bp, Arabidopsis thaliana
tgccctttgtcgctaag

SEQ ID NO: 151314 - DNA, 17 bp, Arabidopsis thaliana
tgcccttttcacactac

SEQ ID NO: 151315 - DNA, 17 bp, Arabidopsis thaliana
tgcccttttctcaatgc

SEQ ID NO: 151316 - DNA, 17 bp, Arabidopsis thaliana
tgccgaaatggatgacc

SEQ ID NO: 151317 - DNA, 17 bp, Arabidopsis thaliana
tgccgaactgagataaa

SEQ ID NO: 151318 - DNA, 17 bp, Arabidopsis thaliana
tgccgaagctgtgggat

SEQ ID NO: 151319 - DNA, 17 bp, Arabidopsis thaliana
tgccgaagtcgaactcc

SEQ ID NO: 151320 - DNA, 17 bp, Arabidopsis thaliana
tgccgaatccgagtttg

SEQ ID NO: 151321 - DNA, 17 bp, Arabidopsis thaliana
tgccgaattgaccaggt

SEQ ID NO: 151322 - DNA, 17 bp, Arabidopsis thaliana
tgccgaccaaactgcac

SEQ ID NO: 151323 - DNA, 17 bp, Arabidopsis thaliana
tgccgaccagggatcaa

SEQ ID NO: 151324 - DNA, 17 bp, Arabidopsis thaliana
tgccgaccagggatcag

SEQ ID NO: 151325 - DNA, 17 bp, Arabidopsis thaliana
tgccgaccagggatcat

SEQ ID NO: 151326 - DNA, 17 bp, Arabidopsis thaliana
tgccgaccaggtatcag

SEQ ID NO: 151327 - DNA, 17 bp, Arabidopsis thaliana
tgccgaccatggatcag

SEQ ID NO: 151328 - DNA, 17 bp, Arabidopsis thaliana
tgccgaccctcagtacg

SEQ ID NO: 151329 - DNA, 17 bp, Arabidopsis thaliana
tgccgaccctcagtaga

SEQ ID NO: 151330 - DNA, 17 bp, Arabidopsis thaliana
tgccgaccctcagtagg

SEQ ID NO: 151331 - DNA, 17 bp, Arabidopsis thaliana
tgccgaccctcagtcgg

SEQ ID NO: 151332 - DNA, 17 bp, Arabidopsis thaliana
tgccgacctggctaact

SEQ ID NO: 151333 - DNA, 17 bp, Arabidopsis thaliana
tgccgaccttcagtagg

SEQ ID NO: 151334 - DNA, 17 bp, Arabidopsis thaliana
tgccgacggttattctc

SEQ ID NO: 151335 - DNA, 17 bp, Arabidopsis thaliana
tgccgacgttgctccga

SEQ ID NO: 151336 - DNA, 17 bp, Arabidopsis thaliana
tgccgactccgtcgcat

SEQ ID NO: 151337 - DNA, 17 bp, Arabidopsis thaliana
tgccgactgtcgctact

SEQ ID NO: 151338 - DNA, 17 bp, Arabidopsis thaliana
tgccgacttagttcctt

SEQ ID NO: 151339 - DNA, 17 bp, Arabidopsis thaliana
tgccgacttagtttcct

SEQ ID NO: 151340 - DNA, 17 bp, Arabidopsis thaliana
tgccgactttagcccga

SEQ ID NO: 151341 - DNA, 17 bp, Arabidopsis thaliana
tgccgaggataatggcc

SEQ ID NO: 151342 - DNA, 17 bp, Arabidopsis thaliana
tgccgagggcacgtccg

SEQ ID NO: 151343 - DNA, 17 bp, Arabidopsis thaliana
tgccgagggcacgtctg

SEQ ID NO: 151344 - DNA, 17 bp, Arabidopsis thaliana
tgccgagtggaagggcc

SEQ ID NO: 151345 - DNA, 17 bp, Arabidopsis thaliana
tgccgataacaggacgc

SEQ ID NO: 151346 - DNA, 17 bp, Arabidopsis thaliana
tgccgatactgttagtc

SEQ ID NO: 151347 - DNA, 17 bp, Arabidopsis thaliana
tgccgatcgatagaaat

SEQ ID NO: 151348 - DNA, 17 bp, Arabidopsis thaliana
tgccgatcggaaatcag

SEQ ID NO: 151349 - DNA, 17 bp, Arabidopsis thaliana
tgccgatgagtgagccg

SEQ ID NO: 151350 - DNA, 17 bp, Arabidopsis thaliana
tgccgattggacccggg

SEQ ID NO: 151351 - DNA, 17 bp, Arabidopsis thaliana
tgccgattgtttgacgt

SEQ ID NO: 151352 - DNA, 17 bp, Arabidopsis thaliana
tgccgatttgattggga

SEQ ID NO: 151353 - DNA, 17 bp, Arabidopsis thaliana
tgccgattttcgataca

SEQ ID NO: 151354 - DNA, 17 bp, Arabidopsis thaliana
tgccgcacaagccgtca

SEQ ID NO: 151355 - DNA, 17 bp, Arabidopsis thaliana
tgccgcacacgaggcgc

SEQ ID NO: 151356 - DNA, 17 bp, Arabidopsis thaliana
tgccgcaccacgaggcg

SEQ ID NO: 151357 - DNA, 17 bp, Arabidopsis thaliana
tgccgcagccgttgccg

SEQ ID NO: 151358 - DNA, 17 bp, Arabidopsis thaliana
tgccgcagcgactgtaa

SEQ ID NO: 151359 - DNA, 17 bp, Arabidopsis thaliana
tgccgcagtgactgtaa

SEQ ID NO: 151360 - DNA, 17 bp, Arabidopsis thaliana
tgccgcagttgccgcag

SEQ ID NO: 151361 - DNA, 17 bp, Arabidopsis thaliana
tgccgcagttttttttg

SEQ ID NO: 151362 - DNA, 17 bp, Arabidopsis thaliana
tgccgcatcagctactt

SEQ ID NO: 151363 - DNA, 17 bp, Arabidopsis thaliana
tgccgccaagttgatac

SEQ ID NO: 151364 - DNA, 17 bp, Arabidopsis thaliana
tgccgccaggattagct

SEQ ID NO: 151365 - DNA, 17 bp, Arabidopsis thaliana
tgccgccgacgctgccg

SEQ ID NO: 151366 - DNA, 17 bp, Arabidopsis thaliana
tgccgccgattcagttg

SEQ ID NO: 151367 - DNA, 17 bp, Arabidopsis thaliana
tgccgccgccctctagt

SEQ ID NO: 151368 - DNA, 17 bp, Arabidopsis thaliana
tgccgcgcccacaggcg

SEQ ID NO: 151369 - DNA, 17 bp, Arabidopsis thaliana
tgccgcggttaaatctg

SEQ ID NO: 151370 - DNA, 17 bp, Arabidopsis thaliana
tgccgcgtggaggtaga

SEQ ID NO: 151371 - DNA, 17 bp, Arabidopsis thaliana
tgccgctcaccccagcc

SEQ ID NO: 151372 - DNA, 17 bp, Arabidopsis thaliana
tgccgctcacgcccgct

SEQ ID NO: 151373 - DNA, 17 bp, Arabidopsis thaliana
tgccgctcacgcccggt

SEQ ID NO: 151374 - DNA, 17 bp, Arabidopsis thaliana
tgccgctccggcagcgt

SEQ ID NO: 151375 - DNA, 17 bp, Arabidopsis thaliana
tgccgctgcaatatgtg

SEQ ID NO: 151376 - DNA, 17 bp, Arabidopsis thaliana
tgccgctgccgctgcgt

SEQ ID NO: 151377 - DNA, 17 bp, Arabidopsis thaliana
tgccgctgctagaaata

SEQ ID NO: 151378 - DNA, 17 bp, Arabidopsis thaliana
tgccgctggattttaat

SEQ ID NO: 151379 - DNA, 17 bp, Arabidopsis thaliana
tgccgcttctttggccc

SEQ ID NO: 151380 - DNA, 17 bp, Arabidopsis thaliana
tgccgcttgagtcagag

SEQ ID NO: 151381 - DNA, 17 bp, Arabidopsis thaliana
tgccgcttggccctgcc

SEQ ID NO: 151382 - DNA, 17 bp, Arabidopsis thaliana
tgccgcttggccctgct

SEQ ID NO: 151383 - DNA, 17 bp, Arabidopsis thaliana
tgccggccgaaaccgac

SEQ ID NO: 151384 - DNA, 17 bp, Arabidopsis thaliana
tgccggccgagggacgg

SEQ ID NO: 151385 - DNA, 17 bp, Arabidopsis thaliana
tgccggccgggggacgg

SEQ ID NO: 151386 - DNA, 17 bp, Arabidopsis thaliana
tgccggcgtccggatct

SEQ ID NO: 151387 - DNA, 17 bp, Arabidopsis thaliana
tgccggctaagctaaaa

SEQ ID NO: 151388 - DNA, 17 bp, Arabidopsis thaliana
tgccggctcaaccgcac

SEQ ID NO: 151389 - DNA, 17 bp, Arabidopsis thaliana
tgccggctcagaatgtg

SEQ ID NO: 151390 - DNA, 17 bp, Arabidopsis thaliana
tgccggctcatgagtac

SEQ ID NO: 151391 - DNA, 17 bp, Arabidopsis thaliana
tgccggggaaacttacc

SEQ ID NO: 151392 - DNA, 17 bp, Arabidopsis thaliana
tgccggggttttgtgat

SEQ ID NO: 151393 - DNA, 17 bp, Arabidopsis thaliana
tgccggtaaaatcaatt

SEQ ID NO: 151394 - DNA, 17 bp, Arabidopsis thaliana
tgccggtagtgatggaa

SEQ ID NO: 151395 - DNA, 17 bp, Arabidopsis thaliana
tgccggtggttgagatc

SEQ ID NO: 151396 - DNA, 17 bp, Arabidopsis thaliana
tgccggttcggcttggt

SEQ ID NO: 151397 - DNA, 17 bp, Arabidopsis thaliana
tgccggtttgttaagct

SEQ ID NO: 151398 - DNA, 17 bp, Arabidopsis thaliana
tgccgtaaagatgtcga

SEQ ID NO: 151399 - DNA, 17 bp, Arabidopsis thaliana
tgccgtaaggtgttggg

SEQ ID NO: 151400 - DNA, 17 bp, Arabidopsis thaliana
tgccgtagacaccggag

SEQ ID NO: 151401 - DNA, 17 bp, Arabidopsis thaliana
tgccgtagaccaggtca

SEQ ID NO: 151402 - DNA, 17 bp, Arabidopsis thaliana
tgccgtagccgccgatt

SEQ ID NO: 151403 - DNA, 17 bp, Arabidopsis thaliana
tgccgtatggaacttga

SEQ ID NO: 151404 - DNA, 17 bp, Arabidopsis thaliana
tgccgtcactacaacag

SEQ ID NO: 151405 - DNA, 17 bp, Arabidopsis thaliana
tgccgtcataaccaaaa

SEQ ID NO: 151406 - DNA, 17 bp, Arabidopsis thaliana
tgccgtccagatgatat

SEQ ID NO: 151407 - DNA, 17 bp, Arabidopsis thaliana
tgccgtccctcagtagg

SEQ ID NO: 151408 - DNA, 17 bp, Arabidopsis thaliana
tgccgtcgacgcctgct

SEQ ID NO: 151409 - DNA, 17 bp, Arabidopsis thaliana
tgccgtcgctggtcgct

SEQ ID NO: 151410 - DNA, 17 bp, Arabidopsis thaliana
tgccgtcggggcaagag

SEQ ID NO: 151411 - DNA, 17 bp, Arabidopsis thaliana
tgccgtctctcgtgaat

SEQ ID NO: 151412 - DNA, 17 bp, Arabidopsis thaliana
tgccgtctttgttgtca

SEQ ID NO: 151413 - DNA, 17 bp, Arabidopsis thaliana
tgccgtgactctgtacg

SEQ ID NO: 151414 - DNA, 17 bp, Arabidopsis thaliana
tgccgtgactggagagg

SEQ ID NO: 151415 - DNA, 17 bp, Arabidopsis thaliana
tgccgtgatcggcgtcg

SEQ ID NO: 151416 - DNA, 17 bp, Arabidopsis thaliana
tgccgtgatcgtggtct

SEQ ID NO: 151417 - DNA, 17 bp, Arabidopsis thaliana
tgccgtgctactgtagc

SEQ ID NO: 151418 - DNA, 17 bp, Arabidopsis thaliana
tgccgtgcttaggactt

SEQ ID NO: 151419 - DNA, 17 bp, Arabidopsis thaliana
tgccgttaaatttttgt

SEQ ID NO: 151420 - DNA, 17 bp, Arabidopsis thaliana
tgccgttcgccaagatt

SEQ ID NO: 151421 - DNA, 17 bp, Arabidopsis thaliana
tgccgttgaatcacatg

SEQ ID NO: 151422 - DNA, 17 bp, Arabidopsis thaliana
tgccgttgagcggtctt

SEQ ID NO: 151423 - DNA, 17 bp, Arabidopsis thaliana
tgccgttggaccactca

SEQ ID NO: 151424 - DNA, 17 bp, Arabidopsis thaliana
tgccgttggggaagaat

SEQ ID NO: 151425 - DNA, 17 bp, Arabidopsis thaliana
tgccgtttcccctacga

SEQ ID NO: 151426 - DNA, 17 bp, Arabidopsis thaliana
tgccgtttgcaaatgca

SEQ ID NO: 151427 - DNA, 17 bp, Arabidopsis thaliana
tgcctaaacatgtccaa

SEQ ID NO: 151428 - DNA, 17 bp, Arabidopsis thaliana
tgcctaaacgcagctcc

SEQ ID NO: 151429 - DNA, 17 bp, Arabidopsis thaliana
tgcctaaacggtctatt

SEQ ID NO: 151430 - DNA, 17 bp, Arabidopsis thaliana
tgcctaaacgtgtcaca

SEQ ID NO: 151431 - DNA, 17 bp, Arabidopsis thaliana
tgcctaacaataacctt

SEQ ID NO: 151432 - DNA, 17 bp, Arabidopsis thaliana
tgcctaaccgaattgac

SEQ ID NO: 151433 - DNA, 17 bp, Arabidopsis thaliana
tgcctaagagctcgagt

SEQ ID NO: 151434 - DNA, 17 bp, Arabidopsis thaliana
tgcctaatagtggaaca

SEQ ID NO: 151435 - DNA, 17 bp, Arabidopsis thaliana
tgcctacattggctcct

SEQ ID NO: 151436 - DNA, 17 bp, Arabidopsis thaliana
tgcctacctgtgttgca

SEQ ID NO: 151437 - DNA, 17 bp, Arabidopsis thaliana
tgcctacggtgctgctg

SEQ ID NO: 151438 - DNA, 17 bp, Arabidopsis thaliana
tgcctactaactaagga

SEQ ID NO: 151439 - DNA, 17 bp, Arabidopsis thaliana
tgcctactccctccaaa

SEQ ID NO: 151440 - DNA, 17 bp, Arabidopsis thaliana
tgcctacttcaccgcag

SEQ ID NO: 151441 - DNA, 17 bp, Arabidopsis thaliana
tgcctagattgctctac

SEQ ID NO: 151442 - DNA, 17 bp, Arabidopsis thaliana
tgcctagctccctgtat

SEQ ID NO: 151443 - DNA, 17 bp, Arabidopsis thaliana
tgcctagctctgttatc

SEQ ID NO: 151444 - DNA, 17 bp, Arabidopsis thaliana
tgcctaggcgcggttag

SEQ ID NO: 151445 - DNA, 17 bp, Arabidopsis thaliana
tgcctagtgacgggtcc

SEQ ID NO: 151446 - DNA, 17 bp, Arabidopsis thaliana
tgcctataggtacgagt

SEQ ID NO: 151447 - DNA, 17 bp, Arabidopsis thaliana
tgcctatattgctgcgg

SEQ ID NO: 151448 - DNA, 17 bp, Arabidopsis thaliana
tgcctatcgatccttta

SEQ ID NO: 151449 - DNA, 17 bp, Arabidopsis thaliana
tgcctatcgttggttca

SEQ ID NO: 151450 - DNA, 17 bp, Arabidopsis thaliana
tgcctatgatgtggcac

SEQ ID NO: 151451 - DNA, 17 bp, Arabidopsis thaliana
tgcctatgtgatctggg

SEQ ID NO: 151452 - DNA, 17 bp, Arabidopsis thaliana
tgcctattagctcagtt

SEQ ID NO: 151453 - DNA, 17 bp, Arabidopsis thaliana
tgcctattcagagggat

SEQ ID NO: 151454 - DNA, 17 bp, Arabidopsis thaliana
tgcctattgggatgtct

SEQ ID NO: 151455 - DNA, 17 bp, Arabidopsis thaliana
tgcctattgtgtcggct

SEQ ID NO: 151456 - DNA, 17 bp, Arabidopsis thaliana
tgcctcaaacggaataa

SEQ ID NO: 151457 - DNA, 17 bp, Arabidopsis thaliana
tgcctcaaagtgttaca

SEQ ID NO: 151458 - DNA, 17 bp, Arabidopsis thaliana
tgcctcaaatcttcgac

SEQ ID NO: 151459 - DNA, 17 bp, Arabidopsis thaliana
tgcctcaagtgtgcgaa

SEQ ID NO: 151460 - DNA, 17 bp, Arabidopsis thaliana
tgcctcacatttcatcc

SEQ ID NO: 151461 - DNA, 17 bp, Arabidopsis thaliana
tgcctcaccgccttgga

SEQ ID NO: 151462 - DNA, 17 bp, Arabidopsis thaliana
tgcctcacctggtattt

SEQ ID NO: 151463 - DNA, 17 bp, Arabidopsis thaliana
tgcctcagaaaatgtga

SEQ ID NO: 151464 - DNA, 17 bp, Arabidopsis thaliana
tgcctcagctcctccag

SEQ ID NO: 151465 - DNA, 17 bp, Arabidopsis thaliana
tgcctcaggagggatag

SEQ ID NO: 151466 - DNA, 17 bp, Arabidopsis thaliana
tgcctcaggcgcccagg

SEQ ID NO: 151467 - DNA, 17 bp, Arabidopsis thaliana
tgcctcaggttcagctc

SEQ ID NO: 151468 - DNA, 17 bp, Arabidopsis thaliana
tgcctcatctctgcaaa

SEQ ID NO: 151469 - DNA, 17 bp, Arabidopsis thaliana
tgcctcatggttcggcg

SEQ ID NO: 151470 - DNA, 17 bp, Arabidopsis thaliana
tgcctcccaagatgttg

SEQ ID NO: 151471 - DNA, 17 bp, Arabidopsis thaliana
tgcctccctctgaactt

SEQ ID NO: 151472 - DNA, 17 bp, Arabidopsis thaliana
tgcctccgacgctgtta

SEQ ID NO: 151473 - DNA, 17 bp, Arabidopsis thaliana
tgcctccgccactcgta

SEQ ID NO: 151474 - DNA, 17 bp, Arabidopsis thaliana
tgcctccggcgctgtta

SEQ ID NO: 151475 - DNA, 17 bp, Arabidopsis thaliana
tgcctccggtgctgtta

SEQ ID NO: 151476 - DNA, 17 bp, Arabidopsis thaliana
tgcctcctaaccgccag

SEQ ID NO: 151477 - DNA, 17 bp, Arabidopsis thaliana
tgcctcctcagatggat

SEQ ID NO: 151478 - DNA, 17 bp, Arabidopsis thaliana
tgcctcgaagttactgc

SEQ ID NO: 151479 - DNA, 17 bp, Arabidopsis thaliana
tgcctcgacatggaccc

SEQ ID NO: 151480 - DNA, 17 bp, Arabidopsis thaliana
tgcctcgcgatattgcc

SEQ ID NO: 151481 - DNA, 17 bp, Arabidopsis thaliana
tgcctcggatgaccaat

SEQ ID NO: 151482 - DNA, 17 bp, Arabidopsis thaliana
tgcctcggatgaccatt

SEQ ID NO: 151483 - DNA, 17 bp, Arabidopsis thaliana
tgcctcgtcatctaatt

SEQ ID NO: 151484 - DNA, 17 bp, Arabidopsis thaliana
tgcctcgttctgctgct

SEQ ID NO: 151485 - DNA, 17 bp, Arabidopsis thaliana
tgcctctactttgtgtt

SEQ ID NO: 151486 - DNA, 17 bp, Arabidopsis thaliana
tgcctctaggaatctcc

SEQ ID NO: 151487 - DNA, 17 bp, Arabidopsis thaliana
tgcctctaggaatctct

SEQ ID NO: 151488 - DNA, 17 bp, Arabidopsis thaliana
tgcctctaggtatccac

SEQ ID NO: 151489 - DNA, 17 bp, Arabidopsis thaliana
tgcctctcgcctccgga

SEQ ID NO: 151490 - DNA, 17 bp, Arabidopsis thaliana
tgcctctcgggacccga

SEQ ID NO: 151491 - DNA, 17 bp, Arabidopsis thaliana
tgcctctctgctctcct

SEQ ID NO: 151492 - DNA, 17 bp, Arabidopsis thaliana
tgcctctgacggtccta

SEQ ID NO: 151493 - DNA, 17 bp, Arabidopsis thaliana
tgcctctgaggttctct

SEQ ID NO: 151494 - DNA, 17 bp, Arabidopsis thaliana
tgcctctgatgttcgcc

SEQ ID NO: 151495 - DNA, 17 bp, Arabidopsis thaliana
tgcctctgatgtttgcc

SEQ ID NO: 151496 - DNA, 17 bp, Arabidopsis thaliana
tgcctctgcttattgga

SEQ ID NO: 151497 - DNA, 17 bp, Arabidopsis thaliana
tgcctctgggagatgta

SEQ ID NO: 151498 - DNA, 17 bp, Arabidopsis thaliana
tgcctctgttatctcaa

SEQ ID NO: 151499 - DNA, 17 bp, Arabidopsis thaliana
tgcctctgttccaagga

SEQ ID NO: 151500 - DNA, 17 bp, Arabidopsis thaliana
tgcctcttcttggtttt

SEQ ID NO: 151501 - DNA, 17 bp, Arabidopsis thaliana
tgcctctttctggtttt

SEQ ID NO: 151502 - DNA, 17 bp, Arabidopsis thaliana
tgcctcttttgcctctg

SEQ ID NO: 151503 - DNA, 17 bp, Arabidopsis thaliana
tgcctgaacagactcgc

SEQ ID NO: 151504 - DNA, 17 bp, Arabidopsis thaliana
tgcctgaaccttcttgg

SEQ ID NO: 151505 - DNA, 17 bp, Arabidopsis thaliana
tgcctgaaccttggaaa

SEQ ID NO: 151506 - DNA, 17 bp, Arabidopsis thaliana
tgcctgactccctgtat

SEQ ID NO: 151507 - DNA, 17 bp, Arabidopsis thaliana
tgcctgactgtgagacc

SEQ ID NO: 151508 - DNA, 17 bp, Arabidopsis thaliana
tgcctgagcggattatc

SEQ ID NO: 151509 - DNA, 17 bp, Arabidopsis thaliana
tgcctgagcggggtaaa

SEQ ID NO: 151510 - DNA, 17 bp, Arabidopsis thaliana
tgcctgatctgcaccgc

SEQ ID NO: 151511 - DNA, 17 bp, Arabidopsis thaliana
tgcctgatgttatgcgt

SEQ ID NO: 151512 - DNA, 17 bp, Arabidopsis thaliana
tgcctgcaaaggtttcc

SEQ ID NO: 151513 - DNA, 17 bp, Arabidopsis thaliana
tgcctgcaaccagatct

SEQ ID NO: 151514 - DNA, 17 bp, Arabidopsis thaliana
tgcctgcaatgattcca

SEQ ID NO: 151515 - DNA, 17 bp, Arabidopsis thaliana
tgcctgcacattgcggt

SEQ ID NO: 151516 - DNA, 17 bp, Arabidopsis thaliana
tgcctgcaccctcagga

SEQ ID NO: 151517 - DNA, 17 bp, Arabidopsis thaliana
tgcctgcacctggacag

SEQ ID NO: 151518 - DNA, 17 bp, Arabidopsis thaliana
tgcctgcactttatgca

SEQ ID NO: 151519 - DNA, 17 bp, Arabidopsis thaliana
tgcctgcagccaaggat

SEQ ID NO: 151520 - DNA, 17 bp, Arabidopsis thaliana
tgcctgcaggacgaatt

SEQ ID NO: 151521 - DNA, 17 bp, Arabidopsis thaliana
tgcctgcaggattctgt

SEQ ID NO: 151522 - DNA, 17 bp, Arabidopsis thaliana
tgcctgcattggtcggc

SEQ ID NO: 151523 - DNA, 17 bp, Arabidopsis thaliana
tgcctgccaaaagtggt

SEQ ID NO: 151524 - DNA, 17 bp, Arabidopsis thaliana
tgcctgccaagattgtt

SEQ ID NO: 151525 - DNA, 17 bp, Arabidopsis thaliana
tgcctgccaaggatgtt

SEQ ID NO: 151526 - DNA, 17 bp, Arabidopsis thaliana
tgcctgccagacgcatt

SEQ ID NO: 151527 - DNA, 17 bp, Arabidopsis thaliana
tgcctgcccctgttatg

SEQ ID NO: 151528 - DNA, 17 bp, Arabidopsis thaliana
tgcctgccctttgtaca

SEQ ID NO: 151529 - DNA, 17 bp, Arabidopsis thaliana
tgcctgccgaccagcca

SEQ ID NO: 151530 - DNA, 17 bp, Arabidopsis thaliana
tgcctgccgctcacgcc

SEQ ID NO: 151531 - DNA, 17 bp, Arabidopsis thaliana
tgcctgccggccggggg

SEQ ID NO: 151532 - DNA, 17 bp, Arabidopsis thaliana
tgcctgccggtccgcct

SEQ ID NO: 151533 - DNA, 17 bp, Arabidopsis thaliana
tgcctgccgtgatcgtg

SEQ ID NO: 151534 - DNA, 17 bp, Arabidopsis thaliana
tgcctgcctccctgtat

SEQ ID NO: 151535 - DNA, 17 bp, Arabidopsis thaliana
tgcctgcctccggcgct

SEQ ID NO: 151536 - DNA, 17 bp, Arabidopsis thaliana
tgcctgcctctgcttat

SEQ ID NO: 151537 - DNA, 17 bp, Arabidopsis thaliana
tgcctgcctgctttgac

SEQ ID NO: 151538 - DNA, 17 bp, Arabidopsis thaliana
tgcctgcctggctccct

SEQ ID NO: 151539 - DNA, 17 bp, Arabidopsis thaliana
tgcctgcctggctgcct

SEQ ID NO: 151540 - DNA, 17 bp, Arabidopsis thaliana
tgcctgcctgtcgctgg

SEQ ID NO: 151541 - DNA, 17 bp, Arabidopsis thaliana
tgcctgcctgtcgggac

SEQ ID NO: 151542 - DNA, 17 bp, Arabidopsis thaliana
tgcctgcgaccgaatgt

SEQ ID NO: 151543 - DNA, 17 bp, Arabidopsis thaliana
tgcctgcgacggaatta

SEQ ID NO: 151544 - DNA, 17 bp, Arabidopsis thaliana
tgcctgcgactatgctc

SEQ ID NO: 151545 - DNA, 17 bp, Arabidopsis thaliana
tgcctgcgcattgtgtg

SEQ ID NO: 151546 - DNA, 17 bp, Arabidopsis thaliana
tgcctgcgcccgccgcc

SEQ ID NO: 151547 - DNA, 17 bp, Arabidopsis thaliana
tgcctgcgctaaataca

SEQ ID NO: 151548 - DNA, 17 bp, Arabidopsis thaliana
tgcctgcgctgcgattt

SEQ ID NO: 151549 - DNA, 17 bp, Arabidopsis thaliana
tgcctgcggcagcggta

SEQ ID NO: 151550 - DNA, 17 bp, Arabidopsis thaliana
tgcctgcggctgcggca

SEQ ID NO: 151551 - DNA, 17 bp, Arabidopsis thaliana
tgcctgcggctgttgat

SEQ ID NO: 151552 - DNA, 17 bp, Arabidopsis thaliana
tgcctgcgggaagcatt

SEQ ID NO: 151553 - DNA, 17 bp, Arabidopsis thaliana
tgcctgcggttgcggac

SEQ ID NO: 151554 - DNA, 17 bp, Arabidopsis thaliana
tgcctgcgttcctaccg

SEQ ID NO: 151555 - DNA, 17 bp, Arabidopsis thaliana
tgcctgctacttcttgg

SEQ ID NO: 151556 - DNA, 17 bp, Arabidopsis thaliana
tgcctgctcaggtgtct

SEQ ID NO: 151557 - DNA, 17 bp, Arabidopsis thaliana
tgcctgctccctgtatg

SEQ ID NO: 151558 - DNA, 17 bp, Arabidopsis thaliana
tgcctgctccggtcggg

SEQ ID NO: 151559 - DNA, 17 bp, Arabidopsis thaliana
tgcctgctgccgaatgc

SEQ ID NO: 151560 - DNA, 17 bp, Arabidopsis thaliana
tgcctgctgggccttac

SEQ ID NO: 151561 - DNA, 17 bp, Arabidopsis thaliana
tgcctgctttacccagg

SEQ ID NO: 151562 - DNA, 17 bp, Arabidopsis thaliana
tgcctgctttctcgcca

SEQ ID NO: 151563 - DNA, 17 bp, Arabidopsis thaliana
tgcctgctttgaccgag

SEQ ID NO: 151564 - DNA, 17 bp, Arabidopsis thaliana
tgcctggccccctgtat

SEQ ID NO: 151565 - DNA, 17 bp, Arabidopsis thaliana
tgcctggcctgcatgcc

SEQ ID NO: 151566 - DNA, 17 bp, Arabidopsis thaliana
tgcctggcctgtatgcc

SEQ ID NO: 151567 - DNA, 17 bp, Arabidopsis thaliana
tgcctggcctttcattt

SEQ ID NO: 151568 - DNA, 17 bp, Arabidopsis thaliana
tgcctggcgccctgtat

SEQ ID NO: 151569 - DNA, 17 bp, Arabidopsis thaliana
tgcctggctcactgtat

SEQ ID NO: 151570 - DNA, 17 bp, Arabidopsis thaliana
tgcctggctccccttat

SEQ ID NO: 151571 - DNA, 17 bp, Arabidopsis thaliana
tgcctggctccctatat

SEQ ID NO: 151572 - DNA, 17 bp, Arabidopsis thaliana
tgcctggctccctctat

SEQ ID NO: 151573 - DNA, 17 bp, Arabidopsis thaliana
tgcctggctccctgaat

SEQ ID NO: 151574 - DNA, 17 bp, Arabidopsis thaliana
tgcctggctccctgcct

SEQ ID NO: 151575 - DNA, 17 bp, Arabidopsis thaliana
tgcctggctccctgtac

SEQ ID NO: 151576 - DNA, 17 bp, Arabidopsis thaliana
tgcctggctccctgtag

SEQ ID NO: 151577 - DNA, 17 bp, Arabidopsis thaliana
tgcctggctccctgtat

SEQ ID NO: 151578 - DNA, 17 bp, Arabidopsis thaliana
tgcctggctccctgtct

SEQ ID NO: 151579 - DNA, 17 bp, Arabidopsis thaliana
tgcctggctccctgtgt

SEQ ID NO: 151580 - DNA, 17 bp, Arabidopsis thaliana
tgcctggctccctgttg

SEQ ID NO: 151581 - DNA, 17 bp, Arabidopsis thaliana
tgcctggctccctttat

SEQ ID NO: 151582 - DNA, 17 bp, Arabidopsis thaliana
tgcctggctcctgtatg

SEQ ID NO: 151583 - DNA, 17 bp, Arabidopsis thaliana
tgcctggctccttgtat

SEQ ID NO: 151584 - DNA, 17 bp, Arabidopsis thaliana
tgcctggctctctgtat

SEQ ID NO: 151585 - DNA, 17 bp, Arabidopsis thaliana
tgcctggctctctgtct

SEQ ID NO: 151586 - DNA, 17 bp, Arabidopsis thaliana
tgcctggctgcctgtat

SEQ ID NO: 151587 - DNA, 17 bp, Arabidopsis thaliana
tgcctggctgtatgcca

SEQ ID NO: 151588 - DNA, 17 bp, Arabidopsis thaliana
tgcctggcttcctgtat

SEQ ID NO: 151589 - DNA, 17 bp, Arabidopsis thaliana
tgcctggcttctgtatg

SEQ ID NO: 151590 - DNA, 17 bp, Arabidopsis thaliana
tgcctgggtccctgtat

SEQ ID NO: 151591 - DNA, 17 bp, Arabidopsis thaliana
tgcctgggttgaataga

SEQ ID NO: 151592 - DNA, 17 bp, Arabidopsis thaliana
tgcctggtctgggggtg

SEQ ID NO: 151593 - DNA, 17 bp, Arabidopsis thaliana
tgcctggttccctgtat

SEQ ID NO: 151594 - DNA, 17 bp, Arabidopsis thaliana
tgcctgtaaattccctg

SEQ ID NO: 151595 - DNA, 17 bp, Arabidopsis thaliana
tgcctgtccgccggccg

SEQ ID NO: 151596 - DNA, 17 bp, Arabidopsis thaliana
tgcctgtcgctggcgac

SEQ ID NO: 151597 - DNA, 17 bp, Arabidopsis thaliana
tgcctgtcgctggtgac

SEQ ID NO: 151598 - DNA, 17 bp, Arabidopsis thaliana
tgcctgtcgctggttca

SEQ ID NO: 151599 - DNA, 17 bp, Arabidopsis thaliana
tgcctgtcgctggttga

SEQ ID NO: 151600 - DNA, 17 bp, Arabidopsis thaliana
tgcctgtcggactcctc

SEQ ID NO: 151601 - DNA, 17 bp, Arabidopsis thaliana
tgcctgtcgggacccga

SEQ ID NO: 151602 - DNA, 17 bp, Arabidopsis thaliana
tgcctgtcgggacccgt

SEQ ID NO: 151603 - DNA, 17 bp, Arabidopsis thaliana
tgcctgtcggttcggcc

SEQ ID NO: 151604 - DNA, 17 bp, Arabidopsis thaliana
tgcctgtctccctgtat

SEQ ID NO: 151605 - DNA, 17 bp, Arabidopsis thaliana
tgcctgtctccctgtct

SEQ ID NO: 151606 - DNA, 17 bp, Arabidopsis thaliana
tgcctgttgaagaatga

SEQ ID NO: 151607 - DNA, 17 bp, Arabidopsis thaliana
tgcctgttgatcgagtt

SEQ ID NO: 151608 - DNA, 17 bp, Arabidopsis thaliana
tgccttaaccgatcgca

SEQ ID NO: 151609 - DNA, 17 bp, Arabidopsis thaliana
tgccttagaagtcttca

SEQ ID NO: 151610 - DNA, 17 bp, Arabidopsis thaliana
tgccttaggcttgtaat

SEQ ID NO: 151611 - DNA, 17 bp, Arabidopsis thaliana
tgccttaggcttgttat

SEQ ID NO: 151612 - DNA, 17 bp, Arabidopsis thaliana
tgccttataggtcgctg

SEQ ID NO: 151613 - DNA, 17 bp, Arabidopsis thaliana
tgccttatgacccgccc

SEQ ID NO: 151614 - DNA, 17 bp, Arabidopsis thaliana
tgccttatgacccgtcg

SEQ ID NO: 151615 - DNA, 17 bp, Arabidopsis thaliana
tgccttatgcgttttac

SEQ ID NO: 151616 - DNA, 17 bp, Arabidopsis thaliana
tgccttatggatggtgc

SEQ ID NO: 151617 - DNA, 17 bp, Arabidopsis thaliana
tgccttcaggtattggt

SEQ ID NO: 151618 - DNA, 17 bp, Arabidopsis thaliana
tgccttcaggtggattt

SEQ ID NO: 151619 - DNA, 17 bp, Arabidopsis thaliana
tgccttccgacctttat

SEQ ID NO: 151620 - DNA, 17 bp, Arabidopsis thaliana
tgccttccgactaatcc

SEQ ID NO: 151621 - DNA, 17 bp, Arabidopsis thaliana
tgccttccgactaatgc

SEQ ID NO: 151622 - DNA, 17 bp, Arabidopsis thaliana
tgccttccttggatgtg

SEQ ID NO: 151623 - DNA, 17 bp, Arabidopsis thaliana
tgccttcgataagcttg

SEQ ID NO: 151624 - DNA, 17 bp, Arabidopsis thaliana
tgccttcggaaatggct

SEQ ID NO: 151625 - DNA, 17 bp, Arabidopsis thaliana
tgccttcgggaacgcgg

SEQ ID NO: 151626 - DNA, 17 bp, Arabidopsis thaliana
tgccttcggggacgcgg

SEQ ID NO: 151627 - DNA, 17 bp, Arabidopsis thaliana
tgccttcgggttcggtt

SEQ ID NO: 151628 - DNA, 17 bp, Arabidopsis thaliana
tgccttctaccattgtg

SEQ ID NO: 151629 - DNA, 17 bp, Arabidopsis thaliana
tgccttctctttcattc

SEQ ID NO: 151630 - DNA, 17 bp, Arabidopsis thaliana
tgccttctttctactgg

SEQ ID NO: 151631 - DNA, 17 bp, Arabidopsis thaliana
tgccttcttttgcgcca

SEQ ID NO: 151632 - DNA, 17 bp, Arabidopsis thaliana
tgccttgctcaaaagtg

SEQ ID NO: 151633 - DNA, 17 bp, Arabidopsis thaliana
tgccttgctccctgtat

SEQ ID NO: 151634 - DNA, 17 bp, Arabidopsis thaliana
tgccttggacaaaatta

SEQ ID NO: 151635 - DNA, 17 bp, Arabidopsis thaliana
tgccttggacgcctttt

SEQ ID NO: 151636 - DNA, 17 bp, Arabidopsis thaliana
tgccttggagttatcct

SEQ ID NO: 151637 - DNA, 17 bp, Arabidopsis thaliana
tgccttggagttatctt

SEQ ID NO: 151638 - DNA, 17 bp, Arabidopsis thaliana
tgccttggctgccgatg

SEQ ID NO: 151639 - DNA, 17 bp, Arabidopsis thaliana
tgcctttaagatccggt

SEQ ID NO: 151640 - DNA, 17 bp, Arabidopsis thaliana
tgcctttacatttgcag

SEQ ID NO: 151641 - DNA, 17 bp, Arabidopsis thaliana
tgcctttcaagctcaca

SEQ ID NO: 151642 - DNA, 17 bp, Arabidopsis thaliana
tgcctttctttcatctc

SEQ ID NO: 151643 - DNA, 17 bp, Arabidopsis thaliana
tgcctttgaagtcttca

SEQ ID NO: 151644 - DNA, 17 bp, Arabidopsis thaliana
tgcctttgcgtttgtcc

SEQ ID NO: 151645 - DNA, 17 bp, Arabidopsis thaliana
tgcctttgggagcctaa

SEQ ID NO: 151646 - DNA, 17 bp, Arabidopsis thaliana
tgcctttgtaaaggcat

SEQ ID NO: 151647 - DNA, 17 bp, Arabidopsis thaliana
tgcctttgtgttctttg

SEQ ID NO: 151648 - DNA, 17 bp, Arabidopsis thaliana
tgccttttccgtgcgct

SEQ ID NO: 151649 - DNA, 17 bp, Arabidopsis thaliana
tgccttttctaataacc

SEQ ID NO: 151650 - DNA, 17 bp, Arabidopsis thaliana
tgcctttttccgagttt

SEQ ID NO: 151651 - DNA, 17 bp, Arabidopsis thaliana
tgcctttttgtggggtg

SEQ ID NO: 151652 - DNA, 17 bp, Arabidopsis thaliana
tgccttttttgcaagac

SEQ ID NO: 151653 - DNA, 17 bp, Arabidopsis thaliana
tgcgaaaaagctgtaga

SEQ ID NO: 151654 - DNA, 17 bp, Arabidopsis thaliana
tgcgaaaaagtaaccag

SEQ ID NO: 151655 - DNA, 17 bp, Arabidopsis thaliana
tgcgaaactaggatcgg

SEQ ID NO: 151656 - DNA, 17 bp, Arabidopsis thaliana
tgcgaaagaagtgcggt

SEQ ID NO: 151657 - DNA, 17 bp, Arabidopsis thaliana
tgcgaaagcatttgcca

SEQ ID NO: 151658 - DNA, 17 bp, Arabidopsis thaliana
tgcgaaaggcttgtaac

SEQ ID NO: 151659 - DNA, 17 bp, Arabidopsis thaliana
tgcgaaaggcttgtacc

SEQ ID NO: 151660 - DNA, 17 bp, Arabidopsis thaliana
tgcgaaagggcttttct

SEQ ID NO: 151661 - DNA, 17 bp, Arabidopsis thaliana
tgcgaaattcaggtatg

SEQ ID NO: 151662 - DNA, 17 bp, Arabidopsis thaliana
tgcgaaccaggaggagt

SEQ ID NO: 151663 - DNA, 17 bp, Arabidopsis thaliana
tgcgaaccctcaagccc

SEQ ID NO: 151664 - DNA, 17 bp, Arabidopsis thaliana
tgcgaaccctggttatt

SEQ ID NO: 151665 - DNA, 17 bp, Arabidopsis thaliana
tgcgaacttactttaaa

SEQ ID NO: 151666 - DNA, 17 bp, Arabidopsis thaliana
tgcgaagaagctgtatg

SEQ ID NO: 151667 - DNA, 17 bp, Arabidopsis thaliana
tgcgaagctagctgtca

SEQ ID NO: 151668 - DNA, 17 bp, Arabidopsis thaliana
tgcgaagtccactaagt

SEQ ID NO: 151669 - DNA, 17 bp, Arabidopsis thaliana
tgcgaatatgattccaa

SEQ ID NO: 151670 - DNA, 17 bp, Arabidopsis thaliana
tgcgaatatggcacagc

SEQ ID NO: 151671 - DNA, 17 bp, Arabidopsis thaliana
tgcgaatcaacggttcc

SEQ ID NO: 151672 - DNA, 17 bp, Arabidopsis thaliana
tgcgaatcaccctcgtt

SEQ ID NO: 151673 - DNA, 17 bp, Arabidopsis thaliana
tgcgaatcctcaggatc

SEQ ID NO: 151674 - DNA, 17 bp, Arabidopsis thaliana
tgcgaatgactgaggtg

SEQ ID NO: 151675 - DNA, 17 bp, Arabidopsis thaliana
tgcgaatgcaagatgat

SEQ ID NO: 151676 - DNA, 17 bp, Arabidopsis thaliana
tgcgaatgcctcattaa

SEQ ID NO: 151677 - DNA, 17 bp, Arabidopsis thaliana
tgcgaatggctcattaa

SEQ ID NO: 151678 - DNA, 17 bp, Arabidopsis thaliana
tgcgaatggctcattga

SEQ ID NO: 151679 - DNA, 17 bp, Arabidopsis thaliana
tgcgaatgtgattgcga

SEQ ID NO: 151680 - DNA, 17 bp, Arabidopsis thaliana
tgcgaattcttccctgt

SEQ ID NO: 151681 - DNA, 17 bp, Arabidopsis thaliana
tgcgaatttcagatctt

SEQ ID NO: 151682 - DNA, 17 bp, Arabidopsis thaliana
tgcgacaaaagagttgg

SEQ ID NO: 151683 - DNA, 17 bp, Arabidopsis thaliana
tgcgacaaacctttgcg

SEQ ID NO: 151684 - DNA, 17 bp, Arabidopsis thaliana
tgcgacaactactcccg

SEQ ID NO: 151685 - DNA, 17 bp, Arabidopsis thaliana
tgcgacaagcaccggcg

SEQ ID NO: 151686 - DNA, 17 bp, Arabidopsis thaliana
tgcgacagattttttat

SEQ ID NO: 151687 - DNA, 17 bp, Arabidopsis thaliana
tgcgacagctgaacgtc

SEQ ID NO: 151688 - DNA, 17 bp, Arabidopsis thaliana
tgcgacatttggcactc

SEQ ID NO: 151689 - DNA, 17 bp, Arabidopsis thaliana
tgcgaccagcgagtgcg

SEQ ID NO: 151690 - DNA, 17 bp, Arabidopsis thaliana
tgcgaccgaatgtgtca

SEQ ID NO: 151691 - DNA, 17 bp, Arabidopsis thaliana
tgcgacgactcaacggc

SEQ ID NO: 151692 - DNA, 17 bp, Arabidopsis thaliana
tgcgacgactttgccat

SEQ ID NO: 151693 - DNA, 17 bp, Arabidopsis thaliana
tgcgacgagcgttttgc

SEQ ID NO: 151694 - DNA, 17 bp, Arabidopsis thaliana
tgcgacgattgtgcaac

SEQ ID NO: 151695 - DNA, 17 bp, Arabidopsis thaliana
tgcgacgcgggttcgat

SEQ ID NO: 151696 - DNA, 17 bp, Arabidopsis thaliana
tgcgacgctcgagaatg

SEQ ID NO: 151697 - DNA, 17 bp, Arabidopsis thaliana
tgcgacggaattaataa

SEQ ID NO: 151698 - DNA, 17 bp, Arabidopsis thaliana
tgcgacggagtagcgtg

SEQ ID NO: 151699 - DNA, 17 bp, Arabidopsis thaliana
tgcgacggattagcaac

SEQ ID NO: 151700 - DNA, 17 bp, Arabidopsis thaliana
tgcgacggatttgttat

SEQ ID NO: 151701 - DNA, 17 bp, Arabidopsis thaliana
tgcgacggcgccgctgg

SEQ ID NO: 151702 - DNA, 17 bp, Arabidopsis thaliana
tgcgacgggttcctccg

SEQ ID NO: 151703 - DNA, 17 bp, Arabidopsis thaliana
tgcgacgtattttggat

SEQ ID NO: 151704 - DNA, 17 bp, Arabidopsis thaliana
tgcgacgtgccggagtg

SEQ ID NO: 151705 - DNA, 17 bp, Arabidopsis thaliana
tgcgactatgctctgtt

SEQ ID NO: 151706 - DNA, 17 bp, Arabidopsis thaliana
tgcgactatgtaacgac

SEQ ID NO: 151707 - DNA, 17 bp, Arabidopsis thaliana
tgcgactatttgacgac

SEQ ID NO: 151708 - DNA, 17 bp, Arabidopsis thaliana
tgcgactccggcgtctg

SEQ ID NO: 151709 - DNA, 17 bp, Arabidopsis thaliana
tgcgactccttggcagg

SEQ ID NO: 151710 - DNA, 17 bp, Arabidopsis thaliana
tgcgactcggattgggc

SEQ ID NO: 151711 - DNA, 17 bp, Arabidopsis thaliana
tgcgactctcggcaacg

SEQ ID NO: 151712 - DNA, 17 bp, Arabidopsis thaliana
tgcgactgattaacgac

SEQ ID NO: 151713 - DNA, 17 bp, Arabidopsis thaliana
tgcgactggtaactgtg

SEQ ID NO: 151714 - DNA, 17 bp, Arabidopsis thaliana
tgcgagaaacaggccag

SEQ ID NO: 151715 - DNA, 17 bp, Arabidopsis thaliana
tgcgagagcagaagctg

SEQ ID NO: 151716 - DNA, 17 bp, Arabidopsis thaliana
tgcgagagcgcctagca

SEQ ID NO: 151717 - DNA, 17 bp, Arabidopsis thaliana
tgcgagaggcacggggt

SEQ ID NO: 151718 - DNA, 17 bp, Arabidopsis thaliana
tgcgagaggtacgggga

SEQ ID NO: 151719 - DNA, 17 bp, Arabidopsis thaliana
tgcgagaggtcccgagt

SEQ ID NO: 151720 - DNA, 17 bp, Arabidopsis thaliana
tgcgagagtttcgtagc

SEQ ID NO: 151721 - DNA, 17 bp, Arabidopsis thaliana
tgcgagatcaaaatgtt

SEQ ID NO: 151722 - DNA, 17 bp, Arabidopsis thaliana
tgcgagatccgccatta

SEQ ID NO: 151723 - DNA, 17 bp, Arabidopsis thaliana
tgcgagatctagacttc

SEQ ID NO: 151724 - DNA, 17 bp, Arabidopsis thaliana
tgcgagatgtttccacg

SEQ ID NO: 151725 - DNA, 17 bp, Arabidopsis thaliana
tgcgagatttttgcgag

SEQ ID NO: 151726 - DNA, 17 bp, Arabidopsis thaliana
tgcgagcaaggcaagtt

SEQ ID NO: 151727 - DNA, 17 bp, Arabidopsis thaliana
tgcgagcggtagcggtt

SEQ ID NO: 151728 - DNA, 17 bp, Arabidopsis thaliana
tgcgaggaacttgcgag

SEQ ID NO: 151729 - DNA, 17 bp, Arabidopsis thaliana
tgcgaggaattagcgag

SEQ ID NO: 151730 - DNA, 17 bp, Arabidopsis thaliana
tgcgaggagtccgacag

SEQ ID NO: 151731 - DNA, 17 bp, Arabidopsis thaliana
tgcgagggctgggctcg

SEQ ID NO: 151732 - DNA, 17 bp, Arabidopsis thaliana
tgcgaggggtacggtga

SEQ ID NO: 151733 - DNA, 17 bp, Arabidopsis thaliana
tgcgaggggtacggtgg

SEQ ID NO: 151734 - DNA, 17 bp, Arabidopsis thaliana
tgcgaggtacatctctg

SEQ ID NO: 151735 - DNA, 17 bp, Arabidopsis thaliana
tgcgaggtgggttcaga

SEQ ID NO: 151736 - DNA, 17 bp, Arabidopsis thaliana
tgcgaggtgtagttcgg

SEQ ID NO: 151737 - DNA, 17 bp, Arabidopsis thaliana
tgcgagtcaacgggtga

SEQ ID NO: 151738 - DNA, 17 bp, Arabidopsis thaliana
tgcgagtccttggcagg

SEQ ID NO: 151739 - DNA, 17 bp, Arabidopsis thaliana
tgcgagtgcttcgcgag

SEQ ID NO: 151740 - DNA, 17 bp, Arabidopsis thaliana
tgcgagtgtcctccagg

SEQ ID NO: 151741 - DNA, 17 bp, Arabidopsis thaliana
tgcgagttacttgcctt

SEQ ID NO: 151742 - DNA, 17 bp, Arabidopsis thaliana
tgcgataaaccgcaggt

SEQ ID NO: 151743 - DNA, 17 bp, Arabidopsis thaliana
tgcgataactagacgct

SEQ ID NO: 151744 - DNA, 17 bp, Arabidopsis thaliana
tgcgataactagactct

SEQ ID NO: 151745 - DNA, 17 bp, Arabidopsis thaliana
tgcgatacagtcgtctc

SEQ ID NO: 151746 - DNA, 17 bp, Arabidopsis thaliana
tgcgatacggagggagg

SEQ ID NO: 151747 - DNA, 17 bp, Arabidopsis thaliana
tgcgatacttggtgtga

SEQ ID NO: 151748 - DNA, 17 bp, Arabidopsis thaliana
tgcgatagagtcttgag

SEQ ID NO: 151749 - DNA, 17 bp, Arabidopsis thaliana
tgcgatagcagattctg

SEQ ID NO: 151750 - DNA, 17 bp, Arabidopsis thaliana
tgcgatagttctcgtgg

SEQ ID NO: 151751 - DNA, 17 bp, Arabidopsis thaliana
tgcgatataggagaagt

SEQ ID NO: 151752 - DNA, 17 bp, Arabidopsis thaliana
tgcgatatcacgaaagg

SEQ ID NO: 151753 - DNA, 17 bp, Arabidopsis thaliana
tgcgatatgttgcgaag

SEQ ID NO: 151754 - DNA, 17 bp, Arabidopsis thaliana
tgcgatattgcctattg

SEQ ID NO: 151755 - DNA, 17 bp, Arabidopsis thaliana
tgcgatcaagagtaatg

SEQ ID NO: 151756 - DNA, 17 bp, Arabidopsis thaliana
tgcgatcagatccagcg

SEQ ID NO: 151757 - DNA, 17 bp, Arabidopsis thaliana
tgcgatcataccagcac

SEQ ID NO: 151758 - DNA, 17 bp, Arabidopsis thaliana
tgcgatcggtcggtcga

SEQ ID NO: 151759 - DNA, 17 bp, Arabidopsis thaliana
tgcgatgaacgcttggt

SEQ ID NO: 151760 - DNA, 17 bp, Arabidopsis thaliana
tgcgatgaagctttgcc

SEQ ID NO: 151761 - DNA, 17 bp, Arabidopsis thaliana
tgcgatgaagcttttgc

SEQ ID NO: 151762 - DNA, 17 bp, Arabidopsis thaliana
tgcgatgaattcttccg

SEQ ID NO: 151763 - DNA, 17 bp, Arabidopsis thaliana
tgcgatgagagacggcg

SEQ ID NO: 151764 - DNA, 17 bp, Arabidopsis thaliana
tgcgatgatgtgacact

SEQ ID NO: 151765 - DNA, 17 bp, Arabidopsis thaliana
tgcgatgcgattttggg

SEQ ID NO: 151766 - DNA, 17 bp, Arabidopsis thaliana
tgcgatgcggttttggg

SEQ ID NO: 151767 - DNA, 17 bp, Arabidopsis thaliana
tgcgatggtccctgcgg

SEQ ID NO: 151768 - DNA, 17 bp, Arabidopsis thaliana
tgcgatggttaagccgt

SEQ ID NO: 151769 - DNA, 17 bp, Arabidopsis thaliana
tgcgatgtagttttgag

SEQ ID NO: 151770 - DNA, 17 bp, Arabidopsis thaliana
tgcgattaacccggaag

SEQ ID NO: 151771 - DNA, 17 bp, Arabidopsis thaliana
tgcgattagaggccgga

SEQ ID NO: 151772 - DNA, 17 bp, Arabidopsis thaliana
tgcgattagccgcgagt

SEQ ID NO: 151773 - DNA, 17 bp, Arabidopsis thaliana
tgcgattatgttgtccc

SEQ ID NO: 151774 - DNA, 17 bp, Arabidopsis thaliana
tgcgattatgttgtcgc

SEQ ID NO: 151775 - DNA, 17 bp, Arabidopsis thaliana
tgcgattatgttgtctc

SEQ ID NO: 151776 - DNA, 17 bp, Arabidopsis thaliana
tgcgattatgttgtctg

SEQ ID NO: 151777 - DNA, 17 bp, Arabidopsis thaliana
tgcgattcaaaccgtga

SEQ ID NO: 151778 - DNA, 17 bp, Arabidopsis thaliana
tgcgattcaagcagatg

SEQ ID NO: 151779 - DNA, 17 bp, Arabidopsis thaliana
tgcgattcagccctttg

SEQ ID NO: 151780 - DNA, 17 bp, Arabidopsis thaliana
tgcgattcagtacagat

SEQ ID NO: 151781 - DNA, 17 bp, Arabidopsis thaliana
tgcgattcatcgcctcg

SEQ ID NO: 151782 - DNA, 17 bp, Arabidopsis thaliana
tgcgattctcatcgtct

SEQ ID NO: 151783 - DNA, 17 bp, Arabidopsis thaliana
tgcgattcttttctttc

SEQ ID NO: 151784 - DNA, 17 bp, Arabidopsis thaliana
tgcgattgaacttagat

SEQ ID NO: 151785 - DNA, 17 bp, Arabidopsis thaliana
tgcgattgaatctctga

SEQ ID NO: 151786 - DNA, 17 bp, Arabidopsis thaliana
tgcgattgagagcaaca

SEQ ID NO: 151787 - DNA, 17 bp, Arabidopsis thaliana
tgcgattgagtcagcgg

SEQ ID NO: 151788 - DNA, 17 bp, Arabidopsis thaliana
tgcgattgcgggagttt

SEQ ID NO: 151789 - DNA, 17 bp, Arabidopsis thaliana
tgcgattgcggttgaca

SEQ ID NO: 151790 - DNA, 17 bp, Arabidopsis thaliana
tgcgattggtgcagata

SEQ ID NO: 151791 - DNA, 17 bp, Arabidopsis thaliana
tgcgattgttgtgctct

SEQ ID NO: 151792 - DNA, 17 bp, Arabidopsis thaliana
tgcgatttaatttgcaa

SEQ ID NO: 151793 - DNA, 17 bp, Arabidopsis thaliana
tgcgatttactggtatg

SEQ ID NO: 151794 - DNA, 17 bp, Arabidopsis thaliana
tgcgatttagattggcc

SEQ ID NO: 151795 - DNA, 17 bp, Arabidopsis thaliana
tgcgatttgcacctccc

SEQ ID NO: 151796 - DNA, 17 bp, Arabidopsis thaliana
tgcgatttgcaggaatc

SEQ ID NO: 151797 - DNA, 17 bp, Arabidopsis thaliana
tgcgattttgaggtcaa

SEQ ID NO: 151798 - DNA, 17 bp, Arabidopsis thaliana
tgcgattttggcaaaaa

SEQ ID NO: 151799 - DNA, 17 bp, Arabidopsis thaliana
tgcgattttggcaaaac

SEQ ID NO: 151800 - DNA, 17 bp, Arabidopsis thaliana
tgcgattttggcgggaa

SEQ ID NO: 151801 - DNA, 17 bp, Arabidopsis thaliana
tgcgattttgggtatgg

SEQ ID NO: 151802 - DNA, 17 bp, Arabidopsis thaliana
tgcgattttgggtgcgg

SEQ ID NO: 151803 - DNA, 17 bp, Arabidopsis thaliana
tgcgcaaaggtgaactt

SEQ ID NO: 151804 - DNA, 17 bp, Arabidopsis thaliana
tgcgcaagaagctgaac

SEQ ID NO: 151805 - DNA, 17 bp, Arabidopsis thaliana
tgcgcaatcaaaacagt

SEQ ID NO: 151806 - DNA, 17 bp, Arabidopsis thaliana
tgcgcaccaagactgtt

SEQ ID NO: 151807 - DNA, 17 bp, Arabidopsis thaliana
tgcgcagagacgcggcg

SEQ ID NO: 151808 - DNA, 17 bp, Arabidopsis thaliana
tgcgcagatgtgccacc

SEQ ID NO: 151809 - DNA, 17 bp, Arabidopsis thaliana
tgcgcaggcagacattc

SEQ ID NO: 151810 - DNA, 17 bp, Arabidopsis thaliana
tgcgcaggcttgctagg

SEQ ID NO: 151811 - DNA, 17 bp, Arabidopsis thaliana
tgcgcagtcttttgtct

SEQ ID NO: 151812 - DNA, 17 bp, Arabidopsis thaliana
tgcgcatatgaccagtt

SEQ ID NO: 151813 - DNA, 17 bp, Arabidopsis thaliana
tgcgcatgctacctccc

SEQ ID NO: 151814 - DNA, 17 bp, Arabidopsis thaliana
tgcgcatgtctctgttc

SEQ ID NO: 151815 - DNA, 17 bp, Arabidopsis thaliana
tgcgcattagccatagt

SEQ ID NO: 151816 - DNA, 17 bp, Arabidopsis thaliana
tgcgcattagccgtagt

SEQ ID NO: 151817 - DNA, 17 bp, Arabidopsis thaliana
tgcgcattgtgtgtcta

SEQ ID NO: 151818 - DNA, 17 bp, Arabidopsis thaliana
tgcgcattttctgacat

SEQ ID NO: 151819 - DNA, 17 bp, Arabidopsis thaliana
tgcgccaactttcaaat

SEQ ID NO: 151820 - DNA, 17 bp, Arabidopsis thaliana
tgcgccaaggagctcac

SEQ ID NO: 151821 - DNA, 17 bp, Arabidopsis thaliana
tgcgccaagttgttatg

SEQ ID NO: 151822 - DNA, 17 bp, Arabidopsis thaliana
tgcgccaggcaaaaaat

SEQ ID NO: 151823 - DNA, 17 bp, Arabidopsis thaliana
tgcgccatatgcccaca

SEQ ID NO: 151824 - DNA, 17 bp, Arabidopsis thaliana
tgcgccatgactctggc

SEQ ID NO: 151825 - DNA, 17 bp, Arabidopsis thaliana
tgcgccatggccggtct

SEQ ID NO: 151826 - DNA, 17 bp, Arabidopsis thaliana
tgcgcccaggacgctgc

SEQ ID NO: 151827 - DNA, 17 bp, Arabidopsis thaliana
tgcgcccaggacgctgt

SEQ ID NO: 151828 - DNA, 17 bp, Arabidopsis thaliana
tgcgcccatgcggaggt

SEQ ID NO: 151829 - DNA, 17 bp, Arabidopsis thaliana
tgcgccccaagccttct

SEQ ID NO: 151830 - DNA, 17 bp, Arabidopsis thaliana
tgcgcccccggcggccc

SEQ ID NO: 151831 - DNA, 17 bp, Arabidopsis thaliana
tgcgccccctcccaccg

SEQ ID NO: 151832 - DNA, 17 bp, Arabidopsis thaliana
tgcgcccgccgcccgac

SEQ ID NO: 151833 - DNA, 17 bp, Arabidopsis thaliana
tgcgcccgccgcccgat

SEQ ID NO: 151834 - DNA, 17 bp, Arabidopsis thaliana
tgcgcccgccgcccgct

SEQ ID NO: 151835 - DNA, 17 bp, Arabidopsis thaliana
tgcgccgaagatgaacg

SEQ ID NO: 151836 - DNA, 17 bp, Arabidopsis thaliana
tgcgccgaagtgatcaa

SEQ ID NO: 151837 - DNA, 17 bp, Arabidopsis thaliana
tgcgccgacgaaggaga

SEQ ID NO: 151838 - DNA, 17 bp, Arabidopsis thaliana
tgcgccgacttatctat

SEQ ID NO: 151839 - DNA, 17 bp, Arabidopsis thaliana
tgcgccgacttatcttt

SEQ ID NO: 151840 - DNA, 17 bp, Arabidopsis thaliana
tgcgcctaacggcgtgc

SEQ ID NO: 151841 - DNA, 17 bp, Arabidopsis thaliana
tgcgcctagggaaaagg

SEQ ID NO: 151842 - DNA, 17 bp, Arabidopsis thaliana
tgcgcctcctccgacag

SEQ ID NO: 151843 - DNA, 17 bp, Arabidopsis thaliana
tgcgcctctatgtgtac

SEQ ID NO: 151844 - DNA, 17 bp, Arabidopsis thaliana
tgcgcctgggaaattat

SEQ ID NO: 151845 - DNA, 17 bp, Arabidopsis thaliana
tgcgccttccgacagtt

SEQ ID NO: 151846 - DNA, 17 bp, Arabidopsis thaliana
tgcgcgaatgtgtgaaa

SEQ ID NO: 151847 - DNA, 17 bp, Arabidopsis thaliana
tgcgcgacctatacccg

SEQ ID NO: 151848 - DNA, 17 bp, Arabidopsis thaliana
tgcgcgacttattcaat

SEQ ID NO: 151849 - DNA, 17 bp, Arabidopsis thaliana
tgcgcgagctggaggga

SEQ ID NO: 151850 - DNA, 17 bp, Arabidopsis thaliana
tgcgcgaggtcccgagt

SEQ ID NO: 151851 - DNA, 17 bp, Arabidopsis thaliana
tgcgcgatcatgacagg

SEQ ID NO: 151852 - DNA, 17 bp, Arabidopsis thaliana
tgcgcggaaagtttgca

SEQ ID NO: 151853 - DNA, 17 bp, Arabidopsis thaliana
tgcgcggaagatccgca

SEQ ID NO: 151854 - DNA, 17 bp, Arabidopsis thaliana
tgcgcggggtactacat

SEQ ID NO: 151855 - DNA, 17 bp, Arabidopsis thaliana
tgcgcgttgcttccgga

SEQ ID NO: 151856 - DNA, 17 bp, Arabidopsis thaliana
tgcgctaaatacaaatg

SEQ ID NO: 151857 - DNA, 17 bp, Arabidopsis thaliana
tgcgctaatggtgctct

SEQ ID NO: 151858 - DNA, 17 bp, Arabidopsis thaliana
tgcgctacgggaaaaat

SEQ ID NO: 151859 - DNA, 17 bp, Arabidopsis thaliana
tgcgctacgggagaaat

SEQ ID NO: 151860 - DNA, 17 bp, Arabidopsis thaliana
tgcgctaggcttgttgt

SEQ ID NO: 151861 - DNA, 17 bp, Arabidopsis thaliana
tgcgctccgtgctgcac

SEQ ID NO: 151862 - DNA, 17 bp, Arabidopsis thaliana
tgcgctcgccgcccgat

SEQ ID NO: 151863 - DNA, 17 bp, Arabidopsis thaliana
tgcgctctgatcatcaa

SEQ ID NO: 151864 - DNA, 17 bp, Arabidopsis thaliana
tgcgctctgtgctgcac

SEQ ID NO: 151865 - DNA, 17 bp, Arabidopsis thaliana
tgcgctgaagagacgtt

SEQ ID NO: 151866 - DNA, 17 bp, Arabidopsis thaliana
tgcgctgacgtggcatt

SEQ ID NO: 151867 - DNA, 17 bp, Arabidopsis thaliana
tgcgctgacgtggctgt

SEQ ID NO: 151868 - DNA, 17 bp, Arabidopsis thaliana
tgcgctgatttgattgg

SEQ ID NO: 151869 - DNA, 17 bp, Arabidopsis thaliana
tgcgctgcgattttggg

SEQ ID NO: 151870 - DNA, 17 bp, Arabidopsis thaliana
tgcgctgcgattttggt

SEQ ID NO: 151871 - DNA, 17 bp, Arabidopsis thaliana
tgcgctgcgatttttgg

SEQ ID NO: 151872 - DNA, 17 bp, Arabidopsis thaliana
tgcgctggattatgact

SEQ ID NO: 151873 - DNA, 17 bp, Arabidopsis thaliana
tgcgctgtacagattaa

SEQ ID NO: 151874 - DNA, 17 bp, Arabidopsis thaliana
tgcgctgtacagattac

SEQ ID NO: 151875 - DNA, 17 bp, Arabidopsis thaliana
tgcgctgtgtgttttct

SEQ ID NO: 151876 - DNA, 17 bp, Arabidopsis thaliana
tgcgcttaagcttttgt

SEQ ID NO: 151877 - DNA, 17 bp, Arabidopsis thaliana
tgcgcttacagggattc

SEQ ID NO: 151878 - DNA, 17 bp, Arabidopsis thaliana
tgcgcttagagacggtt

SEQ ID NO: 151879 - DNA, 17 bp, Arabidopsis thaliana
tgcgcttcatactttgc

SEQ ID NO: 151880 - DNA, 17 bp, Arabidopsis thaliana
tgcgcttcgccagacgc

SEQ ID NO: 151881 - DNA, 17 bp, Arabidopsis thaliana
tgcgcttctgctcactg

SEQ ID NO: 151882 - DNA, 17 bp, Arabidopsis thaliana
tgcgcttgaaggactgg

SEQ ID NO: 151883 - DNA, 17 bp, Arabidopsis thaliana
tgcgcttgatggacatc

SEQ ID NO: 151884 - DNA, 17 bp, Arabidopsis thaliana
tgcgcttgatggatacc

SEQ ID NO: 151885 - DNA, 17 bp, Arabidopsis thaliana
tgcgcttgattatgact

SEQ ID NO: 151886 - DNA, 17 bp, Arabidopsis thaliana
tgcgcttgattgtggat

SEQ ID NO: 151887 - DNA, 17 bp, Arabidopsis thaliana
tgcgcttggatcttctg

SEQ ID NO: 151888 - DNA, 17 bp, Arabidopsis thaliana
tgcgcttgtaatgatct

SEQ ID NO: 151889 - DNA, 17 bp, Arabidopsis thaliana
tgcgctttggccgagtg

SEQ ID NO: 151890 - DNA, 17 bp, Arabidopsis thaliana
tgcgctttgtcttgttc

SEQ ID NO: 151891 - DNA, 17 bp, Arabidopsis thaliana
tgcgcttttgccaatac

SEQ ID NO: 151892 - DNA, 17 bp, Arabidopsis thaliana
tgcgcttttgctgctta

SEQ ID NO: 151893 - DNA, 17 bp, Arabidopsis thaliana
tgcggaaaatgtgattt

SEQ ID NO: 151894 - DNA, 17 bp, Arabidopsis thaliana
tgcggaaacaggcggtt

SEQ ID NO: 151895 - DNA, 17 bp, Arabidopsis thaliana
tgcggaaacggacggtt

SEQ ID NO: 151896 - DNA, 17 bp, Arabidopsis thaliana
tgcggaaacgggcgatc

SEQ ID NO: 151897 - DNA, 17 bp, Arabidopsis thaliana
tgcggaaatcgtccagg

SEQ ID NO: 151898 - DNA, 17 bp, Arabidopsis thaliana
tgcggaacacatgcggt

SEQ ID NO: 151899 - DNA, 17 bp, Arabidopsis thaliana
tgcggaacagacagtgc

SEQ ID NO: 151900 - DNA, 17 bp, Arabidopsis thaliana
tgcggaacggagcaatc

SEQ ID NO: 151901 - DNA, 17 bp, Arabidopsis thaliana
tgcggaacgggtttggc

SEQ ID NO: 151902 - DNA, 17 bp, Arabidopsis thaliana
tgcggaagattcagggg

SEQ ID NO: 151903 - DNA, 17 bp, Arabidopsis thaliana
tgcggaagattcggggg

SEQ ID NO: 151904 - DNA, 17 bp, Arabidopsis thaliana
tgcggaagccgaagata

SEQ ID NO: 151905 - DNA, 17 bp, Arabidopsis thaliana
tgcggaaggatcattgc

SEQ ID NO: 151906 - DNA, 17 bp, Arabidopsis thaliana
tgcggaaggatcattgt

SEQ ID NO: 151907 - DNA, 17 bp, Arabidopsis thaliana
tgcggaaggctcgttca

SEQ ID NO: 151908 - DNA, 17 bp, Arabidopsis thaliana
tgcggaagggtgggaga

SEQ ID NO: 151909 - DNA, 17 bp, Arabidopsis thaliana
tgcggaatcatacagtt

SEQ ID NO: 151910 - DNA, 17 bp, Arabidopsis thaliana
tgcggaatttacaaatt

SEQ ID NO: 151911 - DNA, 17 bp, Arabidopsis thaliana
tgcggacatcatcgcta

SEQ ID NO: 151912 - DNA, 17 bp, Arabidopsis thaliana
tgcggacatgaatgagt

SEQ ID NO: 151913 - DNA, 17 bp, Arabidopsis thaliana
tgcggaccacatttgct

SEQ ID NO: 151914 - DNA, 17 bp, Arabidopsis thaliana
tgcggaccatttgatgg

SEQ ID NO: 151915 - DNA, 17 bp, Arabidopsis thaliana
tgcggaccgcttttaca

SEQ ID NO: 151916 - DNA, 17 bp, Arabidopsis thaliana
tgcggacgagaattgtg

SEQ ID NO: 151917 - DNA, 17 bp, Arabidopsis thaliana
tgcggacgggttagcta

SEQ ID NO: 151918 - DNA, 17 bp, Arabidopsis thaliana
tgcggacggtagcagtt

SEQ ID NO: 151919 - DNA, 17 bp, Arabidopsis thaliana
tgcggacggtagcggtt

SEQ ID NO: 151920 - DNA, 17 bp, Arabidopsis thaliana
tgcggactaattctgcg

SEQ ID NO: 151921 - DNA, 17 bp, Arabidopsis thaliana
tgcggactacctgcacc

SEQ ID NO: 151922 - DNA, 17 bp, Arabidopsis thaliana
tgcggactatgaatggg

SEQ ID NO: 151923 - DNA, 17 bp, Arabidopsis thaliana
tgcggactgcgggtatg

SEQ ID NO: 151924 - DNA, 17 bp, Arabidopsis thaliana
tgcggagacgaaaatgt

SEQ ID NO: 151925 - DNA, 17 bp, Arabidopsis thaliana
tgcggagatggctatga

SEQ ID NO: 151926 - DNA, 17 bp, Arabidopsis thaliana
tgcggagcaagtttatt

SEQ ID NO: 151927 - DNA, 17 bp, Arabidopsis thaliana
tgcggaggaccgagtgc

SEQ ID NO: 151928 - DNA, 17 bp, Arabidopsis thaliana
tgcggagtaccaacggc

SEQ ID NO: 151929 - DNA, 17 bp, Arabidopsis thaliana
tgcggagtcctacatcg

SEQ ID NO: 151930 - DNA, 17 bp, Arabidopsis thaliana
tgcggagttctgatggg

SEQ ID NO: 151931 - DNA, 17 bp, Arabidopsis thaliana
tgcggataaagtgatgt

SEQ ID NO: 151932 - DNA, 17 bp, Arabidopsis thaliana
tgcggataggactggat

SEQ ID NO: 151933 - DNA, 17 bp, Arabidopsis thaliana
tgcggatattttttgtc

SEQ ID NO: 151934 - DNA, 17 bp, Arabidopsis thaliana
tgcggatcatgtgagaa

SEQ ID NO: 151935 - DNA, 17 bp, Arabidopsis thaliana
tgcggatcctagtgtaa

SEQ ID NO: 151936 - DNA, 17 bp, Arabidopsis thaliana
tgcggatgaattagcta

SEQ ID NO: 151937 - DNA, 17 bp, Arabidopsis thaliana
tgcggatgggttagcaa

SEQ ID NO: 151938 - DNA, 17 bp, Arabidopsis thaliana
tgcggatgggttagcga

SEQ ID NO: 151939 - DNA, 17 bp, Arabidopsis thaliana
tgcggatgtagccaagt

SEQ ID NO: 151940 - DNA, 17 bp, Arabidopsis thaliana
tgcggcaaacgcaagtc

SEQ ID NO: 151941 - DNA, 17 bp, Arabidopsis thaliana
tgcggcaacggcaacgg

SEQ ID NO: 151942 - DNA, 17 bp, Arabidopsis thaliana
tgcggcaacggttgtgg

SEQ ID NO: 151943 - DNA, 17 bp, Arabidopsis thaliana
tgcggcaactgtttaga

SEQ ID NO: 151944 - DNA, 17 bp, Arabidopsis thaliana
tgcggcaactgtttccc

SEQ ID NO: 151945 - DNA, 17 bp, Arabidopsis thaliana
tgcggcaatgtctctag

SEQ ID NO: 151946 - DNA, 17 bp, Arabidopsis thaliana
tgcggcacgtctgcctg

SEQ ID NO: 151947 - DNA, 17 bp, Arabidopsis thaliana
tgcggcagacgcagctt

SEQ ID NO: 151948 - DNA, 17 bp, Arabidopsis thaliana
tgcggcagcggcaacgg

SEQ ID NO: 151949 - DNA, 17 bp, Arabidopsis thaliana
tgcggcagcggtagcgg

SEQ ID NO: 151950 - DNA, 17 bp, Arabidopsis thaliana
tgcggcagcttaactac

SEQ ID NO: 151951 - DNA, 17 bp, Arabidopsis thaliana
tgcggcagggagatcca

SEQ ID NO: 151952 - DNA, 17 bp, Arabidopsis thaliana
tgcggccagcaccgcgg

SEQ ID NO: 151953 - DNA, 17 bp, Arabidopsis thaliana
tgcggccagcaccgtgg

SEQ ID NO: 151954 - DNA, 17 bp, Arabidopsis thaliana
tgcggccgttagtggtg

SEQ ID NO: 151955 - DNA, 17 bp, Arabidopsis thaliana
tgcggcgacgtgggtgg

SEQ ID NO: 151956 - DNA, 17 bp, Arabidopsis thaliana
tgcggcgagatcgttct

SEQ ID NO: 151957 - DNA, 17 bp, Arabidopsis thaliana
tgcggcgatggtagcgt

SEQ ID NO: 151958 - DNA, 17 bp, Arabidopsis thaliana
tgcggcgatggtagctt

SEQ ID NO: 151959 - DNA, 17 bp, Arabidopsis thaliana
tgcggcgggctgggtaa

SEQ ID NO: 151960 - DNA, 17 bp, Arabidopsis thaliana
tgcggcgtacaaagttt

SEQ ID NO: 151961 - DNA, 17 bp, Arabidopsis thaliana
tgcggcgtaccgcgggt

SEQ ID NO: 151962 - DNA, 17 bp, Arabidopsis thaliana
tgcggcgtagccaagca

SEQ ID NO: 151963 - DNA, 17 bp, Arabidopsis thaliana
tgcggcgtagccaagcg

SEQ ID NO: 151964 - DNA, 17 bp, Arabidopsis thaliana
tgcggcgtagcgcggat

SEQ ID NO: 151965 - DNA, 17 bp, Arabidopsis thaliana
tgcggcgtagcgcgggt

SEQ ID NO: 151966 - DNA, 17 bp, Arabidopsis thaliana
tgcggctaccttggtta

SEQ ID NO: 151967 - DNA, 17 bp, Arabidopsis thaliana
tgcggctacgaggcgac

SEQ ID NO: 151968 - DNA, 17 bp, Arabidopsis thaliana
tgcggctatcagagaac

SEQ ID NO: 151969 - DNA, 17 bp, Arabidopsis thaliana
tgcggctcatcacgggt

SEQ ID NO: 151970 - DNA, 17 bp, Arabidopsis thaliana
tgcggctccgtctgctt

SEQ ID NO: 151971 - DNA, 17 bp, Arabidopsis thaliana
tgcggctcttgctggtg

SEQ ID NO: 151972 - DNA, 17 bp, Arabidopsis thaliana
tgcggctgcacctgtgg

SEQ ID NO: 151973 - DNA, 17 bp, Arabidopsis thaliana
tgcggctgcctgggtgt

SEQ ID NO: 151974 - DNA, 17 bp, Arabidopsis thaliana
tgcggctggaactgcga

SEQ ID NO: 151975 - DNA, 17 bp, Arabidopsis thaliana
tgcggctggaggtggtg

SEQ ID NO: 151976 - DNA, 17 bp, Arabidopsis thaliana
tgcggctggatcacctc

SEQ ID NO: 151977 - DNA, 17 bp, Arabidopsis thaliana
tgcggctgtccagtgtt

SEQ ID NO: 151978 - DNA, 17 bp, Arabidopsis thaliana
tgcggctgttgattggg

SEQ ID NO: 151979 - DNA, 17 bp, Arabidopsis thaliana
tgcggctgttgattgtg

SEQ ID NO: 151980 - DNA, 17 bp, Arabidopsis thaliana
tgcggcttgctatggtt

SEQ ID NO: 151981 - DNA, 17 bp, Arabidopsis thaliana
tgcggctttggctttcg

SEQ ID NO: 151982 - DNA, 17 bp, Arabidopsis thaliana
tgcggctttttttgggt

SEQ ID NO: 151983 - DNA, 17 bp, Arabidopsis thaliana
tgcgggaagcattcgca

SEQ ID NO: 151984 - DNA, 17 bp, Arabidopsis thaliana
tgcgggaagcatttaca

SEQ ID NO: 151985 - DNA, 17 bp, Arabidopsis thaliana
tgcgggaagcatttatt

SEQ ID NO: 151986 - DNA, 17 bp, Arabidopsis thaliana
tgcgggaagcatttgca

SEQ ID NO: 151987 - DNA, 17 bp, Arabidopsis thaliana
tgcgggaagcatttgta

SEQ ID NO: 151988 - DNA, 17 bp, Arabidopsis thaliana
tgcgggaagccgagata

SEQ ID NO: 151989 - DNA, 17 bp, Arabidopsis thaliana
tgcgggacctttgtgtg

SEQ ID NO: 151990 - DNA, 17 bp, Arabidopsis thaliana
tgcgggacgagtttggc

SEQ ID NO: 151991 - DNA, 17 bp, Arabidopsis thaliana
tgcgggacgggtttgac

SEQ ID NO: 151992 - DNA, 17 bp, Arabidopsis thaliana
tgcgggacgggtttggc

SEQ ID NO: 151993 - DNA, 17 bp, Arabidopsis thaliana
tgcgggacgggtttggg

SEQ ID NO: 151994 - DNA, 17 bp, Arabidopsis thaliana
tgcgggagaagccaata

SEQ ID NO: 151995 - DNA, 17 bp, Arabidopsis thaliana
tgcgggagaagtgcggt

SEQ ID NO: 151996 - DNA, 17 bp, Arabidopsis thaliana
tgcgggagagtaggacg

SEQ ID NO: 151997 - DNA, 17 bp, Arabidopsis thaliana
tgcgggagcttaatgac

SEQ ID NO: 151998 - DNA, 17 bp, Arabidopsis thaliana
tgcgggagtaactatga

SEQ ID NO: 151999 - DNA, 17 bp, Arabidopsis thaliana
tgcgggagttttatgac

SEQ ID NO: 152000 - DNA, 17 bp, Arabidopsis thaliana
tgcgggatcttcgccac

SEQ ID NO: 152001 - DNA, 17 bp, Arabidopsis thaliana
tgcgggatgaaccggaa

SEQ ID NO: 152002 - DNA, 17 bp, Arabidopsis thaliana
tgcgggatgggtttggc

SEQ ID NO: 152003 - DNA, 17 bp, Arabidopsis thaliana
tgcgggattagcgaagg

SEQ ID NO: 152004 - DNA, 17 bp, Arabidopsis thaliana
tgcgggccccacggtgg

SEQ ID NO: 152005 - DNA, 17 bp, Arabidopsis thaliana
tgcgggcctggctcatc

SEQ ID NO: 152006 - DNA, 17 bp, Arabidopsis thaliana
tgcgggccttccacagg

SEQ ID NO: 152007 - DNA, 17 bp, Arabidopsis thaliana
tgcgggcggtaccggtt

SEQ ID NO: 152008 - DNA, 17 bp, Arabidopsis thaliana
tgcgggcggtagcagtt

SEQ ID NO: 152009 - DNA, 17 bp, Arabidopsis thaliana
tgcgggcggtagcggtg

SEQ ID NO: 152010 - DNA, 17 bp, Arabidopsis thaliana
tgcgggcggtagcggtt

SEQ ID NO: 152011 - DNA, 17 bp, Arabidopsis thaliana
tgcgggcttacgatgtg

SEQ ID NO: 152012 - DNA, 17 bp, Arabidopsis thaliana
tgcggggacattggaac

SEQ ID NO: 152013 - DNA, 17 bp, Arabidopsis thaliana
tgcggggcctttgtgtg

SEQ ID NO: 152014 - DNA, 17 bp, Arabidopsis thaliana
tgcgggggaagccaata

SEQ ID NO: 152015 - DNA, 17 bp, Arabidopsis thaliana
tgcgggggaggtcatca

SEQ ID NO: 152016 - DNA, 17 bp, Arabidopsis thaliana
tgcggggtagagcagtt

SEQ ID NO: 152017 - DNA, 17 bp, Arabidopsis thaliana
tgcgggtactcatctag

SEQ ID NO: 152018 - DNA, 17 bp, Arabidopsis thaliana
tgcgggtatgatcgcat

SEQ ID NO: 152019 - DNA, 17 bp, Arabidopsis thaliana
tgcgggtcaaaatctag

SEQ ID NO: 152020 - DNA, 17 bp, Arabidopsis thaliana
tgcgggtcactacatcg

SEQ ID NO: 152021 - DNA, 17 bp, Arabidopsis thaliana
tgcgggtcttccacagg

SEQ ID NO: 152022 - DNA, 17 bp, Arabidopsis thaliana
tgcgggtgatagcggtt

SEQ ID NO: 152023 - DNA, 17 bp, Arabidopsis thaliana
tgcgggtggcagaggga

SEQ ID NO: 152024 - DNA, 17 bp, Arabidopsis thaliana
tgcgggtggtagcggtg

SEQ ID NO: 152025 - DNA, 17 bp, Arabidopsis thaliana
tgcgggtggtagcggtt

SEQ ID NO: 152026 - DNA, 17 bp, Arabidopsis thaliana
tgcgggttcaaatcccg

SEQ ID NO: 152027 - DNA, 17 bp, Arabidopsis thaliana
tgcgggttcagattgta

SEQ ID NO: 152028 - DNA, 17 bp, Arabidopsis thaliana
tgcgggttcgagccccg

SEQ ID NO: 152029 - DNA, 17 bp, Arabidopsis thaliana
tgcgggttcgagccctg

SEQ ID NO: 152030 - DNA, 17 bp, Arabidopsis thaliana
tgcgggttcgattcccg

SEQ ID NO: 152031 - DNA, 17 bp, Arabidopsis thaliana
tgcgggttgagccccgt

SEQ ID NO: 152032 - DNA, 17 bp, Arabidopsis thaliana
tgcgggtttgtgcttgt

SEQ ID NO: 152033 - DNA, 17 bp, Arabidopsis thaliana
tgcggtaaaatccattg

SEQ ID NO: 152034 - DNA, 17 bp, Arabidopsis thaliana
tgcggtaacacacggga

SEQ ID NO: 152035 - DNA, 17 bp, Arabidopsis thaliana
tgcggtaaccgcgattt

SEQ ID NO: 152036 - DNA, 17 bp, Arabidopsis thaliana
tgcggtacaccgcagct

SEQ ID NO: 152037 - DNA, 17 bp, Arabidopsis thaliana
tgcggtacaccgcaggt

SEQ ID NO: 152038 - DNA, 17 bp, Arabidopsis thaliana
tgcggtacaggagaagt

SEQ ID NO: 152039 - DNA, 17 bp, Arabidopsis thaliana
tgcggtacgggaaaagt

SEQ ID NO: 152040 - DNA, 17 bp, Arabidopsis thaliana
tgcggtacgggagaagt

SEQ ID NO: 152041 - DNA, 17 bp, Arabidopsis thaliana
tgcggtacggttcaact

SEQ ID NO: 152042 - DNA, 17 bp, Arabidopsis thaliana
tgcggtagacgcagatg

SEQ ID NO: 152043 - DNA, 17 bp, Arabidopsis thaliana
tgcggtagcggcagcgg

SEQ ID NO: 152044 - DNA, 17 bp, Arabidopsis thaliana
tgcggtatgcggaacaa

SEQ ID NO: 152045 - DNA, 17 bp, Arabidopsis thaliana
tgcggtatgctgcaggt

SEQ ID NO: 152046 - DNA, 17 bp, Arabidopsis thaliana
tgcggtcacacaagaca

SEQ ID NO: 152047 - DNA, 17 bp, Arabidopsis thaliana
tgcggtcatcatcactg

SEQ ID NO: 152048 - DNA, 17 bp, Arabidopsis thaliana
tgcggtccaaaactttg

SEQ ID NO: 152049 - DNA, 17 bp, Arabidopsis thaliana
tgcggtcctgtgttatt

SEQ ID NO: 152050 - DNA, 17 bp, Arabidopsis thaliana
tgcggtcgagtgactag

SEQ ID NO: 152051 - DNA, 17 bp, Arabidopsis thaliana
tgcggtcgagtggtggt

SEQ ID NO: 152052 - DNA, 17 bp, Arabidopsis thaliana
tgcggtcggatctgaat

SEQ ID NO: 152053 - DNA, 17 bp, Arabidopsis thaliana
tgcggtgcaggagaagt

SEQ ID NO: 152054 - DNA, 17 bp, Arabidopsis thaliana
tgcggtgcagttttggg

SEQ ID NO: 152055 - DNA, 17 bp, Arabidopsis thaliana
tgcggtgcgaaagaagt

SEQ ID NO: 152056 - DNA, 17 bp, Arabidopsis thaliana
tgcggtgcgagagaagt

SEQ ID NO: 152057 - DNA, 17 bp, Arabidopsis thaliana
tgcggtgcggaaaaaat

SEQ ID NO: 152058 - DNA, 17 bp, Arabidopsis thaliana
tgcggtgcggaagaagt

SEQ ID NO: 152059 - DNA, 17 bp, Arabidopsis thaliana
tgcggtgcgggaaaagt

SEQ ID NO: 152060 - DNA, 17 bp, Arabidopsis thaliana
tgcggtgcgggacaagt

SEQ ID NO: 152061 - DNA, 17 bp, Arabidopsis thaliana
tgcggtgcgggagaact

SEQ ID NO: 152062 - DNA, 17 bp, Arabidopsis thaliana
tgcggtgcgggagaagt

SEQ ID NO: 152063 - DNA, 17 bp, Arabidopsis thaliana
tgcggtgcgggagagtg

SEQ ID NO: 152064 - DNA, 17 bp, Arabidopsis thaliana
tgcggtgcggttcaaat

SEQ ID NO: 152065 - DNA, 17 bp, Arabidopsis thaliana
tgcggtgcggttttaag

SEQ ID NO: 152066 - DNA, 17 bp, Arabidopsis thaliana
tgcggtgcggttttact

SEQ ID NO: 152067 - DNA, 17 bp, Arabidopsis thaliana
tgcggtgcggttttgaa

SEQ ID NO: 152068 - DNA, 17 bp, Arabidopsis thaliana
tgcggtgcggttttgag

SEQ ID NO: 152069 - DNA, 17 bp, Arabidopsis thaliana
tgcggtgcggttttggg

SEQ ID NO: 152070 - DNA, 17 bp, Arabidopsis thaliana
tgcggtggcacttagat

SEQ ID NO: 152071 - DNA, 17 bp, Arabidopsis thaliana
tgcggtggtgaacttga

SEQ ID NO: 152072 - DNA, 17 bp, Arabidopsis thaliana
tgcggtggttttgggcc

SEQ ID NO: 152073 - DNA, 17 bp, Arabidopsis thaliana
tgcggtgtcttgaaggc

SEQ ID NO: 152074 - DNA, 17 bp, Arabidopsis thaliana
tgcggtgtgggagaaat

SEQ ID NO: 152075 - DNA, 17 bp, Arabidopsis thaliana
tgcggtgtgggagaagt

SEQ ID NO: 152076 - DNA, 17 bp, Arabidopsis thaliana
tgcggtgtgtctgtaac

SEQ ID NO: 152077 - DNA, 17 bp, Arabidopsis thaliana
tgcggtgttgggcagtg

SEQ ID NO: 152078 - DNA, 17 bp, Arabidopsis thaliana
tgcggttacgggcggta

SEQ ID NO: 152079 - DNA, 17 bp, Arabidopsis thaliana
tgcggttattctactag

SEQ ID NO: 152080 - DNA, 17 bp, Arabidopsis thaliana
tgcggttcaactgcgga

SEQ ID NO: 152081 - DNA, 17 bp, Arabidopsis thaliana
tgcggttcggcataaaa

SEQ ID NO: 152082 - DNA, 17 bp, Arabidopsis thaliana
tgcggttcggtacaaac

SEQ ID NO: 152083 - DNA, 17 bp, Arabidopsis thaliana
tgcggttcggttgtgtc

SEQ ID NO: 152084 - DNA, 17 bp, Arabidopsis thaliana
tgcggttctactttggc

SEQ ID NO: 152085 - DNA, 17 bp, Arabidopsis thaliana
tgcggttgcagacggta

SEQ ID NO: 152086 - DNA, 17 bp, Arabidopsis thaliana
tgcggttgcgattgcgg

SEQ ID NO: 152087 - DNA, 17 bp, Arabidopsis thaliana
tgcggttgcggacggtt

SEQ ID NO: 152088 - DNA, 17 bp, Arabidopsis thaliana
tgcggttgcgggcggta

SEQ ID NO: 152089 - DNA, 17 bp, Arabidopsis thaliana
tgcggttgcgggcggtt

SEQ ID NO: 152090 - DNA, 17 bp, Arabidopsis thaliana
tgcggttgcggttacgg

SEQ ID NO: 152091 - DNA, 17 bp, Arabidopsis thaliana
tgcggttgcggttgatt

SEQ ID NO: 152092 - DNA, 17 bp, Arabidopsis thaliana
tgcggttgcggttgcgg

SEQ ID NO: 152093 - DNA, 17 bp, Arabidopsis thaliana
tgcggttggacacgcat

SEQ ID NO: 152094 - DNA, 17 bp, Arabidopsis thaliana
tgcggttggacatgtca

SEQ ID NO: 152095 - DNA, 17 bp, Arabidopsis thaliana
tgcggttggagaagaca

SEQ ID NO: 152096 - DNA, 17 bp, Arabidopsis thaliana
tgcggttgttgcataag

SEQ ID NO: 152097 - DNA, 17 bp, Arabidopsis thaliana
tgcggtttaactgtgga

SEQ ID NO: 152098 - DNA, 17 bp, Arabidopsis thaliana
tgcggtttcagcaaaat

SEQ ID NO: 152099 - DNA, 17 bp, Arabidopsis thaliana
tgcggttttcagatttt

SEQ ID NO: 152100 - DNA, 17 bp, Arabidopsis thaliana
tgcggttttgaatgcga

SEQ ID NO: 152101 - DNA, 17 bp, Arabidopsis thaliana
tgcggttttgagtgcgg

SEQ ID NO: 152102 - DNA, 17 bp, Arabidopsis thaliana
tgcggttttgatcgcac

SEQ ID NO: 152103 - DNA, 17 bp, Arabidopsis thaliana
tgcggttttgcgattgg

SEQ ID NO: 152104 - DNA, 17 bp, Arabidopsis thaliana
tgcggttttggcgggaa

SEQ ID NO: 152105 - DNA, 17 bp, Arabidopsis thaliana
tgcggttttgggtgcgg

SEQ ID NO: 152106 - DNA, 17 bp, Arabidopsis thaliana
tgcggttttgggtgcgt

SEQ ID NO: 152107 - DNA, 17 bp, Arabidopsis thaliana
tgcggttttgtgtacgg

SEQ ID NO: 152108 - DNA, 17 bp, Arabidopsis thaliana
tgcggttttgtgtgcgg

SEQ ID NO: 152109 - DNA, 17 bp, Arabidopsis thaliana
tgcgtaaccgtatcagt

SEQ ID NO: 152110 - DNA, 17 bp, Arabidopsis thaliana
tgcgtaagttagtgctt

SEQ ID NO: 152111 - DNA, 17 bp, Arabidopsis thaliana
tgcgtaatgcgaagatc

SEQ ID NO: 152112 - DNA, 17 bp, Arabidopsis thaliana
tgcgtaattacgaatcc

SEQ ID NO: 152113 - DNA, 17 bp, Arabidopsis thaliana
tgcgtacccattgtcga

SEQ ID NO: 152114 - DNA, 17 bp, Arabidopsis thaliana
tgcgtagaatcctggcg

SEQ ID NO: 152115 - DNA, 17 bp, Arabidopsis thaliana
tgcgtagcctggtgtcg

SEQ ID NO: 152116 - DNA, 17 bp, Arabidopsis thaliana
tgcgtaggacctggcgg

SEQ ID NO: 152117 - DNA, 17 bp, Arabidopsis thaliana
tgcgtataatcctggcg

SEQ ID NO: 152118 - DNA, 17 bp, Arabidopsis thaliana
tgcgtatacggatcttg

SEQ ID NO: 152119 - DNA, 17 bp, Arabidopsis thaliana
tgcgtataggaaggcta

SEQ ID NO: 152120 - DNA, 17 bp, Arabidopsis thaliana
tgcgtatcgacccgccc

SEQ ID NO: 152121 - DNA, 17 bp, Arabidopsis thaliana
tgcgtatcgacccgtgc

SEQ ID NO: 152122 - DNA, 17 bp, Arabidopsis thaliana
tgcgtatctgattgctc

SEQ ID NO: 152123 - DNA, 17 bp, Arabidopsis thaliana
tgcgtattaggatttga

SEQ ID NO: 152124 - DNA, 17 bp, Arabidopsis thaliana
tgcgtattcagatttgc

SEQ ID NO: 152125 - DNA, 17 bp, Arabidopsis thaliana
tgcgtcaaattccatac

SEQ ID NO: 152126 - DNA, 17 bp, Arabidopsis thaliana
tgcgtcaactacggagg

SEQ ID NO: 152127 - DNA, 17 bp, Arabidopsis thaliana
tgcgtcaactgtgattg

SEQ ID NO: 152128 - DNA, 17 bp, Arabidopsis thaliana
tgcgtcacagagtcggc

SEQ ID NO: 152129 - DNA, 17 bp, Arabidopsis thaliana
tgcgtcactaatattct

SEQ ID NO: 152130 - DNA, 17 bp, Arabidopsis thaliana
tgcgtcagctacctgcc

SEQ ID NO: 152131 - DNA, 17 bp, Arabidopsis thaliana
tgcgtcagctacctgcg

SEQ ID NO: 152132 - DNA, 17 bp, Arabidopsis thaliana
tgcgtcagttacctgct

SEQ ID NO: 152133 - DNA, 17 bp, Arabidopsis thaliana
tgcgtcataggtgttcc

SEQ ID NO: 152134 - DNA, 17 bp, Arabidopsis thaliana
tgcgtccaataggattt

SEQ ID NO: 152135 - DNA, 17 bp, Arabidopsis thaliana
tgcgtccacgataattg

SEQ ID NO: 152136 - DNA, 17 bp, Arabidopsis thaliana
tgcgtccagtgaccagt

SEQ ID NO: 152137 - DNA, 17 bp, Arabidopsis thaliana
tgcgtccgacttgttga

SEQ ID NO: 152138 - DNA, 17 bp, Arabidopsis thaliana
tgcgtcctatcttcctc

SEQ ID NO: 152139 - DNA, 17 bp, Arabidopsis thaliana
tgcgtcctctagcagac

SEQ ID NO: 152140 - DNA, 17 bp, Arabidopsis thaliana
tgcgtcctgcggggcgt

SEQ ID NO: 152141 - DNA, 17 bp, Arabidopsis thaliana
tgcgtccttggattgct

SEQ ID NO: 152142 - DNA, 17 bp, Arabidopsis thaliana
tgcgtcgaagatttgag

SEQ ID NO: 152143 - DNA, 17 bp, Arabidopsis thaliana
tgcgtcgagctgtgatg

SEQ ID NO: 152144 - DNA, 17 bp, Arabidopsis thaliana
tgcgtcgccgcatatct

SEQ ID NO: 152145 - DNA, 17 bp, Arabidopsis thaliana
tgcgtcgccggcccttg

SEQ ID NO: 152146 - DNA, 17 bp, Arabidopsis thaliana
tgcgtcggagttgcgac

SEQ ID NO: 152147 - DNA, 17 bp, Arabidopsis thaliana
tgcgtcggagttgcgag

SEQ ID NO: 152148 - DNA, 17 bp, Arabidopsis thaliana
tgcgtcggatgttgatt

SEQ ID NO: 152149 - DNA, 17 bp, Arabidopsis thaliana
tgcgtcgtagccaggtt

SEQ ID NO: 152150 - DNA, 17 bp, Arabidopsis thaliana
tgcgtcgttgtgcctgg

SEQ ID NO: 152151 - DNA, 17 bp, Arabidopsis thaliana
tgcgtcgttttaagtat

SEQ ID NO: 152152 - DNA, 17 bp, Arabidopsis thaliana
tgcgtctaagcaaatgg

SEQ ID NO: 152153 - DNA, 17 bp, Arabidopsis thaliana
tgcgtctcggatatcaa

SEQ ID NO: 152154 - DNA, 17 bp, Arabidopsis thaliana
tgcgtctctgctcgggt

SEQ ID NO: 152155 - DNA, 17 bp, Arabidopsis thaliana
tgcgtctgccgcaacca

SEQ ID NO: 152156 - DNA, 17 bp, Arabidopsis thaliana
tgcgtctgcttttgtct

SEQ ID NO: 152157 - DNA, 17 bp, Arabidopsis thaliana
tgcgtctgtttgcgtct

SEQ ID NO: 152158 - DNA, 17 bp, Arabidopsis thaliana
tgcgtcttagtctgctg

SEQ ID NO: 152159 - DNA, 17 bp, Arabidopsis thaliana
tgcgtcttatttccgag

SEQ ID NO: 152160 - DNA, 17 bp, Arabidopsis thaliana
tgcgtcttccctttcct

SEQ ID NO: 152161 - DNA, 17 bp, Arabidopsis thaliana
tgcgtcttgtcttcact

SEQ ID NO: 152162 - DNA, 17 bp, Arabidopsis thaliana
tgcgtctttgactactg

SEQ ID NO: 152163 - DNA, 17 bp, Arabidopsis thaliana
tgcgtctttgactgctg

SEQ ID NO: 152164 - DNA, 17 bp, Arabidopsis thaliana
tgcgtctttgactgctt

SEQ ID NO: 152165 - DNA, 17 bp, Arabidopsis thaliana
tgcgtcttttcggctgt

SEQ ID NO: 152166 - DNA, 17 bp, Arabidopsis thaliana
tgcgtcttttcggttgt

SEQ ID NO: 152167 - DNA, 17 bp, Arabidopsis thaliana
tgcgtgactggattgcc

SEQ ID NO: 152168 - DNA, 17 bp, Arabidopsis thaliana
tgcgtgaggctggtttc

SEQ ID NO: 152169 - DNA, 17 bp, Arabidopsis thaliana
tgcgtgattgtccatta

SEQ ID NO: 152170 - DNA, 17 bp, Arabidopsis thaliana
tgcgtgcatgggtcggc

SEQ ID NO: 152171 - DNA, 17 bp, Arabidopsis thaliana
tgcgtgcctagtttgga

SEQ ID NO: 152172 - DNA, 17 bp, Arabidopsis thaliana
tgcgtgcgtttcacaag

SEQ ID NO: 152173 - DNA, 17 bp, Arabidopsis thaliana
tgcgtgctccgggcgtc

SEQ ID NO: 152174 - DNA, 17 bp, Arabidopsis thaliana
tgcgtggtaactggtat

SEQ ID NO: 152175 - DNA, 17 bp, Arabidopsis thaliana
tgcgtgtaggacactcc

SEQ ID NO: 152176 - DNA, 17 bp, Arabidopsis thaliana
tgcgtgttcgtttcacg

SEQ ID NO: 152177 - DNA, 17 bp, Arabidopsis thaliana
tgcgttaactaagttat

SEQ ID NO: 152178 - DNA, 17 bp, Arabidopsis thaliana
tgcgttaagtatgccca

SEQ ID NO: 152179 - DNA, 17 bp, Arabidopsis thaliana
tgcgttaccgaggtcgg

SEQ ID NO: 152180 - DNA, 17 bp, Arabidopsis thaliana
tgcgttacggctgagtt

SEQ ID NO: 152181 - DNA, 17 bp, Arabidopsis thaliana
tgcgttacgggagaagt

SEQ ID NO: 152182 - DNA, 17 bp, Arabidopsis thaliana
tgcgttagcttaccgga

SEQ ID NO: 152183 - DNA, 17 bp, Arabidopsis thaliana
tgcgttaggcattgggt

SEQ ID NO: 152184 - DNA, 17 bp, Arabidopsis thaliana
tgcgttagtgctggtat

SEQ ID NO: 152185 - DNA, 17 bp, Arabidopsis thaliana
tgcgttagtttgcgaag

SEQ ID NO: 152186 - DNA, 17 bp, Arabidopsis thaliana
tgcgttagtttgcggag

SEQ ID NO: 152187 - DNA, 17 bp, Arabidopsis thaliana
tgcgttatcctctagaa

SEQ ID NO: 152188 - DNA, 17 bp, Arabidopsis thaliana
tgcgttattttgcgaag

SEQ ID NO: 152189 - DNA, 17 bp, Arabidopsis thaliana
tgcgttcaaagactcga

SEQ ID NO: 152190 - DNA, 17 bp, Arabidopsis thaliana
tgcgttcaaagaggcgg

SEQ ID NO: 152191 - DNA, 17 bp, Arabidopsis thaliana
tgcgttccggtcgcagt

SEQ ID NO: 152192 - DNA, 17 bp, Arabidopsis thaliana
tgcgttcctaccaaaac

SEQ ID NO: 152193 - DNA, 17 bp, Arabidopsis thaliana
tgcgttcctaccgaggt

SEQ ID NO: 152194 - DNA, 17 bp, Arabidopsis thaliana
tgcgttcctatcaaaac

SEQ ID NO: 152195 - DNA, 17 bp, Arabidopsis thaliana
tgcgttcctgattgtag

SEQ ID NO: 152196 - DNA, 17 bp, Arabidopsis thaliana
tgcgttcggaggatctg

SEQ ID NO: 152197 - DNA, 17 bp, Arabidopsis thaliana
tgcgttcgtgaagttgc

SEQ ID NO: 152198 - DNA, 17 bp, Arabidopsis thaliana
tgcgttcgtttgcggag

SEQ ID NO: 152199 - DNA, 17 bp, Arabidopsis thaliana
tgcgttctattattgcg

SEQ ID NO: 152200 - DNA, 17 bp, Arabidopsis thaliana
tgcgttctgaagtggtg

SEQ ID NO: 152201 - DNA, 17 bp, Arabidopsis thaliana
tgcgttctgataacttg

SEQ ID NO: 152202 - DNA, 17 bp, Arabidopsis thaliana
tgcgttgactcgggcta

SEQ ID NO: 152203 - DNA, 17 bp, Arabidopsis thaliana
tgcgttgagctacgaag

SEQ ID NO: 152204 - DNA, 17 bp, Arabidopsis thaliana
tgcgttgagctgaattg

SEQ ID NO: 152205 - DNA, 17 bp, Arabidopsis thaliana
tgcgttgaggcgcagca

SEQ ID NO: 152206 - DNA, 17 bp, Arabidopsis thaliana
tgcgttgatttcaggtg

SEQ ID NO: 152207 - DNA, 17 bp, Arabidopsis thaliana
tgcgttgattttgcacc

SEQ ID NO: 152208 - DNA, 17 bp, Arabidopsis thaliana
tgcgttgccaaagtaag

SEQ ID NO: 152209 - DNA, 17 bp, Arabidopsis thaliana
tgcgttggtgaggcagg

SEQ ID NO: 152210 - DNA, 17 bp, Arabidopsis thaliana
tgcgttgtaaacgggcg

SEQ ID NO: 152211 - DNA, 17 bp, Arabidopsis thaliana
tgcgttgtacacggtcg

SEQ ID NO: 152212 - DNA, 17 bp, Arabidopsis thaliana
tgcgttgtcaggaggct

SEQ ID NO: 152213 - DNA, 17 bp, Arabidopsis thaliana
tgcgttgtcctaagttt

SEQ ID NO: 152214 - DNA, 17 bp, Arabidopsis thaliana
tgcgttgtgggtttcgg

SEQ ID NO: 152215 - DNA, 17 bp, Arabidopsis thaliana
tgcgttgttccggcttt

SEQ ID NO: 152216 - DNA, 17 bp, Arabidopsis thaliana
tgcgttgttgagtgccg

SEQ ID NO: 152217 - DNA, 17 bp, Arabidopsis thaliana
tgcgttgttggttgtga

SEQ ID NO: 152218 - DNA, 17 bp, Arabidopsis thaliana
tgcgtttaaaccagtca

SEQ ID NO: 152219 - DNA, 17 bp, Arabidopsis thaliana
tgcgtttataccagaac

SEQ ID NO: 152220 - DNA, 17 bp, Arabidopsis thaliana
tgcgtttcccaggtttg

SEQ ID NO: 152221 - DNA, 17 bp, Arabidopsis thaliana
tgcgtttctaccgaggc

SEQ ID NO: 152222 - DNA, 17 bp, Arabidopsis thaliana
tgcgtttctgccgaggc

SEQ ID NO: 152223 - DNA, 17 bp, Arabidopsis thaliana
tgcgtttgcgggagttt

SEQ ID NO: 152224 - DNA, 17 bp, Arabidopsis thaliana
tgcgtttgcgggtggta

SEQ ID NO: 152225 - DNA, 17 bp, Arabidopsis thaliana
tgcgtttggtgtctctt

SEQ ID NO: 152226 - DNA, 17 bp, Arabidopsis thaliana
tgcgtttgtgccatggc

SEQ ID NO: 152227 - DNA, 17 bp, Arabidopsis thaliana
tgcgtttgtgggcggta

SEQ ID NO: 152228 - DNA, 17 bp, Arabidopsis thaliana
tgcgtttgttccggctt

SEQ ID NO: 152229 - DNA, 17 bp, Arabidopsis thaliana
tgcgtttgttccgtctt

SEQ ID NO: 152230 - DNA, 17 bp, Arabidopsis thaliana
tgcgttttaagcttttc

SEQ ID NO: 152231 - DNA, 17 bp, Arabidopsis thaliana
tgcgttttacagtgcgg

SEQ ID NO: 152232 - DNA, 17 bp, Arabidopsis thaliana
tgcgttttcaagcacat

SEQ ID NO: 152233 - DNA, 17 bp, Arabidopsis thaliana
tgcgttttcatgcacat

SEQ ID NO: 152234 - DNA, 17 bp, Arabidopsis thaliana
tgcgttttctctaccgt

SEQ ID NO: 152235 - DNA, 17 bp, Arabidopsis thaliana
tgcgttttgcggtgcga

SEQ ID NO: 152236 - DNA, 17 bp, Arabidopsis thaliana
tgcgttttgcggtgcgg

SEQ ID NO: 152237 - DNA, 17 bp, Arabidopsis thaliana
tgcgttttgtggtgtgg

SEQ ID NO: 152238 - DNA, 17 bp, Arabidopsis thaliana
tgcgttttgttggatca

SEQ ID NO: 152239 - DNA, 17 bp, Arabidopsis thaliana
tgcgttttttcttgact

SEQ ID NO: 152240 - DNA, 17 bp, Arabidopsis thaliana
tgctaaaacactctcca

SEQ ID NO: 152241 - DNA, 17 bp, Arabidopsis thaliana
tgctaaaagtcttagag

SEQ ID NO: 152242 - DNA, 17 bp, Arabidopsis thaliana
tgctaaaagtcttagga

SEQ ID NO: 152243 - DNA, 17 bp, Arabidopsis thaliana
tgctaaaagtggtgaaa

SEQ ID NO: 152244 - DNA, 17 bp, Arabidopsis thaliana
tgctaaacccgattagg

SEQ ID NO: 152245 - DNA, 17 bp, Arabidopsis thaliana
tgctaaaggctcagatc

SEQ ID NO: 152246 - DNA, 17 bp, Arabidopsis thaliana
tgctaaaggtaagtccc

SEQ ID NO: 152247 - DNA, 17 bp, Arabidopsis thaliana
tgctaaagtgatgatgt

SEQ ID NO: 152248 - DNA, 17 bp, Arabidopsis thaliana
tgctaaatcttttggct

SEQ ID NO: 152249 - DNA, 17 bp, Arabidopsis thaliana
tgctaacactggtgtac

SEQ ID NO: 152250 - DNA, 17 bp, Arabidopsis thaliana
tgctaacagggaaaacg

SEQ ID NO: 152251 - DNA, 17 bp, Arabidopsis thaliana
tgctaacccatatcagc

SEQ ID NO: 152252 - DNA, 17 bp, Arabidopsis thaliana
tgctaacgcaatgtgat

SEQ ID NO: 152253 - DNA, 17 bp, Arabidopsis thaliana
tgctaacggaaacacta

SEQ ID NO: 152254 - DNA, 17 bp, Arabidopsis thaliana
tgctaacgtcgcagggt

SEQ ID NO: 152255 - DNA, 17 bp, Arabidopsis thaliana
tgctaacgtcgcaggtt

SEQ ID NO: 152256 - DNA, 17 bp, Arabidopsis thaliana
tgctaactcaggtgatc

SEQ ID NO: 152257 - DNA, 17 bp, Arabidopsis thaliana
tgctaactcaggtgatt

SEQ ID NO: 152258 - DNA, 17 bp, Arabidopsis thaliana
tgctaactcataggatc

SEQ ID NO: 152259 - DNA, 17 bp, Arabidopsis thaliana
tgctaactcataggatt

SEQ ID NO: 152260 - DNA, 17 bp, Arabidopsis thaliana
tgctaactcgccaccac

SEQ ID NO: 152261 - DNA, 17 bp, Arabidopsis thaliana
tgctaactctcgtgatt

SEQ ID NO: 152262 - DNA, 17 bp, Arabidopsis thaliana
tgctaacttagtttacc

SEQ ID NO: 152263 - DNA, 17 bp, Arabidopsis thaliana
tgctaagaatgtctttg

SEQ ID NO: 152264 - DNA, 17 bp, Arabidopsis thaliana
tgctaagcgaacggtga

SEQ ID NO: 152265 - DNA, 17 bp, Arabidopsis thaliana
tgctaaggtgtgactga

SEQ ID NO: 152266 - DNA, 17 bp, Arabidopsis thaliana
tgctaaggttgtctggt

SEQ ID NO: 152267 - DNA, 17 bp, Arabidopsis thaliana
tgctaagtccaaggctg

SEQ ID NO: 152268 - DNA, 17 bp, Arabidopsis thaliana
tgctaagtgatgaccat

SEQ ID NO: 152269 - DNA, 17 bp, Arabidopsis thaliana
tgctaagttgttcgttt

SEQ ID NO: 152270 - DNA, 17 bp, Arabidopsis thaliana
tgctaagtttggccgca

SEQ ID NO: 152271 - DNA, 17 bp, Arabidopsis thaliana
tgctaataccccgtagg

SEQ ID NO: 152272 - DNA, 17 bp, Arabidopsis thaliana
tgctaatccatcggcaa

SEQ ID NO: 152273 - DNA, 17 bp, Arabidopsis thaliana
tgctaatcctcaggatc

SEQ ID NO: 152274 - DNA, 17 bp, Arabidopsis thaliana
tgctaatcttacctccc

SEQ ID NO: 152275 - DNA, 17 bp, Arabidopsis thaliana
tgctaatcttacctctg

SEQ ID NO: 152276 - DNA, 17 bp, Arabidopsis thaliana
tgctaatcttcagggcc

SEQ ID NO: 152277 - DNA, 17 bp, Arabidopsis thaliana
tgctaatgatctcgatg

SEQ ID NO: 152278 - DNA, 17 bp, Arabidopsis thaliana
tgctaattcataggatc

SEQ ID NO: 152279 - DNA, 17 bp, Arabidopsis thaliana
tgctaattcatgattgt

SEQ ID NO: 152280 - DNA, 17 bp, Arabidopsis thaliana
tgctacaaccttcaatg

SEQ ID NO: 152281 - DNA, 17 bp, Arabidopsis thaliana
tgctacaacggccttgg

SEQ ID NO: 152282 - DNA, 17 bp, Arabidopsis thaliana
tgctacaatggccggga

SEQ ID NO: 152283 - DNA, 17 bp, Arabidopsis thaliana
tgctacactgatggtga

SEQ ID NO: 152284 - DNA, 17 bp, Arabidopsis thaliana
tgctacagaaagtttgt

SEQ ID NO: 152285 - DNA, 17 bp, Arabidopsis thaliana
tgctacagagtgaattt

SEQ ID NO: 152286 - DNA, 17 bp, Arabidopsis thaliana
tgctacagccgataatg

SEQ ID NO: 152287 - DNA, 17 bp, Arabidopsis thaliana
tgctacatacgattggc

SEQ ID NO: 152288 - DNA, 17 bp, Arabidopsis thaliana
tgctacatcttggttgt

SEQ ID NO: 152289 - DNA, 17 bp, Arabidopsis thaliana
tgctacatggccgacct

SEQ ID NO: 152290 - DNA, 17 bp, Arabidopsis thaliana
tgctacatggctaagtc

SEQ ID NO: 152291 - DNA, 17 bp, Arabidopsis thaliana
tgctacatgtcagcttc

SEQ ID NO: 152292 - DNA, 17 bp, Arabidopsis thaliana
tgctacatgtgactttc

SEQ ID NO: 152293 - DNA, 17 bp, Arabidopsis thaliana
tgctacatttgccatgt

SEQ ID NO: 152294 - DNA, 17 bp, Arabidopsis thaliana
tgctaccacccgcaaac

SEQ ID NO: 152295 - DNA, 17 bp, Arabidopsis thaliana
tgctaccatttgcctga

SEQ ID NO: 152296 - DNA, 17 bp, Arabidopsis thaliana
tgctaccgagaccggtt

SEQ ID NO: 152297 - DNA, 17 bp, Arabidopsis thaliana
tgctacctgggtttccg

SEQ ID NO: 152298 - DNA, 17 bp, Arabidopsis thaliana
tgctacctggttgatcc

SEQ ID NO: 152299 - DNA, 17 bp, Arabidopsis thaliana
tgctacgaatttgcgag

SEQ ID NO: 152300 - DNA, 17 bp, Arabidopsis thaliana
tgctacgacaaacataa

SEQ ID NO: 152301 - DNA, 17 bp, Arabidopsis thaliana
tgctacgacaaattgct

SEQ ID NO: 152302 - DNA, 17 bp, Arabidopsis thaliana
tgctacgagggaaccgc

SEQ ID NO: 152303 - DNA, 17 bp, Arabidopsis thaliana
tgctacgccgctgtttt

SEQ ID NO: 152304 - DNA, 17 bp, Arabidopsis thaliana
tgctacgtggcaagcta

SEQ ID NO: 152305 - DNA, 17 bp, Arabidopsis thaliana
tgctactccgatcgtcc

SEQ ID NO: 152306 - DNA, 17 bp, Arabidopsis thaliana
tgctactcgccaatgat

SEQ ID NO: 152307 - DNA, 17 bp, Arabidopsis thaliana
tgctactcgcgtgcggt

SEQ ID NO: 152308 - DNA, 17 bp, Arabidopsis thaliana
tgctactgagctaatga

SEQ ID NO: 152309 - DNA, 17 bp, Arabidopsis thaliana
tgctactgtctggacca

SEQ ID NO: 152310 - DNA, 17 bp, Arabidopsis thaliana
tgctactgtgactcaag

SEQ ID NO: 152311 - DNA, 17 bp, Arabidopsis thaliana
tgctacttcttggttgg

SEQ ID NO: 152312 - DNA, 17 bp, Arabidopsis thaliana
tgctacttcttggttgt

SEQ ID NO: 152313 - DNA, 17 bp, Arabidopsis thaliana
tgctacttgcgagttat

SEQ ID NO: 152314 - DNA, 17 bp, Arabidopsis thaliana
tgctacttgctagttat

SEQ ID NO: 152315 - DNA, 17 bp, Arabidopsis thaliana
tgctacttggataggtc

SEQ ID NO: 152316 - DNA, 17 bp, Arabidopsis thaliana
tgctacttgtgatgtac

SEQ ID NO: 152317 - DNA, 17 bp, Arabidopsis thaliana
tgctactttcaagacag

SEQ ID NO: 152318 - DNA, 17 bp, Arabidopsis thaliana
tgctactttcctttgcg

SEQ ID NO: 152319 - DNA, 17 bp, Arabidopsis thaliana
tgctagatcattgcggt

SEQ ID NO: 152320 - DNA, 17 bp, Arabidopsis thaliana
tgctagatccacacttg

SEQ ID NO: 152321 - DNA, 17 bp, Arabidopsis thaliana
tgctaggcgaagcggtg

SEQ ID NO: 152322 - DNA, 17 bp, Arabidopsis thaliana
tgctagggagtttctac

SEQ ID NO: 152323 - DNA, 17 bp, Arabidopsis thaliana
tgctagtcctgggcgtt

SEQ ID NO: 152324 - DNA, 17 bp, Arabidopsis thaliana
tgctataaccgtattgc

SEQ ID NO: 152325 - DNA, 17 bp, Arabidopsis thaliana
tgctataccagtctttg

SEQ ID NO: 152326 - DNA, 17 bp, Arabidopsis thaliana
tgctataccttttgcgc

SEQ ID NO: 152327 - DNA, 17 bp, Arabidopsis thaliana
tgctataggttttttcg

SEQ ID NO: 152328 - DNA, 17 bp, Arabidopsis thaliana
tgctatatttgccagat

SEQ ID NO: 152329 - DNA, 17 bp, Arabidopsis thaliana
tgctatcaaatatctct

SEQ ID NO: 152330 - DNA, 17 bp, Arabidopsis thaliana
tgctatcagactcatcg

SEQ ID NO: 152331 - DNA, 17 bp, Arabidopsis thaliana
tgctatcaggtttgtgc

SEQ ID NO: 152332 - DNA, 17 bp, Arabidopsis thaliana
tgctatccaccgtttgt

SEQ ID NO: 152333 - DNA, 17 bp, Arabidopsis thaliana
tgctatccgagaacaat

SEQ ID NO: 152334 - DNA, 17 bp, Arabidopsis thaliana
tgctatctcgccggagg

SEQ ID NO: 152335 - DNA, 17 bp, Arabidopsis thaliana
tgctatctgtacagcgc

SEQ ID NO: 152336 - DNA, 17 bp, Arabidopsis thaliana
tgctatctttacagtta

SEQ ID NO: 152337 - DNA, 17 bp, Arabidopsis thaliana
tgctatctttacagttg

SEQ ID NO: 152338 - DNA, 17 bp, Arabidopsis thaliana
tgctatgaagtctttgg

SEQ ID NO: 152339 - DNA, 17 bp, Arabidopsis thaliana
tgctatgactttttgtc

SEQ ID NO: 152340 - DNA, 17 bp, Arabidopsis thaliana
tgctatgagtatccgtt

SEQ ID NO: 152341 - DNA, 17 bp, Arabidopsis thaliana
tgctatgcgtcctatct

SEQ ID NO: 152342 - DNA, 17 bp, Arabidopsis thaliana
tgctatgctccaaatta

SEQ ID NO: 152343 - DNA, 17 bp, Arabidopsis thaliana
tgctatgctccaaattt

SEQ ID NO: 152344 - DNA, 17 bp, Arabidopsis thaliana
tgctatgctgatgttga

SEQ ID NO: 152345 - DNA, 17 bp, Arabidopsis thaliana
tgctatgcttcagagtg

SEQ ID NO: 152346 - DNA, 17 bp, Arabidopsis thaliana
tgctatgcttctggatt

SEQ ID NO: 152347 - DNA, 17 bp, Arabidopsis thaliana
tgctatggtttcaggcc

SEQ ID NO: 152348 - DNA, 17 bp, Arabidopsis thaliana
tgctatgtcacgtttca

SEQ ID NO: 152349 - DNA, 17 bp, Arabidopsis thaliana
tgctatgtccatcgccg

SEQ ID NO: 152350 - DNA, 17 bp, Arabidopsis thaliana
tgctattattcgcagac

SEQ ID NO: 152351 - DNA, 17 bp, Arabidopsis thaliana
tgctattcaccctaatg

SEQ ID NO: 152352 - DNA, 17 bp, Arabidopsis thaliana
tgctattctggtatgca

SEQ ID NO: 152353 - DNA, 17 bp, Arabidopsis thaliana
tgctattgaattaccac

SEQ ID NO: 152354 - DNA, 17 bp, Arabidopsis thaliana
tgctattgatagtgcca

SEQ ID NO: 152355 - DNA, 17 bp, Arabidopsis thaliana
tgctattggcaaagcgg

SEQ ID NO: 152356 - DNA, 17 bp, Arabidopsis thaliana
tgctattgttgtgccta

SEQ ID NO: 152357 - DNA, 17 bp, Arabidopsis thaliana
tgctattgttgtgcctg

SEQ ID NO: 152358 - DNA, 17 bp, Arabidopsis thaliana
tgctattgttgtggctg

SEQ ID NO: 152359 - DNA, 17 bp, Arabidopsis thaliana
tgctattgttgttgact

SEQ ID NO: 152360 - DNA, 17 bp, Arabidopsis thaliana
tgctatttcctcttgag

SEQ ID NO: 152361 - DNA, 17 bp, Arabidopsis thaliana
tgctatttggacattga

SEQ ID NO: 152362 - DNA, 17 bp, Arabidopsis thaliana
tgctatttgggtgatcg

SEQ ID NO: 152363 - DNA, 17 bp, Arabidopsis thaliana
tgctatttttcttaagc

SEQ ID NO: 152364 - DNA, 17 bp, Arabidopsis thaliana
tgctcaaactcgtcctg

SEQ ID NO: 152365 - DNA, 17 bp, Arabidopsis thaliana
tgctcaaacttatagac

SEQ ID NO: 152366 - DNA, 17 bp, Arabidopsis thaliana
tgctcaaagtgtcacag

SEQ ID NO: 152367 - DNA, 17 bp, Arabidopsis thaliana
tgctcaaccgtggcact

SEQ ID NO: 152368 - DNA, 17 bp, Arabidopsis thaliana
tgctcaacggaccaccc

SEQ ID NO: 152369 - DNA, 17 bp, Arabidopsis thaliana
tgctcaacggaccactc

SEQ ID NO: 152370 - DNA, 17 bp, Arabidopsis thaliana
tgctcaactaatctgtg

SEQ ID NO: 152371 - DNA, 17 bp, Arabidopsis thaliana
tgctcaactgtcacaga

SEQ ID NO: 152372 - DNA, 17 bp, Arabidopsis thaliana
tgctcaagccgactatt

SEQ ID NO: 152373 - DNA, 17 bp, Arabidopsis thaliana
tgctcaagtacacggga

SEQ ID NO: 152374 - DNA, 17 bp, Arabidopsis thaliana
tgctcaagtgactgttc

SEQ ID NO: 152375 - DNA, 17 bp, Arabidopsis thaliana
tgctcaataatctccaa

SEQ ID NO: 152376 - DNA, 17 bp, Arabidopsis thaliana
tgctcaatcttttgttc

SEQ ID NO: 152377 - DNA, 17 bp, Arabidopsis thaliana
tgctcacaactctatct

SEQ ID NO: 152378 - DNA, 17 bp, Arabidopsis thaliana
tgctcacaataagaagg

SEQ ID NO: 152379 - DNA, 17 bp, Arabidopsis thaliana
tgctcacagctctatct

SEQ ID NO: 152380 - DNA, 17 bp, Arabidopsis thaliana
tgctcacagctctccct

SEQ ID NO: 152381 - DNA, 17 bp, Arabidopsis thaliana
tgctcacatctgcgcat

SEQ ID NO: 152382 - DNA, 17 bp, Arabidopsis thaliana
tgctcacattgacagga

SEQ ID NO: 152383 - DNA, 17 bp, Arabidopsis thaliana
tgctcaccatgttgcct

SEQ ID NO: 152384 - DNA, 17 bp, Arabidopsis thaliana
tgctcacccctctttct

SEQ ID NO: 152385 - DNA, 17 bp, Arabidopsis thaliana
tgctcacccctttctgt

SEQ ID NO: 152386 - DNA, 17 bp, Arabidopsis thaliana
tgctcacccctttcttt

SEQ ID NO: 152387 - DNA, 17 bp, Arabidopsis thaliana
tgctcaccctctttctg

SEQ ID NO: 152388 - DNA, 17 bp, Arabidopsis thaliana
tgctcacctccctttct

SEQ ID NO: 152389 - DNA, 17 bp, Arabidopsis thaliana
tgctcacctcctttctg

SEQ ID NO: 152390 - DNA, 17 bp, Arabidopsis thaliana
tgctcacctccttttct

SEQ ID NO: 152391 - DNA, 17 bp, Arabidopsis thaliana
tgctcacctctccttct

SEQ ID NO: 152392 - DNA, 17 bp, Arabidopsis thaliana
tgctcacctctctctct

SEQ ID NO: 152393 - DNA, 17 bp, Arabidopsis thaliana
tgctcacctctctctgt

SEQ ID NO: 152394 - DNA, 17 bp, Arabidopsis thaliana
tgctcacctctcttctg

SEQ ID NO: 152395 - DNA, 17 bp, Arabidopsis thaliana
tgctcacctctcttctt

SEQ ID NO: 152396 - DNA, 17 bp, Arabidopsis thaliana
tgctcacctctcttgct

SEQ ID NO: 152397 - DNA, 17 bp, Arabidopsis thaliana
tgctcacctctctttct

SEQ ID NO: 152398 - DNA, 17 bp, Arabidopsis thaliana
tgctcacctctctttgt

SEQ ID NO: 152399 - DNA, 17 bp, Arabidopsis thaliana
tgctcacctctcttttt

SEQ ID NO: 152400 - DNA, 17 bp, Arabidopsis thaliana
tgctcacctctttctgt

SEQ ID NO: 152401 - DNA, 17 bp, Arabidopsis thaliana
tgctcacctctttcttt

SEQ ID NO: 152402 - DNA, 17 bp, Arabidopsis thaliana
tgctcacctcttttctg

SEQ ID NO: 152403 - DNA, 17 bp, Arabidopsis thaliana
tgctcacctctttttct

SEQ ID NO: 152404 - DNA, 17 bp, Arabidopsis thaliana
tgctcacctgtccctgt

SEQ ID NO: 152405 - DNA, 17 bp, Arabidopsis thaliana
tgctcaccttctttctg

SEQ ID NO: 152406 - DNA, 17 bp, Arabidopsis thaliana
tgctcacctttctgtca

SEQ ID NO: 152407 - DNA, 17 bp, Arabidopsis thaliana
tgctcacctttctttct

SEQ ID NO: 152408 - DNA, 17 bp, Arabidopsis thaliana
tgctcacgacgtggcgg

SEQ ID NO: 152409 - DNA, 17 bp, Arabidopsis thaliana
tgctcacggattacggt

SEQ ID NO: 152410 - DNA, 17 bp, Arabidopsis thaliana
tgctcacggattctgat

SEQ ID NO: 152411 - DNA, 17 bp, Arabidopsis thaliana
tgctcacgttcgctctg

SEQ ID NO: 152412 - DNA, 17 bp, Arabidopsis thaliana
tgctcactaagctcagg

SEQ ID NO: 152413 - DNA, 17 bp, Arabidopsis thaliana
tgctcactgctctacct

SEQ ID NO: 152414 - DNA, 17 bp, Arabidopsis thaliana
tgctcactgctctatct

SEQ ID NO: 152415 - DNA, 17 bp, Arabidopsis thaliana
tgctcactgctctattt

SEQ ID NO: 152416 - DNA, 17 bp, Arabidopsis thaliana
tgctcactgctcttctt

SEQ ID NO: 152417 - DNA, 17 bp, Arabidopsis thaliana
tgctcactgctctttct

SEQ ID NO: 152418 - DNA, 17 bp, Arabidopsis thaliana
tgctcactgttctatct

SEQ ID NO: 152419 - DNA, 17 bp, Arabidopsis thaliana
tgctcacttctctatct

SEQ ID NO: 152420 - DNA, 17 bp, Arabidopsis thaliana
tgctcagaatgcccttt

SEQ ID NO: 152421 - DNA, 17 bp, Arabidopsis thaliana
tgctcagacttggaaga

SEQ ID NO: 152422 - DNA, 17 bp, Arabidopsis thaliana
tgctcagacttggacta

SEQ ID NO: 152423 - DNA, 17 bp, Arabidopsis thaliana
tgctcagatcacggtct

SEQ ID NO: 152424 - DNA, 17 bp, Arabidopsis thaliana
tgctcagattgctcttg

SEQ ID NO: 152425 - DNA, 17 bp, Arabidopsis thaliana
tgctcagccctttgtcg

SEQ ID NO: 152426 - DNA, 17 bp, Arabidopsis thaliana
tgctcagcggataaacc

SEQ ID NO: 152427 - DNA, 17 bp, Arabidopsis thaliana
tgctcagctgtatttgc

SEQ ID NO: 152428 - DNA, 17 bp, Arabidopsis thaliana
tgctcaggaggtgcgat

SEQ ID NO: 152429 - DNA, 17 bp, Arabidopsis thaliana
tgctcagggccagtcca

SEQ ID NO: 152430 - DNA, 17 bp, Arabidopsis thaliana
tgctcaggtctgcttag

SEQ ID NO: 152431 - DNA, 17 bp, Arabidopsis thaliana
tgctcaggtgtctttgc

SEQ ID NO: 152432 - DNA, 17 bp, Arabidopsis thaliana
tgctcagtagactgagc

SEQ ID NO: 152433 - DNA, 17 bp, Arabidopsis thaliana
tgctcagttgcgcttct

SEQ ID NO: 152434 - DNA, 17 bp, Arabidopsis thaliana
tgctcatcaacaactgc

SEQ ID NO: 152435 - DNA, 17 bp, Arabidopsis thaliana
tgctcatcagcgcctga

SEQ ID NO: 152436 - DNA, 17 bp, Arabidopsis thaliana
tgctcatccattgattt

SEQ ID NO: 152437 - DNA, 17 bp, Arabidopsis thaliana
tgctcatcgacaaagtg

SEQ ID NO: 152438 - DNA, 17 bp, Arabidopsis thaliana
tgctcatcggtggtggc

SEQ ID NO: 152439 - DNA, 17 bp, Arabidopsis thaliana
tgctcatcttacatggg

SEQ ID NO: 152440 - DNA, 17 bp, Arabidopsis thaliana
tgctcatcttcagcatg

SEQ ID NO: 152441 - DNA, 17 bp, Arabidopsis thaliana
tgctcatgaccggtcct

SEQ ID NO: 152442 - DNA, 17 bp, Arabidopsis thaliana
tgctcatgatctcgccg

SEQ ID NO: 152443 - DNA, 17 bp, Arabidopsis thaliana
tgctcatgctgacgttg

SEQ ID NO: 152444 - DNA, 17 bp, Arabidopsis thaliana
tgctcatgctgctcata

SEQ ID NO: 152445 - DNA, 17 bp, Arabidopsis thaliana
tgctcatgggctaattg

SEQ ID NO: 152446 - DNA, 17 bp, Arabidopsis thaliana
tgctcatgggcttttgg

SEQ ID NO: 152447 - DNA, 17 bp, Arabidopsis thaliana
tgctcatgtgagtgacc

SEQ ID NO: 152448 - DNA, 17 bp, Arabidopsis thaliana
tgctcatgtggcttgtc

SEQ ID NO: 152449 - DNA, 17 bp, Arabidopsis thaliana
tgctcattggttgacca

SEQ ID NO: 152450 - DNA, 17 bp, Arabidopsis thaliana
tgctcatttgggatgtc

SEQ ID NO: 152451 - DNA, 17 bp, Arabidopsis thaliana
tgctcattttgttattt

SEQ ID NO: 152452 - DNA, 17 bp, Arabidopsis thaliana
tgctccaaaatgtctcc

SEQ ID NO: 152453 - DNA, 17 bp, Arabidopsis thaliana
tgctccaatcatgcact

SEQ ID NO: 152454 - DNA, 17 bp, Arabidopsis thaliana
tgctccacctcgtggac

SEQ ID NO: 152455 - DNA, 17 bp, Arabidopsis thaliana
tgctccaccttgatctg

SEQ ID NO: 152456 - DNA, 17 bp, Arabidopsis thaliana
tgctccacgcgctacca

SEQ ID NO: 152457 - DNA, 17 bp, Arabidopsis thaliana
tgctccagaatgctcaa

SEQ ID NO: 152458 - DNA, 17 bp, Arabidopsis thaliana
tgctccagaatgctcca

SEQ ID NO: 152459 - DNA, 17 bp, Arabidopsis thaliana
tgctccagcaaggatga

SEQ ID NO: 152460 - DNA, 17 bp, Arabidopsis thaliana
tgctccaggctgccagg

SEQ ID NO: 152461 - DNA, 17 bp, Arabidopsis thaliana
tgctcccggtaggacct

SEQ ID NO: 152462 - DNA, 17 bp, Arabidopsis thaliana
tgctccctaagatggta

SEQ ID NO: 152463 - DNA, 17 bp, Arabidopsis thaliana
tgctccgatgaatgata

SEQ ID NO: 152464 - DNA, 17 bp, Arabidopsis thaliana
tgctccgcaacggttta

SEQ ID NO: 152465 - DNA, 17 bp, Arabidopsis thaliana
tgctccgccatcgacgt

SEQ ID NO: 152466 - DNA, 17 bp, Arabidopsis thaliana
tgctccgctattctgcc

SEQ ID NO: 152467 - DNA, 17 bp, Arabidopsis thaliana
tgctccggaaagagaag

SEQ ID NO: 152468 - DNA, 17 bp, Arabidopsis thaliana
tgctccggatgaatctg

SEQ ID NO: 152469 - DNA, 17 bp, Arabidopsis thaliana
tgctccggcggagagac

SEQ ID NO: 152470 - DNA, 17 bp, Arabidopsis thaliana
tgctccggcttaagcac

SEQ ID NO: 152471 - DNA, 17 bp, Arabidopsis thaliana
tgctccgggcgtcggcc

SEQ ID NO: 152472 - DNA, 17 bp, Arabidopsis thaliana
tgctccggtcgggtgga

SEQ ID NO: 152473 - DNA, 17 bp, Arabidopsis thaliana
tgctccgtaccgcttga

SEQ ID NO: 152474 - DNA, 17 bp, Arabidopsis thaliana
tgctccgttcttatggg

SEQ ID NO: 152475 - DNA, 17 bp, Arabidopsis thaliana
tgctcctaagtgtgcgt

SEQ ID NO: 152476 - DNA, 17 bp, Arabidopsis thaliana
tgctcctcagccaagac

SEQ ID NO: 152477 - DNA, 17 bp, Arabidopsis thaliana
tgctcctccaattgtga

SEQ ID NO: 152478 - DNA, 17 bp, Arabidopsis thaliana
tgctcctcgtcggtgat

SEQ ID NO: 152479 - DNA, 17 bp, Arabidopsis thaliana
tgctcctctaattccta

SEQ ID NO: 152480 - DNA, 17 bp, Arabidopsis thaliana
tgctcctcttgacgaat

SEQ ID NO: 152481 - DNA, 17 bp, Arabidopsis thaliana
tgctcctgggatgataa

SEQ ID NO: 152482 - DNA, 17 bp, Arabidopsis thaliana
tgctccttggggttata

SEQ ID NO: 152483 - DNA, 17 bp, Arabidopsis thaliana
tgctccttggggttgta

SEQ ID NO: 152484 - DNA, 17 bp, Arabidopsis thaliana
tgctccttggtgttgta

SEQ ID NO: 152485 - DNA, 17 bp, Arabidopsis thaliana
tgctcctttgtatcttc

SEQ ID NO: 152486 - DNA, 17 bp, Arabidopsis thaliana
tgctcgaaacttgagag

SEQ ID NO: 152487 - DNA, 17 bp, Arabidopsis thaliana
tgctcgaagatctgcct

SEQ ID NO: 152488 - DNA, 17 bp, Arabidopsis thaliana
tgctcgactacgttgga

SEQ ID NO: 152489 - DNA, 17 bp, Arabidopsis thaliana
tgctcgcctccttggtg

SEQ ID NO: 152490 - DNA, 17 bp, Arabidopsis thaliana
tgctcgcctctctttct

SEQ ID NO: 152491 - DNA, 17 bp, Arabidopsis thaliana
tgctcgcggctcgagtc

SEQ ID NO: 152492 - DNA, 17 bp, Arabidopsis thaliana
tgctcgcggtaactagg

SEQ ID NO: 152493 - DNA, 17 bp, Arabidopsis thaliana
tgctcgcggtcgtgatt

SEQ ID NO: 152494 - DNA, 17 bp, Arabidopsis thaliana
tgctcgcggtggtacag

SEQ ID NO: 152495 - DNA, 17 bp, Arabidopsis thaliana
tgctcgcggtggtccag

SEQ ID NO: 152496 - DNA, 17 bp, Arabidopsis thaliana
tgctcgctaagctcagg

SEQ ID NO: 152497 - DNA, 17 bp, Arabidopsis thaliana
tgctcgctttgacattt

SEQ ID NO: 152498 - DNA, 17 bp, Arabidopsis thaliana
tgctcggacccggtcgc

SEQ ID NO: 152499 - DNA, 17 bp, Arabidopsis thaliana
tgctcggccgagtgttg

SEQ ID NO: 152500 - DNA, 17 bp, Arabidopsis thaliana
tgctcggctacagcgcg

SEQ ID NO: 152501 - DNA, 17 bp, Arabidopsis thaliana
tgctcgggctgttgatc

SEQ ID NO: 152502 - DNA, 17 bp, Arabidopsis thaliana
tgctcgtagatgggatg

SEQ ID NO: 152503 - DNA, 17 bp, Arabidopsis thaliana
tgctcgtcaaagatcag

SEQ ID NO: 152504 - DNA, 17 bp, Arabidopsis thaliana
tgctcgtcgaacatttc

SEQ ID NO: 152505 - DNA, 17 bp, Arabidopsis thaliana
tgctcgtctgataccaa

SEQ ID NO: 152506 - DNA, 17 bp, Arabidopsis thaliana
tgctcgtgatgttggat

SEQ ID NO: 152507 - DNA, 17 bp, Arabidopsis thaliana
tgctcgtgcggtcgtgc

SEQ ID NO: 152508 - DNA, 17 bp, Arabidopsis thaliana
tgctcgtgctggtgatc

SEQ ID NO: 152509 - DNA, 17 bp, Arabidopsis thaliana
tgctcgttcatgttctc

SEQ ID NO: 152510 - DNA, 17 bp, Arabidopsis thaliana
tgctcgttttataaaag

SEQ ID NO: 152511 - DNA, 17 bp, Arabidopsis thaliana
tgctctaaaccgttgcg

SEQ ID NO: 152512 - DNA, 17 bp, Arabidopsis thaliana
tgctctaacacccgcac

SEQ ID NO: 152513 - DNA, 17 bp, Arabidopsis thaliana
tgctctaaggtgctgac

SEQ ID NO: 152514 - DNA, 17 bp, Arabidopsis thaliana
tgctctaaggttgtgtg

SEQ ID NO: 152515 - DNA, 17 bp, Arabidopsis thaliana
tgctctaagttgcccat

SEQ ID NO: 152516 - DNA, 17 bp, Arabidopsis thaliana
tgctctacagtcgtggg

SEQ ID NO: 152517 - DNA, 17 bp, Arabidopsis thaliana
tgctctactcgaccact

SEQ ID NO: 152518 - DNA, 17 bp, Arabidopsis thaliana
tgctctactcgacctgg

SEQ ID NO: 152519 - DNA, 17 bp, Arabidopsis thaliana
tgctctagatctaaagg

SEQ ID NO: 152520 - DNA, 17 bp, Arabidopsis thaliana
tgctctagatgtaaagg

SEQ ID NO: 152521 - DNA, 17 bp, Arabidopsis thaliana
tgctctagtaggattgg

SEQ ID NO: 152522 - DNA, 17 bp, Arabidopsis thaliana
tgctctatggatgaaat

SEQ ID NO: 152523 - DNA, 17 bp, Arabidopsis thaliana
tgctctcaatggtctac

SEQ ID NO: 152524 - DNA, 17 bp, Arabidopsis thaliana
tgctctcacgcgtatcc

SEQ ID NO: 152525 - DNA, 17 bp, Arabidopsis thaliana
tgctctcagtatcgtgt

SEQ ID NO: 152526 - DNA, 17 bp, Arabidopsis thaliana
tgctctcatctacagtc

SEQ ID NO: 152527 - DNA, 17 bp, Arabidopsis thaliana
tgctctcctagttaagt

SEQ ID NO: 152528 - DNA, 17 bp, Arabidopsis thaliana
tgctctcctattccgac

SEQ ID NO: 152529 - DNA, 17 bp, Arabidopsis thaliana
tgctctcgatagcggat

SEQ ID NO: 152530 - DNA, 17 bp, Arabidopsis thaliana
tgctctcggagctgaga

SEQ ID NO: 152531 - DNA, 17 bp, Arabidopsis thaliana
tgctctctaaagtgcct

SEQ ID NO: 152532 - DNA, 17 bp, Arabidopsis thaliana
tgctctctaattgtcgt

SEQ ID NO: 152533 - DNA, 17 bp, Arabidopsis thaliana
tgctctctacatgcacc

SEQ ID NO: 152534 - DNA, 17 bp, Arabidopsis thaliana
tgctctctagccttctg

SEQ ID NO: 152535 - DNA, 17 bp, Arabidopsis thaliana
tgctctctagccttctt

SEQ ID NO: 152536 - DNA, 17 bp, Arabidopsis thaliana
tgctctctctcttctgt

SEQ ID NO: 152537 - DNA, 17 bp, Arabidopsis thaliana
tgctctctctctttctg

SEQ ID NO: 152538 - DNA, 17 bp, Arabidopsis thaliana
tgctctctcttcgattt

SEQ ID NO: 152539 - DNA, 17 bp, Arabidopsis thaliana
tgctctctttgtactct

SEQ ID NO: 152540 - DNA, 17 bp, Arabidopsis thaliana
tgctctgacccgagtag

SEQ ID NO: 152541 - DNA, 17 bp, Arabidopsis thaliana
tgctctgagggctgggc

SEQ ID NO: 152542 - DNA, 17 bp, Arabidopsis thaliana
tgctctgatgattcatg

SEQ ID NO: 152543 - DNA, 17 bp, Arabidopsis thaliana
tgctctgattcgtttac

SEQ ID NO: 152544 - DNA, 17 bp, Arabidopsis thaliana
tgctctgcttaaaccac

SEQ ID NO: 152545 - DNA, 17 bp, Arabidopsis thaliana
tgctctgcttaaaccgc

SEQ ID NO: 152546 - DNA, 17 bp, Arabidopsis thaliana
tgctctggaagatggct

SEQ ID NO: 152547 - DNA, 17 bp, Arabidopsis thaliana
tgctctggctgatggcg

SEQ ID NO: 152548 - DNA, 17 bp, Arabidopsis thaliana
tgctctggttacatgcc

SEQ ID NO: 152549 - DNA, 17 bp, Arabidopsis thaliana
tgctctgtgcccataag

SEQ ID NO: 152550 - DNA, 17 bp, Arabidopsis thaliana
tgctctgttttgtctat

SEQ ID NO: 152551 - DNA, 17 bp, Arabidopsis thaliana
tgctcttacagtttgtc

SEQ ID NO: 152552 - DNA, 17 bp, Arabidopsis thaliana
tgctcttacttgactgt

SEQ ID NO: 152553 - DNA, 17 bp, Arabidopsis thaliana
tgctcttagagacggtt

SEQ ID NO: 152554 - DNA, 17 bp, Arabidopsis thaliana
tgctcttagatcagata

SEQ ID NO: 152555 - DNA, 17 bp, Arabidopsis thaliana
tgctcttagtttcatct

SEQ ID NO: 152556 - DNA, 17 bp, Arabidopsis thaliana
tgctcttcaaggtgata

SEQ ID NO: 152557 - DNA, 17 bp, Arabidopsis thaliana
tgctcttcatccgacgg

SEQ ID NO: 152558 - DNA, 17 bp, Arabidopsis thaliana
tgctcttcctttgacct

SEQ ID NO: 152559 - DNA, 17 bp, Arabidopsis thaliana
tgctcttcgaactttgt

SEQ ID NO: 152560 - DNA, 17 bp, Arabidopsis thaliana
tgctcttcgcagccgac

SEQ ID NO: 152561 - DNA, 17 bp, Arabidopsis thaliana
tgctcttgacgtcactg

SEQ ID NO: 152562 - DNA, 17 bp, Arabidopsis thaliana
tgctcttgcggttccaa

SEQ ID NO: 152563 - DNA, 17 bp, Arabidopsis thaliana
tgctcttggaccgcgcc

SEQ ID NO: 152564 - DNA, 17 bp, Arabidopsis thaliana
tgctcttggctcgacat

SEQ ID NO: 152565 - DNA, 17 bp, Arabidopsis thaliana
tgctcttggtcctagag

SEQ ID NO: 152566 - DNA, 17 bp, Arabidopsis thaliana
tgctcttggtcctaggg

SEQ ID NO: 152567 - DNA, 17 bp, Arabidopsis thaliana
tgctcttggttgtggac

SEQ ID NO: 152568 - DNA, 17 bp, Arabidopsis thaliana
tgctcttgtagtggcca

SEQ ID NO: 152569 - DNA, 17 bp, Arabidopsis thaliana
tgctcttgtgcagaacg

SEQ ID NO: 152570 - DNA, 17 bp, Arabidopsis thaliana
tgctctttcagtgttcc

SEQ ID NO: 152571 - DNA, 17 bp, Arabidopsis thaliana
tgctctttcagtgtttc

SEQ ID NO: 152572 - DNA, 17 bp, Arabidopsis thaliana
tgctctttcttgcctta

SEQ ID NO: 152573 - DNA, 17 bp, Arabidopsis thaliana
tgctcttttctcgtctg

SEQ ID NO: 152574 - DNA, 17 bp, Arabidopsis thaliana
tgctcttttgctgtcag

SEQ ID NO: 152575 - DNA, 17 bp, Arabidopsis thaliana
tgctcttttggaagtgc

SEQ ID NO: 152576 - DNA, 17 bp, Arabidopsis thaliana
tgctcttttggtccgga

SEQ ID NO: 152577 - DNA, 17 bp, Arabidopsis thaliana
tgctgaaaacttgggcc

SEQ ID NO: 152578 - DNA, 17 bp, Arabidopsis thaliana
tgctgaaaataagaggc

SEQ ID NO: 152579 - DNA, 17 bp, Arabidopsis thaliana
tgctgaagaagacggcg

SEQ ID NO: 152580 - DNA, 17 bp, Arabidopsis thaliana
tgctgaagatgagcaag

SEQ ID NO: 152581 - DNA, 17 bp, Arabidopsis thaliana
tgctgaagtttgctgcg

SEQ ID NO: 152582 - DNA, 17 bp, Arabidopsis thaliana
tgctgaagtttgctgtg

SEQ ID NO: 152583 - DNA, 17 bp, Arabidopsis thaliana
tgctgaataagcagttg

SEQ ID NO: 152584 - DNA, 17 bp, Arabidopsis thaliana
tgctgaatactgtgtgc

SEQ ID NO: 152585 - DNA, 17 bp, Arabidopsis thaliana
tgctgaatttgccgctg

SEQ ID NO: 152586 - DNA, 17 bp, Arabidopsis thaliana
tgctgacacatcacctt

SEQ ID NO: 152587 - DNA, 17 bp, Arabidopsis thaliana
tgctgaccagatcagcc

SEQ ID NO: 152588 - DNA, 17 bp, Arabidopsis thaliana
tgctgaccatttggccg

SEQ ID NO: 152589 - DNA, 17 bp, Arabidopsis thaliana
tgctgaccgaggcgagg

SEQ ID NO: 152590 - DNA, 17 bp, Arabidopsis thaliana
tgctgaccgcctgtcga

SEQ ID NO: 152591 - DNA, 17 bp, Arabidopsis thaliana
tgctgaccgtctgtcaa

SEQ ID NO: 152592 - DNA, 17 bp, Arabidopsis thaliana
tgctgacctaacctgca

SEQ ID NO: 152593 - DNA, 17 bp, Arabidopsis thaliana
tgctgacctaacctgcc

SEQ ID NO: 152594 - DNA, 17 bp, Arabidopsis thaliana
tgctgacgagatatgca

SEQ ID NO: 152595 - DNA, 17 bp, Arabidopsis thaliana
tgctgacggattagtcc

SEQ ID NO: 152596 - DNA, 17 bp, Arabidopsis thaliana
tgctgacgggttagcca

SEQ ID NO: 152597 - DNA, 17 bp, Arabidopsis thaliana
tgctgacgtggattaaa

SEQ ID NO: 152598 - DNA, 17 bp, Arabidopsis thaliana
tgctgactcagctgaca

SEQ ID NO: 152599 - DNA, 17 bp, Arabidopsis thaliana
tgctgactcgccattcc

SEQ ID NO: 152600 - DNA, 17 bp, Arabidopsis thaliana
tgctgactttgagttga

SEQ ID NO: 152601 - DNA, 17 bp, Arabidopsis thaliana
tgctgactttggacgtc

SEQ ID NO: 152602 - DNA, 17 bp, Arabidopsis thaliana
tgctgagaaagccaccg

SEQ ID NO: 152603 - DNA, 17 bp, Arabidopsis thaliana
tgctgagaatgcacacc

SEQ ID NO: 152604 - DNA, 17 bp, Arabidopsis thaliana
tgctgagacataaacag

SEQ ID NO: 152605 - DNA, 17 bp, Arabidopsis thaliana
tgctgagactgaagtgg

SEQ ID NO: 152606 - DNA, 17 bp, Arabidopsis thaliana
tgctgagatcgactatt

SEQ ID NO: 152607 - DNA, 17 bp, Arabidopsis thaliana
tgctgagattatcgttg

SEQ ID NO: 152608 - DNA, 17 bp, Arabidopsis thaliana
tgctgagcatctttcaa

SEQ ID NO: 152609 - DNA, 17 bp, Arabidopsis thaliana
tgctgagccagcaacag

SEQ ID NO: 152610 - DNA, 17 bp, Arabidopsis thaliana
tgctgagctgatgacca

SEQ ID NO: 152611 - DNA, 17 bp, Arabidopsis thaliana
tgctgagcttgcgagat

SEQ ID NO: 152612 - DNA, 17 bp, Arabidopsis thaliana
tgctgaggaggttccat

SEQ ID NO: 152613 - DNA, 17 bp, Arabidopsis thaliana
tgctgagtcacaagccg

SEQ ID NO: 152614 - DNA, 17 bp, Arabidopsis thaliana
tgctgataggtgttgtg

SEQ ID NO: 152615 - DNA, 17 bp, Arabidopsis thaliana
tgctgatcacaagctgc

SEQ ID NO: 152616 - DNA, 17 bp, Arabidopsis thaliana
tgctgatcctggtcacg

SEQ ID NO: 152617 - DNA, 17 bp, Arabidopsis thaliana
tgctgatccttcgatgt

SEQ ID NO: 152618 - DNA, 17 bp, Arabidopsis thaliana
tgctgatcggccatatt

SEQ ID NO: 152619 - DNA, 17 bp, Arabidopsis thaliana
tgctgatctgagttgta

SEQ ID NO: 152620 - DNA, 17 bp, Arabidopsis thaliana
tgctgatctgatgacca

SEQ ID NO: 152621 - DNA, 17 bp, Arabidopsis thaliana
tgctgatcttgaccttg

SEQ ID NO: 152622 - DNA, 17 bp, Arabidopsis thaliana
tgctgatggattagcga

SEQ ID NO: 152623 - DNA, 17 bp, Arabidopsis thaliana
tgctgatgggttagcta

SEQ ID NO: 152624 - DNA, 17 bp, Arabidopsis thaliana
tgctgatgtccggatca

SEQ ID NO: 152625 - DNA, 17 bp, Arabidopsis thaliana
tgctgatgtttgatctt

SEQ ID NO: 152626 - DNA, 17 bp, Arabidopsis thaliana
tgctgattctgatgacc

SEQ ID NO: 152627 - DNA, 17 bp, Arabidopsis thaliana
tgctgattgcgctgtac

SEQ ID NO: 152628 - DNA, 17 bp, Arabidopsis thaliana
tgctgattggattcttg

SEQ ID NO: 152629 - DNA, 17 bp, Arabidopsis thaliana
tgctgatttcgttttta

SEQ ID NO: 152630 - DNA, 17 bp, Arabidopsis thaliana
tgctgatttgattcttg

SEQ ID NO: 152631 - DNA, 17 bp, Arabidopsis thaliana
tgctgcaatatgtgcta

SEQ ID NO: 152632 - DNA, 17 bp, Arabidopsis thaliana
tgctgcagacctctcca

SEQ ID NO: 152633 - DNA, 17 bp, Arabidopsis thaliana
tgctgcagtggacacgg

SEQ ID NO: 152634 - DNA, 17 bp, Arabidopsis thaliana
tgctgcatggctgtcgt

SEQ ID NO: 152635 - DNA, 17 bp, Arabidopsis thaliana
tgctgcatggctgtctt

SEQ ID NO: 152636 - DNA, 17 bp, Arabidopsis thaliana
tgctgcattggattgac

SEQ ID NO: 152637 - DNA, 17 bp, Arabidopsis thaliana
tgctgccacgatccact

SEQ ID NO: 152638 - DNA, 17 bp, Arabidopsis thaliana
tgctgccagaccgagcg

SEQ ID NO: 152639 - DNA, 17 bp, Arabidopsis thaliana
tgctgccagcatgatct

SEQ ID NO: 152640 - DNA, 17 bp, Arabidopsis thaliana
tgctgccatcttgagat

SEQ ID NO: 152641 - DNA, 17 bp, Arabidopsis thaliana
tgctgccatggccgtct

SEQ ID NO: 152642 - DNA, 17 bp, Arabidopsis thaliana
tgctgccctcttgacca

SEQ ID NO: 152643 - DNA, 17 bp, Arabidopsis thaliana
tgctgccgaatgctata

SEQ ID NO: 152644 - DNA, 17 bp, Arabidopsis thaliana
tgctgccgtctacatgg

SEQ ID NO: 152645 - DNA, 17 bp, Arabidopsis thaliana
tgctgccttccttggat

SEQ ID NO: 152646 - DNA, 17 bp, Arabidopsis thaliana
tgctgcgactctttcat

SEQ ID NO: 152647 - DNA, 17 bp, Arabidopsis thaliana
tgctgcgatggtgcttc

SEQ ID NO: 152648 - DNA, 17 bp, Arabidopsis thaliana
tgctgcgccaaggagct

SEQ ID NO: 152649 - DNA, 17 bp, Arabidopsis thaliana
tgctgcgcccgcccctc

SEQ ID NO: 152650 - DNA, 17 bp, Arabidopsis thaliana
tgctgcgccgcttttgc

SEQ ID NO: 152651 - DNA, 17 bp, Arabidopsis thaliana
tgctgcggaatttgagt

SEQ ID NO: 152652 - DNA, 17 bp, Arabidopsis thaliana
tgctgcggacccgaccc

SEQ ID NO: 152653 - DNA, 17 bp, Arabidopsis thaliana
tgctgcggatttcacta

SEQ ID NO: 152654 - DNA, 17 bp, Arabidopsis thaliana
tgctgcggccagcacca

SEQ ID NO: 152655 - DNA, 17 bp, Arabidopsis thaliana
tgctgcgggttgctcgg

SEQ ID NO: 152656 - DNA, 17 bp, Arabidopsis thaliana
tgctgcggtaggaaagg

SEQ ID NO: 152657 - DNA, 17 bp, Arabidopsis thaliana
tgctgcgttgcctactt

SEQ ID NO: 152658 - DNA, 17 bp, Arabidopsis thaliana
tgctgctactcaaaagg

SEQ ID NO: 152659 - DNA, 17 bp, Arabidopsis thaliana
tgctgctaggcgaagcg

SEQ ID NO: 152660 - DNA, 17 bp, Arabidopsis thaliana
tgctgctatttcatgga

SEQ ID NO: 152661 - DNA, 17 bp, Arabidopsis thaliana
tgctgctcagctgtatt

SEQ ID NO: 152662 - DNA, 17 bp, Arabidopsis thaliana
tgctgctccgatcgtcc

SEQ ID NO: 152663 - DNA, 17 bp, Arabidopsis thaliana
tgctgctcgtatgccgg

SEQ ID NO: 152664 - DNA, 17 bp, Arabidopsis thaliana
tgctgctgaatccatgg

SEQ ID NO: 152665 - DNA, 17 bp, Arabidopsis thaliana
tgctgctgagtggacaa

SEQ ID NO: 152666 - DNA, 17 bp, Arabidopsis thaliana
tgctgctgctaggcgaa

SEQ ID NO: 152667 - DNA, 17 bp, Arabidopsis thaliana
tgctgctgctgcgtcct

SEQ ID NO: 152668 - DNA, 17 bp, Arabidopsis thaliana
tgctgctgctgcgttct

SEQ ID NO: 152669 - DNA, 17 bp, Arabidopsis thaliana
tgctgctgctggtgaaa

SEQ ID NO: 152670 - DNA, 17 bp, Arabidopsis thaliana
tgctgcttagtggttat

SEQ ID NO: 152671 - DNA, 17 bp, Arabidopsis thaliana
tgctgcttatcgaccgg

SEQ ID NO: 152672 - DNA, 17 bp, Arabidopsis thaliana
tgctgcttctacaaagt

SEQ ID NO: 152673 - DNA, 17 bp, Arabidopsis thaliana
tgctgcttgtttgtctt

SEQ ID NO: 152674 - DNA, 17 bp, Arabidopsis thaliana
tgctgcttgttttgtct

SEQ ID NO: 152675 - DNA, 17 bp, Arabidopsis thaliana
tgctgctttgtcaccat

SEQ ID NO: 152676 - DNA, 17 bp, Arabidopsis thaliana
tgctggaactatcttag

SEQ ID NO: 152677 - DNA, 17 bp, Arabidopsis thaliana
tgctggaaggccatagg

SEQ ID NO: 152678 - DNA, 17 bp, Arabidopsis thaliana
tgctggaatatggtcgt

SEQ ID NO: 152679 - DNA, 17 bp, Arabidopsis thaliana
tgctggaccgaaactgg

SEQ ID NO: 152680 - DNA, 17 bp, Arabidopsis thaliana
tgctggacgggtttggc

SEQ ID NO: 152681 - DNA, 17 bp, Arabidopsis thaliana
tgctggagcgatttgtt

SEQ ID NO: 152682 - DNA, 17 bp, Arabidopsis thaliana
tgctggaggagtgatca

SEQ ID NO: 152683 - DNA, 17 bp, Arabidopsis thaliana
tgctggatctagcgaca

SEQ ID NO: 152684 - DNA, 17 bp, Arabidopsis thaliana
tgctggatgtggcccca

SEQ ID NO: 152685 - DNA, 17 bp, Arabidopsis thaliana
tgctggattgctgaggt

SEQ ID NO: 152686 - DNA, 17 bp, Arabidopsis thaliana
tgctggatttggcgaag

SEQ ID NO: 152687 - DNA, 17 bp, Arabidopsis thaliana
tgctggcgacaatagca

SEQ ID NO: 152688 - DNA, 17 bp, Arabidopsis thaliana
tgctggctctggctcgg

SEQ ID NO: 152689 - DNA, 17 bp, Arabidopsis thaliana
tgctggctctgtggacc

SEQ ID NO: 152690 - DNA, 17 bp, Arabidopsis thaliana
tgctggctgactgcatt

SEQ ID NO: 152691 - DNA, 17 bp, Arabidopsis thaliana
tgctgggccgaaactag

SEQ ID NO: 152692 - DNA, 17 bp, Arabidopsis thaliana
tgctgggccgaaactgg

SEQ ID NO: 152693 - DNA, 17 bp, Arabidopsis thaliana
tgctgggccttacaact

SEQ ID NO: 152694 - DNA, 17 bp, Arabidopsis thaliana
tgctgggctttgaacac

SEQ ID NO: 152695 - DNA, 17 bp, Arabidopsis thaliana
tgctgggttcggcgcac

SEQ ID NO: 152696 - DNA, 17 bp, Arabidopsis thaliana
tgctgggttggctgttg

SEQ ID NO: 152697 - DNA, 17 bp, Arabidopsis thaliana
tgctggtatgatcgcat

SEQ ID NO: 152698 - DNA, 17 bp, Arabidopsis thaliana
tgctggtccgatctcat

SEQ ID NO: 152699 - DNA, 17 bp, Arabidopsis thaliana
tgctggtcttagattct

SEQ ID NO: 152700 - DNA, 17 bp, Arabidopsis thaliana
tgctggtgctgagatta

SEQ ID NO: 152701 - DNA, 17 bp, Arabidopsis thaliana
tgctggttctggtgtaa

SEQ ID NO: 152702 - DNA, 17 bp, Arabidopsis thaliana
tgctgtaactgtgttga

SEQ ID NO: 152703 - DNA, 17 bp, Arabidopsis thaliana
tgctgtaagtcagactt

SEQ ID NO: 152704 - DNA, 17 bp, Arabidopsis thaliana
tgctgtacgctcgattc

SEQ ID NO: 152705 - DNA, 17 bp, Arabidopsis thaliana
tgctgtagaagttgtgg

SEQ ID NO: 152706 - DNA, 17 bp, Arabidopsis thaliana
tgctgtagcgacatccg

SEQ ID NO: 152707 - DNA, 17 bp, Arabidopsis thaliana
tgctgtagctaacgcgt

SEQ ID NO: 152708 - DNA, 17 bp, Arabidopsis thaliana
tgctgtatggtagccgg

SEQ ID NO: 152709 - DNA, 17 bp, Arabidopsis thaliana
tgctgtatgtgtgatga

SEQ ID NO: 152710 - DNA, 17 bp, Arabidopsis thaliana
tgctgtcaagagtcgag

SEQ ID NO: 152711 - DNA, 17 bp, Arabidopsis thaliana
tgctgtcctataggccc

SEQ ID NO: 152712 - DNA, 17 bp, Arabidopsis thaliana
tgctgtcgctgctcgct

SEQ ID NO: 152713 - DNA, 17 bp, Arabidopsis thaliana
tgctgtcgctggtcgct

SEQ ID NO: 152714 - DNA, 17 bp, Arabidopsis thaliana
tgctgtcgcttgtcgtt

SEQ ID NO: 152715 - DNA, 17 bp, Arabidopsis thaliana
tgctgtctacgagtcgg

SEQ ID NO: 152716 - DNA, 17 bp, Arabidopsis thaliana
tgctgtgactgagttat

SEQ ID NO: 152717 - DNA, 17 bp, Arabidopsis thaliana
tgctgtgccgcgaactg

SEQ ID NO: 152718 - DNA, 17 bp, Arabidopsis thaliana
tgctgtgcgggagaagt

SEQ ID NO: 152719 - DNA, 17 bp, Arabidopsis thaliana
tgctgtgcggttcaaat

SEQ ID NO: 152720 - DNA, 17 bp, Arabidopsis thaliana
tgctgtgctcaggacaa

SEQ ID NO: 152721 - DNA, 17 bp, Arabidopsis thaliana
tgctgtggacttgtggt

SEQ ID NO: 152722 - DNA, 17 bp, Arabidopsis thaliana
tgctgtggagattatgt

SEQ ID NO: 152723 - DNA, 17 bp, Arabidopsis thaliana
tgctgtggctgtcatca

SEQ ID NO: 152724 - DNA, 17 bp, Arabidopsis thaliana
tgctgttcgtttgactg

SEQ ID NO: 152725 - DNA, 17 bp, Arabidopsis thaliana
tgctgttgaggctccat

SEQ ID NO: 152726 - DNA, 17 bp, Arabidopsis thaliana
tgctgttgtgacaccga

SEQ ID NO: 152727 - DNA, 17 bp, Arabidopsis thaliana
tgctgttttgttgtatt

SEQ ID NO: 152728 - DNA, 17 bp, Arabidopsis thaliana
tgcttaactcgatgacc

SEQ ID NO: 152729 - DNA, 17 bp, Arabidopsis thaliana
tgcttaagggtgaacga

SEQ ID NO: 152730 - DNA, 17 bp, Arabidopsis thaliana
tgcttaatctagtggcc

SEQ ID NO: 152731 - DNA, 17 bp, Arabidopsis thaliana
tgcttacaaggctacct

SEQ ID NO: 152732 - DNA, 17 bp, Arabidopsis thaliana
tgcttacaaggctatct

SEQ ID NO: 152733 - DNA, 17 bp, Arabidopsis thaliana
tgcttacagttgttcac

SEQ ID NO: 152734 - DNA, 17 bp, Arabidopsis thaliana
tgcttaccaagttgttc

SEQ ID NO: 152735 - DNA, 17 bp, Arabidopsis thaliana
tgcttacctctctttct

SEQ ID NO: 152736 - DNA, 17 bp, Arabidopsis thaliana
tgcttacggcggttatc

SEQ ID NO: 152737 - DNA, 17 bp, Arabidopsis thaliana
tgcttagagacaaagtt

SEQ ID NO: 152738 - DNA, 17 bp, Arabidopsis thaliana
tgcttagccaaatgtgg

SEQ ID NO: 152739 - DNA, 17 bp, Arabidopsis thaliana
tgcttagctaagatgtg

SEQ ID NO: 152740 - DNA, 17 bp, Arabidopsis thaliana
tgcttaggctctttagg

SEQ ID NO: 152741 - DNA, 17 bp, Arabidopsis thaliana
tgcttagtccacggtgc

SEQ ID NO: 152742 - DNA, 17 bp, Arabidopsis thaliana
tgcttagtggaaagacg

SEQ ID NO: 152743 - DNA, 17 bp, Arabidopsis thaliana
tgcttagtggggatcct

SEQ ID NO: 152744 - DNA, 17 bp, Arabidopsis thaliana
tgcttagtggtggatgc

SEQ ID NO: 152745 - DNA, 17 bp, Arabidopsis thaliana
tgcttagtgttactgct

SEQ ID NO: 152746 - DNA, 17 bp, Arabidopsis thaliana
tgcttataggactccgc

SEQ ID NO: 152747 - DNA, 17 bp, Arabidopsis thaliana
tgcttataggatccgct

SEQ ID NO: 152748 - DNA, 17 bp, Arabidopsis thaliana
tgcttataggcattgga

SEQ ID NO: 152749 - DNA, 17 bp, Arabidopsis thaliana
tgcttatgcaacctcgc

SEQ ID NO: 152750 - DNA, 17 bp, Arabidopsis thaliana
tgcttatgctagattgt

SEQ ID NO: 152751 - DNA, 17 bp, Arabidopsis thaliana
tgcttattggctttggt

SEQ ID NO: 152752 - DNA, 17 bp, Arabidopsis thaliana
tgcttattgtggactgg

SEQ ID NO: 152753 - DNA, 17 bp, Arabidopsis thaliana
tgcttatttcgtcggag

SEQ ID NO: 152754 - DNA, 17 bp, Arabidopsis thaliana
tgcttcaaagtgtcctt

SEQ ID NO: 152755 - DNA, 17 bp, Arabidopsis thaliana
tgcttcaaatgaagaca

SEQ ID NO: 152756 - DNA, 17 bp, Arabidopsis thaliana
tgcttcaaccagtgatg

SEQ ID NO: 152757 - DNA, 17 bp, Arabidopsis thaliana
tgcttcaagattgcttt

SEQ ID NO: 152758 - DNA, 17 bp, Arabidopsis thaliana
tgcttcaaggcaagatc

SEQ ID NO: 152759 - DNA, 17 bp, Arabidopsis thaliana
tgcttcaaggttgcttt

SEQ ID NO: 152760 - DNA, 17 bp, Arabidopsis thaliana
tgcttcaaggttgtttt

SEQ ID NO: 152761 - DNA, 17 bp, Arabidopsis thaliana
tgcttcaatgattcgcg

SEQ ID NO: 152762 - DNA, 17 bp, Arabidopsis thaliana
tgcttcagagctggcct

SEQ ID NO: 152763 - DNA, 17 bp, Arabidopsis thaliana
tgcttcagattgacgaa

SEQ ID NO: 152764 - DNA, 17 bp, Arabidopsis thaliana
tgcttcagattgacgac

SEQ ID NO: 152765 - DNA, 17 bp, Arabidopsis thaliana
tgcttcagcggttgata

SEQ ID NO: 152766 - DNA, 17 bp, Arabidopsis thaliana
tgcttcaggaagagcgt

SEQ ID NO: 152767 - DNA, 17 bp, Arabidopsis thaliana
tgcttcaggccttggga

SEQ ID NO: 152768 - DNA, 17 bp, Arabidopsis thaliana
tgcttcatatgactaga

SEQ ID NO: 152769 - DNA, 17 bp, Arabidopsis thaliana
tgcttcatccacttaat

SEQ ID NO: 152770 - DNA, 17 bp, Arabidopsis thaliana
tgcttcatccgtgacaa

SEQ ID NO: 152771 - DNA, 17 bp, Arabidopsis thaliana
tgcttcatctaaggctg

SEQ ID NO: 152772 - DNA, 17 bp, Arabidopsis thaliana
tgcttcatctcttccat

SEQ ID NO: 152773 - DNA, 17 bp, Arabidopsis thaliana
tgcttcatctcttggcc

SEQ ID NO: 152774 - DNA, 17 bp, Arabidopsis thaliana
tgcttcatctggttatg

SEQ ID NO: 152775 - DNA, 17 bp, Arabidopsis thaliana
tgcttcatgagcgtggt

SEQ ID NO: 152776 - DNA, 17 bp, Arabidopsis thaliana
tgcttcatggacaacac

SEQ ID NO: 152777 - DNA, 17 bp, Arabidopsis thaliana
tgcttcatgggtttgtg

SEQ ID NO: 152778 - DNA, 17 bp, Arabidopsis thaliana
tgcttcatgttgcgaca

SEQ ID NO: 152779 - DNA, 17 bp, Arabidopsis thaliana
tgcttccaaaaaactag

SEQ ID NO: 152780 - DNA, 17 bp, Arabidopsis thaliana
tgcttccaattactggc

SEQ ID NO: 152781 - DNA, 17 bp, Arabidopsis thaliana
tgcttccacttactcac

SEQ ID NO: 152782 - DNA, 17 bp, Arabidopsis thaliana
tgcttccacttgatcac

SEQ ID NO: 152783 - DNA, 17 bp, Arabidopsis thaliana
tgcttccactttggtga

SEQ ID NO: 152784 - DNA, 17 bp, Arabidopsis thaliana
tgcttccagacagattt

SEQ ID NO: 152785 - DNA, 17 bp, Arabidopsis thaliana
tgcttccatagatgaca

SEQ ID NO: 152786 - DNA, 17 bp, Arabidopsis thaliana
tgcttccatcgggtctg

SEQ ID NO: 152787 - DNA, 17 bp, Arabidopsis thaliana
tgcttcccacaagttaa

SEQ ID NO: 152788 - DNA, 17 bp, Arabidopsis thaliana
tgcttcccctgcggctg

SEQ ID NO: 152789 - DNA, 17 bp, Arabidopsis thaliana
tgcttccgactgttcag

SEQ ID NO: 152790 - DNA, 17 bp, Arabidopsis thaliana
tgcttccgaggatgtgt

SEQ ID NO: 152791 - DNA, 17 bp, Arabidopsis thaliana
tgcttccgcttcttcgg

SEQ ID NO: 152792 - DNA, 17 bp, Arabidopsis thaliana
tgcttccggtggctcga

SEQ ID NO: 152793 - DNA, 17 bp, Arabidopsis thaliana
tgcttcctcattcatgg

SEQ ID NO: 152794 - DNA, 17 bp, Arabidopsis thaliana
tgcttcctcctgaggcc

SEQ ID NO: 152795 - DNA, 17 bp, Arabidopsis thaliana
tgcttcctctactcggt

SEQ ID NO: 152796 - DNA, 17 bp, Arabidopsis thaliana
tgcttcctcttcatgct

SEQ ID NO: 152797 - DNA, 17 bp, Arabidopsis thaliana
tgcttccttaagcgcct

SEQ ID NO: 152798 - DNA, 17 bp, Arabidopsis thaliana
tgcttccttctctagca

SEQ ID NO: 152799 - DNA, 17 bp, Arabidopsis thaliana
tgcttcgagacatgtca

SEQ ID NO: 152800 - DNA, 17 bp, Arabidopsis thaliana
tgcttcgatgtgcgctt

SEQ ID NO: 152801 - DNA, 17 bp, Arabidopsis thaliana
tgcttcgatgtggcacc

SEQ ID NO: 152802 - DNA, 17 bp, Arabidopsis thaliana
tgcttcgcaaccggttt

SEQ ID NO: 152803 - DNA, 17 bp, Arabidopsis thaliana
tgcttcgccgctgagaa

SEQ ID NO: 152804 - DNA, 17 bp, Arabidopsis thaliana
tgcttcgcgacccttgt

SEQ ID NO: 152805 - DNA, 17 bp, Arabidopsis thaliana
tgcttcgctcgggtgtt

SEQ ID NO: 152806 - DNA, 17 bp, Arabidopsis thaliana
tgcttcgggttgctcgg

SEQ ID NO: 152807 - DNA, 17 bp, Arabidopsis thaliana
tgcttcggttaaggcgg

SEQ ID NO: 152808 - DNA, 17 bp, Arabidopsis thaliana
tgcttcgtagccaggtt

SEQ ID NO: 152809 - DNA, 17 bp, Arabidopsis thaliana
tgcttcgtccgtctagt

SEQ ID NO: 152810 - DNA, 17 bp, Arabidopsis thaliana
tgcttcgttatacacag

SEQ ID NO: 152811 - DNA, 17 bp, Arabidopsis thaliana
tgcttcgttatggtcga

SEQ ID NO: 152812 - DNA, 17 bp, Arabidopsis thaliana
tgcttctaagcaaatct

SEQ ID NO: 152813 - DNA, 17 bp, Arabidopsis thaliana
tgcttctaagcaaatta

SEQ ID NO: 152814 - DNA, 17 bp, Arabidopsis thaliana
tgcttctaagcaaattt

SEQ ID NO: 152815 - DNA, 17 bp, Arabidopsis thaliana
tgcttctaagcaagttt

SEQ ID NO: 152816 - DNA, 17 bp, Arabidopsis thaliana
tgcttctacaacgccat

SEQ ID NO: 152817 - DNA, 17 bp, Arabidopsis thaliana
tgcttctaccggtctat

SEQ ID NO: 152818 - DNA, 17 bp, Arabidopsis thaliana
tgcttctagccgtcgca

SEQ ID NO: 152819 - DNA, 17 bp, Arabidopsis thaliana
tgcttctattggttagc

SEQ ID NO: 152820 - DNA, 17 bp, Arabidopsis thaliana
tgcttctcaaagctttc

SEQ ID NO: 152821 - DNA, 17 bp, Arabidopsis thaliana
tgcttctcaatggagtt

SEQ ID NO: 152822 - DNA, 17 bp, Arabidopsis thaliana
tgcttctcagtgacaga

SEQ ID NO: 152823 - DNA, 17 bp, Arabidopsis thaliana
tgcttctcgactactca

SEQ ID NO: 152824 - DNA, 17 bp, Arabidopsis thaliana
tgcttctcgtgttgctc

SEQ ID NO: 152825 - DNA, 17 bp, Arabidopsis thaliana
tgcttctctcaaagtgc

SEQ ID NO: 152826 - DNA, 17 bp, Arabidopsis thaliana
tgcttctctcaaagtgg

SEQ ID NO: 152827 - DNA, 17 bp, Arabidopsis thaliana
tgcttctcttatcccat

SEQ ID NO: 152828 - DNA, 17 bp, Arabidopsis thaliana
tgcttctcttttccagg

SEQ ID NO: 152829 - DNA, 17 bp, Arabidopsis thaliana
tgcttctgacggaaggc

SEQ ID NO: 152830 - DNA, 17 bp, Arabidopsis thaliana
tgcttctgagcaagttt

SEQ ID NO: 152831 - DNA, 17 bp, Arabidopsis thaliana
tgcttctgattcattgt

SEQ ID NO: 152832 - DNA, 17 bp, Arabidopsis thaliana
tgcttctgccaattgca

SEQ ID NO: 152833 - DNA, 17 bp, Arabidopsis thaliana
tgcttctgcctcggtgt

SEQ ID NO: 152834 - DNA, 17 bp, Arabidopsis thaliana
tgcttctgcttctgctt

SEQ ID NO: 152835 - DNA, 17 bp, Arabidopsis thaliana
tgcttctggccttgcat

SEQ ID NO: 152836 - DNA, 17 bp, Arabidopsis thaliana
tgcttctgggtcatgcc

SEQ ID NO: 152837 - DNA, 17 bp, Arabidopsis thaliana
tgcttctgggtcatgga

SEQ ID NO: 152838 - DNA, 17 bp, Arabidopsis thaliana
tgcttctgttgacccac

SEQ ID NO: 152839 - DNA, 17 bp, Arabidopsis thaliana
tgcttcttcatcgccga

SEQ ID NO: 152840 - DNA, 17 bp, Arabidopsis thaliana
tgcttcttcttaggctg

SEQ ID NO: 152841 - DNA, 17 bp, Arabidopsis thaliana
tgcttcttgctgtaggt

SEQ ID NO: 152842 - DNA, 17 bp, Arabidopsis thaliana
tgcttcttggggttagg

SEQ ID NO: 152843 - DNA, 17 bp, Arabidopsis thaliana
tgcttcttggggttgta

SEQ ID NO: 152844 - DNA, 17 bp, Arabidopsis thaliana
tgcttcttgtggcttag

SEQ ID NO: 152845 - DNA, 17 bp, Arabidopsis thaliana
tgcttctttcgtcgcag

SEQ ID NO: 152846 - DNA, 17 bp, Arabidopsis thaliana
tgcttctttgcgggaga

SEQ ID NO: 152847 - DNA, 17 bp, Arabidopsis thaliana
tgcttgaaattgtcggg

SEQ ID NO: 152848 - DNA, 17 bp, Arabidopsis thaliana
tgcttgaatcagggagt

SEQ ID NO: 152849 - DNA, 17 bp, Arabidopsis thaliana
tgcttgaatcggtggat

SEQ ID NO: 152850 - DNA, 17 bp, Arabidopsis thaliana
tgcttgaatctgatgtc

SEQ ID NO: 152851 - DNA, 17 bp, Arabidopsis thaliana
tgcttgactctgatttg

SEQ ID NO: 152852 - DNA, 17 bp, Arabidopsis thaliana
tgcttgacttcttggca

SEQ ID NO: 152853 - DNA, 17 bp, Arabidopsis thaliana
tgcttgagaatttctat

SEQ ID NO: 152854 - DNA, 17 bp, Arabidopsis thaliana
tgcttgagccgcgcctc

SEQ ID NO: 152855 - DNA, 17 bp, Arabidopsis thaliana
tgcttgagccgtgtcac

SEQ ID NO: 152856 - DNA, 17 bp, Arabidopsis thaliana
tgcttgaggatttctat

SEQ ID NO: 152857 - DNA, 17 bp, Arabidopsis thaliana
tgcttgagtctgattgt

SEQ ID NO: 152858 - DNA, 17 bp, Arabidopsis thaliana
tgcttgagttgccaagg

SEQ ID NO: 152859 - DNA, 17 bp, Arabidopsis thaliana
tgcttgagttggagctt

SEQ ID NO: 152860 - DNA, 17 bp, Arabidopsis thaliana
tgcttgatacgcttttg

SEQ ID NO: 152861 - DNA, 17 bp, Arabidopsis thaliana
tgcttgatccgcacttg

SEQ ID NO: 152862 - DNA, 17 bp, Arabidopsis thaliana
tgcttgatccgcctgat

SEQ ID NO: 152863 - DNA, 17 bp, Arabidopsis thaliana
tgcttgatccgctctac

SEQ ID NO: 152864 - DNA, 17 bp, Arabidopsis thaliana
tgcttgatctgcttttg

SEQ ID NO: 152865 - DNA, 17 bp, Arabidopsis thaliana
tgcttgatctgttccgt

SEQ ID NO: 152866 - DNA, 17 bp, Arabidopsis thaliana
tgcttgatgtgcttctc

SEQ ID NO: 152867 - DNA, 17 bp, Arabidopsis thaliana
tgcttgatgtgcttgat

SEQ ID NO: 152868 - DNA, 17 bp, Arabidopsis thaliana
tgcttgatttgtttgtt

SEQ ID NO: 152869 - DNA, 17 bp, Arabidopsis thaliana
tgcttgcagaatcgact

SEQ ID NO: 152870 - DNA, 17 bp, Arabidopsis thaliana
tgcttgcaggggcttgt

SEQ ID NO: 152871 - DNA, 17 bp, Arabidopsis thaliana
tgcttgccggcgccggg

SEQ ID NO: 152872 - DNA, 17 bp, Arabidopsis thaliana
tgcttgcctccttctga

SEQ ID NO: 152873 - DNA, 17 bp, Arabidopsis thaliana
tgcttgcggcagattat

SEQ ID NO: 152874 - DNA, 17 bp, Arabidopsis thaliana
tgcttgcgggttccaaa

SEQ ID NO: 152875 - DNA, 17 bp, Arabidopsis thaliana
tgcttgcgtctggcttc

SEQ ID NO: 152876 - DNA, 17 bp, Arabidopsis thaliana
tgcttgctgctaatcca

SEQ ID NO: 152877 - DNA, 17 bp, Arabidopsis thaliana
tgcttgctgctaattaa

SEQ ID NO: 152878 - DNA, 17 bp, Arabidopsis thaliana
tgcttgctgctaattca

SEQ ID NO: 152879 - DNA, 17 bp, Arabidopsis thaliana
tgcttgctgggccacaa

SEQ ID NO: 152880 - DNA, 17 bp, Arabidopsis thaliana
tgcttgcttctggtctg

SEQ ID NO: 152881 - DNA, 17 bp, Arabidopsis thaliana
tgcttgctttgcctctg

SEQ ID NO: 152882 - DNA, 17 bp, Arabidopsis thaliana
tgcttggaccgctgtaa

SEQ ID NO: 152883 - DNA, 17 bp, Arabidopsis thaliana
tgcttggagccgaattt

SEQ ID NO: 152884 - DNA, 17 bp, Arabidopsis thaliana
tgcttggatgtctgctg

SEQ ID NO: 152885 - DNA, 17 bp, Arabidopsis thaliana
tgcttggcctcgtctaa

SEQ ID NO: 152886 - DNA, 17 bp, Arabidopsis thaliana
tgcttggctagccggca

SEQ ID NO: 152887 - DNA, 17 bp, Arabidopsis thaliana
tgcttggctccctgtat

SEQ ID NO: 152888 - DNA, 17 bp, Arabidopsis thaliana
tgcttggctccttgtat

SEQ ID NO: 152889 - DNA, 17 bp, Arabidopsis thaliana
tgcttggcttgacttag

SEQ ID NO: 152890 - DNA, 17 bp, Arabidopsis thaliana
tgcttgggcgagagtag

SEQ ID NO: 152891 - DNA, 17 bp, Arabidopsis thaliana
tgcttggggtgacggag

SEQ ID NO: 152892 - DNA, 17 bp, Arabidopsis thaliana
tgcttgggttgccaatg

SEQ ID NO: 152893 - DNA, 17 bp, Arabidopsis thaliana
tgcttggtccgatcacg

SEQ ID NO: 152894 - DNA, 17 bp, Arabidopsis thaliana
tgcttggtgcaggtccg

SEQ ID NO: 152895 - DNA, 17 bp, Arabidopsis thaliana
tgcttggtgcaggtcgg

SEQ ID NO: 152896 - DNA, 17 bp, Arabidopsis thaliana
tgcttgtccgttggtct

SEQ ID NO: 152897 - DNA, 17 bp, Arabidopsis thaliana
tgcttgtcgctggcgac

SEQ ID NO: 152898 - DNA, 17 bp, Arabidopsis thaliana
tgcttgtcgttggattc

SEQ ID NO: 152899 - DNA, 17 bp, Arabidopsis thaliana
tgcttgtctcaaagatt

SEQ ID NO: 152900 - DNA, 17 bp, Arabidopsis thaliana
tgcttgtctcccctccc

SEQ ID NO: 152901 - DNA, 17 bp, Arabidopsis thaliana
tgcttgtgaatcttctt

SEQ ID NO: 152902 - DNA, 17 bp, Arabidopsis thaliana
tgcttgtggatgtactg

SEQ ID NO: 152903 - DNA, 17 bp, Arabidopsis thaliana
tgcttgtggtacagtga

SEQ ID NO: 152904 - DNA, 17 bp, Arabidopsis thaliana
tgcttgtgtccagctgc

SEQ ID NO: 152905 - DNA, 17 bp, Arabidopsis thaliana
tgcttgttgagccttta

SEQ ID NO: 152906 - DNA, 17 bp, Arabidopsis thaliana
tgcttgttgatggcgat

SEQ ID NO: 152907 - DNA, 17 bp, Arabidopsis thaliana
tgcttgttttccaacta

SEQ ID NO: 152908 - DNA, 17 bp, Arabidopsis thaliana
tgctttaacaatgccgt

SEQ ID NO: 152909 - DNA, 17 bp, Arabidopsis thaliana
tgctttaagtacatgtg

SEQ ID NO: 152910 - DNA, 17 bp, Arabidopsis thaliana
tgctttacccaggtggc

SEQ ID NO: 152911 - DNA, 17 bp, Arabidopsis thaliana
tgctttaggccatcttc

SEQ ID NO: 152912 - DNA, 17 bp, Arabidopsis thaliana
tgctttatcctgttagc

SEQ ID NO: 152913 - DNA, 17 bp, Arabidopsis thaliana
tgctttcaccgagacag

SEQ ID NO: 152914 - DNA, 17 bp, Arabidopsis thaliana
tgctttcagactaatgc

SEQ ID NO: 152915 - DNA, 17 bp, Arabidopsis thaliana
tgctttcagccacattt

SEQ ID NO: 152916 - DNA, 17 bp, Arabidopsis thaliana
tgctttcagcgattgtc

SEQ ID NO: 152917 - DNA, 17 bp, Arabidopsis thaliana
tgctttccaactaatgc

SEQ ID NO: 152918 - DNA, 17 bp, Arabidopsis thaliana
tgctttcccttgacacg

SEQ ID NO: 152919 - DNA, 17 bp, Arabidopsis thaliana
tgctttccgacgaagca

SEQ ID NO: 152920 - DNA, 17 bp, Arabidopsis thaliana
tgctttccgactaatgc

SEQ ID NO: 152921 - DNA, 17 bp, Arabidopsis thaliana
tgctttccgactaatgt

SEQ ID NO: 152922 - DNA, 17 bp, Arabidopsis thaliana
tgctttccgttttcaat

SEQ ID NO: 152923 - DNA, 17 bp, Arabidopsis thaliana
tgctttcgacaatgtgc

SEQ ID NO: 152924 - DNA, 17 bp, Arabidopsis thaliana
tgctttcgaccatattt

SEQ ID NO: 152925 - DNA, 17 bp, Arabidopsis thaliana
tgctttcgatgagattt

SEQ ID NO: 152926 - DNA, 17 bp, Arabidopsis thaliana
tgctttcgctacacctc

SEQ ID NO: 152927 - DNA, 17 bp, Arabidopsis thaliana
tgctttcggactttcgg

SEQ ID NO: 152928 - DNA, 17 bp, Arabidopsis thaliana
tgctttcggatcttttg

SEQ ID NO: 152929 - DNA, 17 bp, Arabidopsis thaliana
tgctttcggccctgttc

SEQ ID NO: 152930 - DNA, 17 bp, Arabidopsis thaliana
tgctttcggtcctcgtg

SEQ ID NO: 152931 - DNA, 17 bp, Arabidopsis thaliana
tgctttcgtcgaagggc

SEQ ID NO: 152932 - DNA, 17 bp, Arabidopsis thaliana
tgctttctcagtgggcg

SEQ ID NO: 152933 - DNA, 17 bp, Arabidopsis thaliana
tgctttctcgacattgg

SEQ ID NO: 152934 - DNA, 17 bp, Arabidopsis thaliana
tgctttctcgacattta

SEQ ID NO: 152935 - DNA, 17 bp, Arabidopsis thaliana
tgctttctcgacatttg

SEQ ID NO: 152936 - DNA, 17 bp, Arabidopsis thaliana
tgctttctcgacatttt

SEQ ID NO: 152937 - DNA, 17 bp, Arabidopsis thaliana
tgctttctcgccactac

SEQ ID NO: 152938 - DNA, 17 bp, Arabidopsis thaliana
tgctttctcgttatccc

SEQ ID NO: 152939 - DNA, 17 bp, Arabidopsis thaliana
tgctttctctatgagtg

SEQ ID NO: 152940 - DNA, 17 bp, Arabidopsis thaliana
tgctttctctctctttc

SEQ ID NO: 152941 - DNA, 17 bp, Arabidopsis thaliana
tgctttcttgagaccat

SEQ ID NO: 152942 - DNA, 17 bp, Arabidopsis thaliana
tgctttgaccaaggctc

SEQ ID NO: 152943 - DNA, 17 bp, Arabidopsis thaliana
tgctttgaccacagata

SEQ ID NO: 152944 - DNA, 17 bp, Arabidopsis thaliana
tgctttgaccagcagcg

SEQ ID NO: 152945 - DNA, 17 bp, Arabidopsis thaliana
tgctttgaccgagatct

SEQ ID NO: 152946 - DNA, 17 bp, Arabidopsis thaliana
tgctttgatctcaacag

SEQ ID NO: 152947 - DNA, 17 bp, Arabidopsis thaliana
tgctttgatgtcgcaga

SEQ ID NO: 152948 - DNA, 17 bp, Arabidopsis thaliana
tgctttgatttgcgtac

SEQ ID NO: 152949 - DNA, 17 bp, Arabidopsis thaliana
tgctttgcaacaagccg

SEQ ID NO: 152950 - DNA, 17 bp, Arabidopsis thaliana
tgctttgcaacaagcgg

SEQ ID NO: 152951 - DNA, 17 bp, Arabidopsis thaliana
tgctttgctgatggttg

SEQ ID NO: 152952 - DNA, 17 bp, Arabidopsis thaliana
tgctttgcttacttccg

SEQ ID NO: 152953 - DNA, 17 bp, Arabidopsis thaliana
tgctttggatataatcg

SEQ ID NO: 152954 - DNA, 17 bp, Arabidopsis thaliana
tgctttggattctttgc

SEQ ID NO: 152955 - DNA, 17 bp, Arabidopsis thaliana
tgctttgggtggccaca

SEQ ID NO: 152956 - DNA, 17 bp, Arabidopsis thaliana
tgctttggtgaatagat

SEQ ID NO: 152957 - DNA, 17 bp, Arabidopsis thaliana
tgctttggttgagtaga

SEQ ID NO: 152958 - DNA, 17 bp, Arabidopsis thaliana
tgctttggtttatcccc

SEQ ID NO: 152959 - DNA, 17 bp, Arabidopsis thaliana
tgctttgtcattcactt

SEQ ID NO: 152960 - DNA, 17 bp, Arabidopsis thaliana
tgctttgtccgcttgat

SEQ ID NO: 152961 - DNA, 17 bp, Arabidopsis thaliana
tgctttgtgatgtttgt

SEQ ID NO: 152962 - DNA, 17 bp, Arabidopsis thaliana
tgctttgtgtgtgtggt

SEQ ID NO: 152963 - DNA, 17 bp, Arabidopsis thaliana
tgctttgttagttgacc

SEQ ID NO: 152964 - DNA, 17 bp, Arabidopsis thaliana
tgctttgttgagccgtc

SEQ ID NO: 152965 - DNA, 17 bp, Arabidopsis thaliana
tgctttgttgctacgtc

SEQ ID NO: 152966 - DNA, 17 bp, Arabidopsis thaliana
tgctttgttttcagact

SEQ ID NO: 152967 - DNA, 17 bp, Arabidopsis thaliana
tgcttttaagatctgtt

SEQ ID NO: 152968 - DNA, 17 bp, Arabidopsis thaliana
tgcttttaggaggaagg

SEQ ID NO: 152969 - DNA, 17 bp, Arabidopsis thaliana
tgcttttccactacgca

SEQ ID NO: 152970 - DNA, 17 bp, Arabidopsis thaliana
tgcttttccttcactct

SEQ ID NO: 152971 - DNA, 17 bp, Arabidopsis thaliana
tgcttttcttcttcccc

SEQ ID NO: 152972 - DNA, 17 bp, Arabidopsis thaliana
tgcttttgctgcttcct

SEQ ID NO: 152973 - DNA, 17 bp, Arabidopsis thaliana
tgcttttgcttctgcaa

SEQ ID NO: 152974 - DNA, 17 bp, Arabidopsis thaliana
tgcttttggcaaatgcg

SEQ ID NO: 152975 - DNA, 17 bp, Arabidopsis thaliana
tgcttttggttcaactt

SEQ ID NO: 152976 - DNA, 17 bp, Arabidopsis thaliana
tgcttttggttgtgcac

SEQ ID NO: 152977 - DNA, 17 bp, Arabidopsis thaliana
tgcttttggttgtggac

SEQ ID NO: 152978 - DNA, 17 bp, Arabidopsis thaliana
tgcttttgtcttgaggt

SEQ ID NO: 152979 - DNA, 17 bp, Arabidopsis thaliana
tgcttttgttgcaagta

SEQ ID NO: 152980 - DNA, 17 bp, Arabidopsis thaliana
tgctttttcgcctcaga

SEQ ID NO: 152981 - DNA, 17 bp, Arabidopsis thaliana
tgctttttcgttggcag

SEQ ID NO: 152982 - DNA, 17 bp, Arabidopsis thaliana
tgctttttgatccttcg

SEQ ID NO: 152983 - DNA, 17 bp, Arabidopsis thaliana
tgctttttgatccttct

SEQ ID NO: 152984 - DNA, 17 bp, Arabidopsis thaliana
tgctttttggatgtttg

SEQ ID NO: 152985 - DNA, 17 bp, Arabidopsis thaliana
tgcttttttctgcttga

SEQ ID NO: 152986 - DNA, 17 bp, Arabidopsis thaliana
tgcttttttgagccgtc

SEQ ID NO: 152987 - DNA, 17 bp, Arabidopsis thaliana
tggaaaaacaatacatc

SEQ ID NO: 152988 - DNA, 17 bp, Arabidopsis thaliana
tggaaaaacaggaatgc

SEQ ID NO: 152989 - DNA, 17 bp, Arabidopsis thaliana
tggaaaaacctgcgtga

SEQ ID NO: 152990 - DNA, 17 bp, Arabidopsis thaliana
tggaaaacatgattagg

SEQ ID NO: 152991 - DNA, 17 bp, Arabidopsis thaliana
tggaaaaccagcaggtg

SEQ ID NO: 152992 - DNA, 17 bp, Arabidopsis thaliana
tggaaaacccctgggac

SEQ ID NO: 152993 - DNA, 17 bp, Arabidopsis thaliana
tggaaaacggtccagcg

SEQ ID NO: 152994 - DNA, 17 bp, Arabidopsis thaliana
tggaaaagttccattgt

SEQ ID NO: 152995 - DNA, 17 bp, Arabidopsis thaliana
tggaaaagtttcattgt

SEQ ID NO: 152996 - DNA, 17 bp, Arabidopsis thaliana
tggaaaagtttttccgg

SEQ ID NO: 152997 - DNA, 17 bp, Arabidopsis thaliana
tggaaaatccacctagg

SEQ ID NO: 152998 - DNA, 17 bp, Arabidopsis thaliana
tggaaaatcctagaatt

SEQ ID NO: 152999 - DNA, 17 bp, Arabidopsis thaliana
tggaaaatctcgggttt

SEQ ID NO: 153000 - DNA, 17 bp, Arabidopsis thaliana
tggaaaatctgccatat

SEQ ID NO: 153001 - DNA, 17 bp, Arabidopsis thaliana
tggaaaatctgtcagtt

SEQ ID NO: 153002 - DNA, 17 bp, Arabidopsis thaliana
tggaaaatgaggatgtc

SEQ ID NO: 153003 - DNA, 17 bp, Arabidopsis thaliana
tggaaaatgtcgagctt

SEQ ID NO: 153004 - DNA, 17 bp, Arabidopsis thaliana
tggaaaatgtctgtgta

SEQ ID NO: 153005 - DNA, 17 bp, Arabidopsis thaliana
tggaaaatgtgtatcgc

SEQ ID NO: 153006 - DNA, 17 bp, Arabidopsis thaliana
tggaaaattgccttcga

SEQ ID NO: 153007 - DNA, 17 bp, Arabidopsis thaliana
tggaaacacagctatct

SEQ ID NO: 153008 - DNA, 17 bp, Arabidopsis thaliana
tggaaacacttactgac

SEQ ID NO: 153009 - DNA, 17 bp, Arabidopsis thaliana
tggaaacagaattgcag

SEQ ID NO: 153010 - DNA, 17 bp, Arabidopsis thaliana
tggaaacccacgtgatt

SEQ ID NO: 153011 - DNA, 17 bp, Arabidopsis thaliana
tggaaacggctcaccca

SEQ ID NO: 153012 - DNA, 17 bp, Arabidopsis thaliana
tggaaacggctcacccg

SEQ ID NO: 153013 - DNA, 17 bp, Arabidopsis thaliana
tggaaacggctcagcca

SEQ ID NO: 153014 - DNA, 17 bp, Arabidopsis thaliana
tggaaacggctcagccg

SEQ ID NO: 153015 - DNA, 17 bp, Arabidopsis thaliana
tggaaacgtgcggttta

SEQ ID NO: 153016 - DNA, 17 bp, Arabidopsis thaliana
tggaaactcaaggctga

SEQ ID NO: 153017 - DNA, 17 bp, Arabidopsis thaliana
tggaaactgagacaaaa

SEQ ID NO: 153018 - DNA, 17 bp, Arabidopsis thaliana
tggaaacttaacgacat

SEQ ID NO: 153019 - DNA, 17 bp, Arabidopsis thaliana
tggaaagaatcggtttc

SEQ ID NO: 153020 - DNA, 17 bp, Arabidopsis thaliana
tggaaagacctagacga

SEQ ID NO: 153021 - DNA, 17 bp, Arabidopsis thaliana
tggaaagactttggccc

SEQ ID NO: 153022 - DNA, 17 bp, Arabidopsis thaliana
tggaaagactttggcgc

SEQ ID NO: 153023 - DNA, 17 bp, Arabidopsis thaliana
tggaaagagaaaaatcg

SEQ ID NO: 153024 - DNA, 17 bp, Arabidopsis thaliana
tggaaagagagtttcct

SEQ ID NO: 153025 - DNA, 17 bp, Arabidopsis thaliana
tggaaagagagtttctt

SEQ ID NO: 153026 - DNA, 17 bp, Arabidopsis thaliana
tggaaagagtgcggatc

SEQ ID NO: 153027 - DNA, 17 bp, Arabidopsis thaliana
tggaaagattacgggtt

SEQ ID NO: 153028 - DNA, 17 bp, Arabidopsis thaliana
tggaaagctctccaaag

SEQ ID NO: 153029 - DNA, 17 bp, Arabidopsis thaliana
tggaaagctctccaaat

SEQ ID NO: 153030 - DNA, 17 bp, Arabidopsis thaliana
tggaaaggcacatggac

SEQ ID NO: 153031 - DNA, 17 bp, Arabidopsis thaliana
tggaaaggccatcttat

SEQ ID NO: 153032 - DNA, 17 bp, Arabidopsis thaliana
tggaaaggggcgccaga

SEQ ID NO: 153033 - DNA, 17 bp, Arabidopsis thaliana
tggaaaggggcgcctga

SEQ ID NO: 153034 - DNA, 17 bp, Arabidopsis thaliana
tggaaagggttgtgcta

SEQ ID NO: 153035 - DNA, 17 bp, Arabidopsis thaliana
tggaaagggttgtgctg

SEQ ID NO: 153036 - DNA, 17 bp, Arabidopsis thaliana
tggaaagtctgtcagtt

SEQ ID NO: 153037 - DNA, 17 bp, Arabidopsis thaliana
tggaaagtgcggctgga

SEQ ID NO: 153038 - DNA, 17 bp, Arabidopsis thaliana
tggaaagtgttgaatgg

SEQ ID NO: 153039 - DNA, 17 bp, Arabidopsis thaliana
tggaaagtgtttgccaa

SEQ ID NO: 153040 - DNA, 17 bp, Arabidopsis thaliana
tggaaagttgtcatcgt

SEQ ID NO: 153041 - DNA, 17 bp, Arabidopsis thaliana
tggaaagtttgacttga

SEQ ID NO: 153042 - DNA, 17 bp, Arabidopsis thaliana
tggaaatatgctgagag

SEQ ID NO: 153043 - DNA, 17 bp, Arabidopsis thaliana
tggaaatcacggttgtt

SEQ ID NO: 153044 - DNA, 17 bp, Arabidopsis thaliana
tggaaatcagatcaaca

SEQ ID NO: 153045 - DNA, 17 bp, Arabidopsis thaliana
tggaaatccagcgcacg

SEQ ID NO: 153046 - DNA, 17 bp, Arabidopsis thaliana
tggaaatccatgggttc

SEQ ID NO: 153047 - DNA, 17 bp, Arabidopsis thaliana
tggaaatctctggtttt

SEQ ID NO: 153048 - DNA, 17 bp, Arabidopsis thaliana
tggaaatgacgatttcg

SEQ ID NO: 153049 - DNA, 17 bp, Arabidopsis thaliana
tggaaatgatctggtta

SEQ ID NO: 153050 - DNA, 17 bp, Arabidopsis thaliana
tggaaatgccatctcca

SEQ ID NO: 153051 - DNA, 17 bp, Arabidopsis thaliana
tggaaatgctctaacac

SEQ ID NO: 153052 - DNA, 17 bp, Arabidopsis thaliana
tggaaatgctctaagtc

SEQ ID NO: 153053 - DNA, 17 bp, Arabidopsis thaliana
tggaaatgttcgacgag

SEQ ID NO: 153054 - DNA, 17 bp, Arabidopsis thaliana
tggaaattctaaaaacc

SEQ ID NO: 153055 - DNA, 17 bp, Arabidopsis thaliana
tggaaattgcgcatgtg

SEQ ID NO: 153056 - DNA, 17 bp, Arabidopsis thaliana
tggaaattttgtttgtt

SEQ ID NO: 153057 - DNA, 17 bp, Arabidopsis thaliana
tggaacaaagtctttct

SEQ ID NO: 153058 - DNA, 17 bp, Arabidopsis thaliana
tggaacaacaaagccac

SEQ ID NO: 153059 - DNA, 17 bp, Arabidopsis thaliana
tggaacaacctggccaa

SEQ ID NO: 153060 - DNA, 17 bp, Arabidopsis thaliana
tggaacaacgacccgaa

SEQ ID NO: 153061 - DNA, 17 bp, Arabidopsis thaliana
tggaacaactgccagac

SEQ ID NO: 153062 - DNA, 17 bp, Arabidopsis thaliana
tggaacaccgagttccc

SEQ ID NO: 153063 - DNA, 17 bp, Arabidopsis thaliana
tggaacacggttaggat

SEQ ID NO: 153064 - DNA, 17 bp, Arabidopsis thaliana
tggaacacggttggatt

SEQ ID NO: 153065 - DNA, 17 bp, Arabidopsis thaliana
tggaacagacggtatgg

SEQ ID NO: 153066 - DNA, 17 bp, Arabidopsis thaliana
tggaacagctggttaca

SEQ ID NO: 153067 - DNA, 17 bp, Arabidopsis thaliana
tggaacaggtacccctg

SEQ ID NO: 153068 - DNA, 17 bp, Arabidopsis thaliana
tggaacagtgtggtgga

SEQ ID NO: 153069 - DNA, 17 bp, Arabidopsis thaliana
tggaaccagatcttaaa

SEQ ID NO: 153070 - DNA, 17 bp, Arabidopsis thaliana
tggaaccatgaacagac

SEQ ID NO: 153071 - DNA, 17 bp, Arabidopsis thaliana
tggaacccaagaaaacg

SEQ ID NO: 153072 - DNA, 17 bp, Arabidopsis thaliana
tggaacccggttaggac

SEQ ID NO: 153073 - DNA, 17 bp, Arabidopsis thaliana
tggaacccggttaggat

SEQ ID NO: 153074 - DNA, 17 bp, Arabidopsis thaliana
tggaacccggttgagcc

SEQ ID NO: 153075 - DNA, 17 bp, Arabidopsis thaliana
tggaaccctaaacagac

SEQ ID NO: 153076 - DNA, 17 bp, Arabidopsis thaliana
tggaaccctgaacagac

SEQ ID NO: 153077 - DNA, 17 bp, Arabidopsis thaliana
tggaaccgctctctgga

SEQ ID NO: 153078 - DNA, 17 bp, Arabidopsis thaliana
tggaaccgcttgatccg

SEQ ID NO: 153079 - DNA, 17 bp, Arabidopsis thaliana
tggaaccggtgtctcct

SEQ ID NO: 153080 - DNA, 17 bp, Arabidopsis thaliana
tggaaccggttaggatt

SEQ ID NO: 153081 - DNA, 17 bp, Arabidopsis thaliana
tggaacctctttgcttt

SEQ ID NO: 153082 - DNA, 17 bp, Arabidopsis thaliana
tggaaccttatccagct

SEQ ID NO: 153083 - DNA, 17 bp, Arabidopsis thaliana
tggaacgacgccggccc

SEQ ID NO: 153084 - DNA, 17 bp, Arabidopsis thaliana
tggaacgacttttccat

SEQ ID NO: 153085 - DNA, 17 bp, Arabidopsis thaliana
tggaacgattgttcgct

SEQ ID NO: 153086 - DNA, 17 bp, Arabidopsis thaliana
tggaacgcggtagagta

SEQ ID NO: 153087 - DNA, 17 bp, Arabidopsis thaliana
tggaacgctcttgctca

SEQ ID NO: 153088 - DNA, 17 bp, Arabidopsis thaliana
tggaacggcgagaagct

SEQ ID NO: 153089 - DNA, 17 bp, Arabidopsis thaliana
tggaactaaactcgtgg

SEQ ID NO: 153090 - DNA, 17 bp, Arabidopsis thaliana
tggaactaacttgctac

SEQ ID NO: 153091 - DNA, 17 bp, Arabidopsis thaliana
tggaactccttacgtat

SEQ ID NO: 153092 - DNA, 17 bp, Arabidopsis thaliana
tggaactcgagtatcac

SEQ ID NO: 153093 - DNA, 17 bp, Arabidopsis thaliana
tggaactgactgctgcc

SEQ ID NO: 153094 - DNA, 17 bp, Arabidopsis thaliana
tggaactgccacattct

SEQ ID NO: 153095 - DNA, 17 bp, Arabidopsis thaliana
tggaactgcgacaggag

SEQ ID NO: 153096 - DNA, 17 bp, Arabidopsis thaliana
tggaactgcgacaggca

SEQ ID NO: 153097 - DNA, 17 bp, Arabidopsis thaliana
tggaactgtcggaggag

SEQ ID NO: 153098 - DNA, 17 bp, Arabidopsis thaliana
tggaactgttccattgt

SEQ ID NO: 153099 - DNA, 17 bp, Arabidopsis thaliana
tggaactgttgcagatc

SEQ ID NO: 153100 - DNA, 17 bp, Arabidopsis thaliana
tggaacttatttacaac

SEQ ID NO: 153101 - DNA, 17 bp, Arabidopsis thaliana
tggaacttatttacaat

SEQ ID NO: 153102 - DNA, 17 bp, Arabidopsis thaliana
tggaacttcactagatt

SEQ ID NO: 153103 - DNA, 17 bp, Arabidopsis thaliana
tggaacttgacttgctt

SEQ ID NO: 153104 - DNA, 17 bp, Arabidopsis thaliana
tggaacttgtggcggat

SEQ ID NO: 153105 - DNA, 17 bp, Arabidopsis thaliana
tggaacttgtgtgagat

SEQ ID NO: 153106 - DNA, 17 bp, Arabidopsis thaliana
tggaacttttccactga

SEQ ID NO: 153107 - DNA, 17 bp, Arabidopsis thaliana
tggaacttttccattga

SEQ ID NO: 153108 - DNA, 17 bp, Arabidopsis thaliana
tggaacttttccgggac

SEQ ID NO: 153109 - DNA, 17 bp, Arabidopsis thaliana
tggaagaagtgccctac

SEQ ID NO: 153110 - DNA, 17 bp, Arabidopsis thaliana
tggaagacaccccagac

SEQ ID NO: 153111 - DNA, 17 bp, Arabidopsis thaliana
tggaagaccagcgtcgc

SEQ ID NO: 153112 - DNA, 17 bp, Arabidopsis thaliana
tggaagacccaagtgac

SEQ ID NO: 153113 - DNA, 17 bp, Arabidopsis thaliana
tggaagaccggaacgag

SEQ ID NO: 153114 - DNA, 17 bp, Arabidopsis thaliana
tggaagacgatcagata

SEQ ID NO: 153115 - DNA, 17 bp, Arabidopsis thaliana
tggaagacgctgctaat

SEQ ID NO: 153116 - DNA, 17 bp, Arabidopsis thaliana
tggaagactctcatgga

SEQ ID NO: 153117 - DNA, 17 bp, Arabidopsis thaliana
tggaagacttgcagcag

SEQ ID NO: 153118 - DNA, 17 bp, Arabidopsis thaliana
tggaagagcaccgcacg

SEQ ID NO: 153119 - DNA, 17 bp, Arabidopsis thaliana
tggaagatcgtaatcga

SEQ ID NO: 153120 - DNA, 17 bp, Arabidopsis thaliana
tggaagatctggtggtt

SEQ ID NO: 153121 - DNA, 17 bp, Arabidopsis thaliana
tggaagatgctttggga

SEQ ID NO: 153122 - DNA, 17 bp, Arabidopsis thaliana
tggaagattacgagatt

SEQ ID NO: 153123 - DNA, 17 bp, Arabidopsis thaliana
tggaagattttagttat

SEQ ID NO: 153124 - DNA, 17 bp, Arabidopsis thaliana
tggaagcaaacacgtgt

SEQ ID NO: 153125 - DNA, 17 bp, Arabidopsis thaliana
tggaagcaccgcgaggt

SEQ ID NO: 153126 - DNA, 17 bp, Arabidopsis thaliana
tggaagcaccttgtgag

SEQ ID NO: 153127 - DNA, 17 bp, Arabidopsis thaliana
tggaagcacttggccca

SEQ ID NO: 153128 - DNA, 17 bp, Arabidopsis thaliana
tggaagcaggcctcata

SEQ ID NO: 153129 - DNA, 17 bp, Arabidopsis thaliana
tggaagcccacagtcta

SEQ ID NO: 153130 - DNA, 17 bp, Arabidopsis thaliana
tggaagcccccttggcc

SEQ ID NO: 153131 - DNA, 17 bp, Arabidopsis thaliana
tggaagcccgcagcgat

SEQ ID NO: 153132 - DNA, 17 bp, Arabidopsis thaliana
tggaagccgatactcta

SEQ ID NO: 153133 - DNA, 17 bp, Arabidopsis thaliana
tggaagccgcgtctgga

SEQ ID NO: 153134 - DNA, 17 bp, Arabidopsis thaliana
tggaagcctcggtattt

SEQ ID NO: 153135 - DNA, 17 bp, Arabidopsis thaliana
tggaagcggccgtgtga

SEQ ID NO: 153136 - DNA, 17 bp, Arabidopsis thaliana
tggaagcgtgtgattgg

SEQ ID NO: 153137 - DNA, 17 bp, Arabidopsis thaliana
tggaagctacggcgata

SEQ ID NO: 153138 - DNA, 17 bp, Arabidopsis thaliana
tggaagctactaacgat

SEQ ID NO: 153139 - DNA, 17 bp, Arabidopsis thaliana
tggaagctcggaccaga

SEQ ID NO: 153140 - DNA, 17 bp, Arabidopsis thaliana
tggaagctctgactctc

SEQ ID NO: 153141 - DNA, 17 bp, Arabidopsis thaliana
tggaagctcttctttgg

SEQ ID NO: 153142 - DNA, 17 bp, Arabidopsis thaliana
tggaagctgtttcagaa

SEQ ID NO: 153143 - DNA, 17 bp, Arabidopsis thaliana
tggaagctttgtgatgt

SEQ ID NO: 153144 - DNA, 17 bp, Arabidopsis thaliana
tggaaggaagtgcacat

SEQ ID NO: 153145 - DNA, 17 bp, Arabidopsis thaliana
tggaaggaccatgaggg

SEQ ID NO: 153146 - DNA, 17 bp, Arabidopsis thaliana
tggaaggacttgtttga

SEQ ID NO: 153147 - DNA, 17 bp, Arabidopsis thaliana
tggaaggattacggatt

SEQ ID NO: 153148 - DNA, 17 bp, Arabidopsis thaliana
tggaaggattacgggct

SEQ ID NO: 153149 - DNA, 17 bp, Arabidopsis thaliana
tggaaggatttggtcta

SEQ ID NO: 153150 - DNA, 17 bp, Arabidopsis thaliana
tggaaggatttggtctg

SEQ ID NO: 153151 - DNA, 17 bp, Arabidopsis thaliana
tggaaggcaaagcccgt

SEQ ID NO: 153152 - DNA, 17 bp, Arabidopsis thaliana
tggaaggcaacccactg

SEQ ID NO: 153153 - DNA, 17 bp, Arabidopsis thaliana
tggaaggctagctttgg

SEQ ID NO: 153154 - DNA, 17 bp, Arabidopsis thaliana
tggaagggacgcattta

SEQ ID NO: 153155 - DNA, 17 bp, Arabidopsis thaliana
tggaagggagtaggcac

SEQ ID NO: 153156 - DNA, 17 bp, Arabidopsis thaliana
tggaaggtgcggctgca

SEQ ID NO: 153157 - DNA, 17 bp, Arabidopsis thaliana
tggaaggtgcggctgga

SEQ ID NO: 153158 - DNA, 17 bp, Arabidopsis thaliana
tggaaggtgcggttgga

SEQ ID NO: 153159 - DNA, 17 bp, Arabidopsis thaliana
tggaaggtgcgtctgga

SEQ ID NO: 153160 - DNA, 17 bp, Arabidopsis thaliana
tggaagtcgaaatccgc

SEQ ID NO: 153161 - DNA, 17 bp, Arabidopsis thaliana
tggaagtcgagtatcac

SEQ ID NO: 153162 - DNA, 17 bp, Arabidopsis thaliana
tggaagtctgtgtcatt

SEQ ID NO: 153163 - DNA, 17 bp, Arabidopsis thaliana
tggaagtgcagtgatgt

SEQ ID NO: 153164 - DNA, 17 bp, Arabidopsis thaliana
tggaagtgccatattgt

SEQ ID NO: 153165 - DNA, 17 bp, Arabidopsis thaliana
tggaagtggcggacagg

SEQ ID NO: 153166 - DNA, 17 bp, Arabidopsis thaliana
tggaagtggcggacatg

SEQ ID NO: 153167 - DNA, 17 bp, Arabidopsis thaliana
tggaagtgtgtgttaaa

SEQ ID NO: 153168 - DNA, 17 bp, Arabidopsis thaliana
tggaagttgttgagcca

SEQ ID NO: 153169 - DNA, 17 bp, Arabidopsis thaliana
tggaagtttcatcacag

SEQ ID NO: 153170 - DNA, 17 bp, Arabidopsis thaliana
tggaagtttgaagatct

SEQ ID NO: 153171 - DNA, 17 bp, Arabidopsis thaliana
tggaagtttgcgtgggc

SEQ ID NO: 153172 - DNA, 17 bp, Arabidopsis thaliana
tggaataaccgggtgcg

SEQ ID NO: 153173 - DNA, 17 bp, Arabidopsis thaliana
tggaataacgatgtgga

SEQ ID NO: 153174 - DNA, 17 bp, Arabidopsis thaliana
tggaataacgcgggaac

SEQ ID NO: 153175 - DNA, 17 bp, Arabidopsis thaliana
tggaataatccattgag

SEQ ID NO: 153176 - DNA, 17 bp, Arabidopsis thaliana
tggaataatttcagcat

SEQ ID NO: 153177 - DNA, 17 bp, Arabidopsis thaliana
tggaataatttcaggat

SEQ ID NO: 153178 - DNA, 17 bp, Arabidopsis thaliana
tggaatagcggctttgc

SEQ ID NO: 153179 - DNA, 17 bp, Arabidopsis thaliana
tggaatagcggctttgg

SEQ ID NO: 153180 - DNA, 17 bp, Arabidopsis thaliana
tggaatatcactggcct

SEQ ID NO: 153181 - DNA, 17 bp, Arabidopsis thaliana
tggaatatgaccagttt

SEQ ID NO: 153182 - DNA, 17 bp, Arabidopsis thaliana
tggaatatggtcgtgcg

SEQ ID NO: 153183 - DNA, 17 bp, Arabidopsis thaliana
tggaatatgtccaatgt

SEQ ID NO: 153184 - DNA, 17 bp, Arabidopsis thaliana
tggaatcattttggcct

SEQ ID NO: 153185 - DNA, 17 bp, Arabidopsis thaliana
tggaatccaattgacgc

SEQ ID NO: 153186 - DNA, 17 bp, Arabidopsis thaliana
tggaatccgctttcagg

SEQ ID NO: 153187 - DNA, 17 bp, Arabidopsis thaliana
tggaatccgtagtctgt

SEQ ID NO: 153188 - DNA, 17 bp, Arabidopsis thaliana
tggaatccgtagtcttt

SEQ ID NO: 153189 - DNA, 17 bp, Arabidopsis thaliana
tggaatcctgtcacctt

SEQ ID NO: 153190 - DNA, 17 bp, Arabidopsis thaliana
tggaatcctgttatgat

SEQ ID NO: 153191 - DNA, 17 bp, Arabidopsis thaliana
tggaatcgcaatgacca

SEQ ID NO: 153192 - DNA, 17 bp, Arabidopsis thaliana
tggaatcgctaacgact

SEQ ID NO: 153193 - DNA, 17 bp, Arabidopsis thaliana
tggaatcgctaataacc

SEQ ID NO: 153194 - DNA, 17 bp, Arabidopsis thaliana
tggaatcgctaatgacc

SEQ ID NO: 153195 - DNA, 17 bp, Arabidopsis thaliana
tggaatcgctaatggcc

SEQ ID NO: 153196 - DNA, 17 bp, Arabidopsis thaliana
tggaatcggctctatac

SEQ ID NO: 153197 - DNA, 17 bp, Arabidopsis thaliana
tggaatcgggcaacgag

SEQ ID NO: 153198 - DNA, 17 bp, Arabidopsis thaliana
tggaatctcatcttact

SEQ ID NO: 153199 - DNA, 17 bp, Arabidopsis thaliana
tggaatctccgtcgtta

SEQ ID NO: 153200 - DNA, 17 bp, Arabidopsis thaliana
tggaatctcgacttgcc

SEQ ID NO: 153201 - DNA, 17 bp, Arabidopsis thaliana
tggaatctctacatttt

SEQ ID NO: 153202 - DNA, 17 bp, Arabidopsis thaliana
tggaatcttccgcagga

SEQ ID NO: 153203 - DNA, 17 bp, Arabidopsis thaliana
tggaatgaccgaattac

SEQ ID NO: 153204 - DNA, 17 bp, Arabidopsis thaliana
tggaatgcccactgtcc

SEQ ID NO: 153205 - DNA, 17 bp, Arabidopsis thaliana
tggaatgctagaagact

SEQ ID NO: 153206 - DNA, 17 bp, Arabidopsis thaliana
tggaatgctgactcgcg

SEQ ID NO: 153207 - DNA, 17 bp, Arabidopsis thaliana
tggaatggatatgaggc

SEQ ID NO: 153208 - DNA, 17 bp, Arabidopsis thaliana
tggaatggatatgtgac

SEQ ID NO: 153209 - DNA, 17 bp, Arabidopsis thaliana
tggaatggatatgtgga

SEQ ID NO: 153210 - DNA, 17 bp, Arabidopsis thaliana
tggaatggatatgtggc

SEQ ID NO: 153211 - DNA, 17 bp, Arabidopsis thaliana
tggaatggcggttcaga

SEQ ID NO: 153212 - DNA, 17 bp, Arabidopsis thaliana
tggaatgggtcggccgg

SEQ ID NO: 153213 - DNA, 17 bp, Arabidopsis thaliana
tggaatgtgatttctgc

SEQ ID NO: 153214 - DNA, 17 bp, Arabidopsis thaliana
tggaattattggttcag

SEQ ID NO: 153215 - DNA, 17 bp, Arabidopsis thaliana
tggaattccaacaaaat

SEQ ID NO: 153216 - DNA, 17 bp, Arabidopsis thaliana
tggaattccgtggatga

SEQ ID NO: 153217 - DNA, 17 bp, Arabidopsis thaliana
tggaattcctcgtgtcg

SEQ ID NO: 153218 - DNA, 17 bp, Arabidopsis thaliana
tggaattcctcgtgttg

SEQ ID NO: 153219 - DNA, 17 bp, Arabidopsis thaliana
tggaattgccaaggact

SEQ ID NO: 153220 - DNA, 17 bp, Arabidopsis thaliana
tggaattgtaacagtct

SEQ ID NO: 153221 - DNA, 17 bp, Arabidopsis thaliana
tggaatttatttacaat

SEQ ID NO: 153222 - DNA, 17 bp, Arabidopsis thaliana
tggaatttgccaacttg

SEQ ID NO: 153223 - DNA, 17 bp, Arabidopsis thaliana
tggaattttcgtgttgg

SEQ ID NO: 153224 - DNA, 17 bp, Arabidopsis thaliana
tggaattttgggtgcca

SEQ ID NO: 153225 - DNA, 17 bp, Arabidopsis thaliana
tggacaaaactggtcat

SEQ ID NO: 153226 - DNA, 17 bp, Arabidopsis thaliana
tggacaaagacccaagt

SEQ ID NO: 153227 - DNA, 17 bp, Arabidopsis thaliana
tggacaaagattgcgcc

SEQ ID NO: 153228 - DNA, 17 bp, Arabidopsis thaliana
tggacaaatttagaggg

SEQ ID NO: 153229 - DNA, 17 bp, Arabidopsis thaliana
tggacaaccaccgtcgc

SEQ ID NO: 153230 - DNA, 17 bp, Arabidopsis thaliana
tggacaactcacggtga

SEQ ID NO: 153231 - DNA, 17 bp, Arabidopsis thaliana
tggacaagaacatacct

SEQ ID NO: 153232 - DNA, 17 bp, Arabidopsis thaliana
tggacaagacagttaac

SEQ ID NO: 153233 - DNA, 17 bp, Arabidopsis thaliana
tggacaagacagtttac

SEQ ID NO: 153234 - DNA, 17 bp, Arabidopsis thaliana
tggacaagaccacccca

SEQ ID NO: 153235 - DNA, 17 bp, Arabidopsis thaliana
tggacaagaccgaagta

SEQ ID NO: 153236 - DNA, 17 bp, Arabidopsis thaliana
tggacaagcagggcacg

SEQ ID NO: 153237 - DNA, 17 bp, Arabidopsis thaliana
tggacaagccacgagcg

SEQ ID NO: 153238 - DNA, 17 bp, Arabidopsis thaliana
tggacaagcccatgggc

SEQ ID NO: 153239 - DNA, 17 bp, Arabidopsis thaliana
tggacaagtctgtcttt

SEQ ID NO: 153240 - DNA, 17 bp, Arabidopsis thaliana
tggacaagtgtcatcat

SEQ ID NO: 153241 - DNA, 17 bp, Arabidopsis thaliana
tggacaagttttcagac

SEQ ID NO: 153242 - DNA, 17 bp, Arabidopsis thaliana
tggacaagttttgtgtg

SEQ ID NO: 153243 - DNA, 17 bp, Arabidopsis thaliana
tggacaagtttttcgta

SEQ ID NO: 153244 - DNA, 17 bp, Arabidopsis thaliana
tggacaataaaccgctg

SEQ ID NO: 153245 - DNA, 17 bp, Arabidopsis thaliana
tggacaatgggttaccc

SEQ ID NO: 153246 - DNA, 17 bp, Arabidopsis thaliana
tggacaatggtctttaa

SEQ ID NO: 153247 - DNA, 17 bp, Arabidopsis thaliana
tggacaatggttcagac

SEQ ID NO: 153248 - DNA, 17 bp, Arabidopsis thaliana
tggacaattccttccga

SEQ ID NO: 153249 - DNA, 17 bp, Arabidopsis thaliana
tggacaatttcttttgt

SEQ ID NO: 153250 - DNA, 17 bp, Arabidopsis thaliana
tggacacaaacggtgag

SEQ ID NO: 153251 - DNA, 17 bp, Arabidopsis thaliana
tggacacaacatcccgt

SEQ ID NO: 153252 - DNA, 17 bp, Arabidopsis thaliana
tggacacaagcactagc

SEQ ID NO: 153253 - DNA, 17 bp, Arabidopsis thaliana
tggacacaagtatccga

SEQ ID NO: 153254 - DNA, 17 bp, Arabidopsis thaliana
tggacacacgtttctct

SEQ ID NO: 153255 - DNA, 17 bp, Arabidopsis thaliana
tggacacaggcctctaa

SEQ ID NO: 153256 - DNA, 17 bp, Arabidopsis thaliana
tggacaccaaaggtaga

SEQ ID NO: 153257 - DNA, 17 bp, Arabidopsis thaliana
tggacaccatattcgat

SEQ ID NO: 153258 - DNA, 17 bp, Arabidopsis thaliana
tggacaccgagtttgcc

SEQ ID NO: 153259 - DNA, 17 bp, Arabidopsis thaliana
tggacacgggccgcccg

SEQ ID NO: 153260 - DNA, 17 bp, Arabidopsis thaliana
tggacacggttgcttgc

SEQ ID NO: 153261 - DNA, 17 bp, Arabidopsis thaliana
tggacacgtcgttaagt

SEQ ID NO: 153262 - DNA, 17 bp, Arabidopsis thaliana
tggacactcgggtttaa

SEQ ID NO: 153263 - DNA, 17 bp, Arabidopsis thaliana
tggacactctgatggct

SEQ ID NO: 153264 - DNA, 17 bp, Arabidopsis thaliana
tggacacttccgcattt

SEQ ID NO: 153265 - DNA, 17 bp, Arabidopsis thaliana
tggacagaaagacccca

SEQ ID NO: 153266 - DNA, 17 bp, Arabidopsis thaliana
tggacagaaagacccta

SEQ ID NO: 153267 - DNA, 17 bp, Arabidopsis thaliana
tggacagactcatccgc

SEQ ID NO: 153268 - DNA, 17 bp, Arabidopsis thaliana
tggacagaggctatcag

SEQ ID NO: 153269 - DNA, 17 bp, Arabidopsis thaliana
tggacagcccaactcaa

SEQ ID NO: 153270 - DNA, 17 bp, Arabidopsis thaliana
tggacagcccgctttga

SEQ ID NO: 153271 - DNA, 17 bp, Arabidopsis thaliana
tggacagcctaggcgga

SEQ ID NO: 153272 - DNA, 17 bp, Arabidopsis thaliana
tggacaggattcttctt

SEQ ID NO: 153273 - DNA, 17 bp, Arabidopsis thaliana
tggacaggcggcccata

SEQ ID NO: 153274 - DNA, 17 bp, Arabidopsis thaliana
tggacaggtttggcagg

SEQ ID NO: 153275 - DNA, 17 bp, Arabidopsis thaliana
tggacagtgtgcttctc

SEQ ID NO: 153276 - DNA, 17 bp, Arabidopsis thaliana
tggacataagccgagag

SEQ ID NO: 153277 - DNA, 17 bp, Arabidopsis thaliana
tggacatatgatctgca

SEQ ID NO: 153278 - DNA, 17 bp, Arabidopsis thaliana
tggacatccattttggc

SEQ ID NO: 153279 - DNA, 17 bp, Arabidopsis thaliana
tggacatcttgtttttg

SEQ ID NO: 153280 - DNA, 17 bp, Arabidopsis thaliana
tggacatgcggcctaat

SEQ ID NO: 153281 - DNA, 17 bp, Arabidopsis thaliana
tggacatgctctaagtg

SEQ ID NO: 153282 - DNA, 17 bp, Arabidopsis thaliana
tggacatgctctaagtt

SEQ ID NO: 153283 - DNA, 17 bp, Arabidopsis thaliana
tggacatgctcttactt

SEQ ID NO: 153284 - DNA, 17 bp, Arabidopsis thaliana
tggacatggatagggtc

SEQ ID NO: 153285 - DNA, 17 bp, Arabidopsis thaliana
tggacatgtagaccggg

SEQ ID NO: 153286 - DNA, 17 bp, Arabidopsis thaliana
tggacatgttgaatgga

SEQ ID NO: 153287 - DNA, 17 bp, Arabidopsis thaliana
tggacatttttcggacc

SEQ ID NO: 153288 - DNA, 17 bp, Arabidopsis thaliana
tggaccaaaactggtgt

SEQ ID NO: 153289 - DNA, 17 bp, Arabidopsis thaliana
tggaccaaagaacatcc

SEQ ID NO: 153290 - DNA, 17 bp, Arabidopsis thaliana
tggaccaaagttccctt

SEQ ID NO: 153291 - DNA, 17 bp, Arabidopsis thaliana
tggaccaacatcctcaa

SEQ ID NO: 153292 - DNA, 17 bp, Arabidopsis thaliana
tggaccaaccataagct

SEQ ID NO: 153293 - DNA, 17 bp, Arabidopsis thaliana
tggaccaaccatgggct

SEQ ID NO: 153294 - DNA, 17 bp, Arabidopsis thaliana
tggaccaacgcggatta

SEQ ID NO: 153295 - DNA, 17 bp, Arabidopsis thaliana
tggaccaacttttatgg

SEQ ID NO: 153296 - DNA, 17 bp, Arabidopsis thaliana
tggaccaagagcgttac

SEQ ID NO: 153297 - DNA, 17 bp, Arabidopsis thaliana
tggaccaagatacccag

SEQ ID NO: 153298 - DNA, 17 bp, Arabidopsis thaliana
tggaccaagatatccag

SEQ ID NO: 153299 - DNA, 17 bp, Arabidopsis thaliana
tggaccaagatccgtat

SEQ ID NO: 153300 - DNA, 17 bp, Arabidopsis thaliana
tggaccaagatccgtgc

SEQ ID NO: 153301 - DNA, 17 bp, Arabidopsis thaliana
tggaccaagatcgaggt

SEQ ID NO: 153302 - DNA, 17 bp, Arabidopsis thaliana
tggaccaagtattccgt

SEQ ID NO: 153303 - DNA, 17 bp, Arabidopsis thaliana
tggaccaagtggtggtg

SEQ ID NO: 153304 - DNA, 17 bp, Arabidopsis thaliana
tggaccaatggcgaaaa

SEQ ID NO: 153305 - DNA, 17 bp, Arabidopsis thaliana
tggaccacacttgtttc

SEQ ID NO: 153306 - DNA, 17 bp, Arabidopsis thaliana
tggaccacacttgtttg

SEQ ID NO: 153307 - DNA, 17 bp, Arabidopsis thaliana
tggaccaccacactgtc

SEQ ID NO: 153308 - DNA, 17 bp, Arabidopsis thaliana
tggaccaccacattgtc

SEQ ID NO: 153309 - DNA, 17 bp, Arabidopsis thaliana
tggaccaccatgtgttt

SEQ ID NO: 153310 - DNA, 17 bp, Arabidopsis thaliana
tggaccaccgcgagcaa

SEQ ID NO: 153311 - DNA, 17 bp, Arabidopsis thaliana
tggaccaccggtgcggg

SEQ ID NO: 153312 - DNA, 17 bp, Arabidopsis thaliana
tggaccacgtctgcctg

SEQ ID NO: 153313 - DNA, 17 bp, Arabidopsis thaliana
tggaccactcacaatgc

SEQ ID NO: 153314 - DNA, 17 bp, Arabidopsis thaliana
tggaccacttttctttt

SEQ ID NO: 153315 - DNA, 17 bp, Arabidopsis thaliana
tggaccagaatcaccca

SEQ ID NO: 153316 - DNA, 17 bp, Arabidopsis thaliana
tggaccagaccgagaaa

SEQ ID NO: 153317 - DNA, 17 bp, Arabidopsis thaliana
tggaccagctaaagtgg

SEQ ID NO: 153318 - DNA, 17 bp, Arabidopsis thaliana
tggaccaggcttcatcc

SEQ ID NO: 153319 - DNA, 17 bp, Arabidopsis thaliana
tggaccaggcttcattc

SEQ ID NO: 153320 - DNA, 17 bp, Arabidopsis thaliana
tggaccagtaccaggcc

SEQ ID NO: 153321 - DNA, 17 bp, Arabidopsis thaliana
tggaccagtgactgacc

SEQ ID NO: 153322 - DNA, 17 bp, Arabidopsis thaliana
tggaccagtgtacgtgt

SEQ ID NO: 153323 - DNA, 17 bp, Arabidopsis thaliana
tggaccagtgttaggct

SEQ ID NO: 153324 - DNA, 17 bp, Arabidopsis thaliana
tggaccataggtccgat

SEQ ID NO: 153325 - DNA, 17 bp, Arabidopsis thaliana
tggaccataggtgcgat

SEQ ID NO: 153326 - DNA, 17 bp, Arabidopsis thaliana
tggaccatcaccgggtg

SEQ ID NO: 153327 - DNA, 17 bp, Arabidopsis thaliana
tggaccatcatgtggat

SEQ ID NO: 153328 - DNA, 17 bp, Arabidopsis thaliana
tggaccatcgtctatct

SEQ ID NO: 153329 - DNA, 17 bp, Arabidopsis thaliana
tggaccatctccggatt

SEQ ID NO: 153330 - DNA, 17 bp, Arabidopsis thaliana
tggaccatcttgacaac

SEQ ID NO: 153331 - DNA, 17 bp, Arabidopsis thaliana
tggaccatgattaattc

SEQ ID NO: 153332 - DNA, 17 bp, Arabidopsis thaliana
tggaccatttggatgga

SEQ ID NO: 153333 - DNA, 17 bp, Arabidopsis thaliana
tggaccatttgtatgga

SEQ ID NO: 153334 - DNA, 17 bp, Arabidopsis thaliana
tggaccatttgtgagaa

SEQ ID NO: 153335 - DNA, 17 bp, Arabidopsis thaliana
tggacccaagtggggga

SEQ ID NO: 153336 - DNA, 17 bp, Arabidopsis thaliana
tggacccaattgggaag

SEQ ID NO: 153337 - DNA, 17 bp, Arabidopsis thaliana
tggacccacggcgaatg

SEQ ID NO: 153338 - DNA, 17 bp, Arabidopsis thaliana
tggacccactggcgctc

SEQ ID NO: 153339 - DNA, 17 bp, Arabidopsis thaliana
tggacccagtggtggtc

SEQ ID NO: 153340 - DNA, 17 bp, Arabidopsis thaliana
tggacccagtggtggtg

SEQ ID NO: 153341 - DNA, 17 bp, Arabidopsis thaliana
tggacccagttcccaat

SEQ ID NO: 153342 - DNA, 17 bp, Arabidopsis thaliana
tggacccagttcctaat

SEQ ID NO: 153343 - DNA, 17 bp, Arabidopsis thaliana
tggacccatgacatttg

SEQ ID NO: 153344 - DNA, 17 bp, Arabidopsis thaliana
tggaccccaaagcccac

SEQ ID NO: 153345 - DNA, 17 bp, Arabidopsis thaliana
tggacccctcttcttag

SEQ ID NO: 153346 - DNA, 17 bp, Arabidopsis thaliana
tggacccgaacctgggt

SEQ ID NO: 153347 - DNA, 17 bp, Arabidopsis thaliana
tggacccgacccgaacc

SEQ ID NO: 153348 - DNA, 17 bp, Arabidopsis thaliana
tggacccgatccgaacc

SEQ ID NO: 153349 - DNA, 17 bp, Arabidopsis thaliana
tggacccgctttttatt

SEQ ID NO: 153350 - DNA, 17 bp, Arabidopsis thaliana
tggacccggtcgatgaa

SEQ ID NO: 153351 - DNA, 17 bp, Arabidopsis thaliana
tggacccgtcactaggc

SEQ ID NO: 153352 - DNA, 17 bp, Arabidopsis thaliana
tggacccgtcactcgga

SEQ ID NO: 153353 - DNA, 17 bp, Arabidopsis thaliana
tggaccctgtgcctcac

SEQ ID NO: 153354 - DNA, 17 bp, Arabidopsis thaliana
tggaccctgtgcctcag

SEQ ID NO: 153355 - DNA, 17 bp, Arabidopsis thaliana
tggacccttcattacca

SEQ ID NO: 153356 - DNA, 17 bp, Arabidopsis thaliana
tggacccttcattgtca

SEQ ID NO: 153357 - DNA, 17 bp, Arabidopsis thaliana
tggaccgaaacccgtat

SEQ ID NO: 153358 - DNA, 17 bp, Arabidopsis thaliana
tggaccgaaactcataa

SEQ ID NO: 153359 - DNA, 17 bp, Arabidopsis thaliana
tggaccgaaatttgtga

SEQ ID NO: 153360 - DNA, 17 bp, Arabidopsis thaliana
tggaccgaacacctgac

SEQ ID NO: 153361 - DNA, 17 bp, Arabidopsis thaliana
tggaccgaagcccgtaa

SEQ ID NO: 153362 - DNA, 17 bp, Arabidopsis thaliana
tggaccgaagctcggga

SEQ ID NO: 153363 - DNA, 17 bp, Arabidopsis thaliana
tggaccgaagtccgtaa

SEQ ID NO: 153364 - DNA, 17 bp, Arabidopsis thaliana
tggaccgaagttattcc

SEQ ID NO: 153365 - DNA, 17 bp, Arabidopsis thaliana
tggaccgaatcccgtaa

SEQ ID NO: 153366 - DNA, 17 bp, Arabidopsis thaliana
tggaccgacacggatta

SEQ ID NO: 153367 - DNA, 17 bp, Arabidopsis thaliana
tggaccgaccattggca

SEQ ID NO: 153368 - DNA, 17 bp, Arabidopsis thaliana
tggaccgaccctgctct

SEQ ID NO: 153369 - DNA, 17 bp, Arabidopsis thaliana
tggaccgacgcagatta

SEQ ID NO: 153370 - DNA, 17 bp, Arabidopsis thaliana
tggaccgacgcgattac

SEQ ID NO: 153371 - DNA, 17 bp, Arabidopsis thaliana
tggaccgacgcggataa

SEQ ID NO: 153372 - DNA, 17 bp, Arabidopsis thaliana
tggaccgacgcggatca

SEQ ID NO: 153373 - DNA, 17 bp, Arabidopsis thaliana
tggaccgacgcggatta

SEQ ID NO: 153374 - DNA, 17 bp, Arabidopsis thaliana
tggaccgacgcggattg

SEQ ID NO: 153375 - DNA, 17 bp, Arabidopsis thaliana
tggaccgacgcgtatta

SEQ ID NO: 153376 - DNA, 17 bp, Arabidopsis thaliana
tggaccgacgctgatca

SEQ ID NO: 153377 - DNA, 17 bp, Arabidopsis thaliana
tggaccgacgctgatta

SEQ ID NO: 153378 - DNA, 17 bp, Arabidopsis thaliana
tggaccgagactttata

SEQ ID NO: 153379 - DNA, 17 bp, Arabidopsis thaliana
tggaccgagagacagga

SEQ ID NO: 153380 - DNA, 17 bp, Arabidopsis thaliana
tggaccgagcaacttac

SEQ ID NO: 153381 - DNA, 17 bp, Arabidopsis thaliana
tggaccgaggttttgaa

SEQ ID NO: 153382 - DNA, 17 bp, Arabidopsis thaliana
tggaccgatccgtaggc

SEQ ID NO: 153383 - DNA, 17 bp, Arabidopsis thaliana
tggaccgatggactggt

SEQ ID NO: 153384 - DNA, 17 bp, Arabidopsis thaliana
tggaccgattgatattt

SEQ ID NO: 153385 - DNA, 17 bp, Arabidopsis thaliana
tggaccgattgtttttg

SEQ ID NO: 153386 - DNA, 17 bp, Arabidopsis thaliana
tggaccgcacagatcag

SEQ ID NO: 153387 - DNA, 17 bp, Arabidopsis thaliana
tggaccgcccaacttca

SEQ ID NO: 153388 - DNA, 17 bp, Arabidopsis thaliana
tggaccgctaacagatt

SEQ ID NO: 153389 - DNA, 17 bp, Arabidopsis thaliana
tggaccgctcgaaatcg

SEQ ID NO: 153390 - DNA, 17 bp, Arabidopsis thaliana
tggaccgctgacagatt

SEQ ID NO: 153391 - DNA, 17 bp, Arabidopsis thaliana
tggaccgctgatcggac

SEQ ID NO: 153392 - DNA, 17 bp, Arabidopsis thaliana
tggaccgcttgaaatcg

SEQ ID NO: 153393 - DNA, 17 bp, Arabidopsis thaliana
tggaccggagctctgct

SEQ ID NO: 153394 - DNA, 17 bp, Arabidopsis thaliana
tggaccggcgattgtca

SEQ ID NO: 153395 - DNA, 17 bp, Arabidopsis thaliana
tggaccggctctgtgct

SEQ ID NO: 153396 - DNA, 17 bp, Arabidopsis thaliana
tggaccggctctgtgtt

SEQ ID NO: 153397 - DNA, 17 bp, Arabidopsis thaliana
tggaccggcttcattgt

SEQ ID NO: 153398 - DNA, 17 bp, Arabidopsis thaliana
tggaccgggaggtagta

SEQ ID NO: 153399 - DNA, 17 bp, Arabidopsis thaliana
tggaccgggtggtgttt

SEQ ID NO: 153400 - DNA, 17 bp, Arabidopsis thaliana
tggaccggtccgccttt

SEQ ID NO: 153401 - DNA, 17 bp, Arabidopsis thaliana
tggaccggttcatctac

SEQ ID NO: 153402 - DNA, 17 bp, Arabidopsis thaliana
tggaccggttcatttta

SEQ ID NO: 153403 - DNA, 17 bp, Arabidopsis thaliana
tggaccggttgtttttg

SEQ ID NO: 153404 - DNA, 17 bp, Arabidopsis thaliana
tggaccgtcatatgcgc

SEQ ID NO: 153405 - DNA, 17 bp, Arabidopsis thaliana
tggaccgtcatgcgcca

SEQ ID NO: 153406 - DNA, 17 bp, Arabidopsis thaliana
tggaccgtccaacttgg

SEQ ID NO: 153407 - DNA, 17 bp, Arabidopsis thaliana
tggaccgtctacactag

SEQ ID NO: 153408 - DNA, 17 bp, Arabidopsis thaliana
tggaccgtggtacaagt

SEQ ID NO: 153409 - DNA, 17 bp, Arabidopsis thaliana
tggaccgtggtataagt

SEQ ID NO: 153410 - DNA, 17 bp, Arabidopsis thaliana
tggaccgtggtatccag

SEQ ID NO: 153411 - DNA, 17 bp, Arabidopsis thaliana
tggaccgtggtcattag

SEQ ID NO: 153412 - DNA, 17 bp, Arabidopsis thaliana
tggaccgtgtcccgttt

SEQ ID NO: 153413 - DNA, 17 bp, Arabidopsis thaliana
tggaccgttcgaaatcg

SEQ ID NO: 153414 - DNA, 17 bp, Arabidopsis thaliana
tggaccgttgacggatt

SEQ ID NO: 153415 - DNA, 17 bp, Arabidopsis thaliana
tggaccgttggtgttga

SEQ ID NO: 153416 - DNA, 17 bp, Arabidopsis thaliana
tggaccgtttaaattgt

SEQ ID NO: 153417 - DNA, 17 bp, Arabidopsis thaliana
tggacctaaattgccga

SEQ ID NO: 153418 - DNA, 17 bp, Arabidopsis thaliana
tggacctacgcggatta

SEQ ID NO: 153419 - DNA, 17 bp, Arabidopsis thaliana
tggacctaggggtatat

SEQ ID NO: 153420 - DNA, 17 bp, Arabidopsis thaliana
tggacctccaggcttca

SEQ ID NO: 153421 - DNA, 17 bp, Arabidopsis thaliana
tggacctcccgtgccgt

SEQ ID NO: 153422 - DNA, 17 bp, Arabidopsis thaliana
tggacctcggggcgaga

SEQ ID NO: 153423 - DNA, 17 bp, Arabidopsis thaliana
tggacctctccacctat

SEQ ID NO: 153424 - DNA, 17 bp, Arabidopsis thaliana
tggacctgaacttccag

SEQ ID NO: 153425 - DNA, 17 bp, Arabidopsis thaliana
tggacctgaatttccag

SEQ ID NO: 153426 - DNA, 17 bp, Arabidopsis thaliana
tggacctgataactgtg

SEQ ID NO: 153427 - DNA, 17 bp, Arabidopsis thaliana
tggacctgcctatgcgg

SEQ ID NO: 153428 - DNA, 17 bp, Arabidopsis thaliana
tggacctgcggaaggat

SEQ ID NO: 153429 - DNA, 17 bp, Arabidopsis thaliana
tggacctgcggatggat

SEQ ID NO: 153430 - DNA, 17 bp, Arabidopsis thaliana
tggacctggtgaattac

SEQ ID NO: 153431 - DNA, 17 bp, Arabidopsis thaliana
tggacctggttcatgac

SEQ ID NO: 153432 - DNA, 17 bp, Arabidopsis thaliana
tggacctgtgacctatt

SEQ ID NO: 153433 - DNA, 17 bp, Arabidopsis thaliana
tggacctgttagcttta

SEQ ID NO: 153434 - DNA, 17 bp, Arabidopsis thaliana
tggacctgtttgtttct

SEQ ID NO: 153435 - DNA, 17 bp, Arabidopsis thaliana
tggaccttattgcttct

SEQ ID NO: 153436 - DNA, 17 bp, Arabidopsis thaliana
tggaccttccggaaagt

SEQ ID NO: 153437 - DNA, 17 bp, Arabidopsis thaliana
tggaccttcgggacctg

SEQ ID NO: 153438 - DNA, 17 bp, Arabidopsis thaliana
tggaccttgtgctatgc

SEQ ID NO: 153439 - DNA, 17 bp, Arabidopsis thaliana
tggaccttgtgttatgc

SEQ ID NO: 153440 - DNA, 17 bp, Arabidopsis thaliana
tggacctttctacggag

SEQ ID NO: 153441 - DNA, 17 bp, Arabidopsis thaliana
tggaccttttgcaaaca

SEQ ID NO: 153442 - DNA, 17 bp, Arabidopsis thaliana
tggacgacgaaatccga

SEQ ID NO: 153443 - DNA, 17 bp, Arabidopsis thaliana
tggacgagaatccagct

SEQ ID NO: 153444 - DNA, 17 bp, Arabidopsis thaliana
tggacgagatccgtcac

SEQ ID NO: 153445 - DNA, 17 bp, Arabidopsis thaliana
tggacgagcagcgttat

SEQ ID NO: 153446 - DNA, 17 bp, Arabidopsis thaliana
tggacgagccaccaacc

SEQ ID NO: 153447 - DNA, 17 bp, Arabidopsis thaliana
tggacgagccaccataa

SEQ ID NO: 153448 - DNA, 17 bp, Arabidopsis thaliana
tggacgagccaccatca

SEQ ID NO: 153449 - DNA, 17 bp, Arabidopsis thaliana
tggacgagccaccatcc

SEQ ID NO: 153450 - DNA, 17 bp, Arabidopsis thaliana
tggacgagctatattct

SEQ ID NO: 153451 - DNA, 17 bp, Arabidopsis thaliana
tggacgagtaatcggtt

SEQ ID NO: 153452 - DNA, 17 bp, Arabidopsis thaliana
tggacgagtcttgatcg

SEQ ID NO: 153453 - DNA, 17 bp, Arabidopsis thaliana
tggacgagtgacggact

SEQ ID NO: 153454 - DNA, 17 bp, Arabidopsis thaliana
tggacgatagcctgcaa

SEQ ID NO: 153455 - DNA, 17 bp, Arabidopsis thaliana
tggacgatgcgtccacg

SEQ ID NO: 153456 - DNA, 17 bp, Arabidopsis thaliana
tggacgattctcggaca

SEQ ID NO: 153457 - DNA, 17 bp, Arabidopsis thaliana
tggacgattgacggacg

SEQ ID NO: 153458 - DNA, 17 bp, Arabidopsis thaliana
tggacgatttcatgact

SEQ ID NO: 153459 - DNA, 17 bp, Arabidopsis thaliana
tggacgattttaccctt

SEQ ID NO: 153460 - DNA, 17 bp, Arabidopsis thaliana
tggacgcaaatcctccg

SEQ ID NO: 153461 - DNA, 17 bp, Arabidopsis thaliana
tggacgcatgtgtgaga

SEQ ID NO: 153462 - DNA, 17 bp, Arabidopsis thaliana
tggacgcattgactcga

SEQ ID NO: 153463 - DNA, 17 bp, Arabidopsis thaliana
tggacgccagttgtttc

SEQ ID NO: 153464 - DNA, 17 bp, Arabidopsis thaliana
tggacgccgatttcaac

SEQ ID NO: 153465 - DNA, 17 bp, Arabidopsis thaliana
tggacgcctctactatg

SEQ ID NO: 153466 - DNA, 17 bp, Arabidopsis thaliana
tggacgcctgcctcact

SEQ ID NO: 153467 - DNA, 17 bp, Arabidopsis thaliana
tggacgcggattacgct

SEQ ID NO: 153468 - DNA, 17 bp, Arabidopsis thaliana
tggacgcggattacggt

SEQ ID NO: 153469 - DNA, 17 bp, Arabidopsis thaliana
tggacgcgtacgccgcc

SEQ ID NO: 153470 - DNA, 17 bp, Arabidopsis thaliana
tggacgctggataccga

SEQ ID NO: 153471 - DNA, 17 bp, Arabidopsis thaliana
tggacgctggataccta

SEQ ID NO: 153472 - DNA, 17 bp, Arabidopsis thaliana
tggacggaagttatgct

SEQ ID NO: 153473 - DNA, 17 bp, Arabidopsis thaliana
tggacggaccaaatgtt

SEQ ID NO: 153474 - DNA, 17 bp, Arabidopsis thaliana
tggacggaccactttga

SEQ ID NO: 153475 - DNA, 17 bp, Arabidopsis thaliana
tggacggaccatttgac

SEQ ID NO: 153476 - DNA, 17 bp, Arabidopsis thaliana
tggacggacctaaatgg

SEQ ID NO: 153477 - DNA, 17 bp, Arabidopsis thaliana
tggacggactattttga

SEQ ID NO: 153478 - DNA, 17 bp, Arabidopsis thaliana
tggacggactcttggcc

SEQ ID NO: 153479 - DNA, 17 bp, Arabidopsis thaliana
tggacggactgggaacg

SEQ ID NO: 153480 - DNA, 17 bp, Arabidopsis thaliana
tggacggagcggatcaa

SEQ ID NO: 153481 - DNA, 17 bp, Arabidopsis thaliana
tggacggatcacggttt

SEQ ID NO: 153482 - DNA, 17 bp, Arabidopsis thaliana
tggacggatcttggata

SEQ ID NO: 153483 - DNA, 17 bp, Arabidopsis thaliana
tggacggatgacaactt

SEQ ID NO: 153484 - DNA, 17 bp, Arabidopsis thaliana
tggacggatttggcagg

SEQ ID NO: 153485 - DNA, 17 bp, Arabidopsis thaliana
tggacggatttggcggg

SEQ ID NO: 153486 - DNA, 17 bp, Arabidopsis thaliana
tggacggcagatccaag

SEQ ID NO: 153487 - DNA, 17 bp, Arabidopsis thaliana
tggacggccaggtgacc

SEQ ID NO: 153488 - DNA, 17 bp, Arabidopsis thaliana
tggacggccataaaagt

SEQ ID NO: 153489 - DNA, 17 bp, Arabidopsis thaliana
tggacgggaggccatgt

SEQ ID NO: 153490 - DNA, 17 bp, Arabidopsis thaliana
tggacgggatgatgtat

SEQ ID NO: 153491 - DNA, 17 bp, Arabidopsis thaliana
tggacgggccagattgc

SEQ ID NO: 153492 - DNA, 17 bp, Arabidopsis thaliana
tggacgggccgctcatg

SEQ ID NO: 153493 - DNA, 17 bp, Arabidopsis thaliana
tggacgggttggcggga

SEQ ID NO: 153494 - DNA, 17 bp, Arabidopsis thaliana
tggacgggttggcgtga

SEQ ID NO: 153495 - DNA, 17 bp, Arabidopsis thaliana
tggacgggtttggcagg

SEQ ID NO: 153496 - DNA, 17 bp, Arabidopsis thaliana
tggacggtagcggttag

SEQ ID NO: 153497 - DNA, 17 bp, Arabidopsis thaliana
tggacggtccataactc

SEQ ID NO: 153498 - DNA, 17 bp, Arabidopsis thaliana
tggacgtaagcgaaggt

SEQ ID NO: 153499 - DNA, 17 bp, Arabidopsis thaliana
tggacgtaggcgaaggt

SEQ ID NO: 153500 - DNA, 17 bp, Arabidopsis thaliana
tggacgtcatccattat

SEQ ID NO: 153501 - DNA, 17 bp, Arabidopsis thaliana
tggacgtgccggagtgg

SEQ ID NO: 153502 - DNA, 17 bp, Arabidopsis thaliana
tggacgttcttttggac

SEQ ID NO: 153503 - DNA, 17 bp, Arabidopsis thaliana
tggacgtttgggaagcg

SEQ ID NO: 153504 - DNA, 17 bp, Arabidopsis thaliana
tggacgtttgggaagtg

SEQ ID NO: 153505 - DNA, 17 bp, Arabidopsis thaliana
tggactaaaccgctgac

SEQ ID NO: 153506 - DNA, 17 bp, Arabidopsis thaliana
tggactaaagcgttgga

SEQ ID NO: 153507 - DNA, 17 bp, Arabidopsis thaliana
tggactaaatcgcattg

SEQ ID NO: 153508 - DNA, 17 bp, Arabidopsis thaliana
tggactaatcggcccgc

SEQ ID NO: 153509 - DNA, 17 bp, Arabidopsis thaliana
tggactaatttgcccct

SEQ ID NO: 153510 - DNA, 17 bp, Arabidopsis thaliana
tggactacatcttggtt

SEQ ID NO: 153511 - DNA, 17 bp, Arabidopsis thaliana
tggactacctgtatttc

SEQ ID NO: 153512 - DNA, 17 bp, Arabidopsis thaliana
tggactacgggttaatt

SEQ ID NO: 153513 - DNA, 17 bp, Arabidopsis thaliana
tggactacggtgtgtac

SEQ ID NO: 153514 - DNA, 17 bp, Arabidopsis thaliana
tggactactgagctgac

SEQ ID NO: 153515 - DNA, 17 bp, Arabidopsis thaliana
tggactacttcaggtta

SEQ ID NO: 153516 - DNA, 17 bp, Arabidopsis thaliana
tggactagaaaaaacaa

SEQ ID NO: 153517 - DNA, 17 bp, Arabidopsis thaliana
tggactaggctaatcgg

SEQ ID NO: 153518 - DNA, 17 bp, Arabidopsis thaliana
tggactaggtcccgcgg

SEQ ID NO: 153519 - DNA, 17 bp, Arabidopsis thaliana
tggactagtcagatcac

SEQ ID NO: 153520 - DNA, 17 bp, Arabidopsis thaliana
tggactagtgcctaacg

SEQ ID NO: 153521 - DNA, 17 bp, Arabidopsis thaliana
tggactatctttagacg

SEQ ID NO: 153522 - DNA, 17 bp, Arabidopsis thaliana
tggactatgaatgggat

SEQ ID NO: 153523 - DNA, 17 bp, Arabidopsis thaliana
tggactatgaatggggt

SEQ ID NO: 153524 - DNA, 17 bp, Arabidopsis thaliana
tggactatggacgcggt

SEQ ID NO: 153525 - DNA, 17 bp, Arabidopsis thaliana
tggactcaaggaagctc

SEQ ID NO: 153526 - DNA, 17 bp, Arabidopsis thaliana
tggactcagaatcggtg

SEQ ID NO: 153527 - DNA, 17 bp, Arabidopsis thaliana
tggactcaggtgtgacg

SEQ ID NO: 153528 - DNA, 17 bp, Arabidopsis thaliana
tggactccataaccgtg

SEQ ID NO: 153529 - DNA, 17 bp, Arabidopsis thaliana
tggactccatgaaatag

SEQ ID NO: 153530 - DNA, 17 bp, Arabidopsis thaliana
tggactccgatcaagtt

SEQ ID NO: 153531 - DNA, 17 bp, Arabidopsis thaliana
tggactcctcgtctcga

SEQ ID NO: 153532 - DNA, 17 bp, Arabidopsis thaliana
tggactcgaatatgacc

SEQ ID NO: 153533 - DNA, 17 bp, Arabidopsis thaliana
tggactcgaatatggcc

SEQ ID NO: 153534 - DNA, 17 bp, Arabidopsis thaliana
tggactcgacccgaacc

SEQ ID NO: 153535 - DNA, 17 bp, Arabidopsis thaliana
tggactcgagacccgtg

SEQ ID NO: 153536 - DNA, 17 bp, Arabidopsis thaliana
tggactcgcattacggt

SEQ ID NO: 153537 - DNA, 17 bp, Arabidopsis thaliana
tggactcgggcaatcgt

SEQ ID NO: 153538 - DNA, 17 bp, Arabidopsis thaliana
tggactcgtcagtcttc

SEQ ID NO: 153539 - DNA, 17 bp, Arabidopsis thaliana
tggactctcggcaacgg

SEQ ID NO: 153540 - DNA, 17 bp, Arabidopsis thaliana
tggactctctggcttgc

SEQ ID NO: 153541 - DNA, 17 bp, Arabidopsis thaliana
tggactgaaacccgtaa

SEQ ID NO: 153542 - DNA, 17 bp, Arabidopsis thaliana
tggactgaaacgttcaa

SEQ ID NO: 153543 - DNA, 17 bp, Arabidopsis thaliana
tggactgaaattcgtaa

SEQ ID NO: 153544 - DNA, 17 bp, Arabidopsis thaliana
tggactgaaccgctgac

SEQ ID NO: 153545 - DNA, 17 bp, Arabidopsis thaliana
tggactgaagcccgtaa

SEQ ID NO: 153546 - DNA, 17 bp, Arabidopsis thaliana
tggactgaagggagctc

SEQ ID NO: 153547 - DNA, 17 bp, Arabidopsis thaliana
tggactgaatcatctcc

SEQ ID NO: 153548 - DNA, 17 bp, Arabidopsis thaliana
tggactgagcccgtaat

SEQ ID NO: 153549 - DNA, 17 bp, Arabidopsis thaliana
tggactgaggtttgaga

SEQ ID NO: 153550 - DNA, 17 bp, Arabidopsis thaliana
tggactgagttgtttgt

SEQ ID NO: 153551 - DNA, 17 bp, Arabidopsis thaliana
tggactgatactcatca

SEQ ID NO: 153552 - DNA, 17 bp, Arabidopsis thaliana
tggactgatgtgcgatc

SEQ ID NO: 153553 - DNA, 17 bp, Arabidopsis thaliana
tggactgattcttctcc

SEQ ID NO: 153554 - DNA, 17 bp, Arabidopsis thaliana
tggactgccatcagtta

SEQ ID NO: 153555 - DNA, 17 bp, Arabidopsis thaliana
tggactgcggtctgaac

SEQ ID NO: 153556 - DNA, 17 bp, Arabidopsis thaliana
tggactgcgtagagttt

SEQ ID NO: 153557 - DNA, 17 bp, Arabidopsis thaliana
tggactgcttttgattt

SEQ ID NO: 153558 - DNA, 17 bp, Arabidopsis thaliana
tggactggacattgtta

SEQ ID NO: 153559 - DNA, 17 bp, Arabidopsis thaliana
tggactggacattgttg

SEQ ID NO: 153560 - DNA, 17 bp, Arabidopsis thaliana
tggactggaccgctgac

SEQ ID NO: 153561 - DNA, 17 bp, Arabidopsis thaliana
tggactggactgtccga

SEQ ID NO: 153562 - DNA, 17 bp, Arabidopsis thaliana
tggactggactgtggac

SEQ ID NO: 153563 - DNA, 17 bp, Arabidopsis thaliana
tggactggagtagtttc

SEQ ID NO: 153564 - DNA, 17 bp, Arabidopsis thaliana
tggactggatgattcgg

SEQ ID NO: 153565 - DNA, 17 bp, Arabidopsis thaliana
tggactggccctgagca

SEQ ID NO: 153566 - DNA, 17 bp, Arabidopsis thaliana
tggactgggcaagccca

SEQ ID NO: 153567 - DNA, 17 bp, Arabidopsis thaliana
tggactgggccacccaa

SEQ ID NO: 153568 - DNA, 17 bp, Arabidopsis thaliana
tggactgggctaatgga

SEQ ID NO: 153569 - DNA, 17 bp, Arabidopsis thaliana
tggactggggtggtggt

SEQ ID NO: 153570 - DNA, 17 bp, Arabidopsis thaliana
tggactggtctgtcttc

SEQ ID NO: 153571 - DNA, 17 bp, Arabidopsis thaliana
tggactgtaatggaacc

SEQ ID NO: 153572 - DNA, 17 bp, Arabidopsis thaliana
tggactgtaatggagcc

SEQ ID NO: 153573 - DNA, 17 bp, Arabidopsis thaliana
tggactgtttcagaccc

SEQ ID NO: 153574 - DNA, 17 bp, Arabidopsis thaliana
tggactgtttcagacgc

SEQ ID NO: 153575 - DNA, 17 bp, Arabidopsis thaliana
tggactgtttcccgctg

SEQ ID NO: 153576 - DNA, 17 bp, Arabidopsis thaliana
tggactgtttttcgttg

SEQ ID NO: 153577 - DNA, 17 bp, Arabidopsis thaliana
tggacttagaatacgct

SEQ ID NO: 153578 - DNA, 17 bp, Arabidopsis thaliana
tggacttatttacaatg

SEQ ID NO: 153579 - DNA, 17 bp, Arabidopsis thaliana
tggacttcaaactgaaa

SEQ ID NO: 153580 - DNA, 17 bp, Arabidopsis thaliana
tggacttcccctggggg

SEQ ID NO: 153581 - DNA, 17 bp, Arabidopsis thaliana
tggacttccggtttagg

SEQ ID NO: 153582 - DNA, 17 bp, Arabidopsis thaliana
tggacttcggaagatca

SEQ ID NO: 153583 - DNA, 17 bp, Arabidopsis thaliana
tggacttcggaggatca

SEQ ID NO: 153584 - DNA, 17 bp, Arabidopsis thaliana
tggacttctctccgaag

SEQ ID NO: 153585 - DNA, 17 bp, Arabidopsis thaliana
tggacttctctccgtag

SEQ ID NO: 153586 - DNA, 17 bp, Arabidopsis thaliana
tggacttctcttttcat

SEQ ID NO: 153587 - DNA, 17 bp, Arabidopsis thaliana
tggacttctggtggaat

SEQ ID NO: 153588 - DNA, 17 bp, Arabidopsis thaliana
tggacttcttcccgaag

SEQ ID NO: 153589 - DNA, 17 bp, Arabidopsis thaliana
tggacttgaattttcag

SEQ ID NO: 153590 - DNA, 17 bp, Arabidopsis thaliana
tggacttgactgctgac

SEQ ID NO: 153591 - DNA, 17 bp, Arabidopsis thaliana
tggacttgatattgctc

SEQ ID NO: 153592 - DNA, 17 bp, Arabidopsis thaliana
tggacttgatctacctg

SEQ ID NO: 153593 - DNA, 17 bp, Arabidopsis thaliana
tggacttgccaaatccg

SEQ ID NO: 153594 - DNA, 17 bp, Arabidopsis thaliana
tggacttgcccatatgg

SEQ ID NO: 153595 - DNA, 17 bp, Arabidopsis thaliana
tggacttgcggcacacc

SEQ ID NO: 153596 - DNA, 17 bp, Arabidopsis thaliana
tggacttgctggagtta

SEQ ID NO: 153597 - DNA, 17 bp, Arabidopsis thaliana
tggacttggatcatttg

SEQ ID NO: 153598 - DNA, 17 bp, Arabidopsis thaliana
tggacttggattgccat

SEQ ID NO: 153599 - DNA, 17 bp, Arabidopsis thaliana
tggacttggtatcccgg

SEQ ID NO: 153600 - DNA, 17 bp, Arabidopsis thaliana
tggacttggtcccgggg

SEQ ID NO: 153601 - DNA, 17 bp, Arabidopsis thaliana
tggacttggtctcacag

SEQ ID NO: 153602 - DNA, 17 bp, Arabidopsis thaliana
tggacttggttggacca

SEQ ID NO: 153603 - DNA, 17 bp, Arabidopsis thaliana
tggacttggttggactt

SEQ ID NO: 153604 - DNA, 17 bp, Arabidopsis thaliana
tggacttgttggcaatc

SEQ ID NO: 153605 - DNA, 17 bp, Arabidopsis thaliana
tggacttgttgtacgac

SEQ ID NO: 153606 - DNA, 17 bp, Arabidopsis thaliana
tggactttatccaccct

SEQ ID NO: 153607 - DNA, 17 bp, Arabidopsis thaliana
tggactttcaccaggtg

SEQ ID NO: 153608 - DNA, 17 bp, Arabidopsis thaliana
tggactttcaggcaaac

SEQ ID NO: 153609 - DNA, 17 bp, Arabidopsis thaliana
tggactttcccgttggt

SEQ ID NO: 153610 - DNA, 17 bp, Arabidopsis thaliana
tggactttgaatccagc

SEQ ID NO: 153611 - DNA, 17 bp, Arabidopsis thaliana
tggactttgcaaactac

SEQ ID NO: 153612 - DNA, 17 bp, Arabidopsis thaliana
tggactttggaccaatt

SEQ ID NO: 153613 - DNA, 17 bp, Arabidopsis thaliana
tggactttggctaaacc

SEQ ID NO: 153614 - DNA, 17 bp, Arabidopsis thaliana
tggactttggtgttcca

SEQ ID NO: 153615 - DNA, 17 bp, Arabidopsis thaliana
tggactttgtctcaacg

SEQ ID NO: 153616 - DNA, 17 bp, Arabidopsis thaliana
tggactttgttccctgt

SEQ ID NO: 153617 - DNA, 17 bp, Arabidopsis thaliana
tggacttttccctaggt

SEQ ID NO: 153618 - DNA, 17 bp, Arabidopsis thaliana
tggacttttccctagtt

SEQ ID NO: 153619 - DNA, 17 bp, Arabidopsis thaliana
tggacttttcgcgacgt

SEQ ID NO: 153620 - DNA, 17 bp, Arabidopsis thaliana
tggacttttcgctacgc

SEQ ID NO: 153621 - DNA, 17 bp, Arabidopsis thaliana
tggacttttgtgggctg

SEQ ID NO: 153622 - DNA, 17 bp, Arabidopsis thaliana
tggacttttttaccctc

SEQ ID NO: 153623 - DNA, 17 bp, Arabidopsis thaliana
tggagaaacagggcacc

SEQ ID NO: 153624 - DNA, 17 bp, Arabidopsis thaliana
tggagaaacagggcacg

SEQ ID NO: 153625 - DNA, 17 bp, Arabidopsis thaliana
tggagaaagaggagaga

SEQ ID NO: 153626 - DNA, 17 bp, Arabidopsis thaliana
tggagaaagaggccgca

SEQ ID NO: 153627 - DNA, 17 bp, Arabidopsis thaliana
tggagaaagcggatcgg

SEQ ID NO: 153628 - DNA, 17 bp, Arabidopsis thaliana
tggagaaagttgaccaa

SEQ ID NO: 153629 - DNA, 17 bp, Arabidopsis thaliana
tggagaaatcggtggat

SEQ ID NO: 153630 - DNA, 17 bp, Arabidopsis thaliana
tggagaacactctggtc

SEQ ID NO: 153631 - DNA, 17 bp, Arabidopsis thaliana
tggagaacatgtaactc

SEQ ID NO: 153632 - DNA, 17 bp, Arabidopsis thaliana
tggagaactataccgca

SEQ ID NO: 153633 - DNA, 17 bp, Arabidopsis thaliana
tggagaactcagaatgc

SEQ ID NO: 153634 - DNA, 17 bp, Arabidopsis thaliana
tggagaagacaccatct

SEQ ID NO: 153635 - DNA, 17 bp, Arabidopsis thaliana
tggagaagcaaggcacg

SEQ ID NO: 153636 - DNA, 17 bp, Arabidopsis thaliana
tggagaagcaggacacg

SEQ ID NO: 153637 - DNA, 17 bp, Arabidopsis thaliana
tggagaagcaggcacgt

SEQ ID NO: 153638 - DNA, 17 bp, Arabidopsis thaliana
tggagaagcagggcaag

SEQ ID NO: 153639 - DNA, 17 bp, Arabidopsis thaliana
tggagaagcagggcacc

SEQ ID NO: 153640 - DNA, 17 bp, Arabidopsis thaliana
tggagaagcagggcacg

SEQ ID NO: 153641 - DNA, 17 bp, Arabidopsis thaliana
tggagaagcagggcact

SEQ ID NO: 153642 - DNA, 17 bp, Arabidopsis thaliana
tggagaagcagggcagg

SEQ ID NO: 153643 - DNA, 17 bp, Arabidopsis thaliana
tggagaagcagggcccc

SEQ ID NO: 153644 - DNA, 17 bp, Arabidopsis thaliana
tggagaagcagggcccg

SEQ ID NO: 153645 - DNA, 17 bp, Arabidopsis thaliana
tggagaagcagggcgcg

SEQ ID NO: 153646 - DNA, 17 bp, Arabidopsis thaliana
tggagaagcaggggacg

SEQ ID NO: 153647 - DNA, 17 bp, Arabidopsis thaliana
tggagaagcaggtcacg

SEQ ID NO: 153648 - DNA, 17 bp, Arabidopsis thaliana
tggagaagcatggcacg

SEQ ID NO: 153649 - DNA, 17 bp, Arabidopsis thaliana
tggagaagcgtcctcag

SEQ ID NO: 153650 - DNA, 17 bp, Arabidopsis thaliana
tggagaaggagggcacg

SEQ ID NO: 153651 - DNA, 17 bp, Arabidopsis thaliana
tggagaaggcactttgg

SEQ ID NO: 153652 - DNA, 17 bp, Arabidopsis thaliana
tggagaagtagggcacg

SEQ ID NO: 153653 - DNA, 17 bp, Arabidopsis thaliana
tggagaataccggaact

SEQ ID NO: 153654 - DNA, 17 bp, Arabidopsis thaliana
tggagaatactgcaaaa

SEQ ID NO: 153655 - DNA, 17 bp, Arabidopsis thaliana
tggagaatccctgtaag

SEQ ID NO: 153656 - DNA, 17 bp, Arabidopsis thaliana
tggagaatcctcaagac

SEQ ID NO: 153657 - DNA, 17 bp, Arabidopsis thaliana
tggagaatcctctatgg

SEQ ID NO: 153658 - DNA, 17 bp, Arabidopsis thaliana
tggagaattacgggctt

SEQ ID NO: 153659 - DNA, 17 bp, Arabidopsis thaliana
tggagaattacgggttt

SEQ ID NO: 153660 - DNA, 17 bp, Arabidopsis thaliana
tggagaattctaccagg

SEQ ID NO: 153661 - DNA, 17 bp, Arabidopsis thaliana
tggagacaagtgtccac

SEQ ID NO: 153662 - DNA, 17 bp, Arabidopsis thaliana
tggagacagttcggtcc

SEQ ID NO: 153663 - DNA, 17 bp, Arabidopsis thaliana
tggagacatcgctgccg

SEQ ID NO: 153664 - DNA, 17 bp, Arabidopsis thaliana
tggagaccaagttctgc

SEQ ID NO: 153665 - DNA, 17 bp, Arabidopsis thaliana
tggagaccgtcgtccgg

SEQ ID NO: 153666 - DNA, 17 bp, Arabidopsis thaliana
tggagacgaaatttcac

SEQ ID NO: 153667 - DNA, 17 bp, Arabidopsis thaliana
tggagacgaacctggct

SEQ ID NO: 153668 - DNA, 17 bp, Arabidopsis thaliana
tggagacgatgaaagct

SEQ ID NO: 153669 - DNA, 17 bp, Arabidopsis thaliana
tggagacgtcgccgtga

SEQ ID NO: 153670 - DNA, 17 bp, Arabidopsis thaliana
tggagacgtcgctcccg

SEQ ID NO: 153671 - DNA, 17 bp, Arabidopsis thaliana
tggagacgtcgctgccg

SEQ ID NO: 153672 - DNA, 17 bp, Arabidopsis thaliana
tggagacgtgcggttca

SEQ ID NO: 153673 - DNA, 17 bp, Arabidopsis thaliana
tggagacgtgtacccta

SEQ ID NO: 153674 - DNA, 17 bp, Arabidopsis thaliana
tggagacgttgctgccg

SEQ ID NO: 153675 - DNA, 17 bp, Arabidopsis thaliana
tggagagaattggccaa

SEQ ID NO: 153676 - DNA, 17 bp, Arabidopsis thaliana
tggagagacttcgtcaa

SEQ ID NO: 153677 - DNA, 17 bp, Arabidopsis thaliana
tggagagagttgaccaa

SEQ ID NO: 153678 - DNA, 17 bp, Arabidopsis thaliana
tggagagagttgcccac

SEQ ID NO: 153679 - DNA, 17 bp, Arabidopsis thaliana
tggagagagttggccaa

SEQ ID NO: 153680 - DNA, 17 bp, Arabidopsis thaliana
tggagagagttgtccaa

SEQ ID NO: 153681 - DNA, 17 bp, Arabidopsis thaliana
tggagagatctcgctct

SEQ ID NO: 153682 - DNA, 17 bp, Arabidopsis thaliana
tggagagatctcgcttt

SEQ ID NO: 153683 - DNA, 17 bp, Arabidopsis thaliana
tggagagattacaggat

SEQ ID NO: 153684 - DNA, 17 bp, Arabidopsis thaliana
tggagagattacgggct

SEQ ID NO: 153685 - DNA, 17 bp, Arabidopsis thaliana
tggagagattacgggtt

SEQ ID NO: 153686 - DNA, 17 bp, Arabidopsis thaliana
tggagagctctccaagt

SEQ ID NO: 153687 - DNA, 17 bp, Arabidopsis thaliana
tggagaggcagggcacg

SEQ ID NO: 153688 - DNA, 17 bp, Arabidopsis thaliana
tggagaggtgatgttga

SEQ ID NO: 153689 - DNA, 17 bp, Arabidopsis thaliana
tggagagtccaactccg

SEQ ID NO: 153690 - DNA, 17 bp, Arabidopsis thaliana
tggagagtgttggccaa

SEQ ID NO: 153691 - DNA, 17 bp, Arabidopsis thaliana
tggagagttcgatcctg

SEQ ID NO: 153692 - DNA, 17 bp, Arabidopsis thaliana
tggagatacctaagcac

SEQ ID NO: 153693 - DNA, 17 bp, Arabidopsis thaliana
tggagatagcgccatgg

SEQ ID NO: 153694 - DNA, 17 bp, Arabidopsis thaliana
tggagatcaggaatcaa

SEQ ID NO: 153695 - DNA, 17 bp, Arabidopsis thaliana
tggagatcagggtgatg

SEQ ID NO: 153696 - DNA, 17 bp, Arabidopsis thaliana
tggagatccatagtgca

SEQ ID NO: 153697 - DNA, 17 bp, Arabidopsis thaliana
tggagatcgcagttata

SEQ ID NO: 153698 - DNA, 17 bp, Arabidopsis thaliana
tggagatcgtacgattc

SEQ ID NO: 153699 - DNA, 17 bp, Arabidopsis thaliana
tggagatctcttgtagt

SEQ ID NO: 153700 - DNA, 17 bp, Arabidopsis thaliana
tggagatgatagattat

SEQ ID NO: 153701 - DNA, 17 bp, Arabidopsis thaliana
tggagatgatagattcc

SEQ ID NO: 153702 - DNA, 17 bp, Arabidopsis thaliana
tggagatgatattgggt

SEQ ID NO: 153703 - DNA, 17 bp, Arabidopsis thaliana
tggagatggattggtca

SEQ ID NO: 153704 - DNA, 17 bp, Arabidopsis thaliana
tggagatgtggagatcg

SEQ ID NO: 153705 - DNA, 17 bp, Arabidopsis thaliana
tggagatgttggccgct

SEQ ID NO: 153706 - DNA, 17 bp, Arabidopsis thaliana
tggagattagctcagtt

SEQ ID NO: 153707 - DNA, 17 bp, Arabidopsis thaliana
tggagattccgagactt

SEQ ID NO: 153708 - DNA, 17 bp, Arabidopsis thaliana
tggagattcgagataag

SEQ ID NO: 153709 - DNA, 17 bp, Arabidopsis thaliana
tggagattctctaaggg

SEQ ID NO: 153710 - DNA, 17 bp, Arabidopsis thaliana
tggagattctctaagtg

SEQ ID NO: 153711 - DNA, 17 bp, Arabidopsis thaliana
tggagatttggaacgac

SEQ ID NO: 153712 - DNA, 17 bp, Arabidopsis thaliana
tggagatttggaacggc

SEQ ID NO: 153713 - DNA, 17 bp, Arabidopsis thaliana
tggagcaaacgatcggt

SEQ ID NO: 153714 - DNA, 17 bp, Arabidopsis thaliana
tggagcaacgacggatg

SEQ ID NO: 153715 - DNA, 17 bp, Arabidopsis thaliana
tggagcaccctttccgt

SEQ ID NO: 153716 - DNA, 17 bp, Arabidopsis thaliana
tggagcagcgggttggc

SEQ ID NO: 153717 - DNA, 17 bp, Arabidopsis thaliana
tggagcaggtgaactgt

SEQ ID NO: 153718 - DNA, 17 bp, Arabidopsis thaliana
tggagcagttccggtgc

SEQ ID NO: 153719 - DNA, 17 bp, Arabidopsis thaliana
tggagcatgaggcctgt

SEQ ID NO: 153720 - DNA, 17 bp, Arabidopsis thaliana
tggagcatttttccggg

SEQ ID NO: 153721 - DNA, 17 bp, Arabidopsis thaliana
tggagccatctaatgcg

SEQ ID NO: 153722 - DNA, 17 bp, Arabidopsis thaliana
tggagccattcttccca

SEQ ID NO: 153723 - DNA, 17 bp, Arabidopsis thaliana
tggagccgtagcgtctg

SEQ ID NO: 153724 - DNA, 17 bp, Arabidopsis thaliana
tggagcctcctcaggat

SEQ ID NO: 153725 - DNA, 17 bp, Arabidopsis thaliana
tggagcctgcggcttaa

SEQ ID NO: 153726 - DNA, 17 bp, Arabidopsis thaliana
tggagcgaagcccgtaa

SEQ ID NO: 153727 - DNA, 17 bp, Arabidopsis thaliana
tggagcgatttgtatgg

SEQ ID NO: 153728 - DNA, 17 bp, Arabidopsis thaliana
tggagcgatttgtctgg

SEQ ID NO: 153729 - DNA, 17 bp, Arabidopsis thaliana
tggagcgatttgtctgt

SEQ ID NO: 153730 - DNA, 17 bp, Arabidopsis thaliana
tggagcggcgattgtgg

SEQ ID NO: 153731 - DNA, 17 bp, Arabidopsis thaliana
tggagcggcggtgtcgg

SEQ ID NO: 153732 - DNA, 17 bp, Arabidopsis thaliana
tggagcggtgaaatgcg

SEQ ID NO: 153733 - DNA, 17 bp, Arabidopsis thaliana
tggagcggttaccaggt

SEQ ID NO: 153734 - DNA, 17 bp, Arabidopsis thaliana
tggagctattgcagcgg

SEQ ID NO: 153735 - DNA, 17 bp, Arabidopsis thaliana
tggagctcggacgcgag

SEQ ID NO: 153736 - DNA, 17 bp, Arabidopsis thaliana
tggagctcgtcattatc

SEQ ID NO: 153737 - DNA, 17 bp, Arabidopsis thaliana
tggagctgagaccgaac

SEQ ID NO: 153738 - DNA, 17 bp, Arabidopsis thaliana
tggagctgagtcatcta

SEQ ID NO: 153739 - DNA, 17 bp, Arabidopsis thaliana
tggagctgcaagcatga

SEQ ID NO: 153740 - DNA, 17 bp, Arabidopsis thaliana
tggagctgccagcatga

SEQ ID NO: 153741 - DNA, 17 bp, Arabidopsis thaliana
tggagctgcctgcatga

SEQ ID NO: 153742 - DNA, 17 bp, Arabidopsis thaliana
tggagctgcgtctgctt

SEQ ID NO: 153743 - DNA, 17 bp, Arabidopsis thaliana
tggagctttcccatatg

SEQ ID NO: 153744 - DNA, 17 bp, Arabidopsis thaliana
tggaggaactgaggcac

SEQ ID NO: 153745 - DNA, 17 bp, Arabidopsis thaliana
tggaggaaggcgaggac

SEQ ID NO: 153746 - DNA, 17 bp, Arabidopsis thaliana
tggaggaatgtctgtct

SEQ ID NO: 153747 - DNA, 17 bp, Arabidopsis thaliana
tggaggaattacgggat

SEQ ID NO: 153748 - DNA, 17 bp, Arabidopsis thaliana
tggaggaattacggggt

SEQ ID NO: 153749 - DNA, 17 bp, Arabidopsis thaliana
tggaggacctcatctgt

SEQ ID NO: 153750 - DNA, 17 bp, Arabidopsis thaliana
tggaggactgaccaccc

SEQ ID NO: 153751 - DNA, 17 bp, Arabidopsis thaliana
tggaggagacgcaagga

SEQ ID NO: 153752 - DNA, 17 bp, Arabidopsis thaliana
tggaggagcacttgtct

SEQ ID NO: 153753 - DNA, 17 bp, Arabidopsis thaliana
tggaggagctgaggcac

SEQ ID NO: 153754 - DNA, 17 bp, Arabidopsis thaliana
tggaggagctgatgtac

SEQ ID NO: 153755 - DNA, 17 bp, Arabidopsis thaliana
tggaggaggacacaggt

SEQ ID NO: 153756 - DNA, 17 bp, Arabidopsis thaliana
tggaggaggcgcagcgg

SEQ ID NO: 153757 - DNA, 17 bp, Arabidopsis thaliana
tggaggagtgatcacac

SEQ ID NO: 153758 - DNA, 17 bp, Arabidopsis thaliana
tggaggagtgatcacgc

SEQ ID NO: 153759 - DNA, 17 bp, Arabidopsis thaliana
tggaggatcgccgccaa

SEQ ID NO: 153760 - DNA, 17 bp, Arabidopsis thaliana
tggaggattacaggctt

SEQ ID NO: 153761 - DNA, 17 bp, Arabidopsis thaliana
tggaggattacgggctt

SEQ ID NO: 153762 - DNA, 17 bp, Arabidopsis thaliana
tggaggcagcggacaaa

SEQ ID NO: 153763 - DNA, 17 bp, Arabidopsis thaliana
tggaggcagcggttcat

SEQ ID NO: 153764 - DNA, 17 bp, Arabidopsis thaliana
tggaggcagtggttcat

SEQ ID NO: 153765 - DNA, 17 bp, Arabidopsis thaliana
tggaggcattgggggcg

SEQ ID NO: 153766 - DNA, 17 bp, Arabidopsis thaliana
tggaggccacaaggaag

SEQ ID NO: 153767 - DNA, 17 bp, Arabidopsis thaliana
tggaggcgaaggcgcgt

SEQ ID NO: 153768 - DNA, 17 bp, Arabidopsis thaliana
tggaggcgcagcgggca

SEQ ID NO: 153769 - DNA, 17 bp, Arabidopsis thaliana
tggaggcgctcgaccgt

SEQ ID NO: 153770 - DNA, 17 bp, Arabidopsis thaliana
tggaggcgcttcgttaa

SEQ ID NO: 153771 - DNA, 17 bp, Arabidopsis thaliana
tggaggctcatgattcg

SEQ ID NO: 153772 - DNA, 17 bp, Arabidopsis thaliana
tggaggctggttatcgt

SEQ ID NO: 153773 - DNA, 17 bp, Arabidopsis thaliana
tggaggcttggctgcag

SEQ ID NO: 153774 - DNA, 17 bp, Arabidopsis thaliana
tggagggattacaagat

SEQ ID NO: 153775 - DNA, 17 bp, Arabidopsis thaliana
tggagggattacgggat

SEQ ID NO: 153776 - DNA, 17 bp, Arabidopsis thaliana
tggagggattacgggct

SEQ ID NO: 153777 - DNA, 17 bp, Arabidopsis thaliana
tggagggcaaagcccgt

SEQ ID NO: 153778 - DNA, 17 bp, Arabidopsis thaliana
tggagggcaagtctggt

SEQ ID NO: 153779 - DNA, 17 bp, Arabidopsis thaliana
tggagggcacgtctgcc

SEQ ID NO: 153780 - DNA, 17 bp, Arabidopsis thaliana
tggaggggttgctggaa

SEQ ID NO: 153781 - DNA, 17 bp, Arabidopsis thaliana
tggaggtcacgtctgcc

SEQ ID NO: 153782 - DNA, 17 bp, Arabidopsis thaliana
tggaggtcactttgcaa

SEQ ID NO: 153783 - DNA, 17 bp, Arabidopsis thaliana
tggaggtccacctgatg

SEQ ID NO: 153784 - DNA, 17 bp, Arabidopsis thaliana
tggaggttaatctcaac

SEQ ID NO: 153785 - DNA, 17 bp, Arabidopsis thaliana
tggaggttcagacgaag

SEQ ID NO: 153786 - DNA, 17 bp, Arabidopsis thaliana
tggaggttccccaatag

SEQ ID NO: 153787 - DNA, 17 bp, Arabidopsis thaliana
tggaggttcgagtcctc

SEQ ID NO: 153788 - DNA, 17 bp, Arabidopsis thaliana
tggaggttctcggccga

SEQ ID NO: 153789 - DNA, 17 bp, Arabidopsis thaliana
tggagtaaacactagat

SEQ ID NO: 153790 - DNA, 17 bp, Arabidopsis thaliana
tggagtagcggatgggc

SEQ ID NO: 153791 - DNA, 17 bp, Arabidopsis thaliana
tggagtagtcggtttag

SEQ ID NO: 153792 - DNA, 17 bp, Arabidopsis thaliana
tggagtatagccaagta

SEQ ID NO: 153793 - DNA, 17 bp, Arabidopsis thaliana
tggagtatagccaagtg

SEQ ID NO: 153794 - DNA, 17 bp, Arabidopsis thaliana
tggagtatgccccttat

SEQ ID NO: 153795 - DNA, 17 bp, Arabidopsis thaliana
tggagtattggcaaatg

SEQ ID NO: 153796 - DNA, 17 bp, Arabidopsis thaliana
tggagtcaagattcttc

SEQ ID NO: 153797 - DNA, 17 bp, Arabidopsis thaliana
tggagtccatcccaccg

SEQ ID NO: 153798 - DNA, 17 bp, Arabidopsis thaliana
tggagtccatcccactg

SEQ ID NO: 153799 - DNA, 17 bp, Arabidopsis thaliana
tggagtcctgaactagc

SEQ ID NO: 153800 - DNA, 17 bp, Arabidopsis thaliana
tggagtccttcgacatg

SEQ ID NO: 153801 - DNA, 17 bp, Arabidopsis thaliana
tggagtcgaatatgact

SEQ ID NO: 153802 - DNA, 17 bp, Arabidopsis thaliana
tggagtcgaatatgagt

SEQ ID NO: 153803 - DNA, 17 bp, Arabidopsis thaliana
tggagtcgagtatgacc

SEQ ID NO: 153804 - DNA, 17 bp, Arabidopsis thaliana
tggagtcgagtatgact

SEQ ID NO: 153805 - DNA, 17 bp, Arabidopsis thaliana
tggagtcgcatcctgca

SEQ ID NO: 153806 - DNA, 17 bp, Arabidopsis thaliana
tggagtcgcatcctgta

SEQ ID NO: 153807 - DNA, 17 bp, Arabidopsis thaliana
tggagtctggtgtgctt

SEQ ID NO: 153808 - DNA, 17 bp, Arabidopsis thaliana
tggagtcttgaccaacg

SEQ ID NO: 153809 - DNA, 17 bp, Arabidopsis thaliana
tggagtgaatatgcctt

SEQ ID NO: 153810 - DNA, 17 bp, Arabidopsis thaliana
tggagtgacccatacca

SEQ ID NO: 153811 - DNA, 17 bp, Arabidopsis thaliana
tggagtgattacgggtc

SEQ ID NO: 153812 - DNA, 17 bp, Arabidopsis thaliana
tggagtgattacgggtt

SEQ ID NO: 153813 - DNA, 17 bp, Arabidopsis thaliana
tggagtgccaacttaca

SEQ ID NO: 153814 - DNA, 17 bp, Arabidopsis thaliana
tggagtgcggccataat

SEQ ID NO: 153815 - DNA, 17 bp, Arabidopsis thaliana
tggagtgcttcgcgtct

SEQ ID NO: 153816 - DNA, 17 bp, Arabidopsis thaliana
tggagtgtaggcttctt

SEQ ID NO: 153817 - DNA, 17 bp, Arabidopsis thaliana
tggagtgtttatgggga

SEQ ID NO: 153818 - DNA, 17 bp, Arabidopsis thaliana
tggagttaaacgcacgg

SEQ ID NO: 153819 - DNA, 17 bp, Arabidopsis thaliana
tggagttaatgacttgt

SEQ ID NO: 153820 - DNA, 17 bp, Arabidopsis thaliana
tggagttacaaaggtgt

SEQ ID NO: 153821 - DNA, 17 bp, Arabidopsis thaliana
tggagttcatcccactg

SEQ ID NO: 153822 - DNA, 17 bp, Arabidopsis thaliana
tggagttctctcaggac

SEQ ID NO: 153823 - DNA, 17 bp, Arabidopsis thaliana
tggagttctcttgtggg

SEQ ID NO: 153824 - DNA, 17 bp, Arabidopsis thaliana
tggagttgaaagtgacg

SEQ ID NO: 153825 - DNA, 17 bp, Arabidopsis thaliana
tggagttgcggtgggcg

SEQ ID NO: 153826 - DNA, 17 bp, Arabidopsis thaliana
tggagttggacttggct

SEQ ID NO: 153827 - DNA, 17 bp, Arabidopsis thaliana
tggagttggtggctgat

SEQ ID NO: 153828 - DNA, 17 bp, Arabidopsis thaliana
tggagttgttcgcttta

SEQ ID NO: 153829 - DNA, 17 bp, Arabidopsis thaliana
tggagtttcagagggcg

SEQ ID NO: 153830 - DNA, 17 bp, Arabidopsis thaliana
tggagtttccgtccgct

SEQ ID NO: 153831 - DNA, 17 bp, Arabidopsis thaliana
tggagtttgcaatggtt

SEQ ID NO: 153832 - DNA, 17 bp, Arabidopsis thaliana
tggagtttgcacgttta

SEQ ID NO: 153833 - DNA, 17 bp, Arabidopsis thaliana
tggataaaaagtcttag

SEQ ID NO: 153834 - DNA, 17 bp, Arabidopsis thaliana
tggataaaaagtttcag

SEQ ID NO: 153835 - DNA, 17 bp, Arabidopsis thaliana
tggataaaactcagaca

SEQ ID NO: 153836 - DNA, 17 bp, Arabidopsis thaliana
tggataaaagtgcattc

SEQ ID NO: 153837 - DNA, 17 bp, Arabidopsis thaliana
tggataaaatgcattgc

SEQ ID NO: 153838 - DNA, 17 bp, Arabidopsis thaliana
tggataaaatttcgggt

SEQ ID NO: 153839 - DNA, 17 bp, Arabidopsis thaliana
tggataaaccgttccat

SEQ ID NO: 153840 - DNA, 17 bp, Arabidopsis thaliana
tggataaccgcatgctt

SEQ ID NO: 153841 - DNA, 17 bp, Arabidopsis thaliana
tggataactgttaccac

SEQ ID NO: 153842 - DNA, 17 bp, Arabidopsis thaliana
tggataataaaccgttg

SEQ ID NO: 153843 - DNA, 17 bp, Arabidopsis thaliana
tggataatgtagaccct

SEQ ID NO: 153844 - DNA, 17 bp, Arabidopsis thaliana
tggataattgcactgca

SEQ ID NO: 153845 - DNA, 17 bp, Arabidopsis thaliana
tggataccgaggcctgt

SEQ ID NO: 153846 - DNA, 17 bp, Arabidopsis thaliana
tggatacctaggcaccc

SEQ ID NO: 153847 - DNA, 17 bp, Arabidopsis thaliana
tggatacctattcgggt

SEQ ID NO: 153848 - DNA, 17 bp, Arabidopsis thaliana
tggatacgggacattca

SEQ ID NO: 153849 - DNA, 17 bp, Arabidopsis thaliana
tggatacggtgctattg

SEQ ID NO: 153850 - DNA, 17 bp, Arabidopsis thaliana
tggatactaggcgctgt

SEQ ID NO: 153851 - DNA, 17 bp, Arabidopsis thaliana
tggatactgagcaaaat

SEQ ID NO: 153852 - DNA, 17 bp, Arabidopsis thaliana
tggatacttatcttacc

SEQ ID NO: 153853 - DNA, 17 bp, Arabidopsis thaliana
tggatacttgcctcgtg

SEQ ID NO: 153854 - DNA, 17 bp, Arabidopsis thaliana
tggatagaagcggtgat

SEQ ID NO: 153855 - DNA, 17 bp, Arabidopsis thaliana
tggatagactgatcgat

SEQ ID NO: 153856 - DNA, 17 bp, Arabidopsis thaliana
tggatagactgttcaag

SEQ ID NO: 153857 - DNA, 17 bp, Arabidopsis thaliana
tggatagaggttccgct

SEQ ID NO: 153858 - DNA, 17 bp, Arabidopsis thaliana
tggatagagtcgtcttg

SEQ ID NO: 153859 - DNA, 17 bp, Arabidopsis thaliana
tggatagccataacaag

SEQ ID NO: 153860 - DNA, 17 bp, Arabidopsis thaliana
tggataggaaccatcta

SEQ ID NO: 153861 - DNA, 17 bp, Arabidopsis thaliana
tggataggactaggtgg

SEQ ID NO: 153862 - DNA, 17 bp, Arabidopsis thaliana
tggatagtccgagttac

SEQ ID NO: 153863 - DNA, 17 bp, Arabidopsis thaliana
tggatagtccgcattgt

SEQ ID NO: 153864 - DNA, 17 bp, Arabidopsis thaliana
tggatagtcctctcaga

SEQ ID NO: 153865 - DNA, 17 bp, Arabidopsis thaliana
tggatagtcttacaatg

SEQ ID NO: 153866 - DNA, 17 bp, Arabidopsis thaliana
tggatagtggtgttttt

SEQ ID NO: 153867 - DNA, 17 bp, Arabidopsis thaliana
tggatagttttgacctc

SEQ ID NO: 153868 - DNA, 17 bp, Arabidopsis thaliana
tggatataggataatag

SEQ ID NO: 153869 - DNA, 17 bp, Arabidopsis thaliana
tggatatcaggagctgt

SEQ ID NO: 153870 - DNA, 17 bp, Arabidopsis thaliana
tggatatcatctacgag

SEQ ID NO: 153871 - DNA, 17 bp, Arabidopsis thaliana
tggatatccgcttggtg

SEQ ID NO: 153872 - DNA, 17 bp, Arabidopsis thaliana
tggatatccttctaaat

SEQ ID NO: 153873 - DNA, 17 bp, Arabidopsis thaliana
tggatatctatttggct

SEQ ID NO: 153874 - DNA, 17 bp, Arabidopsis thaliana
tggatatgatcgcagcg

SEQ ID NO: 153875 - DNA, 17 bp, Arabidopsis thaliana
tggatattcggcaggtc

SEQ ID NO: 153876 - DNA, 17 bp, Arabidopsis thaliana
tggatattgtggttagt

SEQ ID NO: 153877 - DNA, 17 bp, Arabidopsis thaliana
tggatattttcaggact

SEQ ID NO: 153878 - DNA, 17 bp, Arabidopsis thaliana
tggatcaaatgcaactt

SEQ ID NO: 153879 - DNA, 17 bp, Arabidopsis thaliana
tggatcaaatggatgcc

SEQ ID NO: 153880 - DNA, 17 bp, Arabidopsis thaliana
tggatcaagaacatctc

SEQ ID NO: 153881 - DNA, 17 bp, Arabidopsis thaliana
tggatcaagtttcatcg

SEQ ID NO: 153882 - DNA, 17 bp, Arabidopsis thaliana
tggatcaatggctactg

SEQ ID NO: 153883 - DNA, 17 bp, Arabidopsis thaliana
tggatcacataggttac

SEQ ID NO: 153884 - DNA, 17 bp, Arabidopsis thaliana
tggatcaccgttcgctt

SEQ ID NO: 153885 - DNA, 17 bp, Arabidopsis thaliana
tggatcacgctatgcaa

SEQ ID NO: 153886 - DNA, 17 bp, Arabidopsis thaliana
tggatcacggattctgt

SEQ ID NO: 153887 - DNA, 17 bp, Arabidopsis thaliana
tggatcacttgctgcag

SEQ ID NO: 153888 - DNA, 17 bp, Arabidopsis thaliana
tggatcagacgttccaa

SEQ ID NO: 153889 - DNA, 17 bp, Arabidopsis thaliana
tggatcagcggataggg

SEQ ID NO: 153890 - DNA, 17 bp, Arabidopsis thaliana
tggatcaggcagtgtgg

SEQ ID NO: 153891 - DNA, 17 bp, Arabidopsis thaliana
tggatcagggcgagcag

SEQ ID NO: 153892 - DNA, 17 bp, Arabidopsis thaliana
tggatcaggtatctctc

SEQ ID NO: 153893 - DNA, 17 bp, Arabidopsis thaliana
tggatcaggttcggttt

SEQ ID NO: 153894 - DNA, 17 bp, Arabidopsis thaliana
tggatcagtcgcatcct

SEQ ID NO: 153895 - DNA, 17 bp, Arabidopsis thaliana
tggatcagtgatctggg

SEQ ID NO: 153896 - DNA, 17 bp, Arabidopsis thaliana
tggatcataggctctta

SEQ ID NO: 153897 - DNA, 17 bp, Arabidopsis thaliana
tggatcatccagtggat

SEQ ID NO: 153898 - DNA, 17 bp, Arabidopsis thaliana
tggatcatctggatgga

SEQ ID NO: 153899 - DNA, 17 bp, Arabidopsis thaliana
tggatcatttgcgccga

SEQ ID NO: 153900 - DNA, 17 bp, Arabidopsis thaliana
tggatccaacgtggcat

SEQ ID NO: 153901 - DNA, 17 bp, Arabidopsis thaliana
tggatccacctcgatgt

SEQ ID NO: 153902 - DNA, 17 bp, Arabidopsis thaliana
tggatccacctgtagat

SEQ ID NO: 153903 - DNA, 17 bp, Arabidopsis thaliana
tggatccagaggcttat

SEQ ID NO: 153904 - DNA, 17 bp, Arabidopsis thaliana
tggatccagcgacagcg

SEQ ID NO: 153905 - DNA, 17 bp, Arabidopsis thaliana
tggatccagcgacatgc

SEQ ID NO: 153906 - DNA, 17 bp, Arabidopsis thaliana
tggatccagcgaccagc

SEQ ID NO: 153907 - DNA, 17 bp, Arabidopsis thaliana
tggatcccaaacttagc

SEQ ID NO: 153908 - DNA, 17 bp, Arabidopsis thaliana
tggatcccaggatcgta

SEQ ID NO: 153909 - DNA, 17 bp, Arabidopsis thaliana
tggatcccatattattc

SEQ ID NO: 153910 - DNA, 17 bp, Arabidopsis thaliana
tggatcccgacgcggat

SEQ ID NO: 153911 - DNA, 17 bp, Arabidopsis thaliana
tggatcccgccttgcat

SEQ ID NO: 153912 - DNA, 17 bp, Arabidopsis thaliana
tggatccctcttcttag

SEQ ID NO: 153913 - DNA, 17 bp, Arabidopsis thaliana
tggatccctttcttgtg

SEQ ID NO: 153914 - DNA, 17 bp, Arabidopsis thaliana
tggatccgacccgaacc

SEQ ID NO: 153915 - DNA, 17 bp, Arabidopsis thaliana
tggatccgcatcctcca

SEQ ID NO: 153916 - DNA, 17 bp, Arabidopsis thaliana
tggatccgcatcctgta

SEQ ID NO: 153917 - DNA, 17 bp, Arabidopsis thaliana
tggatccgccactgagt

SEQ ID NO: 153918 - DNA, 17 bp, Arabidopsis thaliana
tggatccgcctaggctg

SEQ ID NO: 153919 - DNA, 17 bp, Arabidopsis thaliana
tggatccgctcctgtag

SEQ ID NO: 153920 - DNA, 17 bp, Arabidopsis thaliana
tggatccggacatggtg

SEQ ID NO: 153921 - DNA, 17 bp, Arabidopsis thaliana
tggatccggattcagtt

SEQ ID NO: 153922 - DNA, 17 bp, Arabidopsis thaliana
tggatccggcggcagat

SEQ ID NO: 153923 - DNA, 17 bp, Arabidopsis thaliana
tggatccgtaacttcgg

SEQ ID NO: 153924 - DNA, 17 bp, Arabidopsis thaliana
tggatcctacccgaacc

SEQ ID NO: 153925 - DNA, 17 bp, Arabidopsis thaliana
tggatcctcgtccatct

SEQ ID NO: 153926 - DNA, 17 bp, Arabidopsis thaliana
tggatccttagtcgctg

SEQ ID NO: 153927 - DNA, 17 bp, Arabidopsis thaliana
tggatcctttgcccact

SEQ ID NO: 153928 - DNA, 17 bp, Arabidopsis thaliana
tggatcgaagcatttct

SEQ ID NO: 153929 - DNA, 17 bp, Arabidopsis thaliana
tggatcgaagcccgtaa

SEQ ID NO: 153930 - DNA, 17 bp, Arabidopsis thaliana
tggatcgaagcctgtaa

SEQ ID NO: 153931 - DNA, 17 bp, Arabidopsis thaliana
tggatcgacctttgctg

SEQ ID NO: 153932 - DNA, 17 bp, Arabidopsis thaliana
tggatcgagcattctct

SEQ ID NO: 153933 - DNA, 17 bp, Arabidopsis thaliana
tggatcgagcccatcat

SEQ ID NO: 153934 - DNA, 17 bp, Arabidopsis thaliana
tggatcgagtgaatgga

SEQ ID NO: 153935 - DNA, 17 bp, Arabidopsis thaliana
tggatcgatcgatcggc

SEQ ID NO: 153936 - DNA, 17 bp, Arabidopsis thaliana
tggatcgatcgggtgtc

SEQ ID NO: 153937 - DNA, 17 bp, Arabidopsis thaliana
tggatcgattatgtcac

SEQ ID NO: 153938 - DNA, 17 bp, Arabidopsis thaliana
tggatcgattgtgtgag

SEQ ID NO: 153939 - DNA, 17 bp, Arabidopsis thaliana
tggatcgcaaccgtatc

SEQ ID NO: 153940 - DNA, 17 bp, Arabidopsis thaliana
tggatcgcaggtagctg

SEQ ID NO: 153941 - DNA, 17 bp, Arabidopsis thaliana
tggatcgcatcctgtag

SEQ ID NO: 153942 - DNA, 17 bp, Arabidopsis thaliana
tggatcgcgaaccgaga

SEQ ID NO: 153943 - DNA, 17 bp, Arabidopsis thaliana
tggatcgcggtcgagtg

SEQ ID NO: 153944 - DNA, 17 bp, Arabidopsis thaliana
tggatcgcgtctgtagt

SEQ ID NO: 153945 - DNA, 17 bp, Arabidopsis thaliana
tggatcgctaagttgtt

SEQ ID NO: 153946 - DNA, 17 bp, Arabidopsis thaliana
tggatcgctcaaataca

SEQ ID NO: 153947 - DNA, 17 bp, Arabidopsis thaliana
tggatcgggaaaagtcc

SEQ ID NO: 153948 - DNA, 17 bp, Arabidopsis thaliana
tggatcgggagatgtcc

SEQ ID NO: 153949 - DNA, 17 bp, Arabidopsis thaliana
tggatcggggatgtagc

SEQ ID NO: 153950 - DNA, 17 bp, Arabidopsis thaliana
tggatcgggttcggatc

SEQ ID NO: 153951 - DNA, 17 bp, Arabidopsis thaliana
tggatcgggttcggttt

SEQ ID NO: 153952 - DNA, 17 bp, Arabidopsis thaliana
tggatcgggttgagtat

SEQ ID NO: 153953 - DNA, 17 bp, Arabidopsis thaliana
tggatcggtgacattca

SEQ ID NO: 153954 - DNA, 17 bp, Arabidopsis thaliana
tggatcggtttcggtcc

SEQ ID NO: 153955 - DNA, 17 bp, Arabidopsis thaliana
tggatcgtcgcatccca

SEQ ID NO: 153956 - DNA, 17 bp, Arabidopsis thaliana
tggatcgtcgcatcctt

SEQ ID NO: 153957 - DNA, 17 bp, Arabidopsis thaliana
tggatcgttcgagtccg

SEQ ID NO: 153958 - DNA, 17 bp, Arabidopsis thaliana
tggatcgttttgaatgt

SEQ ID NO: 153959 - DNA, 17 bp, Arabidopsis thaliana
tggatctaagctgccag

SEQ ID NO: 153960 - DNA, 17 bp, Arabidopsis thaliana
tggatctacgggacctc

SEQ ID NO: 153961 - DNA, 17 bp, Arabidopsis thaliana
tggatctagcgacaggg

SEQ ID NO: 153962 - DNA, 17 bp, Arabidopsis thaliana
tggatctagtcgcacct

SEQ ID NO: 153963 - DNA, 17 bp, Arabidopsis thaliana
tggatctagtcgcatcc

SEQ ID NO: 153964 - DNA, 17 bp, Arabidopsis thaliana
tggatctatggcacact

SEQ ID NO: 153965 - DNA, 17 bp, Arabidopsis thaliana
tggatctccttgtgtct

SEQ ID NO: 153966 - DNA, 17 bp, Arabidopsis thaliana
tggatctccttgttcat

SEQ ID NO: 153967 - DNA, 17 bp, Arabidopsis thaliana
tggatctcgatcctgta

SEQ ID NO: 153968 - DNA, 17 bp, Arabidopsis thaliana
tggatctcggaccaggc

SEQ ID NO: 153969 - DNA, 17 bp, Arabidopsis thaliana
tggatctctcatggatt

SEQ ID NO: 153970 - DNA, 17 bp, Arabidopsis thaliana
tggatctctggcgacgg

SEQ ID NO: 153971 - DNA, 17 bp, Arabidopsis thaliana
tggatctgaaattgctc

SEQ ID NO: 153972 - DNA, 17 bp, Arabidopsis thaliana
tggatctgaagctgcca

SEQ ID NO: 153973 - DNA, 17 bp, Arabidopsis thaliana
tggatctgaaggtcgcg

SEQ ID NO: 153974 - DNA, 17 bp, Arabidopsis thaliana
tggatctgacatggaga

SEQ ID NO: 153975 - DNA, 17 bp, Arabidopsis thaliana
tggatctgacattgccg

SEQ ID NO: 153976 - DNA, 17 bp, Arabidopsis thaliana
tggatctgaccaaagtt

SEQ ID NO: 153977 - DNA, 17 bp, Arabidopsis thaliana
tggatctgactctgttt

SEQ ID NO: 153978 - DNA, 17 bp, Arabidopsis thaliana
tggatctgcctggctcc

SEQ ID NO: 153979 - DNA, 17 bp, Arabidopsis thaliana
tggatctgctcaacctc

SEQ ID NO: 153980 - DNA, 17 bp, Arabidopsis thaliana
tggatctggatcgcatc

SEQ ID NO: 153981 - DNA, 17 bp, Arabidopsis thaliana
tggatctggattctggg

SEQ ID NO: 153982 - DNA, 17 bp, Arabidopsis thaliana
tggatctggcaagacac

SEQ ID NO: 153983 - DNA, 17 bp, Arabidopsis thaliana
tggatctggtcggcttg

SEQ ID NO: 153984 - DNA, 17 bp, Arabidopsis thaliana
tggatctggtggattac

SEQ ID NO: 153985 - DNA, 17 bp, Arabidopsis thaliana
tggatctgtccaagcct

SEQ ID NO: 153986 - DNA, 17 bp, Arabidopsis thaliana
tggatctgttttggagt

SEQ ID NO: 153987 - DNA, 17 bp, Arabidopsis thaliana
tggatcttagtcgcatc

SEQ ID NO: 153988 - DNA, 17 bp, Arabidopsis thaliana
tggatcttagtttgtac

SEQ ID NO: 153989 - DNA, 17 bp, Arabidopsis thaliana
tggatcttatgacgcca

SEQ ID NO: 153990 - DNA, 17 bp, Arabidopsis thaliana
tggatcttatggggcca

SEQ ID NO: 153991 - DNA, 17 bp, Arabidopsis thaliana
tggatcttcagtctgag

SEQ ID NO: 153992 - DNA, 17 bp, Arabidopsis thaliana
tggatcttcatgaatcg

SEQ ID NO: 153993 - DNA, 17 bp, Arabidopsis thaliana
tggatcttcgggtttgg

SEQ ID NO: 153994 - DNA, 17 bp, Arabidopsis thaliana
tggatcttcttatttcc

SEQ ID NO: 153995 - DNA, 17 bp, Arabidopsis thaliana
tggatcttggactgaag

SEQ ID NO: 153996 - DNA, 17 bp, Arabidopsis thaliana
tggatcttggcgtttat

SEQ ID NO: 153997 - DNA, 17 bp, Arabidopsis thaliana
tggatcttgggcggtac

SEQ ID NO: 153998 - DNA, 17 bp, Arabidopsis thaliana
tggatcttggtcgcatc

SEQ ID NO: 153999 - DNA, 17 bp, Arabidopsis thaliana
tggatcttgtcatctgt

SEQ ID NO: 154000 - DNA, 17 bp, Arabidopsis thaliana
tggatcttgtggttagt

SEQ ID NO: 154001 - DNA, 17 bp, Arabidopsis thaliana
tggatctttagattctc

SEQ ID NO: 154002 - DNA, 17 bp, Arabidopsis thaliana
tggatctttcggacttc

SEQ ID NO: 154003 - DNA, 17 bp, Arabidopsis thaliana
tggatgaatcatttgga

SEQ ID NO: 154004 - DNA, 17 bp, Arabidopsis thaliana
tggatgacatttgtgga

SEQ ID NO: 154005 - DNA, 17 bp, Arabidopsis thaliana
tggatgacccgaatgca

SEQ ID NO: 154006 - DNA, 17 bp, Arabidopsis thaliana
tggatgaccttattttg

SEQ ID NO: 154007 - DNA, 17 bp, Arabidopsis thaliana
tggatgacgtatccaat

SEQ ID NO: 154008 - DNA, 17 bp, Arabidopsis thaliana
tggatgactgcgtcgct

SEQ ID NO: 154009 - DNA, 17 bp, Arabidopsis thaliana
tggatgacttgagaagc

SEQ ID NO: 154010 - DNA, 17 bp, Arabidopsis thaliana
tggatgagccaccatca

SEQ ID NO: 154011 - DNA, 17 bp, Arabidopsis thaliana
tggatgaggacgtcggc

SEQ ID NO: 154012 - DNA, 17 bp, Arabidopsis thaliana
tggatgatcagtttgtg

SEQ ID NO: 154013 - DNA, 17 bp, Arabidopsis thaliana
tggatgatgcattcgac

SEQ ID NO: 154014 - DNA, 17 bp, Arabidopsis thaliana
tggatgccttaatcggc

SEQ ID NO: 154015 - DNA, 17 bp, Arabidopsis thaliana
tggatgccttccagcca

SEQ ID NO: 154016 - DNA, 17 bp, Arabidopsis thaliana
tggatgcgaccccaggt

SEQ ID NO: 154017 - DNA, 17 bp, Arabidopsis thaliana
tggatgctgctcagctg

SEQ ID NO: 154018 - DNA, 17 bp, Arabidopsis thaliana
tggatggactactgagc

SEQ ID NO: 154019 - DNA, 17 bp, Arabidopsis thaliana
tggatggatcatctgga

SEQ ID NO: 154020 - DNA, 17 bp, Arabidopsis thaliana
tggatggatttggcggg

SEQ ID NO: 154021 - DNA, 17 bp, Arabidopsis thaliana
tggatggcgcttaagcg

SEQ ID NO: 154022 - DNA, 17 bp, Arabidopsis thaliana
tggatggctttatccac

SEQ ID NO: 154023 - DNA, 17 bp, Arabidopsis thaliana
tggatgggctaagttca

SEQ ID NO: 154024 - DNA, 17 bp, Arabidopsis thaliana
tggatgggtcggccggt

SEQ ID NO: 154025 - DNA, 17 bp, Arabidopsis thaliana
tggatgggtttggcggg

SEQ ID NO: 154026 - DNA, 17 bp, Arabidopsis thaliana
tggatggtccatctgaa

SEQ ID NO: 154027 - DNA, 17 bp, Arabidopsis thaliana
tggatggtcttagaaca

SEQ ID NO: 154028 - DNA, 17 bp, Arabidopsis thaliana
tggatggtggtgcgaag

SEQ ID NO: 154029 - DNA, 17 bp, Arabidopsis thaliana
tggatggtttcaggctt

SEQ ID NO: 154030 - DNA, 17 bp, Arabidopsis thaliana
tggatgtcaagtcggct

SEQ ID NO: 154031 - DNA, 17 bp, Arabidopsis thaliana
tggatgtcctaaacgtt

SEQ ID NO: 154032 - DNA, 17 bp, Arabidopsis thaliana
tggatgtcttaattcgc

SEQ ID NO: 154033 - DNA, 17 bp, Arabidopsis thaliana
tggatgtgttcctcaca

SEQ ID NO: 154034 - DNA, 17 bp, Arabidopsis thaliana
tggatgttccatctgaa

SEQ ID NO: 154035 - DNA, 17 bp, Arabidopsis thaliana
tggatgttccatgtgaa

SEQ ID NO: 154036 - DNA, 17 bp, Arabidopsis thaliana
tggatgttgctactccg

SEQ ID NO: 154037 - DNA, 17 bp, Arabidopsis thaliana
tggatgttgtgggttct

SEQ ID NO: 154038 - DNA, 17 bp, Arabidopsis thaliana
tggatgttgtggttagt

SEQ ID NO: 154039 - DNA, 17 bp, Arabidopsis thaliana
tggatgtttcaaagccg

SEQ ID NO: 154040 - DNA, 17 bp, Arabidopsis thaliana
tggatgtttcaacgtgt

SEQ ID NO: 154041 - DNA, 17 bp, Arabidopsis thaliana
tggatgtttgtggccgc

SEQ ID NO: 154042 - DNA, 17 bp, Arabidopsis thaliana
tggattaaaggccaagc

SEQ ID NO: 154043 - DNA, 17 bp, Arabidopsis thaliana
tggattaacgagattcc

SEQ ID NO: 154044 - DNA, 17 bp, Arabidopsis thaliana
tggattaagagttggac

SEQ ID NO: 154045 - DNA, 17 bp, Arabidopsis thaliana
tggattaagtccggtgc

SEQ ID NO: 154046 - DNA, 17 bp, Arabidopsis thaliana
tggattaagttagacca

SEQ ID NO: 154047 - DNA, 17 bp, Arabidopsis thaliana
tggattaatgccacgtg

SEQ ID NO: 154048 - DNA, 17 bp, Arabidopsis thaliana
tggattacaaaccatat

SEQ ID NO: 154049 - DNA, 17 bp, Arabidopsis thaliana
tggattacgctccaatg

SEQ ID NO: 154050 - DNA, 17 bp, Arabidopsis thaliana
tggattacggattgtgg

SEQ ID NO: 154051 - DNA, 17 bp, Arabidopsis thaliana
tggattacgttgctctt

SEQ ID NO: 154052 - DNA, 17 bp, Arabidopsis thaliana
tggattactgtgccaaa

SEQ ID NO: 154053 - DNA, 17 bp, Arabidopsis thaliana
tggattagactactctc

SEQ ID NO: 154054 - DNA, 17 bp, Arabidopsis thaliana
tggattagatctgcagc

SEQ ID NO: 154055 - DNA, 17 bp, Arabidopsis thaliana
tggattaggatttccac

SEQ ID NO: 154056 - DNA, 17 bp, Arabidopsis thaliana
tggattagtaggcgcaa

SEQ ID NO: 154057 - DNA, 17 bp, Arabidopsis thaliana
tggattagtgaatccgg

SEQ ID NO: 154058 - DNA, 17 bp, Arabidopsis thaliana
tggattatgactgaacg

SEQ ID NO: 154059 - DNA, 17 bp, Arabidopsis thaliana
tggattatttccatcgc

SEQ ID NO: 154060 - DNA, 17 bp, Arabidopsis thaliana
tggattcaagcttcaaa

SEQ ID NO: 154061 - DNA, 17 bp, Arabidopsis thaliana
tggattcaatcttaact

SEQ ID NO: 154062 - DNA, 17 bp, Arabidopsis thaliana
tggattcacttctaggg

SEQ ID NO: 154063 - DNA, 17 bp, Arabidopsis thaliana
tggattcagcagctcag

SEQ ID NO: 154064 - DNA, 17 bp, Arabidopsis thaliana
tggattcagcgaccaat

SEQ ID NO: 154065 - DNA, 17 bp, Arabidopsis thaliana
tggattcagcgatagcg

SEQ ID NO: 154066 - DNA, 17 bp, Arabidopsis thaliana
tggattcatctgaacaa

SEQ ID NO: 154067 - DNA, 17 bp, Arabidopsis thaliana
tggattcccgctatccg

SEQ ID NO: 154068 - DNA, 17 bp, Arabidopsis thaliana
tggattcccttgcctca

SEQ ID NO: 154069 - DNA, 17 bp, Arabidopsis thaliana
tggattccgttcgcact

SEQ ID NO: 154070 - DNA, 17 bp, Arabidopsis thaliana
tggattccttgtaatga

SEQ ID NO: 154071 - DNA, 17 bp, Arabidopsis thaliana
tggattcgacacacgtt

SEQ ID NO: 154072 - DNA, 17 bp, Arabidopsis thaliana
tggattcgactcagcat

SEQ ID NO: 154073 - DNA, 17 bp, Arabidopsis thaliana
tggattcggaatcggtg

SEQ ID NO: 154074 - DNA, 17 bp, Arabidopsis thaliana
tggattcgggccccacg

SEQ ID NO: 154075 - DNA, 17 bp, Arabidopsis thaliana
tggattcgggttttttt

SEQ ID NO: 154076 - DNA, 17 bp, Arabidopsis thaliana
tggattcgttggcccct

SEQ ID NO: 154077 - DNA, 17 bp, Arabidopsis thaliana
tggattctaccgcaaga

SEQ ID NO: 154078 - DNA, 17 bp, Arabidopsis thaliana
tggattctgccattttt

SEQ ID NO: 154079 - DNA, 17 bp, Arabidopsis thaliana
tggattcttctggattt

SEQ ID NO: 154080 - DNA, 17 bp, Arabidopsis thaliana
tggattcttgtggaaag

SEQ ID NO: 154081 - DNA, 17 bp, Arabidopsis thaliana
tggattcttgtggataa

SEQ ID NO: 154082 - DNA, 17 bp, Arabidopsis thaliana
tggattcttgtggatag

SEQ ID NO: 154083 - DNA, 17 bp, Arabidopsis thaliana
tggattgagaacttcga

SEQ ID NO: 154084 - DNA, 17 bp, Arabidopsis thaliana
tggattgagactttgct

SEQ ID NO: 154085 - DNA, 17 bp, Arabidopsis thaliana
tggattgagccttggta

SEQ ID NO: 154086 - DNA, 17 bp, Arabidopsis thaliana
tggattgaggccgagga

SEQ ID NO: 154087 - DNA, 17 bp, Arabidopsis thaliana
tggattgaggtttgctt

SEQ ID NO: 154088 - DNA, 17 bp, Arabidopsis thaliana
tggattgattctggtac

SEQ ID NO: 154089 - DNA, 17 bp, Arabidopsis thaliana
tggattgattctggtat

SEQ ID NO: 154090 - DNA, 17 bp, Arabidopsis thaliana
tggattgcatatctctg

SEQ ID NO: 154091 - DNA, 17 bp, Arabidopsis thaliana
tggattgcattttttgg

SEQ ID NO: 154092 - DNA, 17 bp, Arabidopsis thaliana
tggattgcccttttgca

SEQ ID NO: 154093 - DNA, 17 bp, Arabidopsis thaliana
tggattgctgaggtgtc

SEQ ID NO: 154094 - DNA, 17 bp, Arabidopsis thaliana
tggattggaatccagac

SEQ ID NO: 154095 - DNA, 17 bp, Arabidopsis thaliana
tggattggaccgatgtg

SEQ ID NO: 154096 - DNA, 17 bp, Arabidopsis thaliana
tggattggcttccacat

SEQ ID NO: 154097 - DNA, 17 bp, Arabidopsis thaliana
tggattgggtaggttgg

SEQ ID NO: 154098 - DNA, 17 bp, Arabidopsis thaliana
tggattggtccacttat

SEQ ID NO: 154099 - DNA, 17 bp, Arabidopsis thaliana
tggattggtgacatgga

SEQ ID NO: 154100 - DNA, 17 bp, Arabidopsis thaliana
tggattgtgactgaacg

SEQ ID NO: 154101 - DNA, 17 bp, Arabidopsis thaliana
tggattgtggtcattgt

SEQ ID NO: 154102 - DNA, 17 bp, Arabidopsis thaliana
tggattgtgtcggattc

SEQ ID NO: 154103 - DNA, 17 bp, Arabidopsis thaliana
tggattgttacacattt

SEQ ID NO: 154104 - DNA, 17 bp, Arabidopsis thaliana
tggatttaacccattcg

SEQ ID NO: 154105 - DNA, 17 bp, Arabidopsis thaliana
tggatttaacccatttg

SEQ ID NO: 154106 - DNA, 17 bp, Arabidopsis thaliana
tggatttacatttttag

SEQ ID NO: 154107 - DNA, 17 bp, Arabidopsis thaliana
tggatttacccgacgac

SEQ ID NO: 154108 - DNA, 17 bp, Arabidopsis thaliana
tggatttaccgtatggg

SEQ ID NO: 154109 - DNA, 17 bp, Arabidopsis thaliana
tggatttagaagtttaa

SEQ ID NO: 154110 - DNA, 17 bp, Arabidopsis thaliana
tggatttagacaaattc

SEQ ID NO: 154111 - DNA, 17 bp, Arabidopsis thaliana
tggatttagatcactag

SEQ ID NO: 154112 - DNA, 17 bp, Arabidopsis thaliana
tggatttagatctgaag

SEQ ID NO: 154113 - DNA, 17 bp, Arabidopsis thaliana
tggatttcacgaccaaa

SEQ ID NO: 154114 - DNA, 17 bp, Arabidopsis thaliana
tggatttcagaactcac

SEQ ID NO: 154115 - DNA, 17 bp, Arabidopsis thaliana
tggatttcagaccgatc

SEQ ID NO: 154116 - DNA, 17 bp, Arabidopsis thaliana
tggatttcagcttcagt

SEQ ID NO: 154117 - DNA, 17 bp, Arabidopsis thaliana
tggatttccttcttgac

SEQ ID NO: 154118 - DNA, 17 bp, Arabidopsis thaliana
tggatttctgcaagtgg

SEQ ID NO: 154119 - DNA, 17 bp, Arabidopsis thaliana
tggatttgagcttgcca

SEQ ID NO: 154120 - DNA, 17 bp, Arabidopsis thaliana
tggatttgccccgtcag

SEQ ID NO: 154121 - DNA, 17 bp, Arabidopsis thaliana
tggatttgcccttttgc

SEQ ID NO: 154122 - DNA, 17 bp, Arabidopsis thaliana
tggatttgctaactttt

SEQ ID NO: 154123 - DNA, 17 bp, Arabidopsis thaliana
tggatttgctagagtct

SEQ ID NO: 154124 - DNA, 17 bp, Arabidopsis thaliana
tggatttggatcagggt

SEQ ID NO: 154125 - DNA, 17 bp, Arabidopsis thaliana
tggatttggcgaagttt

SEQ ID NO: 154126 - DNA, 17 bp, Arabidopsis thaliana
tggatttggcgggacgg

SEQ ID NO: 154127 - DNA, 17 bp, Arabidopsis thaliana
tggatttgggcctgcat

SEQ ID NO: 154128 - DNA, 17 bp, Arabidopsis thaliana
tggatttgtggaatcac

SEQ ID NO: 154129 - DNA, 17 bp, Arabidopsis thaliana
tggatttgtggaatcgc

SEQ ID NO: 154130 - DNA, 17 bp, Arabidopsis thaliana
tggattttagggtgttg

SEQ ID NO: 154131 - DNA, 17 bp, Arabidopsis thaliana
tggattttatgatcact

SEQ ID NO: 154132 - DNA, 17 bp, Arabidopsis thaliana
tggattttcccagattc

SEQ ID NO: 154133 - DNA, 17 bp, Arabidopsis thaliana
tggattttcggttcatt

SEQ ID NO: 154134 - DNA, 17 bp, Arabidopsis thaliana
tggattttgaggtcccg

SEQ ID NO: 154135 - DNA, 17 bp, Arabidopsis thaliana
tggattttgattctaga

SEQ ID NO: 154136 - DNA, 17 bp, Arabidopsis thaliana
tggattttggtctggtc

SEQ ID NO: 154137 - DNA, 17 bp, Arabidopsis thaliana
tggattttgttacagcg

SEQ ID NO: 154138 - DNA, 17 bp, Arabidopsis thaliana
tggatttttgagctttc

SEQ ID NO: 154139 - DNA, 17 bp, Arabidopsis thaliana
tggatttttgcaggatc

SEQ ID NO: 154140 - DNA, 17 bp, Arabidopsis thaliana
tggatttttgccacaat

SEQ ID NO: 154141 - DNA, 17 bp, Arabidopsis thaliana
tggatttttttcttaaa

SEQ ID NO: 154142 - DNA, 17 bp, Arabidopsis thaliana
tggcaaaaactgtgttc

SEQ ID NO: 154143 - DNA, 17 bp, Arabidopsis thaliana
tggcaaaacgactgctg

SEQ ID NO: 154144 - DNA, 17 bp, Arabidopsis thaliana
tggcaaaagaggacatc

SEQ ID NO: 154145 - DNA, 17 bp, Arabidopsis thaliana
tggcaaaagtgttgtgg

SEQ ID NO: 154146 - DNA, 17 bp, Arabidopsis thaliana
tggcaaaatgggctgga

SEQ ID NO: 154147 - DNA, 17 bp, Arabidopsis thaliana
tggcaaaccgtttctgg

SEQ ID NO: 154148 - DNA, 17 bp, Arabidopsis thaliana
tggcaaactcggtgtcc

SEQ ID NO: 154149 - DNA, 17 bp, Arabidopsis thaliana
tggcaaactgagatgta

SEQ ID NO: 154150 - DNA, 17 bp, Arabidopsis thaliana
tggcaaactgagatgtg

SEQ ID NO: 154151 - DNA, 17 bp, Arabidopsis thaliana
tggcaaaggaccaattt

SEQ ID NO: 154152 - DNA, 17 bp, Arabidopsis thaliana
tggcaaaggatttctat

SEQ ID NO: 154153 - DNA, 17 bp, Arabidopsis thaliana
tggcaaagtgatactcg

SEQ ID NO: 154154 - DNA, 17 bp, Arabidopsis thaliana
tggcaaatctggttttg

SEQ ID NO: 154155 - DNA, 17 bp, Arabidopsis thaliana
tggcaaatgctaaagtg

SEQ ID NO: 154156 - DNA, 17 bp, Arabidopsis thaliana
tggcaaatgctttctac

SEQ ID NO: 154157 - DNA, 17 bp, Arabidopsis thaliana
tggcaaattttagcggg

SEQ ID NO: 154158 - DNA, 17 bp, Arabidopsis thaliana
tggcaacagaatgtgca

SEQ ID NO: 154159 - DNA, 17 bp, Arabidopsis thaliana
tggcaacagactgtaca

SEQ ID NO: 154160 - DNA, 17 bp, Arabidopsis thaliana
tggcaacagactgtgca

SEQ ID NO: 154161 - DNA, 17 bp, Arabidopsis thaliana
tggcaacaggccctttt

SEQ ID NO: 154162 - DNA, 17 bp, Arabidopsis thaliana
tggcaacatgtgcctaa

SEQ ID NO: 154163 - DNA, 17 bp, Arabidopsis thaliana
tggcaacattgattggg

SEQ ID NO: 154164 - DNA, 17 bp, Arabidopsis thaliana
tggcaacccaagcaacc

SEQ ID NO: 154165 - DNA, 17 bp, Arabidopsis thaliana
tggcaacgaagatcggt

SEQ ID NO: 154166 - DNA, 17 bp, Arabidopsis thaliana
tggcaacgcattttcta

SEQ ID NO: 154167 - DNA, 17 bp, Arabidopsis thaliana
tggcaacgcatttttta

SEQ ID NO: 154168 - DNA, 17 bp, Arabidopsis thaliana
tggcaactgatgtaaga

SEQ ID NO: 154169 - DNA, 17 bp, Arabidopsis thaliana
tggcaactgtcgctttt

SEQ ID NO: 154170 - DNA, 17 bp, Arabidopsis thaliana
tggcaagaatatccgcc

SEQ ID NO: 154171 - DNA, 17 bp, Arabidopsis thaliana
tggcaagacaccttgtg

SEQ ID NO: 154172 - DNA, 17 bp, Arabidopsis thaliana
tggcaagacagcaagtt

SEQ ID NO: 154173 - DNA, 17 bp, Arabidopsis thaliana
tggcaagacccggtgct

SEQ ID NO: 154174 - DNA, 17 bp, Arabidopsis thaliana
tggcaagacggatttgg

SEQ ID NO: 154175 - DNA, 17 bp, Arabidopsis thaliana
tggcaagacggattttg

SEQ ID NO: 154176 - DNA, 17 bp, Arabidopsis thaliana
tggcaagctaaaacctc

SEQ ID NO: 154177 - DNA, 17 bp, Arabidopsis thaliana
tggcaagctaaccgttg

SEQ ID NO: 154178 - DNA, 17 bp, Arabidopsis thaliana
tggcaagctctcatatg

SEQ ID NO: 154179 - DNA, 17 bp, Arabidopsis thaliana
tggcaagctctcatgta

SEQ ID NO: 154180 - DNA, 17 bp, Arabidopsis thaliana
tggcaagctctcatgtg

SEQ ID NO: 154181 - DNA, 17 bp, Arabidopsis thaliana
tggcaaggttagttgat

SEQ ID NO: 154182 - DNA, 17 bp, Arabidopsis thaliana
tggcaagtgtgccacga

SEQ ID NO: 154183 - DNA, 17 bp, Arabidopsis thaliana
tggcaagttgtcctccg

SEQ ID NO: 154184 - DNA, 17 bp, Arabidopsis thaliana
tggcaagttgtccttcg

SEQ ID NO: 154185 - DNA, 17 bp, Arabidopsis thaliana
tggcaagttgtccttct

SEQ ID NO: 154186 - DNA, 17 bp, Arabidopsis thaliana
tggcaagtttcagtatg

SEQ ID NO: 154187 - DNA, 17 bp, Arabidopsis thaliana
tggcaataaataacaat

SEQ ID NO: 154188 - DNA, 17 bp, Arabidopsis thaliana
tggcaataggtggagag

SEQ ID NO: 154189 - DNA, 17 bp, Arabidopsis thaliana
tggcaatatgcaatggt

SEQ ID NO: 154190 - DNA, 17 bp, Arabidopsis thaliana
tggcaatattgctctgc

SEQ ID NO: 154191 - DNA, 17 bp, Arabidopsis thaliana
tggcaatctccctctgg

SEQ ID NO: 154192 - DNA, 17 bp, Arabidopsis thaliana
tggcaatgacaagttga

SEQ ID NO: 154193 - DNA, 17 bp, Arabidopsis thaliana
tggcaattcacagtctg

SEQ ID NO: 154194 - DNA, 17 bp, Arabidopsis thaliana
tggcacaatcctttgag

SEQ ID NO: 154195 - DNA, 17 bp, Arabidopsis thaliana
tggcacaatggtttttt

SEQ ID NO: 154196 - DNA, 17 bp, Arabidopsis thaliana
tggcacacaggtcgttc

SEQ ID NO: 154197 - DNA, 17 bp, Arabidopsis thaliana
tggcacagggtgagcgg

SEQ ID NO: 154198 - DNA, 17 bp, Arabidopsis thaliana
tggcacatattgcagcg

SEQ ID NO: 154199 - DNA, 17 bp, Arabidopsis thaliana
tggcacatcgtttacga

SEQ ID NO: 154200 - DNA, 17 bp, Arabidopsis thaliana
tggcacattgacggtag

SEQ ID NO: 154201 - DNA, 17 bp, Arabidopsis thaliana
tggcaccaacagacaga

SEQ ID NO: 154202 - DNA, 17 bp, Arabidopsis thaliana
tggcaccggtgtctcct

SEQ ID NO: 154203 - DNA, 17 bp, Arabidopsis thaliana
tggcaccgtcgacctcc

SEQ ID NO: 154204 - DNA, 17 bp, Arabidopsis thaliana
tggcaccgtgggttgtt

SEQ ID NO: 154205 - DNA, 17 bp, Arabidopsis thaliana
tggcacctcgatgtcgg

SEQ ID NO: 154206 - DNA, 17 bp, Arabidopsis thaliana
tggcacgaagactgtat

SEQ ID NO: 154207 - DNA, 17 bp, Arabidopsis thaliana
tggcacgaccctatgaa

SEQ ID NO: 154208 - DNA, 17 bp, Arabidopsis thaliana
tggcacgaccctatgag

SEQ ID NO: 154209 - DNA, 17 bp, Arabidopsis thaliana
tggcacgactctgatga

SEQ ID NO: 154210 - DNA, 17 bp, Arabidopsis thaliana
tggcacgaggattactt

SEQ ID NO: 154211 - DNA, 17 bp, Arabidopsis thaliana
tggcacgaggattgctt

SEQ ID NO: 154212 - DNA, 17 bp, Arabidopsis thaliana
tggcacgcatttttttg

SEQ ID NO: 154213 - DNA, 17 bp, Arabidopsis thaliana
tggcacgcctgcctggg

SEQ ID NO: 154214 - DNA, 17 bp, Arabidopsis thaliana
tggcacgcgggtgacca

SEQ ID NO: 154215 - DNA, 17 bp, Arabidopsis thaliana
tggcacgctcataccaa

SEQ ID NO: 154216 - DNA, 17 bp, Arabidopsis thaliana
tggcacggtgactagct

SEQ ID NO: 154217 - DNA, 17 bp, Arabidopsis thaliana
tggcacgtccgcctggg

SEQ ID NO: 154218 - DNA, 17 bp, Arabidopsis thaliana
tggcacgtctgcctgag

SEQ ID NO: 154219 - DNA, 17 bp, Arabidopsis thaliana
tggcacgtctgcctggg

SEQ ID NO: 154220 - DNA, 17 bp, Arabidopsis thaliana
tggcacgtctgcctggt

SEQ ID NO: 154221 - DNA, 17 bp, Arabidopsis thaliana
tggcacgtctgcttggg

SEQ ID NO: 154222 - DNA, 17 bp, Arabidopsis thaliana
tggcactaccaaaacct

SEQ ID NO: 154223 - DNA, 17 bp, Arabidopsis thaliana
tggcactagtgttagtt

SEQ ID NO: 154224 - DNA, 17 bp, Arabidopsis thaliana
tggcactatactttgat

SEQ ID NO: 154225 - DNA, 17 bp, Arabidopsis thaliana
tggcactattcgaaagg

SEQ ID NO: 154226 - DNA, 17 bp, Arabidopsis thaliana
tggcactcactggtgtg

SEQ ID NO: 154227 - DNA, 17 bp, Arabidopsis thaliana
tggcactcattggtgtg

SEQ ID NO: 154228 - DNA, 17 bp, Arabidopsis thaliana
tggcactcattgtaaat

SEQ ID NO: 154229 - DNA, 17 bp, Arabidopsis thaliana
tggcactccacgtgtcg

SEQ ID NO: 154230 - DNA, 17 bp, Arabidopsis thaliana
tggcactcgaccacggg

SEQ ID NO: 154231 - DNA, 17 bp, Arabidopsis thaliana
tggcactctactttgat

SEQ ID NO: 154232 - DNA, 17 bp, Arabidopsis thaliana
tggcactctcaaatggt

SEQ ID NO: 154233 - DNA, 17 bp, Arabidopsis thaliana
tggcactctcttaggtg

SEQ ID NO: 154234 - DNA, 17 bp, Arabidopsis thaliana
tggcactctgctggaac

SEQ ID NO: 154235 - DNA, 17 bp, Arabidopsis thaliana
tggcactgctctatctg

SEQ ID NO: 154236 - DNA, 17 bp, Arabidopsis thaliana
tggcacttactggtgtg

SEQ ID NO: 154237 - DNA, 17 bp, Arabidopsis thaliana
tggcagaaaaacgcaat

SEQ ID NO: 154238 - DNA, 17 bp, Arabidopsis thaliana
tggcagaaactttgatc

SEQ ID NO: 154239 - DNA, 17 bp, Arabidopsis thaliana
tggcagaaagtactcag

SEQ ID NO: 154240 - DNA, 17 bp, Arabidopsis thaliana
tggcagaagagagtgag

SEQ ID NO: 154241 - DNA, 17 bp, Arabidopsis thaliana
tggcagacaagcttgga

SEQ ID NO: 154242 - DNA, 17 bp, Arabidopsis thaliana
tggcagactctagcggg

SEQ ID NO: 154243 - DNA, 17 bp, Arabidopsis thaliana
tggcagactctctccag

SEQ ID NO: 154244 - DNA, 17 bp, Arabidopsis thaliana
tggcagactcttccaaa

SEQ ID NO: 154245 - DNA, 17 bp, Arabidopsis thaliana
tggcagactcttccaga

SEQ ID NO: 154246 - DNA, 17 bp, Arabidopsis thaliana
tggcagacttattctca

SEQ ID NO: 154247 - DNA, 17 bp, Arabidopsis thaliana
tggcagacttttccaga

SEQ ID NO: 154248 - DNA, 17 bp, Arabidopsis thaliana
tggcagagaccctgtta

SEQ ID NO: 154249 - DNA, 17 bp, Arabidopsis thaliana
tggcagagtggccttgc

SEQ ID NO: 154250 - DNA, 17 bp, Arabidopsis thaliana
tggcagagtgggctagg

SEQ ID NO: 154251 - DNA, 17 bp, Arabidopsis thaliana
tggcagatattgctgtt

SEQ ID NO: 154252 - DNA, 17 bp, Arabidopsis thaliana
tggcagatctacatagt

SEQ ID NO: 154253 - DNA, 17 bp, Arabidopsis thaliana
tggcagatctggataaa

SEQ ID NO: 154254 - DNA, 17 bp, Arabidopsis thaliana
tggcagatgggattgcg

SEQ ID NO: 154255 - DNA, 17 bp, Arabidopsis thaliana
tggcagattcttgtacg

SEQ ID NO: 154256 - DNA, 17 bp, Arabidopsis thaliana
tggcagcaaggccactc

SEQ ID NO: 154257 - DNA, 17 bp, Arabidopsis thaliana
tggcagcaccaacaaac

SEQ ID NO: 154258 - DNA, 17 bp, Arabidopsis thaliana
tggcagcaccaacaagg

SEQ ID NO: 154259 - DNA, 17 bp, Arabidopsis thaliana
tggcagccaagcgttca

SEQ ID NO: 154260 - DNA, 17 bp, Arabidopsis thaliana
tggcagccactgtaaat

SEQ ID NO: 154261 - DNA, 17 bp, Arabidopsis thaliana
tggcagccattgtaaat

SEQ ID NO: 154262 - DNA, 17 bp, Arabidopsis thaliana
tggcagccattgtgaat

SEQ ID NO: 154263 - DNA, 17 bp, Arabidopsis thaliana
tggcagcggctgatcgt

SEQ ID NO: 154264 - DNA, 17 bp, Arabidopsis thaliana
tggcagctaattgcgca

SEQ ID NO: 154265 - DNA, 17 bp, Arabidopsis thaliana
tggcagctatttgcgcg

SEQ ID NO: 154266 - DNA, 17 bp, Arabidopsis thaliana
tggcagctcgagtgact

SEQ ID NO: 154267 - DNA, 17 bp, Arabidopsis thaliana
tggcagctgccgattgg

SEQ ID NO: 154268 - DNA, 17 bp, Arabidopsis thaliana
tggcagcttgtgattag

SEQ ID NO: 154269 - DNA, 17 bp, Arabidopsis thaliana
tggcagcttgtggagta

SEQ ID NO: 154270 - DNA, 17 bp, Arabidopsis thaliana
tggcaggaaaatttgag

SEQ ID NO: 154271 - DNA, 17 bp, Arabidopsis thaliana
tggcaggacagagcggg

SEQ ID NO: 154272 - DNA, 17 bp, Arabidopsis thaliana
tggcaggacgggttttg

SEQ ID NO: 154273 - DNA, 17 bp, Arabidopsis thaliana
tggcaggatcaaccagg

SEQ ID NO: 154274 - DNA, 17 bp, Arabidopsis thaliana
tggcaggattccttgat

SEQ ID NO: 154275 - DNA, 17 bp, Arabidopsis thaliana
tggcagggcctgaatct

SEQ ID NO: 154276 - DNA, 17 bp, Arabidopsis thaliana
tggcagggggtagtcag

SEQ ID NO: 154277 - DNA, 17 bp, Arabidopsis thaliana
tggcagggtactattct

SEQ ID NO: 154278 - DNA, 17 bp, Arabidopsis thaliana
tggcaggtatcttacac

SEQ ID NO: 154279 - DNA, 17 bp, Arabidopsis thaliana
tggcaggtgaagttttc

SEQ ID NO: 154280 - DNA, 17 bp, Arabidopsis thaliana
tggcaggttctgagagc

SEQ ID NO: 154281 - DNA, 17 bp, Arabidopsis thaliana
tggcagtcattgtaaat

SEQ ID NO: 154282 - DNA, 17 bp, Arabidopsis thaliana
tggcagtccagatcagt

SEQ ID NO: 154283 - DNA, 17 bp, Arabidopsis thaliana
tggcagtccagtgacga

SEQ ID NO: 154284 - DNA, 17 bp, Arabidopsis thaliana
tggcagtctatacatct

SEQ ID NO: 154285 - DNA, 17 bp, Arabidopsis thaliana
tggcagtgatgactcga

SEQ ID NO: 154286 - DNA, 17 bp, Arabidopsis thaliana
tggcagtgatgactcgg

SEQ ID NO: 154287 - DNA, 17 bp, Arabidopsis thaliana
tggcagtggcagtagta

SEQ ID NO: 154288 - DNA, 17 bp, Arabidopsis thaliana
tggcagttggttgtaaa

SEQ ID NO: 154289 - DNA, 17 bp, Arabidopsis thaliana
tggcagtttctgatttt

SEQ ID NO: 154290 - DNA, 17 bp, Arabidopsis thaliana
tggcataaaactggtga

SEQ ID NO: 154291 - DNA, 17 bp, Arabidopsis thaliana
tggcataaacaaacaaa

SEQ ID NO: 154292 - DNA, 17 bp, Arabidopsis thaliana
tggcataaaccaacagt

SEQ ID NO: 154293 - DNA, 17 bp, Arabidopsis thaliana
tggcataatggcggatc

SEQ ID NO: 154294 - DNA, 17 bp, Arabidopsis thaliana
tggcatacaagatcggg

SEQ ID NO: 154295 - DNA, 17 bp, Arabidopsis thaliana
tggcatagtgtgcttgg

SEQ ID NO: 154296 - DNA, 17 bp, Arabidopsis thaliana
tggcatagttgccttgc

SEQ ID NO: 154297 - DNA, 17 bp, Arabidopsis thaliana
tggcatctgtgctggcg

SEQ ID NO: 154298 - DNA, 17 bp, Arabidopsis thaliana
tggcatgacgtttttcc

SEQ ID NO: 154299 - DNA, 17 bp, Arabidopsis thaliana
tggcatgccaaggttat

SEQ ID NO: 154300 - DNA, 17 bp, Arabidopsis thaliana
tggcatggaagaaagta

SEQ ID NO: 154301 - DNA, 17 bp, Arabidopsis thaliana
tggcatggaagaaagtg

SEQ ID NO: 154302 - DNA, 17 bp, Arabidopsis thaliana
tggcatgtcttctggcg

SEQ ID NO: 154303 - DNA, 17 bp, Arabidopsis thaliana
tggcatgtgataccttt

SEQ ID NO: 154304 - DNA, 17 bp, Arabidopsis thaliana
tggcatgtgtgaccatg

SEQ ID NO: 154305 - DNA, 17 bp, Arabidopsis thaliana
tggcattagtcggaaag

SEQ ID NO: 154306 - DNA, 17 bp, Arabidopsis thaliana
tggcattagtcggaagg

SEQ ID NO: 154307 - DNA, 17 bp, Arabidopsis thaliana
tggcattcactggtatg

SEQ ID NO: 154308 - DNA, 17 bp, Arabidopsis thaliana
tggcattcactggtgtg

SEQ ID NO: 154309 - DNA, 17 bp, Arabidopsis thaliana
tggcattcgtcggtcta

SEQ ID NO: 154310 - DNA, 17 bp, Arabidopsis thaliana
tggcattgatgaaagcg

SEQ ID NO: 154311 - DNA, 17 bp, Arabidopsis thaliana
tggcattgctaagacgt

SEQ ID NO: 154312 - DNA, 17 bp, Arabidopsis thaliana
tggcattgggttgtaaa

SEQ ID NO: 154313 - DNA, 17 bp, Arabidopsis thaliana
tggcattgttccgggct

SEQ ID NO: 154314 - DNA, 17 bp, Arabidopsis thaliana
tggcatttccataggag

SEQ ID NO: 154315 - DNA, 17 bp, Arabidopsis thaliana
tggcatttgattctgct

SEQ ID NO: 154316 - DNA, 17 bp, Arabidopsis thaliana
tggcatttgccctactc

SEQ ID NO: 154317 - DNA, 17 bp, Arabidopsis thaliana
tggcattttcgtgatta

SEQ ID NO: 154318 - DNA, 17 bp, Arabidopsis thaliana
tggcattttcgtgattt

SEQ ID NO: 154319 - DNA, 17 bp, Arabidopsis thaliana
tggcattttctttgatg

SEQ ID NO: 154320 - DNA, 17 bp, Arabidopsis thaliana
tggcatttttgtgattt

SEQ ID NO: 154321 - DNA, 17 bp, Arabidopsis thaliana
tggccaaaaaggtgaat

SEQ ID NO: 154322 - DNA, 17 bp, Arabidopsis thaliana
tggccaaaaccactcat

SEQ ID NO: 154323 - DNA, 17 bp, Arabidopsis thaliana
tggccaaaatcccgaga

SEQ ID NO: 154324 - DNA, 17 bp, Arabidopsis thaliana
tggccaaacaattctca

SEQ ID NO: 154325 - DNA, 17 bp, Arabidopsis thaliana
tggccaaagctgaggat

SEQ ID NO: 154326 - DNA, 17 bp, Arabidopsis thaliana
tggccaaagttgagggt

SEQ ID NO: 154327 - DNA, 17 bp, Arabidopsis thaliana
tggccaaattaaccgtg

SEQ ID NO: 154328 - DNA, 17 bp, Arabidopsis thaliana
tggccaacaccggaaag

SEQ ID NO: 154329 - DNA, 17 bp, Arabidopsis thaliana
tggccaacctgacccca

SEQ ID NO: 154330 - DNA, 17 bp, Arabidopsis thaliana
tggccaacgaggtctgc

SEQ ID NO: 154331 - DNA, 17 bp, Arabidopsis thaliana
tggccaactctctccat

SEQ ID NO: 154332 - DNA, 17 bp, Arabidopsis thaliana
tggccaactctctccca

SEQ ID NO: 154333 - DNA, 17 bp, Arabidopsis thaliana
tggccaactctctccta

SEQ ID NO: 154334 - DNA, 17 bp, Arabidopsis thaliana
tggccaactctctctat

SEQ ID NO: 154335 - DNA, 17 bp, Arabidopsis thaliana
tggccaactctctctct

SEQ ID NO: 154336 - DNA, 17 bp, Arabidopsis thaliana
tggccaactctctgcat

SEQ ID NO: 154337 - DNA, 17 bp, Arabidopsis thaliana
tggccaactttctccat

SEQ ID NO: 154338 - DNA, 17 bp, Arabidopsis thaliana
tggccaagctggagaca

SEQ ID NO: 154339 - DNA, 17 bp, Arabidopsis thaliana
tggccaagctttgttaa

SEQ ID NO: 154340 - DNA, 17 bp, Arabidopsis thaliana
tggccaaggacgtggat

SEQ ID NO: 154341 - DNA, 17 bp, Arabidopsis thaliana
tggccaaggatgacttc

SEQ ID NO: 154342 - DNA, 17 bp, Arabidopsis thaliana
tggccaaggatgacttg

SEQ ID NO: 154343 - DNA, 17 bp, Arabidopsis thaliana
tggccaagggttgggct

SEQ ID NO: 154344 - DNA, 17 bp, Arabidopsis thaliana
tggccaagtcaatgaaa

SEQ ID NO: 154345 - DNA, 17 bp, Arabidopsis thaliana
tggccaagttggacctg

SEQ ID NO: 154346 - DNA, 17 bp, Arabidopsis thaliana
tggccaatacgagtagt

SEQ ID NO: 154347 - DNA, 17 bp, Arabidopsis thaliana
tggccaatcttgcccat

SEQ ID NO: 154348 - DNA, 17 bp, Arabidopsis thaliana
tggccaatggaccgcat

SEQ ID NO: 154349 - DNA, 17 bp, Arabidopsis thaliana
tggccaattgaccgcat

SEQ ID NO: 154350 - DNA, 17 bp, Arabidopsis thaliana
tggccacaatgccacag

SEQ ID NO: 154351 - DNA, 17 bp, Arabidopsis thaliana
tggccacatacgaagtt

SEQ ID NO: 154352 - DNA, 17 bp, Arabidopsis thaliana
tggccacatgtgaagtt

SEQ ID NO: 154353 - DNA, 17 bp, Arabidopsis thaliana
tggccacctgaagttag

SEQ ID NO: 154354 - DNA, 17 bp, Arabidopsis thaliana
tggccacctgaagtttg

SEQ ID NO: 154355 - DNA, 17 bp, Arabidopsis thaliana
tggccacgatccaaatg

SEQ ID NO: 154356 - DNA, 17 bp, Arabidopsis thaliana
tggccacgtgtcattca

SEQ ID NO: 154357 - DNA, 17 bp, Arabidopsis thaliana
tggccactacaagagca

SEQ ID NO: 154358 - DNA, 17 bp, Arabidopsis thaliana
tggccactttggagata

SEQ ID NO: 154359 - DNA, 17 bp, Arabidopsis thaliana
tggccactttgtcggag

SEQ ID NO: 154360 - DNA, 17 bp, Arabidopsis thaliana
tggccactttttggaag

SEQ ID NO: 154361 - DNA, 17 bp, Arabidopsis thaliana
tggccacttttttaatg

SEQ ID NO: 154362 - DNA, 17 bp, Arabidopsis thaliana
tggccagaaatcgaatc

SEQ ID NO: 154363 - DNA, 17 bp, Arabidopsis thaliana
tggccagaccggtgtcc

SEQ ID NO: 154364 - DNA, 17 bp, Arabidopsis thaliana
tggccagagagtttttt

SEQ ID NO: 154365 - DNA, 17 bp, Arabidopsis thaliana
tggccagcgttttcaac

SEQ ID NO: 154366 - DNA, 17 bp, Arabidopsis thaliana
tggccaggatgaagctt

SEQ ID NO: 154367 - DNA, 17 bp, Arabidopsis thaliana
tggccaggtcaacgttt

SEQ ID NO: 154368 - DNA, 17 bp, Arabidopsis thaliana
tggccaggtcgtgcctc

SEQ ID NO: 154369 - DNA, 17 bp, Arabidopsis thaliana
tggccaggttatgcttt

SEQ ID NO: 154370 - DNA, 17 bp, Arabidopsis thaliana
tggccaggttgttccgg

SEQ ID NO: 154371 - DNA, 17 bp, Arabidopsis thaliana
tggccagttaccaccag

SEQ ID NO: 154372 - DNA, 17 bp, Arabidopsis thaliana
tggccatacgaattccg

SEQ ID NO: 154373 - DNA, 17 bp, Arabidopsis thaliana
tggccatatctgactct

SEQ ID NO: 154374 - DNA, 17 bp, Arabidopsis thaliana
tggccatcagggagagt

SEQ ID NO: 154375 - DNA, 17 bp, Arabidopsis thaliana
tggccatcagggtatgt

SEQ ID NO: 154376 - DNA, 17 bp, Arabidopsis thaliana
tggccatctttcttgat

SEQ ID NO: 154377 - DNA, 17 bp, Arabidopsis thaliana
tggccatcttttatgct

SEQ ID NO: 154378 - DNA, 17 bp, Arabidopsis thaliana
tggccatgagaacattg

SEQ ID NO: 154379 - DNA, 17 bp, Arabidopsis thaliana
tggccatgagaaccttc

SEQ ID NO: 154380 - DNA, 17 bp, Arabidopsis thaliana
tggccatgagaaccttg

SEQ ID NO: 154381 - DNA, 17 bp, Arabidopsis thaliana
tggccatgaggagaggc

SEQ ID NO: 154382 - DNA, 17 bp, Arabidopsis thaliana
tggccatgcccgaagtc

SEQ ID NO: 154383 - DNA, 17 bp, Arabidopsis thaliana
tggccatgcgaacccgg

SEQ ID NO: 154384 - DNA, 17 bp, Arabidopsis thaliana
tggccatgtgtttttca

SEQ ID NO: 154385 - DNA, 17 bp, Arabidopsis thaliana
tggccatgttcgaaaaa

SEQ ID NO: 154386 - DNA, 17 bp, Arabidopsis thaliana
tggccatgttctttaac

SEQ ID NO: 154387 - DNA, 17 bp, Arabidopsis thaliana
tggccatgttcttttgt

SEQ ID NO: 154388 - DNA, 17 bp, Arabidopsis thaliana
tggccattcggtcggtc

SEQ ID NO: 154389 - DNA, 17 bp, Arabidopsis thaliana
tggccattcggttcgag

SEQ ID NO: 154390 - DNA, 17 bp, Arabidopsis thaliana
tggccattcggttggga

SEQ ID NO: 154391 - DNA, 17 bp, Arabidopsis thaliana
tggccattcggttgggg

SEQ ID NO: 154392 - DNA, 17 bp, Arabidopsis thaliana
tggccattcggttggta

SEQ ID NO: 154393 - DNA, 17 bp, Arabidopsis thaliana
tggccatttcacgagtt

SEQ ID NO: 154394 - DNA, 17 bp, Arabidopsis thaliana
tggccatttggatgaac

SEQ ID NO: 154395 - DNA, 17 bp, Arabidopsis thaliana
tggccattttccctcaa

SEQ ID NO: 154396 - DNA, 17 bp, Arabidopsis thaliana
tggccatttttaaaact

SEQ ID NO: 154397 - DNA, 17 bp, Arabidopsis thaliana
tggccattttttgaaag

SEQ ID NO: 154398 - DNA, 17 bp, Arabidopsis thaliana
tggccattttttgtaag

SEQ ID NO: 154399 - DNA, 17 bp, Arabidopsis thaliana
tggcccaaaatgttccc

SEQ ID NO: 154400 - DNA, 17 bp, Arabidopsis thaliana
tggcccaaccagatttt

SEQ ID NO: 154401 - DNA, 17 bp, Arabidopsis thaliana
tggcccaagggctgcgt

SEQ ID NO: 154402 - DNA, 17 bp, Arabidopsis thaliana
tggcccaatccactttg

SEQ ID NO: 154403 - DNA, 17 bp, Arabidopsis thaliana
tggcccaatctactttg

SEQ ID NO: 154404 - DNA, 17 bp, Arabidopsis thaliana
tggcccaatggataagg

SEQ ID NO: 154405 - DNA, 17 bp, Arabidopsis thaliana
tggcccaatgggaacga

SEQ ID NO: 154406 - DNA, 17 bp, Arabidopsis thaliana
tggcccaatggtaaatc

SEQ ID NO: 154407 - DNA, 17 bp, Arabidopsis thaliana
tggcccaatggttgacc

SEQ ID NO: 154408 - DNA, 17 bp, Arabidopsis thaliana
tggcccaattaatttac

SEQ ID NO: 154409 - DNA, 17 bp, Arabidopsis thaliana
tggcccaattggtttac

SEQ ID NO: 154410 - DNA, 17 bp, Arabidopsis thaliana
tggcccaattggtttat

SEQ ID NO: 154411 - DNA, 17 bp, Arabidopsis thaliana
tggcccacctccaactg

SEQ ID NO: 154412 - DNA, 17 bp, Arabidopsis thaliana
tggcccacttgtctcac

SEQ ID NO: 154413 - DNA, 17 bp, Arabidopsis thaliana
tggcccagaacttcctg

SEQ ID NO: 154414 - DNA, 17 bp, Arabidopsis thaliana
tggcccagacagcgtac

SEQ ID NO: 154415 - DNA, 17 bp, Arabidopsis thaliana
tggcccagctgctttca

SEQ ID NO: 154416 - DNA, 17 bp, Arabidopsis thaliana
tggcccagtggtaaatc

SEQ ID NO: 154417 - DNA, 17 bp, Arabidopsis thaliana
tggcccatggtatgcgg

SEQ ID NO: 154418 - DNA, 17 bp, Arabidopsis thaliana
tggccccaaggctcgct

SEQ ID NO: 154419 - DNA, 17 bp, Arabidopsis thaliana
tggccccattggtttac

SEQ ID NO: 154420 - DNA, 17 bp, Arabidopsis thaliana
tggccccggagtcctct

SEQ ID NO: 154421 - DNA, 17 bp, Arabidopsis thaliana
tggcccctgcgcaagga

SEQ ID NO: 154422 - DNA, 17 bp, Arabidopsis thaliana
tggccccttttggttga

SEQ ID NO: 154423 - DNA, 17 bp, Arabidopsis thaliana
tggcccgacgcggaccc

SEQ ID NO: 154424 - DNA, 17 bp, Arabidopsis thaliana
tggcccgacttctgttg

SEQ ID NO: 154425 - DNA, 17 bp, Arabidopsis thaliana
tggcccgacttgggacc

SEQ ID NO: 154426 - DNA, 17 bp, Arabidopsis thaliana
tggcccgcccattccaa

SEQ ID NO: 154427 - DNA, 17 bp, Arabidopsis thaliana
tggcccgccgattccaa

SEQ ID NO: 154428 - DNA, 17 bp, Arabidopsis thaliana
tggcccgggtttggcag

SEQ ID NO: 154429 - DNA, 17 bp, Arabidopsis thaliana
tggcccggtcaacagaa

SEQ ID NO: 154430 - DNA, 17 bp, Arabidopsis thaliana
tggccctcaggatagct

SEQ ID NO: 154431 - DNA, 17 bp, Arabidopsis thaliana
tggccctcgtggctcag

SEQ ID NO: 154432 - DNA, 17 bp, Arabidopsis thaliana
tggccctcgtggctgag

SEQ ID NO: 154433 - DNA, 17 bp, Arabidopsis thaliana
tggccctgacattagat

SEQ ID NO: 154434 - DNA, 17 bp, Arabidopsis thaliana
tggccctgcaggaatcg

SEQ ID NO: 154435 - DNA, 17 bp, Arabidopsis thaliana
tggccctgcgaacattg

SEQ ID NO: 154436 - DNA, 17 bp, Arabidopsis thaliana
tggccctgctgtgtttc

SEQ ID NO: 154437 - DNA, 17 bp, Arabidopsis thaliana
tggccctggtttacctg

SEQ ID NO: 154438 - DNA, 17 bp, Arabidopsis thaliana
tggccctggtttactta

SEQ ID NO: 154439 - DNA, 17 bp, Arabidopsis thaliana
tggccctggtttatctg

SEQ ID NO: 154440 - DNA, 17 bp, Arabidopsis thaliana
tggccctgtaccaaggt

SEQ ID NO: 154441 - DNA, 17 bp, Arabidopsis thaliana
tggccctgttctttgat

SEQ ID NO: 154442 - DNA, 17 bp, Arabidopsis thaliana
tggccctgttttgattg

SEQ ID NO: 154443 - DNA, 17 bp, Arabidopsis thaliana
tggcccttattgcctta

SEQ ID NO: 154444 - DNA, 17 bp, Arabidopsis thaliana
tggccctttggattcac

SEQ ID NO: 154445 - DNA, 17 bp, Arabidopsis thaliana
tggccctttgtcgctaa

SEQ ID NO: 154446 - DNA, 17 bp, Arabidopsis thaliana
tggccctttttaccagc

SEQ ID NO: 154447 - DNA, 17 bp, Arabidopsis thaliana
tggccgaaccgacagac

SEQ ID NO: 154448 - DNA, 17 bp, Arabidopsis thaliana
tggccgaactcttttgc

SEQ ID NO: 154449 - DNA, 17 bp, Arabidopsis thaliana
tggccgaagcccgtaat

SEQ ID NO: 154450 - DNA, 17 bp, Arabidopsis thaliana
tggccgaaggcacgtct

SEQ ID NO: 154451 - DNA, 17 bp, Arabidopsis thaliana
tggccgaatctaagtgg

SEQ ID NO: 154452 - DNA, 17 bp, Arabidopsis thaliana
tggccgaattacagtca

SEQ ID NO: 154453 - DNA, 17 bp, Arabidopsis thaliana
tggccgacagacccggg

SEQ ID NO: 154454 - DNA, 17 bp, Arabidopsis thaliana
tggccgacaggcccggg

SEQ ID NO: 154455 - DNA, 17 bp, Arabidopsis thaliana
tggccgacaggcccggt

SEQ ID NO: 154456 - DNA, 17 bp, Arabidopsis thaliana
tggccgacctcaaagtt

SEQ ID NO: 154457 - DNA, 17 bp, Arabidopsis thaliana
tggccgacctcagaatt

SEQ ID NO: 154458 - DNA, 17 bp, Arabidopsis thaliana
tggccgaccttctcagt

SEQ ID NO: 154459 - DNA, 17 bp, Arabidopsis thaliana
tggccgacgccctcggg

SEQ ID NO: 154460 - DNA, 17 bp, Arabidopsis thaliana
tggccgacgtcagagtt

SEQ ID NO: 154461 - DNA, 17 bp, Arabidopsis thaliana
tggccgagcgaataagt

SEQ ID NO: 154462 - DNA, 17 bp, Arabidopsis thaliana
tggccgaggacacgtct

SEQ ID NO: 154463 - DNA, 17 bp, Arabidopsis thaliana
tggccgaggcacgtctg

SEQ ID NO: 154464 - DNA, 17 bp, Arabidopsis thaliana
tggccgaggccacgtct

SEQ ID NO: 154465 - DNA, 17 bp, Arabidopsis thaliana
tggccgagggcacatct

SEQ ID NO: 154466 - DNA, 17 bp, Arabidopsis thaliana
tggccgagggcacgcct

SEQ ID NO: 154467 - DNA, 17 bp, Arabidopsis thaliana
tggccgagggcacgtat

SEQ ID NO: 154468 - DNA, 17 bp, Arabidopsis thaliana
tggccgagggcacgtct

SEQ ID NO: 154469 - DNA, 17 bp, Arabidopsis thaliana
tggccgagggcacgttg

SEQ ID NO: 154470 - DNA, 17 bp, Arabidopsis thaliana
tggccgagggcacgttt

SEQ ID NO: 154471 - DNA, 17 bp, Arabidopsis thaliana
tggccgaggtcacgtct

SEQ ID NO: 154472 - DNA, 17 bp, Arabidopsis thaliana
tggccgagtgcgtgtac

SEQ ID NO: 154473 - DNA, 17 bp, Arabidopsis thaliana
tggccgatccgatccga

SEQ ID NO: 154474 - DNA, 17 bp, Arabidopsis thaliana
tggccgattctgacttt

SEQ ID NO: 154475 - DNA, 17 bp, Arabidopsis thaliana
tggccgattgcatttct

SEQ ID NO: 154476 - DNA, 17 bp, Arabidopsis thaliana
tggccgatttcatcgta

SEQ ID NO: 154477 - DNA, 17 bp, Arabidopsis thaliana
tggccgcaaaactgcac

SEQ ID NO: 154478 - DNA, 17 bp, Arabidopsis thaliana
tggccgcagcagaagga

SEQ ID NO: 154479 - DNA, 17 bp, Arabidopsis thaliana
tggccgcatgagagtga

SEQ ID NO: 154480 - DNA, 17 bp, Arabidopsis thaliana
tggccgccatagagctg

SEQ ID NO: 154481 - DNA, 17 bp, Arabidopsis thaliana
tggccgcgacgaaggag

SEQ ID NO: 154482 - DNA, 17 bp, Arabidopsis thaliana
tggccgctaccgacgac

SEQ ID NO: 154483 - DNA, 17 bp, Arabidopsis thaliana
tggccggaatcacaaac

SEQ ID NO: 154484 - DNA, 17 bp, Arabidopsis thaliana
tggccggaggcccccca

SEQ ID NO: 154485 - DNA, 17 bp, Arabidopsis thaliana
tggccggagttgtggaa

SEQ ID NO: 154486 - DNA, 17 bp, Arabidopsis thaliana
tggccggatttgaatca

SEQ ID NO: 154487 - DNA, 17 bp, Arabidopsis thaliana
tggccggcggcggaggt

SEQ ID NO: 154488 - DNA, 17 bp, Arabidopsis thaliana
tggccgggacaaagggt

SEQ ID NO: 154489 - DNA, 17 bp, Arabidopsis thaliana
tggccgggggcacgtct

SEQ ID NO: 154490 - DNA, 17 bp, Arabidopsis thaliana
tggccgggtcaacgata

SEQ ID NO: 154491 - DNA, 17 bp, Arabidopsis thaliana
tggccgggtcgtgcccc

SEQ ID NO: 154492 - DNA, 17 bp, Arabidopsis thaliana
tggccgggtcgtgcctc

SEQ ID NO: 154493 - DNA, 17 bp, Arabidopsis thaliana
tggccggtccgcctttg

SEQ ID NO: 154494 - DNA, 17 bp, Arabidopsis thaliana
tggccggtgttttatga

SEQ ID NO: 154495 - DNA, 17 bp, Arabidopsis thaliana
tggccgtaagctttcct

SEQ ID NO: 154496 - DNA, 17 bp, Arabidopsis thaliana
tggccgtagcagaagga

SEQ ID NO: 154497 - DNA, 17 bp, Arabidopsis thaliana
tggccgtagtaatgtca

SEQ ID NO: 154498 - DNA, 17 bp, Arabidopsis thaliana
tggccgtcgaaattgcc

SEQ ID NO: 154499 - DNA, 17 bp, Arabidopsis thaliana
tggccgtctactgtata

SEQ ID NO: 154500 - DNA, 17 bp, Arabidopsis thaliana
tggccgtctcgcgttct

SEQ ID NO: 154501 - DNA, 17 bp, Arabidopsis thaliana
tggccgtgaatcgattc

SEQ ID NO: 154502 - DNA, 17 bp, Arabidopsis thaliana
tggccgtgatacatttt

SEQ ID NO: 154503 - DNA, 17 bp, Arabidopsis thaliana
tggccgtggggacccgg

SEQ ID NO: 154504 - DNA, 17 bp, Arabidopsis thaliana
tggccgtgttacatgat

SEQ ID NO: 154505 - DNA, 17 bp, Arabidopsis thaliana
tggccgttagttggtgg

SEQ ID NO: 154506 - DNA, 17 bp, Arabidopsis thaliana
tggccgttcttagttgg

SEQ ID NO: 154507 - DNA, 17 bp, Arabidopsis thaliana
tggccgttgctacgaca

SEQ ID NO: 154508 - DNA, 17 bp, Arabidopsis thaliana
tggcctaaaactggtga

SEQ ID NO: 154509 - DNA, 17 bp, Arabidopsis thaliana
tggcctaaactgaattc

SEQ ID NO: 154510 - DNA, 17 bp, Arabidopsis thaliana
tggcctaacagtcgtta

SEQ ID NO: 154511 - DNA, 17 bp, Arabidopsis thaliana
tggcctaacttgggacc

SEQ ID NO: 154512 - DNA, 17 bp, Arabidopsis thaliana
tggcctaagcagaaggt

SEQ ID NO: 154513 - DNA, 17 bp, Arabidopsis thaliana
tggcctaatggtaaatc

SEQ ID NO: 154514 - DNA, 17 bp, Arabidopsis thaliana
tggcctaatggtaccat

SEQ ID NO: 154515 - DNA, 17 bp, Arabidopsis thaliana
tggcctaattgggcata

SEQ ID NO: 154516 - DNA, 17 bp, Arabidopsis thaliana
tggcctaccatgggtaa

SEQ ID NO: 154517 - DNA, 17 bp, Arabidopsis thaliana
tggcctaccatggtgct

SEQ ID NO: 154518 - DNA, 17 bp, Arabidopsis thaliana
tggcctaccatggtggt

SEQ ID NO: 154519 - DNA, 17 bp, Arabidopsis thaliana
tggcctaccatggtgtt

SEQ ID NO: 154520 - DNA, 17 bp, Arabidopsis thaliana
tggcctacgatcagagc

SEQ ID NO: 154521 - DNA, 17 bp, Arabidopsis thaliana
tggcctagagggattac

SEQ ID NO: 154522 - DNA, 17 bp, Arabidopsis thaliana
tggcctaggctagtgac

SEQ ID NO: 154523 - DNA, 17 bp, Arabidopsis thaliana
tggcctagtgacagcgg

SEQ ID NO: 154524 - DNA, 17 bp, Arabidopsis thaliana
tggcctagtggtaaatt

SEQ ID NO: 154525 - DNA, 17 bp, Arabidopsis thaliana
tggcctatcagaagctg

SEQ ID NO: 154526 - DNA, 17 bp, Arabidopsis thaliana
tggcctcaacttccaga

SEQ ID NO: 154527 - DNA, 17 bp, Arabidopsis thaliana
tggcctcacatcaatat

SEQ ID NO: 154528 - DNA, 17 bp, Arabidopsis thaliana
tggcctcacggtataca

SEQ ID NO: 154529 - DNA, 17 bp, Arabidopsis thaliana
tggcctcctgatacgtt

SEQ ID NO: 154530 - DNA, 17 bp, Arabidopsis thaliana
tggcctcgtctaaacga

SEQ ID NO: 154531 - DNA, 17 bp, Arabidopsis thaliana
tggcctctccgcgactc

SEQ ID NO: 154532 - DNA, 17 bp, Arabidopsis thaliana
tggcctctcttgcttgc

SEQ ID NO: 154533 - DNA, 17 bp, Arabidopsis thaliana
tggcctctgtgctggcg

SEQ ID NO: 154534 - DNA, 17 bp, Arabidopsis thaliana
tggcctcttctaggtga

SEQ ID NO: 154535 - DNA, 17 bp, Arabidopsis thaliana
tggcctcttctaggtgg

SEQ ID NO: 154536 - DNA, 17 bp, Arabidopsis thaliana
tggcctcttgtgatttc

SEQ ID NO: 154537 - DNA, 17 bp, Arabidopsis thaliana
tggcctgaagggattac

SEQ ID NO: 154538 - DNA, 17 bp, Arabidopsis thaliana
tggcctgactatcctct

SEQ ID NO: 154539 - DNA, 17 bp, Arabidopsis thaliana
tggcctgagatgtcctc

SEQ ID NO: 154540 - DNA, 17 bp, Arabidopsis thaliana
tggcctgagctgaggtt

SEQ ID NO: 154541 - DNA, 17 bp, Arabidopsis thaliana
tggcctgaggttggacg

SEQ ID NO: 154542 - DNA, 17 bp, Arabidopsis thaliana
tggcctgattcagttgt

SEQ ID NO: 154543 - DNA, 17 bp, Arabidopsis thaliana
tggcctgatttcatcgt

SEQ ID NO: 154544 - DNA, 17 bp, Arabidopsis thaliana
tggcctgcaatttaccc

SEQ ID NO: 154545 - DNA, 17 bp, Arabidopsis thaliana
tggcctggtattttcgc

SEQ ID NO: 154546 - DNA, 17 bp, Arabidopsis thaliana
tggcctggtattttcgt

SEQ ID NO: 154547 - DNA, 17 bp, Arabidopsis thaliana
tggcctgtcctcagtaa

SEQ ID NO: 154548 - DNA, 17 bp, Arabidopsis thaliana
tggcctgtgagtatcac

SEQ ID NO: 154549 - DNA, 17 bp, Arabidopsis thaliana
tggcctgttcatgtgta

SEQ ID NO: 154550 - DNA, 17 bp, Arabidopsis thaliana
tggcctgttgcagattt

SEQ ID NO: 154551 - DNA, 17 bp, Arabidopsis thaliana
tggccttaactgatcaa

SEQ ID NO: 154552 - DNA, 17 bp, Arabidopsis thaliana
tggccttagacgaagtt

SEQ ID NO: 154553 - DNA, 17 bp, Arabidopsis thaliana
tggccttagtgatccga

SEQ ID NO: 154554 - DNA, 17 bp, Arabidopsis thaliana
tggccttagtgatccgc

SEQ ID NO: 154555 - DNA, 17 bp, Arabidopsis thaliana
tggccttataaccaact

SEQ ID NO: 154556 - DNA, 17 bp, Arabidopsis thaliana
tggccttcaaatgacct

SEQ ID NO: 154557 - DNA, 17 bp, Arabidopsis thaliana
tggccttcaccgctgtt

SEQ ID NO: 154558 - DNA, 17 bp, Arabidopsis thaliana
tggccttcctctttgct

SEQ ID NO: 154559 - DNA, 17 bp, Arabidopsis thaliana
tggccttcgggatcgga

SEQ ID NO: 154560 - DNA, 17 bp, Arabidopsis thaliana
tggccttcttatgattc

SEQ ID NO: 154561 - DNA, 17 bp, Arabidopsis thaliana
tggccttcttcgccatc

SEQ ID NO: 154562 - DNA, 17 bp, Arabidopsis thaliana
tggccttgaatgttttg

SEQ ID NO: 154563 - DNA, 17 bp, Arabidopsis thaliana
tggccttgcacaagcta

SEQ ID NO: 154564 - DNA, 17 bp, Arabidopsis thaliana
tggccttgcccggatgg

SEQ ID NO: 154565 - DNA, 17 bp, Arabidopsis thaliana
tggccttgctgccacga

SEQ ID NO: 154566 - DNA, 17 bp, Arabidopsis thaliana
tggccttgctgtgagaa

SEQ ID NO: 154567 - DNA, 17 bp, Arabidopsis thaliana
tggccttgtcatctcaa

SEQ ID NO: 154568 - DNA, 17 bp, Arabidopsis thaliana
tggcctttagctcagct

SEQ ID NO: 154569 - DNA, 17 bp, Arabidopsis thaliana
tggcctttggtaacaga

SEQ ID NO: 154570 - DNA, 17 bp, Arabidopsis thaliana
tggcctttgtgctggcg

SEQ ID NO: 154571 - DNA, 17 bp, Arabidopsis thaliana
tggccttttcgtgatct

SEQ ID NO: 154572 - DNA, 17 bp, Arabidopsis thaliana
tggccttttgcatgtaa

SEQ ID NO: 154573 - DNA, 17 bp, Arabidopsis thaliana
tggcctttttcagacgg

SEQ ID NO: 154574 - DNA, 17 bp, Arabidopsis thaliana
tggcgaaacagttatgg

SEQ ID NO: 154575 - DNA, 17 bp, Arabidopsis thaliana
tggcgaaatggctatcc

SEQ ID NO: 154576 - DNA, 17 bp, Arabidopsis thaliana
tggcgaacatcagaggc

SEQ ID NO: 154577 - DNA, 17 bp, Arabidopsis thaliana
tggcgaactgaaacatc

SEQ ID NO: 154578 - DNA, 17 bp, Arabidopsis thaliana
tggcgaagatccagcat

SEQ ID NO: 154579 - DNA, 17 bp, Arabidopsis thaliana
tggcgaagcccgtaatc

SEQ ID NO: 154580 - DNA, 17 bp, Arabidopsis thaliana
tggcgaaggaaccagtt

SEQ ID NO: 154581 - DNA, 17 bp, Arabidopsis thaliana
tggcgaaggcgactttc

SEQ ID NO: 154582 - DNA, 17 bp, Arabidopsis thaliana
tggcgaagtttccgatt

SEQ ID NO: 154583 - DNA, 17 bp, Arabidopsis thaliana
tggcgaatcctgaagtt

SEQ ID NO: 154584 - DNA, 17 bp, Arabidopsis thaliana
tggcgacaatacgatta

SEQ ID NO: 154585 - DNA, 17 bp, Arabidopsis thaliana
tggcgacaatacgattg

SEQ ID NO: 154586 - DNA, 17 bp, Arabidopsis thaliana
tggcgacacggctttgc

SEQ ID NO: 154587 - DNA, 17 bp, Arabidopsis thaliana
tggcgacactaataggc

SEQ ID NO: 154588 - DNA, 17 bp, Arabidopsis thaliana
tggcgacagaaaccggc

SEQ ID NO: 154589 - DNA, 17 bp, Arabidopsis thaliana
tggcgacagtccagtag

SEQ ID NO: 154590 - DNA, 17 bp, Arabidopsis thaliana
tggcgacagtcgctgcg

SEQ ID NO: 154591 - DNA, 17 bp, Arabidopsis thaliana
tggcgacagtcgctggc

SEQ ID NO: 154592 - DNA, 17 bp, Arabidopsis thaliana
tggcgacagtttaacgc

SEQ ID NO: 154593 - DNA, 17 bp, Arabidopsis thaliana
tggcgacattcgtaggt

SEQ ID NO: 154594 - DNA, 17 bp, Arabidopsis thaliana
tggcgacatttgtgctt

SEQ ID NO: 154595 - DNA, 17 bp, Arabidopsis thaliana
tggcgaccgagaaggac

SEQ ID NO: 154596 - DNA, 17 bp, Arabidopsis thaliana
tggcgacgcatcattca

SEQ ID NO: 154597 - DNA, 17 bp, Arabidopsis thaliana
tggcgacgcggattacg

SEQ ID NO: 154598 - DNA, 17 bp, Arabidopsis thaliana
tggcgacggatcgcatg

SEQ ID NO: 154599 - DNA, 17 bp, Arabidopsis thaliana
tggcgacggatgagacg

SEQ ID NO: 154600 - DNA, 17 bp, Arabidopsis thaliana
tggcgacgggtgtcact

SEQ ID NO: 154601 - DNA, 17 bp, Arabidopsis thaliana
tggcgacggtgttggtt

SEQ ID NO: 154602 - DNA, 17 bp, Arabidopsis thaliana
tggcgacgtcgtgggtc

SEQ ID NO: 154603 - DNA, 17 bp, Arabidopsis thaliana
tggcgactacgatggtg

SEQ ID NO: 154604 - DNA, 17 bp, Arabidopsis thaliana
tggcgactagggttgct

SEQ ID NO: 154605 - DNA, 17 bp, Arabidopsis thaliana
tggcgactatcgctatt

SEQ ID NO: 154606 - DNA, 17 bp, Arabidopsis thaliana
tggcgactgaaaccagc

SEQ ID NO: 154607 - DNA, 17 bp, Arabidopsis thaliana
tggcgactgaaattagc

SEQ ID NO: 154608 - DNA, 17 bp, Arabidopsis thaliana
tggcgactgtcgctact

SEQ ID NO: 154609 - DNA, 17 bp, Arabidopsis thaliana
tggcgactgtcgctagt

SEQ ID NO: 154610 - DNA, 17 bp, Arabidopsis thaliana
tggcgactgtcgttact

SEQ ID NO: 154611 - DNA, 17 bp, Arabidopsis thaliana
tggcgactgtttttgta

SEQ ID NO: 154612 - DNA, 17 bp, Arabidopsis thaliana
tggcgacttctggtttt

SEQ ID NO: 154613 - DNA, 17 bp, Arabidopsis thaliana
tggcgacttttagttcc

SEQ ID NO: 154614 - DNA, 17 bp, Arabidopsis thaliana
tggcgagaaaatcacgg

SEQ ID NO: 154615 - DNA, 17 bp, Arabidopsis thaliana
tggcgagacccaagtgc

SEQ ID NO: 154616 - DNA, 17 bp, Arabidopsis thaliana
tggcgagaccggtggat

SEQ ID NO: 154617 - DNA, 17 bp, Arabidopsis thaliana
tggcgagacggatttgg

SEQ ID NO: 154618 - DNA, 17 bp, Arabidopsis thaliana
tggcgagacgggtttga

SEQ ID NO: 154619 - DNA, 17 bp, Arabidopsis thaliana
tggcgagacgggtttgg

SEQ ID NO: 154620 - DNA, 17 bp, Arabidopsis thaliana
tggcgaggaatggtcga

SEQ ID NO: 154621 - DNA, 17 bp, Arabidopsis thaliana
tggcgaggacccggacc

SEQ ID NO: 154622 - DNA, 17 bp, Arabidopsis thaliana
tggcgaggacctcgaac

SEQ ID NO: 154623 - DNA, 17 bp, Arabidopsis thaliana
tggcgagggcacgtctg

SEQ ID NO: 154624 - DNA, 17 bp, Arabidopsis thaliana
tggcgagtagcttgtcc

SEQ ID NO: 154625 - DNA, 17 bp, Arabidopsis thaliana
tggcgagtcggaatgga

SEQ ID NO: 154626 - DNA, 17 bp, Arabidopsis thaliana
tggcgagtgttaggaga

SEQ ID NO: 154627 - DNA, 17 bp, Arabidopsis thaliana
tggcgagttgtccttcg

SEQ ID NO: 154628 - DNA, 17 bp, Arabidopsis thaliana
tggcgatatctgatttc

SEQ ID NO: 154629 - DNA, 17 bp, Arabidopsis thaliana
tggcgatcactatactg

SEQ ID NO: 154630 - DNA, 17 bp, Arabidopsis thaliana
tggcgatctctaagttt

SEQ ID NO: 154631 - DNA, 17 bp, Arabidopsis thaliana
tggcgatgaagatggcg

SEQ ID NO: 154632 - DNA, 17 bp, Arabidopsis thaliana
tggcgatgatgatcaat

SEQ ID NO: 154633 - DNA, 17 bp, Arabidopsis thaliana
tggcgatgatgatggcg

SEQ ID NO: 154634 - DNA, 17 bp, Arabidopsis thaliana
tggcgatggagtcaata

SEQ ID NO: 154635 - DNA, 17 bp, Arabidopsis thaliana
tggcgatgtgttggctt

SEQ ID NO: 154636 - DNA, 17 bp, Arabidopsis thaliana
tggcgatgtgttgttcg

SEQ ID NO: 154637 - DNA, 17 bp, Arabidopsis thaliana
tggcgattcacgacttc

SEQ ID NO: 154638 - DNA, 17 bp, Arabidopsis thaliana
tggcgattgaacggtct

SEQ ID NO: 154639 - DNA, 17 bp, Arabidopsis thaliana
tggcgattgtcgttact

SEQ ID NO: 154640 - DNA, 17 bp, Arabidopsis thaliana
tggcgatttcagctctt

SEQ ID NO: 154641 - DNA, 17 bp, Arabidopsis thaliana
tggcgatttcgaacggt

SEQ ID NO: 154642 - DNA, 17 bp, Arabidopsis thaliana
tggcgatttcgagcggt

SEQ ID NO: 154643 - DNA, 17 bp, Arabidopsis thaliana
tggcgatttctctgtcg

SEQ ID NO: 154644 - DNA, 17 bp, Arabidopsis thaliana
tggcgatttctctgtct

SEQ ID NO: 154645 - DNA, 17 bp, Arabidopsis thaliana
tggcgatttctttgtcg

SEQ ID NO: 154646 - DNA, 17 bp, Arabidopsis thaliana
tggcgcaattgttttcc

SEQ ID NO: 154647 - DNA, 17 bp, Arabidopsis thaliana
tggcgcaatttgtagat

SEQ ID NO: 154648 - DNA, 17 bp, Arabidopsis thaliana
tggcgcacagaccgtcg

SEQ ID NO: 154649 - DNA, 17 bp, Arabidopsis thaliana
tggcgcaccctgtagat

SEQ ID NO: 154650 - DNA, 17 bp, Arabidopsis thaliana
tggcgcaccgactgtcg

SEQ ID NO: 154651 - DNA, 17 bp, Arabidopsis thaliana
tggcgcagctgattaag

SEQ ID NO: 154652 - DNA, 17 bp, Arabidopsis thaliana
tggcgcagttgccaatt

SEQ ID NO: 154653 - DNA, 17 bp, Arabidopsis thaliana
tggcgccgaaccacgag

SEQ ID NO: 154654 - DNA, 17 bp, Arabidopsis thaliana
tggcgccgacaatcaag

SEQ ID NO: 154655 - DNA, 17 bp, Arabidopsis thaliana
tggcgccgttccgatcc

SEQ ID NO: 154656 - DNA, 17 bp, Arabidopsis thaliana
tggcgccgttgccaatt

SEQ ID NO: 154657 - DNA, 17 bp, Arabidopsis thaliana
tggcgcctctgcctggc

SEQ ID NO: 154658 - DNA, 17 bp, Arabidopsis thaliana
tggcgctaaaacttgtg

SEQ ID NO: 154659 - DNA, 17 bp, Arabidopsis thaliana
tggcgctaccggtctac

SEQ ID NO: 154660 - DNA, 17 bp, Arabidopsis thaliana
tggcgctatccatcatg

SEQ ID NO: 154661 - DNA, 17 bp, Arabidopsis thaliana
tggcgctatccatcctg

SEQ ID NO: 154662 - DNA, 17 bp, Arabidopsis thaliana
tggcgctatccctcctg

SEQ ID NO: 154663 - DNA, 17 bp, Arabidopsis thaliana
tggcgctctatttattc

SEQ ID NO: 154664 - DNA, 17 bp, Arabidopsis thaliana
tggcgctgacattcgac

SEQ ID NO: 154665 - DNA, 17 bp, Arabidopsis thaliana
tggcgctggaggtggtg

SEQ ID NO: 154666 - DNA, 17 bp, Arabidopsis thaliana
tggcgctgttgtctgcg

SEQ ID NO: 154667 - DNA, 17 bp, Arabidopsis thaliana
tggcgcttaagcgcgcc

SEQ ID NO: 154668 - DNA, 17 bp, Arabidopsis thaliana
tggcgcttaagcgcgcg

SEQ ID NO: 154669 - DNA, 17 bp, Arabidopsis thaliana
tggcgcttccgtaacca

SEQ ID NO: 154670 - DNA, 17 bp, Arabidopsis thaliana
tggcgcttttgcttccg

SEQ ID NO: 154671 - DNA, 17 bp, Arabidopsis thaliana
tggcggaaaaatcatgg

SEQ ID NO: 154672 - DNA, 17 bp, Arabidopsis thaliana
tggcggaccgatcctgc

SEQ ID NO: 154673 - DNA, 17 bp, Arabidopsis thaliana
tggcggacgggtttggc

SEQ ID NO: 154674 - DNA, 17 bp, Arabidopsis thaliana
tggcggacgttacggta

SEQ ID NO: 154675 - DNA, 17 bp, Arabidopsis thaliana
tggcggactggtcaact

SEQ ID NO: 154676 - DNA, 17 bp, Arabidopsis thaliana
tggcggactggtcagct

SEQ ID NO: 154677 - DNA, 17 bp, Arabidopsis thaliana
tggcggagacaaatggg

SEQ ID NO: 154678 - DNA, 17 bp, Arabidopsis thaliana
tggcggagcagactgtc

SEQ ID NO: 154679 - DNA, 17 bp, Arabidopsis thaliana
tggcggagcggccgcag

SEQ ID NO: 154680 - DNA, 17 bp, Arabidopsis thaliana
tggcggatgattattgg

SEQ ID NO: 154681 - DNA, 17 bp, Arabidopsis thaliana
tggcggatgtcagcggc

SEQ ID NO: 154682 - DNA, 17 bp, Arabidopsis thaliana
tggcggatgtcagcggt

SEQ ID NO: 154683 - DNA, 17 bp, Arabidopsis thaliana
tggcggcacgagcttgg

SEQ ID NO: 154684 - DNA, 17 bp, Arabidopsis thaliana
tggcggcatttgcattt

SEQ ID NO: 154685 - DNA, 17 bp, Arabidopsis thaliana
tggcggccagcaccgct

SEQ ID NO: 154686 - DNA, 17 bp, Arabidopsis thaliana
tggcggcctaagccccg

SEQ ID NO: 154687 - DNA, 17 bp, Arabidopsis thaliana
tggcggcctaagcccgg

SEQ ID NO: 154688 - DNA, 17 bp, Arabidopsis thaliana
tggcggcctaccccggg

SEQ ID NO: 154689 - DNA, 17 bp, Arabidopsis thaliana
tggcggcgatataactt

SEQ ID NO: 154690 - DNA, 17 bp, Arabidopsis thaliana
tggcggcgctggtggtg

SEQ ID NO: 154691 - DNA, 17 bp, Arabidopsis thaliana
tggcggcggttatagga

SEQ ID NO: 154692 - DNA, 17 bp, Arabidopsis thaliana
tggcggctccacatatg

SEQ ID NO: 154693 - DNA, 17 bp, Arabidopsis thaliana
tggcggctcgggatcgt

SEQ ID NO: 154694 - DNA, 17 bp, Arabidopsis thaliana
tggcggctgtactcatc

SEQ ID NO: 154695 - DNA, 17 bp, Arabidopsis thaliana
tggcggctgtcgtagat

SEQ ID NO: 154696 - DNA, 17 bp, Arabidopsis thaliana
tggcggcttactgtgct

SEQ ID NO: 154697 - DNA, 17 bp, Arabidopsis thaliana
tggcggcttctgcctgt

SEQ ID NO: 154698 - DNA, 17 bp, Arabidopsis thaliana
tggcgggaaaaccacgg

SEQ ID NO: 154699 - DNA, 17 bp, Arabidopsis thaliana
tggcgggaaaatcacgg

SEQ ID NO: 154700 - DNA, 17 bp, Arabidopsis thaliana
tggcgggaaaatgttaa

SEQ ID NO: 154701 - DNA, 17 bp, Arabidopsis thaliana
tggcgggaaatgttttt

SEQ ID NO: 154702 - DNA, 17 bp, Arabidopsis thaliana
tggcgggaagattttgg

SEQ ID NO: 154703 - DNA, 17 bp, Arabidopsis thaliana
tggcgggacaggtttgg

SEQ ID NO: 154704 - DNA, 17 bp, Arabidopsis thaliana
tggcgggacgagtttag

SEQ ID NO: 154705 - DNA, 17 bp, Arabidopsis thaliana
tggcgggacgagtttgg

SEQ ID NO: 154706 - DNA, 17 bp, Arabidopsis thaliana
tggcgggacgcgattta

SEQ ID NO: 154707 - DNA, 17 bp, Arabidopsis thaliana
tggcgggacggatttga

SEQ ID NO: 154708 - DNA, 17 bp, Arabidopsis thaliana
tggcgggacgggtttag

SEQ ID NO: 154709 - DNA, 17 bp, Arabidopsis thaliana
tggcgggacgggtttga

SEQ ID NO: 154710 - DNA, 17 bp, Arabidopsis thaliana
tggcgggacgggtttgg

SEQ ID NO: 154711 - DNA, 17 bp, Arabidopsis thaliana
tggcgggacgggtttgt

SEQ ID NO: 154712 - DNA, 17 bp, Arabidopsis thaliana
tggcgggactgggtttt

SEQ ID NO: 154713 - DNA, 17 bp, Arabidopsis thaliana
tggcgggacttggcggt

SEQ ID NO: 154714 - DNA, 17 bp, Arabidopsis thaliana
tggcgggatacttcgga

SEQ ID NO: 154715 - DNA, 17 bp, Arabidopsis thaliana
tggcgggatccctcgca

SEQ ID NO: 154716 - DNA, 17 bp, Arabidopsis thaliana
tggcgggatccctcgcg

SEQ ID NO: 154717 - DNA, 17 bp, Arabidopsis thaliana
tggcgggatcccttgcg

SEQ ID NO: 154718 - DNA, 17 bp, Arabidopsis thaliana
tggcgggatgggtttgg

SEQ ID NO: 154719 - DNA, 17 bp, Arabidopsis thaliana
tggcgggattccctcgc

SEQ ID NO: 154720 - DNA, 17 bp, Arabidopsis thaliana
tggcgggcctttggaag

SEQ ID NO: 154721 - DNA, 17 bp, Arabidopsis thaliana
tggcgggtcaagttctg

SEQ ID NO: 154722 - DNA, 17 bp, Arabidopsis thaliana
tggcgggtgggacccac

SEQ ID NO: 154723 - DNA, 17 bp, Arabidopsis thaliana
tggcgggtgggacccag

SEQ ID NO: 154724 - DNA, 17 bp, Arabidopsis thaliana
tggcgggttgatgttca

SEQ ID NO: 154725 - DNA, 17 bp, Arabidopsis thaliana
tggcggtaactttttgg

SEQ ID NO: 154726 - DNA, 17 bp, Arabidopsis thaliana
tggcggtacgggtttgg

SEQ ID NO: 154727 - DNA, 17 bp, Arabidopsis thaliana
tggcggtcaaattgatg

SEQ ID NO: 154728 - DNA, 17 bp, Arabidopsis thaliana
tggcggtcgcaggttga

SEQ ID NO: 154729 - DNA, 17 bp, Arabidopsis thaliana
tggcggtgccaggcggg

SEQ ID NO: 154730 - DNA, 17 bp, Arabidopsis thaliana
tggcggtgctagattgg

SEQ ID NO: 154731 - DNA, 17 bp, Arabidopsis thaliana
tggcggttatcaaggag

SEQ ID NO: 154732 - DNA, 17 bp, Arabidopsis thaliana
tggcggttcacttcgag

SEQ ID NO: 154733 - DNA, 17 bp, Arabidopsis thaliana
tggcggttgacggcaac

SEQ ID NO: 154734 - DNA, 17 bp, Arabidopsis thaliana
tggcggttgacggcagg

SEQ ID NO: 154735 - DNA, 17 bp, Arabidopsis thaliana
tggcggttgagggtttc

SEQ ID NO: 154736 - DNA, 17 bp, Arabidopsis thaliana
tggcggtttacggcaac

SEQ ID NO: 154737 - DNA, 17 bp, Arabidopsis thaliana
tggcggttttggcagaa

SEQ ID NO: 154738 - DNA, 17 bp, Arabidopsis thaliana
tggcgtaacgacttggg

SEQ ID NO: 154739 - DNA, 17 bp, Arabidopsis thaliana
tggcgtaattaagtgtg

SEQ ID NO: 154740 - DNA, 17 bp, Arabidopsis thaliana
tggcgtagccaagcggt

SEQ ID NO: 154741 - DNA, 17 bp, Arabidopsis thaliana
tggcgtcactaatgttt

SEQ ID NO: 154742 - DNA, 17 bp, Arabidopsis thaliana
tggcgtcagttgcattt

SEQ ID NO: 154743 - DNA, 17 bp, Arabidopsis thaliana
tggcgtcgaacagtcag

SEQ ID NO: 154744 - DNA, 17 bp, Arabidopsis thaliana
tggcgtcgctcagaacc

SEQ ID NO: 154745 - DNA, 17 bp, Arabidopsis thaliana
tggcgtcggaatctttt

SEQ ID NO: 154746 - DNA, 17 bp, Arabidopsis thaliana
tggcgtcggatattggt

SEQ ID NO: 154747 - DNA, 17 bp, Arabidopsis thaliana
tggcgtcgttgccaatt

SEQ ID NO: 154748 - DNA, 17 bp, Arabidopsis thaliana
tggcgtcgttgtttcct

SEQ ID NO: 154749 - DNA, 17 bp, Arabidopsis thaliana
tggcgtcgtttcaagct

SEQ ID NO: 154750 - DNA, 17 bp, Arabidopsis thaliana
tggcgtctagctcagtt

SEQ ID NO: 154751 - DNA, 17 bp, Arabidopsis thaliana
tggcgtctgcctgggtg

SEQ ID NO: 154752 - DNA, 17 bp, Arabidopsis thaliana
tggcgtctggagaatca

SEQ ID NO: 154753 - DNA, 17 bp, Arabidopsis thaliana
tggcgtctgttgcagcg

SEQ ID NO: 154754 - DNA, 17 bp, Arabidopsis thaliana
tggcgtgatctctttga

SEQ ID NO: 154755 - DNA, 17 bp, Arabidopsis thaliana
tggcgtgcagtgacctg

SEQ ID NO: 154756 - DNA, 17 bp, Arabidopsis thaliana
tggcgtgcagtgacttg

SEQ ID NO: 154757 - DNA, 17 bp, Arabidopsis thaliana
tggcgtgcgctaatggt

SEQ ID NO: 154758 - DNA, 17 bp, Arabidopsis thaliana
tggcgtggcaaaagcga

SEQ ID NO: 154759 - DNA, 17 bp, Arabidopsis thaliana
tggcgtgtgataccttt

SEQ ID NO: 154760 - DNA, 17 bp, Arabidopsis thaliana
tggcgttaaatcagcaa

SEQ ID NO: 154761 - DNA, 17 bp, Arabidopsis thaliana
tggcgttaagtcaactg

SEQ ID NO: 154762 - DNA, 17 bp, Arabidopsis thaliana
tggcgttacaggtttgg

SEQ ID NO: 154763 - DNA, 17 bp, Arabidopsis thaliana
tggcgttatggggaagc

SEQ ID NO: 154764 - DNA, 17 bp, Arabidopsis thaliana
tggcgttcaagagtgac

SEQ ID NO: 154765 - DNA, 17 bp, Arabidopsis thaliana
tggcgttcactatggaa

SEQ ID NO: 154766 - DNA, 17 bp, Arabidopsis thaliana
tggcgttccttggcctc

SEQ ID NO: 154767 - DNA, 17 bp, Arabidopsis thaliana
tggcgttcgtggtcaga

SEQ ID NO: 154768 - DNA, 17 bp, Arabidopsis thaliana
tggcgttgaccgatggt

SEQ ID NO: 154769 - DNA, 17 bp, Arabidopsis thaliana
tggcgttgaccgatgtt

SEQ ID NO: 154770 - DNA, 17 bp, Arabidopsis thaliana
tggcgttgaggctgagc

SEQ ID NO: 154771 - DNA, 17 bp, Arabidopsis thaliana
tggcgttgatggtgaga

SEQ ID NO: 154772 - DNA, 17 bp, Arabidopsis thaliana
tggcgttgatggtggga

SEQ ID NO: 154773 - DNA, 17 bp, Arabidopsis thaliana
tggcgttgtactcggtt

SEQ ID NO: 154774 - DNA, 17 bp, Arabidopsis thaliana
tggcgttgtattctgca

SEQ ID NO: 154775 - DNA, 17 bp, Arabidopsis thaliana
tggcgtttactatctca

SEQ ID NO: 154776 - DNA, 17 bp, Arabidopsis thaliana
tggcgtttcttggcctc

SEQ ID NO: 154777 - DNA, 17 bp, Arabidopsis thaliana
tggcgtttgcggttgcg

SEQ ID NO: 154778 - DNA, 17 bp, Arabidopsis thaliana
tggcgtttggcctgatg

SEQ ID NO: 154779 - DNA, 17 bp, Arabidopsis thaliana
tggcgtttggtgattgg

SEQ ID NO: 154780 - DNA, 17 bp, Arabidopsis thaliana
tggcgtttggtttcatg

SEQ ID NO: 154781 - DNA, 17 bp, Arabidopsis thaliana
tggcgttttagactctt

SEQ ID NO: 154782 - DNA, 17 bp, Arabidopsis thaliana
tggcgttttggctgcaa

SEQ ID NO: 154783 - DNA, 17 bp, Arabidopsis thaliana
tggctaaaacctgattg

SEQ ID NO: 154784 - DNA, 17 bp, Arabidopsis thaliana
tggctaaaacgtggttg

SEQ ID NO: 154785 - DNA, 17 bp, Arabidopsis thaliana
tggctaaaactacgcgt

SEQ ID NO: 154786 - DNA, 17 bp, Arabidopsis thaliana
tggctaaaagggagtta

SEQ ID NO: 154787 - DNA, 17 bp, Arabidopsis thaliana
tggctaaaagggagttg

SEQ ID NO: 154788 - DNA, 17 bp, Arabidopsis thaliana
tggctaaaatctggctg

SEQ ID NO: 154789 - DNA, 17 bp, Arabidopsis thaliana
tggctaaaatgtggttg

SEQ ID NO: 154790 - DNA, 17 bp, Arabidopsis thaliana
tggctaaagaacttgaa

SEQ ID NO: 154791 - DNA, 17 bp, Arabidopsis thaliana
tggctaaagacttcggt

SEQ ID NO: 154792 - DNA, 17 bp, Arabidopsis thaliana
tggctaaagtcaagggt

SEQ ID NO: 154793 - DNA, 17 bp, Arabidopsis thaliana
tggctaaagtgatgata

SEQ ID NO: 154794 - DNA, 17 bp, Arabidopsis thaliana
tggctaaagtttcaaaa

SEQ ID NO: 154795 - DNA, 17 bp, Arabidopsis thaliana
tggctaaagttttgttc

SEQ ID NO: 154796 - DNA, 17 bp, Arabidopsis thaliana
tggctaaatcagcttca

SEQ ID NO: 154797 - DNA, 17 bp, Arabidopsis thaliana
tggctaaatcttgaaga

SEQ ID NO: 154798 - DNA, 17 bp, Arabidopsis thaliana
tggctaaattaatcgtg

SEQ ID NO: 154799 - DNA, 17 bp, Arabidopsis thaliana
tggctaacgttctctac

SEQ ID NO: 154800 - DNA, 17 bp, Arabidopsis thaliana
tggctaactttctccag

SEQ ID NO: 154801 - DNA, 17 bp, Arabidopsis thaliana
tggctaactttctccat

SEQ ID NO: 154802 - DNA, 17 bp, Arabidopsis thaliana
tggctaagaagaatcat

SEQ ID NO: 154803 - DNA, 17 bp, Arabidopsis thaliana
tggctaagaattgaaag

SEQ ID NO: 154804 - DNA, 17 bp, Arabidopsis thaliana
tggctaagagaggttgt

SEQ ID NO: 154805 - DNA, 17 bp, Arabidopsis thaliana
tggctaagaggccacct

SEQ ID NO: 154806 - DNA, 17 bp, Arabidopsis thaliana
tggctaagatataccgc

SEQ ID NO: 154807 - DNA, 17 bp, Arabidopsis thaliana
tggctaagcgtcgacat

SEQ ID NO: 154808 - DNA, 17 bp, Arabidopsis thaliana
tggctaaggtccttgtc

SEQ ID NO: 154809 - DNA, 17 bp, Arabidopsis thaliana
tggctaagtcaaatgtg

SEQ ID NO: 154810 - DNA, 17 bp, Arabidopsis thaliana
tggctaagtccaagtgt

SEQ ID NO: 154811 - DNA, 17 bp, Arabidopsis thaliana
tggctaagtccattcgg

SEQ ID NO: 154812 - DNA, 17 bp, Arabidopsis thaliana
tggctaagtccctcggc

SEQ ID NO: 154813 - DNA, 17 bp, Arabidopsis thaliana
tggctaagtccgttcgg

SEQ ID NO: 154814 - DNA, 17 bp, Arabidopsis thaliana
tggctaagttatcgtgt

SEQ ID NO: 154815 - DNA, 17 bp, Arabidopsis thaliana
tggctaagttggagttt

SEQ ID NO: 154816 - DNA, 17 bp, Arabidopsis thaliana
tggctaagtttagcgga

SEQ ID NO: 154817 - DNA, 17 bp, Arabidopsis thaliana
tggctaagtttgggatc

SEQ ID NO: 154818 - DNA, 17 bp, Arabidopsis thaliana
tggctaatagctgaaag

SEQ ID NO: 154819 - DNA, 17 bp, Arabidopsis thaliana
tggctaatcctcgtctt

SEQ ID NO: 154820 - DNA, 17 bp, Arabidopsis thaliana
tggctaatgcgaggttg

SEQ ID NO: 154821 - DNA, 17 bp, Arabidopsis thaliana
tggctaatgcgcagtat

SEQ ID NO: 154822 - DNA, 17 bp, Arabidopsis thaliana
tggctaatgcgcagtct

SEQ ID NO: 154823 - DNA, 17 bp, Arabidopsis thaliana
tggctaatgtggagatt

SEQ ID NO: 154824 - DNA, 17 bp, Arabidopsis thaliana
tggctaattccacttca

SEQ ID NO: 154825 - DNA, 17 bp, Arabidopsis thaliana
tggctaatttgtcagca

SEQ ID NO: 154826 - DNA, 17 bp, Arabidopsis thaliana
tggctacaagatctttt

SEQ ID NO: 154827 - DNA, 17 bp, Arabidopsis thaliana
tggctacaatggggcta

SEQ ID NO: 154828 - DNA, 17 bp, Arabidopsis thaliana
tggctacacacttttca

SEQ ID NO: 154829 - DNA, 17 bp, Arabidopsis thaliana
tggctacaccatgaaag

SEQ ID NO: 154830 - DNA, 17 bp, Arabidopsis thaliana
tggctacagggtgcggc

SEQ ID NO: 154831 - DNA, 17 bp, Arabidopsis thaliana
tggctaccaggtcattt

SEQ ID NO: 154832 - DNA, 17 bp, Arabidopsis thaliana
tggctaccagtatgagg

SEQ ID NO: 154833 - DNA, 17 bp, Arabidopsis thaliana
tggctactggccgaccg

SEQ ID NO: 154834 - DNA, 17 bp, Arabidopsis thaliana
tggctactgtcgtggct

SEQ ID NO: 154835 - DNA, 17 bp, Arabidopsis thaliana
tggctacttcttgatcc

SEQ ID NO: 154836 - DNA, 17 bp, Arabidopsis thaliana
tggctagacggtagcct

SEQ ID NO: 154837 - DNA, 17 bp, Arabidopsis thaliana
tggctagactcgaaaac

SEQ ID NO: 154838 - DNA, 17 bp, Arabidopsis thaliana
tggctagactctgaact

SEQ ID NO: 154839 - DNA, 17 bp, Arabidopsis thaliana
tggctagactctgaagt

SEQ ID NO: 154840 - DNA, 17 bp, Arabidopsis thaliana
tggctagatgaagcccg

SEQ ID NO: 154841 - DNA, 17 bp, Arabidopsis thaliana
tggctagcagatctgca

SEQ ID NO: 154842 - DNA, 17 bp, Arabidopsis thaliana
tggctaggaaagccttc

SEQ ID NO: 154843 - DNA, 17 bp, Arabidopsis thaliana
tggctaggcagagcttg

SEQ ID NO: 154844 - DNA, 17 bp, Arabidopsis thaliana
tggctaggcggtcttga

SEQ ID NO: 154845 - DNA, 17 bp, Arabidopsis thaliana
tggctaggtttgtcaaa

SEQ ID NO: 154846 - DNA, 17 bp, Arabidopsis thaliana
tggctagtctttcacac

SEQ ID NO: 154847 - DNA, 17 bp, Arabidopsis thaliana
tggctatacaatggcgg

SEQ ID NO: 154848 - DNA, 17 bp, Arabidopsis thaliana
tggctatactcggcctg

SEQ ID NO: 154849 - DNA, 17 bp, Arabidopsis thaliana
tggctatagcgggtttg

SEQ ID NO: 154850 - DNA, 17 bp, Arabidopsis thaliana
tggctatcacagttggc

SEQ ID NO: 154851 - DNA, 17 bp, Arabidopsis thaliana
tggctatcagctcagtt

SEQ ID NO: 154852 - DNA, 17 bp, Arabidopsis thaliana
tggctatcagttgcttg

SEQ ID NO: 154853 - DNA, 17 bp, Arabidopsis thaliana
tggctatccacagatgt

SEQ ID NO: 154854 - DNA, 17 bp, Arabidopsis thaliana
tggctatccaccgtgta

SEQ ID NO: 154855 - DNA, 17 bp, Arabidopsis thaliana
tggctatgcagtgtcgt

SEQ ID NO: 154856 - DNA, 17 bp, Arabidopsis thaliana
tggctatggatcttctt

SEQ ID NO: 154857 - DNA, 17 bp, Arabidopsis thaliana
tggctatggatgtttga

SEQ ID NO: 154858 - DNA, 17 bp, Arabidopsis thaliana
tggctatggcacaagct

SEQ ID NO: 154859 - DNA, 17 bp, Arabidopsis thaliana
tggctatgttccacccg

SEQ ID NO: 154860 - DNA, 17 bp, Arabidopsis thaliana
tggctattacagtgggt

SEQ ID NO: 154861 - DNA, 17 bp, Arabidopsis thaliana
tggctattagctcagta

SEQ ID NO: 154862 - DNA, 17 bp, Arabidopsis thaliana
tggctattagctcagtg

SEQ ID NO: 154863 - DNA, 17 bp, Arabidopsis thaliana
tggctattagctcagtt

SEQ ID NO: 154864 - DNA, 17 bp, Arabidopsis thaliana
tggctattggccgaccg

SEQ ID NO: 154865 - DNA, 17 bp, Arabidopsis thaliana
tggctattggccgactg

SEQ ID NO: 154866 - DNA, 17 bp, Arabidopsis thaliana
tggctattgggccgaat

SEQ ID NO: 154867 - DNA, 17 bp, Arabidopsis thaliana
tggctattgggctattg

SEQ ID NO: 154868 - DNA, 17 bp, Arabidopsis thaliana
tggctattgttgataac

SEQ ID NO: 154869 - DNA, 17 bp, Arabidopsis thaliana
tggctatttggtcctcc

SEQ ID NO: 154870 - DNA, 17 bp, Arabidopsis thaliana
tggctcaacgccaccgg

SEQ ID NO: 154871 - DNA, 17 bp, Arabidopsis thaliana
tggctcaactcagggac

SEQ ID NO: 154872 - DNA, 17 bp, Arabidopsis thaliana
tggctcaagtgtggcct

SEQ ID NO: 154873 - DNA, 17 bp, Arabidopsis thaliana
tggctcaagttcgcata

SEQ ID NO: 154874 - DNA, 17 bp, Arabidopsis thaliana
tggctcaatcttttgtg

SEQ ID NO: 154875 - DNA, 17 bp, Arabidopsis thaliana
tggctcacgaacggtcc

SEQ ID NO: 154876 - DNA, 17 bp, Arabidopsis thaliana
tggctcacggggaacca

SEQ ID NO: 154877 - DNA, 17 bp, Arabidopsis thaliana
tggctcactgctataac

SEQ ID NO: 154878 - DNA, 17 bp, Arabidopsis thaliana
tggctcactgctatgac

SEQ ID NO: 154879 - DNA, 17 bp, Arabidopsis thaliana
tggctcagatactcgga

SEQ ID NO: 154880 - DNA, 17 bp, Arabidopsis thaliana
tggctcaggataaacgc

SEQ ID NO: 154881 - DNA, 17 bp, Arabidopsis thaliana
tggctcaggatgaacgc

SEQ ID NO: 154882 - DNA, 17 bp, Arabidopsis thaliana
tggctcagttggtttct

SEQ ID NO: 154883 - DNA, 17 bp, Arabidopsis thaliana
tggctcatcttttgttg

SEQ ID NO: 154884 - DNA, 17 bp, Arabidopsis thaliana
tggctcatgagcttttt

SEQ ID NO: 154885 - DNA, 17 bp, Arabidopsis thaliana
tggctcatgggcttttt

SEQ ID NO: 154886 - DNA, 17 bp, Arabidopsis thaliana
tggctcattggttgacc

SEQ ID NO: 154887 - DNA, 17 bp, Arabidopsis thaliana
tggctcatttagtgttg

SEQ ID NO: 154888 - DNA, 17 bp, Arabidopsis thaliana
tggctcatttggctaag

SEQ ID NO: 154889 - DNA, 17 bp, Arabidopsis thaliana
tggctccaaagtcactc

SEQ ID NO: 154890 - DNA, 17 bp, Arabidopsis thaliana
tggctccaggcttcatt

SEQ ID NO: 154891 - DNA, 17 bp, Arabidopsis thaliana
tggctccagtgatgatt

SEQ ID NO: 154892 - DNA, 17 bp, Arabidopsis thaliana
tggctccagttaatcct

SEQ ID NO: 154893 - DNA, 17 bp, Arabidopsis thaliana
tggctccatcgttaagg

SEQ ID NO: 154894 - DNA, 17 bp, Arabidopsis thaliana
tggctccctccaatcag

SEQ ID NO: 154895 - DNA, 17 bp, Arabidopsis thaliana
tggctccgaatgagtag

SEQ ID NO: 154896 - DNA, 17 bp, Arabidopsis thaliana
tggctccgaatggtgac

SEQ ID NO: 154897 - DNA, 17 bp, Arabidopsis thaliana
tggctccgacggatgtg

SEQ ID NO: 154898 - DNA, 17 bp, Arabidopsis thaliana
tggctccgtacagacgc

SEQ ID NO: 154899 - DNA, 17 bp, Arabidopsis thaliana
tggctcctgcttcgcct

SEQ ID NO: 154900 - DNA, 17 bp, Arabidopsis thaliana
tggctcctgttgcagct

SEQ ID NO: 154901 - DNA, 17 bp, Arabidopsis thaliana
tggctcgaaccggtgac

SEQ ID NO: 154902 - DNA, 17 bp, Arabidopsis thaliana
tggctcgacctcgactc

SEQ ID NO: 154903 - DNA, 17 bp, Arabidopsis thaliana
tggctcgacgaggtgtc

SEQ ID NO: 154904 - DNA, 17 bp, Arabidopsis thaliana
tggctcgcatggcttga

SEQ ID NO: 154905 - DNA, 17 bp, Arabidopsis thaliana
tggctcgccaacccggt

SEQ ID NO: 154906 - DNA, 17 bp, Arabidopsis thaliana
tggctcgccagcatagg

SEQ ID NO: 154907 - DNA, 17 bp, Arabidopsis thaliana
tggctcgctcaggtgga

SEQ ID NO: 154908 - DNA, 17 bp, Arabidopsis thaliana
tggctcggaaattgtgg

SEQ ID NO: 154909 - DNA, 17 bp, Arabidopsis thaliana
tggctcggactcccaga

SEQ ID NO: 154910 - DNA, 17 bp, Arabidopsis thaliana
tggctcggactggcagt

SEQ ID NO: 154911 - DNA, 17 bp, Arabidopsis thaliana
tggctcggatgtgtttc

SEQ ID NO: 154912 - DNA, 17 bp, Arabidopsis thaliana
tggctcggattcggata

SEQ ID NO: 154913 - DNA, 17 bp, Arabidopsis thaliana
tggctcggctacaccat

SEQ ID NO: 154914 - DNA, 17 bp, Arabidopsis thaliana
tggctcggctggatagt

SEQ ID NO: 154915 - DNA, 17 bp, Arabidopsis thaliana
tggctcgggtatgttta

SEQ ID NO: 154916 - DNA, 17 bp, Arabidopsis thaliana
tggctcggtcaggctgc

SEQ ID NO: 154917 - DNA, 17 bp, Arabidopsis thaliana
tggctcgtgagcttttt

SEQ ID NO: 154918 - DNA, 17 bp, Arabidopsis thaliana
tggctcgttcccagctg

SEQ ID NO: 154919 - DNA, 17 bp, Arabidopsis thaliana
tggctcgttcccagttg

SEQ ID NO: 154920 - DNA, 17 bp, Arabidopsis thaliana
tggctctaagtcagaat

SEQ ID NO: 154921 - DNA, 17 bp, Arabidopsis thaliana
tggctctacttagcaac

SEQ ID NO: 154922 - DNA, 17 bp, Arabidopsis thaliana
tggctctatccaactac

SEQ ID NO: 154923 - DNA, 17 bp, Arabidopsis thaliana
tggctctatccaactcc

SEQ ID NO: 154924 - DNA, 17 bp, Arabidopsis thaliana
tggctctatcgtctttt

SEQ ID NO: 154925 - DNA, 17 bp, Arabidopsis thaliana
tggctctatgcgctgct

SEQ ID NO: 154926 - DNA, 17 bp, Arabidopsis thaliana
tggctctatttagcgga

SEQ ID NO: 154927 - DNA, 17 bp, Arabidopsis thaliana
tggctctcccatttttt

SEQ ID NO: 154928 - DNA, 17 bp, Arabidopsis thaliana
tggctctctcaggttga

SEQ ID NO: 154929 - DNA, 17 bp, Arabidopsis thaliana
tggctctgagcctctga

SEQ ID NO: 154930 - DNA, 17 bp, Arabidopsis thaliana
tggctctgagggccggg

SEQ ID NO: 154931 - DNA, 17 bp, Arabidopsis thaliana
tggctctgagggctggg

SEQ ID NO: 154932 - DNA, 17 bp, Arabidopsis thaliana
tggctctgggctgccaa

SEQ ID NO: 154933 - DNA, 17 bp, Arabidopsis thaliana
tggctctgtggacctgg

SEQ ID NO: 154934 - DNA, 17 bp, Arabidopsis thaliana
tggctctgtggatcgac

SEQ ID NO: 154935 - DNA, 17 bp, Arabidopsis thaliana
tggctctgttcgtttgc

SEQ ID NO: 154936 - DNA, 17 bp, Arabidopsis thaliana
tggctcttcacgtcctc

SEQ ID NO: 154937 - DNA, 17 bp, Arabidopsis thaliana
tggctcttcatcttctt

SEQ ID NO: 154938 - DNA, 17 bp, Arabidopsis thaliana
tggctcttctagttatg

SEQ ID NO: 154939 - DNA, 17 bp, Arabidopsis thaliana
tggctcttgagaatctg

SEQ ID NO: 154940 - DNA, 17 bp, Arabidopsis thaliana
tggctcttggcgaatca

SEQ ID NO: 154941 - DNA, 17 bp, Arabidopsis thaliana
tggctcttggtgttcga

SEQ ID NO: 154942 - DNA, 17 bp, Arabidopsis thaliana
tggctcttgttgcgaca

SEQ ID NO: 154943 - DNA, 17 bp, Arabidopsis thaliana
tggctcttgttgcgacg

SEQ ID NO: 154944 - DNA, 17 bp, Arabidopsis thaliana
tggctctttctcagatc

SEQ ID NO: 154945 - DNA, 17 bp, Arabidopsis thaliana
tggctgaaaattcaggc

SEQ ID NO: 154946 - DNA, 17 bp, Arabidopsis thaliana
tggctgaacgcctctaa

SEQ ID NO: 154947 - DNA, 17 bp, Arabidopsis thaliana
tggctgaactaaattgg

SEQ ID NO: 154948 - DNA, 17 bp, Arabidopsis thaliana
tggctgaagcaatgttc

SEQ ID NO: 154949 - DNA, 17 bp, Arabidopsis thaliana
tggctgaagcatgttgg

SEQ ID NO: 154950 - DNA, 17 bp, Arabidopsis thaliana
tggctgaagtccgagca

SEQ ID NO: 154951 - DNA, 17 bp, Arabidopsis thaliana
tggctgaatgactaaaa

SEQ ID NO: 154952 - DNA, 17 bp, Arabidopsis thaliana
tggctgaatggctaaaa

SEQ ID NO: 154953 - DNA, 17 bp, Arabidopsis thaliana
tggctgaattgctaaaa

SEQ ID NO: 154954 - DNA, 17 bp, Arabidopsis thaliana
tggctgacgaacagaat

SEQ ID NO: 154955 - DNA, 17 bp, Arabidopsis thaliana
tggctgacgatggtcct

SEQ ID NO: 154956 - DNA, 17 bp, Arabidopsis thaliana
tggctgactgcatttac

SEQ ID NO: 154957 - DNA, 17 bp, Arabidopsis thaliana
tggctgacttattcacc

SEQ ID NO: 154958 - DNA, 17 bp, Arabidopsis thaliana
tggctgacttctacctt

SEQ ID NO: 154959 - DNA, 17 bp, Arabidopsis thaliana
tggctgacttggtgcct

SEQ ID NO: 154960 - DNA, 17 bp, Arabidopsis thaliana
tggctgactttctcagg

SEQ ID NO: 154961 - DNA, 17 bp, Arabidopsis thaliana
tggctgactttctcagt

SEQ ID NO: 154962 - DNA, 17 bp, Arabidopsis thaliana
tggctgactttctctgg

SEQ ID NO: 154963 - DNA, 17 bp, Arabidopsis thaliana
tggctgagagccctcac

SEQ ID NO: 154964 - DNA, 17 bp, Arabidopsis thaliana
tggctgagatacaagaa

SEQ ID NO: 154965 - DNA, 17 bp, Arabidopsis thaliana
tggctgaggaagagtta

SEQ ID NO: 154966 - DNA, 17 bp, Arabidopsis thaliana
tggctgagtcgagtaga

SEQ ID NO: 154967 - DNA, 17 bp, Arabidopsis thaliana
tggctgagtctgagctc

SEQ ID NO: 154968 - DNA, 17 bp, Arabidopsis thaliana
tggctgagtgataggat

SEQ ID NO: 154969 - DNA, 17 bp, Arabidopsis thaliana
tggctgagtgatagggt

SEQ ID NO: 154970 - DNA, 17 bp, Arabidopsis thaliana
tggctgagttaatcata

SEQ ID NO: 154971 - DNA, 17 bp, Arabidopsis thaliana
tggctgagttataggct

SEQ ID NO: 154972 - DNA, 17 bp, Arabidopsis thaliana
tggctgagttatcgtgt

SEQ ID NO: 154973 - DNA, 17 bp, Arabidopsis thaliana
tggctgatcagacaacg

SEQ ID NO: 154974 - DNA, 17 bp, Arabidopsis thaliana
tggctgatccattgacg

SEQ ID NO: 154975 - DNA, 17 bp, Arabidopsis thaliana
tggctgatcctgtggct

SEQ ID NO: 154976 - DNA, 17 bp, Arabidopsis thaliana
tggctgatctgtctggc

SEQ ID NO: 154977 - DNA, 17 bp, Arabidopsis thaliana
tggctgatctttgacga

SEQ ID NO: 154978 - DNA, 17 bp, Arabidopsis thaliana
tggctgatgtgatgata

SEQ ID NO: 154979 - DNA, 17 bp, Arabidopsis thaliana
tggctgatgtgttaccg

SEQ ID NO: 154980 - DNA, 17 bp, Arabidopsis thaliana
tggctgattcgttgttt

SEQ ID NO: 154981 - DNA, 17 bp, Arabidopsis thaliana
tggctgattctggggtt

SEQ ID NO: 154982 - DNA, 17 bp, Arabidopsis thaliana
tggctgattttgaacgc

SEQ ID NO: 154983 - DNA, 17 bp, Arabidopsis thaliana
tggctgcaaaaatgtat

SEQ ID NO: 154984 - DNA, 17 bp, Arabidopsis thaliana
tggctgcaatctagacc

SEQ ID NO: 154985 - DNA, 17 bp, Arabidopsis thaliana
tggctgcaatgggtggt

SEQ ID NO: 154986 - DNA, 17 bp, Arabidopsis thaliana
tggctgccactggattt

SEQ ID NO: 154987 - DNA, 17 bp, Arabidopsis thaliana
tggctgcctaagcccgg

SEQ ID NO: 154988 - DNA, 17 bp, Arabidopsis thaliana
tggctgcgaaccacggt

SEQ ID NO: 154989 - DNA, 17 bp, Arabidopsis thaliana
tggctgcgctaatcttt

SEQ ID NO: 154990 - DNA, 17 bp, Arabidopsis thaliana
tggctgcggtaatcttt

SEQ ID NO: 154991 - DNA, 17 bp, Arabidopsis thaliana
tggctgcggtaatgttt

SEQ ID NO: 154992 - DNA, 17 bp, Arabidopsis thaliana
tggctgcgtcgagccaa

SEQ ID NO: 154993 - DNA, 17 bp, Arabidopsis thaliana
tggctgctcgagtgact

SEQ ID NO: 154994 - DNA, 17 bp, Arabidopsis thaliana
tggctgctcgggctgct

SEQ ID NO: 154995 - DNA, 17 bp, Arabidopsis thaliana
tggctgctcgtctagcc

SEQ ID NO: 154996 - DNA, 17 bp, Arabidopsis thaliana
tggctgctgtatccaag

SEQ ID NO: 154997 - DNA, 17 bp, Arabidopsis thaliana
tggctggaaatccagcg

SEQ ID NO: 154998 - DNA, 17 bp, Arabidopsis thaliana
tggctggaacattgtaa

SEQ ID NO: 154999 - DNA, 17 bp, Arabidopsis thaliana
tggctggaaccctgaac

SEQ ID NO: 155000 - DNA, 17 bp, Arabidopsis thaliana
tggctggaagattacca

SEQ ID NO: 155001 - DNA, 17 bp, Arabidopsis thaliana
tggctggaaggtgcggc

SEQ ID NO: 155002 - DNA, 17 bp, Arabidopsis thaliana
tggctggaccaaccatg

SEQ ID NO: 155003 - DNA, 17 bp, Arabidopsis thaliana
tggctggaccagtccac

SEQ ID NO: 155004 - DNA, 17 bp, Arabidopsis thaliana
tggctggaccagtccat

SEQ ID NO: 155005 - DNA, 17 bp, Arabidopsis thaliana
tggctggacccagtggt

SEQ ID NO: 155006 - DNA, 17 bp, Arabidopsis thaliana
tggctggaccctgtgcc

SEQ ID NO: 155007 - DNA, 17 bp, Arabidopsis thaliana
tggctggaccgaagtcc

SEQ ID NO: 155008 - DNA, 17 bp, Arabidopsis thaliana
tggctggaccgacgcgg

SEQ ID NO: 155009 - DNA, 17 bp, Arabidopsis thaliana
tggctggactggacatt

SEQ ID NO: 155010 - DNA, 17 bp, Arabidopsis thaliana
tggctggagaaagttga

SEQ ID NO: 155011 - DNA, 17 bp, Arabidopsis thaliana
tggctggagaagcaggg

SEQ ID NO: 155012 - DNA, 17 bp, Arabidopsis thaliana
tggctggagagcccatt

SEQ ID NO: 155013 - DNA, 17 bp, Arabidopsis thaliana
tggctggagattcaagg

SEQ ID NO: 155014 - DNA, 17 bp, Arabidopsis thaliana
tggctggagtgattacg

SEQ ID NO: 155015 - DNA, 17 bp, Arabidopsis thaliana
tggctggataaaagtgc

SEQ ID NO: 155016 - DNA, 17 bp, Arabidopsis thaliana
tggctggatccagcgac

SEQ ID NO: 155017 - DNA, 17 bp, Arabidopsis thaliana
tggctggatcttggtcg

SEQ ID NO: 155018 - DNA, 17 bp, Arabidopsis thaliana
tggctggcaaaacgact

SEQ ID NO: 155019 - DNA, 17 bp, Arabidopsis thaliana
tggctggcaaactgaga

SEQ ID NO: 155020 - DNA, 17 bp, Arabidopsis thaliana
tggctggcagcagacag

SEQ ID NO: 155021 - DNA, 17 bp, Arabidopsis thaliana
tggctggcagccattgt

SEQ ID NO: 155022 - DNA, 17 bp, Arabidopsis thaliana
tggctggccaacaccgg

SEQ ID NO: 155023 - DNA, 17 bp, Arabidopsis thaliana
tggctggccatcaggga

SEQ ID NO: 155024 - DNA, 17 bp, Arabidopsis thaliana
tggctggccatgaggag

SEQ ID NO: 155025 - DNA, 17 bp, Arabidopsis thaliana
tggctggccctgcagga

SEQ ID NO: 155026 - DNA, 17 bp, Arabidopsis thaliana
tggctggccctggttta

SEQ ID NO: 155027 - DNA, 17 bp, Arabidopsis thaliana
tggctggccgaagcccg

SEQ ID NO: 155028 - DNA, 17 bp, Arabidopsis thaliana
tggctggccgaattaca

SEQ ID NO: 155029 - DNA, 17 bp, Arabidopsis thaliana
tggctggccgaccttct

SEQ ID NO: 155030 - DNA, 17 bp, Arabidopsis thaliana
tggctggccgcagcaga

SEQ ID NO: 155031 - DNA, 17 bp, Arabidopsis thaliana
tggctggcctagtgaca

SEQ ID NO: 155032 - DNA, 17 bp, Arabidopsis thaliana
tggctggcctagtggta

SEQ ID NO: 155033 - DNA, 17 bp, Arabidopsis thaliana
tggctggccttgcctct

SEQ ID NO: 155034 - DNA, 17 bp, Arabidopsis thaliana
tggctggccttgctgcc

SEQ ID NO: 155035 - DNA, 17 bp, Arabidopsis thaliana
tggctggcgaagtttcc

SEQ ID NO: 155036 - DNA, 17 bp, Arabidopsis thaliana
tggctggcgatttctag

SEQ ID NO: 155037 - DNA, 17 bp, Arabidopsis thaliana
tggctggcgatttctct

SEQ ID NO: 155038 - DNA, 17 bp, Arabidopsis thaliana
tggctggcgggatccct

SEQ ID NO: 155039 - DNA, 17 bp, Arabidopsis thaliana
tggctggcgtcggaatc

SEQ ID NO: 155040 - DNA, 17 bp, Arabidopsis thaliana
tggctggctaacgttct

SEQ ID NO: 155041 - DNA, 17 bp, Arabidopsis thaliana
tggctggctaagtccgt

SEQ ID NO: 155042 - DNA, 17 bp, Arabidopsis thaliana
tggctggctctgagggc

SEQ ID NO: 155043 - DNA, 17 bp, Arabidopsis thaliana
tggctggctgaatggct

SEQ ID NO: 155044 - DNA, 17 bp, Arabidopsis thaliana
tggctggctgaattgct

SEQ ID NO: 155045 - DNA, 17 bp, Arabidopsis thaliana
tggctggctgagtgata

SEQ ID NO: 155046 - DNA, 17 bp, Arabidopsis thaliana
tggctggctgagttata

SEQ ID NO: 155047 - DNA, 17 bp, Arabidopsis thaliana
tggctggctgtagttta

SEQ ID NO: 155048 - DNA, 17 bp, Arabidopsis thaliana
tggctggcttttatctt

SEQ ID NO: 155049 - DNA, 17 bp, Arabidopsis thaliana
tggctgggaactcaggc

SEQ ID NO: 155050 - DNA, 17 bp, Arabidopsis thaliana
tggctgggaagtcttgg

SEQ ID NO: 155051 - DNA, 17 bp, Arabidopsis thaliana
tggctgggaggttaaaa

SEQ ID NO: 155052 - DNA, 17 bp, Arabidopsis thaliana
tggctgggatgggtcgg

SEQ ID NO: 155053 - DNA, 17 bp, Arabidopsis thaliana
tggctgggattggcttt

SEQ ID NO: 155054 - DNA, 17 bp, Arabidopsis thaliana
tggctgggcaagcccat

SEQ ID NO: 155055 - DNA, 17 bp, Arabidopsis thaliana
tggctgggcatatgacc

SEQ ID NO: 155056 - DNA, 17 bp, Arabidopsis thaliana
tggctgggcattttcgt

SEQ ID NO: 155057 - DNA, 17 bp, Arabidopsis thaliana
tggctgggccttccatt

SEQ ID NO: 155058 - DNA, 17 bp, Arabidopsis thaliana
tggctgggctaaacggt

SEQ ID NO: 155059 - DNA, 17 bp, Arabidopsis thaliana
tggctgggctcgggggt

SEQ ID NO: 155060 - DNA, 17 bp, Arabidopsis thaliana
tggctgggctgcgccac

SEQ ID NO: 155061 - DNA, 17 bp, Arabidopsis thaliana
tggctgggcttagtttc

SEQ ID NO: 155062 - DNA, 17 bp, Arabidopsis thaliana
tggctgggcttcggcca

SEQ ID NO: 155063 - DNA, 17 bp, Arabidopsis thaliana
tggctggggagtttggc

SEQ ID NO: 155064 - DNA, 17 bp, Arabidopsis thaliana
tggctggggcggcacat

SEQ ID NO: 155065 - DNA, 17 bp, Arabidopsis thaliana
tggctgggtcgttgcga

SEQ ID NO: 155066 - DNA, 17 bp, Arabidopsis thaliana
tggctgggtctcactac

SEQ ID NO: 155067 - DNA, 17 bp, Arabidopsis thaliana
tggctgggtcttagcca

SEQ ID NO: 155068 - DNA, 17 bp, Arabidopsis thaliana
tggctgggtgccccacg

SEQ ID NO: 155069 - DNA, 17 bp, Arabidopsis thaliana
tggctgggttccttccc

SEQ ID NO: 155070 - DNA, 17 bp, Arabidopsis thaliana
tggctgggttcgactcc

SEQ ID NO: 155071 - DNA, 17 bp, Arabidopsis thaliana
tggctgggttcgcgtcc

SEQ ID NO: 155072 - DNA, 17 bp, Arabidopsis thaliana
tggctgggttcggctcc

SEQ ID NO: 155073 - DNA, 17 bp, Arabidopsis thaliana
tggctgggttcgggccc

SEQ ID NO: 155074 - DNA, 17 bp, Arabidopsis thaliana
tggctgggttcgggtcc

SEQ ID NO: 155075 - DNA, 17 bp, Arabidopsis thaliana
tggctgggttcgtccca

SEQ ID NO: 155076 - DNA, 17 bp, Arabidopsis thaliana
tggctgggttcgtgccc

SEQ ID NO: 155077 - DNA, 17 bp, Arabidopsis thaliana
tggctgggttcgtgtcc

SEQ ID NO: 155078 - DNA, 17 bp, Arabidopsis thaliana
tggctgggttcgttccc

SEQ ID NO: 155079 - DNA, 17 bp, Arabidopsis thaliana
tggctgggttgccaaga

SEQ ID NO: 155080 - DNA, 17 bp, Arabidopsis thaliana
tggctgggttttcaaga

SEQ ID NO: 155081 - DNA, 17 bp, Arabidopsis thaliana
tggctgggttttttcca

SEQ ID NO: 155082 - DNA, 17 bp, Arabidopsis thaliana
tggctggtaaaccagcg

SEQ ID NO: 155083 - DNA, 17 bp, Arabidopsis thaliana
tggctggtacggacaag

SEQ ID NO: 155084 - DNA, 17 bp, Arabidopsis thaliana
tggctggtcaaacatgc

SEQ ID NO: 155085 - DNA, 17 bp, Arabidopsis thaliana
tggctggtcccaaggct

SEQ ID NO: 155086 - DNA, 17 bp, Arabidopsis thaliana
tggctggtccgcagcga

SEQ ID NO: 155087 - DNA, 17 bp, Arabidopsis thaliana
tggctggtcgcacggcg

SEQ ID NO: 155088 - DNA, 17 bp, Arabidopsis thaliana
tggctggtcttaagcaa

SEQ ID NO: 155089 - DNA, 17 bp, Arabidopsis thaliana
tggctggtgaactatgc

SEQ ID NO: 155090 - DNA, 17 bp, Arabidopsis thaliana
tggctggtgatcgcagg

SEQ ID NO: 155091 - DNA, 17 bp, Arabidopsis thaliana
tggctggtgccagcagc

SEQ ID NO: 155092 - DNA, 17 bp, Arabidopsis thaliana
tggctggtggagcgatt

SEQ ID NO: 155093 - DNA, 17 bp, Arabidopsis thaliana
tggctggtggtaatcca

SEQ ID NO: 155094 - DNA, 17 bp, Arabidopsis thaliana
tggctggtgtaagtgac

SEQ ID NO: 155095 - DNA, 17 bp, Arabidopsis thaliana
tggctggtgtgcattgg

SEQ ID NO: 155096 - DNA, 17 bp, Arabidopsis thaliana
tggctggttcaaatcca

SEQ ID NO: 155097 - DNA, 17 bp, Arabidopsis thaliana
tggctggttcagggcgg

SEQ ID NO: 155098 - DNA, 17 bp, Arabidopsis thaliana
tggctggtttcggacct

SEQ ID NO: 155099 - DNA, 17 bp, Arabidopsis thaliana
tggctggtttcgtatag

SEQ ID NO: 155100 - DNA, 17 bp, Arabidopsis thaliana
tggctggtttggacact

SEQ ID NO: 155101 - DNA, 17 bp, Arabidopsis thaliana
tggctggttttaactct

SEQ ID NO: 155102 - DNA, 17 bp, Arabidopsis thaliana
tggctgtaaaaaccttg

SEQ ID NO: 155103 - DNA, 17 bp, Arabidopsis thaliana
tggctgtaaagacttcg

SEQ ID NO: 155104 - DNA, 17 bp, Arabidopsis thaliana
tggctgtagctgtaagt

SEQ ID NO: 155105 - DNA, 17 bp, Arabidopsis thaliana
tggctgtagctgtagaa

SEQ ID NO: 155106 - DNA, 17 bp, Arabidopsis thaliana
tggctgtaggttttatt

SEQ ID NO: 155107 - DNA, 17 bp, Arabidopsis thaliana
tggctgtagttcagtgg

SEQ ID NO: 155108 - DNA, 17 bp, Arabidopsis thaliana
tggctgtagtttagtgg

SEQ ID NO: 155109 - DNA, 17 bp, Arabidopsis thaliana
tggctgtatgaagctcg

SEQ ID NO: 155110 - DNA, 17 bp, Arabidopsis thaliana
tggctgtcgtcagcccg

SEQ ID NO: 155111 - DNA, 17 bp, Arabidopsis thaliana
tggctgtcgtcagctcg

SEQ ID NO: 155112 - DNA, 17 bp, Arabidopsis thaliana
tggctgtgccgatgtta

SEQ ID NO: 155113 - DNA, 17 bp, Arabidopsis thaliana
tggctgtggctgctttg

SEQ ID NO: 155114 - DNA, 17 bp, Arabidopsis thaliana
tggctgtgtgatagggt

SEQ ID NO: 155115 - DNA, 17 bp, Arabidopsis thaliana
tggctgttgggcttgct

SEQ ID NO: 155116 - DNA, 17 bp, Arabidopsis thaliana
tggcttaacgactgcgt

SEQ ID NO: 155117 - DNA, 17 bp, Arabidopsis thaliana
tggcttaaggtagccaa

SEQ ID NO: 155118 - DNA, 17 bp, Arabidopsis thaliana
tggcttaatggctaaaa

SEQ ID NO: 155119 - DNA, 17 bp, Arabidopsis thaliana
tggcttaccttagtcct

SEQ ID NO: 155120 - DNA, 17 bp, Arabidopsis thaliana
tggcttactttcaaagg

SEQ ID NO: 155121 - DNA, 17 bp, Arabidopsis thaliana
tggcttagaccatctcc

SEQ ID NO: 155122 - DNA, 17 bp, Arabidopsis thaliana
tggcttaggccctgttt

SEQ ID NO: 155123 - DNA, 17 bp, Arabidopsis thaliana
tggcttagtttagtggt

SEQ ID NO: 155124 - DNA, 17 bp, Arabidopsis thaliana
tggcttatccgtatgta

SEQ ID NO: 155125 - DNA, 17 bp, Arabidopsis thaliana
tggcttatgatcagtcg

SEQ ID NO: 155126 - DNA, 17 bp, Arabidopsis thaliana
tggcttatttaatgacc

SEQ ID NO: 155127 - DNA, 17 bp, Arabidopsis thaliana
tggcttcaagtctgcat

SEQ ID NO: 155128 - DNA, 17 bp, Arabidopsis thaliana
tggcttcaatgacctgt

SEQ ID NO: 155129 - DNA, 17 bp, Arabidopsis thaliana
tggcttcacggtcgatc

SEQ ID NO: 155130 - DNA, 17 bp, Arabidopsis thaliana
tggcttcatcagatagt

SEQ ID NO: 155131 - DNA, 17 bp, Arabidopsis thaliana
tggcttccactttcgca

SEQ ID NO: 155132 - DNA, 17 bp, Arabidopsis thaliana
tggcttccaggaatgta

SEQ ID NO: 155133 - DNA, 17 bp, Arabidopsis thaliana
tggcttccatagcgccg

SEQ ID NO: 155134 - DNA, 17 bp, Arabidopsis thaliana
tggcttccatctaagtt

SEQ ID NO: 155135 - DNA, 17 bp, Arabidopsis thaliana
tggcttccgttatggtt

SEQ ID NO: 155136 - DNA, 17 bp, Arabidopsis thaliana
tggcttcctcttctggt

SEQ ID NO: 155137 - DNA, 17 bp, Arabidopsis thaliana
tggcttcgaaagagaca

SEQ ID NO: 155138 - DNA, 17 bp, Arabidopsis thaliana
tggcttcgacaatgaca

SEQ ID NO: 155139 - DNA, 17 bp, Arabidopsis thaliana
tggcttcgagctgtcac

SEQ ID NO: 155140 - DNA, 17 bp, Arabidopsis thaliana
tggcttcgattcctcgt

SEQ ID NO: 155141 - DNA, 17 bp, Arabidopsis thaliana
tggcttcgccccaaaac

SEQ ID NO: 155142 - DNA, 17 bp, Arabidopsis thaliana
tggcttcgccccaaacc

SEQ ID NO: 155143 - DNA, 17 bp, Arabidopsis thaliana
tggcttcgcggggaaaa

SEQ ID NO: 155144 - DNA, 17 bp, Arabidopsis thaliana
tggcttcgcgtccaggc

SEQ ID NO: 155145 - DNA, 17 bp, Arabidopsis thaliana
tggcttctaccacaaga

SEQ ID NO: 155146 - DNA, 17 bp, Arabidopsis thaliana
tggcttctaccgcaaga

SEQ ID NO: 155147 - DNA, 17 bp, Arabidopsis thaliana
tggcttctactgttgtt

SEQ ID NO: 155148 - DNA, 17 bp, Arabidopsis thaliana
tggcttctacttggctt

SEQ ID NO: 155149 - DNA, 17 bp, Arabidopsis thaliana
tggcttctagcagttgg

SEQ ID NO: 155150 - DNA, 17 bp, Arabidopsis thaliana
tggcttctcggattgcg

SEQ ID NO: 155151 - DNA, 17 bp, Arabidopsis thaliana
tggcttctgatccaccc

SEQ ID NO: 155152 - DNA, 17 bp, Arabidopsis thaliana
tggcttctgatcgcccc

SEQ ID NO: 155153 - DNA, 17 bp, Arabidopsis thaliana
tggcttcttggactgac

SEQ ID NO: 155154 - DNA, 17 bp, Arabidopsis thaliana
tggcttgaaccagatct

SEQ ID NO: 155155 - DNA, 17 bp, Arabidopsis thaliana
tggcttgaagacattct

SEQ ID NO: 155156 - DNA, 17 bp, Arabidopsis thaliana
tggcttgacaaggctag

SEQ ID NO: 155157 - DNA, 17 bp, Arabidopsis thaliana
tggcttgacctctccta

SEQ ID NO: 155158 - DNA, 17 bp, Arabidopsis thaliana
tggcttgactctagtcc

SEQ ID NO: 155159 - DNA, 17 bp, Arabidopsis thaliana
tggcttgactctgtgaa

SEQ ID NO: 155160 - DNA, 17 bp, Arabidopsis thaliana
tggcttgacttagtgac

SEQ ID NO: 155161 - DNA, 17 bp, Arabidopsis thaliana
tggcttgagatcgtcta

SEQ ID NO: 155162 - DNA, 17 bp, Arabidopsis thaliana
tggcttgagggtctctg

SEQ ID NO: 155163 - DNA, 17 bp, Arabidopsis thaliana
tggcttgatctgcagat

SEQ ID NO: 155164 - DNA, 17 bp, Arabidopsis thaliana
tggcttgatgacatttg

SEQ ID NO: 155165 - DNA, 17 bp, Arabidopsis thaliana
tggcttgattggtttat

SEQ ID NO: 155166 - DNA, 17 bp, Arabidopsis thaliana
tggcttgcgataggcca

SEQ ID NO: 155167 - DNA, 17 bp, Arabidopsis thaliana
tggcttgcgtttgctct

SEQ ID NO: 155168 - DNA, 17 bp, Arabidopsis thaliana
tggcttgctcgatcaac

SEQ ID NO: 155169 - DNA, 17 bp, Arabidopsis thaliana
tggcttggatattccta

SEQ ID NO: 155170 - DNA, 17 bp, Arabidopsis thaliana
tggcttggatttttgcg

SEQ ID NO: 155171 - DNA, 17 bp, Arabidopsis thaliana
tggcttggtgcaggtcg

SEQ ID NO: 155172 - DNA, 17 bp, Arabidopsis thaliana
tggcttggttccaccgg

SEQ ID NO: 155173 - DNA, 17 bp, Arabidopsis thaliana
tggcttggtttatgtac

SEQ ID NO: 155174 - DNA, 17 bp, Arabidopsis thaliana
tggcttggtttcgatat

SEQ ID NO: 155175 - DNA, 17 bp, Arabidopsis thaliana
tggcttgtgatggtgaa

SEQ ID NO: 155176 - DNA, 17 bp, Arabidopsis thaliana
tggcttgtggactccaa

SEQ ID NO: 155177 - DNA, 17 bp, Arabidopsis thaliana
tggcttgtttaggaccg

SEQ ID NO: 155178 - DNA, 17 bp, Arabidopsis thaliana
tggcttgtttgattagt

SEQ ID NO: 155179 - DNA, 17 bp, Arabidopsis thaliana
tggctttaacttgttga

SEQ ID NO: 155180 - DNA, 17 bp, Arabidopsis thaliana
tggctttaagatcaggt

SEQ ID NO: 155181 - DNA, 17 bp, Arabidopsis thaliana
tggctttaccgcaatag

SEQ ID NO: 155182 - DNA, 17 bp, Arabidopsis thaliana
tggctttactgttcatc

SEQ ID NO: 155183 - DNA, 17 bp, Arabidopsis thaliana
tggctttagttgaccgg

SEQ ID NO: 155184 - DNA, 17 bp, Arabidopsis thaliana
tggctttcacccaggag

SEQ ID NO: 155185 - DNA, 17 bp, Arabidopsis thaliana
tggctttcaccgcaaga

SEQ ID NO: 155186 - DNA, 17 bp, Arabidopsis thaliana
tggctttccgcagtttt

SEQ ID NO: 155187 - DNA, 17 bp, Arabidopsis thaliana
tggctttcggacttgta

SEQ ID NO: 155188 - DNA, 17 bp, Arabidopsis thaliana
tggctttcttcaccgct

SEQ ID NO: 155189 - DNA, 17 bp, Arabidopsis thaliana
tggctttcttcaccgtt

SEQ ID NO: 155190 - DNA, 17 bp, Arabidopsis thaliana
tggctttgaccgggtca

SEQ ID NO: 155191 - DNA, 17 bp, Arabidopsis thaliana
tggctttgatgattgtc

SEQ ID NO: 155192 - DNA, 17 bp, Arabidopsis thaliana
tggctttgctcatttta

SEQ ID NO: 155193 - DNA, 17 bp, Arabidopsis thaliana
tggctttggcaagacgg

SEQ ID NO: 155194 - DNA, 17 bp, Arabidopsis thaliana
tggctttgggcttttcc

SEQ ID NO: 155195 - DNA, 17 bp, Arabidopsis thaliana
tggctttggtttcagat

SEQ ID NO: 155196 - DNA, 17 bp, Arabidopsis thaliana
tggctttgtataggatt

SEQ ID NO: 155197 - DNA, 17 bp, Arabidopsis thaliana
tggctttgtgtcttcta

SEQ ID NO: 155198 - DNA, 17 bp, Arabidopsis thaliana
tggcttttcaaccaagc

SEQ ID NO: 155199 - DNA, 17 bp, Arabidopsis thaliana
tggcttttgaggtagtt

SEQ ID NO: 155200 - DNA, 17 bp, Arabidopsis thaliana
tggcttttgaggttgct

SEQ ID NO: 155201 - DNA, 17 bp, Arabidopsis thaliana
tggcttttgatccttcg

SEQ ID NO: 155202 - DNA, 17 bp, Arabidopsis thaliana
tggcttttgggcaagac

SEQ ID NO: 155203 - DNA, 17 bp, Arabidopsis thaliana
tggcttttgttgctgct

SEQ ID NO: 155204 - DNA, 17 bp, Arabidopsis thaliana
tggctttttcagcacca

SEQ ID NO: 155205 - DNA, 17 bp, Arabidopsis thaliana
tggctttttggcaagac

SEQ ID NO: 155206 - DNA, 17 bp, Arabidopsis thaliana
tggctttttggccaagt

SEQ ID NO: 155207 - DNA, 17 bp, Arabidopsis thaliana
tggcttttttgcaagac

SEQ ID NO: 155208 - DNA, 17 bp, Arabidopsis thaliana
tgggaaaatgtgcaatt

SEQ ID NO: 155209 - DNA, 17 bp, Arabidopsis thaliana
tgggaaaccaatctatc

SEQ ID NO: 155210 - DNA, 17 bp, Arabidopsis thaliana
tgggaaaccaatctttc

SEQ ID NO: 155211 - DNA, 17 bp, Arabidopsis thaliana
tgggaaagattaagggt

SEQ ID NO: 155212 - DNA, 17 bp, Arabidopsis thaliana
tgggaaagctccacaag

SEQ ID NO: 155213 - DNA, 17 bp, Arabidopsis thaliana
tgggaacccaatcaagc

SEQ ID NO: 155214 - DNA, 17 bp, Arabidopsis thaliana
tgggaaccgaaagtaca

SEQ ID NO: 155215 - DNA, 17 bp, Arabidopsis thaliana
tgggaaccttgggatgg

SEQ ID NO: 155216 - DNA, 17 bp, Arabidopsis thaliana
tgggaacggcgatcgat

SEQ ID NO: 155217 - DNA, 17 bp, Arabidopsis thaliana
tgggaacggctctcggg

SEQ ID NO: 155218 - DNA, 17 bp, Arabidopsis thaliana
tgggaacggctctctcg

SEQ ID NO: 155219 - DNA, 17 bp, Arabidopsis thaliana
tgggaacgtcgtcttat

SEQ ID NO: 155220 - DNA, 17 bp, Arabidopsis thaliana
tgggaactgcaggagtg

SEQ ID NO: 155221 - DNA, 17 bp, Arabidopsis thaliana
tgggaagaagtccacga

SEQ ID NO: 155222 - DNA, 17 bp, Arabidopsis thaliana
tgggaagaccttaggct

SEQ ID NO: 155223 - DNA, 17 bp, Arabidopsis thaliana
tgggaagattacgggtt

SEQ ID NO: 155224 - DNA, 17 bp, Arabidopsis thaliana
tgggaagctgcatccgt

SEQ ID NO: 155225 - DNA, 17 bp, Arabidopsis thaliana
tgggaaggacaacaaca

SEQ ID NO: 155226 - DNA, 17 bp, Arabidopsis thaliana
tgggaaggagttgggtg

SEQ ID NO: 155227 - DNA, 17 bp, Arabidopsis thaliana
tgggaagggactctcag

SEQ ID NO: 155228 - DNA, 17 bp, Arabidopsis thaliana
tgggaaggtgtggcttg

SEQ ID NO: 155229 - DNA, 17 bp, Arabidopsis thaliana
tgggaagtcctcgtgtt

SEQ ID NO: 155230 - DNA, 17 bp, Arabidopsis thaliana
tgggaagtctgccaggc

SEQ ID NO: 155231 - DNA, 17 bp, Arabidopsis thaliana
tgggaagtctgtcactt

SEQ ID NO: 155232 - DNA, 17 bp, Arabidopsis thaliana
tgggaagtctgtcagtt

SEQ ID NO: 155233 - DNA, 17 bp, Arabidopsis thaliana
tgggaagtctgttaatt

SEQ ID NO: 155234 - DNA, 17 bp, Arabidopsis thaliana
tgggaagtcttggatca

SEQ ID NO: 155235 - DNA, 17 bp, Arabidopsis thaliana
tgggaagttgtccaagc

SEQ ID NO: 155236 - DNA, 17 bp, Arabidopsis thaliana
tgggaatccggcaggac

SEQ ID NO: 155237 - DNA, 17 bp, Arabidopsis thaliana
tgggaatctctggtttt

SEQ ID NO: 155238 - DNA, 17 bp, Arabidopsis thaliana
tgggaatctctttatcg

SEQ ID NO: 155239 - DNA, 17 bp, Arabidopsis thaliana
tgggaatgacaccattt

SEQ ID NO: 155240 - DNA, 17 bp, Arabidopsis thaliana
tgggaatgcagccccaa

SEQ ID NO: 155241 - DNA, 17 bp, Arabidopsis thaliana
tgggaatgctgtggcag

SEQ ID NO: 155242 - DNA, 17 bp, Arabidopsis thaliana
tgggaatgtgacacgtt

SEQ ID NO: 155243 - DNA, 17 bp, Arabidopsis thaliana
tgggaattctgtcagtt

SEQ ID NO: 155244 - DNA, 17 bp, Arabidopsis thaliana
tgggaattgtgaccatc

SEQ ID NO: 155245 - DNA, 17 bp, Arabidopsis thaliana
tgggacaaaatgggtat

SEQ ID NO: 155246 - DNA, 17 bp, Arabidopsis thaliana
tgggacaagaaatgagt

SEQ ID NO: 155247 - DNA, 17 bp, Arabidopsis thaliana
tgggacagactcagctg

SEQ ID NO: 155248 - DNA, 17 bp, Arabidopsis thaliana
tgggacagactcggccg

SEQ ID NO: 155249 - DNA, 17 bp, Arabidopsis thaliana
tgggacatgtctgttac

SEQ ID NO: 155250 - DNA, 17 bp, Arabidopsis thaliana
tgggaccaaagccacca

SEQ ID NO: 155251 - DNA, 17 bp, Arabidopsis thaliana
tgggaccactgtgggaa

SEQ ID NO: 155252 - DNA, 17 bp, Arabidopsis thaliana
tgggaccaggcttcatt

SEQ ID NO: 155253 - DNA, 17 bp, Arabidopsis thaliana
tgggaccagtggcatac

SEQ ID NO: 155254 - DNA, 17 bp, Arabidopsis thaliana
tgggacccacagcgaat

SEQ ID NO: 155255 - DNA, 17 bp, Arabidopsis thaliana
tgggacccacgacgaat

SEQ ID NO: 155256 - DNA, 17 bp, Arabidopsis thaliana
tgggacccacggcaaat

SEQ ID NO: 155257 - DNA, 17 bp, Arabidopsis thaliana
tgggacccacggcatat

SEQ ID NO: 155258 - DNA, 17 bp, Arabidopsis thaliana
tgggacccacggcgaaa

SEQ ID NO: 155259 - DNA, 17 bp, Arabidopsis thaliana
tgggacccacggcgaac

SEQ ID NO: 155260 - DNA, 17 bp, Arabidopsis thaliana
tgggacccacggcgaat

SEQ ID NO: 155261 - DNA, 17 bp, Arabidopsis thaliana
tgggacccacggcgagt

SEQ ID NO: 155262 - DNA, 17 bp, Arabidopsis thaliana
tgggacccacggcgatt

SEQ ID NO: 155263 - DNA, 17 bp, Arabidopsis thaliana
tgggacccacggtgaac

SEQ ID NO: 155264 - DNA, 17 bp, Arabidopsis thaliana
tgggacccacggtgaat

SEQ ID NO: 155265 - DNA, 17 bp, Arabidopsis thaliana
tgggacccagggagaac

SEQ ID NO: 155266 - DNA, 17 bp, Arabidopsis thaliana
tgggacccagggcgaac

SEQ ID NO: 155267 - DNA, 17 bp, Arabidopsis thaliana
tgggacccagggcgaat

SEQ ID NO: 155268 - DNA, 17 bp, Arabidopsis thaliana
tgggacccggtgcacta

SEQ ID NO: 155269 - DNA, 17 bp, Arabidopsis thaliana
tgggaccctacaggttc

SEQ ID NO: 155270 - DNA, 17 bp, Arabidopsis thaliana
tgggaccggacggttcg

SEQ ID NO: 155271 - DNA, 17 bp, Arabidopsis thaliana
tgggaccggcttggcca

SEQ ID NO: 155272 - DNA, 17 bp, Arabidopsis thaliana
tgggaccgggacgtcgg

SEQ ID NO: 155273 - DNA, 17 bp, Arabidopsis thaliana
tgggacctgattctgtg

SEQ ID NO: 155274 - DNA, 17 bp, Arabidopsis thaliana
tgggacctgggctcgta

SEQ ID NO: 155275 - DNA, 17 bp, Arabidopsis thaliana
tgggaccttatcttgtt

SEQ ID NO: 155276 - DNA, 17 bp, Arabidopsis thaliana
tgggacgaccatgcgct

SEQ ID NO: 155277 - DNA, 17 bp, Arabidopsis thaliana
tgggacggactgggaac

SEQ ID NO: 155278 - DNA, 17 bp, Arabidopsis thaliana
tgggacggagagagtat

SEQ ID NO: 155279 - DNA, 17 bp, Arabidopsis thaliana
tgggacggattggcgga

SEQ ID NO: 155280 - DNA, 17 bp, Arabidopsis thaliana
tgggacggattggcggg

SEQ ID NO: 155281 - DNA, 17 bp, Arabidopsis thaliana
tgggacgggttggcggg

SEQ ID NO: 155282 - DNA, 17 bp, Arabidopsis thaliana
tgggacgggtttagcgg

SEQ ID NO: 155283 - DNA, 17 bp, Arabidopsis thaliana
tgggacgggtttagggg

SEQ ID NO: 155284 - DNA, 17 bp, Arabidopsis thaliana
tgggacgggtttggcgg

SEQ ID NO: 155285 - DNA, 17 bp, Arabidopsis thaliana
tgggactacctgtaacg

SEQ ID NO: 155286 - DNA, 17 bp, Arabidopsis thaliana
tgggactatgtccatca

SEQ ID NO: 155287 - DNA, 17 bp, Arabidopsis thaliana
tgggactcagagccaaa

SEQ ID NO: 155288 - DNA, 17 bp, Arabidopsis thaliana
tgggactcaggttcacg

SEQ ID NO: 155289 - DNA, 17 bp, Arabidopsis thaliana
tgggactcccacgacct

SEQ ID NO: 155290 - DNA, 17 bp, Arabidopsis thaliana
tgggactccgtcacaga

SEQ ID NO: 155291 - DNA, 17 bp, Arabidopsis thaliana
tgggactcctaccctca

SEQ ID NO: 155292 - DNA, 17 bp, Arabidopsis thaliana
tgggactctcggcaacg

SEQ ID NO: 155293 - DNA, 17 bp, Arabidopsis thaliana
tgggactcttgcccgtt

SEQ ID NO: 155294 - DNA, 17 bp, Arabidopsis thaliana
tgggactgaagggagct

SEQ ID NO: 155295 - DNA, 17 bp, Arabidopsis thaliana
tgggactgagacacggc

SEQ ID NO: 155296 - DNA, 17 bp, Arabidopsis thaliana
tgggactgattgggttt

SEQ ID NO: 155297 - DNA, 17 bp, Arabidopsis thaliana
tgggacttacctttagc

SEQ ID NO: 155298 - DNA, 17 bp, Arabidopsis thaliana
tgggacttagttacaat

SEQ ID NO: 155299 - DNA, 17 bp, Arabidopsis thaliana
tgggacttattcacaat

SEQ ID NO: 155300 - DNA, 17 bp, Arabidopsis thaliana
tgggacttatttacaat

SEQ ID NO: 155301 - DNA, 17 bp, Arabidopsis thaliana
tgggacttatttacagc

SEQ ID NO: 155302 - DNA, 17 bp, Arabidopsis thaliana
tgggacttatttacagt

SEQ ID NO: 155303 - DNA, 17 bp, Arabidopsis thaliana
tgggacttcttggggtg

SEQ ID NO: 155304 - DNA, 17 bp, Arabidopsis thaliana
tgggacttgctggcgga

SEQ ID NO: 155305 - DNA, 17 bp, Arabidopsis thaliana
tgggactttagcccgaa

SEQ ID NO: 155306 - DNA, 17 bp, Arabidopsis thaliana
tgggagaaatgcggtgc

SEQ ID NO: 155307 - DNA, 17 bp, Arabidopsis thaliana
tgggagaaatgtggtgc

SEQ ID NO: 155308 - DNA, 17 bp, Arabidopsis thaliana
tgggagaagtgcggtgc

SEQ ID NO: 155309 - DNA, 17 bp, Arabidopsis thaliana
tgggagacatagggtgc

SEQ ID NO: 155310 - DNA, 17 bp, Arabidopsis thaliana
tgggagaccacccacca

SEQ ID NO: 155311 - DNA, 17 bp, Arabidopsis thaliana
tgggagacgggggcctt

SEQ ID NO: 155312 - DNA, 17 bp, Arabidopsis thaliana
tgggagactatggggga

SEQ ID NO: 155313 - DNA, 17 bp, Arabidopsis thaliana
tgggagagagttaggct

SEQ ID NO: 155314 - DNA, 17 bp, Arabidopsis thaliana
tgggagagatctcgtgg

SEQ ID NO: 155315 - DNA, 17 bp, Arabidopsis thaliana
tgggagagtaggacgta

SEQ ID NO: 155316 - DNA, 17 bp, Arabidopsis thaliana
tgggagagtaggacgtt

SEQ ID NO: 155317 - DNA, 17 bp, Arabidopsis thaliana
tgggagatcggttatct

SEQ ID NO: 155318 - DNA, 17 bp, Arabidopsis thaliana
tgggagatggacccaca

SEQ ID NO: 155319 - DNA, 17 bp, Arabidopsis thaliana
tgggagatggccgagtg

SEQ ID NO: 155320 - DNA, 17 bp, Arabidopsis thaliana
tgggagatgtaagacct

SEQ ID NO: 155321 - DNA, 17 bp, Arabidopsis thaliana
tgggagatgtaaggcct

SEQ ID NO: 155322 - DNA, 17 bp, Arabidopsis thaliana
tgggagatgtccggaat

SEQ ID NO: 155323 - DNA, 17 bp, Arabidopsis thaliana
tgggagatttaccactg

SEQ ID NO: 155324 - DNA, 17 bp, Arabidopsis thaliana
tgggagatttaccattg

SEQ ID NO: 155325 - DNA, 17 bp, Arabidopsis thaliana
tgggagatttgcaaaac

SEQ ID NO: 155326 - DNA, 17 bp, Arabidopsis thaliana
tgggagcaaactttatt

SEQ ID NO: 155327 - DNA, 17 bp, Arabidopsis thaliana
tgggagcagaaaggact

SEQ ID NO: 155328 - DNA, 17 bp, Arabidopsis thaliana
tgggagcagatcttacc

SEQ ID NO: 155329 - DNA, 17 bp, Arabidopsis thaliana
tgggagccatcttctgt

SEQ ID NO: 155330 - DNA, 17 bp, Arabidopsis thaliana
tgggagcctatctcgcc

SEQ ID NO: 155331 - DNA, 17 bp, Arabidopsis thaliana
tgggagctcggaccaga

SEQ ID NO: 155332 - DNA, 17 bp, Arabidopsis thaliana
tgggagcttcggcgcaa

SEQ ID NO: 155333 - DNA, 17 bp, Arabidopsis thaliana
tgggaggactccaagtg

SEQ ID NO: 155334 - DNA, 17 bp, Arabidopsis thaliana
tgggaggagacccgcgg

SEQ ID NO: 155335 - DNA, 17 bp, Arabidopsis thaliana
tgggaggatcgtcttta

SEQ ID NO: 155336 - DNA, 17 bp, Arabidopsis thaliana
tgggaggattacggact

SEQ ID NO: 155337 - DNA, 17 bp, Arabidopsis thaliana
tgggaggattacgggct

SEQ ID NO: 155338 - DNA, 17 bp, Arabidopsis thaliana
tgggaggattacgggtt

SEQ ID NO: 155339 - DNA, 17 bp, Arabidopsis thaliana
tgggagggatctcgtgg

SEQ ID NO: 155340 - DNA, 17 bp, Arabidopsis thaliana
tgggagggcacgtctgc

SEQ ID NO: 155341 - DNA, 17 bp, Arabidopsis thaliana
tgggaggtgcggctgga

SEQ ID NO: 155342 - DNA, 17 bp, Arabidopsis thaliana
tgggaggtgctgagtgt

SEQ ID NO: 155343 - DNA, 17 bp, Arabidopsis thaliana
tgggagtctcggcggtc

SEQ ID NO: 155344 - DNA, 17 bp, Arabidopsis thaliana
tgggagtctgttcttgt

SEQ ID NO: 155345 - DNA, 17 bp, Arabidopsis thaliana
tgggagttacgactttg

SEQ ID NO: 155346 - DNA, 17 bp, Arabidopsis thaliana
tgggagttatttacaat

SEQ ID NO: 155347 - DNA, 17 bp, Arabidopsis thaliana
tgggagttctttcctga

SEQ ID NO: 155348 - DNA, 17 bp, Arabidopsis thaliana
tgggagtttgctttcta

SEQ ID NO: 155349 - DNA, 17 bp, Arabidopsis thaliana
tgggataaatgtggtgc

SEQ ID NO: 155350 - DNA, 17 bp, Arabidopsis thaliana
tgggataacatcatagg

SEQ ID NO: 155351 - DNA, 17 bp, Arabidopsis thaliana
tgggataccagaagctg

SEQ ID NO: 155352 - DNA, 17 bp, Arabidopsis thaliana
tgggatacgatccgatt

SEQ ID NO: 155353 - DNA, 17 bp, Arabidopsis thaliana
tgggatagggtgcgaac

SEQ ID NO: 155354 - DNA, 17 bp, Arabidopsis thaliana
tgggatatgtagggcct

SEQ ID NO: 155355 - DNA, 17 bp, Arabidopsis thaliana
tgggatatgtccgagtg

SEQ ID NO: 155356 - DNA, 17 bp, Arabidopsis thaliana
tgggatatgtctgtctc

SEQ ID NO: 155357 - DNA, 17 bp, Arabidopsis thaliana
tgggatattactggatc

SEQ ID NO: 155358 - DNA, 17 bp, Arabidopsis thaliana
tgggatattcacttcca

SEQ ID NO: 155359 - DNA, 17 bp, Arabidopsis thaliana
tgggatcaaattggtta

SEQ ID NO: 155360 - DNA, 17 bp, Arabidopsis thaliana
tgggatcattcatcgcg

SEQ ID NO: 155361 - DNA, 17 bp, Arabidopsis thaliana
tgggatcctcaccttct

SEQ ID NO: 155362 - DNA, 17 bp, Arabidopsis thaliana
tgggatcggttatggtc

SEQ ID NO: 155363 - DNA, 17 bp, Arabidopsis thaliana
tgggatctcgcaggagc

SEQ ID NO: 155364 - DNA, 17 bp, Arabidopsis thaliana
tgggatctggtcacttc

SEQ ID NO: 155365 - DNA, 17 bp, Arabidopsis thaliana
tgggatcttcctatgtt

SEQ ID NO: 155366 - DNA, 17 bp, Arabidopsis thaliana
tgggatgaaaaccaaca

SEQ ID NO: 155367 - DNA, 17 bp, Arabidopsis thaliana
tgggatgacatttgtgg

SEQ ID NO: 155368 - DNA, 17 bp, Arabidopsis thaliana
tgggatgaggttcttgg

SEQ ID NO: 155369 - DNA, 17 bp, Arabidopsis thaliana
tgggatgatggtgccaa

SEQ ID NO: 155370 - DNA, 17 bp, Arabidopsis thaliana
tgggatgcccactgtcc

SEQ ID NO: 155371 - DNA, 17 bp, Arabidopsis thaliana
tgggatggatcggtcgg

SEQ ID NO: 155372 - DNA, 17 bp, Arabidopsis thaliana
tgggatggctccttttg

SEQ ID NO: 155373 - DNA, 17 bp, Arabidopsis thaliana
tgggatggctcgcccgc

SEQ ID NO: 155374 - DNA, 17 bp, Arabidopsis thaliana
tgggatgggtcccggtc

SEQ ID NO: 155375 - DNA, 17 bp, Arabidopsis thaliana
tgggatgggtcccggtg

SEQ ID NO: 155376 - DNA, 17 bp, Arabidopsis thaliana
tgggatgggtcggacgg

SEQ ID NO: 155377 - DNA, 17 bp, Arabidopsis thaliana
tgggatgggtcggatgg

SEQ ID NO: 155378 - DNA, 17 bp, Arabidopsis thaliana
tgggatgggtcggccga

SEQ ID NO: 155379 - DNA, 17 bp, Arabidopsis thaliana
tgggatgggtcggccgc

SEQ ID NO: 155380 - DNA, 17 bp, Arabidopsis thaliana
tgggatgggtcggccgg

SEQ ID NO: 155381 - DNA, 17 bp, Arabidopsis thaliana
tgggatgggtcggccgt

SEQ ID NO: 155382 - DNA, 17 bp, Arabidopsis thaliana
tgggatgggtcggtcgg

SEQ ID NO: 155383 - DNA, 17 bp, Arabidopsis thaliana
tgggatgggtctgccgg

SEQ ID NO: 155384 - DNA, 17 bp, Arabidopsis thaliana
tgggatggtgtactacg

SEQ ID NO: 155385 - DNA, 17 bp, Arabidopsis thaliana
tgggatggtttcgcttg

SEQ ID NO: 155386 - DNA, 17 bp, Arabidopsis thaliana
tgggatgtagctcaata

SEQ ID NO: 155387 - DNA, 17 bp, Arabidopsis thaliana
tgggatgtcaaaatgca

SEQ ID NO: 155388 - DNA, 17 bp, Arabidopsis thaliana
tgggatgtcaatggtgt

SEQ ID NO: 155389 - DNA, 17 bp, Arabidopsis thaliana
tgggatgtccatccaaa

SEQ ID NO: 155390 - DNA, 17 bp, Arabidopsis thaliana
tgggatgtccttgttta

SEQ ID NO: 155391 - DNA, 17 bp, Arabidopsis thaliana
tgggatgtgcgaaacgg

SEQ ID NO: 155392 - DNA, 17 bp, Arabidopsis thaliana
tgggatgtgctaaaaca

SEQ ID NO: 155393 - DNA, 17 bp, Arabidopsis thaliana
tgggatgtgttgtgttg

SEQ ID NO: 155394 - DNA, 17 bp, Arabidopsis thaliana
tgggatgttctggtttc

SEQ ID NO: 155395 - DNA, 17 bp, Arabidopsis thaliana
tgggattacggacttca

SEQ ID NO: 155396 - DNA, 17 bp, Arabidopsis thaliana
tgggattacgggattcg

SEQ ID NO: 155397 - DNA, 17 bp, Arabidopsis thaliana
tgggattagaccgtcgt

SEQ ID NO: 155398 - DNA, 17 bp, Arabidopsis thaliana
tgggattattgacttgt

SEQ ID NO: 155399 - DNA, 17 bp, Arabidopsis thaliana
tgggattcaagtcgtcg

SEQ ID NO: 155400 - DNA, 17 bp, Arabidopsis thaliana
tgggattcacgcacaaa

SEQ ID NO: 155401 - DNA, 17 bp, Arabidopsis thaliana
tgggattcagagagatg

SEQ ID NO: 155402 - DNA, 17 bp, Arabidopsis thaliana
tgggattcaggacatgg

SEQ ID NO: 155403 - DNA, 17 bp, Arabidopsis thaliana
tgggattcatcggtgac

SEQ ID NO: 155404 - DNA, 17 bp, Arabidopsis thaliana
tgggattccggttagta

SEQ ID NO: 155405 - DNA, 17 bp, Arabidopsis thaliana
tgggattcgaaccccag

SEQ ID NO: 155406 - DNA, 17 bp, Arabidopsis thaliana
tgggattcgacaatgga

SEQ ID NO: 155407 - DNA, 17 bp, Arabidopsis thaliana
tgggattcgcttttgtc

SEQ ID NO: 155408 - DNA, 17 bp, Arabidopsis thaliana
tgggattcttttgagta

SEQ ID NO: 155409 - DNA, 17 bp, Arabidopsis thaliana
tgggattgagccactca

SEQ ID NO: 155410 - DNA, 17 bp, Arabidopsis thaliana
tgggattgccaacaagt

SEQ ID NO: 155411 - DNA, 17 bp, Arabidopsis thaliana
tgggattggatcacggt

SEQ ID NO: 155412 - DNA, 17 bp, Arabidopsis thaliana
tgggattggctcggctg

SEQ ID NO: 155413 - DNA, 17 bp, Arabidopsis thaliana
tgggattggctttgggc

SEQ ID NO: 155414 - DNA, 17 bp, Arabidopsis thaliana
tgggatttaacgtctca

SEQ ID NO: 155415 - DNA, 17 bp, Arabidopsis thaliana
tgggatttacttacagt

SEQ ID NO: 155416 - DNA, 17 bp, Arabidopsis thaliana
tgggatttatttacaac

SEQ ID NO: 155417 - DNA, 17 bp, Arabidopsis thaliana
tgggatttatttacaat

SEQ ID NO: 155418 - DNA, 17 bp, Arabidopsis thaliana
tgggatttatttacagc

SEQ ID NO: 155419 - DNA, 17 bp, Arabidopsis thaliana
tgggatttatttacagt

SEQ ID NO: 155420 - DNA, 17 bp, Arabidopsis thaliana
tgggatttctgatgtaa

SEQ ID NO: 155421 - DNA, 17 bp, Arabidopsis thaliana
tgggatttggcccaatt

SEQ ID NO: 155422 - DNA, 17 bp, Arabidopsis thaliana
tgggatttggtttgaca

SEQ ID NO: 155423 - DNA, 17 bp, Arabidopsis thaliana
tgggattttggttggtt

SEQ ID NO: 155424 - DNA, 17 bp, Arabidopsis thaliana
tgggcaaactgcgttta

SEQ ID NO: 155425 - DNA, 17 bp, Arabidopsis thaliana
tgggcaaactgtctgtt

SEQ ID NO: 155426 - DNA, 17 bp, Arabidopsis thaliana
tgggcaaatgacaactg

SEQ ID NO: 155427 - DNA, 17 bp, Arabidopsis thaliana
tgggcaacaaactgtag

SEQ ID NO: 155428 - DNA, 17 bp, Arabidopsis thaliana
tgggcaacagcgacgaa

SEQ ID NO: 155429 - DNA, 17 bp, Arabidopsis thaliana
tgggcaagcccatggac

SEQ ID NO: 155430 - DNA, 17 bp, Arabidopsis thaliana
tgggcaagcccatgggc

SEQ ID NO: 155431 - DNA, 17 bp, Arabidopsis thaliana
tgggcaagcccatggtc

SEQ ID NO: 155432 - DNA, 17 bp, Arabidopsis thaliana
tgggcaagcccatgtat

SEQ ID NO: 155433 - DNA, 17 bp, Arabidopsis thaliana
tgggcaagtataacgat

SEQ ID NO: 155434 - DNA, 17 bp, Arabidopsis thaliana
tgggcaagtccatgggc

SEQ ID NO: 155435 - DNA, 17 bp, Arabidopsis thaliana
tgggcaagtccatggtc

SEQ ID NO: 155436 - DNA, 17 bp, Arabidopsis thaliana
tgggcaagttcatgagc

SEQ ID NO: 155437 - DNA, 17 bp, Arabidopsis thaliana
tgggcaatacaggctgc

SEQ ID NO: 155438 - DNA, 17 bp, Arabidopsis thaliana
tgggcaatcagcttgca

SEQ ID NO: 155439 - DNA, 17 bp, Arabidopsis thaliana
tgggcaccgtaacccgg

SEQ ID NO: 155440 - DNA, 17 bp, Arabidopsis thaliana
tgggcacgtcgttaaat

SEQ ID NO: 155441 - DNA, 17 bp, Arabidopsis thaliana
tgggcacgtctgcctgg

SEQ ID NO: 155442 - DNA, 17 bp, Arabidopsis thaliana
tgggcactccgaaattg

SEQ ID NO: 155443 - DNA, 17 bp, Arabidopsis thaliana
tgggcactttgccatct

SEQ ID NO: 155444 - DNA, 17 bp, Arabidopsis thaliana
tgggcagaaccagtttt

SEQ ID NO: 155445 - DNA, 17 bp, Arabidopsis thaliana
tgggcagagaccgatag

SEQ ID NO: 155446 - DNA, 17 bp, Arabidopsis thaliana
tgggcagagtggatgct

SEQ ID NO: 155447 - DNA, 17 bp, Arabidopsis thaliana
tgggcagatttcgtggc

SEQ ID NO: 155448 - DNA, 17 bp, Arabidopsis thaliana
tgggcagctttgtgacg

SEQ ID NO: 155449 - DNA, 17 bp, Arabidopsis thaliana
tgggcaggacgcccatg

SEQ ID NO: 155450 - DNA, 17 bp, Arabidopsis thaliana
tgggcaggcctgcgaga

SEQ ID NO: 155451 - DNA, 17 bp, Arabidopsis thaliana
tgggcagtacggacccg

SEQ ID NO: 155452 - DNA, 17 bp, Arabidopsis thaliana
tgggcagtccgtgggaa

SEQ ID NO: 155453 - DNA, 17 bp, Arabidopsis thaliana
tgggcagtccgtgggga

SEQ ID NO: 155454 - DNA, 17 bp, Arabidopsis thaliana
tgggcagtctccttggc

SEQ ID NO: 155455 - DNA, 17 bp, Arabidopsis thaliana
tgggcagtgacgattga

SEQ ID NO: 155456 - DNA, 17 bp, Arabidopsis thaliana
tgggcagtgttgcaact

SEQ ID NO: 155457 - DNA, 17 bp, Arabidopsis thaliana
tgggcatagtcttaggt

SEQ ID NO: 155458 - DNA, 17 bp, Arabidopsis thaliana
tgggcatatgaccagtt

SEQ ID NO: 155459 - DNA, 17 bp, Arabidopsis thaliana
tgggcatgaacattttt

SEQ ID NO: 155460 - DNA, 17 bp, Arabidopsis thaliana
tgggcatgcaactctag

SEQ ID NO: 155461 - DNA, 17 bp, Arabidopsis thaliana
tgggcatgcagacccat

SEQ ID NO: 155462 - DNA, 17 bp, Arabidopsis thaliana
tgggcatggacattttc

SEQ ID NO: 155463 - DNA, 17 bp, Arabidopsis thaliana
tgggcatggtcttacgt

SEQ ID NO: 155464 - DNA, 17 bp, Arabidopsis thaliana
tgggcatgtcgttaagt

SEQ ID NO: 155465 - DNA, 17 bp, Arabidopsis thaliana
tgggcatgtcgttattt

SEQ ID NO: 155466 - DNA, 17 bp, Arabidopsis thaliana
tgggcatgtggccttta

SEQ ID NO: 155467 - DNA, 17 bp, Arabidopsis thaliana
tgggcatgtgtgtgcca

SEQ ID NO: 155468 - DNA, 17 bp, Arabidopsis thaliana
tgggcatgtgtgtgccc

SEQ ID NO: 155469 - DNA, 17 bp, Arabidopsis thaliana
tgggcatgtttctgagc

SEQ ID NO: 155470 - DNA, 17 bp, Arabidopsis thaliana
tgggcattcgtgatttg

SEQ ID NO: 155471 - DNA, 17 bp, Arabidopsis thaliana
tgggcattgacctagtt

SEQ ID NO: 155472 - DNA, 17 bp, Arabidopsis thaliana
tgggcattttcgtaatt

SEQ ID NO: 155473 - DNA, 17 bp, Arabidopsis thaliana
tgggcattttcgtgatt

SEQ ID NO: 155474 - DNA, 17 bp, Arabidopsis thaliana
tgggcattttcgtggtt

SEQ ID NO: 155475 - DNA, 17 bp, Arabidopsis thaliana
tgggcattttcgtgttt

SEQ ID NO: 155476 - DNA, 17 bp, Arabidopsis thaliana
tgggcatttttgtgatt

SEQ ID NO: 155477 - DNA, 17 bp, Arabidopsis thaliana
tgggcattttttgagac

SEQ ID NO: 155478 - DNA, 17 bp, Arabidopsis thaliana
tgggccaaaccccgtaa

SEQ ID NO: 155479 - DNA, 17 bp, Arabidopsis thaliana
tgggccaaagcctgtaa

SEQ ID NO: 155480 - DNA, 17 bp, Arabidopsis thaliana
tgggccaaagcctgtca

SEQ ID NO: 155481 - DNA, 17 bp, Arabidopsis thaliana
tgggccaacagcacgtt

SEQ ID NO: 155482 - DNA, 17 bp, Arabidopsis thaliana
tgggccaacagctcctc

SEQ ID NO: 155483 - DNA, 17 bp, Arabidopsis thaliana
tgggccaaccacatttt

SEQ ID NO: 155484 - DNA, 17 bp, Arabidopsis thaliana
tgggccaaccacgtttt

SEQ ID NO: 155485 - DNA, 17 bp, Arabidopsis thaliana
tgggccaacctgactct

SEQ ID NO: 155486 - DNA, 17 bp, Arabidopsis thaliana
tgggccaaggaggcttc

SEQ ID NO: 155487 - DNA, 17 bp, Arabidopsis thaliana
tgggccaaggatgactt

SEQ ID NO: 155488 - DNA, 17 bp, Arabidopsis thaliana
tgggccaagggggcttc

SEQ ID NO: 155489 - DNA, 17 bp, Arabidopsis thaliana
tgggccaagttggacgg

SEQ ID NO: 155490 - DNA, 17 bp, Arabidopsis thaliana
tgggccaatcaggtttt

SEQ ID NO: 155491 - DNA, 17 bp, Arabidopsis thaliana
tgggccaatcttaattt

SEQ ID NO: 155492 - DNA, 17 bp, Arabidopsis thaliana
tgggccaatgtcggtaa

SEQ ID NO: 155493 - DNA, 17 bp, Arabidopsis thaliana
tgggccaattcggacat

SEQ ID NO: 155494 - DNA, 17 bp, Arabidopsis thaliana
tgggccacataggtggg

SEQ ID NO: 155495 - DNA, 17 bp, Arabidopsis thaliana
tgggccacataggttgg

SEQ ID NO: 155496 - DNA, 17 bp, Arabidopsis thaliana
tgggccaccacactgcc

SEQ ID NO: 155497 - DNA, 17 bp, Arabidopsis thaliana
tgggccacgcatgccac

SEQ ID NO: 155498 - DNA, 17 bp, Arabidopsis thaliana
tgggccacgctctgttt

SEQ ID NO: 155499 - DNA, 17 bp, Arabidopsis thaliana
tgggccacggttatgga

SEQ ID NO: 155500 - DNA, 17 bp, Arabidopsis thaliana
tgggccacgtccgggag

SEQ ID NO: 155501 - DNA, 17 bp, Arabidopsis thaliana
tgggccagaaagtgtct

SEQ ID NO: 155502 - DNA, 17 bp, Arabidopsis thaliana
tgggccagcccactttg

SEQ ID NO: 155503 - DNA, 17 bp, Arabidopsis thaliana
tgggccatgacctccgc

SEQ ID NO: 155504 - DNA, 17 bp, Arabidopsis thaliana
tgggccatgcgggttcc

SEQ ID NO: 155505 - DNA, 17 bp, Arabidopsis thaliana
tgggccatttttggtaa

SEQ ID NO: 155506 - DNA, 17 bp, Arabidopsis thaliana
tgggcccaaaacctcct

SEQ ID NO: 155507 - DNA, 17 bp, Arabidopsis thaliana
tgggcccaaggttcatt

SEQ ID NO: 155508 - DNA, 17 bp, Arabidopsis thaliana
tgggcccatgagatgag

SEQ ID NO: 155509 - DNA, 17 bp, Arabidopsis thaliana
tgggcccgcattccact

SEQ ID NO: 155510 - DNA, 17 bp, Arabidopsis thaliana
tgggccctgattggaaa

SEQ ID NO: 155511 - DNA, 17 bp, Arabidopsis thaliana
tgggccctgttctttga

SEQ ID NO: 155512 - DNA, 17 bp, Arabidopsis thaliana
tgggccctttgtcgcta

SEQ ID NO: 155513 - DNA, 17 bp, Arabidopsis thaliana
tgggccgaaaccacagc

SEQ ID NO: 155514 - DNA, 17 bp, Arabidopsis thaliana
tgggccgaaacccgtaa

SEQ ID NO: 155515 - DNA, 17 bp, Arabidopsis thaliana
tgggccgaaactcgtaa

SEQ ID NO: 155516 - DNA, 17 bp, Arabidopsis thaliana
tgggccgaaatccgtaa

SEQ ID NO: 155517 - DNA, 17 bp, Arabidopsis thaliana
tgggccgaaatccgttc

SEQ ID NO: 155518 - DNA, 17 bp, Arabidopsis thaliana
tgggccgaaatgtctgc

SEQ ID NO: 155519 - DNA, 17 bp, Arabidopsis thaliana
tgggccgaaattggcga

SEQ ID NO: 155520 - DNA, 17 bp, Arabidopsis thaliana
tgggccgaaccccgtaa

SEQ ID NO: 155521 - DNA, 17 bp, Arabidopsis thaliana
tgggccgaaccccgtac

SEQ ID NO: 155522 - DNA, 17 bp, Arabidopsis thaliana
tgggccgaagcccgtaa

SEQ ID NO: 155523 - DNA, 17 bp, Arabidopsis thaliana
tgggccgaagcctgtaa

SEQ ID NO: 155524 - DNA, 17 bp, Arabidopsis thaliana
tgggccgaaggccataa

SEQ ID NO: 155525 - DNA, 17 bp, Arabidopsis thaliana
tgggccgaagtccgtaa

SEQ ID NO: 155526 - DNA, 17 bp, Arabidopsis thaliana
tgggccgaatcccataa

SEQ ID NO: 155527 - DNA, 17 bp, Arabidopsis thaliana
tgggccgaatcccgtaa

SEQ ID NO: 155528 - DNA, 17 bp, Arabidopsis thaliana
tgggccgaatcctgtaa

SEQ ID NO: 155529 - DNA, 17 bp, Arabidopsis thaliana
tgggccgaatcttgtaa

SEQ ID NO: 155530 - DNA, 17 bp, Arabidopsis thaliana
tgggccgacactgacac

SEQ ID NO: 155531 - DNA, 17 bp, Arabidopsis thaliana
tgggccgagacccgtac

SEQ ID NO: 155532 - DNA, 17 bp, Arabidopsis thaliana
tgggccgagatgggctt

SEQ ID NO: 155533 - DNA, 17 bp, Arabidopsis thaliana
tgggccgagcagctttc

SEQ ID NO: 155534 - DNA, 17 bp, Arabidopsis thaliana
tgggccgagcagtcatt

SEQ ID NO: 155535 - DNA, 17 bp, Arabidopsis thaliana
tgggccgagccagtgtt

SEQ ID NO: 155536 - DNA, 17 bp, Arabidopsis thaliana
tgggccgagtggtctgg

SEQ ID NO: 155537 - DNA, 17 bp, Arabidopsis thaliana
tgggccgagtggtgtgg

SEQ ID NO: 155538 - DNA, 17 bp, Arabidopsis thaliana
tgggccgccaatgtcca

SEQ ID NO: 155539 - DNA, 17 bp, Arabidopsis thaliana
tgggccgcctgtccagt

SEQ ID NO: 155540 - DNA, 17 bp, Arabidopsis thaliana
tgggccgctgtaaccat

SEQ ID NO: 155541 - DNA, 17 bp, Arabidopsis thaliana
tgggccggaccgatgtg

SEQ ID NO: 155542 - DNA, 17 bp, Arabidopsis thaliana
tgggccggccctgggct

SEQ ID NO: 155543 - DNA, 17 bp, Arabidopsis thaliana
tgggccggccctgtttg

SEQ ID NO: 155544 - DNA, 17 bp, Arabidopsis thaliana
tgggccgggttcgggtt

SEQ ID NO: 155545 - DNA, 17 bp, Arabidopsis thaliana
tgggccggttacttgtt

SEQ ID NO: 155546 - DNA, 17 bp, Arabidopsis thaliana
tgggccggttttgttta

SEQ ID NO: 155547 - DNA, 17 bp, Arabidopsis thaliana
tgggccgtgagcagctt

SEQ ID NO: 155548 - DNA, 17 bp, Arabidopsis thaliana
tgggccgttatattcgc

SEQ ID NO: 155549 - DNA, 17 bp, Arabidopsis thaliana
tgggccgttggtgaatc

SEQ ID NO: 155550 - DNA, 17 bp, Arabidopsis thaliana
tgggccgtttccagggt

SEQ ID NO: 155551 - DNA, 17 bp, Arabidopsis thaliana
tgggccgtttttggtaa

SEQ ID NO: 155552 - DNA, 17 bp, Arabidopsis thaliana
tgggcctaatggctaaa

SEQ ID NO: 155553 - DNA, 17 bp, Arabidopsis thaliana
tgggcctacaccaaaag

SEQ ID NO: 155554 - DNA, 17 bp, Arabidopsis thaliana
tgggcctacatcgggtg

SEQ ID NO: 155555 - DNA, 17 bp, Arabidopsis thaliana
tgggcctaccatggtgg

SEQ ID NO: 155556 - DNA, 17 bp, Arabidopsis thaliana
tgggcctcccatcgcat

SEQ ID NO: 155557 - DNA, 17 bp, Arabidopsis thaliana
tgggcctctccacctat

SEQ ID NO: 155558 - DNA, 17 bp, Arabidopsis thaliana
tgggcctctggaagagt

SEQ ID NO: 155559 - DNA, 17 bp, Arabidopsis thaliana
tgggcctcttcacatat

SEQ ID NO: 155560 - DNA, 17 bp, Arabidopsis thaliana
tgggcctgaacctccag

SEQ ID NO: 155561 - DNA, 17 bp, Arabidopsis thaliana
tgggcctgaacttccag

SEQ ID NO: 155562 - DNA, 17 bp, Arabidopsis thaliana
tgggcctgcacatgtaa

SEQ ID NO: 155563 - DNA, 17 bp, Arabidopsis thaliana
tgggcctgcacatgtca

SEQ ID NO: 155564 - DNA, 17 bp, Arabidopsis thaliana
tgggcctgcgtctttgt

SEQ ID NO: 155565 - DNA, 17 bp, Arabidopsis thaliana
tgggcctgcgtgccttt

SEQ ID NO: 155566 - DNA, 17 bp, Arabidopsis thaliana
tgggcctggaaatggcg

SEQ ID NO: 155567 - DNA, 17 bp, Arabidopsis thaliana
tgggcctgggaggatta

SEQ ID NO: 155568 - DNA, 17 bp, Arabidopsis thaliana
tgggcctgggccgtagg

SEQ ID NO: 155569 - DNA, 17 bp, Arabidopsis thaliana
tgggcctgggggtttac

SEQ ID NO: 155570 - DNA, 17 bp, Arabidopsis thaliana
tgggccttccattcgac

SEQ ID NO: 155571 - DNA, 17 bp, Arabidopsis thaliana
tgggccttggcctaatt

SEQ ID NO: 155572 - DNA, 17 bp, Arabidopsis thaliana
tgggccttgggacgagt

SEQ ID NO: 155573 - DNA, 17 bp, Arabidopsis thaliana
tgggccttgggcatcca

SEQ ID NO: 155574 - DNA, 17 bp, Arabidopsis thaliana
tgggcctttcaattctt

SEQ ID NO: 155575 - DNA, 17 bp, Arabidopsis thaliana
tgggcctttcagctttt

SEQ ID NO: 155576 - DNA, 17 bp, Arabidopsis thaliana
tgggcctttgggcttcc

SEQ ID NO: 155577 - DNA, 17 bp, Arabidopsis thaliana
tgggccttttcgtgatc

SEQ ID NO: 155578 - DNA, 17 bp, Arabidopsis thaliana
tgggcgaaacgatgatg

SEQ ID NO: 155579 - DNA, 17 bp, Arabidopsis thaliana
tgggcgaaagcctgacg

SEQ ID NO: 155580 - DNA, 17 bp, Arabidopsis thaliana
tgggcgaagtccggagc

SEQ ID NO: 155581 - DNA, 17 bp, Arabidopsis thaliana
tgggcgaatttgacggt

SEQ ID NO: 155582 - DNA, 17 bp, Arabidopsis thaliana
tgggcgacacacgtgct

SEQ ID NO: 155583 - DNA, 17 bp, Arabidopsis thaliana
tgggcgaccagtatcct

SEQ ID NO: 155584 - DNA, 17 bp, Arabidopsis thaliana
tgggcgacgagtgagct

SEQ ID NO: 155585 - DNA, 17 bp, Arabidopsis thaliana
tgggcgactaacaaccg

SEQ ID NO: 155586 - DNA, 17 bp, Arabidopsis thaliana
tgggcgactaacttccg

SEQ ID NO: 155587 - DNA, 17 bp, Arabidopsis thaliana
tgggcgactcgcttcct

SEQ ID NO: 155588 - DNA, 17 bp, Arabidopsis thaliana
tgggcgagacctcgtgt

SEQ ID NO: 155589 - DNA, 17 bp, Arabidopsis thaliana
tgggcgagaggccacac

SEQ ID NO: 155590 - DNA, 17 bp, Arabidopsis thaliana
tgggcgagagtagtagt

SEQ ID NO: 155591 - DNA, 17 bp, Arabidopsis thaliana
tgggcgatgaagtgtat

SEQ ID NO: 155592 - DNA, 17 bp, Arabidopsis thaliana
tgggcgcttgtgaacgg

SEQ ID NO: 155593 - DNA, 17 bp, Arabidopsis thaliana
tgggcggactatattac

SEQ ID NO: 155594 - DNA, 17 bp, Arabidopsis thaliana
tgggcggactatattcc

SEQ ID NO: 155595 - DNA, 17 bp, Arabidopsis thaliana
tgggcggctgttgaaac

SEQ ID NO: 155596 - DNA, 17 bp, Arabidopsis thaliana
tgggcgggagaacggtc

SEQ ID NO: 155597 - DNA, 17 bp, Arabidopsis thaliana
tgggcgggcggataaaa

SEQ ID NO: 155598 - DNA, 17 bp, Arabidopsis thaliana
tgggcggtcttgaaggt

SEQ ID NO: 155599 - DNA, 17 bp, Arabidopsis thaliana
tgggcgtaaagcgtctg

SEQ ID NO: 155600 - DNA, 17 bp, Arabidopsis thaliana
tgggcgtgtccgtatgg

SEQ ID NO: 155601 - DNA, 17 bp, Arabidopsis thaliana
tgggcgttttggacaag

SEQ ID NO: 155602 - DNA, 17 bp, Arabidopsis thaliana
tgggctaaacggttgtc

SEQ ID NO: 155603 - DNA, 17 bp, Arabidopsis thaliana
tgggctaaagctggtga

SEQ ID NO: 155604 - DNA, 17 bp, Arabidopsis thaliana
tgggctaaagttggtga

SEQ ID NO: 155605 - DNA, 17 bp, Arabidopsis thaliana
tgggctaaggccacaca

SEQ ID NO: 155606 - DNA, 17 bp, Arabidopsis thaliana
tgggctaagttgttcca

SEQ ID NO: 155607 - DNA, 17 bp, Arabidopsis thaliana
tgggctaatgagacatg

SEQ ID NO: 155608 - DNA, 17 bp, Arabidopsis thaliana
tgggctagcccttcccc

SEQ ID NO: 155609 - DNA, 17 bp, Arabidopsis thaliana
tgggctaggttaatgga

SEQ ID NO: 155610 - DNA, 17 bp, Arabidopsis thaliana
tgggctataccctttga

SEQ ID NO: 155611 - DNA, 17 bp, Arabidopsis thaliana
tgggctatagctcagtt

SEQ ID NO: 155612 - DNA, 17 bp, Arabidopsis thaliana
tgggctatattacggac

SEQ ID NO: 155613 - DNA, 17 bp, Arabidopsis thaliana
tgggctatattacggat

SEQ ID NO: 155614 - DNA, 17 bp, Arabidopsis thaliana
tgggctatattactgac

SEQ ID NO: 155615 - DNA, 17 bp, Arabidopsis thaliana
tgggctatgaaaagtat

SEQ ID NO: 155616 - DNA, 17 bp, Arabidopsis thaliana
tgggctatggtcactgg

SEQ ID NO: 155617 - DNA, 17 bp, Arabidopsis thaliana
tgggctattagctcagt

SEQ ID NO: 155618 - DNA, 17 bp, Arabidopsis thaliana
tgggctatttgatcaag

SEQ ID NO: 155619 - DNA, 17 bp, Arabidopsis thaliana
tgggctcaaacccagac

SEQ ID NO: 155620 - DNA, 17 bp, Arabidopsis thaliana
tgggctcaaattccagt

SEQ ID NO: 155621 - DNA, 17 bp, Arabidopsis thaliana
tgggctcaaggtgacta

SEQ ID NO: 155622 - DNA, 17 bp, Arabidopsis thaliana
tgggctcaaggtgagta

SEQ ID NO: 155623 - DNA, 17 bp, Arabidopsis thaliana
tgggctcatcatgagct

SEQ ID NO: 155624 - DNA, 17 bp, Arabidopsis thaliana
tgggctcatcatgatct

SEQ ID NO: 155625 - DNA, 17 bp, Arabidopsis thaliana
tgggctcatcatgatgt

SEQ ID NO: 155626 - DNA, 17 bp, Arabidopsis thaliana
tgggctccccattcgac

SEQ ID NO: 155627 - DNA, 17 bp, Arabidopsis thaliana
tgggctcccggtaggac

SEQ ID NO: 155628 - DNA, 17 bp, Arabidopsis thaliana
tgggctcctctcagcag

SEQ ID NO: 155629 - DNA, 17 bp, Arabidopsis thaliana
tgggctcctgtcttggt

SEQ ID NO: 155630 - DNA, 17 bp, Arabidopsis thaliana
tgggctcgccactcaaa

SEQ ID NO: 155631 - DNA, 17 bp, Arabidopsis thaliana
tgggctcgggccccacg

SEQ ID NO: 155632 - DNA, 17 bp, Arabidopsis thaliana
tgggctcgggggtccca

SEQ ID NO: 155633 - DNA, 17 bp, Arabidopsis thaliana
tgggctcgggggtccga

SEQ ID NO: 155634 - DNA, 17 bp, Arabidopsis thaliana
tgggctcgggggtcgca

SEQ ID NO: 155635 - DNA, 17 bp, Arabidopsis thaliana
tgggctcgggggtcgga

SEQ ID NO: 155636 - DNA, 17 bp, Arabidopsis thaliana
tgggctcgttacaatgc

SEQ ID NO: 155637 - DNA, 17 bp, Arabidopsis thaliana
tgggctctactctggct

SEQ ID NO: 155638 - DNA, 17 bp, Arabidopsis thaliana
tgggctctagctcagtt

SEQ ID NO: 155639 - DNA, 17 bp, Arabidopsis thaliana
tgggctctatctagaga

SEQ ID NO: 155640 - DNA, 17 bp, Arabidopsis thaliana
tgggctctatctagcgt

SEQ ID NO: 155641 - DNA, 17 bp, Arabidopsis thaliana
tgggctctatctagtat

SEQ ID NO: 155642 - DNA, 17 bp, Arabidopsis thaliana
tgggctctatctggcat

SEQ ID NO: 155643 - DNA, 17 bp, Arabidopsis thaliana
tgggctctatctgggat

SEQ ID NO: 155644 - DNA, 17 bp, Arabidopsis thaliana
tgggctctatctggtat

SEQ ID NO: 155645 - DNA, 17 bp, Arabidopsis thaliana
tgggctctatctgttat

SEQ ID NO: 155646 - DNA, 17 bp, Arabidopsis thaliana
tgggctctatgtaattt

SEQ ID NO: 155647 - DNA, 17 bp, Arabidopsis thaliana
tgggctctatttggcgt

SEQ ID NO: 155648 - DNA, 17 bp, Arabidopsis thaliana
tgggctctccattcgac

SEQ ID NO: 155649 - DNA, 17 bp, Arabidopsis thaliana
tgggctctgaccgcgtc

SEQ ID NO: 155650 - DNA, 17 bp, Arabidopsis thaliana
tgggctctgaccgcgtg

SEQ ID NO: 155651 - DNA, 17 bp, Arabidopsis thaliana
tgggctgaagcccgtaa

SEQ ID NO: 155652 - DNA, 17 bp, Arabidopsis thaliana
tgggctgaagcgcgtac

SEQ ID NO: 155653 - DNA, 17 bp, Arabidopsis thaliana
tgggctgaagctgagat

SEQ ID NO: 155654 - DNA, 17 bp, Arabidopsis thaliana
tgggctgaatcacgcaa

SEQ ID NO: 155655 - DNA, 17 bp, Arabidopsis thaliana
tgggctgaatcccgtaa

SEQ ID NO: 155656 - DNA, 17 bp, Arabidopsis thaliana
tgggctgactcccggta

SEQ ID NO: 155657 - DNA, 17 bp, Arabidopsis thaliana
tgggctgatactgatta

SEQ ID NO: 155658 - DNA, 17 bp, Arabidopsis thaliana
tgggctgatggctctta

SEQ ID NO: 155659 - DNA, 17 bp, Arabidopsis thaliana
tgggctgcgacaagcac

SEQ ID NO: 155660 - DNA, 17 bp, Arabidopsis thaliana
tgggctgcgccaaggcc

SEQ ID NO: 155661 - DNA, 17 bp, Arabidopsis thaliana
tgggctgcgccactcaa

SEQ ID NO: 155662 - DNA, 17 bp, Arabidopsis thaliana
tgggctgcgccactcac

SEQ ID NO: 155663 - DNA, 17 bp, Arabidopsis thaliana
tgggctgcgccactccc

SEQ ID NO: 155664 - DNA, 17 bp, Arabidopsis thaliana
tgggctggagtagtttc

SEQ ID NO: 155665 - DNA, 17 bp, Arabidopsis thaliana
tgggctggcttacttgg

SEQ ID NO: 155666 - DNA, 17 bp, Arabidopsis thaliana
tgggctgggaggattac

SEQ ID NO: 155667 - DNA, 17 bp, Arabidopsis thaliana
tgggctggtgctctttg

SEQ ID NO: 155668 - DNA, 17 bp, Arabidopsis thaliana
tgggctgtcttccggag

SEQ ID NO: 155669 - DNA, 17 bp, Arabidopsis thaliana
tgggctgtgagggcggc

SEQ ID NO: 155670 - DNA, 17 bp, Arabidopsis thaliana
tgggctgtgagggctct

SEQ ID NO: 155671 - DNA, 17 bp, Arabidopsis thaliana
tgggctgtgtggcctta

SEQ ID NO: 155672 - DNA, 17 bp, Arabidopsis thaliana
tgggctgtgtggtttgg

SEQ ID NO: 155673 - DNA, 17 bp, Arabidopsis thaliana
tgggctgttgttctgat

SEQ ID NO: 155674 - DNA, 17 bp, Arabidopsis thaliana
tgggcttaacatgacat

SEQ ID NO: 155675 - DNA, 17 bp, Arabidopsis thaliana
tgggcttaagaccgtag

SEQ ID NO: 155676 - DNA, 17 bp, Arabidopsis thaliana
tgggcttaccggggcgg

SEQ ID NO: 155677 - DNA, 17 bp, Arabidopsis thaliana
tgggcttacgctgtttc

SEQ ID NO: 155678 - DNA, 17 bp, Arabidopsis thaliana
tgggcttagttggctaa

SEQ ID NO: 155679 - DNA, 17 bp, Arabidopsis thaliana
tgggcttagtttccgag

SEQ ID NO: 155680 - DNA, 17 bp, Arabidopsis thaliana
tgggcttagtttctgag

SEQ ID NO: 155681 - DNA, 17 bp, Arabidopsis thaliana
tgggcttattgattgta

SEQ ID NO: 155682 - DNA, 17 bp, Arabidopsis thaliana
tgggcttccaacctacc

SEQ ID NO: 155683 - DNA, 17 bp, Arabidopsis thaliana
tgggcttcgaagacagt

SEQ ID NO: 155684 - DNA, 17 bp, Arabidopsis thaliana
tgggcttcggccagaac

SEQ ID NO: 155685 - DNA, 17 bp, Arabidopsis thaliana
tgggcttcgtgatccga

SEQ ID NO: 155686 - DNA, 17 bp, Arabidopsis thaliana
tgggcttctaagataag

SEQ ID NO: 155687 - DNA, 17 bp, Arabidopsis thaliana
tgggcttctgattcggg

SEQ ID NO: 155688 - DNA, 17 bp, Arabidopsis thaliana
tgggcttctgattcggt

SEQ ID NO: 155689 - DNA, 17 bp, Arabidopsis thaliana
tgggcttctggttcggg

SEQ ID NO: 155690 - DNA, 17 bp, Arabidopsis thaliana
tgggcttgaatttccag

SEQ ID NO: 155691 - DNA, 17 bp, Arabidopsis thaliana
tgggcttgaccgtatgg

SEQ ID NO: 155692 - DNA, 17 bp, Arabidopsis thaliana
tgggcttgagcaactgg

SEQ ID NO: 155693 - DNA, 17 bp, Arabidopsis thaliana
tgggcttgagccccacg

SEQ ID NO: 155694 - DNA, 17 bp, Arabidopsis thaliana
tgggcttgagtctgaga

SEQ ID NO: 155695 - DNA, 17 bp, Arabidopsis thaliana
tgggcttgagtctgata

SEQ ID NO: 155696 - DNA, 17 bp, Arabidopsis thaliana
tgggcttgatgagttga

SEQ ID NO: 155697 - DNA, 17 bp, Arabidopsis thaliana
tgggcttgcagagagaa

SEQ ID NO: 155698 - DNA, 17 bp, Arabidopsis thaliana
tgggcttgcagggcagt

SEQ ID NO: 155699 - DNA, 17 bp, Arabidopsis thaliana
tgggcttgccgaaaagg

SEQ ID NO: 155700 - DNA, 17 bp, Arabidopsis thaliana
tgggcttgctgagttga

SEQ ID NO: 155701 - DNA, 17 bp, Arabidopsis thaliana
tgggcttgctttggttg

SEQ ID NO: 155702 - DNA, 17 bp, Arabidopsis thaliana
tgggcttggactgtttt

SEQ ID NO: 155703 - DNA, 17 bp, Arabidopsis thaliana
tgggcttggaggccaca

SEQ ID NO: 155704 - DNA, 17 bp, Arabidopsis thaliana
tgggcttgggatacctg

SEQ ID NO: 155705 - DNA, 17 bp, Arabidopsis thaliana
tgggcttggttttgaca

SEQ ID NO: 155706 - DNA, 17 bp, Arabidopsis thaliana
tgggcttgtggattttg

SEQ ID NO: 155707 - DNA, 17 bp, Arabidopsis thaliana
tgggcttgttcgtttat

SEQ ID NO: 155708 - DNA, 17 bp, Arabidopsis thaliana
tgggctttattccaact

SEQ ID NO: 155709 - DNA, 17 bp, Arabidopsis thaliana
tgggctttcaacgactg

SEQ ID NO: 155710 - DNA, 17 bp, Arabidopsis thaliana
tgggctttccgaaaaga

SEQ ID NO: 155711 - DNA, 17 bp, Arabidopsis thaliana
tgggctttccgaaaagg

SEQ ID NO: 155712 - DNA, 17 bp, Arabidopsis thaliana
tgggctttccgaacagg

SEQ ID NO: 155713 - DNA, 17 bp, Arabidopsis thaliana
tgggctttcgtccaatt

SEQ ID NO: 155714 - DNA, 17 bp, Arabidopsis thaliana
tgggctttctctacttt

SEQ ID NO: 155715 - DNA, 17 bp, Arabidopsis thaliana
tgggctttgcccgcgca

SEQ ID NO: 155716 - DNA, 17 bp, Arabidopsis thaliana
tgggctttgcctgcgca

SEQ ID NO: 155717 - DNA, 17 bp, Arabidopsis thaliana
tgggctttgcgggccga

SEQ ID NO: 155718 - DNA, 17 bp, Arabidopsis thaliana
tgggctttgcttcaatt

SEQ ID NO: 155719 - DNA, 17 bp, Arabidopsis thaliana
tgggctttggaccgtgt

SEQ ID NO: 155720 - DNA, 17 bp, Arabidopsis thaliana
tgggctttggccccacc

SEQ ID NO: 155721 - DNA, 17 bp, Arabidopsis thaliana
tgggctttggccccatt

SEQ ID NO: 155722 - DNA, 17 bp, Arabidopsis thaliana
tgggctttggccgagtg

SEQ ID NO: 155723 - DNA, 17 bp, Arabidopsis thaliana
tgggctttggtcctatt

SEQ ID NO: 155724 - DNA, 17 bp, Arabidopsis thaliana
tgggctttggtgggtgt

SEQ ID NO: 155725 - DNA, 17 bp, Arabidopsis thaliana
tgggctttggtttatgt

SEQ ID NO: 155726 - DNA, 17 bp, Arabidopsis thaliana
tgggctttgtccggtat

SEQ ID NO: 155727 - DNA, 17 bp, Arabidopsis thaliana
tgggcttttcctgcgca

SEQ ID NO: 155728 - DNA, 17 bp, Arabidopsis thaliana
tgggcttttggattgtt

SEQ ID NO: 155729 - DNA, 17 bp, Arabidopsis thaliana
tgggcttttgttgatga

SEQ ID NO: 155730 - DNA, 17 bp, Arabidopsis thaliana
tgggctttttgaccaaa

SEQ ID NO: 155731 - DNA, 17 bp, Arabidopsis thaliana
tgggctttttgggcttg

SEQ ID NO: 155732 - DNA, 17 bp, Arabidopsis thaliana
tggggaaatagaccgtt

SEQ ID NO: 155733 - DNA, 17 bp, Arabidopsis thaliana
tggggaacaccaccgag

SEQ ID NO: 155734 - DNA, 17 bp, Arabidopsis thaliana
tggggaaccccacagcc

SEQ ID NO: 155735 - DNA, 17 bp, Arabidopsis thaliana
tggggaaccctacaaca

SEQ ID NO: 155736 - DNA, 17 bp, Arabidopsis thaliana
tggggaacctccatggt

SEQ ID NO: 155737 - DNA, 17 bp, Arabidopsis thaliana
tggggaagaatcgcgac

SEQ ID NO: 155738 - DNA, 17 bp, Arabidopsis thaliana
tggggaagcaaatgaca

SEQ ID NO: 155739 - DNA, 17 bp, Arabidopsis thaliana
tggggaatcttggacaa

SEQ ID NO: 155740 - DNA, 17 bp, Arabidopsis thaliana
tggggacacaggtcgtt

SEQ ID NO: 155741 - DNA, 17 bp, Arabidopsis thaliana
tggggaccaattgacct

SEQ ID NO: 155742 - DNA, 17 bp, Arabidopsis thaliana
tggggacgagatgttgt

SEQ ID NO: 155743 - DNA, 17 bp, Arabidopsis thaliana
tggggacgagatgtttt

SEQ ID NO: 155744 - DNA, 17 bp, Arabidopsis thaliana
tggggacgcggattacg

SEQ ID NO: 155745 - DNA, 17 bp, Arabidopsis thaliana
tggggacggattggcgg

SEQ ID NO: 155746 - DNA, 17 bp, Arabidopsis thaliana
tggggactatggttttg

SEQ ID NO: 155747 - DNA, 17 bp, Arabidopsis thaliana
tggggactcccggtagg

SEQ ID NO: 155748 - DNA, 17 bp, Arabidopsis thaliana
tggggagatttcctgat

SEQ ID NO: 155749 - DNA, 17 bp, Arabidopsis thaliana
tggggagcaacttcact

SEQ ID NO: 155750 - DNA, 17 bp, Arabidopsis thaliana
tggggagctgctttgac

SEQ ID NO: 155751 - DNA, 17 bp, Arabidopsis thaliana
tggggagggggtctacc

SEQ ID NO: 155752 - DNA, 17 bp, Arabidopsis thaliana
tggggagtagccaagcg

SEQ ID NO: 155753 - DNA, 17 bp, Arabidopsis thaliana
tggggagtttggctggg

SEQ ID NO: 155754 - DNA, 17 bp, Arabidopsis thaliana
tggggatagatcattgc

SEQ ID NO: 155755 - DNA, 17 bp, Arabidopsis thaliana
tggggatcagccaagcg

SEQ ID NO: 155756 - DNA, 17 bp, Arabidopsis thaliana
tggggatcccacggctc

SEQ ID NO: 155757 - DNA, 17 bp, Arabidopsis thaliana
tggggatccctcgcggg

SEQ ID NO: 155758 - DNA, 17 bp, Arabidopsis thaliana
tggggatcctagtcaac

SEQ ID NO: 155759 - DNA, 17 bp, Arabidopsis thaliana
tggggatgaggaccaga

SEQ ID NO: 155760 - DNA, 17 bp, Arabidopsis thaliana
tggggatgtaacgcatg

SEQ ID NO: 155761 - DNA, 17 bp, Arabidopsis thaliana
tggggatgttacagttt

SEQ ID NO: 155762 - DNA, 17 bp, Arabidopsis thaliana
tggggattacaggcttt

SEQ ID NO: 155763 - DNA, 17 bp, Arabidopsis thaliana
tggggattagcgctttt

SEQ ID NO: 155764 - DNA, 17 bp, Arabidopsis thaliana
tggggattatgagtttt

SEQ ID NO: 155765 - DNA, 17 bp, Arabidopsis thaliana
tggggattcggctcaga

SEQ ID NO: 155766 - DNA, 17 bp, Arabidopsis thaliana
tggggattcggtgttga

SEQ ID NO: 155767 - DNA, 17 bp, Arabidopsis thaliana
tggggattttggcctgg

SEQ ID NO: 155768 - DNA, 17 bp, Arabidopsis thaliana
tggggattttgttttcg

SEQ ID NO: 155769 - DNA, 17 bp, Arabidopsis thaliana
tggggatttttcagagg

SEQ ID NO: 155770 - DNA, 17 bp, Arabidopsis thaliana
tggggcaaaattggccg

SEQ ID NO: 155771 - DNA, 17 bp, Arabidopsis thaliana
tggggcacgtctgcctg

SEQ ID NO: 155772 - DNA, 17 bp, Arabidopsis thaliana
tggggcaggatccgaag

SEQ ID NO: 155773 - DNA, 17 bp, Arabidopsis thaliana
tggggcatgaacgacga

SEQ ID NO: 155774 - DNA, 17 bp, Arabidopsis thaliana
tggggcattttcgtgat

SEQ ID NO: 155775 - DNA, 17 bp, Arabidopsis thaliana
tggggccaaacctgttg

SEQ ID NO: 155776 - DNA, 17 bp, Arabidopsis thaliana
tggggccgccttttttg

SEQ ID NO: 155777 - DNA, 17 bp, Arabidopsis thaliana
tggggccggtgggcggg

SEQ ID NO: 155778 - DNA, 17 bp, Arabidopsis thaliana
tggggcgaagcccgtaa

SEQ ID NO: 155779 - DNA, 17 bp, Arabidopsis thaliana
tggggcgtacccaagcg

SEQ ID NO: 155780 - DNA, 17 bp, Arabidopsis thaliana
tggggcgtagccaagca

SEQ ID NO: 155781 - DNA, 17 bp, Arabidopsis thaliana
tggggcgtagccaagcc

SEQ ID NO: 155782 - DNA, 17 bp, Arabidopsis thaliana
tggggcgtagccaagcg

SEQ ID NO: 155783 - DNA, 17 bp, Arabidopsis thaliana
tggggcgtagccaagct

SEQ ID NO: 155784 - DNA, 17 bp, Arabidopsis thaliana
tggggcgtagccaagtg

SEQ ID NO: 155785 - DNA, 17 bp, Arabidopsis thaliana
tggggcgtagccacgcg

SEQ ID NO: 155786 - DNA, 17 bp, Arabidopsis thaliana
tggggcgtagtcaagcg

SEQ ID NO: 155787 - DNA, 17 bp, Arabidopsis thaliana
tggggcgtatccaagcg

SEQ ID NO: 155788 - DNA, 17 bp, Arabidopsis thaliana
tggggcgtggccaagcg

SEQ ID NO: 155789 - DNA, 17 bp, Arabidopsis thaliana
tggggctactggaggac

SEQ ID NO: 155790 - DNA, 17 bp, Arabidopsis thaliana
tggggctcccggtagga

SEQ ID NO: 155791 - DNA, 17 bp, Arabidopsis thaliana
tggggctgagtacagtt

SEQ ID NO: 155792 - DNA, 17 bp, Arabidopsis thaliana
tggggctggaccagaat

SEQ ID NO: 155793 - DNA, 17 bp, Arabidopsis thaliana
tggggctggcagggacg

SEQ ID NO: 155794 - DNA, 17 bp, Arabidopsis thaliana
tggggcttgagcaactg

SEQ ID NO: 155795 - DNA, 17 bp, Arabidopsis thaliana
tgggggacacagatcgt

SEQ ID NO: 155796 - DNA, 17 bp, Arabidopsis thaliana
tgggggaccaaagcaac

SEQ ID NO: 155797 - DNA, 17 bp, Arabidopsis thaliana
tgggggaggtcgactcc

SEQ ID NO: 155798 - DNA, 17 bp, Arabidopsis thaliana
tgggggatccctacata

SEQ ID NO: 155799 - DNA, 17 bp, Arabidopsis thaliana
tgggggattacggactt

SEQ ID NO: 155800 - DNA, 17 bp, Arabidopsis thaliana
tgggggattacgggatt

SEQ ID NO: 155801 - DNA, 17 bp, Arabidopsis thaliana
tgggggattacgggttt

SEQ ID NO: 155802 - DNA, 17 bp, Arabidopsis thaliana
tgggggccggcgatgca

SEQ ID NO: 155803 - DNA, 17 bp, Arabidopsis thaliana
tgggggccggcgatgcg

SEQ ID NO: 155804 - DNA, 17 bp, Arabidopsis thaliana
tgggggccggcgatgga

SEQ ID NO: 155805 - DNA, 17 bp, Arabidopsis thaliana
tgggggccggcgatttt

SEQ ID NO: 155806 - DNA, 17 bp, Arabidopsis thaliana
tgggggcgcaacgccct

SEQ ID NO: 155807 - DNA, 17 bp, Arabidopsis thaliana
tgggggctcgaagacga

SEQ ID NO: 155808 - DNA, 17 bp, Arabidopsis thaliana
tggggggacggactggg

SEQ ID NO: 155809 - DNA, 17 bp, Arabidopsis thaliana
tggggggattacgggct

SEQ ID NO: 155810 - DNA, 17 bp, Arabidopsis thaliana
tggggggattacgggtt

SEQ ID NO: 155811 - DNA, 17 bp, Arabidopsis thaliana
tggggggccccacggtg

SEQ ID NO: 155812 - DNA, 17 bp, Arabidopsis thaliana
tgggggggcagaggcct

SEQ ID NO: 155813 - DNA, 17 bp, Arabidopsis thaliana
tggggggggactaattg

SEQ ID NO: 155814 - DNA, 17 bp, Arabidopsis thaliana
tggggggggagaggcct

SEQ ID NO: 155815 - DNA, 17 bp, Arabidopsis thaliana
tgggggggtcccaccgg

SEQ ID NO: 155816 - DNA, 17 bp, Arabidopsis thaliana
tggggggtcccaccggg

SEQ ID NO: 155817 - DNA, 17 bp, Arabidopsis thaliana
tggggggtcggccggtc

SEQ ID NO: 155818 - DNA, 17 bp, Arabidopsis thaliana
tggggggtgagccgcta

SEQ ID NO: 155819 - DNA, 17 bp, Arabidopsis thaliana
tgggggtcgtgtgtata

SEQ ID NO: 155820 - DNA, 17 bp, Arabidopsis thaliana
tgggggtctatggttaa

SEQ ID NO: 155821 - DNA, 17 bp, Arabidopsis thaliana
tgggggtgccccacggt

SEQ ID NO: 155822 - DNA, 17 bp, Arabidopsis thaliana
tgggggtgctcttagtt

SEQ ID NO: 155823 - DNA, 17 bp, Arabidopsis thaliana
tggggtaaagcccaact

SEQ ID NO: 155824 - DNA, 17 bp, Arabidopsis thaliana
tggggtcaaggtcggcc

SEQ ID NO: 155825 - DNA, 17 bp, Arabidopsis thaliana
tggggtccaagcttgtc

SEQ ID NO: 155826 - DNA, 17 bp, Arabidopsis thaliana
tggggtccataaaggat

SEQ ID NO: 155827 - DNA, 17 bp, Arabidopsis thaliana
tggggtccatctgaatg

SEQ ID NO: 155828 - DNA, 17 bp, Arabidopsis thaliana
tggggtccattctcagt

SEQ ID NO: 155829 - DNA, 17 bp, Arabidopsis thaliana
tggggtcccaccgggcg

SEQ ID NO: 155830 - DNA, 17 bp, Arabidopsis thaliana
tggggtcccaccgggtg

SEQ ID NO: 155831 - DNA, 17 bp, Arabidopsis thaliana
tggggtccccacagacg

SEQ ID NO: 155832 - DNA, 17 bp, Arabidopsis thaliana
tggggtcctctttgcaa

SEQ ID NO: 155833 - DNA, 17 bp, Arabidopsis thaliana
tggggtccttatcagct

SEQ ID NO: 155834 - DNA, 17 bp, Arabidopsis thaliana
tggggtcctttctctcg

SEQ ID NO: 155835 - DNA, 17 bp, Arabidopsis thaliana
tggggtcgcagtgacca

SEQ ID NO: 155836 - DNA, 17 bp, Arabidopsis thaliana
tggggtcgcttctgtaa

SEQ ID NO: 155837 - DNA, 17 bp, Arabidopsis thaliana
tggggtcttcgactggg

SEQ ID NO: 155838 - DNA, 17 bp, Arabidopsis thaliana
tggggtgaacgacctgt

SEQ ID NO: 155839 - DNA, 17 bp, Arabidopsis thaliana
tggggtgattcctccgg

SEQ ID NO: 155840 - DNA, 17 bp, Arabidopsis thaliana
tggggtgcccagagtga

SEQ ID NO: 155841 - DNA, 17 bp, Arabidopsis thaliana
tggggtgcgagaggtcc

SEQ ID NO: 155842 - DNA, 17 bp, Arabidopsis thaliana
tggggtggcggcctaag

SEQ ID NO: 155843 - DNA, 17 bp, Arabidopsis thaliana
tggggtggtcacaagct

SEQ ID NO: 155844 - DNA, 17 bp, Arabidopsis thaliana
tggggtggtttctccgt

SEQ ID NO: 155845 - DNA, 17 bp, Arabidopsis thaliana
tggggtggttttatgtt

SEQ ID NO: 155846 - DNA, 17 bp, Arabidopsis thaliana
tggggtgtagccaagcg

SEQ ID NO: 155847 - DNA, 17 bp, Arabidopsis thaliana
tggggtgtagctcattg

SEQ ID NO: 155848 - DNA, 17 bp, Arabidopsis thaliana
tggggtgtcccaccggg

SEQ ID NO: 155849 - DNA, 17 bp, Arabidopsis thaliana
tggggtgtgctgggtgt

SEQ ID NO: 155850 - DNA, 17 bp, Arabidopsis thaliana
tggggttcatcatttga

SEQ ID NO: 155851 - DNA, 17 bp, Arabidopsis thaliana
tggggttccccacagac

SEQ ID NO: 155852 - DNA, 17 bp, Arabidopsis thaliana
tggggttccccccagcc

SEQ ID NO: 155853 - DNA, 17 bp, Arabidopsis thaliana
tggggttcgagtccgct

SEQ ID NO: 155854 - DNA, 17 bp, Arabidopsis thaliana
tggggttcgatcccccg

SEQ ID NO: 155855 - DNA, 17 bp, Arabidopsis thaliana
tggggttcgggtcccac

SEQ ID NO: 155856 - DNA, 17 bp, Arabidopsis thaliana
tggggttcggttgaagg

SEQ ID NO: 155857 - DNA, 17 bp, Arabidopsis thaliana
tggggttgtgagactgt

SEQ ID NO: 155858 - DNA, 17 bp, Arabidopsis thaliana
tggggtttcggccgggt

SEQ ID NO: 155859 - DNA, 17 bp, Arabidopsis thaliana
tggggtttgtgactcga

SEQ ID NO: 155860 - DNA, 17 bp, Arabidopsis thaliana
tggggttttagattttg

SEQ ID NO: 155861 - DNA, 17 bp, Arabidopsis thaliana
tgggtaaaagtgcattc

SEQ ID NO: 155862 - DNA, 17 bp, Arabidopsis thaliana
tgggtaaagacccaagt

SEQ ID NO: 155863 - DNA, 17 bp, Arabidopsis thaliana
tgggtaaatggaccatt

SEQ ID NO: 155864 - DNA, 17 bp, Arabidopsis thaliana
tgggtaacaggtaattt

SEQ ID NO: 155865 - DNA, 17 bp, Arabidopsis thaliana
tgggtaactaagagcac

SEQ ID NO: 155866 - DNA, 17 bp, Arabidopsis thaliana
tgggtaagatatcatgt

SEQ ID NO: 155867 - DNA, 17 bp, Arabidopsis thaliana
tgggtaagtcctgtggg

SEQ ID NO: 155868 - DNA, 17 bp, Arabidopsis thaliana
tgggtaagtctcaatga

SEQ ID NO: 155869 - DNA, 17 bp, Arabidopsis thaliana
tgggtaatgatctggtg

SEQ ID NO: 155870 - DNA, 17 bp, Arabidopsis thaliana
tgggtaatgccatggcc

SEQ ID NO: 155871 - DNA, 17 bp, Arabidopsis thaliana
tgggtacaaaccaaagg

SEQ ID NO: 155872 - DNA, 17 bp, Arabidopsis thaliana
tgggtacccacgggtag

SEQ ID NO: 155873 - DNA, 17 bp, Arabidopsis thaliana
tgggtactaaacttctc

SEQ ID NO: 155874 - DNA, 17 bp, Arabidopsis thaliana
tgggtactcgacctcat

SEQ ID NO: 155875 - DNA, 17 bp, Arabidopsis thaliana
tgggtagaaaagtttag

SEQ ID NO: 155876 - DNA, 17 bp, Arabidopsis thaliana
tgggtagaccctgtgcc

SEQ ID NO: 155877 - DNA, 17 bp, Arabidopsis thaliana
tgggtagagacacacgt

SEQ ID NO: 155878 - DNA, 17 bp, Arabidopsis thaliana
tgggtagctttgatctt

SEQ ID NO: 155879 - DNA, 17 bp, Arabidopsis thaliana
tgggtaggtgactctgg

SEQ ID NO: 155880 - DNA, 17 bp, Arabidopsis thaliana
tgggtaggttggattga

SEQ ID NO: 155881 - DNA, 17 bp, Arabidopsis thaliana
tgggtatattaggtgcg

SEQ ID NO: 155882 - DNA, 17 bp, Arabidopsis thaliana
tgggtatattatgtgcc

SEQ ID NO: 155883 - DNA, 17 bp, Arabidopsis thaliana
tgggtatattatgtgcg

SEQ ID NO: 155884 - DNA, 17 bp, Arabidopsis thaliana
tgggtatccacgggtat

SEQ ID NO: 155885 - DNA, 17 bp, Arabidopsis thaliana
tgggtatgcgtccttgg

SEQ ID NO: 155886 - DNA, 17 bp, Arabidopsis thaliana
tgggtattcgataagtt

SEQ ID NO: 155887 - DNA, 17 bp, Arabidopsis thaliana
tgggtattgccacatga

SEQ ID NO: 155888 - DNA, 17 bp, Arabidopsis thaliana
tgggtatttttccatct

SEQ ID NO: 155889 - DNA, 17 bp, Arabidopsis thaliana
tgggtcaaaaccggtaa

SEQ ID NO: 155890 - DNA, 17 bp, Arabidopsis thaliana
tgggtcaaaattcatgg

SEQ ID NO: 155891 - DNA, 17 bp, Arabidopsis thaliana
tgggtcaaaggtggttt

SEQ ID NO: 155892 - DNA, 17 bp, Arabidopsis thaliana
tgggtcaaagtccgtaa

SEQ ID NO: 155893 - DNA, 17 bp, Arabidopsis thaliana
tgggtcaaatgagttat

SEQ ID NO: 155894 - DNA, 17 bp, Arabidopsis thaliana
tgggtcaactatggctg

SEQ ID NO: 155895 - DNA, 17 bp, Arabidopsis thaliana
tgggtcaactcaactta

SEQ ID NO: 155896 - DNA, 17 bp, Arabidopsis thaliana
tgggtcaaggtccgtaa

SEQ ID NO: 155897 - DNA, 17 bp, Arabidopsis thaliana
tgggtcaatccaccgtc

SEQ ID NO: 155898 - DNA, 17 bp, Arabidopsis thaliana
tgggtcagagacgggcc

SEQ ID NO: 155899 - DNA, 17 bp, Arabidopsis thaliana
tgggtcagcaaatgcgt

SEQ ID NO: 155900 - DNA, 17 bp, Arabidopsis thaliana
tgggtcaggttcgtttc

SEQ ID NO: 155901 - DNA, 17 bp, Arabidopsis thaliana
tgggtcatcgcgcaggc

SEQ ID NO: 155902 - DNA, 17 bp, Arabidopsis thaliana
tgggtcatcgggcttct

SEQ ID NO: 155903 - DNA, 17 bp, Arabidopsis thaliana
tgggtcattgccgctta

SEQ ID NO: 155904 - DNA, 17 bp, Arabidopsis thaliana
tgggtccagcgacagcg

SEQ ID NO: 155905 - DNA, 17 bp, Arabidopsis thaliana
tgggtccatcataacgg

SEQ ID NO: 155906 - DNA, 17 bp, Arabidopsis thaliana
tgggtcccgcctctgag

SEQ ID NO: 155907 - DNA, 17 bp, Arabidopsis thaliana
tgggtccgccactgctt

SEQ ID NO: 155908 - DNA, 17 bp, Arabidopsis thaliana
tgggtccgtgatttcgc

SEQ ID NO: 155909 - DNA, 17 bp, Arabidopsis thaliana
tgggtccgtggtttcgc

SEQ ID NO: 155910 - DNA, 17 bp, Arabidopsis thaliana
tgggtcctccattggca

SEQ ID NO: 155911 - DNA, 17 bp, Arabidopsis thaliana
tgggtcgaaacccgtaa

SEQ ID NO: 155912 - DNA, 17 bp, Arabidopsis thaliana
tgggtcgagccccacgg

SEQ ID NO: 155913 - DNA, 17 bp, Arabidopsis thaliana
tgggtcgagtttggttt

SEQ ID NO: 155914 - DNA, 17 bp, Arabidopsis thaliana
tgggtcgatcatatgaa

SEQ ID NO: 155915 - DNA, 17 bp, Arabidopsis thaliana
tgggtcgcaggtagctg

SEQ ID NO: 155916 - DNA, 17 bp, Arabidopsis thaliana
tgggtcgcatcctgtag

SEQ ID NO: 155917 - DNA, 17 bp, Arabidopsis thaliana
tgggtcggccggtccgc

SEQ ID NO: 155918 - DNA, 17 bp, Arabidopsis thaliana
tgggtcggctattatcc

SEQ ID NO: 155919 - DNA, 17 bp, Arabidopsis thaliana
tgggtcggctggtccgc

SEQ ID NO: 155920 - DNA, 17 bp, Arabidopsis thaliana
tgggtcggggctggaca

SEQ ID NO: 155921 - DNA, 17 bp, Arabidopsis thaliana
tgggtcgtccggtccgc

SEQ ID NO: 155922 - DNA, 17 bp, Arabidopsis thaliana
tgggtcgttctgccgct

SEQ ID NO: 155923 - DNA, 17 bp, Arabidopsis thaliana
tgggtcgttctgcggct

SEQ ID NO: 155924 - DNA, 17 bp, Arabidopsis thaliana
tgggtcgttgcgattac

SEQ ID NO: 155925 - DNA, 17 bp, Arabidopsis thaliana
tgggtcgttggatggaa

SEQ ID NO: 155926 - DNA, 17 bp, Arabidopsis thaliana
tgggtctaacttgatga

SEQ ID NO: 155927 - DNA, 17 bp, Arabidopsis thaliana
tgggtctacatgctcaa

SEQ ID NO: 155928 - DNA, 17 bp, Arabidopsis thaliana
tgggtctacatgttcaa

SEQ ID NO: 155929 - DNA, 17 bp, Arabidopsis thaliana
tgggtctagaacgatta

SEQ ID NO: 155930 - DNA, 17 bp, Arabidopsis thaliana
tgggtctcactaccagg

SEQ ID NO: 155931 - DNA, 17 bp, Arabidopsis thaliana
tgggtctcttcaggtgt

SEQ ID NO: 155932 - DNA, 17 bp, Arabidopsis thaliana
tgggtctgacattgccg

SEQ ID NO: 155933 - DNA, 17 bp, Arabidopsis thaliana
tgggtctgatcgttcac

SEQ ID NO: 155934 - DNA, 17 bp, Arabidopsis thaliana
tgggtctggaacgatta

SEQ ID NO: 155935 - DNA, 17 bp, Arabidopsis thaliana
tgggtctgtgttgcgat

SEQ ID NO: 155936 - DNA, 17 bp, Arabidopsis thaliana
tgggtcttagctcagtg

SEQ ID NO: 155937 - DNA, 17 bp, Arabidopsis thaliana
tgggtcttcggtgattt

SEQ ID NO: 155938 - DNA, 17 bp, Arabidopsis thaliana
tgggtcttctggtgtcg

SEQ ID NO: 155939 - DNA, 17 bp, Arabidopsis thaliana
tgggtcttcttggggtg

SEQ ID NO: 155940 - DNA, 17 bp, Arabidopsis thaliana
tgggtcttggactccag

SEQ ID NO: 155941 - DNA, 17 bp, Arabidopsis thaliana
tgggtctttgtccaact

SEQ ID NO: 155942 - DNA, 17 bp, Arabidopsis thaliana
tgggtctttttggttgc

SEQ ID NO: 155943 - DNA, 17 bp, Arabidopsis thaliana
tgggtgaacgacatgtg

SEQ ID NO: 155944 - DNA, 17 bp, Arabidopsis thaliana
tgggtgaacgacctgtg

SEQ ID NO: 155945 - DNA, 17 bp, Arabidopsis thaliana
tgggtgaagtgattatg

SEQ ID NO: 155946 - DNA, 17 bp, Arabidopsis thaliana
tgggtgaccgatagcga

SEQ ID NO: 155947 - DNA, 17 bp, Arabidopsis thaliana
tgggtgacctcccggga

SEQ ID NO: 155948 - DNA, 17 bp, Arabidopsis thaliana
tgggtgacctcccgggg

SEQ ID NO: 155949 - DNA, 17 bp, Arabidopsis thaliana
tgggtgaccttccgaga

SEQ ID NO: 155950 - DNA, 17 bp, Arabidopsis thaliana
tgggtgagaactgttat

SEQ ID NO: 155951 - DNA, 17 bp, Arabidopsis thaliana
tgggtgaggacaaatat

SEQ ID NO: 155952 - DNA, 17 bp, Arabidopsis thaliana
tgggtgagtaaggttcg

SEQ ID NO: 155953 - DNA, 17 bp, Arabidopsis thaliana
tgggtgagtctctcggt

SEQ ID NO: 155954 - DNA, 17 bp, Arabidopsis thaliana
tgggtgatccatccaga

SEQ ID NO: 155955 - DNA, 17 bp, Arabidopsis thaliana
tgggtgatcgtggaccg

SEQ ID NO: 155956 - DNA, 17 bp, Arabidopsis thaliana
tgggtgatctatctatg

SEQ ID NO: 155957 - DNA, 17 bp, Arabidopsis thaliana
tgggtgatctatctatt

SEQ ID NO: 155958 - DNA, 17 bp, Arabidopsis thaliana
tgggtgatgatattcaa

SEQ ID NO: 155959 - DNA, 17 bp, Arabidopsis thaliana
tgggtgatggtgaggtt

SEQ ID NO: 155960 - DNA, 17 bp, Arabidopsis thaliana
tgggtgattacgggttt

SEQ ID NO: 155961 - DNA, 17 bp, Arabidopsis thaliana
tgggtgattctggtcca

SEQ ID NO: 155962 - DNA, 17 bp, Arabidopsis thaliana
tgggtgcaccacctagt

SEQ ID NO: 155963 - DNA, 17 bp, Arabidopsis thaliana
tgggtgcagttttggtt

SEQ ID NO: 155964 - DNA, 17 bp, Arabidopsis thaliana
tgggtgcattggtcggc

SEQ ID NO: 155965 - DNA, 17 bp, Arabidopsis thaliana
tgggtgccccacggtgg

SEQ ID NO: 155966 - DNA, 17 bp, Arabidopsis thaliana
tgggtgcccgataccag

SEQ ID NO: 155967 - DNA, 17 bp, Arabidopsis thaliana
tgggtgccctcccggga

SEQ ID NO: 155968 - DNA, 17 bp, Arabidopsis thaliana
tgggtgccgcagccgga

SEQ ID NO: 155969 - DNA, 17 bp, Arabidopsis thaliana
tgggtgccttgagttca

SEQ ID NO: 155970 - DNA, 17 bp, Arabidopsis thaliana
tgggtgcgctggattat

SEQ ID NO: 155971 - DNA, 17 bp, Arabidopsis thaliana
tgggtgcgcttgggagt

SEQ ID NO: 155972 - DNA, 17 bp, Arabidopsis thaliana
tgggtgcgttatttctc

SEQ ID NO: 155973 - DNA, 17 bp, Arabidopsis thaliana
tgggtgctcgaccacat

SEQ ID NO: 155974 - DNA, 17 bp, Arabidopsis thaliana
tgggtgctcgacctcat

SEQ ID NO: 155975 - DNA, 17 bp, Arabidopsis thaliana
tgggtgctcttattcgc

SEQ ID NO: 155976 - DNA, 17 bp, Arabidopsis thaliana
tgggtgctggtgcatgg

SEQ ID NO: 155977 - DNA, 17 bp, Arabidopsis thaliana
tgggtggaccctgtgca

SEQ ID NO: 155978 - DNA, 17 bp, Arabidopsis thaliana
tgggtggaccctgtgcc

SEQ ID NO: 155979 - DNA, 17 bp, Arabidopsis thaliana
tgggtggaccgcatgtg

SEQ ID NO: 155980 - DNA, 17 bp, Arabidopsis thaliana
tgggtggatgactatgg

SEQ ID NO: 155981 - DNA, 17 bp, Arabidopsis thaliana
tgggtggctatgaatgt

SEQ ID NO: 155982 - DNA, 17 bp, Arabidopsis thaliana
tgggtggctccgcgatt

SEQ ID NO: 155983 - DNA, 17 bp, Arabidopsis thaliana
tgggtggctcttagcta

SEQ ID NO: 155984 - DNA, 17 bp, Arabidopsis thaliana
tgggtggctcttagctg

SEQ ID NO: 155985 - DNA, 17 bp, Arabidopsis thaliana
tgggtgggatcgcctag

SEQ ID NO: 155986 - DNA, 17 bp, Arabidopsis thaliana
tgggtgggttagaccgt

SEQ ID NO: 155987 - DNA, 17 bp, Arabidopsis thaliana
tgggtggtcaccatgtg

SEQ ID NO: 155988 - DNA, 17 bp, Arabidopsis thaliana
tgggtggtgcctgggtg

SEQ ID NO: 155989 - DNA, 17 bp, Arabidopsis thaliana
tgggtggtggaagattg

SEQ ID NO: 155990 - DNA, 17 bp, Arabidopsis thaliana
tgggtggtggtgcatgc

SEQ ID NO: 155991 - DNA, 17 bp, Arabidopsis thaliana
tgggtggtggtgcatgg

SEQ ID NO: 155992 - DNA, 17 bp, Arabidopsis thaliana
tgggtggttcgccgccc

SEQ ID NO: 155993 - DNA, 17 bp, Arabidopsis thaliana
tgggtggtttcctttac

SEQ ID NO: 155994 - DNA, 17 bp, Arabidopsis thaliana
tgggtgtattaggtgcg

SEQ ID NO: 155995 - DNA, 17 bp, Arabidopsis thaliana
tgggtgtcacaaatcgt

SEQ ID NO: 155996 - DNA, 17 bp, Arabidopsis thaliana
tgggtgtcccaccgggt

SEQ ID NO: 155997 - DNA, 17 bp, Arabidopsis thaliana
tgggtgtcccactgggt

SEQ ID NO: 155998 - DNA, 17 bp, Arabidopsis thaliana
tgggtgtctaattgtcc

SEQ ID NO: 155999 - DNA, 17 bp, Arabidopsis thaliana
tgggtgtgagtcgtgtg

SEQ ID NO: 156000 - DNA, 17 bp, Arabidopsis thaliana
tgggtgtgtcggcaaaa

SEQ ID NO: 156001 - DNA, 17 bp, Arabidopsis thaliana
tgggtgtgttggcaaac

SEQ ID NO: 156002 - DNA, 17 bp, Arabidopsis thaliana
tgggtgttatttgcggg

SEQ ID NO: 156003 - DNA, 17 bp, Arabidopsis thaliana
tgggtgttccaccgggt

SEQ ID NO: 156004 - DNA, 17 bp, Arabidopsis thaliana
tgggtgttgagcattta

SEQ ID NO: 156005 - DNA, 17 bp, Arabidopsis thaliana
tgggttaacaggtgctt

SEQ ID NO: 156006 - DNA, 17 bp, Arabidopsis thaliana
tgggttaagctggacct

SEQ ID NO: 156007 - DNA, 17 bp, Arabidopsis thaliana
tgggttaagtcccgcaa

SEQ ID NO: 156008 - DNA, 17 bp, Arabidopsis thaliana
tgggttaagttacgcca

SEQ ID NO: 156009 - DNA, 17 bp, Arabidopsis thaliana
tgggttaatgtggggca

SEQ ID NO: 156010 - DNA, 17 bp, Arabidopsis thaliana
tgggttaattccgctcg

SEQ ID NO: 156011 - DNA, 17 bp, Arabidopsis thaliana
tgggttaccaattttga

SEQ ID NO: 156012 - DNA, 17 bp, Arabidopsis thaliana
tgggttacctatttttc

SEQ ID NO: 156013 - DNA, 17 bp, Arabidopsis thaliana
tgggttacctgtgtcgc

SEQ ID NO: 156014 - DNA, 17 bp, Arabidopsis thaliana
tgggttactatgaagtt

SEQ ID NO: 156015 - DNA, 17 bp, Arabidopsis thaliana
tgggttactgtggtcgg

SEQ ID NO: 156016 - DNA, 17 bp, Arabidopsis thaliana
tgggttagacccaactc

SEQ ID NO: 156017 - DNA, 17 bp, Arabidopsis thaliana
tgggttagaccgtcgtg

SEQ ID NO: 156018 - DNA, 17 bp, Arabidopsis thaliana
tgggttagattcgcaac

SEQ ID NO: 156019 - DNA, 17 bp, Arabidopsis thaliana
tgggttagcaaatgcgt

SEQ ID NO: 156020 - DNA, 17 bp, Arabidopsis thaliana
tgggttagcgaactatg

SEQ ID NO: 156021 - DNA, 17 bp, Arabidopsis thaliana
tgggttagctaactatg

SEQ ID NO: 156022 - DNA, 17 bp, Arabidopsis thaliana
tgggttagtcgatccta

SEQ ID NO: 156023 - DNA, 17 bp, Arabidopsis thaliana
tgggttatccattttga

SEQ ID NO: 156024 - DNA, 17 bp, Arabidopsis thaliana
tgggttatccattttgt

SEQ ID NO: 156025 - DNA, 17 bp, Arabidopsis thaliana
tgggttatcgggtcaac

SEQ ID NO: 156026 - DNA, 17 bp, Arabidopsis thaliana
tgggttatttgtccgtg

SEQ ID NO: 156027 - DNA, 17 bp, Arabidopsis thaliana
tgggttcaaatcccaca

SEQ ID NO: 156028 - DNA, 17 bp, Arabidopsis thaliana
tgggttcaaatcccact

SEQ ID NO: 156029 - DNA, 17 bp, Arabidopsis thaliana
tgggttcaaattttcta

SEQ ID NO: 156030 - DNA, 17 bp, Arabidopsis thaliana
tgggttcacatcccaca

SEQ ID NO: 156031 - DNA, 17 bp, Arabidopsis thaliana
tgggttcagatcccaca

SEQ ID NO: 156032 - DNA, 17 bp, Arabidopsis thaliana
tgggttcagatcccact

SEQ ID NO: 156033 - DNA, 17 bp, Arabidopsis thaliana
tgggttcagattcgagt

SEQ ID NO: 156034 - DNA, 17 bp, Arabidopsis thaliana
tgggttcaggtcggtct

SEQ ID NO: 156035 - DNA, 17 bp, Arabidopsis thaliana
tgggttcatacccccct

SEQ ID NO: 156036 - DNA, 17 bp, Arabidopsis thaliana
tgggttcatatcccaca

SEQ ID NO: 156037 - DNA, 17 bp, Arabidopsis thaliana
tgggttcatcccacagc

SEQ ID NO: 156038 - DNA, 17 bp, Arabidopsis thaliana
tgggttcatcccacagt

SEQ ID NO: 156039 - DNA, 17 bp, Arabidopsis thaliana
tgggttcatcccacatc

SEQ ID NO: 156040 - DNA, 17 bp, Arabidopsis thaliana
tgggttcatgccccacg

SEQ ID NO: 156041 - DNA, 17 bp, Arabidopsis thaliana
tgggttccataccatct

SEQ ID NO: 156042 - DNA, 17 bp, Arabidopsis thaliana
tgggttccctcggtagg

SEQ ID NO: 156043 - DNA, 17 bp, Arabidopsis thaliana
tgggttccgcctctcgg

SEQ ID NO: 156044 - DNA, 17 bp, Arabidopsis thaliana
tgggttccggggggaat

SEQ ID NO: 156045 - DNA, 17 bp, Arabidopsis thaliana
tgggttccggggggagt

SEQ ID NO: 156046 - DNA, 17 bp, Arabidopsis thaliana
tgggttcctcccggtag

SEQ ID NO: 156047 - DNA, 17 bp, Arabidopsis thaliana
tgggttccttcccaaaa

SEQ ID NO: 156048 - DNA, 17 bp, Arabidopsis thaliana
tgggttcgaaccccaca

SEQ ID NO: 156049 - DNA, 17 bp, Arabidopsis thaliana
tgggttcgaacccccca

SEQ ID NO: 156050 - DNA, 17 bp, Arabidopsis thaliana
tgggttcgaacccccct

SEQ ID NO: 156051 - DNA, 17 bp, Arabidopsis thaliana
tgggttcgaatcccatt

SEQ ID NO: 156052 - DNA, 17 bp, Arabidopsis thaliana
tgggttcgaattccacc

SEQ ID NO: 156053 - DNA, 17 bp, Arabidopsis thaliana
tgggttcgactcccact

SEQ ID NO: 156054 - DNA, 17 bp, Arabidopsis thaliana
tgggttcgactcccgat

SEQ ID NO: 156055 - DNA, 17 bp, Arabidopsis thaliana
tgggttcgactcccggt

SEQ ID NO: 156056 - DNA, 17 bp, Arabidopsis thaliana
tgggttcgactcctatc

SEQ ID NO: 156057 - DNA, 17 bp, Arabidopsis thaliana
tgggttcgagccccacg

SEQ ID NO: 156058 - DNA, 17 bp, Arabidopsis thaliana
tgggttcgaggcacgtt

SEQ ID NO: 156059 - DNA, 17 bp, Arabidopsis thaliana
tgggttcgaggtacgtt

SEQ ID NO: 156060 - DNA, 17 bp, Arabidopsis thaliana
tgggttcgagtcccacc

SEQ ID NO: 156061 - DNA, 17 bp, Arabidopsis thaliana
tgggttcgagtcccact

SEQ ID NO: 156062 - DNA, 17 bp, Arabidopsis thaliana
tgggttcgagtcccccc

SEQ ID NO: 156063 - DNA, 17 bp, Arabidopsis thaliana
tgggttcgagtcctacc

SEQ ID NO: 156064 - DNA, 17 bp, Arabidopsis thaliana
tgggttcgatccccaca

SEQ ID NO: 156065 - DNA, 17 bp, Arabidopsis thaliana
tgggttcgatcccccag

SEQ ID NO: 156066 - DNA, 17 bp, Arabidopsis thaliana
tgggttcgatccccgca

SEQ ID NO: 156067 - DNA, 17 bp, Arabidopsis thaliana
tgggttcgccccacggt

SEQ ID NO: 156068 - DNA, 17 bp, Arabidopsis thaliana
tgggttcgcgacgttcg

SEQ ID NO: 156069 - DNA, 17 bp, Arabidopsis thaliana
tgggttcggattcggtt

SEQ ID NO: 156070 - DNA, 17 bp, Arabidopsis thaliana
tgggttcggctccaggt

SEQ ID NO: 156071 - DNA, 17 bp, Arabidopsis thaliana
tgggttcggctcccact

SEQ ID NO: 156072 - DNA, 17 bp, Arabidopsis thaliana
tgggttcggctcccggt

SEQ ID NO: 156073 - DNA, 17 bp, Arabidopsis thaliana
tgggttcgggcccaggg

SEQ ID NO: 156074 - DNA, 17 bp, Arabidopsis thaliana
tgggttcgggccccacg

SEQ ID NO: 156075 - DNA, 17 bp, Arabidopsis thaliana
tgggttcgggccccatg

SEQ ID NO: 156076 - DNA, 17 bp, Arabidopsis thaliana
tgggttcgggccccccc

SEQ ID NO: 156077 - DNA, 17 bp, Arabidopsis thaliana
tgggttcgggcccccct

SEQ ID NO: 156078 - DNA, 17 bp, Arabidopsis thaliana
tgggttcgggtcccacc

SEQ ID NO: 156079 - DNA, 17 bp, Arabidopsis thaliana
tgggttcgggtcccacg

SEQ ID NO: 156080 - DNA, 17 bp, Arabidopsis thaliana
tgggttcgggtcccact

SEQ ID NO: 156081 - DNA, 17 bp, Arabidopsis thaliana
tgggttcgggtcccagg

SEQ ID NO: 156082 - DNA, 17 bp, Arabidopsis thaliana
tgggttcggtcccaccg

SEQ ID NO: 156083 - DNA, 17 bp, Arabidopsis thaliana
tgggttcggtcccactg

SEQ ID NO: 156084 - DNA, 17 bp, Arabidopsis thaliana
tgggttcggtccccaca

SEQ ID NO: 156085 - DNA, 17 bp, Arabidopsis thaliana
tgggttcggtccccagt

SEQ ID NO: 156086 - DNA, 17 bp, Arabidopsis thaliana
tgggttcggtccccccc

SEQ ID NO: 156087 - DNA, 17 bp, Arabidopsis thaliana
tgggttcgtcaccgggt

SEQ ID NO: 156088 - DNA, 17 bp, Arabidopsis thaliana
tgggttcgtcccaccga

SEQ ID NO: 156089 - DNA, 17 bp, Arabidopsis thaliana
tgggttcgtcccaccgg

SEQ ID NO: 156090 - DNA, 17 bp, Arabidopsis thaliana
tgggttcgtcccactgg

SEQ ID NO: 156091 - DNA, 17 bp, Arabidopsis thaliana
tgggttcgtccccacag

SEQ ID NO: 156092 - DNA, 17 bp, Arabidopsis thaliana
tgggttcgtctcccggt

SEQ ID NO: 156093 - DNA, 17 bp, Arabidopsis thaliana
tgggttcgtgccccaca

SEQ ID NO: 156094 - DNA, 17 bp, Arabidopsis thaliana
tgggttcgtgccccacg

SEQ ID NO: 156095 - DNA, 17 bp, Arabidopsis thaliana
tgggttcgtgccccact

SEQ ID NO: 156096 - DNA, 17 bp, Arabidopsis thaliana
tgggttcgtgccccccc

SEQ ID NO: 156097 - DNA, 17 bp, Arabidopsis thaliana
tgggttcgtgccccccg

SEQ ID NO: 156098 - DNA, 17 bp, Arabidopsis thaliana
tgggttcgtgtcccacc

SEQ ID NO: 156099 - DNA, 17 bp, Arabidopsis thaliana
tgggttcgtgtcccacg

SEQ ID NO: 156100 - DNA, 17 bp, Arabidopsis thaliana
tgggttcgtgtcccact

SEQ ID NO: 156101 - DNA, 17 bp, Arabidopsis thaliana
tgggttcgtgtcccagt

SEQ ID NO: 156102 - DNA, 17 bp, Arabidopsis thaliana
tgggttcgtgtcccggt

SEQ ID NO: 156103 - DNA, 17 bp, Arabidopsis thaliana
tgggttcgtgtcctacc

SEQ ID NO: 156104 - DNA, 17 bp, Arabidopsis thaliana
tgggttcgttccccaca

SEQ ID NO: 156105 - DNA, 17 bp, Arabidopsis thaliana
tgggttcgttccccagc

SEQ ID NO: 156106 - DNA, 17 bp, Arabidopsis thaliana
tgggttcgttccccagt

SEQ ID NO: 156107 - DNA, 17 bp, Arabidopsis thaliana
tgggttcgttcccccca

SEQ ID NO: 156108 - DNA, 17 bp, Arabidopsis thaliana
tgggttcgtttcccaca

SEQ ID NO: 156109 - DNA, 17 bp, Arabidopsis thaliana
tgggttctcaggtcacc

SEQ ID NO: 156110 - DNA, 17 bp, Arabidopsis thaliana
tgggttctccccacaga

SEQ ID NO: 156111 - DNA, 17 bp, Arabidopsis thaliana
tgggttctcccggtagg

SEQ ID NO: 156112 - DNA, 17 bp, Arabidopsis thaliana
tgggttctgaagcagta

SEQ ID NO: 156113 - DNA, 17 bp, Arabidopsis thaliana
tgggttctgccccacgg

SEQ ID NO: 156114 - DNA, 17 bp, Arabidopsis thaliana
tgggttctgcctattaa

SEQ ID NO: 156115 - DNA, 17 bp, Arabidopsis thaliana
tgggttcttctacgtgt

SEQ ID NO: 156116 - DNA, 17 bp, Arabidopsis thaliana
tgggttgaaccagacta

SEQ ID NO: 156117 - DNA, 17 bp, Arabidopsis thaliana
tgggttgacaggacgtt

SEQ ID NO: 156118 - DNA, 17 bp, Arabidopsis thaliana
tgggttgacccaactca

SEQ ID NO: 156119 - DNA, 17 bp, Arabidopsis thaliana
tgggttgacccagctca

SEQ ID NO: 156120 - DNA, 17 bp, Arabidopsis thaliana
tgggttgactcccggta

SEQ ID NO: 156121 - DNA, 17 bp, Arabidopsis thaliana
tgggttgactggtgagt

SEQ ID NO: 156122 - DNA, 17 bp, Arabidopsis thaliana
tgggttgagatatgtct

SEQ ID NO: 156123 - DNA, 17 bp, Arabidopsis thaliana
tgggttgagatctgctg

SEQ ID NO: 156124 - DNA, 17 bp, Arabidopsis thaliana
tgggttgaggaatttag

SEQ ID NO: 156125 - DNA, 17 bp, Arabidopsis thaliana
tgggttgagttgaggtg

SEQ ID NO: 156126 - DNA, 17 bp, Arabidopsis thaliana
tgggttgataagaattt

SEQ ID NO: 156127 - DNA, 17 bp, Arabidopsis thaliana
tgggttgatccccagtg

SEQ ID NO: 156128 - DNA, 17 bp, Arabidopsis thaliana
tgggttgcatggcgaaa

SEQ ID NO: 156129 - DNA, 17 bp, Arabidopsis thaliana
tgggttgccaagattct

SEQ ID NO: 156130 - DNA, 17 bp, Arabidopsis thaliana
tgggttgccaagattgt

SEQ ID NO: 156131 - DNA, 17 bp, Arabidopsis thaliana
tgggttgccaaggttga

SEQ ID NO: 156132 - DNA, 17 bp, Arabidopsis thaliana
tgggttgccaaggttgt

SEQ ID NO: 156133 - DNA, 17 bp, Arabidopsis thaliana
tgggttgccaatgttgt

SEQ ID NO: 156134 - DNA, 17 bp, Arabidopsis thaliana
tgggttgcccaattcta

SEQ ID NO: 156135 - DNA, 17 bp, Arabidopsis thaliana
tgggttgcctgtgtcgc

SEQ ID NO: 156136 - DNA, 17 bp, Arabidopsis thaliana
tgggttgcttaactcct

SEQ ID NO: 156137 - DNA, 17 bp, Arabidopsis thaliana
tgggttgcttgactcct

SEQ ID NO: 156138 - DNA, 17 bp, Arabidopsis thaliana
tgggttgctttaatcag

SEQ ID NO: 156139 - DNA, 17 bp, Arabidopsis thaliana
tgggttggagtagtttc

SEQ ID NO: 156140 - DNA, 17 bp, Arabidopsis thaliana
tgggttggagtagtttt

SEQ ID NO: 156141 - DNA, 17 bp, Arabidopsis thaliana
tgggttggctcgctcgg

SEQ ID NO: 156142 - DNA, 17 bp, Arabidopsis thaliana
tgggttgtcgtttcctg

SEQ ID NO: 156143 - DNA, 17 bp, Arabidopsis thaliana
tgggttgtgtcgctaga

SEQ ID NO: 156144 - DNA, 17 bp, Arabidopsis thaliana
tgggttgtgtgatgata

SEQ ID NO: 156145 - DNA, 17 bp, Arabidopsis thaliana
tgggtttaccagtcacg

SEQ ID NO: 156146 - DNA, 17 bp, Arabidopsis thaliana
tgggtttacttgtggtt

SEQ ID NO: 156147 - DNA, 17 bp, Arabidopsis thaliana
tgggtttagaccgtcgt

SEQ ID NO: 156148 - DNA, 17 bp, Arabidopsis thaliana
tgggtttagatacactc

SEQ ID NO: 156149 - DNA, 17 bp, Arabidopsis thaliana
tgggtttagatcccaca

SEQ ID NO: 156150 - DNA, 17 bp, Arabidopsis thaliana
tgggtttaggtagggct

SEQ ID NO: 156151 - DNA, 17 bp, Arabidopsis thaliana
tgggtttagtcggttta

SEQ ID NO: 156152 - DNA, 17 bp, Arabidopsis thaliana
tgggtttagtttatggg

SEQ ID NO: 156153 - DNA, 17 bp, Arabidopsis thaliana
tgggtttatgcttgttt

SEQ ID NO: 156154 - DNA, 17 bp, Arabidopsis thaliana
tgggtttcagtcaaact

SEQ ID NO: 156155 - DNA, 17 bp, Arabidopsis thaliana
tgggtttcccggctggt

SEQ ID NO: 156156 - DNA, 17 bp, Arabidopsis thaliana
tgggtttcgagtttcag

SEQ ID NO: 156157 - DNA, 17 bp, Arabidopsis thaliana
tgggtttcggcgaattt

SEQ ID NO: 156158 - DNA, 17 bp, Arabidopsis thaliana
tgggtttctcatggatg

SEQ ID NO: 156159 - DNA, 17 bp, Arabidopsis thaliana
tgggtttctccagtgca

SEQ ID NO: 156160 - DNA, 17 bp, Arabidopsis thaliana
tgggtttctccagttca

SEQ ID NO: 156161 - DNA, 17 bp, Arabidopsis thaliana
tgggtttctgcgaaaag

SEQ ID NO: 156162 - DNA, 17 bp, Arabidopsis thaliana
tgggtttctttgtgtgg

SEQ ID NO: 156163 - DNA, 17 bp, Arabidopsis thaliana
tgggtttgaccgtatgg

SEQ ID NO: 156164 - DNA, 17 bp, Arabidopsis thaliana
tgggtttgagacacgtt

SEQ ID NO: 156165 - DNA, 17 bp, Arabidopsis thaliana
tgggtttgagatcacca

SEQ ID NO: 156166 - DNA, 17 bp, Arabidopsis thaliana
tgggtttgatactaata

SEQ ID NO: 156167 - DNA, 17 bp, Arabidopsis thaliana
tgggtttgccagacatg

SEQ ID NO: 156168 - DNA, 17 bp, Arabidopsis thaliana
tgggtttgctcatttta

SEQ ID NO: 156169 - DNA, 17 bp, Arabidopsis thaliana
tgggtttgctcattttc

SEQ ID NO: 156170 - DNA, 17 bp, Arabidopsis thaliana
tgggtttggcaggacgt

SEQ ID NO: 156171 - DNA, 17 bp, Arabidopsis thaliana
tgggtttggcgggacgg

SEQ ID NO: 156172 - DNA, 17 bp, Arabidopsis thaliana
tgggtttggcgggaggg

SEQ ID NO: 156173 - DNA, 17 bp, Arabidopsis thaliana
tgggtttgggccttgtg

SEQ ID NO: 156174 - DNA, 17 bp, Arabidopsis thaliana
tgggtttgttcgatttt

SEQ ID NO: 156175 - DNA, 17 bp, Arabidopsis thaliana
tgggtttgttgactcag

SEQ ID NO: 156176 - DNA, 17 bp, Arabidopsis thaliana
tgggttttatgttccgg

SEQ ID NO: 156177 - DNA, 17 bp, Arabidopsis thaliana
tgggttttccagaatgc

SEQ ID NO: 156178 - DNA, 17 bp, Arabidopsis thaliana
tgggttttgatcagtcg

SEQ ID NO: 156179 - DNA, 17 bp, Arabidopsis thaliana
tgggttttgcgggacgg

SEQ ID NO: 156180 - DNA, 17 bp, Arabidopsis thaliana
tgggttttggataccac

SEQ ID NO: 156181 - DNA, 17 bp, Arabidopsis thaliana
tgggttttggatctcta

SEQ ID NO: 156182 - DNA, 17 bp, Arabidopsis thaliana
tgggttttgggatcata

SEQ ID NO: 156183 - DNA, 17 bp, Arabidopsis thaliana
tgggttttgtatgcacg

SEQ ID NO: 156184 - DNA, 17 bp, Arabidopsis thaliana
tgggtttttcagagttt

SEQ ID NO: 156185 - DNA, 17 bp, Arabidopsis thaliana
tgggtttttgcaggacg

SEQ ID NO: 156186 - DNA, 17 bp, Arabidopsis thaliana
tgggtttttggcctggt

SEQ ID NO: 156187 - DNA, 17 bp, Arabidopsis thaliana
tgggtttttggtaggca

SEQ ID NO: 156188 - DNA, 17 bp, Arabidopsis thaliana
tgggttttttccagttg

SEQ ID NO: 156189 - DNA, 17 bp, Arabidopsis thaliana
tgggttttttgtgggcg

SEQ ID NO: 156190 - DNA, 17 bp, Arabidopsis thaliana
tggtaaaactatccgtt

SEQ ID NO: 156191 - DNA, 17 bp, Arabidopsis thaliana
tggtaaaacttgtgtac

SEQ ID NO: 156192 - DNA, 17 bp, Arabidopsis thaliana
tggtaaaatcacgcgaa

SEQ ID NO: 156193 - DNA, 17 bp, Arabidopsis thaliana
tggtaaacatgcgggtg

SEQ ID NO: 156194 - DNA, 17 bp, Arabidopsis thaliana
tggtaaaccaacaaacg

SEQ ID NO: 156195 - DNA, 17 bp, Arabidopsis thaliana
tggtaaaccagcaggtg

SEQ ID NO: 156196 - DNA, 17 bp, Arabidopsis thaliana
tggtaaaccagcggatg

SEQ ID NO: 156197 - DNA, 17 bp, Arabidopsis thaliana
tggtaaaccagcgggtg

SEQ ID NO: 156198 - DNA, 17 bp, Arabidopsis thaliana
tggtaaacgaggactct

SEQ ID NO: 156199 - DNA, 17 bp, Arabidopsis thaliana
tggtaaacgggtcgggt

SEQ ID NO: 156200 - DNA, 17 bp, Arabidopsis thaliana
tggtaaagacctttggc

SEQ ID NO: 156201 - DNA, 17 bp, Arabidopsis thaliana
tggtaaaggaacctcga

SEQ ID NO: 156202 - DNA, 17 bp, Arabidopsis thaliana
tggtaaatcagcgagtg

SEQ ID NO: 156203 - DNA, 17 bp, Arabidopsis thaliana
tggtaaatgaagtaatg

SEQ ID NO: 156204 - DNA, 17 bp, Arabidopsis thaliana
tggtaaatgaatcgcac

SEQ ID NO: 156205 - DNA, 17 bp, Arabidopsis thaliana
tggtaaatgggatggag

SEQ ID NO: 156206 - DNA, 17 bp, Arabidopsis thaliana
tggtaacacagatttcg

SEQ ID NO: 156207 - DNA, 17 bp, Arabidopsis thaliana
tggtaacgatgaaggtg

SEQ ID NO: 156208 - DNA, 17 bp, Arabidopsis thaliana
tggtaactactactcgg

SEQ ID NO: 156209 - DNA, 17 bp, Arabidopsis thaliana
tggtaactgtgttttgc

SEQ ID NO: 156210 - DNA, 17 bp, Arabidopsis thaliana
tggtaacttcatggacc

SEQ ID NO: 156211 - DNA, 17 bp, Arabidopsis thaliana
tggtaagacggatttgg

SEQ ID NO: 156212 - DNA, 17 bp, Arabidopsis thaliana
tggtaagcagaactggc

SEQ ID NO: 156213 - DNA, 17 bp, Arabidopsis thaliana
tggtaagctcgtgttct

SEQ ID NO: 156214 - DNA, 17 bp, Arabidopsis thaliana
tggtaaggcgggggact

SEQ ID NO: 156215 - DNA, 17 bp, Arabidopsis thaliana
tggtaagttagccaagg

SEQ ID NO: 156216 - DNA, 17 bp, Arabidopsis thaliana
tggtaatcagaaatgca

SEQ ID NO: 156217 - DNA, 17 bp, Arabidopsis thaliana
tggtaatccatcgctca

SEQ ID NO: 156218 - DNA, 17 bp, Arabidopsis thaliana
tggtaatcgcaggtcaa

SEQ ID NO: 156219 - DNA, 17 bp, Arabidopsis thaliana
tggtaatcttcagggcc

SEQ ID NO: 156220 - DNA, 17 bp, Arabidopsis thaliana
tggtaatgattgcttga

SEQ ID NO: 156221 - DNA, 17 bp, Arabidopsis thaliana
tggtaatgtcttagcca

SEQ ID NO: 156222 - DNA, 17 bp, Arabidopsis thaliana
tggtaatttcatttgtc

SEQ ID NO: 156223 - DNA, 17 bp, Arabidopsis thaliana
tggtaatttcatttgtt

SEQ ID NO: 156224 - DNA, 17 bp, Arabidopsis thaliana
tggtacacatctcttgt

SEQ ID NO: 156225 - DNA, 17 bp, Arabidopsis thaliana
tggtacaccgcgaagac

SEQ ID NO: 156226 - DNA, 17 bp, Arabidopsis thaliana
tggtacactcgaccagt

SEQ ID NO: 156227 - DNA, 17 bp, Arabidopsis thaliana
tggtacaggtctagatt

SEQ ID NO: 156228 - DNA, 17 bp, Arabidopsis thaliana
tggtacaggtgccgaac

SEQ ID NO: 156229 - DNA, 17 bp, Arabidopsis thaliana
tggtaccaagatgtact

SEQ ID NO: 156230 - DNA, 17 bp, Arabidopsis thaliana
tggtaccgattctgcaa

SEQ ID NO: 156231 - DNA, 17 bp, Arabidopsis thaliana
tggtaccggttgttagc

SEQ ID NO: 156232 - DNA, 17 bp, Arabidopsis thaliana
tggtacgaaaaagattg

SEQ ID NO: 156233 - DNA, 17 bp, Arabidopsis thaliana
tggtacgactttgtttg

SEQ ID NO: 156234 - DNA, 17 bp, Arabidopsis thaliana
tggtacgctgcggtttt

SEQ ID NO: 156235 - DNA, 17 bp, Arabidopsis thaliana
tggtacggacaagggga

SEQ ID NO: 156236 - DNA, 17 bp, Arabidopsis thaliana
tggtacgggtttggttc

SEQ ID NO: 156237 - DNA, 17 bp, Arabidopsis thaliana
tggtacggtggcggcct

SEQ ID NO: 156238 - DNA, 17 bp, Arabidopsis thaliana
tggtactaagccgcata

SEQ ID NO: 156239 - DNA, 17 bp, Arabidopsis thaliana
tggtactacttctcgac

SEQ ID NO: 156240 - DNA, 17 bp, Arabidopsis thaliana
tggtactagtcccgagg

SEQ ID NO: 156241 - DNA, 17 bp, Arabidopsis thaliana
tggtactatcgcacccg

SEQ ID NO: 156242 - DNA, 17 bp, Arabidopsis thaliana
tggtactcaagctgcaa

SEQ ID NO: 156243 - DNA, 17 bp, Arabidopsis thaliana
tggtactcgctatgtcc

SEQ ID NO: 156244 - DNA, 17 bp, Arabidopsis thaliana
tggtactgaccagggtt

SEQ ID NO: 156245 - DNA, 17 bp, Arabidopsis thaliana
tggtactgttaaggccg

SEQ ID NO: 156246 - DNA, 17 bp, Arabidopsis thaliana
tggtagaccgctcggaa

SEQ ID NO: 156247 - DNA, 17 bp, Arabidopsis thaliana
tggtagacgctacggac

SEQ ID NO: 156248 - DNA, 17 bp, Arabidopsis thaliana
tggtagagtgaatgaac

SEQ ID NO: 156249 - DNA, 17 bp, Arabidopsis thaliana
tggtagccaaggatgac

SEQ ID NO: 156250 - DNA, 17 bp, Arabidopsis thaliana
tggtagccaggggccaa

SEQ ID NO: 156251 - DNA, 17 bp, Arabidopsis thaliana
tggtagcggggcgagtt

SEQ ID NO: 156252 - DNA, 17 bp, Arabidopsis thaliana
tggtagcggttcttagc

SEQ ID NO: 156253 - DNA, 17 bp, Arabidopsis thaliana
tggtagcggttgttagc

SEQ ID NO: 156254 - DNA, 17 bp, Arabidopsis thaliana
tggtagcgttattccca

SEQ ID NO: 156255 - DNA, 17 bp, Arabidopsis thaliana
tggtagctgaggcgctt

SEQ ID NO: 156256 - DNA, 17 bp, Arabidopsis thaliana
tggtaggacggatttgg

SEQ ID NO: 156257 - DNA, 17 bp, Arabidopsis thaliana
tggtaggacgggtttgg

SEQ ID NO: 156258 - DNA, 17 bp, Arabidopsis thaliana
tggtaggacgtgtcggc

SEQ ID NO: 156259 - DNA, 17 bp, Arabidopsis thaliana
tggtaggattacgggct

SEQ ID NO: 156260 - DNA, 17 bp, Arabidopsis thaliana
tggtaggcagtacttag

SEQ ID NO: 156261 - DNA, 17 bp, Arabidopsis thaliana
tggtaggcgtccaccac

SEQ ID NO: 156262 - DNA, 17 bp, Arabidopsis thaliana
tggtaggtgaacctgcg

SEQ ID NO: 156263 - DNA, 17 bp, Arabidopsis thaliana
tggtaggtgcggctgga

SEQ ID NO: 156264 - DNA, 17 bp, Arabidopsis thaliana
tggtagtcagaaatgca

SEQ ID NO: 156265 - DNA, 17 bp, Arabidopsis thaliana
tggtagtctctcaagag

SEQ ID NO: 156266 - DNA, 17 bp, Arabidopsis thaliana
tggtagttcgaccgcga

SEQ ID NO: 156267 - DNA, 17 bp, Arabidopsis thaliana
tggtatatctctcgcgt

SEQ ID NO: 156268 - DNA, 17 bp, Arabidopsis thaliana
tggtatcagagcacaag

SEQ ID NO: 156269 - DNA, 17 bp, Arabidopsis thaliana
tggtatcagagcgatta

SEQ ID NO: 156270 - DNA, 17 bp, Arabidopsis thaliana
tggtatcaggagcacta

SEQ ID NO: 156271 - DNA, 17 bp, Arabidopsis thaliana
tggtatcagttccaaaa

SEQ ID NO: 156272 - DNA, 17 bp, Arabidopsis thaliana
tggtatcctagcctatt

SEQ ID NO: 156273 - DNA, 17 bp, Arabidopsis thaliana
tggtatcggatatcgac

SEQ ID NO: 156274 - DNA, 17 bp, Arabidopsis thaliana
tggtatcgggtgtgaca

SEQ ID NO: 156275 - DNA, 17 bp, Arabidopsis thaliana
tggtatctattgtgagt

SEQ ID NO: 156276 - DNA, 17 bp, Arabidopsis thaliana
tggtatctccaaggatg

SEQ ID NO: 156277 - DNA, 17 bp, Arabidopsis thaliana
tggtatctgatggcgtg

SEQ ID NO: 156278 - DNA, 17 bp, Arabidopsis thaliana
tggtatctgtaactaca

SEQ ID NO: 156279 - DNA, 17 bp, Arabidopsis thaliana
tggtatcttggtgccgc

SEQ ID NO: 156280 - DNA, 17 bp, Arabidopsis thaliana
tggtatgattctcgctt

SEQ ID NO: 156281 - DNA, 17 bp, Arabidopsis thaliana
tggtatgcattggtcgg

SEQ ID NO: 156282 - DNA, 17 bp, Arabidopsis thaliana
tggtatgcgttcttgag

SEQ ID NO: 156283 - DNA, 17 bp, Arabidopsis thaliana
tggtatggcgtcagaca

SEQ ID NO: 156284 - DNA, 17 bp, Arabidopsis thaliana
tggtatgggaggagttg

SEQ ID NO: 156285 - DNA, 17 bp, Arabidopsis thaliana
tggtatgggctcctatc

SEQ ID NO: 156286 - DNA, 17 bp, Arabidopsis thaliana
tggtatggttcacttgg

SEQ ID NO: 156287 - DNA, 17 bp, Arabidopsis thaliana
tggtatgtgatggatcg

SEQ ID NO: 156288 - DNA, 17 bp, Arabidopsis thaliana
tggtattaatggcttgt

SEQ ID NO: 156289 - DNA, 17 bp, Arabidopsis thaliana
tggtattagagccaggt

SEQ ID NO: 156290 - DNA, 17 bp, Arabidopsis thaliana
tggtattatcaacggct

SEQ ID NO: 156291 - DNA, 17 bp, Arabidopsis thaliana
tggtattatggcttcga

SEQ ID NO: 156292 - DNA, 17 bp, Arabidopsis thaliana
tggtattgagtcggcag

SEQ ID NO: 156293 - DNA, 17 bp, Arabidopsis thaliana
tggtattgctaccgcac

SEQ ID NO: 156294 - DNA, 17 bp, Arabidopsis thaliana
tggtcaaacaaaggggt

SEQ ID NO: 156295 - DNA, 17 bp, Arabidopsis thaliana
tggtcaaacatgctggg

SEQ ID NO: 156296 - DNA, 17 bp, Arabidopsis thaliana
tggtcaaactgtgtcac

SEQ ID NO: 156297 - DNA, 17 bp, Arabidopsis thaliana
tggtcaaaggagcctgg

SEQ ID NO: 156298 - DNA, 17 bp, Arabidopsis thaliana
tggtcaaagtttggtgg

SEQ ID NO: 156299 - DNA, 17 bp, Arabidopsis thaliana
tggtcaaatcgattgga

SEQ ID NO: 156300 - DNA, 17 bp, Arabidopsis thaliana
tggtcaacatcgctcaa

SEQ ID NO: 156301 - DNA, 17 bp, Arabidopsis thaliana
tggtcaacatcggtcaa

SEQ ID NO: 156302 - DNA, 17 bp, Arabidopsis thaliana
tggtcaaccatgcagtt

SEQ ID NO: 156303 - DNA, 17 bp, Arabidopsis thaliana
tggtcaacgggtgtggc

SEQ ID NO: 156304 - DNA, 17 bp, Arabidopsis thaliana
tggtcaactaatagcgg

SEQ ID NO: 156305 - DNA, 17 bp, Arabidopsis thaliana
tggtcaactgaagctga

SEQ ID NO: 156306 - DNA, 17 bp, Arabidopsis thaliana
tggtcaacttgcatata

SEQ ID NO: 156307 - DNA, 17 bp, Arabidopsis thaliana
tggtcaagatgtatcac

SEQ ID NO: 156308 - DNA, 17 bp, Arabidopsis thaliana
tggtcaagcccatatta

SEQ ID NO: 156309 - DNA, 17 bp, Arabidopsis thaliana
tggtcaatgctgatcaa

SEQ ID NO: 156310 - DNA, 17 bp, Arabidopsis thaliana
tggtcaattctacaaat

SEQ ID NO: 156311 - DNA, 17 bp, Arabidopsis thaliana
tggtcacaacaatattc

SEQ ID NO: 156312 - DNA, 17 bp, Arabidopsis thaliana
tggtcacacagctcggc

SEQ ID NO: 156313 - DNA, 17 bp, Arabidopsis thaliana
tggtcacagccttcagt

SEQ ID NO: 156314 - DNA, 17 bp, Arabidopsis thaliana
tggtcaccggagtgcga

SEQ ID NO: 156315 - DNA, 17 bp, Arabidopsis thaliana
tggtcacctctttcttt

SEQ ID NO: 156316 - DNA, 17 bp, Arabidopsis thaliana
tggtcacgatctcgtca

SEQ ID NO: 156317 - DNA, 17 bp, Arabidopsis thaliana
tggtcacgccaccatct

SEQ ID NO: 156318 - DNA, 17 bp, Arabidopsis thaliana
tggtcactggacgcaat

SEQ ID NO: 156319 - DNA, 17 bp, Arabidopsis thaliana
tggtcacttctccgatg

SEQ ID NO: 156320 - DNA, 17 bp, Arabidopsis thaliana
tggtcagaatgatttgg

SEQ ID NO: 156321 - DNA, 17 bp, Arabidopsis thaliana
tggtcagacgaaatgac

SEQ ID NO: 156322 - DNA, 17 bp, Arabidopsis thaliana
tggtcagatctggttaa

SEQ ID NO: 156323 - DNA, 17 bp, Arabidopsis thaliana
tggtcagcagtagataa

SEQ ID NO: 156324 - DNA, 17 bp, Arabidopsis thaliana
tggtcagcagtagatat

SEQ ID NO: 156325 - DNA, 17 bp, Arabidopsis thaliana
tggtcagccaggttctt

SEQ ID NO: 156326 - DNA, 17 bp, Arabidopsis thaliana
tggtcagccctttgtcg

SEQ ID NO: 156327 - DNA, 17 bp, Arabidopsis thaliana
tggtcagctttctctag

SEQ ID NO: 156328 - DNA, 17 bp, Arabidopsis thaliana
tggtcaggacattggac

SEQ ID NO: 156329 - DNA, 17 bp, Arabidopsis thaliana
tggtcaggatactcggc

SEQ ID NO: 156330 - DNA, 17 bp, Arabidopsis thaliana
tggtcagggcctgttta

SEQ ID NO: 156331 - DNA, 17 bp, Arabidopsis thaliana
tggtcatcaggaggagt

SEQ ID NO: 156332 - DNA, 17 bp, Arabidopsis thaliana
tggtcatcgcgcttggt

SEQ ID NO: 156333 - DNA, 17 bp, Arabidopsis thaliana
tggtcatctccaaagtg

SEQ ID NO: 156334 - DNA, 17 bp, Arabidopsis thaliana
tggtcatctccattggt

SEQ ID NO: 156335 - DNA, 17 bp, Arabidopsis thaliana
tggtcatgagcccaagt

SEQ ID NO: 156336 - DNA, 17 bp, Arabidopsis thaliana
tggtcatgcggtgttcg

SEQ ID NO: 156337 - DNA, 17 bp, Arabidopsis thaliana
tggtcatggaagtcgaa

SEQ ID NO: 156338 - DNA, 17 bp, Arabidopsis thaliana
tggtcatgggttgagaa

SEQ ID NO: 156339 - DNA, 17 bp, Arabidopsis thaliana
tggtcatgtcgatggca

SEQ ID NO: 156340 - DNA, 17 bp, Arabidopsis thaliana
tggtcatgtggttacgt

SEQ ID NO: 156341 - DNA, 17 bp, Arabidopsis thaliana
tggtcattcggttggag

SEQ ID NO: 156342 - DNA, 17 bp, Arabidopsis thaliana
tggtcattcggttgggg

SEQ ID NO: 156343 - DNA, 17 bp, Arabidopsis thaliana
tggtcatttccggcagt

SEQ ID NO: 156344 - DNA, 17 bp, Arabidopsis thaliana
tggtcatttggcgaatt

SEQ ID NO: 156345 - DNA, 17 bp, Arabidopsis thaliana
tggtccaaccacaacaa

SEQ ID NO: 156346 - DNA, 17 bp, Arabidopsis thaliana
tggtccaagacggtgcg

SEQ ID NO: 156347 - DNA, 17 bp, Arabidopsis thaliana
tggtccaagttcagttt

SEQ ID NO: 156348 - DNA, 17 bp, Arabidopsis thaliana
tggtccacgctcagagc

SEQ ID NO: 156349 - DNA, 17 bp, Arabidopsis thaliana
tggtccagctttcacaa

SEQ ID NO: 156350 - DNA, 17 bp, Arabidopsis thaliana
tggtccagtttgcttca

SEQ ID NO: 156351 - DNA, 17 bp, Arabidopsis thaliana
tggtcccaagatggcaa

SEQ ID NO: 156352 - DNA, 17 bp, Arabidopsis thaliana
tggtcccaaggctcgct

SEQ ID NO: 156353 - DNA, 17 bp, Arabidopsis thaliana
tggtcccagaaattaag

SEQ ID NO: 156354 - DNA, 17 bp, Arabidopsis thaliana
tggtcccatgatgtgtg

SEQ ID NO: 156355 - DNA, 17 bp, Arabidopsis thaliana
tggtcccgagggacgga

SEQ ID NO: 156356 - DNA, 17 bp, Arabidopsis thaliana
tggtcccggggtaatca

SEQ ID NO: 156357 - DNA, 17 bp, Arabidopsis thaliana
tggtccctggcgactgt

SEQ ID NO: 156358 - DNA, 17 bp, Arabidopsis thaliana
tggtccctggtgatagt

SEQ ID NO: 156359 - DNA, 17 bp, Arabidopsis thaliana
tggtccgaaaaatgtcc

SEQ ID NO: 156360 - DNA, 17 bp, Arabidopsis thaliana
tggtccgaaagggcgtg

SEQ ID NO: 156361 - DNA, 17 bp, Arabidopsis thaliana
tggtccgacctaaagat

SEQ ID NO: 156362 - DNA, 17 bp, Arabidopsis thaliana
tggtccgactagccagt

SEQ ID NO: 156363 - DNA, 17 bp, Arabidopsis thaliana
tggtccgagaggatgat

SEQ ID NO: 156364 - DNA, 17 bp, Arabidopsis thaliana
tggtccgcagcgattta

SEQ ID NO: 156365 - DNA, 17 bp, Arabidopsis thaliana
tggtccgcatcagttta

SEQ ID NO: 156366 - DNA, 17 bp, Arabidopsis thaliana
tggtccgccagttgact

SEQ ID NO: 156367 - DNA, 17 bp, Arabidopsis thaliana
tggtccgccggataacc

SEQ ID NO: 156368 - DNA, 17 bp, Arabidopsis thaliana
tggtccgcctttggtgt

SEQ ID NO: 156369 - DNA, 17 bp, Arabidopsis thaliana
tggtccgcttgtccctt

SEQ ID NO: 156370 - DNA, 17 bp, Arabidopsis thaliana
tggtccggacattagca

SEQ ID NO: 156371 - DNA, 17 bp, Arabidopsis thaliana
tggtccggaccactgca

SEQ ID NO: 156372 - DNA, 17 bp, Arabidopsis thaliana
tggtccggacggtgaat

SEQ ID NO: 156373 - DNA, 17 bp, Arabidopsis thaliana
tggtccggagattacct

SEQ ID NO: 156374 - DNA, 17 bp, Arabidopsis thaliana
tggtccggctcaagcta

SEQ ID NO: 156375 - DNA, 17 bp, Arabidopsis thaliana
tggtccggtgattatcc

SEQ ID NO: 156376 - DNA, 17 bp, Arabidopsis thaliana
tggtccgtaaattttgt

SEQ ID NO: 156377 - DNA, 17 bp, Arabidopsis thaliana
tggtccgttgcggtttt

SEQ ID NO: 156378 - DNA, 17 bp, Arabidopsis thaliana
tggtccgtttgatcgag

SEQ ID NO: 156379 - DNA, 17 bp, Arabidopsis thaliana
tggtcctaaggctcgct

SEQ ID NO: 156380 - DNA, 17 bp, Arabidopsis thaliana
tggtcctcgatcggttt

SEQ ID NO: 156381 - DNA, 17 bp, Arabidopsis thaliana
tggtcctctaattccta

SEQ ID NO: 156382 - DNA, 17 bp, Arabidopsis thaliana
tggtcctctggagcttg

SEQ ID NO: 156383 - DNA, 17 bp, Arabidopsis thaliana
tggtcctgccattgact

SEQ ID NO: 156384 - DNA, 17 bp, Arabidopsis thaliana
tggtcctggatttgcta

SEQ ID NO: 156385 - DNA, 17 bp, Arabidopsis thaliana
tggtccttcactatgtt

SEQ ID NO: 156386 - DNA, 17 bp, Arabidopsis thaliana
tggtccttcggggagaa

SEQ ID NO: 156387 - DNA, 17 bp, Arabidopsis thaliana
tggtccttggcccaatt

SEQ ID NO: 156388 - DNA, 17 bp, Arabidopsis thaliana
tggtcgacgattcctcc

SEQ ID NO: 156389 - DNA, 17 bp, Arabidopsis thaliana
tggtcgacgattcctcg

SEQ ID NO: 156390 - DNA, 17 bp, Arabidopsis thaliana
tggtcgacgatttaaac

SEQ ID NO: 156391 - DNA, 17 bp, Arabidopsis thaliana
tggtcgacgatttcaac

SEQ ID NO: 156392 - DNA, 17 bp, Arabidopsis thaliana
tggtcgacggatctcta

SEQ ID NO: 156393 - DNA, 17 bp, Arabidopsis thaliana
tggtcgactatttcaac

SEQ ID NO: 156394 - DNA, 17 bp, Arabidopsis thaliana
tggtcgagtaagaggga

SEQ ID NO: 156395 - DNA, 17 bp, Arabidopsis thaliana
tggtcgagtagattgct

SEQ ID NO: 156396 - DNA, 17 bp, Arabidopsis thaliana
tggtcgagtataggctc

SEQ ID NO: 156397 - DNA, 17 bp, Arabidopsis thaliana
tggtcgagtccaaaatc

SEQ ID NO: 156398 - DNA, 17 bp, Arabidopsis thaliana
tggtcgattaagacagc

SEQ ID NO: 156399 - DNA, 17 bp, Arabidopsis thaliana
tggtcgattgcggcttt

SEQ ID NO: 156400 - DNA, 17 bp, Arabidopsis thaliana
tggtcgcaaggctgaaa

SEQ ID NO: 156401 - DNA, 17 bp, Arabidopsis thaliana
tggtcgcacggcggtct

SEQ ID NO: 156402 - DNA, 17 bp, Arabidopsis thaliana
tggtcgcacggctctga

SEQ ID NO: 156403 - DNA, 17 bp, Arabidopsis thaliana
tggtcgcactagctctc

SEQ ID NO: 156404 - DNA, 17 bp, Arabidopsis thaliana
tggtcgcatcctgtaga

SEQ ID NO: 156405 - DNA, 17 bp, Arabidopsis thaliana
tggtcgcgatcttagca

SEQ ID NO: 156406 - DNA, 17 bp, Arabidopsis thaliana
tggtcgctggatccagc

SEQ ID NO: 156407 - DNA, 17 bp, Arabidopsis thaliana
tggtcgctggatctgat

SEQ ID NO: 156408 - DNA, 17 bp, Arabidopsis thaliana
tggtcgctgtcgctggt

SEQ ID NO: 156409 - DNA, 17 bp, Arabidopsis thaliana
tggtcgctgtcgctgtc

SEQ ID NO: 156410 - DNA, 17 bp, Arabidopsis thaliana
tggtcgcttgccccccc

SEQ ID NO: 156411 - DNA, 17 bp, Arabidopsis thaliana
tggtcggaaatggaaag

SEQ ID NO: 156412 - DNA, 17 bp, Arabidopsis thaliana
tggtcggaccaaacaat

SEQ ID NO: 156413 - DNA, 17 bp, Arabidopsis thaliana
tggtcggctcggtttat

SEQ ID NO: 156414 - DNA, 17 bp, Arabidopsis thaliana
tggtcggcttgcccctc

SEQ ID NO: 156415 - DNA, 17 bp, Arabidopsis thaliana
tggtcggcttgtcccct

SEQ ID NO: 156416 - DNA, 17 bp, Arabidopsis thaliana
tggtcggcttgtcccgt

SEQ ID NO: 156417 - DNA, 17 bp, Arabidopsis thaliana
tggtcggcttgtccctc

SEQ ID NO: 156418 - DNA, 17 bp, Arabidopsis thaliana
tggtcggcttgtccctt

SEQ ID NO: 156419 - DNA, 17 bp, Arabidopsis thaliana
tggtcggcttgtccgtt

SEQ ID NO: 156420 - DNA, 17 bp, Arabidopsis thaliana
tggtcggcttgtccttc

SEQ ID NO: 156421 - DNA, 17 bp, Arabidopsis thaliana
tggtcggcttgtccttt

SEQ ID NO: 156422 - DNA, 17 bp, Arabidopsis thaliana
tggtcggcttgtctcgg

SEQ ID NO: 156423 - DNA, 17 bp, Arabidopsis thaliana
tggtcggcttgtcttcg

SEQ ID NO: 156424 - DNA, 17 bp, Arabidopsis thaliana
tggtcggcttgttccgg

SEQ ID NO: 156425 - DNA, 17 bp, Arabidopsis thaliana
tggtcggcttgtttcgg

SEQ ID NO: 156426 - DNA, 17 bp, Arabidopsis thaliana
tggtcggtcgagtaatg

SEQ ID NO: 156427 - DNA, 17 bp, Arabidopsis thaliana
tggtcggttcaattgga

SEQ ID NO: 156428 - DNA, 17 bp, Arabidopsis thaliana
tggtcgtcgcagagatg

SEQ ID NO: 156429 - DNA, 17 bp, Arabidopsis thaliana
tggtcgtgatctactgg

SEQ ID NO: 156430 - DNA, 17 bp, Arabidopsis thaliana
tggtcgtgcaggatgtt

SEQ ID NO: 156431 - DNA, 17 bp, Arabidopsis thaliana
tggtcgtgggttcgggc

SEQ ID NO: 156432 - DNA, 17 bp, Arabidopsis thaliana
tggtcgtgggttcgtgc

SEQ ID NO: 156433 - DNA, 17 bp, Arabidopsis thaliana
tggtcgtgtatcaggtc

SEQ ID NO: 156434 - DNA, 17 bp, Arabidopsis thaliana
tggtcgttggtcgctgt

SEQ ID NO: 156435 - DNA, 17 bp, Arabidopsis thaliana
tggtctaaaaattttct

SEQ ID NO: 156436 - DNA, 17 bp, Arabidopsis thaliana
tggtctaaatagtttct

SEQ ID NO: 156437 - DNA, 17 bp, Arabidopsis thaliana
tggtctaaatcatattt

SEQ ID NO: 156438 - DNA, 17 bp, Arabidopsis thaliana
tggtctaagaagctgat

SEQ ID NO: 156439 - DNA, 17 bp, Arabidopsis thaliana
tggtctaagagcaaccc

SEQ ID NO: 156440 - DNA, 17 bp, Arabidopsis thaliana
tggtctaagcgcgcttg

SEQ ID NO: 156441 - DNA, 17 bp, Arabidopsis thaliana
tggtctaaggcgcctga

SEQ ID NO: 156442 - DNA, 17 bp, Arabidopsis thaliana
tggtctaagtcggatct

SEQ ID NO: 156443 - DNA, 17 bp, Arabidopsis thaliana
tggtctaatagattttt

SEQ ID NO: 156444 - DNA, 17 bp, Arabidopsis thaliana
tggtctaattgatcgca

SEQ ID NO: 156445 - DNA, 17 bp, Arabidopsis thaliana
tggtctaattgggcata

SEQ ID NO: 156446 - DNA, 17 bp, Arabidopsis thaliana
tggtctaatttggattt

SEQ ID NO: 156447 - DNA, 17 bp, Arabidopsis thaliana
tggtctacgaatcctaa

SEQ ID NO: 156448 - DNA, 17 bp, Arabidopsis thaliana
tggtctacgctatcgtt

SEQ ID NO: 156449 - DNA, 17 bp, Arabidopsis thaliana
tggtctacggcaactga

SEQ ID NO: 156450 - DNA, 17 bp, Arabidopsis thaliana
tggtctactcctgctca

SEQ ID NO: 156451 - DNA, 17 bp, Arabidopsis thaliana
tggtctagttacaatcg

SEQ ID NO: 156452 - DNA, 17 bp, Arabidopsis thaliana
tggtctcactctgggca

SEQ ID NO: 156453 - DNA, 17 bp, Arabidopsis thaliana
tggtctccagtcctagg

SEQ ID NO: 156454 - DNA, 17 bp, Arabidopsis thaliana
tggtctcccgtgtgtta

SEQ ID NO: 156455 - DNA, 17 bp, Arabidopsis thaliana
tggtctcgtcattgtac

SEQ ID NO: 156456 - DNA, 17 bp, Arabidopsis thaliana
tggtctctaattggtca

SEQ ID NO: 156457 - DNA, 17 bp, Arabidopsis thaliana
tggtctctcttatgaat

SEQ ID NO: 156458 - DNA, 17 bp, Arabidopsis thaliana
tggtctctgcaacaatg

SEQ ID NO: 156459 - DNA, 17 bp, Arabidopsis thaliana
tggtctgaagctgccag

SEQ ID NO: 156460 - DNA, 17 bp, Arabidopsis thaliana
tggtctgacaccatggc

SEQ ID NO: 156461 - DNA, 17 bp, Arabidopsis thaliana
tggtctgagagtccctt

SEQ ID NO: 156462 - DNA, 17 bp, Arabidopsis thaliana
tggtctgatacctgttg

SEQ ID NO: 156463 - DNA, 17 bp, Arabidopsis thaliana
tggtctgatgtgtctgc

SEQ ID NO: 156464 - DNA, 17 bp, Arabidopsis thaliana
tggtctgcacgcgcctt

SEQ ID NO: 156465 - DNA, 17 bp, Arabidopsis thaliana
tggtctgcagatggtcc

SEQ ID NO: 156466 - DNA, 17 bp, Arabidopsis thaliana
tggtctgcagcacgcac

SEQ ID NO: 156467 - DNA, 17 bp, Arabidopsis thaliana
tggtctgcagcacgcgc

SEQ ID NO: 156468 - DNA, 17 bp, Arabidopsis thaliana
tggtctgcagcagcgcc

SEQ ID NO: 156469 - DNA, 17 bp, Arabidopsis thaliana
tggtctgcagcggttca

SEQ ID NO: 156470 - DNA, 17 bp, Arabidopsis thaliana
tggtctgcagcggttta

SEQ ID NO: 156471 - DNA, 17 bp, Arabidopsis thaliana
tggtctgcagttagtac

SEQ ID NO: 156472 - DNA, 17 bp, Arabidopsis thaliana
tggtctgcctaggatca

SEQ ID NO: 156473 - DNA, 17 bp, Arabidopsis thaliana
tggtctgcggcgatttg

SEQ ID NO: 156474 - DNA, 17 bp, Arabidopsis thaliana
tggtctggacactgagt

SEQ ID NO: 156475 - DNA, 17 bp, Arabidopsis thaliana
tggtctggacccagttc

SEQ ID NO: 156476 - DNA, 17 bp, Arabidopsis thaliana
tggtctggcagtgaagg

SEQ ID NO: 156477 - DNA, 17 bp, Arabidopsis thaliana
tggtctggggaggctta

SEQ ID NO: 156478 - DNA, 17 bp, Arabidopsis thaliana
tggtctgtcagttgact

SEQ ID NO: 156479 - DNA, 17 bp, Arabidopsis thaliana
tggtctgtcctctgcac

SEQ ID NO: 156480 - DNA, 17 bp, Arabidopsis thaliana
tggtctgtgaagtgagt

SEQ ID NO: 156481 - DNA, 17 bp, Arabidopsis thaliana
tggtctgtttcgtgcgc

SEQ ID NO: 156482 - DNA, 17 bp, Arabidopsis thaliana
tggtctgtttgtcctag

SEQ ID NO: 156483 - DNA, 17 bp, Arabidopsis thaliana
tggtcttaaccgatcta

SEQ ID NO: 156484 - DNA, 17 bp, Arabidopsis thaliana
tggtcttaagcaaagag

SEQ ID NO: 156485 - DNA, 17 bp, Arabidopsis thaliana
tggtcttaattggccgg

SEQ ID NO: 156486 - DNA, 17 bp, Arabidopsis thaliana
tggtcttagtcgcatcc

SEQ ID NO: 156487 - DNA, 17 bp, Arabidopsis thaliana
tggtcttatttggacac

SEQ ID NO: 156488 - DNA, 17 bp, Arabidopsis thaliana
tggtcttcaggaaagtc

SEQ ID NO: 156489 - DNA, 17 bp, Arabidopsis thaliana
tggtcttccaagcggtg

SEQ ID NO: 156490 - DNA, 17 bp, Arabidopsis thaliana
tggtcttccaatgttgt

SEQ ID NO: 156491 - DNA, 17 bp, Arabidopsis thaliana
tggtcttccgacttgta

SEQ ID NO: 156492 - DNA, 17 bp, Arabidopsis thaliana
tggtcttcggacttagc

SEQ ID NO: 156493 - DNA, 17 bp, Arabidopsis thaliana
tggtcttctcagaagca

SEQ ID NO: 156494 - DNA, 17 bp, Arabidopsis thaliana
tggtcttctgcttgatg

SEQ ID NO: 156495 - DNA, 17 bp, Arabidopsis thaliana
tggtcttctggttgcac

SEQ ID NO: 156496 - DNA, 17 bp, Arabidopsis thaliana
tggtcttgcgggtctgc

SEQ ID NO: 156497 - DNA, 17 bp, Arabidopsis thaliana
tggtcttgttcaagtga

SEQ ID NO: 156498 - DNA, 17 bp, Arabidopsis thaliana
tggtctttattgggcat

SEQ ID NO: 156499 - DNA, 17 bp, Arabidopsis thaliana
tggtctttccctaccga

SEQ ID NO: 156500 - DNA, 17 bp, Arabidopsis thaliana
tggtctttgaggaagca

SEQ ID NO: 156501 - DNA, 17 bp, Arabidopsis thaliana
tggtctttgggcttgaa

SEQ ID NO: 156502 - DNA, 17 bp, Arabidopsis thaliana
tggtcttttcggatgat

SEQ ID NO: 156503 - DNA, 17 bp, Arabidopsis thaliana
tggtctttttccttttt

SEQ ID NO: 156504 - DNA, 17 bp, Arabidopsis thaliana
tggtgaaaactatttgc

SEQ ID NO: 156505 - DNA, 17 bp, Arabidopsis thaliana
tggtgaaactgatacga

SEQ ID NO: 156506 - DNA, 17 bp, Arabidopsis thaliana
tggtgaaaggagctgct

SEQ ID NO: 156507 - DNA, 17 bp, Arabidopsis thaliana
tggtgaaagtttagaca

SEQ ID NO: 156508 - DNA, 17 bp, Arabidopsis thaliana
tggtgaactaggcagtt

SEQ ID NO: 156509 - DNA, 17 bp, Arabidopsis thaliana
tggtgaactatcctgag

SEQ ID NO: 156510 - DNA, 17 bp, Arabidopsis thaliana
tggtgaactatgcatga

SEQ ID NO: 156511 - DNA, 17 bp, Arabidopsis thaliana
tggtgaactatgcctga

SEQ ID NO: 156512 - DNA, 17 bp, Arabidopsis thaliana
tggtgaactatgcctgc

SEQ ID NO: 156513 - DNA, 17 bp, Arabidopsis thaliana
tggtgaactatgcctta

SEQ ID NO: 156514 - DNA, 17 bp, Arabidopsis thaliana
tggtgaactatgcgtat

SEQ ID NO: 156515 - DNA, 17 bp, Arabidopsis thaliana
tggtgaagcctttgctt

SEQ ID NO: 156516 - DNA, 17 bp, Arabidopsis thaliana
tggtgaagcgcctatca

SEQ ID NO: 156517 - DNA, 17 bp, Arabidopsis thaliana
tggtgaataagccgatt

SEQ ID NO: 156518 - DNA, 17 bp, Arabidopsis thaliana
tggtgaatcagggttcg

SEQ ID NO: 156519 - DNA, 17 bp, Arabidopsis thaliana
tggtgaatcaggttggt

SEQ ID NO: 156520 - DNA, 17 bp, Arabidopsis thaliana
tggtgaatcgatttgta

SEQ ID NO: 156521 - DNA, 17 bp, Arabidopsis thaliana
tggtgaatcgatttgtc

SEQ ID NO: 156522 - DNA, 17 bp, Arabidopsis thaliana
tggtgaatgcaagggcg

SEQ ID NO: 156523 - DNA, 17 bp, Arabidopsis thaliana
tggtgaatggagtgcct

SEQ ID NO: 156524 - DNA, 17 bp, Arabidopsis thaliana
tggtgaattacgggctt

SEQ ID NO: 156525 - DNA, 17 bp, Arabidopsis thaliana
tggtgaattaggtttgc

SEQ ID NO: 156526 - DNA, 17 bp, Arabidopsis thaliana
tggtgaattgattggct

SEQ ID NO: 156527 - DNA, 17 bp, Arabidopsis thaliana
tggtgacaaagcagcgc

SEQ ID NO: 156528 - DNA, 17 bp, Arabidopsis thaliana
tggtgacaacccgaaaa

SEQ ID NO: 156529 - DNA, 17 bp, Arabidopsis thaliana
tggtgacagatcgtagg

SEQ ID NO: 156530 - DNA, 17 bp, Arabidopsis thaliana
tggtgacagcatatttg

SEQ ID NO: 156531 - DNA, 17 bp, Arabidopsis thaliana
tggtgaccaacaaatgt

SEQ ID NO: 156532 - DNA, 17 bp, Arabidopsis thaliana
tggtgaccgactttggc

SEQ ID NO: 156533 - DNA, 17 bp, Arabidopsis thaliana
tggtgacctgattacag

SEQ ID NO: 156534 - DNA, 17 bp, Arabidopsis thaliana
tggtgactatgcggccg

SEQ ID NO: 156535 - DNA, 17 bp, Arabidopsis thaliana
tggtgactctggctcca

SEQ ID NO: 156536 - DNA, 17 bp, Arabidopsis thaliana
tggtgactgagttttgc

SEQ ID NO: 156537 - DNA, 17 bp, Arabidopsis thaliana
tggtgactgtcgctact

SEQ ID NO: 156538 - DNA, 17 bp, Arabidopsis thaliana
tggtgacttaggtgacc

SEQ ID NO: 156539 - DNA, 17 bp, Arabidopsis thaliana
tggtgacttaggttctg

SEQ ID NO: 156540 - DNA, 17 bp, Arabidopsis thaliana
tggtgagactaatgctt

SEQ ID NO: 156541 - DNA, 17 bp, Arabidopsis thaliana
tggtgagatcgacttgg

SEQ ID NO: 156542 - DNA, 17 bp, Arabidopsis thaliana
tggtgagattaagggct

SEQ ID NO: 156543 - DNA, 17 bp, Arabidopsis thaliana
tggtgagattatgtcgg

SEQ ID NO: 156544 - DNA, 17 bp, Arabidopsis thaliana
tggtgagattgatacct

SEQ ID NO: 156545 - DNA, 17 bp, Arabidopsis thaliana
tggtgagcgatttgtcg

SEQ ID NO: 156546 - DNA, 17 bp, Arabidopsis thaliana
tggtgagctgctctctc

SEQ ID NO: 156547 - DNA, 17 bp, Arabidopsis thaliana
tggtgaggttgtgaatt

SEQ ID NO: 156548 - DNA, 17 bp, Arabidopsis thaliana
tggtgagtatgggaatg

SEQ ID NO: 156549 - DNA, 17 bp, Arabidopsis thaliana
tggtgagtcggcgcagt

SEQ ID NO: 156550 - DNA, 17 bp, Arabidopsis thaliana
tggtgatacttcagcta

SEQ ID NO: 156551 - DNA, 17 bp, Arabidopsis thaliana
tggtgatagtcgctgcg

SEQ ID NO: 156552 - DNA, 17 bp, Arabidopsis thaliana
tggtgatattaagggct

SEQ ID NO: 156553 - DNA, 17 bp, Arabidopsis thaliana
tggtgatattcgacttc

SEQ ID NO: 156554 - DNA, 17 bp, Arabidopsis thaliana
tggtgatcccggctgac

SEQ ID NO: 156555 - DNA, 17 bp, Arabidopsis thaliana
tggtgatcgaacattga

SEQ ID NO: 156556 - DNA, 17 bp, Arabidopsis thaliana
tggtgatcgcaggagat

SEQ ID NO: 156557 - DNA, 17 bp, Arabidopsis thaliana
tggtgatctgtgctcgc

SEQ ID NO: 156558 - DNA, 17 bp, Arabidopsis thaliana
tggtgatctttccgttg

SEQ ID NO: 156559 - DNA, 17 bp, Arabidopsis thaliana
tggtgatggtgacatgt

SEQ ID NO: 156560 - DNA, 17 bp, Arabidopsis thaliana
tggtgatggtgatgttg

SEQ ID NO: 156561 - DNA, 17 bp, Arabidopsis thaliana
tggtgatgtcatgactt

SEQ ID NO: 156562 - DNA, 17 bp, Arabidopsis thaliana
tggtgatgtcgattccg

SEQ ID NO: 156563 - DNA, 17 bp, Arabidopsis thaliana
tggtgatgtcgattgcg

SEQ ID NO: 156564 - DNA, 17 bp, Arabidopsis thaliana
tggtgatgtcgctggga

SEQ ID NO: 156565 - DNA, 17 bp, Arabidopsis thaliana
tggtgatgtgaatcgca

SEQ ID NO: 156566 - DNA, 17 bp, Arabidopsis thaliana
tggtgattcggcaggag

SEQ ID NO: 156567 - DNA, 17 bp, Arabidopsis thaliana
tggtgatttcccggctg

SEQ ID NO: 156568 - DNA, 17 bp, Arabidopsis thaliana
tggtgattttggtcgga

SEQ ID NO: 156569 - DNA, 17 bp, Arabidopsis thaliana
tggtgcaccgccgaccg

SEQ ID NO: 156570 - DNA, 17 bp, Arabidopsis thaliana
tggtgcacttgtcaatg

SEQ ID NO: 156571 - DNA, 17 bp, Arabidopsis thaliana
tggtgcagagattctgt

SEQ ID NO: 156572 - DNA, 17 bp, Arabidopsis thaliana
tggtgcatggccgttca

SEQ ID NO: 156573 - DNA, 17 bp, Arabidopsis thaliana
tggtgcatggccgttct

SEQ ID NO: 156574 - DNA, 17 bp, Arabidopsis thaliana
tggtgcatggccgtttt

SEQ ID NO: 156575 - DNA, 17 bp, Arabidopsis thaliana
tggtgcattggtcggct

SEQ ID NO: 156576 - DNA, 17 bp, Arabidopsis thaliana
tggtgcattgtgattta

SEQ ID NO: 156577 - DNA, 17 bp, Arabidopsis thaliana
tggtgccaaggttcaaa

SEQ ID NO: 156578 - DNA, 17 bp, Arabidopsis thaliana
tggtgccaatcgctaac

SEQ ID NO: 156579 - DNA, 17 bp, Arabidopsis thaliana
tggtgccagcagccgcg

SEQ ID NO: 156580 - DNA, 17 bp, Arabidopsis thaliana
tggtgccagtcgctaac

SEQ ID NO: 156581 - DNA, 17 bp, Arabidopsis thaliana
tggtgccattgatcgct

SEQ ID NO: 156582 - DNA, 17 bp, Arabidopsis thaliana
tggtgccgacaaccaag

SEQ ID NO: 156583 - DNA, 17 bp, Arabidopsis thaliana
tggtgccgactatgaca

SEQ ID NO: 156584 - DNA, 17 bp, Arabidopsis thaliana
tggtgccgatttgattg

SEQ ID NO: 156585 - DNA, 17 bp, Arabidopsis thaliana
tggtgcctgggtggtta

SEQ ID NO: 156586 - DNA, 17 bp, Arabidopsis thaliana
tggtgccttccatctta

SEQ ID NO: 156587 - DNA, 17 bp, Arabidopsis thaliana
tggtgcgagaggtcccg

SEQ ID NO: 156588 - DNA, 17 bp, Arabidopsis thaliana
tggtgcggacgcttcta

SEQ ID NO: 156589 - DNA, 17 bp, Arabidopsis thaliana
tggtgcggctcatcatc

SEQ ID NO: 156590 - DNA, 17 bp, Arabidopsis thaliana
tggtgcggtagttagtg

SEQ ID NO: 156591 - DNA, 17 bp, Arabidopsis thaliana
tggtgctaaagcacctt

SEQ ID NO: 156592 - DNA, 17 bp, Arabidopsis thaliana
tggtgctatggatcgcc

SEQ ID NO: 156593 - DNA, 17 bp, Arabidopsis thaliana
tggtgctctaatcctcc

SEQ ID NO: 156594 - DNA, 17 bp, Arabidopsis thaliana
tggtgctctacatagac

SEQ ID NO: 156595 - DNA, 17 bp, Arabidopsis thaliana
tggtgctctacataggc

SEQ ID NO: 156596 - DNA, 17 bp, Arabidopsis thaliana
tggtgctgagattatcg

SEQ ID NO: 156597 - DNA, 17 bp, Arabidopsis thaliana
tggtgctgagggcccag

SEQ ID NO: 156598 - DNA, 17 bp, Arabidopsis thaliana
tggtgctgaggtcaccg

SEQ ID NO: 156599 - DNA, 17 bp, Arabidopsis thaliana
tggtgcttagatcttgc

SEQ ID NO: 156600 - DNA, 17 bp, Arabidopsis thaliana
tggtgcttgccgtgtta

SEQ ID NO: 156601 - DNA, 17 bp, Arabidopsis thaliana
tggtgcttttgcttggt

SEQ ID NO: 156602 - DNA, 17 bp, Arabidopsis thaliana
tggtggaaaaggatacg

SEQ ID NO: 156603 - DNA, 17 bp, Arabidopsis thaliana
tggtggaaaattcggcc

SEQ ID NO: 156604 - DNA, 17 bp, Arabidopsis thaliana
tggtggaaactgctccg

SEQ ID NO: 156605 - DNA, 17 bp, Arabidopsis thaliana
tggtggaaactgctctg

SEQ ID NO: 156606 - DNA, 17 bp, Arabidopsis thaliana
tggtggaacactggatc

SEQ ID NO: 156607 - DNA, 17 bp, Arabidopsis thaliana
tggtggaacactggctc

SEQ ID NO: 156608 - DNA, 17 bp, Arabidopsis thaliana
tggtggaagcccgcagc

SEQ ID NO: 156609 - DNA, 17 bp, Arabidopsis thaliana
tggtggaaggacttgtt

SEQ ID NO: 156610 - DNA, 17 bp, Arabidopsis thaliana
tggtggacaagatctgg

SEQ ID NO: 156611 - DNA, 17 bp, Arabidopsis thaliana
tggtggacgatcttcag

SEQ ID NO: 156612 - DNA, 17 bp, Arabidopsis thaliana
tggtggactccgtttgc

SEQ ID NO: 156613 - DNA, 17 bp, Arabidopsis thaliana
tggtggagcgattagtc

SEQ ID NO: 156614 - DNA, 17 bp, Arabidopsis thaliana
tggtggagcgattgtct

SEQ ID NO: 156615 - DNA, 17 bp, Arabidopsis thaliana
tggtggagcgatttgcc

SEQ ID NO: 156616 - DNA, 17 bp, Arabidopsis thaliana
tggtggagcgatttgtc

SEQ ID NO: 156617 - DNA, 17 bp, Arabidopsis thaliana
tggtggagcgatttgtg

SEQ ID NO: 156618 - DNA, 17 bp, Arabidopsis thaliana
tggtggagcgatttgtt

SEQ ID NO: 156619 - DNA, 17 bp, Arabidopsis thaliana
tggtggagcgatttttc

SEQ ID NO: 156620 - DNA, 17 bp, Arabidopsis thaliana
tggtggaggaccaacag

SEQ ID NO: 156621 - DNA, 17 bp, Arabidopsis thaliana
tggtggaggacgagcgc

SEQ ID NO: 156622 - DNA, 17 bp, Arabidopsis thaliana
tggtggagggatttgtc

SEQ ID NO: 156623 - DNA, 17 bp, Arabidopsis thaliana
tggtggaggtatctaat

SEQ ID NO: 156624 - DNA, 17 bp, Arabidopsis thaliana
tggtggagtgacttgtg

SEQ ID NO: 156625 - DNA, 17 bp, Arabidopsis thaliana
tggtggataccgaggcc

SEQ ID NO: 156626 - DNA, 17 bp, Arabidopsis thaliana
tggtggatgggcacaag

SEQ ID NO: 156627 - DNA, 17 bp, Arabidopsis thaliana
tggtggatgtgcatgga

SEQ ID NO: 156628 - DNA, 17 bp, Arabidopsis thaliana
tggtggatgtgtgttaa

SEQ ID NO: 156629 - DNA, 17 bp, Arabidopsis thaliana
tggtggatgttgctact

SEQ ID NO: 156630 - DNA, 17 bp, Arabidopsis thaliana
tggtggattacggattg

SEQ ID NO: 156631 - DNA, 17 bp, Arabidopsis thaliana
tggtggattctggctgc

SEQ ID NO: 156632 - DNA, 17 bp, Arabidopsis thaliana
tggtggattgacttgct

SEQ ID NO: 156633 - DNA, 17 bp, Arabidopsis thaliana
tggtggatttgggtaaa

SEQ ID NO: 156634 - DNA, 17 bp, Arabidopsis thaliana
tggtggcaggtgaccat

SEQ ID NO: 156635 - DNA, 17 bp, Arabidopsis thaliana
tggtggccagaagtggt

SEQ ID NO: 156636 - DNA, 17 bp, Arabidopsis thaliana
tggtggccggattacct

SEQ ID NO: 156637 - DNA, 17 bp, Arabidopsis thaliana
tggtggccgtgaggtgg

SEQ ID NO: 156638 - DNA, 17 bp, Arabidopsis thaliana
tggtggcgcatggccgt

SEQ ID NO: 156639 - DNA, 17 bp, Arabidopsis thaliana
tggtggcgcgtcattgg

SEQ ID NO: 156640 - DNA, 17 bp, Arabidopsis thaliana
tggtggcgctggaggtg

SEQ ID NO: 156641 - DNA, 17 bp, Arabidopsis thaliana
tggtggcggcgctggtg

SEQ ID NO: 156642 - DNA, 17 bp, Arabidopsis thaliana
tggtggcggctgtcgta

SEQ ID NO: 156643 - DNA, 17 bp, Arabidopsis thaliana
tggtggcggttggtcct

SEQ ID NO: 156644 - DNA, 17 bp, Arabidopsis thaliana
tggtggctaagtttggg

SEQ ID NO: 156645 - DNA, 17 bp, Arabidopsis thaliana
tggtggctccatcgctg

SEQ ID NO: 156646 - DNA, 17 bp, Arabidopsis thaliana
tggtggctgcctcttct

SEQ ID NO: 156647 - DNA, 17 bp, Arabidopsis thaliana
tggtggctggcttatct

SEQ ID NO: 156648 - DNA, 17 bp, Arabidopsis thaliana
tggtggctttgaggcaa

SEQ ID NO: 156649 - DNA, 17 bp, Arabidopsis thaliana
tggtgggcactgcaagt

SEQ ID NO: 156650 - DNA, 17 bp, Arabidopsis thaliana
tggtggggcgatttgtc

SEQ ID NO: 156651 - DNA, 17 bp, Arabidopsis thaliana
tggtgggttttctgcta

SEQ ID NO: 156652 - DNA, 17 bp, Arabidopsis thaliana
tggtggtaatccatcgc

SEQ ID NO: 156653 - DNA, 17 bp, Arabidopsis thaliana
tggtggtactagtcccg

SEQ ID NO: 156654 - DNA, 17 bp, Arabidopsis thaliana
tggtggtagcccgacgc

SEQ ID NO: 156655 - DNA, 17 bp, Arabidopsis thaliana
tggtggtagcggttgtt

SEQ ID NO: 156656 - DNA, 17 bp, Arabidopsis thaliana
tggtggtatgcagattt

SEQ ID NO: 156657 - DNA, 17 bp, Arabidopsis thaliana
tggtggtatttgtgatc

SEQ ID NO: 156658 - DNA, 17 bp, Arabidopsis thaliana
tggtggtcatgctgggg

SEQ ID NO: 156659 - DNA, 17 bp, Arabidopsis thaliana
tggtggtccatttctac

SEQ ID NO: 156660 - DNA, 17 bp, Arabidopsis thaliana
tggtggtcctcatgctg

SEQ ID NO: 156661 - DNA, 17 bp, Arabidopsis thaliana
tggtggtccttcgggga

SEQ ID NO: 156662 - DNA, 17 bp, Arabidopsis thaliana
tggtggtcgacggtgct

SEQ ID NO: 156663 - DNA, 17 bp, Arabidopsis thaliana
tggtggtcggtgtggtt

SEQ ID NO: 156664 - DNA, 17 bp, Arabidopsis thaliana
tggtggtcgtcgtctta

SEQ ID NO: 156665 - DNA, 17 bp, Arabidopsis thaliana
tggtggtctcactctgg

SEQ ID NO: 156666 - DNA, 17 bp, Arabidopsis thaliana
tggtggtctcacttggg

SEQ ID NO: 156667 - DNA, 17 bp, Arabidopsis thaliana
tggtggtgacttaggtt

SEQ ID NO: 156668 - DNA, 17 bp, Arabidopsis thaliana
tggtggtgcacaaggtg

SEQ ID NO: 156669 - DNA, 17 bp, Arabidopsis thaliana
tggtggtgcatggccgt

SEQ ID NO: 156670 - DNA, 17 bp, Arabidopsis thaliana
tggtggtgcatggcctt

SEQ ID NO: 156671 - DNA, 17 bp, Arabidopsis thaliana
tggtggtgcatggctgt

SEQ ID NO: 156672 - DNA, 17 bp, Arabidopsis thaliana
tggtggtgcctgggaca

SEQ ID NO: 156673 - DNA, 17 bp, Arabidopsis thaliana
tggtggtgctctaagtg

SEQ ID NO: 156674 - DNA, 17 bp, Arabidopsis thaliana
tggtggtggcggctgtc

SEQ ID NO: 156675 - DNA, 17 bp, Arabidopsis thaliana
tggtggtggctgaccgg

SEQ ID NO: 156676 - DNA, 17 bp, Arabidopsis thaliana
tggtggtggtgcatggg

SEQ ID NO: 156677 - DNA, 17 bp, Arabidopsis thaliana
tggtggtggtggcggcg

SEQ ID NO: 156678 - DNA, 17 bp, Arabidopsis thaliana
tggtggtggtggtggcg

SEQ ID NO: 156679 - DNA, 17 bp, Arabidopsis thaliana
tggtggttgtctgtcgg

SEQ ID NO: 156680 - DNA, 17 bp, Arabidopsis thaliana
tggtgtaacgactgccc

SEQ ID NO: 156681 - DNA, 17 bp, Arabidopsis thaliana
tggtgtaagtgactgat

SEQ ID NO: 156682 - DNA, 17 bp, Arabidopsis thaliana
tggtgtacattggtcgg

SEQ ID NO: 156683 - DNA, 17 bp, Arabidopsis thaliana
tggtgtacggtcacccg

SEQ ID NO: 156684 - DNA, 17 bp, Arabidopsis thaliana
tggtgtactgacttgcg

SEQ ID NO: 156685 - DNA, 17 bp, Arabidopsis thaliana
tggtgtagccaaagtcc

SEQ ID NO: 156686 - DNA, 17 bp, Arabidopsis thaliana
tggtgtaggttggcttc

SEQ ID NO: 156687 - DNA, 17 bp, Arabidopsis thaliana
tggtgtaggttggcttt

SEQ ID NO: 156688 - DNA, 17 bp, Arabidopsis thaliana
tggtgtattcggcggcc

SEQ ID NO: 156689 - DNA, 17 bp, Arabidopsis thaliana
tggtgtattcggcggct

SEQ ID NO: 156690 - DNA, 17 bp, Arabidopsis thaliana
tggtgtattcggcggtt

SEQ ID NO: 156691 - DNA, 17 bp, Arabidopsis thaliana
tggtgtcaatcactaac

SEQ ID NO: 156692 - DNA, 17 bp, Arabidopsis thaliana
tggtgtcaatcgctaac

SEQ ID NO: 156693 - DNA, 17 bp, Arabidopsis thaliana
tggtgtcagtcgctaac

SEQ ID NO: 156694 - DNA, 17 bp, Arabidopsis thaliana
tggtgtccattggtcgg

SEQ ID NO: 156695 - DNA, 17 bp, Arabidopsis thaliana
tggtgtccgtgcgcccc

SEQ ID NO: 156696 - DNA, 17 bp, Arabidopsis thaliana
tggtgtcgacaatcaaa

SEQ ID NO: 156697 - DNA, 17 bp, Arabidopsis thaliana
tggtgtcgctttggcgg

SEQ ID NO: 156698 - DNA, 17 bp, Arabidopsis thaliana
tggtgtctgtgctcgaa

SEQ ID NO: 156699 - DNA, 17 bp, Arabidopsis thaliana
tggtgtcttctccaacc

SEQ ID NO: 156700 - DNA, 17 bp, Arabidopsis thaliana
tggtgtcttctccactt

SEQ ID NO: 156701 - DNA, 17 bp, Arabidopsis thaliana
tggtgtctttgatgtgt

SEQ ID NO: 156702 - DNA, 17 bp, Arabidopsis thaliana
tggtgtctttgatgttt

SEQ ID NO: 156703 - DNA, 17 bp, Arabidopsis thaliana
tggtgtgaattgcagca

SEQ ID NO: 156704 - DNA, 17 bp, Arabidopsis thaliana
tggtgtgacagggtccg

SEQ ID NO: 156705 - DNA, 17 bp, Arabidopsis thaliana
tggtgtgaggtttgcga

SEQ ID NO: 156706 - DNA, 17 bp, Arabidopsis thaliana
tggtgtgcatgggtcgg

SEQ ID NO: 156707 - DNA, 17 bp, Arabidopsis thaliana
tggtgtgcattgctcgg

SEQ ID NO: 156708 - DNA, 17 bp, Arabidopsis thaliana
tggtgtgcattggtccg

SEQ ID NO: 156709 - DNA, 17 bp, Arabidopsis thaliana
tggtgtgcattggtcga

SEQ ID NO: 156710 - DNA, 17 bp, Arabidopsis thaliana
tggtgtgcattggtcgc

SEQ ID NO: 156711 - DNA, 17 bp, Arabidopsis thaliana
tggtgtgcattggtcgg

SEQ ID NO: 156712 - DNA, 17 bp, Arabidopsis thaliana
tggtgtgcattggtcgt

SEQ ID NO: 156713 - DNA, 17 bp, Arabidopsis thaliana
tggtgtgcattggtggc

SEQ ID NO: 156714 - DNA, 17 bp, Arabidopsis thaliana
tggtgtgcattggtggg

SEQ ID NO: 156715 - DNA, 17 bp, Arabidopsis thaliana
tggtgtgcattggttga

SEQ ID NO: 156716 - DNA, 17 bp, Arabidopsis thaliana
tggtgtgcattggttgg

SEQ ID NO: 156717 - DNA, 17 bp, Arabidopsis thaliana
tggtgtgcattgttcgg

SEQ ID NO: 156718 - DNA, 17 bp, Arabidopsis thaliana
tggtgtgctcgtgacaa

SEQ ID NO: 156719 - DNA, 17 bp, Arabidopsis thaliana
tggtgtgcttccagata

SEQ ID NO: 156720 - DNA, 17 bp, Arabidopsis thaliana
tggtgtgcttccagatt

SEQ ID NO: 156721 - DNA, 17 bp, Arabidopsis thaliana
tggtgtggatcctgtct

SEQ ID NO: 156722 - DNA, 17 bp, Arabidopsis thaliana
tggtgtggatcttggag

SEQ ID NO: 156723 - DNA, 17 bp, Arabidopsis thaliana
tggtgtggatggcaggc

SEQ ID NO: 156724 - DNA, 17 bp, Arabidopsis thaliana
tggtgtggcgaagcggt

SEQ ID NO: 156725 - DNA, 17 bp, Arabidopsis thaliana
tggtgtggctaaagctg

SEQ ID NO: 156726 - DNA, 17 bp, Arabidopsis thaliana
tggtgttacggatctag

SEQ ID NO: 156727 - DNA, 17 bp, Arabidopsis thaliana
tggtgttacggatctat

SEQ ID NO: 156728 - DNA, 17 bp, Arabidopsis thaliana
tggtgttcacgaaacta

SEQ ID NO: 156729 - DNA, 17 bp, Arabidopsis thaliana
tggtgttccatgtgccg

SEQ ID NO: 156730 - DNA, 17 bp, Arabidopsis thaliana
tggtgttcgagtcccaa

SEQ ID NO: 156731 - DNA, 17 bp, Arabidopsis thaliana
tggtgttctctcttttt

SEQ ID NO: 156732 - DNA, 17 bp, Arabidopsis thaliana
tggtgttgaccagagat

SEQ ID NO: 156733 - DNA, 17 bp, Arabidopsis thaliana
tggtgttgaccatcctt

SEQ ID NO: 156734 - DNA, 17 bp, Arabidopsis thaliana
tggtgttgccaaagtcc

SEQ ID NO: 156735 - DNA, 17 bp, Arabidopsis thaliana
tggtgttgctgaaggaa

SEQ ID NO: 156736 - DNA, 17 bp, Arabidopsis thaliana
tggtgtttccagtggcg

SEQ ID NO: 156737 - DNA, 17 bp, Arabidopsis thaliana
tggtgtttccgacgttt

SEQ ID NO: 156738 - DNA, 17 bp, Arabidopsis thaliana
tggtgtttcctcaagga

SEQ ID NO: 156739 - DNA, 17 bp, Arabidopsis thaliana
tggtgtttcgttggtac

SEQ ID NO: 156740 - DNA, 17 bp, Arabidopsis thaliana
tggtgtttctttggctc

SEQ ID NO: 156741 - DNA, 17 bp, Arabidopsis thaliana
tggtgtttttggttatt

SEQ ID NO: 156742 - DNA, 17 bp, Arabidopsis thaliana
tggttaaactctactgc

SEQ ID NO: 156743 - DNA, 17 bp, Arabidopsis thaliana
tggttaacaaccgtgat

SEQ ID NO: 156744 - DNA, 17 bp, Arabidopsis thaliana
tggttaaccagcaggtg

SEQ ID NO: 156745 - DNA, 17 bp, Arabidopsis thaliana
tggttaacgagtcaccg

SEQ ID NO: 156746 - DNA, 17 bp, Arabidopsis thaliana
tggttaagatgtgtggc

SEQ ID NO: 156747 - DNA, 17 bp, Arabidopsis thaliana
tggttaagcggtttgaa

SEQ ID NO: 156748 - DNA, 17 bp, Arabidopsis thaliana
tggttaaggctggcgat

SEQ ID NO: 156749 - DNA, 17 bp, Arabidopsis thaliana
tggttaagggaacccac

SEQ ID NO: 156750 - DNA, 17 bp, Arabidopsis thaliana
tggttaagtcaaacagg

SEQ ID NO: 156751 - DNA, 17 bp, Arabidopsis thaliana
tggttaagtccggttta

SEQ ID NO: 156752 - DNA, 17 bp, Arabidopsis thaliana
tggttacaaatcccacg

SEQ ID NO: 156753 - DNA, 17 bp, Arabidopsis thaliana
tggttacaacagttggg

SEQ ID NO: 156754 - DNA, 17 bp, Arabidopsis thaliana
tggttacaacggttggg

SEQ ID NO: 156755 - DNA, 17 bp, Arabidopsis thaliana
tggttaccaagcgtcgt

SEQ ID NO: 156756 - DNA, 17 bp, Arabidopsis thaliana
tggttaccaaggtaaga

SEQ ID NO: 156757 - DNA, 17 bp, Arabidopsis thaliana
tggttaccaatcagacc

SEQ ID NO: 156758 - DNA, 17 bp, Arabidopsis thaliana
tggttacctagtgtatt

SEQ ID NO: 156759 - DNA, 17 bp, Arabidopsis thaliana
tggttacgttcatctga

SEQ ID NO: 156760 - DNA, 17 bp, Arabidopsis thaliana
tggttacgtttacgtgg

SEQ ID NO: 156761 - DNA, 17 bp, Arabidopsis thaliana
tggttactagtgcaacg

SEQ ID NO: 156762 - DNA, 17 bp, Arabidopsis thaliana
tggttactccttctttc

SEQ ID NO: 156763 - DNA, 17 bp, Arabidopsis thaliana
tggttactccttctttg

SEQ ID NO: 156764 - DNA, 17 bp, Arabidopsis thaliana
tggttactcggatggtg

SEQ ID NO: 156765 - DNA, 17 bp, Arabidopsis thaliana
tggttacttgcttttgt

SEQ ID NO: 156766 - DNA, 17 bp, Arabidopsis thaliana
tggttagaaatcaacac

SEQ ID NO: 156767 - DNA, 17 bp, Arabidopsis thaliana
tggttagaaatcaccac

SEQ ID NO: 156768 - DNA, 17 bp, Arabidopsis thaliana
tggttagagatcgctgg

SEQ ID NO: 156769 - DNA, 17 bp, Arabidopsis thaliana
tggttagagcacccgtt

SEQ ID NO: 156770 - DNA, 17 bp, Arabidopsis thaliana
tggttagagcttgtggc

SEQ ID NO: 156771 - DNA, 17 bp, Arabidopsis thaliana
tggttagataccgatga

SEQ ID NO: 156772 - DNA, 17 bp, Arabidopsis thaliana
tggttagcactcaggac

SEQ ID NO: 156773 - DNA, 17 bp, Arabidopsis thaliana
tggttagcactcaggcc

SEQ ID NO: 156774 - DNA, 17 bp, Arabidopsis thaliana
tggttaggactttcacc

SEQ ID NO: 156775 - DNA, 17 bp, Arabidopsis thaliana
tggttaggatactcggc

SEQ ID NO: 156776 - DNA, 17 bp, Arabidopsis thaliana
tggttaggtagaggcct

SEQ ID NO: 156777 - DNA, 17 bp, Arabidopsis thaliana
tggttaggtttcggttc

SEQ ID NO: 156778 - DNA, 17 bp, Arabidopsis thaliana
tggttagtgctgactga

SEQ ID NO: 156779 - DNA, 17 bp, Arabidopsis thaliana
tggttagttgctgcttt

SEQ ID NO: 156780 - DNA, 17 bp, Arabidopsis thaliana
tggttagtttccgacgt

SEQ ID NO: 156781 - DNA, 17 bp, Arabidopsis thaliana
tggttagttttgcagtt

SEQ ID NO: 156782 - DNA, 17 bp, Arabidopsis thaliana
tggttatagcggtccaa

SEQ ID NO: 156783 - DNA, 17 bp, Arabidopsis thaliana
tggttatccggcggacc

SEQ ID NO: 156784 - DNA, 17 bp, Arabidopsis thaliana
tggttatcgggtccgtt

SEQ ID NO: 156785 - DNA, 17 bp, Arabidopsis thaliana
tggttatctcgatagga

SEQ ID NO: 156786 - DNA, 17 bp, Arabidopsis thaliana
tggttatggaccgtcgg

SEQ ID NO: 156787 - DNA, 17 bp, Arabidopsis thaliana
tggttatggactctgct

SEQ ID NO: 156788 - DNA, 17 bp, Arabidopsis thaliana
tggttattcgtcagcac

SEQ ID NO: 156789 - DNA, 17 bp, Arabidopsis thaliana
tggttattctcagactg

SEQ ID NO: 156790 - DNA, 17 bp, Arabidopsis thaliana
tggttattggaacacgg

SEQ ID NO: 156791 - DNA, 17 bp, Arabidopsis thaliana
tggttattggaacccgg

SEQ ID NO: 156792 - DNA, 17 bp, Arabidopsis thaliana
tggttattgggtttaat

SEQ ID NO: 156793 - DNA, 17 bp, Arabidopsis thaliana
tggttcaaatccagctc

SEQ ID NO: 156794 - DNA, 17 bp, Arabidopsis thaliana
tggttcaaatccaggaa

SEQ ID NO: 156795 - DNA, 17 bp, Arabidopsis thaliana
tggttcaaatccaggat

SEQ ID NO: 156796 - DNA, 17 bp, Arabidopsis thaliana
tggttcaaatgacgctt

SEQ ID NO: 156797 - DNA, 17 bp, Arabidopsis thaliana
tggttcaaccggttcaa

SEQ ID NO: 156798 - DNA, 17 bp, Arabidopsis thaliana
tggttcaaccgtgaccg

SEQ ID NO: 156799 - DNA, 17 bp, Arabidopsis thaliana
tggttcaactcgattcg

SEQ ID NO: 156800 - DNA, 17 bp, Arabidopsis thaliana
tggttcaaggacttagg

SEQ ID NO: 156801 - DNA, 17 bp, Arabidopsis thaliana
tggttcaagtccttcaa

SEQ ID NO: 156802 - DNA, 17 bp, Arabidopsis thaliana
tggttcaagtgacgcac

SEQ ID NO: 156803 - DNA, 17 bp, Arabidopsis thaliana
tggttcaagtgacgctc

SEQ ID NO: 156804 - DNA, 17 bp, Arabidopsis thaliana
tggttcaagttctaagg

SEQ ID NO: 156805 - DNA, 17 bp, Arabidopsis thaliana
tggttcacaatgcgttc

SEQ ID NO: 156806 - DNA, 17 bp, Arabidopsis thaliana
tggttcacacttggttt

SEQ ID NO: 156807 - DNA, 17 bp, Arabidopsis thaliana
tggttcacgaaagtatt

SEQ ID NO: 156808 - DNA, 17 bp, Arabidopsis thaliana
tggttcacgaaggcaat

SEQ ID NO: 156809 - DNA, 17 bp, Arabidopsis thaliana
tggttcacgacatgtta

SEQ ID NO: 156810 - DNA, 17 bp, Arabidopsis thaliana
tggttcacgggattctg

SEQ ID NO: 156811 - DNA, 17 bp, Arabidopsis thaliana
tggttcacttcatgact

SEQ ID NO: 156812 - DNA, 17 bp, Arabidopsis thaliana
tggttcagcaaggcgag

SEQ ID NO: 156813 - DNA, 17 bp, Arabidopsis thaliana
tggttcagcatttccga

SEQ ID NO: 156814 - DNA, 17 bp, Arabidopsis thaliana
tggttcaggaatcagcg

SEQ ID NO: 156815 - DNA, 17 bp, Arabidopsis thaliana
tggttcagggcggttca

SEQ ID NO: 156816 - DNA, 17 bp, Arabidopsis thaliana
tggttcagtttcgtctt

SEQ ID NO: 156817 - DNA, 17 bp, Arabidopsis thaliana
tggttcatgggttgagt

SEQ ID NO: 156818 - DNA, 17 bp, Arabidopsis thaliana
tggttcatttgcgctaa

SEQ ID NO: 156819 - DNA, 17 bp, Arabidopsis thaliana
tggttccaagctttcca

SEQ ID NO: 156820 - DNA, 17 bp, Arabidopsis thaliana
tggttccaatcgctaat

SEQ ID NO: 156821 - DNA, 17 bp, Arabidopsis thaliana
tggttccaggcgagaag

SEQ ID NO: 156822 - DNA, 17 bp, Arabidopsis thaliana
tggttccagggtcatgt

SEQ ID NO: 156823 - DNA, 17 bp, Arabidopsis thaliana
tggttccagttacgctt

SEQ ID NO: 156824 - DNA, 17 bp, Arabidopsis thaliana
tggttccatcaatagta

SEQ ID NO: 156825 - DNA, 17 bp, Arabidopsis thaliana
tggttccatcagtttga

SEQ ID NO: 156826 - DNA, 17 bp, Arabidopsis thaliana
tggttccatctcatcgt

SEQ ID NO: 156827 - DNA, 17 bp, Arabidopsis thaliana
tggttccattttggggg

SEQ ID NO: 156828 - DNA, 17 bp, Arabidopsis thaliana
tggttccccgccgagcg

SEQ ID NO: 156829 - DNA, 17 bp, Arabidopsis thaliana
tggttccccgccgagtg

SEQ ID NO: 156830 - DNA, 17 bp, Arabidopsis thaliana
tggttcccgacgccggc

SEQ ID NO: 156831 - DNA, 17 bp, Arabidopsis thaliana
tggttccctccgaagtt

SEQ ID NO: 156832 - DNA, 17 bp, Arabidopsis thaliana
tggttcctcaggccaca

SEQ ID NO: 156833 - DNA, 17 bp, Arabidopsis thaliana
tggttccttaacagggt

SEQ ID NO: 156834 - DNA, 17 bp, Arabidopsis thaliana
tggttcgaaatatcaca

SEQ ID NO: 156835 - DNA, 17 bp, Arabidopsis thaliana
tggttcgaactgactca

SEQ ID NO: 156836 - DNA, 17 bp, Arabidopsis thaliana
tggttcgaagcccgtaa

SEQ ID NO: 156837 - DNA, 17 bp, Arabidopsis thaliana
tggttcgaatgacgctt

SEQ ID NO: 156838 - DNA, 17 bp, Arabidopsis thaliana
tggttcgacccttgccg

SEQ ID NO: 156839 - DNA, 17 bp, Arabidopsis thaliana
tggttcgacgatagcgt

SEQ ID NO: 156840 - DNA, 17 bp, Arabidopsis thaliana
tggttcgagtgacgctt

SEQ ID NO: 156841 - DNA, 17 bp, Arabidopsis thaliana
tggttcgataacaacct

SEQ ID NO: 156842 - DNA, 17 bp, Arabidopsis thaliana
tggttcgatacggagtt

SEQ ID NO: 156843 - DNA, 17 bp, Arabidopsis thaliana
tggttcgataggatccg

SEQ ID NO: 156844 - DNA, 17 bp, Arabidopsis thaliana
tggttcgattcattggc

SEQ ID NO: 156845 - DNA, 17 bp, Arabidopsis thaliana
tggttcgattccggcag

SEQ ID NO: 156846 - DNA, 17 bp, Arabidopsis thaliana
tggttcgattgctatac

SEQ ID NO: 156847 - DNA, 17 bp, Arabidopsis thaliana
tggttcgattttggttc

SEQ ID NO: 156848 - DNA, 17 bp, Arabidopsis thaliana
tggttcgccgcccgcga

SEQ ID NO: 156849 - DNA, 17 bp, Arabidopsis thaliana
tggttcgcgtgctgctt

SEQ ID NO: 156850 - DNA, 17 bp, Arabidopsis thaliana
tggttcgctacaataag

SEQ ID NO: 156851 - DNA, 17 bp, Arabidopsis thaliana
tggttcggacctgagag

SEQ ID NO: 156852 - DNA, 17 bp, Arabidopsis thaliana
tggttcggattcggttt

SEQ ID NO: 156853 - DNA, 17 bp, Arabidopsis thaliana
tggttcggcttcggttc

SEQ ID NO: 156854 - DNA, 17 bp, Arabidopsis thaliana
tggttcgggtattaggt

SEQ ID NO: 156855 - DNA, 17 bp, Arabidopsis thaliana
tggttcggttccggcag

SEQ ID NO: 156856 - DNA, 17 bp, Arabidopsis thaliana
tggttcgtacccgggct

SEQ ID NO: 156857 - DNA, 17 bp, Arabidopsis thaliana
tggttcgtacccggttg

SEQ ID NO: 156858 - DNA, 17 bp, Arabidopsis thaliana
tggttcgttccggcagg

SEQ ID NO: 156859 - DNA, 17 bp, Arabidopsis thaliana
tggttcgttgcggtttt

SEQ ID NO: 156860 - DNA, 17 bp, Arabidopsis thaliana
tggttcgtttccggcag

SEQ ID NO: 156861 - DNA, 17 bp, Arabidopsis thaliana
tggttctactcccggta

SEQ ID NO: 156862 - DNA, 17 bp, Arabidopsis thaliana
tggttctactcgaccca

SEQ ID NO: 156863 - DNA, 17 bp, Arabidopsis thaliana
tggttctcctcggtgtg

SEQ ID NO: 156864 - DNA, 17 bp, Arabidopsis thaliana
tggttctcgaatggtcg

SEQ ID NO: 156865 - DNA, 17 bp, Arabidopsis thaliana
tggttctcgtcctagtt

SEQ ID NO: 156866 - DNA, 17 bp, Arabidopsis thaliana
tggttctcttcggtgtg

SEQ ID NO: 156867 - DNA, 17 bp, Arabidopsis thaliana
tggttctgagtccccgc

SEQ ID NO: 156868 - DNA, 17 bp, Arabidopsis thaliana
tggttctgccgatactc

SEQ ID NO: 156869 - DNA, 17 bp, Arabidopsis thaliana
tggttctgctgattaac

SEQ ID NO: 156870 - DNA, 17 bp, Arabidopsis thaliana
tggttcttcggttttgg

SEQ ID NO: 156871 - DNA, 17 bp, Arabidopsis thaliana
tggttcttcttgagtat

SEQ ID NO: 156872 - DNA, 17 bp, Arabidopsis thaliana
tggttcttgcatacaca

SEQ ID NO: 156873 - DNA, 17 bp, Arabidopsis thaliana
tggttcttgttgtgaca

SEQ ID NO: 156874 - DNA, 17 bp, Arabidopsis thaliana
tggttcttttgcgcaat

SEQ ID NO: 156875 - DNA, 17 bp, Arabidopsis thaliana
tggttgaaatgggagca

SEQ ID NO: 156876 - DNA, 17 bp, Arabidopsis thaliana
tggttgaagacattcct

SEQ ID NO: 156877 - DNA, 17 bp, Arabidopsis thaliana
tggttgaaggcctgttc

SEQ ID NO: 156878 - DNA, 17 bp, Arabidopsis thaliana
tggttgacaatcgccgg

SEQ ID NO: 156879 - DNA, 17 bp, Arabidopsis thaliana
tggttgaccaagggttc

SEQ ID NO: 156880 - DNA, 17 bp, Arabidopsis thaliana
tggttgacgatttccac

SEQ ID NO: 156881 - DNA, 17 bp, Arabidopsis thaliana
tggttgacggaaactta

SEQ ID NO: 156882 - DNA, 17 bp, Arabidopsis thaliana
tggttgactcagtgatt

SEQ ID NO: 156883 - DNA, 17 bp, Arabidopsis thaliana
tggttgactcagtggtt

SEQ ID NO: 156884 - DNA, 17 bp, Arabidopsis thaliana
tggttgactctagtccg

SEQ ID NO: 156885 - DNA, 17 bp, Arabidopsis thaliana
tggttgactctgcttct

SEQ ID NO: 156886 - DNA, 17 bp, Arabidopsis thaliana
tggttgacttttccatg

SEQ ID NO: 156887 - DNA, 17 bp, Arabidopsis thaliana
tggttgagccgtgtcac

SEQ ID NO: 156888 - DNA, 17 bp, Arabidopsis thaliana
tggttgagcgatttgtc

SEQ ID NO: 156889 - DNA, 17 bp, Arabidopsis thaliana
tggttgagtctccagtc

SEQ ID NO: 156890 - DNA, 17 bp, Arabidopsis thaliana
tggttgagtgatagggt

SEQ ID NO: 156891 - DNA, 17 bp, Arabidopsis thaliana
tggttgagtgcggattt

SEQ ID NO: 156892 - DNA, 17 bp, Arabidopsis thaliana
tggttgagtttactgcg

SEQ ID NO: 156893 - DNA, 17 bp, Arabidopsis thaliana
tggttgatcgtgactgc

SEQ ID NO: 156894 - DNA, 17 bp, Arabidopsis thaliana
tggttgatcgttcggta

SEQ ID NO: 156895 - DNA, 17 bp, Arabidopsis thaliana
tggttgatcgttcgtta

SEQ ID NO: 156896 - DNA, 17 bp, Arabidopsis thaliana
tggttgatggtcagaag

SEQ ID NO: 156897 - DNA, 17 bp, Arabidopsis thaliana
tggttgattcgattcct

SEQ ID NO: 156898 - DNA, 17 bp, Arabidopsis thaliana
tggttgattctagcgac

SEQ ID NO: 156899 - DNA, 17 bp, Arabidopsis thaliana
tggttgcacacatcgat

SEQ ID NO: 156900 - DNA, 17 bp, Arabidopsis thaliana
tggttgcagtgtacaaa

SEQ ID NO: 156901 - DNA, 17 bp, Arabidopsis thaliana
tggttgcctggttatgt

SEQ ID NO: 156902 - DNA, 17 bp, Arabidopsis thaliana
tggttgcctgtcggttc

SEQ ID NO: 156903 - DNA, 17 bp, Arabidopsis thaliana
tggttgcgaccagcgcc

SEQ ID NO: 156904 - DNA, 17 bp, Arabidopsis thaliana
tggttgcggacggtttt

SEQ ID NO: 156905 - DNA, 17 bp, Arabidopsis thaliana
tggttgcggcagtgtgc

SEQ ID NO: 156906 - DNA, 17 bp, Arabidopsis thaliana
tggttgctgtcgctggt

SEQ ID NO: 156907 - DNA, 17 bp, Arabidopsis thaliana
tggttgcttatgcgaag

SEQ ID NO: 156908 - DNA, 17 bp, Arabidopsis thaliana
tggttgcttcctcttca

SEQ ID NO: 156909 - DNA, 17 bp, Arabidopsis thaliana
tggttgcttgaccattc

SEQ ID NO: 156910 - DNA, 17 bp, Arabidopsis thaliana
tggttggaagttccctt

SEQ ID NO: 156911 - DNA, 17 bp, Arabidopsis thaliana
tggttggaccttggtct

SEQ ID NO: 156912 - DNA, 17 bp, Arabidopsis thaliana
tggttggactctagcgg

SEQ ID NO: 156913 - DNA, 17 bp, Arabidopsis thaliana
tggttggacttggttgg

SEQ ID NO: 156914 - DNA, 17 bp, Arabidopsis thaliana
tggttggatcccaaact

SEQ ID NO: 156915 - DNA, 17 bp, Arabidopsis thaliana
tggttggatgtccgtat

SEQ ID NO: 156916 - DNA, 17 bp, Arabidopsis thaliana
tggttggcagcggctga

SEQ ID NO: 156917 - DNA, 17 bp, Arabidopsis thaliana
tggttggctatccacat

SEQ ID NO: 156918 - DNA, 17 bp, Arabidopsis thaliana
tggttggctcaaattca

SEQ ID NO: 156919 - DNA, 17 bp, Arabidopsis thaliana
tggttgggttagaaatt

SEQ ID NO: 156920 - DNA, 17 bp, Arabidopsis thaliana
tggttggtaggtatgct

SEQ ID NO: 156921 - DNA, 17 bp, Arabidopsis thaliana
tggttggtgcagactgg

SEQ ID NO: 156922 - DNA, 17 bp, Arabidopsis thaliana
tggttggttgccttcag

SEQ ID NO: 156923 - DNA, 17 bp, Arabidopsis thaliana
tggttgtaaagacttcg

SEQ ID NO: 156924 - DNA, 17 bp, Arabidopsis thaliana
tggttgtaaagcaggag

SEQ ID NO: 156925 - DNA, 17 bp, Arabidopsis thaliana
tggttgtactgctgtcc

SEQ ID NO: 156926 - DNA, 17 bp, Arabidopsis thaliana
tggttgtccattacgga

SEQ ID NO: 156927 - DNA, 17 bp, Arabidopsis thaliana
tggttgtctctccagcg

SEQ ID NO: 156928 - DNA, 17 bp, Arabidopsis thaliana
tggttgtctgtcggttc

SEQ ID NO: 156929 - DNA, 17 bp, Arabidopsis thaliana
tggttgtgaaaggttgt

SEQ ID NO: 156930 - DNA, 17 bp, Arabidopsis thaliana
tggttgtgatagtggag

SEQ ID NO: 156931 - DNA, 17 bp, Arabidopsis thaliana
tggttgtgcggccgatt

SEQ ID NO: 156932 - DNA, 17 bp, Arabidopsis thaliana
tggttgttacgactttg

SEQ ID NO: 156933 - DNA, 17 bp, Arabidopsis thaliana
tggttgttggtcagaaa

SEQ ID NO: 156934 - DNA, 17 bp, Arabidopsis thaliana
tggttgttgtctgtcgg

SEQ ID NO: 156935 - DNA, 17 bp, Arabidopsis thaliana
tggttgttgttgatgta

SEQ ID NO: 156936 - DNA, 17 bp, Arabidopsis thaliana
tggttgtttctgcccaa

SEQ ID NO: 156937 - DNA, 17 bp, Arabidopsis thaliana
tggttgttttgctcagg

SEQ ID NO: 156938 - DNA, 17 bp, Arabidopsis thaliana
tggtttaactgcagact

SEQ ID NO: 156939 - DNA, 17 bp, Arabidopsis thaliana
tggtttacaacgtgctt

SEQ ID NO: 156940 - DNA, 17 bp, Arabidopsis thaliana
tggtttactgattcggc

SEQ ID NO: 156941 - DNA, 17 bp, Arabidopsis thaliana
tggtttagatctatccc

SEQ ID NO: 156942 - DNA, 17 bp, Arabidopsis thaliana
tggtttagtcactttca

SEQ ID NO: 156943 - DNA, 17 bp, Arabidopsis thaliana
tggtttatccgctgagc

SEQ ID NO: 156944 - DNA, 17 bp, Arabidopsis thaliana
tggtttatccgttctct

SEQ ID NO: 156945 - DNA, 17 bp, Arabidopsis thaliana
tggtttcacacctatgt

SEQ ID NO: 156946 - DNA, 17 bp, Arabidopsis thaliana
tggtttcagagtacact

SEQ ID NO: 156947 - DNA, 17 bp, Arabidopsis thaliana
tggtttcagcgattagt

SEQ ID NO: 156948 - DNA, 17 bp, Arabidopsis thaliana
tggtttcaggaaatggg

SEQ ID NO: 156949 - DNA, 17 bp, Arabidopsis thaliana
tggtttcaggcttcttc

SEQ ID NO: 156950 - DNA, 17 bp, Arabidopsis thaliana
tggtttcagggctggag

SEQ ID NO: 156951 - DNA, 17 bp, Arabidopsis thaliana
tggtttcagtcgtcagc

SEQ ID NO: 156952 - DNA, 17 bp, Arabidopsis thaliana
tggtttcagttgcttcc

SEQ ID NO: 156953 - DNA, 17 bp, Arabidopsis thaliana
tggtttcatgtaaggtt

SEQ ID NO: 156954 - DNA, 17 bp, Arabidopsis thaliana
tggtttcatttggtgcg

SEQ ID NO: 156955 - DNA, 17 bp, Arabidopsis thaliana
tggtttcccacctatgt

SEQ ID NO: 156956 - DNA, 17 bp, Arabidopsis thaliana
tggtttcccggctggtg

SEQ ID NO: 156957 - DNA, 17 bp, Arabidopsis thaliana
tggtttccctcggtatg

SEQ ID NO: 156958 - DNA, 17 bp, Arabidopsis thaliana
tggtttccgacaagtac

SEQ ID NO: 156959 - DNA, 17 bp, Arabidopsis thaliana
tggtttccgacaggtac

SEQ ID NO: 156960 - DNA, 17 bp, Arabidopsis thaliana
tggtttccgactcgcgc

SEQ ID NO: 156961 - DNA, 17 bp, Arabidopsis thaliana
tggtttcctgctatatg

SEQ ID NO: 156962 - DNA, 17 bp, Arabidopsis thaliana
tggtttcgaaccccaca

SEQ ID NO: 156963 - DNA, 17 bp, Arabidopsis thaliana
tggtttcgacaaggtct

SEQ ID NO: 156964 - DNA, 17 bp, Arabidopsis thaliana
tggtttcgattcgggtt

SEQ ID NO: 156965 - DNA, 17 bp, Arabidopsis thaliana
tggtttcgatttggatg

SEQ ID NO: 156966 - DNA, 17 bp, Arabidopsis thaliana
tggtttcgcgtatcggc

SEQ ID NO: 156967 - DNA, 17 bp, Arabidopsis thaliana
tggtttcgctataggct

SEQ ID NO: 156968 - DNA, 17 bp, Arabidopsis thaliana
tggtttcggacctgcaa

SEQ ID NO: 156969 - DNA, 17 bp, Arabidopsis thaliana
tggtttcggacctggag

SEQ ID NO: 156970 - DNA, 17 bp, Arabidopsis thaliana
tggtttcggacctgtgg

SEQ ID NO: 156971 - DNA, 17 bp, Arabidopsis thaliana
tggtttcggacttggag

SEQ ID NO: 156972 - DNA, 17 bp, Arabidopsis thaliana
tggtttcggatccatgc

SEQ ID NO: 156973 - DNA, 17 bp, Arabidopsis thaliana
tggtttcgggcctagga

SEQ ID NO: 156974 - DNA, 17 bp, Arabidopsis thaliana
tggtttcgggcctgaaa

SEQ ID NO: 156975 - DNA, 17 bp, Arabidopsis thaliana
tggtttcgggcctggag

SEQ ID NO: 156976 - DNA, 17 bp, Arabidopsis thaliana
tggtttcgggtctggga

SEQ ID NO: 156977 - DNA, 17 bp, Arabidopsis thaliana
tggtttcggttcggatc

SEQ ID NO: 156978 - DNA, 17 bp, Arabidopsis thaliana
tggtttcgtatagagtt

SEQ ID NO: 156979 - DNA, 17 bp, Arabidopsis thaliana
tggtttcgtctgacaac

SEQ ID NO: 156980 - DNA, 17 bp, Arabidopsis thaliana
tggtttcgttagtttgc

SEQ ID NO: 156981 - DNA, 17 bp, Arabidopsis thaliana
tggtttctccgacagtc

SEQ ID NO: 156982 - DNA, 17 bp, Arabidopsis thaliana
tggtttctctgatgggc

SEQ ID NO: 156983 - DNA, 17 bp, Arabidopsis thaliana
tggtttctctgtgacag

SEQ ID NO: 156984 - DNA, 17 bp, Arabidopsis thaliana
tggtttctcttcccaaa

SEQ ID NO: 156985 - DNA, 17 bp, Arabidopsis thaliana
tggtttctgaggatggg

SEQ ID NO: 156986 - DNA, 17 bp, Arabidopsis thaliana
tggtttcttatggttgc

SEQ ID NO: 156987 - DNA, 17 bp, Arabidopsis thaliana
tggtttcttcgtctgtt

SEQ ID NO: 156988 - DNA, 17 bp, Arabidopsis thaliana
tggtttcttcttcagtt

SEQ ID NO: 156989 - DNA, 17 bp, Arabidopsis thaliana
tggtttcttgatgggct

SEQ ID NO: 156990 - DNA, 17 bp, Arabidopsis thaliana
tggtttctttgtccgtt

SEQ ID NO: 156991 - DNA, 17 bp, Arabidopsis thaliana
tggtttgaaaaagactc

SEQ ID NO: 156992 - DNA, 17 bp, Arabidopsis thaliana
tggtttgaaccttggca

SEQ ID NO: 156993 - DNA, 17 bp, Arabidopsis thaliana
tggtttgacaacttggg

SEQ ID NO: 156994 - DNA, 17 bp, Arabidopsis thaliana
tggtttgacccgatcta

SEQ ID NO: 156995 - DNA, 17 bp, Arabidopsis thaliana
tggtttgacttgaactg

SEQ ID NO: 156996 - DNA, 17 bp, Arabidopsis thaliana
tggtttgacttgacacg

SEQ ID NO: 156997 - DNA, 17 bp, Arabidopsis thaliana
tggtttgatgacagggc

SEQ ID NO: 156998 - DNA, 17 bp, Arabidopsis thaliana
tggtttgatggtcgaga

SEQ ID NO: 156999 - DNA, 17 bp, Arabidopsis thaliana
tggtttgattatcgttt

SEQ ID NO: 157000 - DNA, 17 bp, Arabidopsis thaliana
tggtttgattatgttca

SEQ ID NO: 157001 - DNA, 17 bp, Arabidopsis thaliana
tggtttgattgtcaccg

SEQ ID NO: 157002 - DNA, 17 bp, Arabidopsis thaliana
tggtttgcacgacatgg

SEQ ID NO: 157003 - DNA, 17 bp, Arabidopsis thaliana
tggtttgcacgttcctt

SEQ ID NO: 157004 - DNA, 17 bp, Arabidopsis thaliana
tggtttgcattggtcgg

SEQ ID NO: 157005 - DNA, 17 bp, Arabidopsis thaliana
tggtttgccaacgaaat

SEQ ID NO: 157006 - DNA, 17 bp, Arabidopsis thaliana
tggtttgccaacgaagt

SEQ ID NO: 157007 - DNA, 17 bp, Arabidopsis thaliana
tggtttgctacatggtt

SEQ ID NO: 157008 - DNA, 17 bp, Arabidopsis thaliana
tggtttgctatctttac

SEQ ID NO: 157009 - DNA, 17 bp, Arabidopsis thaliana
tggtttgctatggtggg

SEQ ID NO: 157010 - DNA, 17 bp, Arabidopsis thaliana
tggtttgctttgacgat

SEQ ID NO: 157011 - DNA, 17 bp, Arabidopsis thaliana
tggtttgctttttcttt

SEQ ID NO: 157012 - DNA, 17 bp, Arabidopsis thaliana
tggtttggatcatcaaa

SEQ ID NO: 157013 - DNA, 17 bp, Arabidopsis thaliana
tggtttggcatggtcta

SEQ ID NO: 157014 - DNA, 17 bp, Arabidopsis thaliana
tggtttggcgctgatat

SEQ ID NO: 157015 - DNA, 17 bp, Arabidopsis thaliana
tggtttgggcttgaact

SEQ ID NO: 157016 - DNA, 17 bp, Arabidopsis thaliana
tggtttggtctcgattg

SEQ ID NO: 157017 - DNA, 17 bp, Arabidopsis thaliana
tggtttgtctaacacac

SEQ ID NO: 157018 - DNA, 17 bp, Arabidopsis thaliana
tggtttgtgacgttttg

SEQ ID NO: 157019 - DNA, 17 bp, Arabidopsis thaliana
tggtttgtgcttgcccc

SEQ ID NO: 157020 - DNA, 17 bp, Arabidopsis thaliana
tggtttgttgaactcgg

SEQ ID NO: 157021 - DNA, 17 bp, Arabidopsis thaliana
tggtttgttgaactcgt

SEQ ID NO: 157022 - DNA, 17 bp, Arabidopsis thaliana
tggttttaactctctga

SEQ ID NO: 157023 - DNA, 17 bp, Arabidopsis thaliana
tggttttactcggatga

SEQ ID NO: 157024 - DNA, 17 bp, Arabidopsis thaliana
tggttttagattggaag

SEQ ID NO: 157025 - DNA, 17 bp, Arabidopsis thaliana
tggttttagccgctttt

SEQ ID NO: 157026 - DNA, 17 bp, Arabidopsis thaliana
tggttttaggttggaag

SEQ ID NO: 157027 - DNA, 17 bp, Arabidopsis thaliana
tggttttagtcgctgga

SEQ ID NO: 157028 - DNA, 17 bp, Arabidopsis thaliana
tggttttatcctctttt

SEQ ID NO: 157029 - DNA, 17 bp, Arabidopsis thaliana
tggttttcaaaggcttc

SEQ ID NO: 157030 - DNA, 17 bp, Arabidopsis thaliana
tggttttcatcccaaaa

SEQ ID NO: 157031 - DNA, 17 bp, Arabidopsis thaliana
tggttttcatcgccagc

SEQ ID NO: 157032 - DNA, 17 bp, Arabidopsis thaliana
tggttttccgacttgta

SEQ ID NO: 157033 - DNA, 17 bp, Arabidopsis thaliana
tggttttcgtccggtta

SEQ ID NO: 157034 - DNA, 17 bp, Arabidopsis thaliana
tggttttcgttcttctt

SEQ ID NO: 157035 - DNA, 17 bp, Arabidopsis thaliana
tggttttctgtgggcgc

SEQ ID NO: 157036 - DNA, 17 bp, Arabidopsis thaliana
tggttttcttcgaggcg

SEQ ID NO: 157037 - DNA, 17 bp, Arabidopsis thaliana
tggttttcttctgggtg

SEQ ID NO: 157038 - DNA, 17 bp, Arabidopsis thaliana
tggttttgacccgcacg

SEQ ID NO: 157039 - DNA, 17 bp, Arabidopsis thaliana
tggttttgacgtgtttc

SEQ ID NO: 157040 - DNA, 17 bp, Arabidopsis thaliana
tggttttgagcctaggg

SEQ ID NO: 157041 - DNA, 17 bp, Arabidopsis thaliana
tggttttgagttggaag

SEQ ID NO: 157042 - DNA, 17 bp, Arabidopsis thaliana
tggttttgcagattagt

SEQ ID NO: 157043 - DNA, 17 bp, Arabidopsis thaliana
tggttttgccatcgatt

SEQ ID NO: 157044 - DNA, 17 bp, Arabidopsis thaliana
tggttttgctcgatgat

SEQ ID NO: 157045 - DNA, 17 bp, Arabidopsis thaliana
tggtttttcacctaatg

SEQ ID NO: 157046 - DNA, 17 bp, Arabidopsis thaliana
tggtttttccccactat

SEQ ID NO: 157047 - DNA, 17 bp, Arabidopsis thaliana
tggtttttccccagttt

SEQ ID NO: 157048 - DNA, 17 bp, Arabidopsis thaliana
tggtttttctcctcagg

SEQ ID NO: 157049 - DNA, 17 bp, Arabidopsis thaliana
tggtttttgctgcaact

SEQ ID NO: 157050 - DNA, 17 bp, Arabidopsis thaliana
tggttttttctggtaag

SEQ ID NO: 157051 - DNA, 17 bp, Arabidopsis thaliana
tggttttttttacggga

SEQ ID NO: 157052 - DNA, 17 bp, Arabidopsis thaliana
tgtaaaacgccgagcct

SEQ ID NO: 157053 - DNA, 17 bp, Arabidopsis thaliana
tgtaaaacggacggttg

SEQ ID NO: 157054 - DNA, 17 bp, Arabidopsis thaliana
tgtaaaatagatcaccc

SEQ ID NO: 157055 - DNA, 17 bp, Arabidopsis thaliana
tgtaaaattatagccga

SEQ ID NO: 157056 - DNA, 17 bp, Arabidopsis thaliana
tgtaaaattcatccgct

SEQ ID NO: 157057 - DNA, 17 bp, Arabidopsis thaliana
tgtaaaatttgttgttc

SEQ ID NO: 157058 - DNA, 17 bp, Arabidopsis thaliana
tgtaaacatctgatcgt

SEQ ID NO: 157059 - DNA, 17 bp, Arabidopsis thaliana
tgtaaaccacgggttga

SEQ ID NO: 157060 - DNA, 17 bp, Arabidopsis thaliana
tgtaaaccggagtcccg

SEQ ID NO: 157061 - DNA, 17 bp, Arabidopsis thaliana
tgtaaacctgtgatttt

SEQ ID NO: 157062 - DNA, 17 bp, Arabidopsis thaliana
tgtaaagcttaatgtgt

SEQ ID NO: 157063 - DNA, 17 bp, Arabidopsis thaliana
tgtaaagcttagtgatg

SEQ ID NO: 157064 - DNA, 17 bp, Arabidopsis thaliana
tgtaaaggattatggcc

SEQ ID NO: 157065 - DNA, 17 bp, Arabidopsis thaliana
tgtaaagtctatccatg

SEQ ID NO: 157066 - DNA, 17 bp, Arabidopsis thaliana
tgtaaagttgtaacggc

SEQ ID NO: 157067 - DNA, 17 bp, Arabidopsis thaliana
tgtaaataaatatgtct

SEQ ID NO: 157068 - DNA, 17 bp, Arabidopsis thaliana
tgtaaataagttccaac

SEQ ID NO: 157069 - DNA, 17 bp, Arabidopsis thaliana
tgtaaatgtttaccatc

SEQ ID NO: 157070 - DNA, 17 bp, Arabidopsis thaliana
tgtaaattgagattgta

SEQ ID NO: 157071 - DNA, 17 bp, Arabidopsis thaliana
tgtaacaacattggcct

SEQ ID NO: 157072 - DNA, 17 bp, Arabidopsis thaliana
tgtaacaaccccgaacc

SEQ ID NO: 157073 - DNA, 17 bp, Arabidopsis thaliana
tgtaacaatccaatgca

SEQ ID NO: 157074 - DNA, 17 bp, Arabidopsis thaliana
tgtaacacttcagtgcg

SEQ ID NO: 157075 - DNA, 17 bp, Arabidopsis thaliana
tgtaacactttcggata

SEQ ID NO: 157076 - DNA, 17 bp, Arabidopsis thaliana
tgtaacactttggtgcg

SEQ ID NO: 157077 - DNA, 17 bp, Arabidopsis thaliana
tgtaacagcgccttcgt

SEQ ID NO: 157078 - DNA, 17 bp, Arabidopsis thaliana
tgtaacatttcgactgt

SEQ ID NO: 157079 - DNA, 17 bp, Arabidopsis thaliana
tgtaaccaactccctta

SEQ ID NO: 157080 - DNA, 17 bp, Arabidopsis thaliana
tgtaaccagaatgtgca

SEQ ID NO: 157081 - DNA, 17 bp, Arabidopsis thaliana
tgtaacccgatcttgta

SEQ ID NO: 157082 - DNA, 17 bp, Arabidopsis thaliana
tgtaacccggttaggat

SEQ ID NO: 157083 - DNA, 17 bp, Arabidopsis thaliana
tgtaaccctaattttgc

SEQ ID NO: 157084 - DNA, 17 bp, Arabidopsis thaliana
tgtaaccctaatttttt

SEQ ID NO: 157085 - DNA, 17 bp, Arabidopsis thaliana
tgtaaccgatggagatg

SEQ ID NO: 157086 - DNA, 17 bp, Arabidopsis thaliana
tgtaacgccaatccgtt

SEQ ID NO: 157087 - DNA, 17 bp, Arabidopsis thaliana
tgtaacgcccccgagac

SEQ ID NO: 157088 - DNA, 17 bp, Arabidopsis thaliana
tgtaacggatggatcgc

SEQ ID NO: 157089 - DNA, 17 bp, Arabidopsis thaliana
tgtaacgtccggcgagt

SEQ ID NO: 157090 - DNA, 17 bp, Arabidopsis thaliana
tgtaacgtttagtaggg

SEQ ID NO: 157091 - DNA, 17 bp, Arabidopsis thaliana
tgtaactcctctgcttt

SEQ ID NO: 157092 - DNA, 17 bp, Arabidopsis thaliana
tgtaactcggttaggat

SEQ ID NO: 157093 - DNA, 17 bp, Arabidopsis thaliana
tgtaactctgcggtgcc

SEQ ID NO: 157094 - DNA, 17 bp, Arabidopsis thaliana
tgtaactgagatcgtgg

SEQ ID NO: 157095 - DNA, 17 bp, Arabidopsis thaliana
tgtaactggatctgggt

SEQ ID NO: 157096 - DNA, 17 bp, Arabidopsis thaliana
tgtaactgtgggcgaat

SEQ ID NO: 157097 - DNA, 17 bp, Arabidopsis thaliana
tgtaacttcatcaggct

SEQ ID NO: 157098 - DNA, 17 bp, Arabidopsis thaliana
tgtaacttgtgctgggc

SEQ ID NO: 157099 - DNA, 17 bp, Arabidopsis thaliana
tgtaactttgacacatc

SEQ ID NO: 157100 - DNA, 17 bp, Arabidopsis thaliana
tgtaactttgtttctct

SEQ ID NO: 157101 - DNA, 17 bp, Arabidopsis thaliana
tgtaactttttggttcg

SEQ ID NO: 157102 - DNA, 17 bp, Arabidopsis thaliana
tgtaagacagtgtatgg

SEQ ID NO: 157103 - DNA, 17 bp, Arabidopsis thaliana
tgtaagaccatctccat

SEQ ID NO: 157104 - DNA, 17 bp, Arabidopsis thaliana
tgtaagaccatctttat

SEQ ID NO: 157105 - DNA, 17 bp, Arabidopsis thaliana
tgtaagactctgcagct

SEQ ID NO: 157106 - DNA, 17 bp, Arabidopsis thaliana
tgtaagatttcgggttt

SEQ ID NO: 157107 - DNA, 17 bp, Arabidopsis thaliana
tgtaagctggtggactg

SEQ ID NO: 157108 - DNA, 17 bp, Arabidopsis thaliana
tgtaagcttatcaactg

SEQ ID NO: 157109 - DNA, 17 bp, Arabidopsis thaliana
tgtaaggccttgcctaa

SEQ ID NO: 157110 - DNA, 17 bp, Arabidopsis thaliana
tgtaaggccttttcttg

SEQ ID NO: 157111 - DNA, 17 bp, Arabidopsis thaliana
tgtaagggccaggtcgg

SEQ ID NO: 157112 - DNA, 17 bp, Arabidopsis thaliana
tgtaaggttccatctca

SEQ ID NO: 157113 - DNA, 17 bp, Arabidopsis thaliana
tgtaagtgactgtgttg

SEQ ID NO: 157114 - DNA, 17 bp, Arabidopsis thaliana
tgtaagtgccttttgta

SEQ ID NO: 157115 - DNA, 17 bp, Arabidopsis thaliana
tgtaataagaatcggcc

SEQ ID NO: 157116 - DNA, 17 bp, Arabidopsis thaliana
tgtaataatcggggtga

SEQ ID NO: 157117 - DNA, 17 bp, Arabidopsis thaliana
tgtaatagtcggtcttt

SEQ ID NO: 157118 - DNA, 17 bp, Arabidopsis thaliana
tgtaatatatcagggcc

SEQ ID NO: 157119 - DNA, 17 bp, Arabidopsis thaliana
tgtaatccccacaggtc

SEQ ID NO: 157120 - DNA, 17 bp, Arabidopsis thaliana
tgtaatcggtaccggcg

SEQ ID NO: 157121 - DNA, 17 bp, Arabidopsis thaliana
tgtaatctctccaggtc

SEQ ID NO: 157122 - DNA, 17 bp, Arabidopsis thaliana
tgtaatgatgtaagtgg

SEQ ID NO: 157123 - DNA, 17 bp, Arabidopsis thaliana
tgtaatggacccatagc

SEQ ID NO: 157124 - DNA, 17 bp, Arabidopsis thaliana
tgtaatgggatcacgca

SEQ ID NO: 157125 - DNA, 17 bp, Arabidopsis thaliana
tgtaattattgcaatct

SEQ ID NO: 157126 - DNA, 17 bp, Arabidopsis thaliana
tgtaattcgctgagatt

SEQ ID NO: 157127 - DNA, 17 bp, Arabidopsis thaliana
tgtaatttcaaaattga

SEQ ID NO: 157128 - DNA, 17 bp, Arabidopsis thaliana
tgtacaaacgagagagg

SEQ ID NO: 157129 - DNA, 17 bp, Arabidopsis thaliana
tgtacaactatgtcatt

SEQ ID NO: 157130 - DNA, 17 bp, Arabidopsis thaliana
tgtacaactctgttgtc

SEQ ID NO: 157131 - DNA, 17 bp, Arabidopsis thaliana
tgtacaactttgacagt

SEQ ID NO: 157132 - DNA, 17 bp, Arabidopsis thaliana
tgtacaagagtggaaac

SEQ ID NO: 157133 - DNA, 17 bp, Arabidopsis thaliana
tgtacaagtgcggatca

SEQ ID NO: 157134 - DNA, 17 bp, Arabidopsis thaliana
tgtacaagtgtgtacac

SEQ ID NO: 157135 - DNA, 17 bp, Arabidopsis thaliana
tgtacaatggtcaacgc

SEQ ID NO: 157136 - DNA, 17 bp, Arabidopsis thaliana
tgtacaatggttgggac

SEQ ID NO: 157137 - DNA, 17 bp, Arabidopsis thaliana
tgtacaattataaccgt

SEQ ID NO: 157138 - DNA, 17 bp, Arabidopsis thaliana
tgtacaattatagccgt

SEQ ID NO: 157139 - DNA, 17 bp, Arabidopsis thaliana
tgtacacacatctcgat

SEQ ID NO: 157140 - DNA, 17 bp, Arabidopsis thaliana
tgtacacaccgaccacc

SEQ ID NO: 157141 - DNA, 17 bp, Arabidopsis thaliana
tgtacacaccgcccatc

SEQ ID NO: 157142 - DNA, 17 bp, Arabidopsis thaliana
tgtacacaccgcccgcc

SEQ ID NO: 157143 - DNA, 17 bp, Arabidopsis thaliana
tgtacacaccgcccgtc

SEQ ID NO: 157144 - DNA, 17 bp, Arabidopsis thaliana
tgtacaccactgtacgg

SEQ ID NO: 157145 - DNA, 17 bp, Arabidopsis thaliana
tgtacacggtcggctgg

SEQ ID NO: 157146 - DNA, 17 bp, Arabidopsis thaliana
tgtacactcgatctcca

SEQ ID NO: 157147 - DNA, 17 bp, Arabidopsis thaliana
tgtacactgcagtctcc

SEQ ID NO: 157148 - DNA, 17 bp, Arabidopsis thaliana
tgtacactgttccggtt

SEQ ID NO: 157149 - DNA, 17 bp, Arabidopsis thaliana
tgtacagacccgggttc

SEQ ID NO: 157150 - DNA, 17 bp, Arabidopsis thaliana
tgtacagaccggtagac

SEQ ID NO: 157151 - DNA, 17 bp, Arabidopsis thaliana
tgtacagagcgaactgc

SEQ ID NO: 157152 - DNA, 17 bp, Arabidopsis thaliana
tgtacagatagcggtgt

SEQ ID NO: 157153 - DNA, 17 bp, Arabidopsis thaliana
tgtacagttgaccggat

SEQ ID NO: 157154 - DNA, 17 bp, Arabidopsis thaliana
tgtacagttggccggat

SEQ ID NO: 157155 - DNA, 17 bp, Arabidopsis thaliana
tgtacatcccatggatt

SEQ ID NO: 157156 - DNA, 17 bp, Arabidopsis thaliana
tgtacatcgttgaaaat

SEQ ID NO: 157157 - DNA, 17 bp, Arabidopsis thaliana
tgtacatcgttggagat

SEQ ID NO: 157158 - DNA, 17 bp, Arabidopsis thaliana
tgtacatcgttggaggt

SEQ ID NO: 157159 - DNA, 17 bp, Arabidopsis thaliana
tgtacatcgttgtagag

SEQ ID NO: 157160 - DNA, 17 bp, Arabidopsis thaliana
tgtacatcgttgtagat

SEQ ID NO: 157161 - DNA, 17 bp, Arabidopsis thaliana
tgtacatcgttgtatac

SEQ ID NO: 157162 - DNA, 17 bp, Arabidopsis thaliana
tgtacatctagtcgccc

SEQ ID NO: 157163 - DNA, 17 bp, Arabidopsis thaliana
tgtacatgtgacttgtg

SEQ ID NO: 157164 - DNA, 17 bp, Arabidopsis thaliana
tgtacatgtttcgcaga

SEQ ID NO: 157165 - DNA, 17 bp, Arabidopsis thaliana
tgtaccaccgcgagcaa

SEQ ID NO: 157166 - DNA, 17 bp, Arabidopsis thaliana
tgtaccacttctgcagc

SEQ ID NO: 157167 - DNA, 17 bp, Arabidopsis thaliana
tgtaccagatggactta

SEQ ID NO: 157168 - DNA, 17 bp, Arabidopsis thaliana
tgtaccaggcggcacag

SEQ ID NO: 157169 - DNA, 17 bp, Arabidopsis thaliana
tgtaccaggtggcacag

SEQ ID NO: 157170 - DNA, 17 bp, Arabidopsis thaliana
tgtaccatatgagccga

SEQ ID NO: 157171 - DNA, 17 bp, Arabidopsis thaliana
tgtacccaagacctcct

SEQ ID NO: 157172 - DNA, 17 bp, Arabidopsis thaliana
tgtacccagacgagttc

SEQ ID NO: 157173 - DNA, 17 bp, Arabidopsis thaliana
tgtacccagtgatttca

SEQ ID NO: 157174 - DNA, 17 bp, Arabidopsis thaliana
tgtacccgaaaccgaca

SEQ ID NO: 157175 - DNA, 17 bp, Arabidopsis thaliana
tgtacccgggttcattt

SEQ ID NO: 157176 - DNA, 17 bp, Arabidopsis thaliana
tgtacccgtcagttttg

SEQ ID NO: 157177 - DNA, 17 bp, Arabidopsis thaliana
tgtacccgtcggctttg

SEQ ID NO: 157178 - DNA, 17 bp, Arabidopsis thaliana
tgtaccgaaccgcatca

SEQ ID NO: 157179 - DNA, 17 bp, Arabidopsis thaliana
tgtaccgcctaagcttg

SEQ ID NO: 157180 - DNA, 17 bp, Arabidopsis thaliana
tgtaccgcgggtcaaaa

SEQ ID NO: 157181 - DNA, 17 bp, Arabidopsis thaliana
tgtaccgcgggttaaaa

SEQ ID NO: 157182 - DNA, 17 bp, Arabidopsis thaliana
tgtaccgcggtgacaat

SEQ ID NO: 157183 - DNA, 17 bp, Arabidopsis thaliana
tgtaccgctggactcac

SEQ ID NO: 157184 - DNA, 17 bp, Arabidopsis thaliana
tgtaccgggacaatgcg

SEQ ID NO: 157185 - DNA, 17 bp, Arabidopsis thaliana
tgtaccgggatttgcta

SEQ ID NO: 157186 - DNA, 17 bp, Arabidopsis thaliana
tgtaccggggttgaccg

SEQ ID NO: 157187 - DNA, 17 bp, Arabidopsis thaliana
tgtaccgtgcttgagac

SEQ ID NO: 157188 - DNA, 17 bp, Arabidopsis thaliana
tgtaccgttgctttgtg

SEQ ID NO: 157189 - DNA, 17 bp, Arabidopsis thaliana
tgtacctatgggggtct

SEQ ID NO: 157190 - DNA, 17 bp, Arabidopsis thaliana
tgtacctccgtttttcc

SEQ ID NO: 157191 - DNA, 17 bp, Arabidopsis thaliana
tgtacctcggactcaac

SEQ ID NO: 157192 - DNA, 17 bp, Arabidopsis thaliana
tgtacctcggatttggg

SEQ ID NO: 157193 - DNA, 17 bp, Arabidopsis thaliana
tgtacctctcatgcttg

SEQ ID NO: 157194 - DNA, 17 bp, Arabidopsis thaliana
tgtacctcttacgtctc

SEQ ID NO: 157195 - DNA, 17 bp, Arabidopsis thaliana
tgtaccttagctcagtt

SEQ ID NO: 157196 - DNA, 17 bp, Arabidopsis thaliana
tgtacgaaatttgcacg

SEQ ID NO: 157197 - DNA, 17 bp, Arabidopsis thaliana
tgtacgaggcgtcattg

SEQ ID NO: 157198 - DNA, 17 bp, Arabidopsis thaliana
tgtacgatggttgtcgt

SEQ ID NO: 157199 - DNA, 17 bp, Arabidopsis thaliana
tgtacgattcggtcagc

SEQ ID NO: 157200 - DNA, 17 bp, Arabidopsis thaliana
tgtacgatttcatttca

SEQ ID NO: 157201 - DNA, 17 bp, Arabidopsis thaliana
tgtacgcgccttcgcct

SEQ ID NO: 157202 - DNA, 17 bp, Arabidopsis thaliana
tgtacgcggattacggt

SEQ ID NO: 157203 - DNA, 17 bp, Arabidopsis thaliana
tgtacggaccgcttctt

SEQ ID NO: 157204 - DNA, 17 bp, Arabidopsis thaliana
tgtacggctttggctcg

SEQ ID NO: 157205 - DNA, 17 bp, Arabidopsis thaliana
tgtacgggaggccatgc

SEQ ID NO: 157206 - DNA, 17 bp, Arabidopsis thaliana
tgtacgggtttctgcct

SEQ ID NO: 157207 - DNA, 17 bp, Arabidopsis thaliana
tgtacggtttagttagt

SEQ ID NO: 157208 - DNA, 17 bp, Arabidopsis thaliana
tgtacggtttagtttag

SEQ ID NO: 157209 - DNA, 17 bp, Arabidopsis thaliana
tgtacgtcttcattcgg

SEQ ID NO: 157210 - DNA, 17 bp, Arabidopsis thaliana
tgtacgtttgtgttatg

SEQ ID NO: 157211 - DNA, 17 bp, Arabidopsis thaliana
tgtactactgcccattg

SEQ ID NO: 157212 - DNA, 17 bp, Arabidopsis thaliana
tgtactagattttatcc

SEQ ID NO: 157213 - DNA, 17 bp, Arabidopsis thaliana
tgtactaggatgggtga

SEQ ID NO: 157214 - DNA, 17 bp, Arabidopsis thaliana
tgtactatggacgggat

SEQ ID NO: 157215 - DNA, 17 bp, Arabidopsis thaliana
tgtactcaagtttgcgc

SEQ ID NO: 157216 - DNA, 17 bp, Arabidopsis thaliana
tgtactcaagtttgcgt

SEQ ID NO: 157217 - DNA, 17 bp, Arabidopsis thaliana
tgtactcaccttttcat

SEQ ID NO: 157218 - DNA, 17 bp, Arabidopsis thaliana
tgtactctggatgatga

SEQ ID NO: 157219 - DNA, 17 bp, Arabidopsis thaliana
tgtactgcaggaggttt

SEQ ID NO: 157220 - DNA, 17 bp, Arabidopsis thaliana
tgtactgctgacggatt

SEQ ID NO: 157221 - DNA, 17 bp, Arabidopsis thaliana
tgtactgctggggcttg

SEQ ID NO: 157222 - DNA, 17 bp, Arabidopsis thaliana
tgtactgctggtctctc

SEQ ID NO: 157223 - DNA, 17 bp, Arabidopsis thaliana
tgtactgtgaccggtgg

SEQ ID NO: 157224 - DNA, 17 bp, Arabidopsis thaliana
tgtacttctgaatggtt

SEQ ID NO: 157225 - DNA, 17 bp, Arabidopsis thaliana
tgtacttgttcgttacc

SEQ ID NO: 157226 - DNA, 17 bp, Arabidopsis thaliana
tgtactttacaggatga

SEQ ID NO: 157227 - DNA, 17 bp, Arabidopsis thaliana
tgtactttcagctcacg

SEQ ID NO: 157228 - DNA, 17 bp, Arabidopsis thaliana
tgtactttcggttctaa

SEQ ID NO: 157229 - DNA, 17 bp, Arabidopsis thaliana
tgtactttcggttctcc

SEQ ID NO: 157230 - DNA, 17 bp, Arabidopsis thaliana
tgtactttcggttttcc

SEQ ID NO: 157231 - DNA, 17 bp, Arabidopsis thaliana
tgtactttgatcctctg

SEQ ID NO: 157232 - DNA, 17 bp, Arabidopsis thaliana
tgtagaagtgcctaaac

SEQ ID NO: 157233 - DNA, 17 bp, Arabidopsis thaliana
tgtagaccggggttgaa

SEQ ID NO: 157234 - DNA, 17 bp, Arabidopsis thaliana
tgtagacgttcacgatc

SEQ ID NO: 157235 - DNA, 17 bp, Arabidopsis thaliana
tgtagacttgtccactc

SEQ ID NO: 157236 - DNA, 17 bp, Arabidopsis thaliana
tgtagactttcgggctt

SEQ ID NO: 157237 - DNA, 17 bp, Arabidopsis thaliana
tgtagagaccatccaac

SEQ ID NO: 157238 - DNA, 17 bp, Arabidopsis thaliana
tgtagagacggagtaat

SEQ ID NO: 157239 - DNA, 17 bp, Arabidopsis thaliana
tgtagagactttcgctg

SEQ ID NO: 157240 - DNA, 17 bp, Arabidopsis thaliana
tgtagagattccaaagt

SEQ ID NO: 157241 - DNA, 17 bp, Arabidopsis thaliana
tgtagagcttctctggc

SEQ ID NO: 157242 - DNA, 17 bp, Arabidopsis thaliana
tgtagaggctcatgatt

SEQ ID NO: 157243 - DNA, 17 bp, Arabidopsis thaliana
tgtagagtgtcgcagta

SEQ ID NO: 157244 - DNA, 17 bp, Arabidopsis thaliana
tgtagatagatcgtcac

SEQ ID NO: 157245 - DNA, 17 bp, Arabidopsis thaliana
tgtagatcggatcgcga

SEQ ID NO: 157246 - DNA, 17 bp, Arabidopsis thaliana
tgtagatctcgtggaca

SEQ ID NO: 157247 - DNA, 17 bp, Arabidopsis thaliana
tgtagatctctgccata

SEQ ID NO: 157248 - DNA, 17 bp, Arabidopsis thaliana
tgtagatctttaggtcg

SEQ ID NO: 157249 - DNA, 17 bp, Arabidopsis thaliana
tgtagatggagcacttt

SEQ ID NO: 157250 - DNA, 17 bp, Arabidopsis thaliana
tgtagatggaggtgtgc

SEQ ID NO: 157251 - DNA, 17 bp, Arabidopsis thaliana
tgtagatggatcaaatt

SEQ ID NO: 157252 - DNA, 17 bp, Arabidopsis thaliana
tgtagatggatcagtcg

SEQ ID NO: 157253 - DNA, 17 bp, Arabidopsis thaliana
tgtagatggatcatcac

SEQ ID NO: 157254 - DNA, 17 bp, Arabidopsis thaliana
tgtagatggatcatcta

SEQ ID NO: 157255 - DNA, 17 bp, Arabidopsis thaliana
tgtagatggatcattat

SEQ ID NO: 157256 - DNA, 17 bp, Arabidopsis thaliana
tgtagatggatccaaga

SEQ ID NO: 157257 - DNA, 17 bp, Arabidopsis thaliana
tgtagatggatcccgac

SEQ ID NO: 157258 - DNA, 17 bp, Arabidopsis thaliana
tgtagatggatccttag

SEQ ID NO: 157259 - DNA, 17 bp, Arabidopsis thaliana
tgtagatggatcggcgc

SEQ ID NO: 157260 - DNA, 17 bp, Arabidopsis thaliana
tgtagatggatcgggca

SEQ ID NO: 157261 - DNA, 17 bp, Arabidopsis thaliana
tgtagatggatcgtcac

SEQ ID NO: 157262 - DNA, 17 bp, Arabidopsis thaliana
tgtagatggatcgtcgc

SEQ ID NO: 157263 - DNA, 17 bp, Arabidopsis thaliana
tgtagatggatcgttcg

SEQ ID NO: 157264 - DNA, 17 bp, Arabidopsis thaliana
tgtagatggatctaaat

SEQ ID NO: 157265 - DNA, 17 bp, Arabidopsis thaliana
tgtagatggatctacat

SEQ ID NO: 157266 - DNA, 17 bp, Arabidopsis thaliana
tgtagatggatctattc

SEQ ID NO: 157267 - DNA, 17 bp, Arabidopsis thaliana
tgtagatggatctgacg

SEQ ID NO: 157268 - DNA, 17 bp, Arabidopsis thaliana
tgtagatggatctgtag

SEQ ID NO: 157269 - DNA, 17 bp, Arabidopsis thaliana
tgtagatggatcttgtt

SEQ ID NO: 157270 - DNA, 17 bp, Arabidopsis thaliana
tgtagatggatctttgg

SEQ ID NO: 157271 - DNA, 17 bp, Arabidopsis thaliana
tgtagatggatggtctt

SEQ ID NO: 157272 - DNA, 17 bp, Arabidopsis thaliana
tgtagatggtttgtccg

SEQ ID NO: 157273 - DNA, 17 bp, Arabidopsis thaliana
tgtagatgtcgtctacc

SEQ ID NO: 157274 - DNA, 17 bp, Arabidopsis thaliana
tgtagattaacgcgtac

SEQ ID NO: 157275 - DNA, 17 bp, Arabidopsis thaliana
tgtagattggattgatt

SEQ ID NO: 157276 - DNA, 17 bp, Arabidopsis thaliana
tgtagatttcatttgtg

SEQ ID NO: 157277 - DNA, 17 bp, Arabidopsis thaliana
tgtagatttcgtcatga

SEQ ID NO: 157278 - DNA, 17 bp, Arabidopsis thaliana
tgtagattttgctctcg

SEQ ID NO: 157279 - DNA, 17 bp, Arabidopsis thaliana
tgtagcaagagcttgag

SEQ ID NO: 157280 - DNA, 17 bp, Arabidopsis thaliana
tgtagcaccaaactaaa

SEQ ID NO: 157281 - DNA, 17 bp, Arabidopsis thaliana
tgtagcagcttcggagc

SEQ ID NO: 157282 - DNA, 17 bp, Arabidopsis thaliana
tgtagccaaagtccata

SEQ ID NO: 157283 - DNA, 17 bp, Arabidopsis thaliana
tgtagccaaagtccgta

SEQ ID NO: 157284 - DNA, 17 bp, Arabidopsis thaliana
tgtagccccagagcctt

SEQ ID NO: 157285 - DNA, 17 bp, Arabidopsis thaliana
tgtagccctgcggtgcc

SEQ ID NO: 157286 - DNA, 17 bp, Arabidopsis thaliana
tgtagccgacaagtact

SEQ ID NO: 157287 - DNA, 17 bp, Arabidopsis thaliana
tgtagccgaggagcagc

SEQ ID NO: 157288 - DNA, 17 bp, Arabidopsis thaliana
tgtagccgttatatccg

SEQ ID NO: 157289 - DNA, 17 bp, Arabidopsis thaliana
tgtagcgatcgtcctct

SEQ ID NO: 157290 - DNA, 17 bp, Arabidopsis thaliana
tgtagcgcagtgcggat

SEQ ID NO: 157291 - DNA, 17 bp, Arabidopsis thaliana
tgtagcggacaaaacgg

SEQ ID NO: 157292 - DNA, 17 bp, Arabidopsis thaliana
tgtagcggaccaagtac

SEQ ID NO: 157293 - DNA, 17 bp, Arabidopsis thaliana
tgtagcggttctgcacg

SEQ ID NO: 157294 - DNA, 17 bp, Arabidopsis thaliana
tgtagcgttcgtgatcg

SEQ ID NO: 157295 - DNA, 17 bp, Arabidopsis thaliana
tgtagctgccagcatga

SEQ ID NO: 157296 - DNA, 17 bp, Arabidopsis thaliana
tgtagctgcggttttgt

SEQ ID NO: 157297 - DNA, 17 bp, Arabidopsis thaliana
tgtaggaacctgcggaa

SEQ ID NO: 157298 - DNA, 17 bp, Arabidopsis thaliana
tgtaggacgtgtcggct

SEQ ID NO: 157299 - DNA, 17 bp, Arabidopsis thaliana
tgtaggagagtggaccg

SEQ ID NO: 157300 - DNA, 17 bp, Arabidopsis thaliana
tgtaggatctacggtgc

SEQ ID NO: 157301 - DNA, 17 bp, Arabidopsis thaliana
tgtaggatttagagtga

SEQ ID NO: 157302 - DNA, 17 bp, Arabidopsis thaliana
tgtaggcaagcacgaga

SEQ ID NO: 157303 - DNA, 17 bp, Arabidopsis thaliana
tgtaggcaagggaagtc

SEQ ID NO: 157304 - DNA, 17 bp, Arabidopsis thaliana
tgtaggcaccgctttga

SEQ ID NO: 157305 - DNA, 17 bp, Arabidopsis thaliana
tgtaggccctgttcgtt

SEQ ID NO: 157306 - DNA, 17 bp, Arabidopsis thaliana
tgtaggcggtcgcctga

SEQ ID NO: 157307 - DNA, 17 bp, Arabidopsis thaliana
tgtaggcgtctctggta

SEQ ID NO: 157308 - DNA, 17 bp, Arabidopsis thaliana
tgtaggctaacttgttc

SEQ ID NO: 157309 - DNA, 17 bp, Arabidopsis thaliana
tgtaggcttctacaagt

SEQ ID NO: 157310 - DNA, 17 bp, Arabidopsis thaliana
tgtaggcttctcttgat

SEQ ID NO: 157311 - DNA, 17 bp, Arabidopsis thaliana
tgtagggaaattctgct

SEQ ID NO: 157312 - DNA, 17 bp, Arabidopsis thaliana
tgtaggtatcggcaatc

SEQ ID NO: 157313 - DNA, 17 bp, Arabidopsis thaliana
tgtaggtgaacctgcgg

SEQ ID NO: 157314 - DNA, 17 bp, Arabidopsis thaliana
tgtaggtgacctttgag

SEQ ID NO: 157315 - DNA, 17 bp, Arabidopsis thaliana
tgtaggtgtgatgactg

SEQ ID NO: 157316 - DNA, 17 bp, Arabidopsis thaliana
tgtaggtgtgatggctg

SEQ ID NO: 157317 - DNA, 17 bp, Arabidopsis thaliana
tgtaggtgtgatggttg

SEQ ID NO: 157318 - DNA, 17 bp, Arabidopsis thaliana
tgtaggttcgagcccta

SEQ ID NO: 157319 - DNA, 17 bp, Arabidopsis thaliana
tgtaggttttgcaccat

SEQ ID NO: 157320 - DNA, 17 bp, Arabidopsis thaliana
tgtagtacttcggtgcg

SEQ ID NO: 157321 - DNA, 17 bp, Arabidopsis thaliana
tgtagtagacgcagatt

SEQ ID NO: 157322 - DNA, 17 bp, Arabidopsis thaliana
tgtagtcactttcagcg

SEQ ID NO: 157323 - DNA, 17 bp, Arabidopsis thaliana
tgtagtcccgttctcgt

SEQ ID NO: 157324 - DNA, 17 bp, Arabidopsis thaliana
tgtagtccggtcgccgc

SEQ ID NO: 157325 - DNA, 17 bp, Arabidopsis thaliana
tgtagtcgatcaagtcc

SEQ ID NO: 157326 - DNA, 17 bp, Arabidopsis thaliana
tgtagtcgctggttgct

SEQ ID NO: 157327 - DNA, 17 bp, Arabidopsis thaliana
tgtagtctagctggtca

SEQ ID NO: 157328 - DNA, 17 bp, Arabidopsis thaliana
tgtagtctatatcggtt

SEQ ID NO: 157329 - DNA, 17 bp, Arabidopsis thaliana
tgtagtgattagcactc

SEQ ID NO: 157330 - DNA, 17 bp, Arabidopsis thaliana
tgtagtggttagcactc

SEQ ID NO: 157331 - DNA, 17 bp, Arabidopsis thaliana
tgtagtgtgagatgact

SEQ ID NO: 157332 - DNA, 17 bp, Arabidopsis thaliana
tgtagtgtttcaagctt

SEQ ID NO: 157333 - DNA, 17 bp, Arabidopsis thaliana
tgtagttcttaagcgtt

SEQ ID NO: 157334 - DNA, 17 bp, Arabidopsis thaliana
tgtagttgaaccttggg

SEQ ID NO: 157335 - DNA, 17 bp, Arabidopsis thaliana
tgtagttgaatcgcacg

SEQ ID NO: 157336 - DNA, 17 bp, Arabidopsis thaliana
tgtagttgtgttggctg

SEQ ID NO: 157337 - DNA, 17 bp, Arabidopsis thaliana
tgtagttgtgttggttg

SEQ ID NO: 157338 - DNA, 17 bp, Arabidopsis thaliana
tgtagtttcttaagcaa

SEQ ID NO: 157339 - DNA, 17 bp, Arabidopsis thaliana
tgtagtttcttaagcga

SEQ ID NO: 157340 - DNA, 17 bp, Arabidopsis thaliana
tgtagtttcttaagtga

SEQ ID NO: 157341 - DNA, 17 bp, Arabidopsis thaliana
tgtataccctgttgatt

SEQ ID NO: 157342 - DNA, 17 bp, Arabidopsis thaliana
tgtatacgatgagattc

SEQ ID NO: 157343 - DNA, 17 bp, Arabidopsis thaliana
tgtatagacgaggtgta

SEQ ID NO: 157344 - DNA, 17 bp, Arabidopsis thaliana
tgtataggaaagtgcag

SEQ ID NO: 157345 - DNA, 17 bp, Arabidopsis thaliana
tgtatcaaagcacatgc

SEQ ID NO: 157346 - DNA, 17 bp, Arabidopsis thaliana
tgtatcaaatgcaactt

SEQ ID NO: 157347 - DNA, 17 bp, Arabidopsis thaliana
tgtatcaactgctggag

SEQ ID NO: 157348 - DNA, 17 bp, Arabidopsis thaliana
tgtatcaagcaaaattg

SEQ ID NO: 157349 - DNA, 17 bp, Arabidopsis thaliana
tgtatcacggccatgcg

SEQ ID NO: 157350 - DNA, 17 bp, Arabidopsis thaliana
tgtatcagatcgtcact

SEQ ID NO: 157351 - DNA, 17 bp, Arabidopsis thaliana
tgtatcaggtgcgagag

SEQ ID NO: 157352 - DNA, 17 bp, Arabidopsis thaliana
tgtatcatggaatgttg

SEQ ID NO: 157353 - DNA, 17 bp, Arabidopsis thaliana
tgtatccaagctccgag

SEQ ID NO: 157354 - DNA, 17 bp, Arabidopsis thaliana
tgtatccactacagttt

SEQ ID NO: 157355 - DNA, 17 bp, Arabidopsis thaliana
tgtatccattcggtttc

SEQ ID NO: 157356 - DNA, 17 bp, Arabidopsis thaliana
tgtatccctgctgccag

SEQ ID NO: 157357 - DNA, 17 bp, Arabidopsis thaliana
tgtatcctctaacaatg

SEQ ID NO: 157358 - DNA, 17 bp, Arabidopsis thaliana
tgtatcgatgacgtgac

SEQ ID NO: 157359 - DNA, 17 bp, Arabidopsis thaliana
tgtatcgcactgtccgg

SEQ ID NO: 157360 - DNA, 17 bp, Arabidopsis thaliana
tgtatcgccttacggct

SEQ ID NO: 157361 - DNA, 17 bp, Arabidopsis thaliana
tgtatcgcgttacggct

SEQ ID NO: 157362 - DNA, 17 bp, Arabidopsis thaliana
tgtatcgggccaagatt

SEQ ID NO: 157363 - DNA, 17 bp, Arabidopsis thaliana
tgtatcggtggtgtggc

SEQ ID NO: 157364 - DNA, 17 bp, Arabidopsis thaliana
tgtatcgtctgtcgtgg

SEQ ID NO: 157365 - DNA, 17 bp, Arabidopsis thaliana
tgtatcgtcttcaacat

SEQ ID NO: 157366 - DNA, 17 bp, Arabidopsis thaliana
tgtatcgtcttcaacgt

SEQ ID NO: 157367 - DNA, 17 bp, Arabidopsis thaliana
tgtatctcatcccacaa

SEQ ID NO: 157368 - DNA, 17 bp, Arabidopsis thaliana
tgtatctccttctccag

SEQ ID NO: 157369 - DNA, 17 bp, Arabidopsis thaliana
tgtatctcggaccaggc

SEQ ID NO: 157370 - DNA, 17 bp, Arabidopsis thaliana
tgtatctgcacaacgct

SEQ ID NO: 157371 - DNA, 17 bp, Arabidopsis thaliana
tgtatctggtgccatta

SEQ ID NO: 157372 - DNA, 17 bp, Arabidopsis thaliana
tgtatcttcgcctagct

SEQ ID NO: 157373 - DNA, 17 bp, Arabidopsis thaliana
tgtatcttctaggtttg

SEQ ID NO: 157374 - DNA, 17 bp, Arabidopsis thaliana
tgtatcttgtgaatgtc

SEQ ID NO: 157375 - DNA, 17 bp, Arabidopsis thaliana
tgtatcttgttttctgg

SEQ ID NO: 157376 - DNA, 17 bp, Arabidopsis thaliana
tgtatgaacgaattcag

SEQ ID NO: 157377 - DNA, 17 bp, Arabidopsis thaliana
tgtatgaattttgccga

SEQ ID NO: 157378 - DNA, 17 bp, Arabidopsis thaliana
tgtatgacagatttggg

SEQ ID NO: 157379 - DNA, 17 bp, Arabidopsis thaliana
tgtatgacgtgtcggct

SEQ ID NO: 157380 - DNA, 17 bp, Arabidopsis thaliana
tgtatgactttgaaacc

SEQ ID NO: 157381 - DNA, 17 bp, Arabidopsis thaliana
tgtatgagacagttaga

SEQ ID NO: 157382 - DNA, 17 bp, Arabidopsis thaliana
tgtatgagcagttagcg

SEQ ID NO: 157383 - DNA, 17 bp, Arabidopsis thaliana
tgtatgattagtgccga

SEQ ID NO: 157384 - DNA, 17 bp, Arabidopsis thaliana
tgtatgattgacgccga

SEQ ID NO: 157385 - DNA, 17 bp, Arabidopsis thaliana
tgtatgattggtgccga

SEQ ID NO: 157386 - DNA, 17 bp, Arabidopsis thaliana
tgtatgattgtgctcgg

SEQ ID NO: 157387 - DNA, 17 bp, Arabidopsis thaliana
tgtatgattttgaaaac

SEQ ID NO: 157388 - DNA, 17 bp, Arabidopsis thaliana
tgtatgctcgatcgcct

SEQ ID NO: 157389 - DNA, 17 bp, Arabidopsis thaliana
tgtatggactcgagacc

SEQ ID NO: 157390 - DNA, 17 bp, Arabidopsis thaliana
tgtatggagtcaggatc

SEQ ID NO: 157391 - DNA, 17 bp, Arabidopsis thaliana
tgtatgggggctgacgc

SEQ ID NO: 157392 - DNA, 17 bp, Arabidopsis thaliana
tgtatgggtctctagtg

SEQ ID NO: 157393 - DNA, 17 bp, Arabidopsis thaliana
tgtatggtctggggagg

SEQ ID NO: 157394 - DNA, 17 bp, Arabidopsis thaliana
tgtatggtgattgtgtg

SEQ ID NO: 157395 - DNA, 17 bp, Arabidopsis thaliana
tgtatgtaccatcagtc

SEQ ID NO: 157396 - DNA, 17 bp, Arabidopsis thaliana
tgtatgtactgtgaccg

SEQ ID NO: 157397 - DNA, 17 bp, Arabidopsis thaliana
tgtatgtccagctggaa

SEQ ID NO: 157398 - DNA, 17 bp, Arabidopsis thaliana
tgtatgtctgcgtacca

SEQ ID NO: 157399 - DNA, 17 bp, Arabidopsis thaliana
tgtatgtgtgatgactg

SEQ ID NO: 157400 - DNA, 17 bp, Arabidopsis thaliana
tgtatgttgtcgctggt

SEQ ID NO: 157401 - DNA, 17 bp, Arabidopsis thaliana
tgtatgttgtttgtgct

SEQ ID NO: 157402 - DNA, 17 bp, Arabidopsis thaliana
tgtattaggtgcgctga

SEQ ID NO: 157403 - DNA, 17 bp, Arabidopsis thaliana
tgtattcaagattcgca

SEQ ID NO: 157404 - DNA, 17 bp, Arabidopsis thaliana
tgtattcggcggctccc

SEQ ID NO: 157405 - DNA, 17 bp, Arabidopsis thaliana
tgtattctaccttggtt

SEQ ID NO: 157406 - DNA, 17 bp, Arabidopsis thaliana
tgtattctcagttttcc

SEQ ID NO: 157407 - DNA, 17 bp, Arabidopsis thaliana
tgtattgactacaggaa

SEQ ID NO: 157408 - DNA, 17 bp, Arabidopsis thaliana
tgtattgaggttcgttc

SEQ ID NO: 157409 - DNA, 17 bp, Arabidopsis thaliana
tgtattgcggatcggat

SEQ ID NO: 157410 - DNA, 17 bp, Arabidopsis thaliana
tgtattggaacgccttc

SEQ ID NO: 157411 - DNA, 17 bp, Arabidopsis thaliana
tgtattggctgagtgat

SEQ ID NO: 157412 - DNA, 17 bp, Arabidopsis thaliana
tgtattgtagcctgcca

SEQ ID NO: 157413 - DNA, 17 bp, Arabidopsis thaliana
tgtattgttcgtttgac

SEQ ID NO: 157414 - DNA, 17 bp, Arabidopsis thaliana
tgtattgttgatcgact

SEQ ID NO: 157415 - DNA, 17 bp, Arabidopsis thaliana
tgtatttaacggtctag

SEQ ID NO: 157416 - DNA, 17 bp, Arabidopsis thaliana
tgtatttaccatcatgc

SEQ ID NO: 157417 - DNA, 17 bp, Arabidopsis thaliana
tgtatttaggtgcgttt

SEQ ID NO: 157418 - DNA, 17 bp, Arabidopsis thaliana
tgtatttccgagatgtt

SEQ ID NO: 157419 - DNA, 17 bp, Arabidopsis thaliana
tgtatttgacggtgctg

SEQ ID NO: 157420 - DNA, 17 bp, Arabidopsis thaliana
tgtatttggccgtgttg

SEQ ID NO: 157421 - DNA, 17 bp, Arabidopsis thaliana
tgtatttgtgcgccttg

SEQ ID NO: 157422 - DNA, 17 bp, Arabidopsis thaliana
tgtattttcaggttttc

SEQ ID NO: 157423 - DNA, 17 bp, Arabidopsis thaliana
tgtattttctgattttc

SEQ ID NO: 157424 - DNA, 17 bp, Arabidopsis thaliana
tgtattttgccatggtt

SEQ ID NO: 157425 - DNA, 17 bp, Arabidopsis thaliana
tgtcaaacccatcctgc

SEQ ID NO: 157426 - DNA, 17 bp, Arabidopsis thaliana
tgtcaaacccgtcccgc

SEQ ID NO: 157427 - DNA, 17 bp, Arabidopsis thaliana
tgtcaaacgggcttagt

SEQ ID NO: 157428 - DNA, 17 bp, Arabidopsis thaliana
tgtcaaagacttgggtg

SEQ ID NO: 157429 - DNA, 17 bp, Arabidopsis thaliana
tgtcaaagggtagtgaa

SEQ ID NO: 157430 - DNA, 17 bp, Arabidopsis thaliana
tgtcaaatgtgaccaat

SEQ ID NO: 157431 - DNA, 17 bp, Arabidopsis thaliana
tgtcaaccaaacgcgtt

SEQ ID NO: 157432 - DNA, 17 bp, Arabidopsis thaliana
tgtcaacgtatcatgcc

SEQ ID NO: 157433 - DNA, 17 bp, Arabidopsis thaliana
tgtcaaggagcatggcc

SEQ ID NO: 157434 - DNA, 17 bp, Arabidopsis thaliana
tgtcaaggctaagttac

SEQ ID NO: 157435 - DNA, 17 bp, Arabidopsis thaliana
tgtcaatcgcgggttgc

SEQ ID NO: 157436 - DNA, 17 bp, Arabidopsis thaliana
tgtcaatcttgggctca

SEQ ID NO: 157437 - DNA, 17 bp, Arabidopsis thaliana
tgtcaatgttatggccg

SEQ ID NO: 157438 - DNA, 17 bp, Arabidopsis thaliana
tgtcaattccgctgcaa

SEQ ID NO: 157439 - DNA, 17 bp, Arabidopsis thaliana
tgtcacaaaactgtcgc

SEQ ID NO: 157440 - DNA, 17 bp, Arabidopsis thaliana
tgtcacaatccaatgca

SEQ ID NO: 157441 - DNA, 17 bp, Arabidopsis thaliana
tgtcacacagttggaga

SEQ ID NO: 157442 - DNA, 17 bp, Arabidopsis thaliana
tgtcacacggcatagac

SEQ ID NO: 157443 - DNA, 17 bp, Arabidopsis thaliana
tgtcacagctgttcgcg

SEQ ID NO: 157444 - DNA, 17 bp, Arabidopsis thaliana
tgtcacaggtgccatcg

SEQ ID NO: 157445 - DNA, 17 bp, Arabidopsis thaliana
tgtcacaggttcgatat

SEQ ID NO: 157446 - DNA, 17 bp, Arabidopsis thaliana
tgtcacagttctatacc

SEQ ID NO: 157447 - DNA, 17 bp, Arabidopsis thaliana
tgtcacagttggcgatt

SEQ ID NO: 157448 - DNA, 17 bp, Arabidopsis thaliana
tgtcacatccgggaatt

SEQ ID NO: 157449 - DNA, 17 bp, Arabidopsis thaliana
tgtcacatgggtgtcaa

SEQ ID NO: 157450 - DNA, 17 bp, Arabidopsis thaliana
tgtcacatttctgacct

SEQ ID NO: 157451 - DNA, 17 bp, Arabidopsis thaliana
tgtcacatttctgagct

SEQ ID NO: 157452 - DNA, 17 bp, Arabidopsis thaliana
tgtcaccaccgtcgcct

SEQ ID NO: 157453 - DNA, 17 bp, Arabidopsis thaliana
tgtcaccatcaagggca

SEQ ID NO: 157454 - DNA, 17 bp, Arabidopsis thaliana
tgtcaccatttcgtcag

SEQ ID NO: 157455 - DNA, 17 bp, Arabidopsis thaliana
tgtcaccattttcgtca

SEQ ID NO: 157456 - DNA, 17 bp, Arabidopsis thaliana
tgtcaccggatcttcac

SEQ ID NO: 157457 - DNA, 17 bp, Arabidopsis thaliana
tgtcaccgtccgctgac

SEQ ID NO: 157458 - DNA, 17 bp, Arabidopsis thaliana
tgtcacctgctgctgag

SEQ ID NO: 157459 - DNA, 17 bp, Arabidopsis thaliana
tgtcacgacaatggatt

SEQ ID NO: 157460 - DNA, 17 bp, Arabidopsis thaliana
tgtcacgcgggtgaccc

SEQ ID NO: 157461 - DNA, 17 bp, Arabidopsis thaliana
tgtcacgctcttggcaa

SEQ ID NO: 157462 - DNA, 17 bp, Arabidopsis thaliana
tgtcacggatgaagcac

SEQ ID NO: 157463 - DNA, 17 bp, Arabidopsis thaliana
tgtcacgtcacctgatc

SEQ ID NO: 157464 - DNA, 17 bp, Arabidopsis thaliana
tgtcacgtcggcctggg

SEQ ID NO: 157465 - DNA, 17 bp, Arabidopsis thaliana
tgtcacgtctgcctggg

SEQ ID NO: 157466 - DNA, 17 bp, Arabidopsis thaliana
tgtcacgttaccgaggg

SEQ ID NO: 157467 - DNA, 17 bp, Arabidopsis thaliana
tgtcacgttggattgga

SEQ ID NO: 157468 - DNA, 17 bp, Arabidopsis thaliana
tgtcactagaaacgccg

SEQ ID NO: 157469 - DNA, 17 bp, Arabidopsis thaliana
tgtcactagacggtcgt

SEQ ID NO: 157470 - DNA, 17 bp, Arabidopsis thaliana
tgtcactatttccaaag

SEQ ID NO: 157471 - DNA, 17 bp, Arabidopsis thaliana
tgtcactccatgcagaa

SEQ ID NO: 157472 - DNA, 17 bp, Arabidopsis thaliana
tgtcactccatttttgc

SEQ ID NO: 157473 - DNA, 17 bp, Arabidopsis thaliana
tgtcactcctagaccac

SEQ ID NO: 157474 - DNA, 17 bp, Arabidopsis thaliana
tgtcactcgaaccgacg

SEQ ID NO: 157475 - DNA, 17 bp, Arabidopsis thaliana
tgtcactcgagctgcca

SEQ ID NO: 157476 - DNA, 17 bp, Arabidopsis thaliana
tgtcactcgccgtcgtt

SEQ ID NO: 157477 - DNA, 17 bp, Arabidopsis thaliana
tgtcactgatttgtttt

SEQ ID NO: 157478 - DNA, 17 bp, Arabidopsis thaliana
tgtcactgctctatctg

SEQ ID NO: 157479 - DNA, 17 bp, Arabidopsis thaliana
tgtcactgcttatggac

SEQ ID NO: 157480 - DNA, 17 bp, Arabidopsis thaliana
tgtcactggagcttcca

SEQ ID NO: 157481 - DNA, 17 bp, Arabidopsis thaliana
tgtcacttgttgctgtc

SEQ ID NO: 157482 - DNA, 17 bp, Arabidopsis thaliana
tgtcactttacttggca

SEQ ID NO: 157483 - DNA, 17 bp, Arabidopsis thaliana
tgtcagaaaactgggtg

SEQ ID NO: 157484 - DNA, 17 bp, Arabidopsis thaliana
tgtcagaaaagttacca

SEQ ID NO: 157485 - DNA, 17 bp, Arabidopsis thaliana
tgtcagaaccatgcgaa

SEQ ID NO: 157486 - DNA, 17 bp, Arabidopsis thaliana
tgtcagaacctacgggc

SEQ ID NO: 157487 - DNA, 17 bp, Arabidopsis thaliana
tgtcagaattatgcgtt

SEQ ID NO: 157488 - DNA, 17 bp, Arabidopsis thaliana
tgtcagaccacactctc

SEQ ID NO: 157489 - DNA, 17 bp, Arabidopsis thaliana
tgtcagaccacctctct

SEQ ID NO: 157490 - DNA, 17 bp, Arabidopsis thaliana
tgtcagactatgtcgaa

SEQ ID NO: 157491 - DNA, 17 bp, Arabidopsis thaliana
tgtcagacttacagcct

SEQ ID NO: 157492 - DNA, 17 bp, Arabidopsis thaliana
tgtcagaggagcaaaag

SEQ ID NO: 157493 - DNA, 17 bp, Arabidopsis thaliana
tgtcagatctaattcac

SEQ ID NO: 157494 - DNA, 17 bp, Arabidopsis thaliana
tgtcagatcttacagct

SEQ ID NO: 157495 - DNA, 17 bp, Arabidopsis thaliana
tgtcagatggggagttt

SEQ ID NO: 157496 - DNA, 17 bp, Arabidopsis thaliana
tgtcagatgtgccacaa

SEQ ID NO: 157497 - DNA, 17 bp, Arabidopsis thaliana
tgtcagatgtggccgtc

SEQ ID NO: 157498 - DNA, 17 bp, Arabidopsis thaliana
tgtcagattatccagaa

SEQ ID NO: 157499 - DNA, 17 bp, Arabidopsis thaliana
tgtcagcacttagcagc

SEQ ID NO: 157500 - DNA, 17 bp, Arabidopsis thaliana
tgtcagccaaaactttg

SEQ ID NO: 157501 - DNA, 17 bp, Arabidopsis thaliana
tgtcagccgactgctca

SEQ ID NO: 157502 - DNA, 17 bp, Arabidopsis thaliana
tgtcagcggactgctcg

SEQ ID NO: 157503 - DNA, 17 bp, Arabidopsis thaliana
tgtcagctaggttttcg

SEQ ID NO: 157504 - DNA, 17 bp, Arabidopsis thaliana
tgtcagctccttcggct

SEQ ID NO: 157505 - DNA, 17 bp, Arabidopsis thaliana
tgtcagctttgaacgac

SEQ ID NO: 157506 - DNA, 17 bp, Arabidopsis thaliana
tgtcaggaagaggctct

SEQ ID NO: 157507 - DNA, 17 bp, Arabidopsis thaliana
tgtcaggacctacgggc

SEQ ID NO: 157508 - DNA, 17 bp, Arabidopsis thaliana
tgtcaggacgggtttgg

SEQ ID NO: 157509 - DNA, 17 bp, Arabidopsis thaliana
tgtcaggattgggtaat

SEQ ID NO: 157510 - DNA, 17 bp, Arabidopsis thaliana
tgtcagggatgaggcac

SEQ ID NO: 157511 - DNA, 17 bp, Arabidopsis thaliana
tgtcagggctgcgagcg

SEQ ID NO: 157512 - DNA, 17 bp, Arabidopsis thaliana
tgtcaggtaagttcatc

SEQ ID NO: 157513 - DNA, 17 bp, Arabidopsis thaliana
tgtcaggtgcgagtttg

SEQ ID NO: 157514 - DNA, 17 bp, Arabidopsis thaliana
tgtcaggtggattctga

SEQ ID NO: 157515 - DNA, 17 bp, Arabidopsis thaliana
tgtcaggtgggagtttg

SEQ ID NO: 157516 - DNA, 17 bp, Arabidopsis thaliana
tgtcaggtggggagttt

SEQ ID NO: 157517 - DNA, 17 bp, Arabidopsis thaliana
tgtcaggttgggaggct

SEQ ID NO: 157518 - DNA, 17 bp, Arabidopsis thaliana
tgtcagtatgcagaaac

SEQ ID NO: 157519 - DNA, 17 bp, Arabidopsis thaliana
tgtcagtggcttctctt

SEQ ID NO: 157520 - DNA, 17 bp, Arabidopsis thaliana
tgtcagttcagttggtt

SEQ ID NO: 157521 - DNA, 17 bp, Arabidopsis thaliana
tgtcagttgaaacccga

SEQ ID NO: 157522 - DNA, 17 bp, Arabidopsis thaliana
tgtcagttgggtttttg

SEQ ID NO: 157523 - DNA, 17 bp, Arabidopsis thaliana
tgtcagtttcgaccagt

SEQ ID NO: 157524 - DNA, 17 bp, Arabidopsis thaliana
tgtcataacggctcaat

SEQ ID NO: 157525 - DNA, 17 bp, Arabidopsis thaliana
tgtcataagatctctga

SEQ ID NO: 157526 - DNA, 17 bp, Arabidopsis thaliana
tgtcataaggcttcatt

SEQ ID NO: 157527 - DNA, 17 bp, Arabidopsis thaliana
tgtcataatcgcttggt

SEQ ID NO: 157528 - DNA, 17 bp, Arabidopsis thaliana
tgtcataatctcgtgag

SEQ ID NO: 157529 - DNA, 17 bp, Arabidopsis thaliana
tgtcataccatcaggcc

SEQ ID NO: 157530 - DNA, 17 bp, Arabidopsis thaliana
tgtcatagacccaaccg

SEQ ID NO: 157531 - DNA, 17 bp, Arabidopsis thaliana
tgtcatatctcttggat

SEQ ID NO: 157532 - DNA, 17 bp, Arabidopsis thaliana
tgtcatcaaagtatccg

SEQ ID NO: 157533 - DNA, 17 bp, Arabidopsis thaliana
tgtcatcaaagtcagtt

SEQ ID NO: 157534 - DNA, 17 bp, Arabidopsis thaliana
tgtcatcaactcgaaga

SEQ ID NO: 157535 - DNA, 17 bp, Arabidopsis thaliana
tgtcatcaccgttgaga

SEQ ID NO: 157536 - DNA, 17 bp, Arabidopsis thaliana
tgtcatcaggtacttcc

SEQ ID NO: 157537 - DNA, 17 bp, Arabidopsis thaliana
tgtcatcagtcggtgga

SEQ ID NO: 157538 - DNA, 17 bp, Arabidopsis thaliana
tgtcatccctttgtcgc

SEQ ID NO: 157539 - DNA, 17 bp, Arabidopsis thaliana
tgtcatccgagtgaccc

SEQ ID NO: 157540 - DNA, 17 bp, Arabidopsis thaliana
tgtcatcctgttgtact

SEQ ID NO: 157541 - DNA, 17 bp, Arabidopsis thaliana
tgtcatccttcggctta

SEQ ID NO: 157542 - DNA, 17 bp, Arabidopsis thaliana
tgtcatcgatttggcca

SEQ ID NO: 157543 - DNA, 17 bp, Arabidopsis thaliana
tgtcatcggttctaacc

SEQ ID NO: 157544 - DNA, 17 bp, Arabidopsis thaliana
tgtcatctaggttgact

SEQ ID NO: 157545 - DNA, 17 bp, Arabidopsis thaliana
tgtcatctcgcgagctc

SEQ ID NO: 157546 - DNA, 17 bp, Arabidopsis thaliana
tgtcatctctattgggg

SEQ ID NO: 157547 - DNA, 17 bp, Arabidopsis thaliana
tgtcatctctggtgtat

SEQ ID NO: 157548 - DNA, 17 bp, Arabidopsis thaliana
tgtcatctcttattccg

SEQ ID NO: 157549 - DNA, 17 bp, Arabidopsis thaliana
tgtcatctgatacgacg

SEQ ID NO: 157550 - DNA, 17 bp, Arabidopsis thaliana
tgtcatctgggatatcc

SEQ ID NO: 157551 - DNA, 17 bp, Arabidopsis thaliana
tgtcatgcggtgtaccg

SEQ ID NO: 157552 - DNA, 17 bp, Arabidopsis thaliana
tgtcatgcttgcctctt

SEQ ID NO: 157553 - DNA, 17 bp, Arabidopsis thaliana
tgtcattcagcgctttg

SEQ ID NO: 157554 - DNA, 17 bp, Arabidopsis thaliana
tgtcattcctggtgcgg

SEQ ID NO: 157555 - DNA, 17 bp, Arabidopsis thaliana
tgtcattctgtaatgcg

SEQ ID NO: 157556 - DNA, 17 bp, Arabidopsis thaliana
tgtcattgagccaaaac

SEQ ID NO: 157557 - DNA, 17 bp, Arabidopsis thaliana
tgtcattggccagtgcc

SEQ ID NO: 157558 - DNA, 17 bp, Arabidopsis thaliana
tgtcattggccgaaccg

SEQ ID NO: 157559 - DNA, 17 bp, Arabidopsis thaliana
tgtcattgtcgtagggt

SEQ ID NO: 157560 - DNA, 17 bp, Arabidopsis thaliana
tgtcattgtttgcttcc

SEQ ID NO: 157561 - DNA, 17 bp, Arabidopsis thaliana
tgtcatttccagcatgc

SEQ ID NO: 157562 - DNA, 17 bp, Arabidopsis thaliana
tgtcattttcgtgattt

SEQ ID NO: 157563 - DNA, 17 bp, Arabidopsis thaliana
tgtcattttttcaggac

SEQ ID NO: 157564 - DNA, 17 bp, Arabidopsis thaliana
tgtccaaaacagaacga

SEQ ID NO: 157565 - DNA, 17 bp, Arabidopsis thaliana
tgtccaaacggtgccaa

SEQ ID NO: 157566 - DNA, 17 bp, Arabidopsis thaliana
tgtccaaagcaacaatg

SEQ ID NO: 157567 - DNA, 17 bp, Arabidopsis thaliana
tgtccaaatggaggatc

SEQ ID NO: 157568 - DNA, 17 bp, Arabidopsis thaliana
tgtccaacagttgtaag

SEQ ID NO: 157569 - DNA, 17 bp, Arabidopsis thaliana
tgtccaacttgacgtta

SEQ ID NO: 157570 - DNA, 17 bp, Arabidopsis thaliana
tgtccaagcactagcac

SEQ ID NO: 157571 - DNA, 17 bp, Arabidopsis thaliana
tgtccaaggatgacttg

SEQ ID NO: 157572 - DNA, 17 bp, Arabidopsis thaliana
tgtccaaggatgtgcaa

SEQ ID NO: 157573 - DNA, 17 bp, Arabidopsis thaliana
tgtccaaggtgcgcagg

SEQ ID NO: 157574 - DNA, 17 bp, Arabidopsis thaliana
tgtccaaggtttcaaag

SEQ ID NO: 157575 - DNA, 17 bp, Arabidopsis thaliana
tgtccaagtccggtccg

SEQ ID NO: 157576 - DNA, 17 bp, Arabidopsis thaliana
tgtccaagtctttcagg

SEQ ID NO: 157577 - DNA, 17 bp, Arabidopsis thaliana
tgtccaattggatgaga

SEQ ID NO: 157578 - DNA, 17 bp, Arabidopsis thaliana
tgtccacaactaatcag

SEQ ID NO: 157579 - DNA, 17 bp, Arabidopsis thaliana
tgtccacaactaatcgg

SEQ ID NO: 157580 - DNA, 17 bp, Arabidopsis thaliana
tgtccacaattctagca

SEQ ID NO: 157581 - DNA, 17 bp, Arabidopsis thaliana
tgtccacatccaaccat

SEQ ID NO: 157582 - DNA, 17 bp, Arabidopsis thaliana
tgtccaccgtttgctga

SEQ ID NO: 157583 - DNA, 17 bp, Arabidopsis thaliana
tgtccaccttaacattt

SEQ ID NO: 157584 - DNA, 17 bp, Arabidopsis thaliana
tgtccacgaaaggaatg

SEQ ID NO: 157585 - DNA, 17 bp, Arabidopsis thaliana
tgtccacgggccggttc

SEQ ID NO: 157586 - DNA, 17 bp, Arabidopsis thaliana
tgtccactactgatgtt

SEQ ID NO: 157587 - DNA, 17 bp, Arabidopsis thaliana
tgtccagaactggcact

SEQ ID NO: 157588 - DNA, 17 bp, Arabidopsis thaliana
tgtccagaattgttgct

SEQ ID NO: 157589 - DNA, 17 bp, Arabidopsis thaliana
tgtccagaccactgggt

SEQ ID NO: 157590 - DNA, 17 bp, Arabidopsis thaliana
tgtccagatgtgtcgaa

SEQ ID NO: 157591 - DNA, 17 bp, Arabidopsis thaliana
tgtccagctgcttgagt

SEQ ID NO: 157592 - DNA, 17 bp, Arabidopsis thaliana
tgtccagcttatttcgt

SEQ ID NO: 157593 - DNA, 17 bp, Arabidopsis thaliana
tgtccagtcaacgttct

SEQ ID NO: 157594 - DNA, 17 bp, Arabidopsis thaliana
tgtccagttctgagctg

SEQ ID NO: 157595 - DNA, 17 bp, Arabidopsis thaliana
tgtccagtttgcttcaa

SEQ ID NO: 157596 - DNA, 17 bp, Arabidopsis thaliana
tgtccataaggtcttgg

SEQ ID NO: 157597 - DNA, 17 bp, Arabidopsis thaliana
tgtccataatcctcagg

SEQ ID NO: 157598 - DNA, 17 bp, Arabidopsis thaliana
tgtccatacggtcaagc

SEQ ID NO: 157599 - DNA, 17 bp, Arabidopsis thaliana
tgtccatatggcaagcc

SEQ ID NO: 157600 - DNA, 17 bp, Arabidopsis thaliana
tgtccatgagcaaccca

SEQ ID NO: 157601 - DNA, 17 bp, Arabidopsis thaliana
tgtccatgggtgattct

SEQ ID NO: 157602 - DNA, 17 bp, Arabidopsis thaliana
tgtccatggtgtcggcg

SEQ ID NO: 157603 - DNA, 17 bp, Arabidopsis thaliana
tgtccattaagctcagt

SEQ ID NO: 157604 - DNA, 17 bp, Arabidopsis thaliana
tgtccattgacgagaga

SEQ ID NO: 157605 - DNA, 17 bp, Arabidopsis thaliana
tgtccattgatgagtgt

SEQ ID NO: 157606 - DNA, 17 bp, Arabidopsis thaliana
tgtccattgcgggccca

SEQ ID NO: 157607 - DNA, 17 bp, Arabidopsis thaliana
tgtccattggtgtgacg

SEQ ID NO: 157608 - DNA, 17 bp, Arabidopsis thaliana
tgtccattgtgccgttt

SEQ ID NO: 157609 - DNA, 17 bp, Arabidopsis thaliana
tgtccatttttaaaact

SEQ ID NO: 157610 - DNA, 17 bp, Arabidopsis thaliana
tgtcccacatcgaaagt

SEQ ID NO: 157611 - DNA, 17 bp, Arabidopsis thaliana
tgtcccacatcggaagt

SEQ ID NO: 157612 - DNA, 17 bp, Arabidopsis thaliana
tgtcccactgggtgtgc

SEQ ID NO: 157613 - DNA, 17 bp, Arabidopsis thaliana
tgtcccagaaggtgtgt

SEQ ID NO: 157614 - DNA, 17 bp, Arabidopsis thaliana
tgtcccagttgattctt

SEQ ID NO: 157615 - DNA, 17 bp, Arabidopsis thaliana
tgtcccagtttgtagat

SEQ ID NO: 157616 - DNA, 17 bp, Arabidopsis thaliana
tgtcccataggccttca

SEQ ID NO: 157617 - DNA, 17 bp, Arabidopsis thaliana
tgtccccgcaatgtacc

SEQ ID NO: 157618 - DNA, 17 bp, Arabidopsis thaliana
tgtccccgtcaaccaaa

SEQ ID NO: 157619 - DNA, 17 bp, Arabidopsis thaliana
tgtcccgaacgtagtcc

SEQ ID NO: 157620 - DNA, 17 bp, Arabidopsis thaliana
tgtcccgcactgtctgt

SEQ ID NO: 157621 - DNA, 17 bp, Arabidopsis thaliana
tgtcccgcactttgcaa

SEQ ID NO: 157622 - DNA, 17 bp, Arabidopsis thaliana
tgtcccgccaacccgtc

SEQ ID NO: 157623 - DNA, 17 bp, Arabidopsis thaliana
tgtcccgctaatgcctc

SEQ ID NO: 157624 - DNA, 17 bp, Arabidopsis thaliana
tgtcccggctaggcatt

SEQ ID NO: 157625 - DNA, 17 bp, Arabidopsis thaliana
tgtcccgtgttgtgtac

SEQ ID NO: 157626 - DNA, 17 bp, Arabidopsis thaliana
tgtcccgtttacatcac

SEQ ID NO: 157627 - DNA, 17 bp, Arabidopsis thaliana
tgtccctaggccttcta

SEQ ID NO: 157628 - DNA, 17 bp, Arabidopsis thaliana
tgtccctcctcagattc

SEQ ID NO: 157629 - DNA, 17 bp, Arabidopsis thaliana
tgtccctcgagggataa

SEQ ID NO: 157630 - DNA, 17 bp, Arabidopsis thaliana
tgtccctcgcagaattg

SEQ ID NO: 157631 - DNA, 17 bp, Arabidopsis thaliana
tgtccctctcgtgtggc

SEQ ID NO: 157632 - DNA, 17 bp, Arabidopsis thaliana
tgtccctctgtcaggac

SEQ ID NO: 157633 - DNA, 17 bp, Arabidopsis thaliana
tgtccctgcgatgtacc

SEQ ID NO: 157634 - DNA, 17 bp, Arabidopsis thaliana
tgtccctggtttcagcg

SEQ ID NO: 157635 - DNA, 17 bp, Arabidopsis thaliana
tgtccctggtttctctt

SEQ ID NO: 157636 - DNA, 17 bp, Arabidopsis thaliana
tgtccctgtctactatc

SEQ ID NO: 157637 - DNA, 17 bp, Arabidopsis thaliana
tgtcccttcggtcggcc

SEQ ID NO: 157638 - DNA, 17 bp, Arabidopsis thaliana
tgtcccttcggtcggcg

SEQ ID NO: 157639 - DNA, 17 bp, Arabidopsis thaliana
tgtccctttgggttgat

SEQ ID NO: 157640 - DNA, 17 bp, Arabidopsis thaliana
tgtcccttttatgtgca

SEQ ID NO: 157641 - DNA, 17 bp, Arabidopsis thaliana
tgtccgaaaaagtagtt

SEQ ID NO: 157642 - DNA, 17 bp, Arabidopsis thaliana
tgtccgaaatccatggg

SEQ ID NO: 157643 - DNA, 17 bp, Arabidopsis thaliana
tgtccgaatctgtgacc

SEQ ID NO: 157644 - DNA, 17 bp, Arabidopsis thaliana
tgtccgacccgttccgt

SEQ ID NO: 157645 - DNA, 17 bp, Arabidopsis thaliana
tgtccgacttgttgaca

SEQ ID NO: 157646 - DNA, 17 bp, Arabidopsis thaliana
tgtccgactttcaagtt

SEQ ID NO: 157647 - DNA, 17 bp, Arabidopsis thaliana
tgtccgagcttatggcc

SEQ ID NO: 157648 - DNA, 17 bp, Arabidopsis thaliana
tgtccgagttttgcggt

SEQ ID NO: 157649 - DNA, 17 bp, Arabidopsis thaliana
tgtccgatcacgtttga

SEQ ID NO: 157650 - DNA, 17 bp, Arabidopsis thaliana
tgtccgatcacttggtg

SEQ ID NO: 157651 - DNA, 17 bp, Arabidopsis thaliana
tgtccgatccgtctggc

SEQ ID NO: 157652 - DNA, 17 bp, Arabidopsis thaliana
tgtccgatccgtctgtc

SEQ ID NO: 157653 - DNA, 17 bp, Arabidopsis thaliana
tgtccgatgaggatgct

SEQ ID NO: 157654 - DNA, 17 bp, Arabidopsis thaliana
tgtccgatgaggatggt

SEQ ID NO: 157655 - DNA, 17 bp, Arabidopsis thaliana
tgtccgatgaggatgtt

SEQ ID NO: 157656 - DNA, 17 bp, Arabidopsis thaliana
tgtccgatgagtggtca

SEQ ID NO: 157657 - DNA, 17 bp, Arabidopsis thaliana
tgtccgattttccgatg

SEQ ID NO: 157658 - DNA, 17 bp, Arabidopsis thaliana
tgtccgcacctatcatg

SEQ ID NO: 157659 - DNA, 17 bp, Arabidopsis thaliana
tgtccgcagacacaggt

SEQ ID NO: 157660 - DNA, 17 bp, Arabidopsis thaliana
tgtccgcagataatatg

SEQ ID NO: 157661 - DNA, 17 bp, Arabidopsis thaliana
tgtccgccagctttagt

SEQ ID NO: 157662 - DNA, 17 bp, Arabidopsis thaliana
tgtccgccccaaccgcc

SEQ ID NO: 157663 - DNA, 17 bp, Arabidopsis thaliana
tgtccgcggataatatg

SEQ ID NO: 157664 - DNA, 17 bp, Arabidopsis thaliana
tgtccgctccgctctat

SEQ ID NO: 157665 - DNA, 17 bp, Arabidopsis thaliana
tgtccgctccgtccgcc

SEQ ID NO: 157666 - DNA, 17 bp, Arabidopsis thaliana
tgtccgctccgtgcgcc

SEQ ID NO: 157667 - DNA, 17 bp, Arabidopsis thaliana
tgtccgctccgtgcgtc

SEQ ID NO: 157668 - DNA, 17 bp, Arabidopsis thaliana
tgtccgctctgctttgt

SEQ ID NO: 157669 - DNA, 17 bp, Arabidopsis thaliana
tgtccgctgaaccgtta

SEQ ID NO: 157670 - DNA, 17 bp, Arabidopsis thaliana
tgtccgctgactcgtcg

SEQ ID NO: 157671 - DNA, 17 bp, Arabidopsis thaliana
tgtccgctgcctccatt

SEQ ID NO: 157672 - DNA, 17 bp, Arabidopsis thaliana
tgtccgcttagattacg

SEQ ID NO: 157673 - DNA, 17 bp, Arabidopsis thaliana
tgtccgcttgatctgca

SEQ ID NO: 157674 - DNA, 17 bp, Arabidopsis thaliana
tgtccgcttggaccgct

SEQ ID NO: 157675 - DNA, 17 bp, Arabidopsis thaliana
tgtccgcttgggccgct

SEQ ID NO: 157676 - DNA, 17 bp, Arabidopsis thaliana
tgtccgctttgaccact

SEQ ID NO: 157677 - DNA, 17 bp, Arabidopsis thaliana
tgtccgcttttaccact

SEQ ID NO: 157678 - DNA, 17 bp, Arabidopsis thaliana
tgtccggaattccactt

SEQ ID NO: 157679 - DNA, 17 bp, Arabidopsis thaliana
tgtccggcgaagacgat

SEQ ID NO: 157680 - DNA, 17 bp, Arabidopsis thaliana
tgtccggtgcgcccccg

SEQ ID NO: 157681 - DNA, 17 bp, Arabidopsis thaliana
tgtccgtaagtggtgtt

SEQ ID NO: 157682 - DNA, 17 bp, Arabidopsis thaliana
tgtccgtaatatagccc

SEQ ID NO: 157683 - DNA, 17 bp, Arabidopsis thaliana
tgtccgtattatccgct

SEQ ID NO: 157684 - DNA, 17 bp, Arabidopsis thaliana
tgtccgtcgttgccagc

SEQ ID NO: 157685 - DNA, 17 bp, Arabidopsis thaliana
tgtccgtgaggccaaac

SEQ ID NO: 157686 - DNA, 17 bp, Arabidopsis thaliana
tgtccgtgatagaatcg

SEQ ID NO: 157687 - DNA, 17 bp, Arabidopsis thaliana
tgtccgtgctgattgtc

SEQ ID NO: 157688 - DNA, 17 bp, Arabidopsis thaliana
tgtccgtggtagaatcg

SEQ ID NO: 157689 - DNA, 17 bp, Arabidopsis thaliana
tgtccgtgttagacacg

SEQ ID NO: 157690 - DNA, 17 bp, Arabidopsis thaliana
tgtccgttccgctctat

SEQ ID NO: 157691 - DNA, 17 bp, Arabidopsis thaliana
tgtccgttgctatggtg

SEQ ID NO: 157692 - DNA, 17 bp, Arabidopsis thaliana
tgtccgttggagattct

SEQ ID NO: 157693 - DNA, 17 bp, Arabidopsis thaliana
tgtccgttgtagaatcg

SEQ ID NO: 157694 - DNA, 17 bp, Arabidopsis thaliana
tgtccgttttttcgtga

SEQ ID NO: 157695 - DNA, 17 bp, Arabidopsis thaliana
tgtcctaaatggccaag

SEQ ID NO: 157696 - DNA, 17 bp, Arabidopsis thaliana
tgtcctaaatggctaag

SEQ ID NO: 157697 - DNA, 17 bp, Arabidopsis thaliana
tgtcctaactctacact

SEQ ID NO: 157698 - DNA, 17 bp, Arabidopsis thaliana
tgtcctaagatgagctc

SEQ ID NO: 157699 - DNA, 17 bp, Arabidopsis thaliana
tgtcctacaggaaaagt

SEQ ID NO: 157700 - DNA, 17 bp, Arabidopsis thaliana
tgtcctacatggtacgt

SEQ ID NO: 157701 - DNA, 17 bp, Arabidopsis thaliana
tgtcctacttagcgcaa

SEQ ID NO: 157702 - DNA, 17 bp, Arabidopsis thaliana
tgtcctaggatgacttg

SEQ ID NO: 157703 - DNA, 17 bp, Arabidopsis thaliana
tgtcctagtggcgggcc

SEQ ID NO: 157704 - DNA, 17 bp, Arabidopsis thaliana
tgtcctatttcaaggat

SEQ ID NO: 157705 - DNA, 17 bp, Arabidopsis thaliana
tgtcctcattcgcacag

SEQ ID NO: 157706 - DNA, 17 bp, Arabidopsis thaliana
tgtcctccaatgactct

SEQ ID NO: 157707 - DNA, 17 bp, Arabidopsis thaliana
tgtcctccatatttgca

SEQ ID NO: 157708 - DNA, 17 bp, Arabidopsis thaliana
tgtcctcccgggaagtc

SEQ ID NO: 157709 - DNA, 17 bp, Arabidopsis thaliana
tgtcctcctctggcatt

SEQ ID NO: 157710 - DNA, 17 bp, Arabidopsis thaliana
tgtcctcctggtggatg

SEQ ID NO: 157711 - DNA, 17 bp, Arabidopsis thaliana
tgtcctctaggtatttt

SEQ ID NO: 157712 - DNA, 17 bp, Arabidopsis thaliana
tgtcctctctcgaatgg

SEQ ID NO: 157713 - DNA, 17 bp, Arabidopsis thaliana
tgtcctcttctcctcgg

SEQ ID NO: 157714 - DNA, 17 bp, Arabidopsis thaliana
tgtcctgaccacacagt

SEQ ID NO: 157715 - DNA, 17 bp, Arabidopsis thaliana
tgtcctgagcggtaatg

SEQ ID NO: 157716 - DNA, 17 bp, Arabidopsis thaliana
tgtcctgagtttggaat

SEQ ID NO: 157717 - DNA, 17 bp, Arabidopsis thaliana
tgtcctgatcgattctc

SEQ ID NO: 157718 - DNA, 17 bp, Arabidopsis thaliana
tgtcctgcaaagtctcg

SEQ ID NO: 157719 - DNA, 17 bp, Arabidopsis thaliana
tgtcctgcgacagaaat

SEQ ID NO: 157720 - DNA, 17 bp, Arabidopsis thaliana
tgtcctgctttttgcac

SEQ ID NO: 157721 - DNA, 17 bp, Arabidopsis thaliana
tgtcctggtgagatatg

SEQ ID NO: 157722 - DNA, 17 bp, Arabidopsis thaliana
tgtcctgttgcggcatt

SEQ ID NO: 157723 - DNA, 17 bp, Arabidopsis thaliana
tgtccttattttctgag

SEQ ID NO: 157724 - DNA, 17 bp, Arabidopsis thaliana
tgtccttccatcctgac

SEQ ID NO: 157725 - DNA, 17 bp, Arabidopsis thaliana
tgtccttccattgacag

SEQ ID NO: 157726 - DNA, 17 bp, Arabidopsis thaliana
tgtccttcctggtgcgg

SEQ ID NO: 157727 - DNA, 17 bp, Arabidopsis thaliana
tgtccttcgacgagccg

SEQ ID NO: 157728 - DNA, 17 bp, Arabidopsis thaliana
tgtccttcttggtagtc

SEQ ID NO: 157729 - DNA, 17 bp, Arabidopsis thaliana
tgtccttgaattgtcta

SEQ ID NO: 157730 - DNA, 17 bp, Arabidopsis thaliana
tgtccttggactaatat

SEQ ID NO: 157731 - DNA, 17 bp, Arabidopsis thaliana
tgtccttggagtgccgg

SEQ ID NO: 157732 - DNA, 17 bp, Arabidopsis thaliana
tgtccttggatttgttg

SEQ ID NO: 157733 - DNA, 17 bp, Arabidopsis thaliana
tgtcctttcataccgca

SEQ ID NO: 157734 - DNA, 17 bp, Arabidopsis thaliana
tgtcctttgatctgttg

SEQ ID NO: 157735 - DNA, 17 bp, Arabidopsis thaliana
tgtcctttttataattt

SEQ ID NO: 157736 - DNA, 17 bp, Arabidopsis thaliana
tgtcgaacccgggcgaa

SEQ ID NO: 157737 - DNA, 17 bp, Arabidopsis thaliana
tgtcgaacctggctacg

SEQ ID NO: 157738 - DNA, 17 bp, Arabidopsis thaliana
tgtcgaacgacactcag

SEQ ID NO: 157739 - DNA, 17 bp, Arabidopsis thaliana
tgtcgaagacacgggtt

SEQ ID NO: 157740 - DNA, 17 bp, Arabidopsis thaliana
tgtcgaagccattgtag

SEQ ID NO: 157741 - DNA, 17 bp, Arabidopsis thaliana
tgtcgacagcctgtgtg

SEQ ID NO: 157742 - DNA, 17 bp, Arabidopsis thaliana
tgtcgaccaggtccgag

SEQ ID NO: 157743 - DNA, 17 bp, Arabidopsis thaliana
tgtcgaccgacaccaac

SEQ ID NO: 157744 - DNA, 17 bp, Arabidopsis thaliana
tgtcgaccgacaccttc

SEQ ID NO: 157745 - DNA, 17 bp, Arabidopsis thaliana
tgtcgaccgacagcacc

SEQ ID NO: 157746 - DNA, 17 bp, Arabidopsis thaliana
tgtcgacctcgctaact

SEQ ID NO: 157747 - DNA, 17 bp, Arabidopsis thaliana
tgtcgacgaccactgcg

SEQ ID NO: 157748 - DNA, 17 bp, Arabidopsis thaliana
tgtcgacgcggattacg

SEQ ID NO: 157749 - DNA, 17 bp, Arabidopsis thaliana
tgtcgactccagctcac

SEQ ID NO: 157750 - DNA, 17 bp, Arabidopsis thaliana
tgtcgactgattcatcg

SEQ ID NO: 157751 - DNA, 17 bp, Arabidopsis thaliana
tgtcgagacaggatacc

SEQ ID NO: 157752 - DNA, 17 bp, Arabidopsis thaliana
tgtcgagactttggttt

SEQ ID NO: 157753 - DNA, 17 bp, Arabidopsis thaliana
tgtcgagaggtcgctta

SEQ ID NO: 157754 - DNA, 17 bp, Arabidopsis thaliana
tgtcgagatcgggtgcg

SEQ ID NO: 157755 - DNA, 17 bp, Arabidopsis thaliana
tgtcgagcgttatttat

SEQ ID NO: 157756 - DNA, 17 bp, Arabidopsis thaliana
tgtcgagctccatctct

SEQ ID NO: 157757 - DNA, 17 bp, Arabidopsis thaliana
tgtcgagctggttgcag

SEQ ID NO: 157758 - DNA, 17 bp, Arabidopsis thaliana
tgtcgaggattgcccgg

SEQ ID NO: 157759 - DNA, 17 bp, Arabidopsis thaliana
tgtcgaggcggattgga

SEQ ID NO: 157760 - DNA, 17 bp, Arabidopsis thaliana
tgtcgagggcacgtctg

SEQ ID NO: 157761 - DNA, 17 bp, Arabidopsis thaliana
tgtcgagtagaccttgt

SEQ ID NO: 157762 - DNA, 17 bp, Arabidopsis thaliana
tgtcgagtagactttgt

SEQ ID NO: 157763 - DNA, 17 bp, Arabidopsis thaliana
tgtcgagtctatcaatg

SEQ ID NO: 157764 - DNA, 17 bp, Arabidopsis thaliana
tgtcgataacttcgctg

SEQ ID NO: 157765 - DNA, 17 bp, Arabidopsis thaliana
tgtcgatcaaacatctt

SEQ ID NO: 157766 - DNA, 17 bp, Arabidopsis thaliana
tgtcgatccacctctac

SEQ ID NO: 157767 - DNA, 17 bp, Arabidopsis thaliana
tgtcgatccagtatgcg

SEQ ID NO: 157768 - DNA, 17 bp, Arabidopsis thaliana
tgtcgatcccgactaga

SEQ ID NO: 157769 - DNA, 17 bp, Arabidopsis thaliana
tgtcgatcgacaccggt

SEQ ID NO: 157770 - DNA, 17 bp, Arabidopsis thaliana
tgtcgatcgacactaag

SEQ ID NO: 157771 - DNA, 17 bp, Arabidopsis thaliana
tgtcgatcgagcctggt

SEQ ID NO: 157772 - DNA, 17 bp, Arabidopsis thaliana
tgtcgatcgtcggctat

SEQ ID NO: 157773 - DNA, 17 bp, Arabidopsis thaliana
tgtcgatgaccaagctg

SEQ ID NO: 157774 - DNA, 17 bp, Arabidopsis thaliana
tgtcgatgggagtgcat

SEQ ID NO: 157775 - DNA, 17 bp, Arabidopsis thaliana
tgtcgatgttgtctacg

SEQ ID NO: 157776 - DNA, 17 bp, Arabidopsis thaliana
tgtcgatgtttggctgg

SEQ ID NO: 157777 - DNA, 17 bp, Arabidopsis thaliana
tgtcgattcaccgtact

SEQ ID NO: 157778 - DNA, 17 bp, Arabidopsis thaliana
tgtcgcaaaaactcgtg

SEQ ID NO: 157779 - DNA, 17 bp, Arabidopsis thaliana
tgtcgcaagacaagatt

SEQ ID NO: 157780 - DNA, 17 bp, Arabidopsis thaliana
tgtcgcaccacgaggcg

SEQ ID NO: 157781 - DNA, 17 bp, Arabidopsis thaliana
tgtcgcaccgcttgccc

SEQ ID NO: 157782 - DNA, 17 bp, Arabidopsis thaliana
tgtcgcagcctgtagat

SEQ ID NO: 157783 - DNA, 17 bp, Arabidopsis thaliana
tgtcgcaggttgctgtc

SEQ ID NO: 157784 - DNA, 17 bp, Arabidopsis thaliana
tgtcgcagtgactgtaa

SEQ ID NO: 157785 - DNA, 17 bp, Arabidopsis thaliana
tgtcgcagttctattct

SEQ ID NO: 157786 - DNA, 17 bp, Arabidopsis thaliana
tgtcgcatcctgtagat

SEQ ID NO: 157787 - DNA, 17 bp, Arabidopsis thaliana
tgtcgcatggatcatct

SEQ ID NO: 157788 - DNA, 17 bp, Arabidopsis thaliana
tgtcgcattgcgtcgtg

SEQ ID NO: 157789 - DNA, 17 bp, Arabidopsis thaliana
tgtcgccagcgaccagc

SEQ ID NO: 157790 - DNA, 17 bp, Arabidopsis thaliana
tgtcgccagcgactgtc

SEQ ID NO: 157791 - DNA, 17 bp, Arabidopsis thaliana
tgtcgcccttgcgggat

SEQ ID NO: 157792 - DNA, 17 bp, Arabidopsis thaliana
tgtcgccgccttttgtt

SEQ ID NO: 157793 - DNA, 17 bp, Arabidopsis thaliana
tgtcgccggtttctgtc

SEQ ID NO: 157794 - DNA, 17 bp, Arabidopsis thaliana
tgtcgccttgatttggt

SEQ ID NO: 157795 - DNA, 17 bp, Arabidopsis thaliana
tgtcgcgaatcactggc

SEQ ID NO: 157796 - DNA, 17 bp, Arabidopsis thaliana
tgtcgcgcatgtgtacc

SEQ ID NO: 157797 - DNA, 17 bp, Arabidopsis thaliana
tgtcgcgggtggcggtc

SEQ ID NO: 157798 - DNA, 17 bp, Arabidopsis thaliana
tgtcgcgggttaagctg

SEQ ID NO: 157799 - DNA, 17 bp, Arabidopsis thaliana
tgtcgctaagattcgaa

SEQ ID NO: 157800 - DNA, 17 bp, Arabidopsis thaliana
tgtcgctacagtaacat

SEQ ID NO: 157801 - DNA, 17 bp, Arabidopsis thaliana
tgtcgctacgtccagca

SEQ ID NO: 157802 - DNA, 17 bp, Arabidopsis thaliana
tgtcgctactggacgac

SEQ ID NO: 157803 - DNA, 17 bp, Arabidopsis thaliana
tgtcgctacttttggtc

SEQ ID NO: 157804 - DNA, 17 bp, Arabidopsis thaliana
tgtcgctcacgcccggt

SEQ ID NO: 157805 - DNA, 17 bp, Arabidopsis thaliana
tgtcgctcactgctacc

SEQ ID NO: 157806 - DNA, 17 bp, Arabidopsis thaliana
tgtcgctcagcctcaac

SEQ ID NO: 157807 - DNA, 17 bp, Arabidopsis thaliana
tgtcgctctgaaactcc

SEQ ID NO: 157808 - DNA, 17 bp, Arabidopsis thaliana
tgtcgctctgtagttcc

SEQ ID NO: 157809 - DNA, 17 bp, Arabidopsis thaliana
tgtcgctctgttgttct

SEQ ID NO: 157810 - DNA, 17 bp, Arabidopsis thaliana
tgtcgctgacgctgcgt

SEQ ID NO: 157811 - DNA, 17 bp, Arabidopsis thaliana
tgtcgctgagacaatcg

SEQ ID NO: 157812 - DNA, 17 bp, Arabidopsis thaliana
tgtcgctgagtgacatg

SEQ ID NO: 157813 - DNA, 17 bp, Arabidopsis thaliana
tgtcgctgcgactcttt

SEQ ID NO: 157814 - DNA, 17 bp, Arabidopsis thaliana
tgtcgctgctggtaata

SEQ ID NO: 157815 - DNA, 17 bp, Arabidopsis thaliana
tgtcgctgggacaatcg

SEQ ID NO: 157816 - DNA, 17 bp, Arabidopsis thaliana
tgtcgctggtcgctgga

SEQ ID NO: 157817 - DNA, 17 bp, Arabidopsis thaliana
tgtcgctggttgctgta

SEQ ID NO: 157818 - DNA, 17 bp, Arabidopsis thaliana
tgtcgctggttgctgtc

SEQ ID NO: 157819 - DNA, 17 bp, Arabidopsis thaliana
tgtcgctggttgttgtc

SEQ ID NO: 157820 - DNA, 17 bp, Arabidopsis thaliana
tgtcgctgtaattggtc

SEQ ID NO: 157821 - DNA, 17 bp, Arabidopsis thaliana
tgtcgctgtgttgtccg

SEQ ID NO: 157822 - DNA, 17 bp, Arabidopsis thaliana
tgtcgctgtgttgttcg

SEQ ID NO: 157823 - DNA, 17 bp, Arabidopsis thaliana
tgtcgctttgatctcga

SEQ ID NO: 157824 - DNA, 17 bp, Arabidopsis thaliana
tgtcggaaccatgcgaa

SEQ ID NO: 157825 - DNA, 17 bp, Arabidopsis thaliana
tgtcggaaccattcgag

SEQ ID NO: 157826 - DNA, 17 bp, Arabidopsis thaliana
tgtcggaactgtgcgaa

SEQ ID NO: 157827 - DNA, 17 bp, Arabidopsis thaliana
tgtcggaattgttcttc

SEQ ID NO: 157828 - DNA, 17 bp, Arabidopsis thaliana
tgtcggaatttgtctgt

SEQ ID NO: 157829 - DNA, 17 bp, Arabidopsis thaliana
tgtcggacacaagatta

SEQ ID NO: 157830 - DNA, 17 bp, Arabidopsis thaliana
tgtcggaccaggcttca

SEQ ID NO: 157831 - DNA, 17 bp, Arabidopsis thaliana
tgtcggagaaacgtctg

SEQ ID NO: 157832 - DNA, 17 bp, Arabidopsis thaliana
tgtcggaggaggtcagc

SEQ ID NO: 157833 - DNA, 17 bp, Arabidopsis thaliana
tgtcggaggatcaaact

SEQ ID NO: 157834 - DNA, 17 bp, Arabidopsis thaliana
tgtcggagggttttctt

SEQ ID NO: 157835 - DNA, 17 bp, Arabidopsis thaliana
tgtcggataatcaaggc

SEQ ID NO: 157836 - DNA, 17 bp, Arabidopsis thaliana
tgtcggatctaattcac

SEQ ID NO: 157837 - DNA, 17 bp, Arabidopsis thaliana
tgtcggatctggcgatt

SEQ ID NO: 157838 - DNA, 17 bp, Arabidopsis thaliana
tgtcggatttgggaaag

SEQ ID NO: 157839 - DNA, 17 bp, Arabidopsis thaliana
tgtcggatttgtgtgtt

SEQ ID NO: 157840 - DNA, 17 bp, Arabidopsis thaliana
tgtcggattttggatac

SEQ ID NO: 157841 - DNA, 17 bp, Arabidopsis thaliana
tgtcggcacaagaaatg

SEQ ID NO: 157842 - DNA, 17 bp, Arabidopsis thaliana
tgtcggcccaaatgtta

SEQ ID NO: 157843 - DNA, 17 bp, Arabidopsis thaliana
tgtcggccggtccgcct

SEQ ID NO: 157844 - DNA, 17 bp, Arabidopsis thaliana
tgtcggccttgtccttg

SEQ ID NO: 157845 - DNA, 17 bp, Arabidopsis thaliana
tgtcggcgctcgatatc

SEQ ID NO: 157846 - DNA, 17 bp, Arabidopsis thaliana
tgtcggctacagaaata

SEQ ID NO: 157847 - DNA, 17 bp, Arabidopsis thaliana
tgtcggctacagaaatt

SEQ ID NO: 157848 - DNA, 17 bp, Arabidopsis thaliana
tgtcggctcctccgtcg

SEQ ID NO: 157849 - DNA, 17 bp, Arabidopsis thaliana
tgtcggctcttcctatc

SEQ ID NO: 157850 - DNA, 17 bp, Arabidopsis thaliana
tgtcggctgctttgttg

SEQ ID NO: 157851 - DNA, 17 bp, Arabidopsis thaliana
tgtcggcttgagtaacg

SEQ ID NO: 157852 - DNA, 17 bp, Arabidopsis thaliana
tgtcggcttgttaattt

SEQ ID NO: 157853 - DNA, 17 bp, Arabidopsis thaliana
tgtcggctttcctgact

SEQ ID NO: 157854 - DNA, 17 bp, Arabidopsis thaliana
tgtcggcttttgtgttt

SEQ ID NO: 157855 - DNA, 17 bp, Arabidopsis thaliana
tgtcgggaagagactct

SEQ ID NO: 157856 - DNA, 17 bp, Arabidopsis thaliana
tgtcgggacccaaaaga

SEQ ID NO: 157857 - DNA, 17 bp, Arabidopsis thaliana
tgtcgggacccgaaaga

SEQ ID NO: 157858 - DNA, 17 bp, Arabidopsis thaliana
tgtcgggacgagtttgg

SEQ ID NO: 157859 - DNA, 17 bp, Arabidopsis thaliana
tgtcgggactttgcttc

SEQ ID NO: 157860 - DNA, 17 bp, Arabidopsis thaliana
tgtcgggagggaagcgg

SEQ ID NO: 157861 - DNA, 17 bp, Arabidopsis thaliana
tgtcgggctctgcttat

SEQ ID NO: 157862 - DNA, 17 bp, Arabidopsis thaliana
tgtcggggaaggcgctt

SEQ ID NO: 157863 - DNA, 17 bp, Arabidopsis thaliana
tgtcggtatttcgtgga

SEQ ID NO: 157864 - DNA, 17 bp, Arabidopsis thaliana
tgtcggtgaacttcttg

SEQ ID NO: 157865 - DNA, 17 bp, Arabidopsis thaliana
tgtcggtgctgattgtc

SEQ ID NO: 157866 - DNA, 17 bp, Arabidopsis thaliana
tgtcggtggcggtggac

SEQ ID NO: 157867 - DNA, 17 bp, Arabidopsis thaliana
tgtcggttcggccaatg

SEQ ID NO: 157868 - DNA, 17 bp, Arabidopsis thaliana
tgtcggttgtacaacga

SEQ ID NO: 157869 - DNA, 17 bp, Arabidopsis thaliana
tgtcggttttgttcata

SEQ ID NO: 157870 - DNA, 17 bp, Arabidopsis thaliana
tgtcgtaaagatgttga

SEQ ID NO: 157871 - DNA, 17 bp, Arabidopsis thaliana
tgtcgtaacggggtcaa

SEQ ID NO: 157872 - DNA, 17 bp, Arabidopsis thaliana
tgtcgtaactaagcaga

SEQ ID NO: 157873 - DNA, 17 bp, Arabidopsis thaliana
tgtcgtaagaatcatgt

SEQ ID NO: 157874 - DNA, 17 bp, Arabidopsis thaliana
tgtcgtaagtgccaatc

SEQ ID NO: 157875 - DNA, 17 bp, Arabidopsis thaliana
tgtcgtaccatgcggca

SEQ ID NO: 157876 - DNA, 17 bp, Arabidopsis thaliana
tgtcgtagattcagatc

SEQ ID NO: 157877 - DNA, 17 bp, Arabidopsis thaliana
tgtcgtagcgttagatc

SEQ ID NO: 157878 - DNA, 17 bp, Arabidopsis thaliana
tgtcgtatgtgttgagc

SEQ ID NO: 157879 - DNA, 17 bp, Arabidopsis thaliana
tgtcgtcaatgtagact

SEQ ID NO: 157880 - DNA, 17 bp, Arabidopsis thaliana
tgtcgtcagatgacact

SEQ ID NO: 157881 - DNA, 17 bp, Arabidopsis thaliana
tgtcgtcagtccaagaa

SEQ ID NO: 157882 - DNA, 17 bp, Arabidopsis thaliana
tgtcgtcatcgttttgc

SEQ ID NO: 157883 - DNA, 17 bp, Arabidopsis thaliana
tgtcgtccagcggttag

SEQ ID NO: 157884 - DNA, 17 bp, Arabidopsis thaliana
tgtcgtccagtagcgac

SEQ ID NO: 157885 - DNA, 17 bp, Arabidopsis thaliana
tgtcgtccgactataga

SEQ ID NO: 157886 - DNA, 17 bp, Arabidopsis thaliana
tgtcgtcctaactcaaa

SEQ ID NO: 157887 - DNA, 17 bp, Arabidopsis thaliana
tgtcgtccttgaacatt

SEQ ID NO: 157888 - DNA, 17 bp, Arabidopsis thaliana
tgtcgtcgagaagtgat

SEQ ID NO: 157889 - DNA, 17 bp, Arabidopsis thaliana
tgtcgtcgaggatggat

SEQ ID NO: 157890 - DNA, 17 bp, Arabidopsis thaliana
tgtcgtcgatttctgta

SEQ ID NO: 157891 - DNA, 17 bp, Arabidopsis thaliana
tgtcgtcggcgatggac

SEQ ID NO: 157892 - DNA, 17 bp, Arabidopsis thaliana
tgtcgtcggtagcggcc

SEQ ID NO: 157893 - DNA, 17 bp, Arabidopsis thaliana
tgtcgtcgtctgctcct

SEQ ID NO: 157894 - DNA, 17 bp, Arabidopsis thaliana
tgtcgtcgtgtgaatcg

SEQ ID NO: 157895 - DNA, 17 bp, Arabidopsis thaliana
tgtcgtcgttggtgctg

SEQ ID NO: 157896 - DNA, 17 bp, Arabidopsis thaliana
tgtcgtctagctcagtt

SEQ ID NO: 157897 - DNA, 17 bp, Arabidopsis thaliana
tgtcgtctatcgtggat

SEQ ID NO: 157898 - DNA, 17 bp, Arabidopsis thaliana
tgtcgtctgcctgggtg

SEQ ID NO: 157899 - DNA, 17 bp, Arabidopsis thaliana
tgtcgtctggaaggcag

SEQ ID NO: 157900 - DNA, 17 bp, Arabidopsis thaliana
tgtcgtctgtcgtgcac

SEQ ID NO: 157901 - DNA, 17 bp, Arabidopsis thaliana
tgtcgtctgtcgtggat

SEQ ID NO: 157902 - DNA, 17 bp, Arabidopsis thaliana
tgtcgtcttcactttca

SEQ ID NO: 157903 - DNA, 17 bp, Arabidopsis thaliana
tgtcgtcttccactaag

SEQ ID NO: 157904 - DNA, 17 bp, Arabidopsis thaliana
tgtcgtcttcgcttctg

SEQ ID NO: 157905 - DNA, 17 bp, Arabidopsis thaliana
tgtcgtctttccactaa

SEQ ID NO: 157906 - DNA, 17 bp, Arabidopsis thaliana
tgtcgtctttcgtgcgt

SEQ ID NO: 157907 - DNA, 17 bp, Arabidopsis thaliana
tgtcgtctttgggtgct

SEQ ID NO: 157908 - DNA, 17 bp, Arabidopsis thaliana
tgtcgtgaaggcgatta

SEQ ID NO: 157909 - DNA, 17 bp, Arabidopsis thaliana
tgtcgtgaatgtgagca

SEQ ID NO: 157910 - DNA, 17 bp, Arabidopsis thaliana
tgtcgtgacgttatgaa

SEQ ID NO: 157911 - DNA, 17 bp, Arabidopsis thaliana
tgtcgtgacttggtgaa

SEQ ID NO: 157912 - DNA, 17 bp, Arabidopsis thaliana
tgtcgtgcgggttcttg

SEQ ID NO: 157913 - DNA, 17 bp, Arabidopsis thaliana
tgtcgtgctgccacatg

SEQ ID NO: 157914 - DNA, 17 bp, Arabidopsis thaliana
tgtcgtggcaggataat

SEQ ID NO: 157915 - DNA, 17 bp, Arabidopsis thaliana
tgtcgtgtcgtgccaat

SEQ ID NO: 157916 - DNA, 17 bp, Arabidopsis thaliana
tgtcgttaagtcaactg

SEQ ID NO: 157917 - DNA, 17 bp, Arabidopsis thaliana
tgtcgttaagtttccgt

SEQ ID NO: 157918 - DNA, 17 bp, Arabidopsis thaliana
tgtcgttactttgatcg

SEQ ID NO: 157919 - DNA, 17 bp, Arabidopsis thaliana
tgtcgttacttttgatc

SEQ ID NO: 157920 - DNA, 17 bp, Arabidopsis thaliana
tgtcgttgaacattgcg

SEQ ID NO: 157921 - DNA, 17 bp, Arabidopsis thaliana
tgtcgttggctaagtcc

SEQ ID NO: 157922 - DNA, 17 bp, Arabidopsis thaliana
tgtcgttggtgttggcg

SEQ ID NO: 157923 - DNA, 17 bp, Arabidopsis thaliana
tgtcgttggttgctgtc

SEQ ID NO: 157924 - DNA, 17 bp, Arabidopsis thaliana
tgtcgttgtatttggga

SEQ ID NO: 157925 - DNA, 17 bp, Arabidopsis thaliana
tgtcgttgtgaatggtg

SEQ ID NO: 157926 - DNA, 17 bp, Arabidopsis thaliana
tgtcgtttccacagagt

SEQ ID NO: 157927 - DNA, 17 bp, Arabidopsis thaliana
tgtcgtttcgtgtctga

SEQ ID NO: 157928 - DNA, 17 bp, Arabidopsis thaliana
tgtcgtttgtgttacgc

SEQ ID NO: 157929 - DNA, 17 bp, Arabidopsis thaliana
tgtcgtttgttgcaggt

SEQ ID NO: 157930 - DNA, 17 bp, Arabidopsis thaliana
tgtcgttttggccgctt

SEQ ID NO: 157931 - DNA, 17 bp, Arabidopsis thaliana
tgtcgtttttggcggga

SEQ ID NO: 157932 - DNA, 17 bp, Arabidopsis thaliana
tgtctaaacgctcctat

SEQ ID NO: 157933 - DNA, 17 bp, Arabidopsis thaliana
tgtctaaattcaaggca

SEQ ID NO: 157934 - DNA, 17 bp, Arabidopsis thaliana
tgtctaaccgctgggct

SEQ ID NO: 157935 - DNA, 17 bp, Arabidopsis thaliana
tgtctaacgcctaggtg

SEQ ID NO: 157936 - DNA, 17 bp, Arabidopsis thaliana
tgtctaactccatattc

SEQ ID NO: 157937 - DNA, 17 bp, Arabidopsis thaliana
tgtctaaggtgccaaaa

SEQ ID NO: 157938 - DNA, 17 bp, Arabidopsis thaliana
tgtctaagtctgtcgac

SEQ ID NO: 157939 - DNA, 17 bp, Arabidopsis thaliana
tgtctaattaaccaagg

SEQ ID NO: 157940 - DNA, 17 bp, Arabidopsis thaliana
tgtctaattttactgaa

SEQ ID NO: 157941 - DNA, 17 bp, Arabidopsis thaliana
tgtctacaaaaggtgat

SEQ ID NO: 157942 - DNA, 17 bp, Arabidopsis thaliana
tgtctacagcttcttcg

SEQ ID NO: 157943 - DNA, 17 bp, Arabidopsis thaliana
tgtctacaggatgcgac

SEQ ID NO: 157944 - DNA, 17 bp, Arabidopsis thaliana
tgtctacattagtatca

SEQ ID NO: 157945 - DNA, 17 bp, Arabidopsis thaliana
tgtctacatttggcact

SEQ ID NO: 157946 - DNA, 17 bp, Arabidopsis thaliana
tgtctacgagtcgggtt

SEQ ID NO: 157947 - DNA, 17 bp, Arabidopsis thaliana
tgtctacgagtcggttt

SEQ ID NO: 157948 - DNA, 17 bp, Arabidopsis thaliana
tgtctacgcggccaaaa

SEQ ID NO: 157949 - DNA, 17 bp, Arabidopsis thaliana
tgtctacggtttagtcc

SEQ ID NO: 157950 - DNA, 17 bp, Arabidopsis thaliana
tgtctactatccagcga

SEQ ID NO: 157951 - DNA, 17 bp, Arabidopsis thaliana
tgtctactctgatgaat

SEQ ID NO: 157952 - DNA, 17 bp, Arabidopsis thaliana
tgtctactgtatgttgc

SEQ ID NO: 157953 - DNA, 17 bp, Arabidopsis thaliana
tgtctactgtccggatg

SEQ ID NO: 157954 - DNA, 17 bp, Arabidopsis thaliana
tgtctactttccgactt

SEQ ID NO: 157955 - DNA, 17 bp, Arabidopsis thaliana
tgtctagccgcttatgt

SEQ ID NO: 157956 - DNA, 17 bp, Arabidopsis thaliana
tgtctagcggcattgct

SEQ ID NO: 157957 - DNA, 17 bp, Arabidopsis thaliana
tgtctagtctgcttagg

SEQ ID NO: 157958 - DNA, 17 bp, Arabidopsis thaliana
tgtctagtttgccactt

SEQ ID NO: 157959 - DNA, 17 bp, Arabidopsis thaliana
tgtctatatgagcgtca

SEQ ID NO: 157960 - DNA, 17 bp, Arabidopsis thaliana
tgtctatccctaggggt

SEQ ID NO: 157961 - DNA, 17 bp, Arabidopsis thaliana
tgtctatgtcgacgatg

SEQ ID NO: 157962 - DNA, 17 bp, Arabidopsis thaliana
tgtctatgtgatctagg

SEQ ID NO: 157963 - DNA, 17 bp, Arabidopsis thaliana
tgtctatgtgccagctg

SEQ ID NO: 157964 - DNA, 17 bp, Arabidopsis thaliana
tgtctattagctcagtg

SEQ ID NO: 157965 - DNA, 17 bp, Arabidopsis thaliana
tgtctattcagagccgt

SEQ ID NO: 157966 - DNA, 17 bp, Arabidopsis thaliana
tgtctattgactcaatt

SEQ ID NO: 157967 - DNA, 17 bp, Arabidopsis thaliana
tgtctatttgactccac

SEQ ID NO: 157968 - DNA, 17 bp, Arabidopsis thaliana
tgtctatttgccgggtt

SEQ ID NO: 157969 - DNA, 17 bp, Arabidopsis thaliana
tgtctattttgacctgg

SEQ ID NO: 157970 - DNA, 17 bp, Arabidopsis thaliana
tgtctattttgacctgt

SEQ ID NO: 157971 - DNA, 17 bp, Arabidopsis thaliana
tgtctattttggcctgc

SEQ ID NO: 157972 - DNA, 17 bp, Arabidopsis thaliana
tgtctattttggcctgg

SEQ ID NO: 157973 - DNA, 17 bp, Arabidopsis thaliana
tgtctcaaacgcgttgg

SEQ ID NO: 157974 - DNA, 17 bp, Arabidopsis thaliana
tgtctcaactgagtcga

SEQ ID NO: 157975 - DNA, 17 bp, Arabidopsis thaliana
tgtctcaagtcatctct

SEQ ID NO: 157976 - DNA, 17 bp, Arabidopsis thaliana
tgtctcaatgcttgacc

SEQ ID NO: 157977 - DNA, 17 bp, Arabidopsis thaliana
tgtctcaattggcttag

SEQ ID NO: 157978 - DNA, 17 bp, Arabidopsis thaliana
tgtctcaccacgaggcg

SEQ ID NO: 157979 - DNA, 17 bp, Arabidopsis thaliana
tgtctcaccatcgaaca

SEQ ID NO: 157980 - DNA, 17 bp, Arabidopsis thaliana
tgtctcacctgctagac

SEQ ID NO: 157981 - DNA, 17 bp, Arabidopsis thaliana
tgtctcacgcgtgcggt

SEQ ID NO: 157982 - DNA, 17 bp, Arabidopsis thaliana
tgtctcactagggcctt

SEQ ID NO: 157983 - DNA, 17 bp, Arabidopsis thaliana
tgtctcagatggtgaca

SEQ ID NO: 157984 - DNA, 17 bp, Arabidopsis thaliana
tgtctcagcccggtatc

SEQ ID NO: 157985 - DNA, 17 bp, Arabidopsis thaliana
tgtctcaggttgctttg

SEQ ID NO: 157986 - DNA, 17 bp, Arabidopsis thaliana
tgtctcagtcaggtggt

SEQ ID NO: 157987 - DNA, 17 bp, Arabidopsis thaliana
tgtctcagtctcgtccg

SEQ ID NO: 157988 - DNA, 17 bp, Arabidopsis thaliana
tgtctcagtctggtggt

SEQ ID NO: 157989 - DNA, 17 bp, Arabidopsis thaliana
tgtctcataaattgcgt

SEQ ID NO: 157990 - DNA, 17 bp, Arabidopsis thaliana
tgtctcatggatctact

SEQ ID NO: 157991 - DNA, 17 bp, Arabidopsis thaliana
tgtctcatggattcgtg

SEQ ID NO: 157992 - DNA, 17 bp, Arabidopsis thaliana
tgtctcattttctgcaa

SEQ ID NO: 157993 - DNA, 17 bp, Arabidopsis thaliana
tgtctccaccagtgccg

SEQ ID NO: 157994 - DNA, 17 bp, Arabidopsis thaliana
tgtctccattagcacac

SEQ ID NO: 157995 - DNA, 17 bp, Arabidopsis thaliana
tgtctcccaagatgttg

SEQ ID NO: 157996 - DNA, 17 bp, Arabidopsis thaliana
tgtctccgcggtgtacc

SEQ ID NO: 157997 - DNA, 17 bp, Arabidopsis thaliana
tgtctccgctgtgtacc

SEQ ID NO: 157998 - DNA, 17 bp, Arabidopsis thaliana
tgtctccgggagttttt

SEQ ID NO: 157999 - DNA, 17 bp, Arabidopsis thaliana
tgtctcctctggctgat

SEQ ID NO: 158000 - DNA, 17 bp, Arabidopsis thaliana
tgtctcctctttgttgc

SEQ ID NO: 158001 - DNA, 17 bp, Arabidopsis thaliana
tgtctcctgcggttgct

SEQ ID NO: 158002 - DNA, 17 bp, Arabidopsis thaliana
tgtctcgaacgacagaa

SEQ ID NO: 158003 - DNA, 17 bp, Arabidopsis thaliana
tgtctcgaacgacagca

SEQ ID NO: 158004 - DNA, 17 bp, Arabidopsis thaliana
tgtctcgacctgctatt

SEQ ID NO: 158005 - DNA, 17 bp, Arabidopsis thaliana
tgtctcgactcttgaca

SEQ ID NO: 158006 - DNA, 17 bp, Arabidopsis thaliana
tgtctcgagagtaggat

SEQ ID NO: 158007 - DNA, 17 bp, Arabidopsis thaliana
tgtctcgagggcttcga

SEQ ID NO: 158008 - DNA, 17 bp, Arabidopsis thaliana
tgtctcgataggggtct

SEQ ID NO: 158009 - DNA, 17 bp, Arabidopsis thaliana
tgtctcgatccggacag

SEQ ID NO: 158010 - DNA, 17 bp, Arabidopsis thaliana
tgtctcgctattgatgt

SEQ ID NO: 158011 - DNA, 17 bp, Arabidopsis thaliana
tgtctcggatgaccatt

SEQ ID NO: 158012 - DNA, 17 bp, Arabidopsis thaliana
tgtctcggccaaaaggt

SEQ ID NO: 158013 - DNA, 17 bp, Arabidopsis thaliana
tgtctcgggtgttcttc

SEQ ID NO: 158014 - DNA, 17 bp, Arabidopsis thaliana
tgtctcggtgatcggtt

SEQ ID NO: 158015 - DNA, 17 bp, Arabidopsis thaliana
tgtctcgtctcgggttc

SEQ ID NO: 158016 - DNA, 17 bp, Arabidopsis thaliana
tgtctcgtctcggtttt

SEQ ID NO: 158017 - DNA, 17 bp, Arabidopsis thaliana
tgtctctaccggttcag

SEQ ID NO: 158018 - DNA, 17 bp, Arabidopsis thaliana
tgtctctactacttggc

SEQ ID NO: 158019 - DNA, 17 bp, Arabidopsis thaliana
tgtctctacttaaggct

SEQ ID NO: 158020 - DNA, 17 bp, Arabidopsis thaliana
tgtctctaggactcatg

SEQ ID NO: 158021 - DNA, 17 bp, Arabidopsis thaliana
tgtctctatccaaagcc

SEQ ID NO: 158022 - DNA, 17 bp, Arabidopsis thaliana
tgtctctcatttgcttg

SEQ ID NO: 158023 - DNA, 17 bp, Arabidopsis thaliana
tgtctctccatttccag

SEQ ID NO: 158024 - DNA, 17 bp, Arabidopsis thaliana
tgtctctccgccggagc

SEQ ID NO: 158025 - DNA, 17 bp, Arabidopsis thaliana
tgtctctccgggttcct

SEQ ID NO: 158026 - DNA, 17 bp, Arabidopsis thaliana
tgtctctcggttctgac

SEQ ID NO: 158027 - DNA, 17 bp, Arabidopsis thaliana
tgtctctctacggccac

SEQ ID NO: 158028 - DNA, 17 bp, Arabidopsis thaliana
tgtctctctcaccatcc

SEQ ID NO: 158029 - DNA, 17 bp, Arabidopsis thaliana
tgtctctctcgaaaggc

SEQ ID NO: 158030 - DNA, 17 bp, Arabidopsis thaliana
tgtctctctgacgtcta

SEQ ID NO: 158031 - DNA, 17 bp, Arabidopsis thaliana
tgtctctgcctgggtgt

SEQ ID NO: 158032 - DNA, 17 bp, Arabidopsis thaliana
tgtctctgctgattgtc

SEQ ID NO: 158033 - DNA, 17 bp, Arabidopsis thaliana
tgtctctgctgctttgt

SEQ ID NO: 158034 - DNA, 17 bp, Arabidopsis thaliana
tgtctctggttactgtc

SEQ ID NO: 158035 - DNA, 17 bp, Arabidopsis thaliana
tgtctctggttttgcct

SEQ ID NO: 158036 - DNA, 17 bp, Arabidopsis thaliana
tgtctctgtaaccaaac

SEQ ID NO: 158037 - DNA, 17 bp, Arabidopsis thaliana
tgtctctgtgttgttcg

SEQ ID NO: 158038 - DNA, 17 bp, Arabidopsis thaliana
tgtctcttacatcatct

SEQ ID NO: 158039 - DNA, 17 bp, Arabidopsis thaliana
tgtctcttcagttgctt

SEQ ID NO: 158040 - DNA, 17 bp, Arabidopsis thaliana
tgtctcttctagttgtg

SEQ ID NO: 158041 - DNA, 17 bp, Arabidopsis thaliana
tgtctcttcttgaactc

SEQ ID NO: 158042 - DNA, 17 bp, Arabidopsis thaliana
tgtctcttgtgtgtccg

SEQ ID NO: 158043 - DNA, 17 bp, Arabidopsis thaliana
tgtctctttttgccgcc

SEQ ID NO: 158044 - DNA, 17 bp, Arabidopsis thaliana
tgtctgaaaccttttga

SEQ ID NO: 158045 - DNA, 17 bp, Arabidopsis thaliana
tgtctgaaatcaaagcc

SEQ ID NO: 158046 - DNA, 17 bp, Arabidopsis thaliana
tgtctgaaatgtggatc

SEQ ID NO: 158047 - DNA, 17 bp, Arabidopsis thaliana
tgtctgaaccactaatt

SEQ ID NO: 158048 - DNA, 17 bp, Arabidopsis thaliana
tgtctgaagagacaccg

SEQ ID NO: 158049 - DNA, 17 bp, Arabidopsis thaliana
tgtctgaagaggacctc

SEQ ID NO: 158050 - DNA, 17 bp, Arabidopsis thaliana
tgtctgaagcagccagc

SEQ ID NO: 158051 - DNA, 17 bp, Arabidopsis thaliana
tgtctgaagctgccagc

SEQ ID NO: 158052 - DNA, 17 bp, Arabidopsis thaliana
tgtctgacctacgatga

SEQ ID NO: 158053 - DNA, 17 bp, Arabidopsis thaliana
tgtctgagattttgtcg

SEQ ID NO: 158054 - DNA, 17 bp, Arabidopsis thaliana
tgtctgagcaactgtcg

SEQ ID NO: 158055 - DNA, 17 bp, Arabidopsis thaliana
tgtctgagcattttgga

SEQ ID NO: 158056 - DNA, 17 bp, Arabidopsis thaliana
tgtctgaggagacaccg

SEQ ID NO: 158057 - DNA, 17 bp, Arabidopsis thaliana
tgtctgagtagtgaata

SEQ ID NO: 158058 - DNA, 17 bp, Arabidopsis thaliana
tgtctgatactttgtgt

SEQ ID NO: 158059 - DNA, 17 bp, Arabidopsis thaliana
tgtctgattcgttgacg

SEQ ID NO: 158060 - DNA, 17 bp, Arabidopsis thaliana
tgtctgattgagccgtg

SEQ ID NO: 158061 - DNA, 17 bp, Arabidopsis thaliana
tgtctgatttcagggga

SEQ ID NO: 158062 - DNA, 17 bp, Arabidopsis thaliana
tgtctgcagacacccct

SEQ ID NO: 158063 - DNA, 17 bp, Arabidopsis thaliana
tgtctgcagtataccgc

SEQ ID NO: 158064 - DNA, 17 bp, Arabidopsis thaliana
tgtctgcagttcgttga

SEQ ID NO: 158065 - DNA, 17 bp, Arabidopsis thaliana
tgtctgcattggttaga

SEQ ID NO: 158066 - DNA, 17 bp, Arabidopsis thaliana
tgtctgccgacttagtt

SEQ ID NO: 158067 - DNA, 17 bp, Arabidopsis thaliana
tgtctgccgacttgagt

SEQ ID NO: 158068 - DNA, 17 bp, Arabidopsis thaliana
tgtctgcctgcgcattg

SEQ ID NO: 158069 - DNA, 17 bp, Arabidopsis thaliana
tgtctgcctgggtgtca

SEQ ID NO: 158070 - DNA, 17 bp, Arabidopsis thaliana
tgtctgcgggaggattt

SEQ ID NO: 158071 - DNA, 17 bp, Arabidopsis thaliana
tgtctgcggtttagccc

SEQ ID NO: 158072 - DNA, 17 bp, Arabidopsis thaliana
tgtctgcggtttagtcc

SEQ ID NO: 158073 - DNA, 17 bp, Arabidopsis thaliana
tgtctgcgtagcctggt

SEQ ID NO: 158074 - DNA, 17 bp, Arabidopsis thaliana
tgtctgcgtcagcgaca

SEQ ID NO: 158075 - DNA, 17 bp, Arabidopsis thaliana
tgtctgctaacttcaca

SEQ ID NO: 158076 - DNA, 17 bp, Arabidopsis thaliana
tgtctgctcatcgagtt

SEQ ID NO: 158077 - DNA, 17 bp, Arabidopsis thaliana
tgtctgctgactcagca

SEQ ID NO: 158078 - DNA, 17 bp, Arabidopsis thaliana
tgtctgcttgttctgtg

SEQ ID NO: 158079 - DNA, 17 bp, Arabidopsis thaliana
tgtctggaccaccgcga

SEQ ID NO: 158080 - DNA, 17 bp, Arabidopsis thaliana
tgtctggctccctgtat

SEQ ID NO: 158081 - DNA, 17 bp, Arabidopsis thaliana
tgtctggcttgacttag

SEQ ID NO: 158082 - DNA, 17 bp, Arabidopsis thaliana
tgtctgggaaaagacaa

SEQ ID NO: 158083 - DNA, 17 bp, Arabidopsis thaliana
tgtctgggaagctgcat

SEQ ID NO: 158084 - DNA, 17 bp, Arabidopsis thaliana
tgtctggtccaagaagc

SEQ ID NO: 158085 - DNA, 17 bp, Arabidopsis thaliana
tgtctggtcgagcataa

SEQ ID NO: 158086 - DNA, 17 bp, Arabidopsis thaliana
tgtctggttggatgacg

SEQ ID NO: 158087 - DNA, 17 bp, Arabidopsis thaliana
tgtctgtaactgtgggc

SEQ ID NO: 158088 - DNA, 17 bp, Arabidopsis thaliana
tgtctgtacacaccgcc

SEQ ID NO: 158089 - DNA, 17 bp, Arabidopsis thaliana
tgtctgtacatcgttgt

SEQ ID NO: 158090 - DNA, 17 bp, Arabidopsis thaliana
tgtctgtaccaccgcga

SEQ ID NO: 158091 - DNA, 17 bp, Arabidopsis thaliana
tgtctgtaccagatgga

SEQ ID NO: 158092 - DNA, 17 bp, Arabidopsis thaliana
tgtctgtaccgtgtact

SEQ ID NO: 158093 - DNA, 17 bp, Arabidopsis thaliana
tgtctgtaccgtgtagt

SEQ ID NO: 158094 - DNA, 17 bp, Arabidopsis thaliana
tgtctgtagatggatcc

SEQ ID NO: 158095 - DNA, 17 bp, Arabidopsis thaliana
tgtctgtagatggatcg

SEQ ID NO: 158096 - DNA, 17 bp, Arabidopsis thaliana
tgtctgtagtccaacgg

SEQ ID NO: 158097 - DNA, 17 bp, Arabidopsis thaliana
tgtctgtagtcggttat

SEQ ID NO: 158098 - DNA, 17 bp, Arabidopsis thaliana
tgtctgtatctgcacaa

SEQ ID NO: 158099 - DNA, 17 bp, Arabidopsis thaliana
tgtctgtattaccgacg

SEQ ID NO: 158100 - DNA, 17 bp, Arabidopsis thaliana
tgtctgtattaggtgcg

SEQ ID NO: 158101 - DNA, 17 bp, Arabidopsis thaliana
tgtctgtattttctgat

SEQ ID NO: 158102 - DNA, 17 bp, Arabidopsis thaliana
tgtctgtcactgcttat

SEQ ID NO: 158103 - DNA, 17 bp, Arabidopsis thaliana
tgtctgtcagatgggcc

SEQ ID NO: 158104 - DNA, 17 bp, Arabidopsis thaliana
tgtctgtcagcggactg

SEQ ID NO: 158105 - DNA, 17 bp, Arabidopsis thaliana
tgtctgtcatcaaagtc

SEQ ID NO: 158106 - DNA, 17 bp, Arabidopsis thaliana
tgtctgtccagtttgct

SEQ ID NO: 158107 - DNA, 17 bp, Arabidopsis thaliana
tgtctgtcccataggcc

SEQ ID NO: 158108 - DNA, 17 bp, Arabidopsis thaliana
tgtctgtcccgagtttg

SEQ ID NO: 158109 - DNA, 17 bp, Arabidopsis thaliana
tgtctgtcccttcggtc

SEQ ID NO: 158110 - DNA, 17 bp, Arabidopsis thaliana
tgtctgtccgacttgtt

SEQ ID NO: 158111 - DNA, 17 bp, Arabidopsis thaliana
tgtctgtccgattttcc

SEQ ID NO: 158112 - DNA, 17 bp, Arabidopsis thaliana
tgtctgtccgcagacac

SEQ ID NO: 158113 - DNA, 17 bp, Arabidopsis thaliana
tgtctgtccgctccgtg

SEQ ID NO: 158114 - DNA, 17 bp, Arabidopsis thaliana
tgtctgtccgtggtaga

SEQ ID NO: 158115 - DNA, 17 bp, Arabidopsis thaliana
tgtctgtccgttccgct

SEQ ID NO: 158116 - DNA, 17 bp, Arabidopsis thaliana
tgtctgtcctaggatcc

SEQ ID NO: 158117 - DNA, 17 bp, Arabidopsis thaliana
tgtctgtcctcctggtg

SEQ ID NO: 158118 - DNA, 17 bp, Arabidopsis thaliana
tgtctgtcctgagtttg

SEQ ID NO: 158119 - DNA, 17 bp, Arabidopsis thaliana
tgtctgtcgagaggtcg

SEQ ID NO: 158120 - DNA, 17 bp, Arabidopsis thaliana
tgtctgtcgagtagacc

SEQ ID NO: 158121 - DNA, 17 bp, Arabidopsis thaliana
tgtctgtcgcagtgact

SEQ ID NO: 158122 - DNA, 17 bp, Arabidopsis thaliana
tgtctgtcggaactgtg

SEQ ID NO: 158123 - DNA, 17 bp, Arabidopsis thaliana
tgtctgtcgggagggaa

SEQ ID NO: 158124 - DNA, 17 bp, Arabidopsis thaliana
tgtctgtcgggctctgc

SEQ ID NO: 158125 - DNA, 17 bp, Arabidopsis thaliana
tgtctgtcggttcggcc

SEQ ID NO: 158126 - DNA, 17 bp, Arabidopsis thaliana
tgtctgtcgttaagtca

SEQ ID NO: 158127 - DNA, 17 bp, Arabidopsis thaliana
tgtctgtcgttggctaa

SEQ ID NO: 158128 - DNA, 17 bp, Arabidopsis thaliana
tgtctgtctacgagtcg

SEQ ID NO: 158129 - DNA, 17 bp, Arabidopsis thaliana
tgtctgtctcagtctcg

SEQ ID NO: 158130 - DNA, 17 bp, Arabidopsis thaliana
tgtctgtctcccaagat

SEQ ID NO: 158131 - DNA, 17 bp, Arabidopsis thaliana
tgtctgtctgagacgaa

SEQ ID NO: 158132 - DNA, 17 bp, Arabidopsis thaliana
tgtctgtctgaggagac

SEQ ID NO: 158133 - DNA, 17 bp, Arabidopsis thaliana
tgtctgtctgtcctgag

SEQ ID NO: 158134 - DNA, 17 bp, Arabidopsis thaliana
tgtctgtctgttttgct

SEQ ID NO: 158135 - DNA, 17 bp, Arabidopsis thaliana
tgtctgtcttaggctat

SEQ ID NO: 158136 - DNA, 17 bp, Arabidopsis thaliana
tgtctgtcttctggatt

SEQ ID NO: 158137 - DNA, 17 bp, Arabidopsis thaliana
tgtctgtctttgggctt

SEQ ID NO: 158138 - DNA, 17 bp, Arabidopsis thaliana
tgtctgtctttgtgact

SEQ ID NO: 158139 - DNA, 17 bp, Arabidopsis thaliana
tgtctgtgaattcttcc

SEQ ID NO: 158140 - DNA, 17 bp, Arabidopsis thaliana
tgtctgtgatgccctta

SEQ ID NO: 158141 - DNA, 17 bp, Arabidopsis thaliana
tgtctgtgatttctgcc

SEQ ID NO: 158142 - DNA, 17 bp, Arabidopsis thaliana
tgtctgtgccatttcgg

SEQ ID NO: 158143 - DNA, 17 bp, Arabidopsis thaliana
tgtctgtgcgatctcgg

SEQ ID NO: 158144 - DNA, 17 bp, Arabidopsis thaliana
tgtctgtgcgtatcgac

SEQ ID NO: 158145 - DNA, 17 bp, Arabidopsis thaliana
tgtctgtgctccttgtt

SEQ ID NO: 158146 - DNA, 17 bp, Arabidopsis thaliana
tgtctgtgctctctagc

SEQ ID NO: 158147 - DNA, 17 bp, Arabidopsis thaliana
tgtctgtgggttcgtgt

SEQ ID NO: 158148 - DNA, 17 bp, Arabidopsis thaliana
tgtctgtggtactcact

SEQ ID NO: 158149 - DNA, 17 bp, Arabidopsis thaliana
tgtctgtggtggcaaga

SEQ ID NO: 158150 - DNA, 17 bp, Arabidopsis thaliana
tgtctgtgtcacaatcc

SEQ ID NO: 158151 - DNA, 17 bp, Arabidopsis thaliana
tgtctgtgtgactctgg

SEQ ID NO: 158152 - DNA, 17 bp, Arabidopsis thaliana
tgtctgtgtgattcgga

SEQ ID NO: 158153 - DNA, 17 bp, Arabidopsis thaliana
tgtctgtgttcttactt

SEQ ID NO: 158154 - DNA, 17 bp, Arabidopsis thaliana
tgtctgtgttgttcgtt

SEQ ID NO: 158155 - DNA, 17 bp, Arabidopsis thaliana
tgtctgtgtttaccggc

SEQ ID NO: 158156 - DNA, 17 bp, Arabidopsis thaliana
tgtctgttactcgacct

SEQ ID NO: 158157 - DNA, 17 bp, Arabidopsis thaliana
tgtctgttattaagtaa

SEQ ID NO: 158158 - DNA, 17 bp, Arabidopsis thaliana
tgtctgttccaacgaca

SEQ ID NO: 158159 - DNA, 17 bp, Arabidopsis thaliana
tgtctgttccgcactaa

SEQ ID NO: 158160 - DNA, 17 bp, Arabidopsis thaliana
tgtctgttcctatcgag

SEQ ID NO: 158161 - DNA, 17 bp, Arabidopsis thaliana
tgtctgttcgttccacg

SEQ ID NO: 158162 - DNA, 17 bp, Arabidopsis thaliana
tgtctgttcgtttcacg

SEQ ID NO: 158163 - DNA, 17 bp, Arabidopsis thaliana
tgtctgttctgcgctgc

SEQ ID NO: 158164 - DNA, 17 bp, Arabidopsis thaliana
tgtctgttctgtctatg

SEQ ID NO: 158165 - DNA, 17 bp, Arabidopsis thaliana
tgtctgttcttttccct

SEQ ID NO: 158166 - DNA, 17 bp, Arabidopsis thaliana
tgtctgttgccgggtcg

SEQ ID NO: 158167 - DNA, 17 bp, Arabidopsis thaliana
tgtctgttggaccaacc

SEQ ID NO: 158168 - DNA, 17 bp, Arabidopsis thaliana
tgtctgttgggccaatc

SEQ ID NO: 158169 - DNA, 17 bp, Arabidopsis thaliana
tgtctgttggtgccaag

SEQ ID NO: 158170 - DNA, 17 bp, Arabidopsis thaliana
tgtctgttgttttggcg

SEQ ID NO: 158171 - DNA, 17 bp, Arabidopsis thaliana
tgtctgtttccagtggc

SEQ ID NO: 158172 - DNA, 17 bp, Arabidopsis thaliana
tgtctgtttcggttttg

SEQ ID NO: 158173 - DNA, 17 bp, Arabidopsis thaliana
tgtctgtttcgtccacc

SEQ ID NO: 158174 - DNA, 17 bp, Arabidopsis thaliana
tgtctgtttctgcgatg

SEQ ID NO: 158175 - DNA, 17 bp, Arabidopsis thaliana
tgtctgtttggaccgct

SEQ ID NO: 158176 - DNA, 17 bp, Arabidopsis thaliana
tgtctgttttgctctag

SEQ ID NO: 158177 - DNA, 17 bp, Arabidopsis thaliana
tgtctgtttttggtccc

SEQ ID NO: 158178 - DNA, 17 bp, Arabidopsis thaliana
tgtcttaaaaacgtgct

SEQ ID NO: 158179 - DNA, 17 bp, Arabidopsis thaliana
tgtcttaaaatcgcagt

SEQ ID NO: 158180 - DNA, 17 bp, Arabidopsis thaliana
tgtcttaaatgcgacgg

SEQ ID NO: 158181 - DNA, 17 bp, Arabidopsis thaliana
tgtcttaaatgtcccaa

SEQ ID NO: 158182 - DNA, 17 bp, Arabidopsis thaliana
tgtcttaaatgtctcgg

SEQ ID NO: 158183 - DNA, 17 bp, Arabidopsis thaliana
tgtcttaaatgtgccaa

SEQ ID NO: 158184 - DNA, 17 bp, Arabidopsis thaliana
tgtcttaactagctttt

SEQ ID NO: 158185 - DNA, 17 bp, Arabidopsis thaliana
tgtcttacccgtacgtc

SEQ ID NO: 158186 - DNA, 17 bp, Arabidopsis thaliana
tgtcttacccttacgct

SEQ ID NO: 158187 - DNA, 17 bp, Arabidopsis thaliana
tgtcttaggcgcaacat

SEQ ID NO: 158188 - DNA, 17 bp, Arabidopsis thaliana
tgtcttaggctatctcc

SEQ ID NO: 158189 - DNA, 17 bp, Arabidopsis thaliana
tgtcttaggtcagattc

SEQ ID NO: 158190 - DNA, 17 bp, Arabidopsis thaliana
tgtcttagtcgcattct

SEQ ID NO: 158191 - DNA, 17 bp, Arabidopsis thaliana
tgtcttatcaagcttcg

SEQ ID NO: 158192 - DNA, 17 bp, Arabidopsis thaliana
tgtcttatggattcgtg

SEQ ID NO: 158193 - DNA, 17 bp, Arabidopsis thaliana
tgtcttcaaggcgcaca

SEQ ID NO: 158194 - DNA, 17 bp, Arabidopsis thaliana
tgtcttcacaagactta

SEQ ID NO: 158195 - DNA, 17 bp, Arabidopsis thaliana
tgtcttcccaaccgaat

SEQ ID NO: 158196 - DNA, 17 bp, Arabidopsis thaliana
tgtcttccccacaactt

SEQ ID NO: 158197 - DNA, 17 bp, Arabidopsis thaliana
tgtcttcctcagcaggt

SEQ ID NO: 158198 - DNA, 17 bp, Arabidopsis thaliana
tgtcttcctttgacgca

SEQ ID NO: 158199 - DNA, 17 bp, Arabidopsis thaliana
tgtcttcgactgaacca

SEQ ID NO: 158200 - DNA, 17 bp, Arabidopsis thaliana
tgtcttcgccgtctaca

SEQ ID NO: 158201 - DNA, 17 bp, Arabidopsis thaliana
tgtcttcggttcgtttt

SEQ ID NO: 158202 - DNA, 17 bp, Arabidopsis thaliana
tgtcttcgtcagagtcg

SEQ ID NO: 158203 - DNA, 17 bp, Arabidopsis thaliana
tgtcttcgtgagatctg

SEQ ID NO: 158204 - DNA, 17 bp, Arabidopsis thaliana
tgtcttctaatccgatc

SEQ ID NO: 158205 - DNA, 17 bp, Arabidopsis thaliana
tgtcttctacgggacat

SEQ ID NO: 158206 - DNA, 17 bp, Arabidopsis thaliana
tgtcttctagcaagtta

SEQ ID NO: 158207 - DNA, 17 bp, Arabidopsis thaliana
tgtcttctagcgagttg

SEQ ID NO: 158208 - DNA, 17 bp, Arabidopsis thaliana
tgtcttctccaaccgaa

SEQ ID NO: 158209 - DNA, 17 bp, Arabidopsis thaliana
tgtcttctccaaccgca

SEQ ID NO: 158210 - DNA, 17 bp, Arabidopsis thaliana
tgtcttctcgattgagg

SEQ ID NO: 158211 - DNA, 17 bp, Arabidopsis thaliana
tgtcttctctagcttgc

SEQ ID NO: 158212 - DNA, 17 bp, Arabidopsis thaliana
tgtcttctggatttgga

SEQ ID NO: 158213 - DNA, 17 bp, Arabidopsis thaliana
tgtcttctggttcaggc

SEQ ID NO: 158214 - DNA, 17 bp, Arabidopsis thaliana
tgtcttctggttctggc

SEQ ID NO: 158215 - DNA, 17 bp, Arabidopsis thaliana
tgtcttcttaggctcat

SEQ ID NO: 158216 - DNA, 17 bp, Arabidopsis thaliana
tgtcttcttcacgtctg

SEQ ID NO: 158217 - DNA, 17 bp, Arabidopsis thaliana
tgtcttcttcgatcggt

SEQ ID NO: 158218 - DNA, 17 bp, Arabidopsis thaliana
tgtcttcttcgtcacga

SEQ ID NO: 158219 - DNA, 17 bp, Arabidopsis thaliana
tgtcttcttggttcagc

SEQ ID NO: 158220 - DNA, 17 bp, Arabidopsis thaliana
tgtcttctttaggctca

SEQ ID NO: 158221 - DNA, 17 bp, Arabidopsis thaliana
tgtcttctttggtacct

SEQ ID NO: 158222 - DNA, 17 bp, Arabidopsis thaliana
tgtcttgaacgtcgcga

SEQ ID NO: 158223 - DNA, 17 bp, Arabidopsis thaliana
tgtcttgacgattggac

SEQ ID NO: 158224 - DNA, 17 bp, Arabidopsis thaliana
tgtcttggcatgtgata

SEQ ID NO: 158225 - DNA, 17 bp, Arabidopsis thaliana
tgtcttggtaagagaag

SEQ ID NO: 158226 - DNA, 17 bp, Arabidopsis thaliana
tgtcttggtgcaggtcg

SEQ ID NO: 158227 - DNA, 17 bp, Arabidopsis thaliana
tgtcttggtgggatcag

SEQ ID NO: 158228 - DNA, 17 bp, Arabidopsis thaliana
tgtcttgtgtccagccc

SEQ ID NO: 158229 - DNA, 17 bp, Arabidopsis thaliana
tgtctttacactggtgt

SEQ ID NO: 158230 - DNA, 17 bp, Arabidopsis thaliana
tgtctttcccaaccgaa

SEQ ID NO: 158231 - DNA, 17 bp, Arabidopsis thaliana
tgtctttcctgttacgc

SEQ ID NO: 158232 - DNA, 17 bp, Arabidopsis thaliana
tgtctttcgcatgttag

SEQ ID NO: 158233 - DNA, 17 bp, Arabidopsis thaliana
tgtctttcggatgttag

SEQ ID NO: 158234 - DNA, 17 bp, Arabidopsis thaliana
tgtctttcggccattgt

SEQ ID NO: 158235 - DNA, 17 bp, Arabidopsis thaliana
tgtctttctcttttggc

SEQ ID NO: 158236 - DNA, 17 bp, Arabidopsis thaliana
tgtctttgaccacgctg

SEQ ID NO: 158237 - DNA, 17 bp, Arabidopsis thaliana
tgtctttgacttaccaa

SEQ ID NO: 158238 - DNA, 17 bp, Arabidopsis thaliana
tgtctttggagccacag

SEQ ID NO: 158239 - DNA, 17 bp, Arabidopsis thaliana
tgtctttggcttgaacc

SEQ ID NO: 158240 - DNA, 17 bp, Arabidopsis thaliana
tgtctttgggctttccg

SEQ ID NO: 158241 - DNA, 17 bp, Arabidopsis thaliana
tgtctttgggtgtatca

SEQ ID NO: 158242 - DNA, 17 bp, Arabidopsis thaliana
tgtctttgtagatggac

SEQ ID NO: 158243 - DNA, 17 bp, Arabidopsis thaliana
tgtctttgtgacttgaa

SEQ ID NO: 158244 - DNA, 17 bp, Arabidopsis thaliana
tgtctttgttgaagtcc

SEQ ID NO: 158245 - DNA, 17 bp, Arabidopsis thaliana
tgtcttttcacggtccc

SEQ ID NO: 158246 - DNA, 17 bp, Arabidopsis thaliana
tgtcttttcacggttcc

SEQ ID NO: 158247 - DNA, 17 bp, Arabidopsis thaliana
tgtcttttcagcctttg

SEQ ID NO: 158248 - DNA, 17 bp, Arabidopsis thaliana
tgtcttttcagttgctt

SEQ ID NO: 158249 - DNA, 17 bp, Arabidopsis thaliana
tgtcttttcagttgttt

SEQ ID NO: 158250 - DNA, 17 bp, Arabidopsis thaliana
tgtcttttcgcctgcaa

SEQ ID NO: 158251 - DNA, 17 bp, Arabidopsis thaliana
tgtcttttgggtttgag

SEQ ID NO: 158252 - DNA, 17 bp, Arabidopsis thaliana
tgtctttttcaaaactg

SEQ ID NO: 158253 - DNA, 17 bp, Arabidopsis thaliana
tgtcttttttgcagctt

SEQ ID NO: 158254 - DNA, 17 bp, Arabidopsis thaliana
tgtgaaaatgtgcaatt

SEQ ID NO: 158255 - DNA, 17 bp, Arabidopsis thaliana
tgtgaaactcatttgga

SEQ ID NO: 158256 - DNA, 17 bp, Arabidopsis thaliana
tgtgaaactgcgaaccc

SEQ ID NO: 158257 - DNA, 17 bp, Arabidopsis thaliana
tgtgaaactgcgaatga

SEQ ID NO: 158258 - DNA, 17 bp, Arabidopsis thaliana
tgtgaaactgcgaatgg

SEQ ID NO: 158259 - DNA, 17 bp, Arabidopsis thaliana
tgtgaaacttgttgctc
